United States Patent Application Publication US 2014/0004565 A1 - sequence listing, part 78

SEQ ID NO: 1909743 - RNA, 19 nt, Artificial Sequence
  Description of Artificial Sequence: Synthetic oligonucleotide
cgauugauaacacauucag

SEQ ID NO: 1909744 - RNA, 19 nt, Artificial Sequence
  Description of Artificial Sequence: Synthetic oligonucleotide
gggguguccuccuugacag

SEQ ID NO: 1909745 - RNA, 19 nt, Artificial Sequence
  Description of Artificial Sequence: Synthetic oligonucleotide
ugcuucgagugauuugaca

SEQ ID NO: 1909746 - RNA, 19 nt, Artificial Sequence
  Description of Artificial Sequence: Synthetic oligonucleotide
gagcgugacgugaugguag

SEQ ID NO: 1909747 - RNA, 19 nt, Artificial Sequence
  Description of Artificial Sequence: Synthetic oligonucleotide
agaguugguccaaacacca

SEQ ID NO: 1909748 - RNA, 19 nt, Artificial Sequence
  Description of Artificial Sequence: Synthetic oligonucleotide
caaugaagucucuauguaa

SEQ ID NO: 1909749 - RNA, 19 nt, Artificial Sequence
  Description of Artificial Sequence: Synthetic oligonucleotide
cauggguacacugcacggg

SEQ ID NO: 1909750 - RNA, 19 nt, Artificial Sequence
  Description of Artificial Sequence: Synthetic oligonucleotide
ugggacuaucaccaucuuc

SEQ ID NO: 1909751 - RNA, 19 nt, Artificial Sequence
  Description of Artificial Sequence: Synthetic oligonucleotide
acauugguuagguguuuca

SEQ ID NO: 1909752 - RNA, 19 nt, Artificial Sequence
  Description of Artificial Sequence: Synthetic oligonucleotide
ugcugcaaggugguuuccg

SEQ ID NO: 1909753 - RNA, 19 nt, Artificial Sequence
  Description of Artificial Sequence: Synthetic oligonucleotide
uaggucauaagagguucug

SEQ ID NO: 1909754 - RNA, 19 nt, Artificial Sequence
  Description of Artificial Sequence: Synthetic oligonucleotide
ugggugaaggagguguacc

SEQ ID NO: 1909755 - RNA, 19 nt, Artificial Sequence
  Description of Artificial Sequence: Synthetic oligonucleotide
uucgagugauuugacacau

SEQ ID NO: 1909756 - RNA, 19 nt, Artificial Sequence
  Description of Artificial Sequence: Synthetic oligonucleotide
ugaaguugugggagaugga

SEQ ID NO: 1909757 - RNA, 19 nt, Artificial Sequence
  Description of Artificial Sequence: Synthetic oligonucleotide
caccacuccuaaauuugcc

SEQ ID NO: 1909758 - RNA, 19 nt, Artificial Sequence
  Description of Artificial Sequence: Synthetic oligonucleotide
cauagguggccgaggcugg

SEQ ID NO: 1909759 - RNA, 19 nt, Artificial Sequence
  Description of Artificial Sequence: Synthetic oligonucleotide
cugaaacuucaaauccaug

SEQ ID NO: 1909760 - RNA, 19 nt, Artificial Sequence
  Description of Artificial Sequence: Synthetic oligonucleotide
gcuggcuuggcguaguagc

SEQ ID NO: 1909761 - RNA, 19 nt, Artificial Sequence
  Description of Artificial Sequence: Synthetic oligonucleotide
guggucgcaucagaguugg

SEQ ID NO: 1909762 - RNA, 19 nt, Artificial Sequence
  Description of Artificial Sequence: Synthetic oligonucleotide
cauugguuagguguuucac

SEQ ID NO: 1909763 - RNA, 19 nt, Artificial Sequence
  Description of Artificial Sequence: Synthetic oligonucleotide
cucauaggucauaagaggu

SEQ ID NO: 1909764 - RNA, 19 nt, Artificial Sequence
  Description of Artificial Sequence: Synthetic oligonucleotide
uggaaucagcccucucuug

SEQ ID NO: 1909765 - RNA, 19 nt, Artificial Sequence
  Description of Artificial Sequence: Synthetic oligonucleotide
cuuuuggcuggaacaauga

SEQ ID NO: 1909766 - RNA, 19 nt, Artificial Sequence
  Description of Artificial Sequence: Synthetic oligonucleotide
ugcaguaucuggcgagguc

SEQ ID NO: 1909767 - RNA, 19 nt, Artificial Sequence
  Description of Artificial Sequence: Synthetic oligonucleotide
cuuggcguaguagcugucc

SEQ ID NO: 1909768 - RNA, 19 nt, Artificial Sequence
  Description of Artificial Sequence: Synthetic oligonucleotide
uggcguaguagcuguccag

SEQ ID NO: 1909769 - RNA, 19 nt, Artificial Sequence
  Description of Artificial Sequence: Synthetic oligonucleotide
ugacgugaugguagcauuu

SEQ ID NO: 1909770 - RNA, 19 nt, Artificial Sequence
  Description of Artificial Sequence: Synthetic oligonucleotide
caccauagguggccgaggc

SEQ ID NO: 1909771 - RNA, 19 nt, Artificial Sequence
  Description of Artificial Sequence: Synthetic oligonucleotide
guaccaagaaauggauggc

SEQ ID NO: 1909772 - RNA, 19 nt, Artificial Sequence
  Description of Artificial Sequence: Synthetic oligonucleotide
cuguagauuuagccacugc

SEQ ID NO: 1909773 - RNA, 19 nt, Artificial Sequence
  Description of Artificial Sequence: Synthetic oligonucleotide
ucuggcgagguccgaaaua

SEQ ID NO: 1909774 - RNA, 19 nt, Artificial Sequence
  Description of Artificial Sequence: Synthetic oligonucleotide
uuccgagcuguguucugcc

SEQ ID NO: 1909775 - RNA, 19 nt, Artificial Sequence
  Description of Artificial Sequence: Synthetic oligonucleotide
gauggaguggacaaugaau

SEQ ID NO: 1909776 - RNA, 19 nt, Artificial Sequence
  Description of Artificial Sequence: Synthetic oligonucleotide
aagucucuauguaacucau

SEQ ID NO: 1909777 - RNA, 19 nt, Artificial Sequence
  Description of Artificial Sequence: Synthetic oligonucleotide
aucuucucaugguuuucga

SEQ ID NO: 1909778 - RNA, 19 nt, Artificial Sequence
  Description of Artificial Sequence: Synthetic oligonucleotide
gcaguaucuggcgaggucc

SEQ ID NO: 1909779 - RNA, 19 nt, Artificial Sequence
  Description of Artificial Sequence: Synthetic oligonucleotide
guugugggagauggagugg

SEQ ID NO: 1909780 - RNA, 19 nt, Artificial Sequence
  Description of Artificial Sequence: Synthetic oligonucleotide
ccucucuugccguucaggg

SEQ ID NO: 1909781 - RNA, 19 nt, Artificial Sequence
  Description of Artificial Sequence: Synthetic oligonucleotide
ugcccguggagaucugcag

SEQ ID NO: 1909782 - RNA, 19 nt, Artificial Sequence
  Description of Artificial Sequence: Synthetic oligonucleotide
cuguguucugccucacaug

SEQ ID NO: 1909783 - RNA, 19 nt, Artificial Sequence
  Description of Artificial Sequence: Synthetic oligonucleotide
guggacaaugaauccugac

SEQ ID NO: 1909784 - RNA, 19 nt, Artificial Sequence
  Description of Artificial Sequence: Synthetic oligonucleotide
gcuugucuacaauggaggc

SEQ ID NO: 1909785 - RNA, 19 nt, Artificial Sequence
  Description of Artificial Sequence: Synthetic oligonucleotide
caucagaguugguccaaac

SEQ ID NO: 1909786 - RNA, 19 nt, Artificial Sequence
  Description of Artificial Sequence: Synthetic oligonucleotide
gccacuuuuggcuggaaca

SEQ ID NO: 1909787 - RNA, 19 nt, Artificial Sequence
  Description of Artificial Sequence: Synthetic oligonucleotide
ugcacgggccuugcgauug

SEQ ID NO: 1909788 - RNA, 19 nt, Artificial Sequence
  Description of Artificial Sequence: Synthetic oligonucleotide
ugauggcggcaacaguuuc

SEQ ID NO: 1909789 - RNA, 19 nt, Artificial Sequence
  Description of Artificial Sequence: Synthetic oligonucleotide
gugaugguagcauuugggu

SEQ ID NO: 1909790 - RNA, 19 nt, Artificial Sequence
  Description of Artificial Sequence: Synthetic oligonucleotide
cgugaugguagcauuuggg

SEQ ID NO: 1909791 - RNA, 19 nt, Artificial Sequence
  Description of Artificial Sequence: Synthetic oligonucleotide
gauauccaacaucuccuua

SEQ ID NO: 1909792 - RNA, 19 nt, Artificial Sequence
  Description of Artificial Sequence: Synthetic oligonucleotide
agugcccguggagaucugc

SEQ ID NO: 1909793 - RNA, 19 nt, Artificial Sequence
  Description of Artificial Sequence: Synthetic oligonucleotide
guaccggcuggguuggagc

SEQ ID NO: 1909794 - RNA, 19 nt, Artificial Sequence
  Description of Artificial Sequence: Synthetic oligonucleotide
ucccuugaggucugaacau

SEQ ID NO: 1909795 - RNA, 19 nt, Artificial Sequence
  Description of Artificial Sequence: Synthetic oligonucleotide
cugggcugccacuuuuggc

SEQ ID NO: 1909796 - RNA, 19 nt, Artificial Sequence
  Description of Artificial Sequence: Synthetic oligonucleotide
uggcaaguuucauucccuc

SEQ ID NO: 1909797 - RNA, 19 nt, Artificial Sequence
  Description of Artificial Sequence: Synthetic oligonucleotide
aggugacgcugacaggcag

SEQ ID NO: 1909798 - RNA, 19 nt, Artificial Sequence
  Description of Artificial Sequence: Synthetic oligonucleotide
ucucuuugacugccuugga

SEQ ID NO: 1909799 - RNA, 19 nt, Artificial Sequence
  Description of Artificial Sequence: Synthetic oligonucleotide
gacaauuccgagcuguguu

SEQ ID NO: 1909800 - RNA, 19 nt, Artificial Sequence
  Description of Artificial Sequence: Synthetic oligonucleotide
aguccaagguggcaaguuu

SEQ ID NO: 1909801 - RNA, 19 nt, Artificial Sequence
  Description of Artificial Sequence: Synthetic oligonucleotide
ccuugaggucugaacaucc

SEQ ID NO: 1909802 - RNA, 19 nt, Artificial Sequence
  Description of Artificial Sequence: Synthetic oligonucleotide
aguuccugagcgugacgug

SEQ ID NO: 1909803 - RNA, 19 nt, Artificial Sequence
  Description of Artificial Sequence: Synthetic oligonucleotide
aagcuacagcagcuugaca

SEQ ID NO: 1909804 - RNA, 19 nt, Artificial Sequence
  Description of Artificial Sequence: Synthetic oligonucleotide
uggaacaaugaagucucua

SEQ ID NO: 1909805 - RNA, 19 nt, Artificial Sequence
  Description of Artificial Sequence: Synthetic oligonucleotide
uaucuggcgagguccgaaa

SEQ ID NO: 1909806 - RNA, 19 nt, Artificial Sequence
  Description of Artificial Sequence: Synthetic oligonucleotide
agauucugcuucgagugau

SEQ ID NO: 1909807 - RNA, 19 nt, Artificial Sequence
  Description of Artificial Sequence: Synthetic oligonucleotide
cgauuaauauuucuacaac

SEQ ID NO: 1909808 - RNA, 19 nt, Artificial Sequence
  Description of Artificial Sequence: Synthetic oligonucleotide
aggugguuuccgucugguc

SEQ ID NO: 1909809 - RNA, 19 nt, Artificial Sequence
  Description of Artificial Sequence: Synthetic oligonucleotide
ucauuagauucugcuucga

SEQ ID NO: 1909810 - RNA, 19 nt, Artificial Sequence
  Description of Artificial Sequence: Synthetic oligonucleotide
caugauggcggcaacaguu

SEQ ID NO: 1909811 - RNA, 19 nt, Artificial Sequence
  Description of Artificial Sequence: Synthetic oligonucleotide
auacacggccaccggccuc

SEQ ID NO: 1909812 - RNA, 19 nt, Artificial Sequence
  Description of Artificial Sequence: Synthetic oligonucleotide
ugugggagauggaguggac

SEQ ID NO: 1909813 - RNA, 19 nt, Artificial Sequence
  Description of Artificial Sequence: Synthetic oligonucleotide
cacugcaccauagguggcc

SEQ ID NO: 1909814 - RNA, 19 nt, Artificial Sequence
  Description of Artificial Sequence: Synthetic oligonucleotide
cuauuuccaggcuggugca

SEQ ID NO: 1909815 - RNA, 19 nt, Artificial Sequence
  Description of Artificial Sequence: Synthetic oligonucleotide
ucuucguccgcugccccug

SEQ ID NO: 1909816 - RNA, 19 nt, Artificial Sequence
  Description of Artificial Sequence: Synthetic oligonucleotide
ugucuacaauggaggcagc

SEQ ID NO: 1909817 - RNA, 19 nt, Artificial Sequence
  Description of Artificial Sequence: Synthetic oligonucleotide
ccucacauggguacacugc

SEQ ID NO: 1909818 - RNA, 19 nt, Artificial Sequence
  Description of Artificial Sequence: Synthetic oligonucleotide
ucugccucacauggguaca

SEQ ID NO: 1909819 - RNA, 19 nt, Artificial Sequence
  Description of Artificial Sequence: Synthetic oligonucleotide
ggaacaaugaagucucuau

SEQ ID NO: 1909820 - RNA, 19 nt, Artificial Sequence
  Description of Artificial Sequence: Synthetic oligonucleotide
accaagaaauggauggcau

SEQ ID NO: 1909821 - RNA, 19 nt, Artificial Sequence
  Description of Artificial Sequence: Synthetic oligonucleotide
uggcauuaacacgggacuc

SEQ ID NO: 1909822 - RNA, 19 nt, Artificial Sequence
  Description of Artificial Sequence: Synthetic oligonucleotide
ugcacaguccaagguggca

SEQ ID NO: 1909823 - RNA, 19 nt, Artificial Sequence
  Description of Artificial Sequence: Synthetic oligonucleotide
acacgggacucugggcugc

SEQ ID NO: 1909824 - RNA, 19 nt, Artificial Sequence
  Description of Artificial Sequence: Synthetic oligonucleotide
gugcaugggugccaggauc

SEQ ID NO: 1909825 - RNA, 19 nt, Artificial Sequence
  Description of Artificial Sequence: Synthetic oligonucleotide
cuucucaugguuuucgauu

SEQ ID NO: 1909826 - RNA, 19 nt, Artificial Sequence
  Description of Artificial Sequence: Synthetic oligonucleotide
guuagguguuucaccaaga

SEQ ID NO: 1909827 - RNA, 19 nt, Artificial Sequence
  Description of Artificial Sequence: Synthetic oligonucleotide
uuccugagcgugacgugau

SEQ ID NO: 1909828 - RNA, 19 nt, Artificial Sequence
  Description of Artificial Sequence: Synthetic oligonucleotide
ucguccgcugccccugucu

SEQ ID NO: 1909829 - RNA, 19 nt, Artificial Sequence
  Description of Artificial Sequence: Synthetic oligonucleotide
auaggucauaagagguucu

SEQ ID NO: 1909830 - RNA, 19 nt, Artificial Sequence
  Description of Artificial Sequence: Synthetic oligonucleotide
uccugagcgugacgugaug

SEQ ID NO: 1909831 - RNA, 19 nt, Artificial Sequence
  Description of Artificial Sequence: Synthetic oligonucleotide
aucagcccucucuugccgu

SEQ ID NO: 1909832 - RNA, 19 nt, Artificial Sequence
  Description of Artificial Sequence: Synthetic oligonucleotide
cuaaauuugccacggucau

SEQ ID NO: 1909833 - RNA, 19 nt, Artificial Sequence
  Description of Artificial Sequence: Synthetic oligonucleotide
cuggaagacuccucaaaua

SEQ ID NO: 1909834 - RNA, 19 nt, Artificial Sequence
  Description of Artificial Sequence: Synthetic oligonucleotide
cugcaaggugguuuccguc

SEQ ID NO: 1909835 - RNA, 19 nt, Artificial Sequence
  Description of Artificial Sequence: Synthetic oligonucleotide
ugccccugucucuuugacu

SEQ ID NO: 1909836 - RNA, 19 nt, Artificial Sequence
  Description of Artificial Sequence: Synthetic oligonucleotide
ugagcgugacgugauggua

SEQ ID NO: 1909837 - RNA, 19 nt, Artificial Sequence
  Description of Artificial Sequence: Synthetic oligonucleotide
uaaauuugccacggucauu

SEQ ID NO: 1909838 - RNA, 19 nt, Artificial Sequence
  Description of Artificial Sequence: Synthetic oligonucleotide
aucugcaguuccugagcgu

SEQ ID NO: 1909839 - RNA, 19 nt, Artificial Sequence
  Description of Artificial Sequence: Synthetic oligonucleotide
aggcuggugcaugggugcc

SEQ ID NO: 1909840 - RNA, 19 nt, Artificial Sequence
  Description of Artificial Sequence: Synthetic oligonucleotide
accauagguggccgaggcu

SEQ ID NO: 1909841 - RNA, 19 nt, Artificial Sequence
  Description of Artificial Sequence: Synthetic oligonucleotide
cacauugguuagguguuuc

SEQ ID NO: 1909842 - RNA, 19 nt, Artificial Sequence
  Description of Artificial Sequence: Synthetic oligonucleotide
gcauuuggaggugacgcug

SEQ ID NO: 1909843 - RNA, 19 nt, Artificial Sequence
  Description of Artificial Sequence: Synthetic oligonucleotide
uccgagcuguguucugccu

SEQ ID NO: 1909844 - RNA, 19 nt, Artificial Sequence
  Description of Artificial Sequence: Synthetic oligonucleotide
guccgaaauaucuucucau

SEQ ID NO: 1909845 - RNA, 19 nt, Artificial Sequence
  Description of Artificial Sequence: Synthetic oligonucleotide
ggugacgcugacaggcagg

SEQ ID NO: 1909846 - RNA, 19 nt, Artificial Sequence
  Description of Artificial Sequence: Synthetic oligonucleotide
guguucugccucacauggg

SEQ ID NO: 1909847 - RNA, 19 nt, Artificial Sequence
  Description of Artificial Sequence: Synthetic oligonucleotide
acgcugacaggcagguggg

SEQ ID NO: 1909848 - RNA, 19 nt, Artificial Sequence
  Description of Artificial Sequence: Synthetic oligonucleotide
aguggacaaugaauccuga

SEQ ID NO: 1909849 - RNA, 19 nt, Artificial Sequence
  Description of Artificial Sequence: Synthetic oligonucleotide
aggacaauuccgagcugug

SEQ ID NO: 1909850 - RNA, 19 nt, Artificial Sequence
  Description of Artificial Sequence: Synthetic oligonucleotide
cugcuucgagugauuugac

SEQ ID NO: 1909851 - RNA, 19 nt, Artificial Sequence
  Description of Artificial Sequence: Synthetic oligonucleotide
cucuggcaguuuguguacc

SEQ ID NO: 1909852 - RNA, 19 nt, Artificial Sequence
  Description of Artificial Sequence: Synthetic oligonucleotide
ugggccauccugggugaag

SEQ ID NO: 1909853 - RNA, 19 nt, Artificial Sequence
  Description of Artificial Sequence: Synthetic oligonucleotide
cacugcacgggccuugcga

SEQ ID NO: 1909854 - RNA, 19 nt, Artificial Sequence
  Description of Artificial Sequence: Synthetic oligonucleotide
gguguaccggcuggguugg

SEQ ID NO: 1909855 - RNA, 19 nt, Artificial Sequence
  Description of Artificial Sequence: Synthetic oligonucleotide
aggugggcucagggaaugc

SEQ ID NO: 1909856 - RNA, 19 nt, Artificial Sequence
  Description of Artificial Sequence: Synthetic oligonucleotide
augguagcauuugggugcu

SEQ ID NO: 1909857 - RNA, 19 nt, Artificial Sequence
  Description of Artificial Sequence: Synthetic oligonucleotide
acacugcacgggccuugcg

SEQ ID NO: 1909858 - RNA, 19 nt, Artificial Sequence
  Description of Artificial Sequence: Synthetic oligonucleotide
gcaguuuguguaccaagaa

SEQ ID NO: 1909859 - RNA, 19 nt, Artificial Sequence
  Description of Artificial Sequence: Synthetic oligonucleotide
gccucacauggguacacug

SEQ ID NO: 1909860 - RNA, 19 nt, Artificial Sequence
  Description of Artificial Sequence: Synthetic oligonucleotide
ucgagugauuugacacauu

SEQ ID NO: 1909861 - RNA, 19 nt, Artificial Sequence
  Description of Artificial Sequence: Synthetic oligonucleotide
cgagguccgaaauaucuuc

SEQ ID NO: 1909862 - RNA, 19 nt, Artificial Sequence
  Description of Artificial Sequence: Synthetic oligonucleotide
ggcagcugaaguuguggga

SEQ ID NO: 1909863 - RNA, 19 nt, Artificial Sequence
  Description of Artificial Sequence: Synthetic oligonucleotide
gauggcggcaacaguuucu

SEQ ID NO: 1909864 - RNA, 19 nt, Artificial Sequence
  Description of Artificial Sequence: Synthetic oligonucleotide
gcgauugauaacacauuca

SEQ ID NO: 1909865 - RNA, 19 nt, Artificial Sequence
  Description of Artificial Sequence: Synthetic oligonucleotide
ggcuccuauuucaaaggac

SEQ ID NO: 1909866 - RNA, 19 nt, Artificial Sequence
  Description of Artificial Sequence: Synthetic oligonucleotide
guacacugcacgggccuug

SEQ ID NO: 1909867 - RNA, 19 nt, Artificial Sequence
  Description of Artificial Sequence: Synthetic oligonucleotide
uggcgagguccgaaauauc

SEQ ID NO: 1909868 - RNA, 19 nt, Artificial Sequence
  Description of Artificial Sequence: Synthetic oligonucleotide
gacuccucaaauacuguuu

SEQ ID NO: 1909869 - RNA, 19 nt, Artificial Sequence
  Description of Artificial Sequence: Synthetic oligonucleotide
agcccucucuugccguuca

SEQ ID NO: 1909870 - RNA, 19 nt, Artificial Sequence
  Description of Artificial Sequence: Synthetic oligonucleotide
cuacagcagcuugacauaa

SEQ ID NO: 1909871 - RNA, 19 nt, Artificial Sequence
  Description of Artificial Sequence: Synthetic oligonucleotide
cguggagaucugcaguucc

SEQ ID NO: 1909872 - RNA, 19 nt, Artificial Sequence
  Description of Artificial Sequence: Synthetic oligonucleotide
cuugaggucugaacauccu

SEQ ID NO: 1909873 - RNA, 19 nt, Artificial Sequence
  Description of Artificial Sequence: Synthetic oligonucleotide
uugccguucaggguuccuu

SEQ ID NO: 1909874 - RNA, 19 nt, Artificial Sequence
  Description of Artificial Sequence: Synthetic oligonucleotide
cugccccugucucuuugac

SEQ ID NO: 1909875 - RNA, 19 nt, Artificial Sequence
  Description of Artificial Sequence: Synthetic oligonucleotide
ccagaagguccaugggcag

SEQ ID NO: 1909876 - RNA, 19 nt, Artificial Sequence
  Description of Artificial Sequence: Synthetic oligonucleotide
ugguuuccgucugguccag

SEQ ID NO: 1909877 - RNA, 19 nt, Artificial Sequence
  Description of Artificial Sequence: Synthetic oligonucleotide
ucuugccguucaggguucc

SEQ ID NO: 1909878 - RNA, 19 nt, Artificial Sequence
  Description of Artificial Sequence: Synthetic oligonucleotide
cuguggucgcaucagaguu

SEQ ID NO: 1909879 - RNA, 19 nt, Artificial Sequence
  Description of Artificial Sequence: Synthetic oligonucleotide
gcuguagauuuagccacug

SEQ ID NO: 1909880 - RNA, 19 nt, Artificial Sequence
  Description of Artificial Sequence: Synthetic oligonucleotide
ggaguggacaaugaauccu

SEQ ID NO: 1909881 - RNA, 19 nt, Artificial Sequence
  Description of Artificial Sequence: Synthetic oligonucleotide
auacuguuucaaggcacuu

SEQ ID NO: 1909882 - RNA, 19 nt, Artificial Sequence
  Description of Artificial Sequence: Synthetic oligonucleotide
augcaguaucuggcgaggu

SEQ ID NO: 1909883 - RNA, 19 nt, Artificial Sequence
  Description of Artificial Sequence: Synthetic oligonucleotide
ccaagauauccaacaucuc

SEQ ID NO: 1909884 - RNA, 19 nt, Artificial Sequence
  Description of Artificial Sequence: Synthetic oligonucleotide
caaacaccacuccuaaauu

SEQ ID NO: 1909885 - RNA, 19 nt, Artificial Sequence
  Description of Artificial Sequence: Synthetic oligonucleotide
caagguggcaaguuucauu

SEQ ID NO: 1909886 - RNA, 19 nt, Artificial Sequence
  Description of Artificial Sequence: Synthetic oligonucleotide
guggaaucagcccucucuu

SEQ ID NO: 1909887 - RNA, 19 nt, Artificial Sequence
  Description of Artificial Sequence: Synthetic oligonucleotide
auguaacucauaggucaua

SEQ ID NO: 1909888 - RNA, 19 nt, Artificial Sequence
  Description of Artificial Sequence: Synthetic oligonucleotide
cagguucccuugaggucug

SEQ ID NO: 1909889 - RNA, 19 nt, Artificial Sequence
  Description of Artificial Sequence: Synthetic oligonucleotide
gcaguuccugagcgugacg

SEQ ID NO: 1909890 - RNA, 19 nt, Artificial Sequence
  Description of Artificial Sequence: Synthetic oligonucleotide
gcucaagacaaagauuaua

SEQ ID NO: 1909891 - RNA, 19 nt, Artificial Sequence
  Description of Artificial Sequence: Synthetic oligonucleotide
ggcgagguccgaaauaucu

SEQ ID NO: 1909892 - RNA, 19 nt, Artificial Sequence
  Description of Artificial Sequence: Synthetic oligonucleotide
aguaucuggcgagguccga

SEQ ID NO: 1909893 - RNA, 19 nt, Artificial Sequence
  Description of Artificial Sequence: Synthetic oligonucleotide
caguuccugagcgugacgu

SEQ ID NO: 1909894 - RNA, 19 nt, Artificial Sequence
  Description of Artificial Sequence: Synthetic oligonucleotide
cugccucacauggguacac

SEQ ID NO: 1909895 - RNA, 19 nt, Artificial Sequence
  Description of Artificial Sequence: Synthetic oligonucleotide
gguccaaacaccacuccua

SEQ ID NO: 1909896 - RNA, 19 nt, Artificial Sequence
  Description of Artificial Sequence: Synthetic oligonucleotide
uggagugcccguggagauc

SEQ ID NO: 1909897 - RNA, 19 nt, Artificial Sequence
  Description of Artificial Sequence: Synthetic oligonucleotide
gggccuugcgauugauaac

SEQ ID NO: 1909898 - RNA, 19 nt, Artificial Sequence
  Description of Artificial Sequence: Synthetic oligonucleotide
acacauugguuagguguuu

SEQ ID NO: 1909899 - RNA, 19 nt, Artificial Sequence
  Description of Artificial Sequence: Synthetic oligonucleotide
ggauggcauuaacacggga

SEQ ID NO: 1909900 - RNA, 19 nt, Artificial Sequence
  Description of Artificial Sequence: Synthetic oligonucleotide
cugagcgugacgugauggu

SEQ ID NO: 1909901 - RNA, 19 nt, Artificial Sequence
  Description of Artificial Sequence: Synthetic oligonucleotide
gccagguucccuugagguc

SEQ ID NO: 1909902 - RNA, 19 nt, Artificial Sequence
  Description of Artificial Sequence: Synthetic oligonucleotide
gugacgugaugguagcauu

SEQ ID NO: 1909903 - RNA, 19 nt, Artificial Sequence
  Description of Artificial Sequence: Synthetic oligonucleotide
cucucuugccguucagggu

SEQ ID NO: 1909904 - RNA, 19 nt, Artificial Sequence
  Description of Artificial Sequence: Synthetic oligonucleotide
augggcagcugaaguugug

SEQ ID NO: 1909905 - RNA, 19 nt, Artificial Sequence
  Description of Artificial Sequence: Synthetic oligonucleotide
cuggcgagguccgaaauau

SEQ ID NO: 1909906 - RNA, 19 nt, Artificial Sequence
  Description of Artificial Sequence: Synthetic oligonucleotide
ugacgcugacaggcaggug

SEQ ID NO: 1909907 - RNA, 19 nt, Artificial Sequence
  Description of Artificial Sequence: Synthetic oligonucleotide
agucucuauguaacucaua

SEQ ID NO: 1909908 - RNA, 19 nt, Artificial Sequence
  Description of Artificial Sequence: Synthetic oligonucleotide
guggcaaguuucauucccu

SEQ ID NO: 1909909 - RNA, 19 nt, Artificial Sequence
  Description of Artificial Sequence: Synthetic oligonucleotide
ggcauuaacacgggacucu

SEQ ID NO: 1909910 - RNA, 19 nt, Artificial Sequence
  Description of Artificial Sequence: Synthetic oligonucleotide
gagguguaccggcuggguu

SEQ ID NO: 1909911 - RNA, 19 nt, Artificial Sequence
  Description of Artificial Sequence: Synthetic oligonucleotide
gguuggagcuugcuguggu

SEQ ID NO: 1909912 - RNA, 19 nt, Artificial Sequence
  Description of Artificial Sequence: Synthetic oligonucleotide
ccuugcgauugauaacaca

SEQ ID NO: 1909913 - RNA, 19 nt, Artificial Sequence
  Description of Artificial Sequence: Synthetic oligonucleotide
gcguaguagcuguccaguc

SEQ ID NO: 1909914 - RNA, 19 nt, Artificial Sequence
  Description of Artificial Sequence: Synthetic oligonucleotide
caauuccgagcuguguucu

SEQ ID NO: 1909915 - RNA, 19 nt, Artificial Sequence
  Description of Artificial Sequence: Synthetic oligonucleotide
caaauccaugauggcggca

SEQ ID NO: 1909916 - RNA, 19 nt, Artificial Sequence
  Description of Artificial Sequence: Synthetic oligonucleotide
gugcccguggagaucugca

SEQ ID NO: 1909917 - RNA, 19 nt, Artificial Sequence
  Description of Artificial Sequence: Synthetic oligonucleotide
guagcauuugggugcuauu

SEQ ID NO: 1909918 - RNA, 19 nt, Artificial Sequence
  Description of Artificial Sequence: Synthetic oligonucleotide
cccugucucuuugacugcc

SEQ ID NO: 1909919 - RNA, 19 nt, Artificial Sequence
  Description of Artificial Sequence: Synthetic oligonucleotide
uucguccgcugccccuguc

SEQ ID NO: 1909920 - RNA, 19 nt, Artificial Sequence
  Description of Artificial Sequence: Synthetic oligonucleotide
cccucucuugccguucagg

SEQ ID NO: 1909921 - RNA, 19 nt, Artificial Sequence
  Description of Artificial Sequence: Synthetic oligonucleotide
uugacagggcugggacuau

SEQ ID NO: 1909922 - RNA, 19 nt, Artificial Sequence
  Description of Artificial Sequence: Synthetic oligonucleotide
cagcucuggagugcccgug

SEQ ID NO: 1909923 - RNA, 19 nt, Artificial Sequence
  Description of Artificial Sequence: Synthetic oligonucleotide
cuccuugacagggcuggga

SEQ ID NO: 1909924 - RNA, 19 nt, Artificial Sequence
  Description of Artificial Sequence: Synthetic oligonucleotide
cgggccuugcgauugauaa

SEQ ID NO: 1909925 - RNA, 19 nt, Artificial Sequence
  Description of Artificial Sequence: Synthetic oligonucleotide
cuggcaguuuguguaccaa

SEQ ID NO: 1909926 - RNA, 19 nt, Artificial Sequence
  Description of Artificial Sequence: Synthetic oligonucleotide
gugacgcugacaggcaggu

SEQ ID NO: 1909927 - RNA, 19 nt, Artificial Sequence
  Description of Artificial Sequence: Synthetic oligonucleotide
ggagugcccguggagaucu

SEQ ID NO: 1909928 - RNA, 19 nt, Artificial Sequence
  Description of Artificial Sequence: Synthetic oligonucleotide
guuggaggcuguagauuua

SEQ ID NO: 1909929 - RNA, 19 nt, Artificial Sequence
  Description of Artificial Sequence: Synthetic oligonucleotide
cagugcccuccaucugcug

SEQ ID NO: 1909930 - RNA, 19 nt, Artificial Sequence
  Description of Artificial Sequence: Synthetic oligonucleotide
cugcugcaaggugguuucc

SEQ ID NO: 1909931 - RNA, 19 nt, Artificial Sequence
  Description of Artificial Sequence: Synthetic oligonucleotide
guggagaucugcaguuccu

SEQ ID NO: 1909932 - RNA, 19 nt, Artificial Sequence
  Description of Artificial Sequence: Synthetic oligonucleotide
uggucgcaucagaguuggu

SEQ ID NO: 1909933 - RNA, 19 nt, Artificial Sequence
  Description of Artificial Sequence: Synthetic oligonucleotide
gccguucaggguuccuuca

SEQ ID NO: 1909934 - RNA, 19 nt, Artificial Sequence
  Description of Artificial Sequence: Synthetic oligonucleotide
gcugcaaggugguuuccgu

SEQ ID NO: 1909935 - RNA, 19 nt, Artificial Sequence
  Description of Artificial Sequence: Synthetic oligonucleotide
cugccuuggaggagcauuu

SEQ ID NO: 1909936 - RNA, 19 nt, Artificial Sequence
  Description of Artificial Sequence: Synthetic oligonucleotide
cuggagugcccguggagau

SEQ ID NO: 1909937 - RNA, 19 nt, Artificial Sequence
  Description of Artificial Sequence: Synthetic oligonucleotide
ccacuuuuggcuggaacaa

SEQ ID NO: 1909938 - RNA, 19 nt, Artificial Sequence
  Description of Artificial Sequence: Synthetic oligonucleotide
gccacggucauuagauucu

SEQ ID NO: 1909939 - RNA, 19 nt, Artificial Sequence
  Description of Artificial Sequence: Synthetic oligonucleotide
cuggaacaaugaagucucu

SEQ ID NO: 1909940 - RNA, 19 nt, Artificial Sequence
  Description of Artificial Sequence: Synthetic oligonucleotide
cacgggacucugggcugcc

SEQ ID NO: 1909941 - RNA, 19 nt, Artificial Sequence
  Description of Artificial Sequence: Synthetic oligonucleotide
ccucuucguccgcugcccc

SEQ ID NO: 1909942 - RNA, 19 nt, Artificial Sequence
  Description of Artificial Sequence: Synthetic oligonucleotide
ccccugucucuuugacugc

SEQ ID NO: 1909943 - RNA, 19 nt, Artificial Sequence
  Description of Artificial Sequence: Synthetic oligonucleotide
ggccauccugggugaagga

SEQ ID NO: 1909944 - RNA, 19 nt, Artificial Sequence
  Description of Artificial Sequence: Synthetic oligonucleotide
cagcccucucuugccguuc

SEQ ID NO: 1909945 - RNA, 19 nt, Artificial Sequence
  Description of Artificial Sequence: Synthetic oligonucleotide
ccggcuggguuggagcuug

SEQ ID NO: 1909946 - RNA, 19 nt, Artificial Sequence
  Description of Artificial Sequence: Synthetic oligonucleotide
gaggcuggcuuggcguagu

SEQ ID NO: 1909947 - RNA, 19 nt, Artificial Sequence
  Description of Artificial Sequence: Synthetic oligonucleotide
gcccguggagaucugcagu

SEQ ID NO: 1909948 - RNA, 19 nt, Artificial Sequence
  Description of Artificial Sequence: Synthetic oligonucleotide
gcaucagaguugguccaaa

SEQ ID NO: 1909949 - RNA, 19 nt, Artificial Sequence
  Description of Artificial Sequence: Synthetic oligonucleotide
acgggccuugcgauugaua

SEQ ID NO: 1909950 - RNA, 19 nt, Artificial Sequence
  Description of Artificial Sequence: Synthetic oligonucleotide
ccgucugguccagaagguc

SEQ ID NO: 1909951 - RNA, 19 nt, Artificial Sequence
  Description of Artificial Sequence: Synthetic oligonucleotide
acgggacucugggcugcca

SEQ ID NO: 1909952 - RNA, 19 nt, Artificial Sequence
  Description of Artificial Sequence: Synthetic oligonucleotide
guccgcugccccugucucu

SEQ ID NO: 1909953 - RNA, 19 nt, Artificial Sequence
  Description of Artificial Sequence: Synthetic oligonucleotide
caccggccucuucguccgc

SEQ ID NO: 1909954 - RNA, 19 nt, Artificial Sequence
  Description of Artificial Sequence: Synthetic oligonucleotide
augggccauccugggugaa

SEQ ID NO: 1909955 - RNA, 19 nt, Artificial Sequence
  Description of Artificial Sequence: Synthetic oligonucleotide
agguucccuugaggucuga

SEQ ID NO: 1909956 - RNA, 19 nt, Artificial Sequence
  Description of Artificial Sequence: Synthetic oligonucleotide
ccguggagaucugcaguuc

SEQ ID NO: 1909957 - RNA, 19 nt, Artificial Sequence
  Description of Artificial Sequence: Synthetic oligonucleotide
gugcuauuuccaggcuggu

SEQ ID NO: 1909958 - RNA, 19 nt, Artificial Sequence
  Description of Artificial Sequence: Synthetic oligonucleotide
cguccgcugccccugucuc

SEQ ID NO: 1909959 - RNA, 19 nt, Artificial Sequence
  Description of Artificial Sequence: Synthetic oligonucleotide
ccguucaggguuccuucaa

SEQ ID NO: 1909960 - RNA, 19 nt, Artificial Sequence
  Description of Artificial Sequence: Synthetic oligonucleotide
cuugccguucaggguuccu

SEQ ID NO: 1909961 - RNA, 19 nt, Artificial Sequence
  Description of Artificial Sequence: Synthetic oligonucleotide
ccaugauggcggcaacagu

SEQ ID NO: 1909962 - RNA, 19 nt, Artificial Sequence
  Description of Artificial Sequence: Synthetic oligonucleotide
gcgugacgugaugguagca

SEQ ID NO: 1909963 - RNA, 19 nt, Artificial Sequence
  Description of Artificial Sequence: Synthetic oligonucleotide
gcgagguccgaaauaucuu

SEQ ID NO: 1909964 - RNA, 19 nt, Artificial Sequence
  Description of Artificial Sequence: Synthetic oligonucleotide
gcacgggccuugcgauuga

SEQ ID NO: 1909965 - RNA, 19 nt, Artificial Sequence
  Description of Artificial Sequence: Synthetic oligonucleotide
cugggacuaucaccaucuu

SEQ ID NO: 1909966 - RNA, 19 nt, Artificial Sequence
  Description of Artificial Sequence: Synthetic oligonucleotide
gguuuccgucugguccaga

SEQ ID NO: 1909967 - RNA, 19 nt, Artificial Sequence
  Description of Artificial Sequence: Synthetic oligonucleotide
cuucguccgcugccccugu

SEQ ID NO: 1909968 - RNA, 19 nt, Artificial Sequence
  Description of Artificial Sequence: Synthetic oligonucleotide
gcugugguuggaggcugua

SEQ ID NO: 1909969 - RNA, 19 nt, Artificial Sequence
  Description of Artificial Sequence: Synthetic oligonucleotide
ccgaggcuggcuuggcgua

SEQ ID NO: 1909970 - RNA, 19 nt, Artificial Sequence
  Description of Artificial Sequence: Synthetic oligonucleotide
gacugccuuggaggagcau

SEQ ID NO: 1909971 - RNA, 19 nt, Artificial Sequence
  Description of Artificial Sequence: Synthetic oligonucleotide
gguacacugcacgggccuu

SEQ ID NO: 1909972 - RNA, 19 nt, Artificial Sequence
  Description of Artificial Sequence: Synthetic oligonucleotide
cgugacgugaugguagcau

SEQ ID NO: 1909973 - RNA, 19 nt, Artificial Sequence
  Description of Artificial Sequence: Synthetic oligonucleotide
cugcacgggccuugcgauu

SEQ ID NO: 1909974 - RNA, 19 nt, Artificial Sequence
  Description of Artificial Sequence: Synthetic oligonucleotide
guguaccggcuggguugga

SEQ ID NO: 1909975 - RNA, 19 nt, Artificial Sequence
  Description of Artificial Sequence: Synthetic oligonucleotide
ccaagguggcaaguuucau

SEQ ID NO: 1909976 - RNA, 19 nt, Artificial Sequence
  Description of Artificial Sequence: Synthetic oligonucleotide
cacgggccuugcgauugau

SEQ ID NO: 1909977 - RNA, 19 nt, Artificial Sequence
  Description of Artificial Sequence: Synthetic oligonucleotide
aagguuuguccccagagag

SEQ ID NO: 1909978 - RNA, 19 nt, Artificial Sequence
  Description of Artificial Sequence: Synthetic oligonucleotide
ugaaccaucuucaggaagc

SEQ ID NO: 1909979 - RNA, 19 nt, Artificial Sequence
  Description of Artificial Sequence: Synthetic oligonucleotide
gauguaugagggcagggcg

SEQ ID NO: 1909980 - RNA, 19 nt, Artificial Sequence
  Description of Artificial Sequence: Synthetic oligonucleotide
acaguugccucacugcugc

SEQ ID NO: 1909981 - RNA, 19 nt, Artificial Sequence
  Description of Artificial Sequence: Synthetic oligonucleotide
ucagagaaggccuuuacuc

SEQ ID NO: 1909982 - RNA, 19 nt, Artificial Sequence
  Description of Artificial Sequence: Synthetic oligonucleotide
aagagccuugacugaaggc

SEQ ID NO: 1909983 - RNA, 19 nt, Artificial Sequence
  Description of Artificial Sequence: Synthetic oligonucleotide
augagaugcgaguugcggc

SEQ ID NO: 1909984 - RNA, 19 nt, Artificial Sequence
  Description of Artificial Sequence: Synthetic oligonucleotide
cuagcuuugggacugcugc

SEQ ID NO: 1909985 - RNA, 19 nt, Artificial Sequence
  Description of Artificial Sequence: Synthetic oligonucleotide
acgaacacuuguugcaugc

SEQ ID NO: 1909986 - RNA, 19 nt, Artificial Sequence
  Description of Artificial Sequence: Synthetic oligonucleotide
uagcucaucccauauuggg

SEQ ID NO: 1909987 - RNA, 19 nt, Artificial Sequence
  Description of Artificial Sequence: Synthetic oligonucleotide
ucuucacgaacacuuguug

SEQ ID NO: 1909988 - RNA, 19 nt, Artificial Sequence
  Description of Artificial Sequence: Synthetic oligonucleotide
uucacgaacacuuguugca

SEQ ID NO: 1909989 - RNA, 19 nt, Artificial Sequence
  Description of Artificial Sequence: Synthetic oligonucleotide
ucucccagggguuagcugc

SEQ ID NO: 1909990 - RNA, 19 nt, Artificial Sequence
  Description of Artificial Sequence: Synthetic oligonucleotide
ugcgaguugcggcagaagc

SEQ ID NO: 1909991 - RNA, 19 nt, Artificial Sequence
  Description of Artificial Sequence: Synthetic oligonucleotide
gagagcaccgccuagcuca

SEQ ID NO: 1909992 - RNA, 19 nt, Artificial Sequence
  Description of Artificial Sequence: Synthetic oligonucleotide
ugagguucgugccaagccc

SEQ ID NO: 1909993 - RNA, 19 nt, Artificial Sequence
  Description of Artificial Sequence: Synthetic oligonucleotide
gaugagaugcgaguugcgg

SEQ ID NO: 1909994 - RNA, 19 nt, Artificial Sequence
  Description of Artificial Sequence: Synthetic oligonucleotide
accgcaggcucacaguugc

SEQ ID NO: 1909995 - RNA, 19 nt, Artificial Sequence
  Description of Artificial Sequence: Synthetic oligonucleotide
agagcgaagagccuugacu

SEQ ID NO: 1909996 - RNA, 19 nt, Artificial Sequence
  Description of Artificial Sequence: Synthetic oligonucleotide
ugagguuaggagcugugga

SEQ ID NO: 1909997 - RNA, 19 nt, Artificial Sequence
  Description of Artificial Sequence: Synthetic oligonucleotide
ugugugcacacgaagggcu

SEQ ID NO: 1909998 - RNA, 19 nt, Artificial Sequence
  Description of Artificial Sequence: Synthetic oligonucleotide
ugagcgcagacguagggcc

SEQ ID NO: 1909999 - RNA, 19 nt, Artificial Sequence
  Description of Artificial Sequence: Synthetic oligonucleotide
ggaagugugccuuccaagg

SEQ ID NO: 1910000 - RNA, 19 nt, Artificial Sequence
  Description of Artificial Sequence: Synthetic oligonucleotide
ugagaugcgaguugcggca

SEQ ID NO: 1910001 - RNA, 19 nt, Artificial Sequence
  Description of Artificial Sequence: Synthetic oligonucleotide
cuugacugaaggcugcccc

SEQ ID NO: 1910002 - RNA, 19 nt, Artificial Sequence
  Description of Artificial Sequence: Synthetic oligonucleotide
cucuggaugaaccaucuuc

SEQ ID NO: 1910003 - RNA, 19 nt, Artificial Sequence
  Description of Artificial Sequence: Synthetic oligonucleotide
ugcuugaagagcgaagagc

SEQ ID NO: 1910004 - RNA, 19 nt, Artificial Sequence
  Description of Artificial Sequence: Synthetic oligonucleotide
agagccuugacugaaggcu

SEQ ID NO: 1910005 - RNA, 19 nt, Artificial Sequence
  Description of Artificial Sequence: Synthetic oligonucleotide
uguugcaugcccugcauuc

SEQ ID NO: 1910006 - RNA, 19 nt, Artificial Sequence
  Description of Artificial Sequence: Synthetic oligonucleotide
agaagcggcggccacacug

SEQ ID NO: 1910007 - RNA, 19 nt, Artificial Sequence
  Description of Artificial Sequence: Synthetic oligonucleotide
aagagcgaagagccuugac

SEQ ID NO: 1910008 - RNA, 19 nt, Artificial Sequence
  Description of Artificial Sequence: Synthetic oligonucleotide
ugcccugcauucaaaaggu

SEQ ID NO: 1910009 - RNA, 19 nt, Artificial Sequence
  Description of Artificial Sequence: Synthetic oligonucleotide
ugaagagcgaagagccuug

SEQ ID NO: 1910010 - RNA, 19 nt, Artificial Sequence
  Description of Artificial Sequence: Synthetic oligonucleotide
aguagcugcucccaguaga

SEQ ID NO: 1910011 - RNA, 19 nt, Artificial Sequence
  Description of Artificial Sequence: Synthetic oligonucleotide
gaucuugcggugcuggcug

SEQ ID NO: 1910012 - RNA, 19 nt, Artificial Sequence
  Description of Artificial Sequence: Synthetic oligonucleotide
ugauguaugagggcagggc

SEQ ID NO: 1910013 - RNA, 19 nt, Artificial Sequence
  Description of Artificial Sequence: Synthetic oligonucleotide
ugcugcgugagguuaggag

SEQ ID NO: 1910014 - RNA, 19 nt, Artificial Sequence
  Description of Artificial Sequence: Synthetic oligonucleotide
ugagcccuuggcaaaggcc

SEQ ID NO: 1910015 - RNA, 19 nt, Artificial Sequence
  Description of Artificial Sequence: Synthetic oligonucleotide
cuagcucaucccauauugg

SEQ ID NO: 1910016 - RNA, 19 nt, Artificial Sequence
  Description of Artificial Sequence: Synthetic oligonucleotide
augaaccaucuucaggaag

SEQ ID NO: 1910017 - RNA, 19 nt, Artificial Sequence
  Description of Artificial Sequence: Synthetic oligonucleotide
ucagcuagcuuugggacug

SEQ ID NO: 1910018 - RNA, 19 nt, Artificial Sequence
  Description of Artificial Sequence: Synthetic oligonucleotide
gagguuaggagcuguggac

SEQ ID NO: 1910019 - RNA, 19 nt, Artificial Sequence
  Description of Artificial Sequence: Synthetic oligonucleotide
cacgaagggcuucucaccg

SEQ ID NO: 1910020 - RNA, 19 nt, Artificial Sequence
  Description of Artificial Sequence: Synthetic oligonucleotide
gaggucggagcucuucacg

SEQ ID NO: 1910021 - RNA, 19 nt, Artificial Sequence
  Description of Artificial Sequence: Synthetic oligonucleotide
uggaugagaugcgaguugc

SEQ ID NO: 1910022 - RNA, 19 nt, Artificial Sequence
  Description of Artificial Sequence: Synthetic oligonucleotide
cucgugcuggaugagaugc

SEQ ID NO: 1910023 - RNA, 19 nt, Artificial Sequence
  Description of Artificial Sequence: Synthetic oligonucleotide
uuuacucuggaugaaccau

SEQ ID NO: 1910024 - RNA, 19 nt, Artificial Sequence
  Description of Artificial Sequence: Synthetic oligonucleotide
aggccuuuacucuggauga

SEQ ID NO: 1910025 - RNA, 19 nt, Artificial Sequence
  Description of Artificial Sequence: Synthetic oligonucleotide
ugcuugggaagacucuccc

SEQ ID NO: 1910026 - RNA, 19 nt, Artificial Sequence
  Description of Artificial Sequence: Synthetic oligonucleotide
uugggaagacucucccagg

SEQ ID NO: 1910027 - RNA, 19 nt, Artificial Sequence
  Description of Artificial Sequence: Synthetic oligonucleotide
auguaugagggcagggcgc

SEQ ID NO: 1910028 - RNA, 19 nt, Artificial Sequence
  Description of Artificial Sequence: Synthetic oligonucleotide
uaugagggcagggcgcucg

SEQ ID NO: 1910029 - RNA, 19 nt, Artificial Sequence
  Description of Artificial Sequence: Synthetic oligonucleotide
ugaugcugcgugagguuag

SEQ ID NO: 1910030 - RNA, 19 nt, Artificial Sequence
  Description of Artificial Sequence: Synthetic oligonucleotide
agcacugagcccuuggcaa

SEQ ID NO: 1910031 - RNA, 19 nt, Artificial Sequence
  Description of Artificial Sequence: Synthetic oligonucleotide
ugaugcgcaccaugaaggc

SEQ ID NO: 1910032 - RNA, 19 nt, Artificial Sequence
  Description of Artificial Sequence: Synthetic oligonucleotide
agcggaagggucguucgcc

SEQ ID NO: 1910033 - RNA, 19 nt, Artificial Sequence
  Description of Artificial Sequence: Synthetic oligonucleotide
uguggugucgagggcauug

SEQ ID NO: 1910034 - RNA, 19 nt, Artificial Sequence
  Description of Artificial Sequence: Synthetic oligonucleotide
aagaccugggccagucugg

SEQ ID NO: 1910035 - RNA, 19 nt, Artificial Sequence
  Description of Artificial Sequence: Synthetic oligonucleotide
guggacugaaggcacggcc

SEQ ID NO: 1910036 - RNA, 19 nt, Artificial Sequence
  Description of Artificial Sequence: Synthetic oligonucleotide
gcggcggccacacugagcg

SEQ ID NO: 1910037 - RNA, 19 nt, Artificial Sequence
  Description of Artificial Sequence: Synthetic oligonucleotide
ucaccgguguggaugcgcc

SEQ ID NO: 1910038 - RNA, 19 nt, Artificial Sequence
  Description of Artificial Sequence: Synthetic oligonucleotide
gagugcaugccaccccggg

SEQ ID NO: 1910039 - RNA, 19 nt, Artificial Sequence
  Description of Artificial Sequence: Synthetic oligonucleotide
gcugcgugagguuaggagc

SEQ ID NO: 1910040 - RNA, 19 nt, Artificial Sequence
  Description of Artificial Sequence: Synthetic oligonucleotide
gaaggcacggccacacugc

SEQ ID NO: 1910041 - RNA, 19 nt, Artificial Sequence
  Description of Artificial Sequence: Synthetic oligonucleotide
cuuuacucuggaugaacca

SEQ ID NO: 1910042 - RNA, 19 nt, Artificial Sequence
  Description of Artificial Sequence: Synthetic oligonucleotide
ccuagcucaucccauauug

SEQ ID NO: 1910043 - RNA, 19 nt, Artificial Sequence
  Description of Artificial Sequence: Synthetic oligonucleotide
ucgugcuggaugagaugcg

SEQ ID NO: 1910044 - RNA, 19 nt, Artificial Sequence
  Description of Artificial Sequence: Synthetic oligonucleotide
uugaagagcgaagagccuu

SEQ ID NO: 1910045 - RNA, 19 nt, Artificial Sequence
  Description of Artificial Sequence: Synthetic oligonucleotide
agcuuugggacugcugccg

SEQ ID NO: 1910046 - RNA, 19 nt, Artificial Sequence
  Description of Artificial Sequence: Synthetic oligonucleotide
ugucgagggcauugaugcg

SEQ ID NO: 1910047 - RNA, 19 nt, Artificial Sequence
  Description of Artificial Sequence: Synthetic oligonucleotide
ccuuuacucuggaugaacc

SEQ ID NO: 1910048 - RNA, 19 nt, Artificial Sequence
  Description of Artificial Sequence: Synthetic oligonucleotide
cuugggagugcaugccacc

SEQ ID NO: 1910049 - RNA, 19 nt, Artificial Sequence
  Description of Artificial Sequence: Synthetic oligonucleotide
ucugagguucgugccaagc

SEQ ID NO: 1910050 - RNA, 19 nt, Artificial Sequence
  Description of Artificial Sequence: Synthetic oligonucleotide
ucgagggcauugaugcgca

SEQ ID NO: 1910051 - RNA, 19 nt, Artificial Sequence
  Description of Artificial Sequence: Synthetic oligonucleotide
ucaaccgcaggcucacagu

SEQ ID NO: 1910052 - RNA, 19 nt, Artificial Sequence
  Description of Artificial Sequence: Synthetic oligonucleotide
aggucggagcucuucacga

SEQ ID NO: 1910053 - RNA, 19 nt, Artificial Sequence
  Description of Artificial Sequence: Synthetic oligonucleotide
aggucugggaugcuuggga

SEQ ID NO: 1910054 - RNA, 19 nt, Artificial Sequence
  Description of Artificial Sequence: Synthetic oligonucleotide
cauagcuuugaccucaggu

SEQ ID NO: 1910055 - RNA, 19 nt, Artificial Sequence
  Description of Artificial Sequence: Synthetic oligonucleotide
acugggcgcacgucguacg

SEQ ID NO: 1910056 - RNA, 19 nt, Artificial Sequence
  Description of Artificial Sequence: Synthetic oligonucleotide
uggcuuuuggggcuccgcu

SEQ ID NO: 1910057 - RNA, 19 nt, Artificial Sequence
  Description of Artificial Sequence: Synthetic oligonucleotide
uggccuucgggaagugugc

SEQ ID NO: 1910058 - RNA, 19 nt, Artificial Sequence
  Description of Artificial Sequence: Synthetic oligonucleotide
cacgcguuggugcuugaag

SEQ ID NO: 1910059 - RNA, 19 nt, Artificial Sequence
  Description of Artificial Sequence: Synthetic oligonucleotide
agggcauagcuuugaccuc

SEQ ID NO: 1910060 - RNA, 19 nt, Artificial Sequence
  Description of Artificial Sequence: Synthetic oligonucleotide
gugagguuaggagcugugg

SEQ ID NO: 1910061 - RNA, 19 nt, Artificial Sequence
  Description of Artificial Sequence: Synthetic oligonucleotide
uugggagugcaugccaccc

SEQ ID NO: 1910062 - RNA, 19 nt, Artificial Sequence
  Description of Artificial Sequence: Synthetic oligonucleotide
gucgagggcauugaugcgc

SEQ ID NO: 1910063 - RNA, 19 nt, Artificial Sequence
  Description of Artificial Sequence: Synthetic oligonucleotide
ugccaagccccgcucauuc

SEQ ID NO: 1910064 - RNA, 19 nt, Artificial Sequence
  Description of Artificial Sequence: Synthetic oligonucleotide
gaugcgcaccaugaaggcc

SEQ ID NO: 1910065 - RNA, 19 nt, Artificial Sequence
  Description of Artificial Sequence: Synthetic oligonucleotide
agacguagggccgcccgcc

SEQ ID NO: 1910066 - RNA, 19 nt, Artificial Sequence
  Description of Artificial Sequence: Synthetic oligonucleotide
gagguucgugccaagcccc

SEQ ID NO: 1910067 - RNA, 19 nt, Artificial Sequence
  Description of Artificial Sequence: Synthetic oligonucleotide
cuuucccggggccaggaug

SEQ ID NO: 1910068 - RNA, 19 nt, Artificial Sequence
  Description of Artificial Sequence: Synthetic oligonucleotide
gaugcugcgugagguuagg

SEQ ID NO: 1910069 - RNA, 19 nt, Artificial Sequence
  Description of Artificial Sequence: Synthetic oligonucleotide
uuuuggggcuccgcugccg

SEQ ID NO: 1910070 - RNA, 19 nt, Artificial Sequence
  Description of Artificial Sequence: Synthetic oligonucleotide
uagcaguagcugcucccag

SEQ ID NO: 1910071 - RNA, 19 nt, Artificial Sequence
  Description of Artificial Sequence: Synthetic oligonucleotide
agguuaggagcuguggacu

SEQ ID NO: 1910072 - RNA, 19 nt, Artificial Sequence
  Description of Artificial Sequence: Synthetic oligonucleotide
augcgcaccaugaaggccu

SEQ ID NO: 1910073 - RNA, 19 nt, Artificial Sequence
  Description of Artificial Sequence: Synthetic oligonucleotide
cguuggugcuugaagagcg

SEQ ID NO: 1910074 - RNA, 19 nt, Artificial Sequence
  Description of Artificial Sequence: Synthetic oligonucleotide
guugcggcagaagcggcgg

SEQ ID NO: 1910075 - RNA, 19 nt, Artificial Sequence
  Description of Artificial Sequence: Synthetic oligonucleotide
acugcgggcaggagaaagg

SEQ ID NO: 1910076 - RNA, 19 nt, Artificial Sequence
  Description of Artificial Sequence: Synthetic oligonucleotide
guggccuucgggaagugug

SEQ ID NO: 1910077 - RNA, 19 nt, Artificial Sequence
  Description of Artificial Sequence: Synthetic oligonucleotide
uugcaugcccugcauucaa

SEQ ID NO: 1910078 - RNA, 19 nt, Artificial Sequence
  Description of Artificial Sequence: Synthetic oligonucleotide
gggagugcaugccaccccg

SEQ ID NO: 1910079 - RNA, 19 nt, Artificial Sequence
  Description of Artificial Sequence: Synthetic oligonucleotide
gggaagugugccuuccaag

SEQ ID NO: 1910080 - RNA, 19 nt, Artificial Sequence
  Description of Artificial Sequence: Synthetic oligonucleotide
cacaguugccucacugcug

SEQ ID NO: 1910081 - RNA, 19 nt, Artificial Sequence
  Description of Artificial Sequence: Synthetic oligonucleotide
gugauguaugagggcaggg

SEQ ID NO: 1910082 - RNA, 19 nt, Artificial Sequence
  Description of Artificial Sequence: Synthetic oligonucleotide
agccuugacugaaggcugc

SEQ ID NO: 1910083 - RNA, 19 nt, Artificial Sequence
  Description of Artificial Sequence: Synthetic oligonucleotide
cacgaacacuuguugcaug

SEQ ID NO: 1910084 - RNA, 19 nt, Artificial Sequence
  Description of Artificial Sequence: Synthetic oligonucleotide
aguugcggcagaagcggcg

SEQ ID NO: 1910085 - RNA, 19 nt, Artificial Sequence
  Description of Artificial Sequence: Synthetic oligonucleotide
aggucaaccgcaggcucac

SEQ ID NO: 1910086 - RNA, 19 nt, Artificial Sequence
  Description of Artificial Sequence: Synthetic oligonucleotide
caggucucagcuagcuuug

SEQ ID NO: 1910087 - RNA, 19 nt, Artificial Sequence
  Description of Artificial Sequence: Synthetic oligonucleotide
augagggcagggcgcucgc

SEQ ID NO: 1910088 - RNA, 19 nt, Artificial Sequence
  Description of Artificial Sequence: Synthetic oligonucleotide
gugcguggcugcuuucccg

SEQ ID NO: 1910089 - RNA, 19 nt, Artificial Sequence
  Description of Artificial Sequence: Synthetic oligonucleotide
ucacgaacacuuguugcau

SEQ ID NO: 1910090 - RNA, 19 nt, Artificial Sequence
  Description of Artificial Sequence: Synthetic oligonucleotide
caggugcuugaggaggucg

SEQ ID NO: 1910091 - RNA, 19 nt, Artificial Sequence
  Description of Artificial Sequence: Synthetic oligonucleotide
gcuuuuggggcuccgcugc

SEQ ID NO: 1910092 - RNA, 19 nt, Artificial Sequence
  Description of Artificial Sequence: Synthetic oligonucleotide
ugacugaaggcugccccgc

SEQ ID NO: 1910093 - RNA, 19 nt, Artificial Sequence
  Description of Artificial Sequence: Synthetic oligonucleotide
ggugcuugaagagcgaaga

SEQ ID NO: 1910094 - RNA, 19 nt, Artificial Sequence
  Description of Artificial Sequence: Synthetic oligonucleotide
ggugauguaugagggcagg

SEQ ID NO: 1910095 - RNA, 19 nt, Artificial Sequence
  Description of Artificial Sequence: Synthetic oligonucleotide
aaggcgcggccacacugug

SEQ ID NO: 1910096 - RNA, 19 nt, Artificial Sequence
  Description of Artificial Sequence: Synthetic oligonucleotide
cacacugcgggcaggagaa

SEQ ID NO: 1910097 - RNA, 19 nt, Artificial Sequence
  Description of Artificial Sequence: Synthetic oligonucleotide
gguuaggagcuguggacug

SEQ ID NO: 1910098 - RNA, 19 nt, Artificial Sequence
  Description of Artificial Sequence: Synthetic oligonucleotide
agugugccuuccaaggaug

SEQ ID NO: 1910099 - RNA, 19 nt, Artificial Sequence
  Description of Artificial Sequence: Synthetic oligonucleotide
gcugccgggccuaaggugg

SEQ ID NO: 1910100 - RNA, 19 nt, Artificial Sequence
  Description of Artificial Sequence: Synthetic oligonucleotide
ggagccguggcugaaggcc

SEQ ID NO: 1910101 - RNA, 19 nt, Artificial Sequence
  Description of Artificial Sequence: Synthetic oligonucleotide
ggucucagcuagcuuuggg

SEQ ID NO: 1910102 - RNA, 19 nt, Artificial Sequence
  Description of Artificial Sequence: Synthetic oligonucleotide
gcugggaccuagcaguagc

SEQ ID NO: 1910103 - RNA, 19 nt, Artificial Sequence
  Description of Artificial Sequence: Synthetic oligonucleotide
cacugagcgcagacguagg

SEQ ID NO: 1910104 - RNA, 19 nt, Artificial Sequence
  Description of Artificial Sequence: Synthetic oligonucleotide
gucggagcucuucacgaac

SEQ ID NO: 1910105 - RNA, 19 nt, Artificial Sequence
  Description of Artificial Sequence: Synthetic oligonucleotide
uucgggaagugugccuucc

SEQ ID NO: 1910106 - RNA, 19 nt, Artificial Sequence
  Description of Artificial Sequence: Synthetic oligonucleotide
aggugcuugaggaggucgg

SEQ ID NO: 1910107 - RNA, 19 nt, Artificial Sequence
  Description of Artificial Sequence: Synthetic oligonucleotide
uguggacugaaggcacggc

SEQ ID NO: 1910108 - RNA, 19 nt, Artificial Sequence
  Description of Artificial Sequence: Synthetic oligonucleotide
ugggaccuagcaguagcug

SEQ ID NO: 1910109 - RNA, 19 nt, Artificial Sequence
  Description of Artificial Sequence: Synthetic oligonucleotide
gagccucuggugauguaug

SEQ ID NO: 1910110 - RNA, 19 nt, Artificial Sequence
  Description of Artificial Sequence: Synthetic oligonucleotide
cugagcccuuggcaaaggc

SEQ ID NO: 1910111 - RNA, 19 nt, Artificial Sequence
  Description of Artificial Sequence: Synthetic oligonucleotide
acgucguacggccguucuc

SEQ ID NO: 1910112 - RNA, 19 nt, Artificial Sequence
  Description of Artificial Sequence: Synthetic oligonucleotide
ugcgggcaggagaaaggcu

SEQ ID NO: 1910113 - RNA, 19 nt, Artificial Sequence
  Description of Artificial Sequence: Synthetic oligonucleotide
uuguugcaugcccugcauu

SEQ ID NO: 1910114 - RNA, 19 nt, Artificial Sequence
  Description of Artificial Sequence: Synthetic oligonucleotide
gguuagcugcaucucuggc

SEQ ID NO: 1910115 - RNA, 19 nt, Artificial Sequence
  Description of Artificial Sequence: Synthetic oligonucleotide
ggggcuccagaacacuggg

SEQ ID NO: 1910116 - RNA, 19 nt, Artificial Sequence
  Description of Artificial Sequence: Synthetic oligonucleotide
ggcgcggccacacugugug

SEQ ID NO: 1910117 - RNA, 19 nt, Artificial Sequence
  Description of Artificial Sequence: Synthetic oligonucleotide
ccuaagguggccuucggga

SEQ ID NO: 1910118 - RNA, 19 nt, Artificial Sequence
  Description of Artificial Sequence: Synthetic oligonucleotide
gcagcggaagggucguucg

SEQ ID NO: 1910119 - RNA, 19 nt, Artificial Sequence
  Description of Artificial Sequence: Synthetic oligonucleotide
ugcaugcccugcauucaaa

SEQ ID NO: 1910120 - RNA, 19 nt, Artificial Sequence
  Description of Artificial Sequence: Synthetic oligonucleotide
cugcgggcaggagaaaggc

SEQ ID NO: 1910121 - RNA, 19 nt, Artificial Sequence
  Description of Artificial Sequence: Synthetic oligonucleotide
aagcggcggccacacugag

SEQ ID NO: 1910122 - RNA, 19 nt, Artificial Sequence
  Description of Artificial Sequence: Synthetic oligonucleotide
ucgggaagugugccuucca

SEQ ID NO: 1910123 - RNA, 19 nt, Artificial Sequence
  Description of Artificial Sequence: Synthetic oligonucleotide
ggaaggcgcggccacacug

SEQ ID NO: 1910124 - RNA, 19 nt, Artificial Sequence
  Description of Artificial Sequence: Synthetic oligonucleotide
aagacucucccagggguua

SEQ ID NO: 1910125 - RNA, 19 nt, Artificial Sequence
  Description of Artificial Sequence: Synthetic oligonucleotide
gcucacaguugccucacug

SEQ ID NO: 1910126 - RNA, 19 nt, Artificial Sequence
  Description of Artificial Sequence: Synthetic oligonucleotide
ucguucgcccgugugcagc

SEQ ID NO: 1910127 - RNA, 19 nt, Artificial Sequence
  Description of Artificial Sequence: Synthetic oligonucleotide
cuuuuggggcuccgcugcc

SEQ ID NO: 1910128 - RNA, 19 nt, Artificial Sequence
  Description of Artificial Sequence: Synthetic oligonucleotide
ccuagcaguagcugcuccc

SEQ ID NO: 1910129 - RNA, 19 nt, Artificial Sequence
  Description of Artificial Sequence: Synthetic oligonucleotide
gcucauuccgugucccucc

SEQ ID NO: 1910130 - RNA, 19 nt, Artificial Sequence
  Description of Artificial Sequence: Synthetic oligonucleotide
gagaugcgaguugcggcag

SEQ ID NO: 1910131 - RNA, 19 nt, Artificial Sequence
  Description of Artificial Sequence: Synthetic oligonucleotide
ugggaugcuugggaagacu

SEQ ID NO: 1910132 - RNA, 19 nt, Artificial Sequence
  Description of Artificial Sequence: Synthetic oligonucleotide
agaagaccugggccagucu

SEQ ID NO: 1910133 - RNA, 19 nt, Artificial Sequence
  Description of Artificial Sequence: Synthetic oligonucleotide
ggugucgagggcauugaug

SEQ ID NO: 1910134 - RNA, 19 nt, Artificial Sequence
  Description of Artificial Sequence: Synthetic oligonucleotide
cugggcgcacgucguacgg

SEQ ID NO: 1910135 - RNA, 19 nt, Artificial Sequence
  Description of Artificial Sequence: Synthetic oligonucleotide
gugcgugcgcucgugcugg

SEQ ID NO: 1910136 - RNA, 19 nt, Artificial Sequence
  Description of Artificial Sequence: Synthetic oligonucleotide
ucgcccgugugcagcagcu

SEQ ID NO: 1910137 - RNA, 19 nt, Artificial Sequence
  Description of Artificial Sequence: Synthetic oligonucleotide
uccgcugccgugcguggcu

SEQ ID NO: 1910138 - RNA, 19 nt, Artificial Sequence
  Description of Artificial Sequence: Synthetic oligonucleotide
aaccgcaggcucacaguug

SEQ ID NO: 1910139 - RNA, 19 nt, Artificial Sequence
  Description of Artificial Sequence: Synthetic oligonucleotide
ucuggcuuuuggggcuccg

SEQ ID NO: 1910140 - RNA, 19 nt, Artificial Sequence
  Description of Artificial Sequence: Synthetic oligonucleotide
gcagacguagggccgcccg

SEQ ID NO: 1910141 - RNA, 19 nt, Artificial Sequence
  Description of Artificial Sequence: Synthetic oligonucleotide
uucgugccaagccccgcuc

SEQ ID NO: 1910142 - RNA, 19 nt, Artificial Sequence
  Description of Artificial Sequence: Synthetic oligonucleotide
caggggaggucaaccgcag

SEQ ID NO: 1910143 - RNA, 19 nt, Artificial Sequence
  Description of Artificial Sequence: Synthetic oligonucleotide
uucucggccgugugguguc

SEQ ID NO: 1910144 - RNA, 19 nt, Artificial Sequence
  Description of Artificial Sequence: Synthetic oligonucleotide
agggcgcucgcggaaggcg

SEQ ID NO: 1910145 - RNA, 19 nt, Artificial Sequence
  Description of Artificial Sequence: Synthetic oligonucleotide
gcuuugggacugcugccgg

SEQ ID NO: 1910146 - RNA, 19 nt, Artificial Sequence
  Description of Artificial Sequence: Synthetic oligonucleotide
gccuaagguggccuucggg

SEQ ID NO: 1910147 - RNA, 19 nt, Artificial Sequence
  Description of Artificial Sequence: Synthetic oligonucleotide
ucguacggccguucuccug

SEQ ID NO: 1910148 - RNA, 19 nt, Artificial Sequence
  Description of Artificial Sequence: Synthetic oligonucleotide
aguccccgcagcggaaggg

SEQ ID NO: 1910149 - RNA, 19 nt, Artificial Sequence
  Description of Artificial Sequence: Synthetic oligonucleotide
cagacguagggccgcccgc

SEQ ID NO: 1910150 - RNA, 19 nt, Artificial Sequence
  Description of Artificial Sequence: Synthetic oligonucleotide
caguagcugcucccaguag

SEQ ID NO: 1910151 - RNA, 19 nt, Artificial Sequence
  Description of Artificial Sequence: Synthetic oligonucleotide
agcucuucacgaacacuug

SEQ ID NO: 1910152 - RNA, 19 nt, Artificial Sequence
  Description of Artificial Sequence: Synthetic oligonucleotide
cucucccagggguuagcug

SEQ ID NO: 1910153 - RNA, 19 nt, Artificial Sequence
  Description of Artificial Sequence: Synthetic oligonucleotide
agucuggagagcaccgccu

SEQ ID NO: 1910154 - RNA, 19 nt, Artificial Sequence
  Description of Artificial Sequence: Synthetic oligonucleotide
cacugagcccuuggcaaag

SEQ ID NO: 1910155 - RNA, 19 nt, Artificial Sequence
  Description of Artificial Sequence: Synthetic oligonucleotide
guugcaugcccugcauuca

SEQ ID NO: 1910156 - RNA, 19 nt, Artificial Sequence
  Description of Artificial Sequence: Synthetic oligonucleotide
agaugcgaguugcggcaga

SEQ ID NO: 1910157 - RNA, 19 nt, Artificial Sequence
  Description of Artificial Sequence: Synthetic oligonucleotide
gacguagggccgcccgccc

SEQ ID NO: 1910158 - RNA, 19 nt, Artificial Sequence
  Description of Artificial Sequence: Synthetic oligonucleotide
gugugccuuccaaggaugc

SEQ ID NO: 1910159 - RNA, 19 nt, Artificial Sequence
  Description of Artificial Sequence: Synthetic oligonucleotide
ucggccguguggugucgag

SEQ ID NO: 1910160 - RNA, 19 nt, Artificial Sequence
  Description of Artificial Sequence: Synthetic oligonucleotide
gcccgcguggaucuugcgg

SEQ ID NO: 1910161 - RNA, 19 nt, Artificial Sequence
  Description of Artificial Sequence: Synthetic oligonucleotide
cuugaggaggucggagcuc

SEQ ID NO: 1910162 - RNA, 19 nt, Artificial Sequence
  Description of Artificial Sequence: Synthetic oligonucleotide
cuucgggaagugugccuuc

SEQ ID NO: 1910163 - RNA, 19 nt, Artificial Sequence
  Description of Artificial Sequence: Synthetic oligonucleotide
ggaugagaugcgaguugcg

SEQ ID NO: 1910164 - RNA, 19 nt, Artificial Sequence
  Description of Artificial Sequence: Synthetic oligonucleotide
ugagggcagggcgcucgcg

SEQ ID NO: 1910165 - RNA, 19 nt, Artificial Sequence
  Description of Artificial Sequence: Synthetic oligonucleotide
cagaacacuggggucucuc

SEQ ID NO: 1910166 - RNA, 19 nt, Artificial Sequence
  Description of Artificial Sequence: Synthetic oligonucleotide
gaagagcgaagagccuuga

SEQ ID NO: 1910167 - RNA, 19 nt, Artificial Sequence
  Description of Artificial Sequence: Synthetic oligonucleotide
aggucucagcuagcuuugg

SEQ ID NO: 1910168 - RNA, 19 nt, Artificial Sequence
  Description of Artificial Sequence: Synthetic oligonucleotide
cgaguugcggcagaagcgg

SEQ ID NO: 1910169 - RNA, 19 nt, Artificial Sequence
  Description of Artificial Sequence: Synthetic oligonucleotide
agguucgugccaagccccg

SEQ ID NO: 1910170 - RNA, 19 nt, Artificial Sequence
  Description of Artificial Sequence: Synthetic oligonucleotide
gcugagguuggagccgugg

SEQ ID NO: 1910171 - RNA, 19 nt, Artificial Sequence
  Description of Artificial Sequence: Synthetic oligonucleotide
gaugcgaguugcggcagaa

SEQ ID NO: 1910172 - RNA, 19 nt, Artificial Sequence
  Description of Artificial Sequence: Synthetic oligonucleotide
ugcgugagguuaggagcug

SEQ ID NO: 1910173 - RNA, 19 nt, Artificial Sequence
  Description of Artificial Sequence: Synthetic oligonucleotide
cugcgugagguuaggagcu

SEQ ID NO: 1910174 - RNA, 19 nt, Artificial Sequence
  Description of Artificial Sequence: Synthetic oligonucleotide
guuaggagcuguggacuga

SEQ ID NO: 1910175 - RNA, 19 nt, Artificial Sequence
  Description of Artificial Sequence: Synthetic oligonucleotide
cagcggaagggucguucgc

SEQ ID NO: 1910176 - RNA, 19 nt, Artificial Sequence
  Description of Artificial Sequence: Synthetic oligonucleotide
cuggcuuuuggggcuccgc

SEQ ID NO: 1910177 - RNA, 19 nt, Artificial Sequence
  Description of Artificial Sequence: Synthetic oligonucleotide
ugccgugcguggcugcuuu

SEQ ID NO: 1910178 - RNA, 19 nt, Artificial Sequence
  Description of Artificial Sequence: Synthetic oligonucleotide
ucgcggaaggcgcggccac

SEQ ID NO: 1910179 - RNA, 19 nt, Artificial Sequence
  Description of Artificial Sequence: Synthetic oligonucleotide
ucauuccgugucccuccuc

SEQ ID NO: 1910180 - RNA, 19 nt, Artificial Sequence
  Description of Artificial Sequence: Synthetic oligonucleotide
agcggcggccacacugagc

SEQ ID NO: 1910181 - RNA, 19 nt, Artificial Sequence
  Description of Artificial Sequence: Synthetic oligonucleotide
ggaggucaaccgcaggcuc

SEQ ID NO: 1910182 - RNA, 19 nt, Artificial Sequence
  Description of Artificial Sequence: Synthetic oligonucleotide
caccgguguggaugcgccg

SEQ ID NO: 1910183 - RNA, 19 nt, Artificial Sequence
  Description of Artificial Sequence: Synthetic oligonucleotide
gggcgcacgucguacggcc

SEQ ID NO: 1910184 - RNA, 19 nt, Artificial Sequence
  Description of Artificial Sequence: Synthetic oligonucleotide
gggaugcuugggaagacuc

SEQ ID NO: 1910185 - RNA, 19 nt, Artificial Sequence
  Description of Artificial Sequence: Synthetic oligonucleotide
gacucucccagggguuagc

SEQ ID NO: 1910186 - RNA, 19 nt, Artificial Sequence
  Description of Artificial Sequence: Synthetic oligonucleotide
gcuguggacugaaggcacg

SEQ ID NO: 1910187 - RNA, 19 nt, Artificial Sequence
  Description of Artificial Sequence: Synthetic oligonucleotide
acucucccagggguuagcu

SEQ ID NO: 1910188 - RNA, 19 nt, Artificial Sequence
  Description of Artificial Sequence: Synthetic oligonucleotide
ugagcagcacugagcccuu

SEQ ID NO: 1910189 - RNA, 19 nt, Artificial Sequence
  Description of Artificial Sequence: Synthetic oligonucleotide
cucugagguucgugccaag

SEQ ID NO: 1910190 - RNA, 19 nt, Artificial Sequence
  Description of Artificial Sequence: Synthetic oligonucleotide
ugggcgcacgucguacggc

SEQ ID NO: 1910191 - RNA, 19 nt, Artificial Sequence
  Description of Artificial Sequence: Synthetic oligonucleotide
gccagucuggagagcaccg

SEQ ID NO: 1910192 - RNA, 19 nt, Artificial Sequence
  Description of Artificial Sequence: Synthetic oligonucleotide
cuuugaccucaggucucag

SEQ ID NO: 1910193 - RNA, 19 nt, Artificial Sequence
  Description of Artificial Sequence: Synthetic oligonucleotide
ucucggccguguggugucg

SEQ ID NO: 1910194 - RNA, 19 nt, Artificial Sequence
  Description of Artificial Sequence: Synthetic oligonucleotide
augcgaguugcggcagaag

SEQ ID NO: 1910195 - RNA, 19 nt, Artificial Sequence
  Description of Artificial Sequence: Synthetic oligonucleotide
ggaggucggagcucuucac

SEQ ID NO: 1910196 - RNA, 19 nt, Artificial Sequence
  Description of Artificial Sequence: Synthetic oligonucleotide
gggcauagcuuugaccuca

SEQ ID NO: 1910197 - RNA, 19 nt, Artificial Sequence
  Description of Artificial Sequence: Synthetic oligonucleotide
gaccuagcaguagcugcuc

SEQ ID NO: 1910198 - RNA, 19 nt, Artificial Sequence
  Description of Artificial Sequence: Synthetic oligonucleotide
acucuggaugaaccaucuu

SEQ ID NO: 1910199 - RNA, 19 nt, Artificial Sequence
  Description of Artificial Sequence: Synthetic oligonucleotide
gcggaagggucguucgccc

SEQ ID NO: 1910200 - RNA, 19 nt, Artificial Sequence
  Description of Artificial Sequence: Synthetic oligonucleotide
gcguuggugcuugaagagc

SEQ ID NO: 1910201 - RNA, 19 nt, Artificial Sequence
  Description of Artificial Sequence: Synthetic oligonucleotide
cucuucacgaacacuuguu

SEQ ID NO: 1910202 - RNA, 19 nt, Artificial Sequence
  Description of Artificial Sequence: Synthetic oligonucleotide
cacugggcgcacgucguac

SEQ ID NO: 1910203 - RNA, 19 nt, Artificial Sequence
  Description of Artificial Sequence: Synthetic oligonucleotide
gucguucgcccgugugcag

SEQ ID NO: 1910204 - RNA, 19 nt, Artificial Sequence
  Description of Artificial Sequence: Synthetic oligonucleotide
cugccgggccuaagguggc

SEQ ID NO: 1910205 - RNA, 19 nt, Artificial Sequence
  Description of Artificial Sequence: Synthetic oligonucleotide
augcgccgguggcugagca

SEQ ID NO: 1910206 - RNA, 19 nt, Artificial Sequence
  Description of Artificial Sequence: Synthetic oligonucleotide
cucacugcugcugggaccu

SEQ ID NO: 1910207 - RNA, 19 nt, Artificial Sequence
  Description of Artificial Sequence: Synthetic oligonucleotide
ggccagucuggagagcacc

SEQ ID NO: 1910208 - RNA, 19 nt, Artificial Sequence
  Description of Artificial Sequence: Synthetic oligonucleotide
gggccuaagguggccuucg

SEQ ID NO: 1910209 - RNA, 19 nt, Artificial Sequence
  Description of Artificial Sequence: Synthetic oligonucleotide
cugggaugcuugggaagac

SEQ ID NO: 1910210 - RNA, 19 nt, Artificial Sequence
  Description of Artificial Sequence: Synthetic oligonucleotide
auggaggucugggaugcuu

SEQ ID NO: 1910211 - RNA, 19 nt, Artificial Sequence
  Description of Artificial Sequence: Synthetic oligonucleotide
cgcguuggugcuugaagag

SEQ ID NO: 1910212 - RNA, 19 nt, Artificial Sequence
  Description of Artificial Sequence: Synthetic oligonucleotide
cccggggccaggaugucag

SEQ ID NO: 1910213 - RNA, 19 nt, Artificial Sequence
  Description of Artificial Sequence: Synthetic oligonucleotide
ccgcacugggcgcacgucg

SEQ ID NO: 1910214 - RNA, 19 nt, Artificial Sequence
  Description of Artificial Sequence: Synthetic oligonucleotide
ggucguucgcccgugugca

SEQ ID NO: 1910215 - RNA, 19 nt, Artificial Sequence
  Description of Artificial Sequence: Synthetic oligonucleotide
gcucgugcuggaugagaug

SEQ ID NO: 1910216 - RNA, 19 nt, Artificial Sequence
  Description of Artificial Sequence: Synthetic oligonucleotide
caccgccuagcucauccca

SEQ ID NO: 1910217 - RNA, 19 nt, Artificial Sequence
  Description of Artificial Sequence: Synthetic oligonucleotide
ccgcaggggaggucaaccg

SEQ ID NO: 1910218 - RNA, 19 nt, Artificial Sequence
  Description of Artificial Sequence: Synthetic oligonucleotide
guucgugccaagccccgcu

SEQ ID NO: 1910219 - RNA, 19 nt, Artificial Sequence
  Description of Artificial Sequence: Synthetic oligonucleotide
gcuugaggaggucggagcu

SEQ ID NO: 1910220 - RNA, 19 nt, Artificial Sequence
  Description of Artificial Sequence: Synthetic oligonucleotide
ggccuaagguggccuucgg

SEQ ID NO: 1910221 - RNA, 19 nt, Artificial Sequence
  Description of Artificial Sequence: Synthetic oligonucleotide
gaaggcgcggccacacugu

SEQ ID NO: 1910222 - RNA, 19 nt, Artificial Sequence
  Description of Artificial Sequence: Synthetic oligonucleotide
ugcgcaccaugaaggccuu

SEQ ID NO: 1910223 - RNA, 19 nt, Artificial Sequence
  Description of Artificial Sequence: Synthetic oligonucleotide
cgaagagccuugacugaag

SEQ ID NO: 1910224 - RNA, 19 nt, Artificial Sequence
  Description of Artificial Sequence: Synthetic oligonucleotide
ucccggggccaggauguca

SEQ ID NO: 1910225 - RNA, 19 nt, Artificial Sequence
  Description of Artificial Sequence: Synthetic oligonucleotide
gaaggccuuuacucuggau

SEQ ID NO: 1910226 - RNA, 19 nt, Artificial Sequence
  Description of Artificial Sequence: Synthetic oligonucleotide
gaccuggcuugggagugca

SEQ ID NO: 1910227 - RNA, 19 nt, Artificial Sequence
  Description of Artificial Sequence: Synthetic oligonucleotide
cucccagggguuagcugca

SEQ ID NO: 1910228 - RNA, 19 nt, Artificial Sequence
  Description of Artificial Sequence: Synthetic oligonucleotide
aggcacggccacacugcgg

SEQ ID NO: 1910229 - RNA, 19 nt, Artificial Sequence
  Description of Artificial Sequence: Synthetic oligonucleotide
ccgugucccuccuccaccc

SEQ ID NO: 1910230 - RNA, 19 nt, Artificial Sequence
  Description of Artificial Sequence: Synthetic oligonucleotide
guggugucgagggcauuga

SEQ ID NO: 1910231 - RNA, 19 nt, Artificial Sequence
  Description of Artificial Sequence: Synthetic oligonucleotide
ggucucucugagguucgug

SEQ ID NO: 1910232 - RNA, 19 nt, Artificial Sequence
  Description of Artificial Sequence: Synthetic oligonucleotide
ggagugcaugccaccccgg

SEQ ID NO: 1910233 - RNA, 19 nt, Artificial Sequence
  Description of Artificial Sequence: Synthetic oligonucleotide
accgccuagcucaucccau

SEQ ID NO: 1910234 - RNA, 19 nt, Artificial Sequence
  Description of Artificial Sequence: Synthetic oligonucleotide
guagcugcucccaguagau

SEQ ID NO: 1910235 - RNA, 19 nt, Artificial Sequence
  Description of Artificial Sequence: Synthetic oligonucleotide
gcucuucacgaacacuugu

SEQ ID NO: 1910236 - RNA, 19 nt, Artificial Sequence
  Description of Artificial Sequence: Synthetic oligonucleotide
cugggaccuagcaguagcu

SEQ ID NO: 1910237 - RNA, 19 nt, Artificial Sequence
  Description of Artificial Sequence: Synthetic oligonucleotide
ggcauagcuuugaccucag

SEQ ID NO: 1910238 - RNA, 19 nt, Artificial Sequence
  Description of Artificial Sequence: Synthetic oligonucleotide
ccguguggagccucuggug

SEQ ID NO: 1910239 - RNA, 19 nt, Artificial Sequence
  Description of Artificial Sequence: Synthetic oligonucleotide
cgcaccaugaaggccuugc

SEQ ID NO: 1910240 - RNA, 19 nt, Artificial Sequence
  Description of Artificial Sequence: Synthetic oligonucleotide
gcagggcgcucgcggaagg

SEQ ID NO: 1910241 - RNA, 19 nt, Artificial Sequence
  Description of Artificial Sequence: Synthetic oligonucleotide
ggcggccacacugagcgca

SEQ ID NO: 1910242 - RNA, 19 nt, Artificial Sequence
  Description of Artificial Sequence: Synthetic oligonucleotide
ugcacgcguuggugcuuga

SEQ ID NO: 1910243 - RNA, 19 nt, Artificial Sequence
  Description of Artificial Sequence: Synthetic oligonucleotide
gacugcugccgggccuaag

SEQ ID NO: 1910244 - RNA, 19 nt, Artificial Sequence
  Description of Artificial Sequence: Synthetic oligonucleotide
cugcuuucccggggccagg

SEQ ID NO: 1910245 - RNA, 19 nt, Artificial Sequence
  Description of Artificial Sequence: Synthetic oligonucleotide
cgugagguuaggagcugug

SEQ ID NO: 1910246 - RNA, 19 nt, Artificial Sequence
  Description of Artificial Sequence: Synthetic oligonucleotide
ggccuucgggaagugugcc

SEQ ID NO: 1910247 - RNA, 19 nt, Artificial Sequence
  Description of Artificial Sequence: Synthetic oligonucleotide
ggucggagcucuucacgaa

SEQ ID NO: 1910248 - RNA, 19 nt, Artificial Sequence
  Description of Artificial Sequence: Synthetic oligonucleotide
ccagucuggagagcaccgc

SEQ ID NO: 1910249 - RNA, 19 nt, Artificial Sequence
  Description of Artificial Sequence: Synthetic oligonucleotide
cagggcgcucgcggaaggc

SEQ ID NO: 1910250 - RNA, 19 nt, Artificial Sequence
  Description of Artificial Sequence: Synthetic oligonucleotide
gcaccgccuagcucauccc

SEQ ID NO: 1910251 - RNA, 19 nt, Artificial Sequence
  Description of Artificial Sequence: Synthetic oligonucleotide
cuccgcugccgugcguggc

SEQ ID NO: 1910252 - RNA, 19 nt, Artificial Sequence
  Description of Artificial Sequence: Synthetic oligonucleotide
cucgcggaaggcgcggcca

SEQ ID NO: 1910253 - RNA, 19 nt, Artificial Sequence
  Description of Artificial Sequence: Synthetic oligonucleotide
gcuccgcugccgugcgugg

SEQ ID NO: 1910254 - RNA, 19 nt, Artificial Sequence
  Description of Artificial Sequence: Synthetic oligonucleotide
cgcaggggaggucaaccgc

SEQ ID NO: 1910255 - RNA, 19 nt, Artificial Sequence
  Description of Artificial Sequence: Synthetic oligonucleotide
ugcgugcgcucgugcugga

SEQ ID NO: 1910256 - RNA, 19 nt, Artificial Sequence
  Description of Artificial Sequence: Synthetic oligonucleotide
ccacacugagcgcagacgu

SEQ ID NO: 1910257 - RNA, 19 nt, Artificial Sequence
  Description of Artificial Sequence: Synthetic oligonucleotide
ggaugcgccgguggcugag

SEQ ID NO: 1910258 - RNA, 19 nt, Artificial Sequence
  Description of Artificial Sequence: Synthetic oligonucleotide
cuucucggccguguggugu

SEQ ID NO: 1910259 - RNA, 19 nt, Artificial Sequence
  Description of Artificial Sequence: Synthetic oligonucleotide
gcacugagcccuuggcaaa

SEQ ID NO: 1910260 - RNA, 19 nt, Artificial Sequence
  Description of Artificial Sequence: Synthetic oligonucleotide
cgaacacuuguugcaugcc

SEQ ID NO: 1910261 - RNA, 19 nt, Artificial Sequence
  Description of Artificial Sequence: Synthetic oligonucleotide
ggcgcucgcggaaggcgcg

SEQ ID NO: 1910262 - RNA, 19 nt, Artificial Sequence
  Description of Artificial Sequence: Synthetic oligonucleotide
ggcagggcgcucgcggaag

SEQ ID NO: 1910263 - RNA, 19 nt, Artificial Sequence
  Description of Artificial Sequence: Synthetic oligonucleotide
gguucgugccaagccccgc

SEQ ID NO: 1910264 - RNA, 19 nt, Artificial Sequence
  Description of Artificial Sequence: Synthetic oligonucleotide
gcuucucggccguguggug

SEQ ID NO: 1910265 - RNA, 19 nt, Artificial Sequence
  Description of Artificial Sequence: Synthetic oligonucleotide
guucgcccgugugcagcag

SEQ ID NO: 1910266 - RNA, 19 nt, Artificial Sequence
  Description of Artificial Sequence: Synthetic oligonucleotide
cagcuagcuuugggacugc

SEQ ID NO: 1910267 - RNA, 19 nt, Artificial Sequence
  Description of Artificial Sequence: Synthetic oligonucleotide
gccuugacugaaggcugcc

SEQ ID NO: 1910268 - RNA, 19 nt, Artificial Sequence
  Description of Artificial Sequence: Synthetic oligonucleotide
ggcgcacgucguacggccg

SEQ ID NO: 1910269 - RNA, 19 nt, Artificial Sequence
  Description of Artificial Sequence: Synthetic oligonucleotide
gccguguggugucgagggc

SEQ ID NO: 1910270 - RNA, 19 nt, Artificial Sequence
  Description of Artificial Sequence: Synthetic oligonucleotide
caagccccgcucauuccgu

SEQ ID NO: 1910271 - RNA, 19 nt, Artificial Sequence
  Description of Artificial Sequence: Synthetic oligonucleotide
ccgugcguggcugcuuucc

SEQ ID NO: 1910272 - RNA, 19 nt, Artificial Sequence
  Description of Artificial Sequence: Synthetic oligonucleotide
ggaugcuugggaagacucu

SEQ ID NO: 1910273 - RNA, 19 nt, Artificial Sequence
  Description of Artificial Sequence: Synthetic oligonucleotide
cccugcauucaaaagguuu

SEQ ID NO: 1910274 - RNA, 19 nt, Artificial Sequence
  Description of Artificial Sequence: Synthetic oligonucleotide
gcucgcggaaggcgcggcc

SEQ ID NO: 1910275 - RNA, 19 nt, Artificial Sequence
  Description of Artificial Sequence: Synthetic oligonucleotide
cccgcucauuccguguccc

SEQ ID NO: 1910276 - RNA, 19 nt, Artificial Sequence
  Description of Artificial Sequence: Synthetic oligonucleotide
gccccgcucauuccguguc

SEQ ID NO: 1910277 - RNA, 19 nt, Artificial Sequence
  Description of Artificial Sequence: Synthetic oligonucleotide
cucauuccgugucccuccu

SEQ ID NO: 1910278 - RNA, 19 nt, Artificial Sequence
  Description of Artificial Sequence: Synthetic oligonucleotide
guaugagggcagggcgcuc

SEQ ID NO: 1910279 - RNA, 19 nt, Artificial Sequence
  Description of Artificial Sequence: Synthetic oligonucleotide
gucguacggccguucuccu

SEQ ID NO: 1910280 - RNA, 19 nt, Artificial Sequence
  Description of Artificial Sequence: Synthetic oligonucleotide
cacgucguacggccguucu

SEQ ID NO: 1910281 - RNA, 19 nt, Artificial Sequence
  Description of Artificial Sequence: Synthetic oligonucleotide
cccgcguggaucuugcggu

SEQ ID NO: 1910282 - RNA, 19 nt, Artificial Sequence
  Description of Artificial Sequence: Synthetic oligonucleotide
cugcugccgggccuaaggu

SEQ ID NO: 1910283 - RNA, 19 nt, Artificial Sequence
  Description of Artificial Sequence: Synthetic oligonucleotide
cugccccgcagagggagca

SEQ ID NO: 1910284 - RNA, 19 nt, Artificial Sequence
  Description of Artificial Sequence: Synthetic oligonucleotide
gaagccccgcaggggaggu

SEQ ID NO: 1910285 - RNA, 19 nt, Artificial Sequence
  Description of Artificial Sequence: Synthetic oligonucleotide
ccccgcucauuccgugucc

SEQ ID NO: 1910286 - RNA, 19 nt, Artificial Sequence
  Description of Artificial Sequence: Synthetic oligonucleotide
ccguguggugucgagggca

SEQ ID NO: 1910287 - RNA, 19 nt, Artificial Sequence
  Description of Artificial Sequence: Synthetic oligonucleotide
ccccagagaccuggcuugg

SEQ ID NO: 1910288 - RNA, 19 nt, Artificial Sequence
  Description of Artificial Sequence: Synthetic oligonucleotide
aggcgcggccacacugugu

SEQ ID NO: 1910289 - RNA, 19 nt, Artificial Sequence
  Description of Artificial Sequence: Synthetic oligonucleotide
ccgcccgcguggaucuugc

SEQ ID NO: 1910290 - RNA, 19 nt, Artificial Sequence
  Description of Artificial Sequence: Synthetic oligonucleotide
gcgggcaggagaaaggcuu

SEQ ID NO: 1910291 - RNA, 19 nt, Artificial Sequence
  Description of Artificial Sequence: Synthetic oligonucleotide
ccgcguggaucuugcggug

SEQ ID NO: 1910292 - RNA, 19 nt, Artificial Sequence
  Description of Artificial Sequence: Synthetic oligonucleotide
guccccgcagcggaagggu

SEQ ID NO: 1910293 - RNA, 19 nt, Artificial Sequence
  Description of Artificial Sequence: Synthetic oligonucleotide
ggccuuuacucuggaugaa

SEQ ID NO: 1910294 - RNA, 19 nt, Artificial Sequence
  Description of Artificial Sequence: Synthetic oligonucleotide
ccgcaggcucacaguugcc

SEQ ID NO: 1910295 - RNA, 19 nt, Artificial Sequence
  Description of Artificial Sequence: Synthetic oligonucleotide
acacugcgggcaggagaaa

SEQ ID NO: 1910296 - RNA, 19 nt, Artificial Sequence
  Description of Artificial Sequence: Synthetic oligonucleotide
ugccaccccggggccucug

SEQ ID NO: 1910297 - RNA, 19 nt, Artificial Sequence
  Description of Artificial Sequence: Synthetic oligonucleotide
gcguggaucuugcggugcu

SEQ ID NO: 1910298 - RNA, 19 nt, Artificial Sequence
  Description of Artificial Sequence: Synthetic oligonucleotide
cgcguggaucuugcggugc

SEQ ID NO: 1910299 - RNA, 19 nt, Artificial Sequence
  Description of Artificial Sequence: Synthetic oligonucleotide
gccuucgggaagugugccu

SEQ ID NO: 1910300 - RNA, 19 nt, Artificial Sequence
  Description of Artificial Sequence: Synthetic oligonucleotide
gcugccccgcagagggagc

SEQ ID NO: 1910301 - RNA, 19 nt, Artificial Sequence
  Description of Artificial Sequence: Synthetic oligonucleotide
agccguggcugaaggccuu

SEQ ID NO: 1910302 - RNA, 19 nt, Artificial Sequence
  Description of Artificial Sequence: Synthetic oligonucleotide
gcgcucgcggaaggcgcgg

SEQ ID NO: 1910303 - RNA, 19 nt, Artificial Sequence
  Description of Artificial Sequence: Synthetic oligonucleotide
cgcagcggaagggucguuc

SEQ ID NO: 1910304 - RNA, 19 nt, Artificial Sequence
  Description of Artificial Sequence: Synthetic oligonucleotide
gcgcucgugcuggaugaga

SEQ ID NO: 1910305 - RNA, 19 nt, Artificial Sequence
  Description of Artificial Sequence: Synthetic oligonucleotide
gcgcggccacacugugugc

SEQ ID NO: 1910306 - RNA, 19 nt, Artificial Sequence
  Description of Artificial Sequence: Synthetic oligonucleotide
cguucgcccgugugcagca

SEQ ID NO: 1910307 - RNA, 19 nt, Artificial Sequence
  Description of Artificial Sequence: Synthetic oligonucleotide
gggcagggcgcucgcggaa

SEQ ID NO: 1910308 - RNA, 19 nt, Artificial Sequence
  Description of Artificial Sequence: Synthetic oligonucleotide
cggccguguggugucgagg

SEQ ID NO: 1910309 - RNA, 19 nt, Artificial Sequence
  Description of Artificial Sequence: Synthetic oligonucleotide
gccuagcucaucccauauu

SEQ ID NO: 1910310 - RNA, 19 nt, Artificial Sequence
  Description of Artificial Sequence: Synthetic oligonucleotide
ccucaggucucagcuagcu

SEQ ID NO: 1910311 - RNA, 19 nt, Artificial Sequence
  Description of Artificial Sequence: Synthetic oligonucleotide
cguggaucuugcggugcug

SEQ ID NO: 1910312 - RNA, 19 nt, Artificial Sequence
  Description of Artificial Sequence: Synthetic oligonucleotide
cccggggccucugcagggc

SEQ ID NO: 1910313 - RNA, 19 nt, Artificial Sequence
  Description of Artificial Sequence: Synthetic oligonucleotide
caguugccucacugcugcu

SEQ ID NO: 1910314 - RNA, 19 nt, Artificial Sequence
  Description of Artificial Sequence: Synthetic oligonucleotide
gcgcacgucguacggccgu

SEQ ID NO: 1910315 - RNA, 19 nt, Artificial Sequence
  Description of Artificial Sequence: Synthetic oligonucleotide
gcacgucguacggccguuc

SEQ ID NO: 1910316 - RNA, 19 nt, Artificial Sequence
  Description of Artificial Sequence: Synthetic oligonucleotide
ccgccuagcucaucccaua

SEQ ID NO: 1910317 - RNA, 19 nt, Artificial Sequence
  Description of Artificial Sequence: Synthetic oligonucleotide
gcacugggcgcacgucgua

SEQ ID NO: 1910318 - RNA, 19 nt, Artificial Sequence
  Description of Artificial Sequence: Synthetic oligonucleotide
gccgugcguggcugcuuuc

SEQ ID NO: 1910319 - RNA, 19 nt, Artificial Sequence
  Description of Artificial Sequence: Synthetic oligonucleotide
ggucaaccgcaggcucaca

SEQ ID NO: 1910320 - RNA, 19 nt, Artificial Sequence
  Description of Artificial Sequence: Synthetic oligonucleotide
ccuucgggaagugugccuu

SEQ ID NO: 1910321 - RNA, 19 nt, Artificial Sequence
  Description of Artificial Sequence: Synthetic oligonucleotide
gcacgcguuggugcuugaa

SEQ ID NO: 1910322 - RNA, 19 nt, Artificial Sequence
  Description of Artificial Sequence: Synthetic oligonucleotide
ccgguggcugagcagcacu

SEQ ID NO: 1910323 - RNA, 19 nt, Artificial Sequence
  Description of Artificial Sequence: Synthetic oligonucleotide
ccgcagagggagcaggcau

SEQ ID NO: 1910324 - RNA, 19 nt, Artificial Sequence
  Description of Artificial Sequence: Synthetic oligonucleotide
cauggaggucugggaugcu

SEQ ID NO: 1910325 - RNA, 19 nt, Artificial Sequence
  Description of Artificial Sequence: Synthetic oligonucleotide
cgcucgugcuggaugagau

SEQ ID NO: 1910326 - RNA, 19 nt, Artificial Sequence
  Description of Artificial Sequence: Synthetic oligonucleotide
cccgcccgcguggaucuug

SEQ ID NO: 1910327 - RNA, 19 nt, Artificial Sequence
  Description of Artificial Sequence: Synthetic oligonucleotide
gccgcacugggcgcacguc

SEQ ID NO: 1910328 - RNA, 19 nt, Artificial Sequence
  Description of Artificial Sequence: Synthetic oligonucleotide
gugccaagccccgcucauu

SEQ ID NO: 1910329 - RNA, 19 nt, Artificial Sequence
  Description of Artificial Sequence: Synthetic oligonucleotide
cgcccgcguggaucuugcg

SEQ ID NO: 1910330 - RNA, 19 nt, Artificial Sequence
  Description of Artificial Sequence: Synthetic oligonucleotide
ccgcccgcccgcguggauc

SEQ ID NO: 1910331 - RNA, 19 nt, Artificial Sequence
  Description of Artificial Sequence: Synthetic oligonucleotide
gcgcaccaugaaggccuug

SEQ ID NO: 1910332 - RNA, 19 nt, Artificial Sequence
  Description of Artificial Sequence: Synthetic oligonucleotide
gcugccgugcguggcugcu

SEQ ID NO: 1910333 - RNA, 19 nt, Artificial Sequence
  Description of Artificial Sequence: Synthetic oligonucleotide
cgggccuaagguggccuuc

SEQ ID NO: 1910334 - RNA, 19 nt, Artificial Sequence
  Description of Artificial Sequence: Synthetic oligonucleotide
cgcagacguagggccgccc

SEQ ID NO: 1910335 - RNA, 19 nt, Artificial Sequence
  Description of Artificial Sequence: Synthetic oligonucleotide
cagaagcggcggccacacu

SEQ ID NO: 1910336 - RNA, 19 nt, Artificial Sequence
  Description of Artificial Sequence: Synthetic oligonucleotide
ccgcugccgugcguggcug

SEQ ID NO: 1910337 - RNA, 19 nt, Artificial Sequence
  Description of Artificial Sequence: Synthetic oligonucleotide
cguguggugucgagggcau

SEQ ID NO: 1910338 - RNA, 19 nt, Artificial Sequence
  Description of Artificial Sequence: Synthetic oligonucleotide
gcuuucccggggccaggau

SEQ ID NO: 1910339 - RNA, 19 nt, Artificial Sequence
  Description of Artificial Sequence: Synthetic oligonucleotide
gccgggccuaagguggccu

SEQ ID NO: 1910340 - RNA, 19 nt, Artificial Sequence
  Description of Artificial Sequence: Synthetic oligonucleotide
gggucucucugagguucgu

SEQ ID NO: 1910341 - RNA, 19 nt, Artificial Sequence
  Description of Artificial Sequence: Synthetic oligonucleotide
cgcacugggcgcacgucgu

SEQ ID NO: 1910342 - RNA, 19 nt, Artificial Sequence
  Description of Artificial Sequence: Synthetic oligonucleotide
cgcucgcggaaggcgcggc

SEQ ID NO: 1910343 - RNA, 19 nt, Artificial Sequence
  Description of Artificial Sequence: Synthetic oligonucleotide
cggcggccacacugagcgc

SEQ ID NO: 1910344 - RNA, 19 nt, Artificial Sequence
  Description of Artificial Sequence: Synthetic oligonucleotide
guguggugucgagggcauu

SEQ ID NO: 1910345 - RNA, 19 nt, Artificial Sequence
  Description of Artificial Sequence: Synthetic oligonucleotide
ccgcucauuccgugucccu

SEQ ID NO: 1910346 - RNA, 19 nt, Artificial Sequence
  Description of Artificial Sequence: Synthetic oligonucleotide
cgccuagcucaucccauau

SEQ ID NO: 1910347 - RNA, 19 nt, Artificial Sequence
  Description of Artificial Sequence: Synthetic oligonucleotide
cgugccaagccccgcucau

SEQ ID NO: 1910348 - RNA, 19 nt, Artificial Sequence
  Description of Artificial Sequence: Synthetic oligonucleotide
cugccgugcguggcugcuu

SEQ ID NO: 1910349 - RNA, 19 nt, Artificial Sequence
  Description of Artificial Sequence: Synthetic oligonucleotide
cgcccgcccgcguggaucu

SEQ ID NO: 1910350 - RNA, 19 nt, Artificial Sequence
  Description of Artificial Sequence: Synthetic oligonucleotide
ccgggccuaagguggccuu

SEQ ID NO: 1910351 - RNA, 19 nt, Artificial Sequence
  Description of Artificial Sequence: Synthetic oligonucleotide
gggcuccgcugccgugcgu

SEQ ID NO: 1910352 - RNA, 19 nt, Artificial Sequence
  Description of Artificial Sequence: Synthetic oligonucleotide
gcgugcgcucgugcuggau

SEQ ID NO: 1910353 - RNA, 19 nt, Artificial Sequence
  Description of Artificial Sequence: Synthetic oligonucleotide
cggaaggcgcggccacacu

SEQ ID NO: 1910354 - RNA, 19 nt, Artificial Sequence
  Description of Artificial Sequence: Synthetic oligonucleotide
gccgcccgcccgcguggau

SEQ ID NO: 1910355 - RNA, 19 nt, Artificial Sequence
  Description of Artificial Sequence: Synthetic oligonucleotide
cgcacgucguacggccguu

SEQ ID NO: 1910356 - RNA, 19 nt, Artificial Sequence
  Description of Artificial Sequence: Synthetic oligonucleotide
ccgcagcggaagggucguu

SEQ ID NO: 1910357 - RNA, 19 nt, Artificial Sequence
  Description of Artificial Sequence: Synthetic oligonucleotide
gcccgcccgcguggaucuu

SEQ ID NO: 1910358 - RNA, 19 nt, Artificial Sequence
  Description of Artificial Sequence: Synthetic oligonucleotide
aauuuaaugaugcucaaca

SEQ ID NO: 1910359 - RNA, 19 nt, Artificial Sequence
  Description of Artificial Sequence: Synthetic oligonucleotide
aaaucaaccaaucuagaag

SEQ ID NO: 1910360 - RNA, 19 nt, Artificial Sequence
  Description of Artificial Sequence: Synthetic oligonucleotide
uguuuuauuagaauuagcu

SEQ ID NO: 1910361 - RNA, 19 nt, Artificial Sequence
  Description of Artificial Sequence: Synthetic oligonucleotide
uguacuaucuagaacauca

SEQ ID NO: 1910362 - RNA, 19 nt, Artificial Sequence
  Description of Artificial Sequence: Synthetic oligonucleotide
uuaaugaugcucaacagug

SEQ ID NO: 1910363 - RNA, 19 nt, Artificial Sequence
  Description of Artificial Sequence: Synthetic oligonucleotide
uacacaaccaagaugagug

SEQ ID NO: 1910364 - RNA, 19 nt, Artificial Sequence
  Description of Artificial Sequence: Synthetic oligonucleotide
auaucagacaacuugaucu

SEQ ID NO: 1910365 - RNA, 19 nt, Artificial Sequence
  Description of Artificial Sequence: Synthetic oligonucleotide
aagacuuuguacuaucuag

SEQ ID NO: 1910366 - RNA, 19 nt, Artificial Sequence
  Description of Artificial Sequence: Synthetic oligonucleotide
uggaauaucagacaacuug

SEQ ID NO: 1910367 - RNA, 19 nt, Artificial Sequence
  Description of Artificial Sequence: Synthetic oligonucleotide
cuucugauggacaagacgg

SEQ ID NO: 1910368 - RNA, 19 nt, Artificial Sequence
  Description of Artificial Sequence: Synthetic oligonucleotide
aauaucagacaacuugauc

SEQ ID NO: 1910369 - RNA, 19 nt, Artificial Sequence
  Description of Artificial Sequence: Synthetic oligonucleotide
ugacuaaauuuaaugaugc

SEQ ID NO: 1910370 - RNA, 19 nt, Artificial Sequence
  Description of Artificial Sequence: Synthetic oligonucleotide
uaucuagaacaucagcgcg

SEQ ID NO: 1910371 - RNA, 19 nt, Artificial Sequence
  Description of Artificial Sequence: Synthetic oligonucleotide
uaagagugaauuaaauuac

SEQ ID NO: 1910372 - RNA, 19 nt, Artificial Sequence
  Description of Artificial Sequence: Synthetic oligonucleotide
agaggaacgaccuuccgcg

SEQ ID NO: 1910373 - RNA, 19 nt, Artificial Sequence
  Description of Artificial Sequence: Synthetic oligonucleotide
acaacaacuacaucaucac

SEQ ID NO: 1910374 - RNA, 19 nt, Artificial Sequence
  Description of Artificial Sequence: Synthetic oligonucleotide
aaguacacagggcuuacuc

SEQ ID NO: 1910375 - RNA, 19 nt, Artificial Sequence
  Description of Artificial Sequence: Synthetic oligonucleotide
auuacgauaaugcuugaca

SEQ ID NO: 1910376 - RNA, 19 nt, Artificial Sequence
  Description of Artificial Sequence: Synthetic oligonucleotide
uguaugggaauaacgaaca

SEQ ID NO: 1910377 - RNA, 19 nt, Artificial Sequence
  Description of Artificial Sequence: Synthetic oligonucleotide
acggaaagaagccuaggcc

SEQ ID NO: 1910378 - RNA, 19 nt, Artificial Sequence
  Description of Artificial Sequence: Synthetic oligonucleotide
aacauugaggcccaccgug

SEQ ID NO: 1910379 - RNA, 19 nt, Artificial Sequence
  Description of Artificial Sequence: Synthetic oligonucleotide
aauaacgaacagaagcagg

SEQ ID NO: 1910380 - RNA, 19 nt, Artificial Sequence
  Description of Artificial Sequence: Synthetic oligonucleotide
aaauuuaaugaugcucaac

SEQ ID NO: 1910381 - RNA, 19 nt, Artificial Sequence
  Description of Artificial Sequence: Synthetic oligonucleotide
ugucuaacccacaacaacu

SEQ ID NO: 1910382 - RNA, 19 nt, Artificial Sequence
  Description of Artificial Sequence: Synthetic oligonucleotide
auaacauggcggcagcggc

SEQ ID NO: 1910383 - RNA, 19 nt, Artificial Sequence
  Description of Artificial Sequence: Synthetic oligonucleotide
agcuauaaaagacauugca

SEQ ID NO: 1910384 - RNA, 19 nt, Artificial Sequence
  Description of Artificial Sequence: Synthetic oligonucleotide
cuaucuagaacaucagcgc

SEQ ID NO: 1910385 - RNA, 19 nt, Artificial Sequence
  Description of Artificial Sequence: Synthetic oligonucleotide
uucuguggcgcacaaacag

SEQ ID NO: 1910386 - RNA, 19 nt, Artificial Sequence
  Description of Artificial Sequence: Synthetic oligonucleotide
auaugcaacacccacagua

SEQ ID NO: 1910387 - RNA, 19 nt, Artificial Sequence
  Description of Artificial Sequence: Synthetic oligonucleotide
uuuauuagaauuagcuaua

SEQ ID NO: 1910388 - RNA, 19 nt, Artificial Sequence
  Description of Artificial Sequence: Synthetic oligonucleotide
agaggcaucauagugugac

SEQ ID NO: 1910389 - RNA, 19 nt, Artificial Sequence
  Description of Artificial Sequence: Synthetic oligonucleotide
ucuuaacucgcucuaaauc

SEQ ID NO: 1910390 - RNA, 19 nt, Artificial Sequence
  Description of Artificial Sequence: Synthetic oligonucleotide
uuacucucaacucuucuga

SEQ ID NO: 1910391 - RNA, 19 nt, Artificial Sequence
  Description of Artificial Sequence: Synthetic oligonucleotide
cuuaacucgcucuaaauca

SEQ ID NO: 1910392 - RNA, 19 nt, Artificial Sequence
  Description of Artificial Sequence: Synthetic oligonucleotide
aaucuguaauguuuuauua

SEQ ID NO: 1910393 - RNA, 19 nt, Artificial Sequence
  Description of Artificial Sequence: Synthetic oligonucleotide
uagaacaucagcgcggcgg

SEQ ID NO: 1910394 - RNA, 19 nt, Artificial Sequence
  Description of Artificial Sequence: Synthetic oligonucleotide
aagucgggcaccuugacau

SEQ ID NO: 1910395 - RNA, 19 nt, Artificial Sequence
  Description of Artificial Sequence: Synthetic oligonucleotide
aucauagugugacccaugg

SEQ ID NO: 1910396 - RNA, 19 nt, Artificial Sequence
  Description of Artificial Sequence: Synthetic oligonucleotide
ucagcagacgcgcucaugc

SEQ ID NO: 1910397 - RNA, 19 nt, Artificial Sequence
  Description of Artificial Sequence: Synthetic oligonucleotide
uuaaauuacuucacauuaa

SEQ ID NO: 1910398 - RNA, 19 nt, Artificial Sequence
  Description of Artificial Sequence: Synthetic oligonucleotide
guuaucagguaagagaagc

SEQ ID NO: 1910399 - RNA, 19 nt, Artificial Sequence
  Description of Artificial Sequence: Synthetic oligonucleotide
uuaucagguaagagaagcc

SEQ ID NO: 1910400 - RNA, 19 nt, Artificial Sequence
  Description of Artificial Sequence: Synthetic oligonucleotide
uuacgauaaugcuugacaa

SEQ ID NO: 1910401 - RNA, 19 nt, Artificial Sequence
  Description of Artificial Sequence: Synthetic oligonucleotide
cauagugugacccauggca

SEQ ID NO: 1910402 - RNA, 19 nt, Artificial Sequence
  Description of Artificial Sequence: Synthetic oligonucleotide
caucuguaugggaauaacg

SEQ ID NO: 1910403 - RNA, 19 nt, Artificial Sequence
  Description of Artificial Sequence: Synthetic oligonucleotide
cuucacguucacaacaggc

SEQ ID NO: 1910404 - RNA, 19 nt, Artificial Sequence
  Description of Artificial Sequence: Synthetic oligonucleotide
cuguaugggaauaacgaac

SEQ ID NO: 1910405 - RNA, 19 nt, Artificial Sequence
  Description of Artificial Sequence: Synthetic oligonucleotide
agacaacuugaucucaauc

SEQ ID NO: 1910406 - RNA, 19 nt, Artificial Sequence
  Description of Artificial Sequence: Synthetic oligonucleotide
aaccaagaugagugcagac

SEQ ID NO: 1910407 - RNA, 19 nt, Artificial Sequence
  Description of Artificial Sequence: Synthetic oligonucleotide
uugccucuccauuugaaag

SEQ ID NO: 1910408 - RNA, 19 nt, Artificial Sequence
  Description of Artificial Sequence: Synthetic oligonucleotide
caccuugacaucuguaugg

SEQ ID NO: 1910409 - RNA, 19 nt, Artificial Sequence
  Description of Artificial Sequence: Synthetic oligonucleotide
aaccaaucuagaaguacac

SEQ ID NO: 1910410 - RNA, 19 nt, Artificial Sequence
  Description of Artificial Sequence: Synthetic oligonucleotide
aauggguacacaaccaaga

SEQ ID NO: 1910411 - RNA, 19 nt, Artificial Sequence
  Description of Artificial Sequence: Synthetic oligonucleotide
gaauuagcuauaaaagaca

SEQ ID NO: 1910412 - RNA, 19 nt, Artificial Sequence
  Description of Artificial Sequence: Synthetic oligonucleotide
uaacccacaacaacuacau

SEQ ID NO: 1910413 - RNA, 19 nt, Artificial Sequence
  Description of Artificial Sequence: Synthetic oligonucleotide
uuucuagccucacugcucu

SEQ ID NO: 1910414 - RNA, 19 nt, Artificial Sequence
  Description of Artificial Sequence: Synthetic oligonucleotide
aagucugugacuaaauuua

SEQ ID NO: 1910415 - RNA, 19 nt, Artificial Sequence
  Description of Artificial Sequence: Synthetic oligonucleotide
gaaacaaacugggugacca

SEQ ID NO: 1910416 - RNA, 19 nt, Artificial Sequence
  Description of Artificial Sequence: Synthetic oligonucleotide
uuuagaagacuuuguacua

SEQ ID NO: 1910417 - RNA, 19 nt, Artificial Sequence
  Description of Artificial Sequence: Synthetic oligonucleotide
gaauaacgaacagaagcag

SEQ ID NO: 1910418 - RNA, 19 nt, Artificial Sequence
  Description of Artificial Sequence: Synthetic oligonucleotide
ggcuuuauuacgauaaugc

SEQ ID NO: 1910419 - RNA, 19 nt, Artificial Sequence
  Description of Artificial Sequence: Synthetic oligonucleotide
ucuguaugggaauaacgaa

SEQ ID NO: 1910420 - RNA, 19 nt, Artificial Sequence
  Description of Artificial Sequence: Synthetic oligonucleotide
agccuggccacucagcgac

SEQ ID NO: 1910421 - RNA, 19 nt, Artificial Sequence
  Description of Artificial Sequence: Synthetic oligonucleotide
ccaaucuagaaguacacag

SEQ ID NO: 1910422 - RNA, 19 nt, Artificial Sequence
  Description of Artificial Sequence: Synthetic oligonucleotide
uaaaagacauugcaccuuu

SEQ ID NO: 1910423 - RNA, 19 nt, Artificial Sequence
  Description of Artificial Sequence: Synthetic oligonucleotide
aggcaucauagugugaccc

SEQ ID NO: 1910424 - RNA, 19 nt, Artificial Sequence
  Description of Artificial Sequence: Synthetic oligonucleotide
ucgcucuaaaucaugcugu

SEQ ID NO: 1910425 - RNA, 19 nt, Artificial Sequence
  Description of Artificial Sequence: Synthetic oligonucleotide
ucaacucuucugauggaca

SEQ ID NO: 1910426 - RNA, 19 nt, Artificial Sequence
  Description of Artificial Sequence: Synthetic oligonucleotide
aacagagguuugccucucc

SEQ ID NO: 1910427 - RNA, 19 nt, Artificial Sequence
  Description of Artificial Sequence: Synthetic oligonucleotide
cucuaaaucaugcugugga

SEQ ID NO: 1910428 - RNA, 19 nt, Artificial Sequence
  Description of Artificial Sequence: Synthetic oligonucleotide
ugggcaauaauagccacca

SEQ ID NO: 1910429 - RNA, 19 nt, Artificial Sequence
  Description of Artificial Sequence: Synthetic oligonucleotide
cugugacuaaauuuaauga

SEQ ID NO: 1910430 - RNA, 19 nt, Artificial Sequence
  Description of Artificial Sequence: Synthetic oligonucleotide
uucgacauggccaguacau

SEQ ID NO: 1910431 - RNA, 19 nt, Artificial Sequence
  Description of Artificial Sequence: Synthetic oligonucleotide
uuucuuaacucgcucuaaa

SEQ ID NO: 1910432 - RNA, 19 nt, Artificial Sequence
  Description of Artificial Sequence: Synthetic oligonucleotide
gcagcgaccgauaacaugg

SEQ ID NO: 1910433 - RNA, 19 nt, Artificial Sequence
  Description of Artificial Sequence: Synthetic oligonucleotide
aucuguaugggaauaacga

SEQ ID NO: 1910434 - RNA, 19 nt, Artificial Sequence
  Description of Artificial Sequence: Synthetic oligonucleotide
auaacgaacagaagcagga

SEQ ID NO: 1910435 - RNA, 19 nt, Artificial Sequence
  Description of Artificial Sequence: Synthetic oligonucleotide
caguuaucagguaagagaa

SEQ ID NO: 1910436 - RNA, 19 nt, Artificial Sequence
  Description of Artificial Sequence: Synthetic oligonucleotide
uaucagacaacuugaucuc

SEQ ID NO: 1910437 - RNA, 19 nt, Artificial Sequence
  Description of Artificial Sequence: Synthetic oligonucleotide
aagagugaauuaaauuacu

SEQ ID NO: 1910438 - RNA, 19 nt, Artificial Sequence
  Description of Artificial Sequence: Synthetic oligonucleotide
cucgcucuaaaucaugcug

SEQ ID NO: 1910439 - RNA, 19 nt, Artificial Sequence
  Description of Artificial Sequence: Synthetic oligonucleotide
gacaggacgggcgcgaacg

SEQ ID NO: 1910440 - RNA, 19 nt, Artificial Sequence
  Description of Artificial Sequence: Synthetic oligonucleotide
ucaaccaaucuagaaguac

SEQ ID NO: 1910441 - RNA, 19 nt, Artificial Sequence
  Description of Artificial Sequence: Synthetic oligonucleotide
ugccucuccauuugaaagc

SEQ ID NO: 1910442 - RNA, 19 nt, Artificial Sequence
  Description of Artificial Sequence: Synthetic oligonucleotide
accguggcgaccaaaggcc

SEQ ID NO: 1910443 - RNA, 19 nt, Artificial Sequence
  Description of Artificial Sequence: Synthetic oligonucleotide
cuggaaacaaacuggguga

SEQ ID NO: 1910444 - RNA, 19 nt, Artificial Sequence
  Description of Artificial Sequence: Synthetic oligonucleotide
uuaacucgcucuaaaucau

SEQ ID NO: 1910445 - RNA, 19 nt, Artificial Sequence
  Description of Artificial Sequence: Synthetic oligonucleotide
uuuguacuaucuagaacau

SEQ ID NO: 1910446 - RNA, 19 nt, Artificial Sequence
  Description of Artificial Sequence: Synthetic oligonucleotide
ucgcuucacguucacaaca

SEQ ID NO: 1910447 - RNA, 19 nt, Artificial Sequence
  Description of Artificial Sequence: Synthetic oligonucleotide
aguacacagggcuuacucu

SEQ ID NO: 1910448 - RNA, 19 nt, Artificial Sequence
  Description of Artificial Sequence: Synthetic oligonucleotide
acagggcuuacucucaacu

SEQ ID NO: 1910449 - RNA, 19 nt, Artificial Sequence
  Description of Artificial Sequence: Synthetic oligonucleotide
caauggguacacaaccaag

SEQ ID NO: 1910450 - RNA, 19 nt, Artificial Sequence
  Description of Artificial Sequence: Synthetic oligonucleotide
gcaguuaucagguaagaga

SEQ ID NO: 1910451 - RNA, 19 nt, Artificial Sequence
  Description of Artificial Sequence: Synthetic oligonucleotide
agggcuuacucucaacucu

SEQ ID NO: 1910452 - RNA, 19 nt, Artificial Sequence
  Description of Artificial Sequence: Synthetic oligonucleotide
agcugggacacuucaacug

SEQ ID NO: 1910453 - RNA, 19 nt, Artificial Sequence
  Description of Artificial Sequence: Synthetic oligonucleotide
ucuagaacaucagcgcggc

SEQ ID NO: 1910454 - RNA, 19 nt, Artificial Sequence
  Description of Artificial Sequence: Synthetic oligonucleotide
aguggcuuuauuacgauaa

SEQ ID NO: 1910455 - RNA, 19 nt, Artificial Sequence
  Description of Artificial Sequence: Synthetic oligonucleotide
cucgcgacaggaagggucg

SEQ ID NO: 1910456 - RNA, 19 nt, Artificial Sequence
  Description of Artificial Sequence: Synthetic oligonucleotide
ucaagucugugacuaaauu

SEQ ID NO: 1910457 - RNA, 19 nt, Artificial Sequence
  Description of Artificial Sequence: Synthetic oligonucleotide
cauggcaugggcaauaaua

SEQ ID NO: 1910458 - RNA, 19 nt, Artificial Sequence
  Description of Artificial Sequence: Synthetic oligonucleotide
aucuagaacaucagcgcgg

SEQ ID NO: 1910459 - RNA, 19 nt, Artificial Sequence
  Description of Artificial Sequence: Synthetic oligonucleotide
caaccaaucuagaaguaca

SEQ ID NO: 1910460 - RNA, 19 nt, Artificial Sequence
  Description of Artificial Sequence: Synthetic oligonucleotide
ucuguggcgcacaaacaga

SEQ ID NO: 1910461 - RNA, 19 nt, Artificial Sequence
  Description of Artificial Sequence: Synthetic oligonucleotide
ugcaguuaucagguaagag

SEQ ID NO: 1910462 - RNA, 19 nt, Artificial Sequence
  Description of Artificial Sequence: Synthetic oligonucleotide
ucuaaaucaugcuguggau

SEQ ID NO: 1910463 - RNA, 19 nt, Artificial Sequence
  Description of Artificial Sequence: Synthetic oligonucleotide
aaaucuccugcguuugcaa

SEQ ID NO: 1910464 - RNA, 19 nt, Artificial Sequence
  Description of Artificial Sequence: Synthetic oligonucleotide
uggccaguacaucagcaga

SEQ ID NO: 1910465 - RNA, 19 nt, Artificial Sequence
  Description of Artificial Sequence: Synthetic oligonucleotide
uguggcgcacaaacagagg

SEQ ID NO: 1910466 - RNA, 19 nt, Artificial Sequence
  Description of Artificial Sequence: Synthetic oligonucleotide
ggacaagacggaaagaagc

SEQ ID NO: 1910467 - RNA, 19 nt, Artificial Sequence
  Description of Artificial Sequence: Synthetic oligonucleotide
ucucgcgacaggaaggguc

SEQ ID NO: 1910468 - RNA, 19 nt, Artificial Sequence
  Description of Artificial Sequence: Synthetic oligonucleotide
ugacaauauuuaagaguga

SEQ ID NO: 1910469 - RNA, 19 nt, Artificial Sequence
  Description of Artificial Sequence: Synthetic oligonucleotide
acauugcaccuuucaaguc

SEQ ID NO: 1910470 - RNA, 19 nt, Artificial Sequence
  Description of Artificial Sequence: Synthetic oligonucleotide
ucagaggaacgaccuuccg

SEQ ID NO: 1910471 - RNA, 19 nt, Artificial Sequence
  Description of Artificial Sequence: Synthetic oligonucleotide
cuaucagaauaacccauuc

SEQ ID NO: 1910472 - RNA, 19 nt, Artificial Sequence
  Description of Artificial Sequence: Synthetic oligonucleotide
cuuggcagcauaugcaaca

SEQ ID NO: 1910473 - RNA, 19 nt, Artificial Sequence
  Description of Artificial Sequence: Synthetic oligonucleotide
agguuucuuaacucgcucu

SEQ ID NO: 1910474 - RNA, 19 nt, Artificial Sequence
  Description of Artificial Sequence: Synthetic oligonucleotide
uagaagacuuuguacuauc

SEQ ID NO: 1910475 - RNA, 19 nt, Artificial Sequence
  Description of Artificial Sequence: Synthetic oligonucleotide
uggcuuuauuacgauaaug

SEQ ID NO: 1910476 - RNA, 19 nt, Artificial Sequence
  Description of Artificial Sequence: Synthetic oligonucleotide
ucuccauuugaaagccaug

SEQ ID NO: 1910477 - RNA, 19 nt, Artificial Sequence
  Description of Artificial Sequence: Synthetic oligonucleotide
uucuuaacucgcucuaaau

SEQ ID NO: 1910478 - RNA, 19 nt, Artificial Sequence
  Description of Artificial Sequence: Synthetic oligonucleotide
cagaauaacccauucaggu

SEQ ID NO: 1910479 - RNA, 19 nt, Artificial Sequence
  Description of Artificial Sequence: Synthetic oligonucleotide
cagugucuaacccacaaca

SEQ ID NO: 1910480 - RNA, 19 nt, Artificial Sequence
  Description of Artificial Sequence: Synthetic oligonucleotide
aagacggaaagaagccuag

SEQ ID NO: 1910481 - RNA, 19 nt, Artificial Sequence
  Description of Artificial Sequence: Synthetic oligonucleotide
ggaauaacgaacagaagca

SEQ ID NO: 1910482 - RNA, 19 nt, Artificial Sequence
  Description of Artificial Sequence: Synthetic oligonucleotide
caugcuguggaucccucag

SEQ ID NO: 1910483 - RNA, 19 nt, Artificial Sequence
  Description of Artificial Sequence: Synthetic oligonucleotide
uacgauaaugcuugacaau

SEQ ID NO: 1910484 - RNA, 19 nt, Artificial Sequence
  Description of Artificial Sequence: Synthetic oligonucleotide
cuaaaucaugcuguggauc

SEQ ID NO: 1910485 - RNA, 19 nt, Artificial Sequence
  Description of Artificial Sequence: Synthetic oligonucleotide
ucauagugugacccauggc

SEQ ID NO: 1910486 - RNA, 19 nt, Artificial Sequence
  Description of Artificial Sequence: Synthetic oligonucleotide
aggaacgaccuuccgcgcg

SEQ ID NO: 1910487 - RNA, 19 nt, Artificial Sequence
  Description of Artificial Sequence: Synthetic oligonucleotide
cagaggaacgaccuuccgc

SEQ ID NO: 1910488 - RNA, 19 nt, Artificial Sequence
  Description of Artificial Sequence: Synthetic oligonucleotide
acgauaaugcuugacaaua

SEQ ID NO: 1910489 - RNA, 19 nt, Artificial Sequence
  Description of Artificial Sequence: Synthetic oligonucleotide
augggcaauaauagccacc

SEQ ID NO: 1910490 - RNA, 19 nt, Artificial Sequence
  Description of Artificial Sequence: Synthetic oligonucleotide
guacacagggcuuacucuc

SEQ ID NO: 1910491 - RNA, 19 nt, Artificial Sequence
  Description of Artificial Sequence: Synthetic oligonucleotide
uugacaucuguaugggaau

SEQ ID NO: 1910492 - RNA, 19 nt, Artificial Sequence
  Description of Artificial Sequence: Synthetic oligonucleotide
uuagaagacuuuguacuau

SEQ ID NO: 1910493 - RNA, 19 nt, Artificial Sequence
  Description of Artificial Sequence: Synthetic oligonucleotide
aagccuaggccugagucca

SEQ ID NO: 1910494 - RNA, 19 nt, Artificial Sequence
  Description of Artificial Sequence: Synthetic oligonucleotide
uauuacgauaaugcuugac

SEQ ID NO: 1910495 - RNA, 19 nt, Artificial Sequence
  Description of Artificial Sequence: Synthetic oligonucleotide
uuucaagucugugacuaaa

SEQ ID NO: 1910496 - RNA, 19 nt, Artificial Sequence
  Description of Artificial Sequence: Synthetic oligonucleotide
uaauguuugccaacacauu

SEQ ID NO: 1910497 - RNA, 19 nt, Artificial Sequence
  Description of Artificial Sequence: Synthetic oligonucleotide
uacaucagcagacgcgcuc

SEQ ID NO: 1910498 - RNA, 19 nt, Artificial Sequence
  Description of Artificial Sequence: Synthetic oligonucleotide
gacucucgcgacaggaagg

SEQ ID NO: 1910499 - RNA, 19 nt, Artificial Sequence
  Description of Artificial Sequence: Synthetic oligonucleotide
gagugcagacaccuaucag

SEQ ID NO: 1910500 - RNA, 19 nt, Artificial Sequence
  Description of Artificial Sequence: Synthetic oligonucleotide
ugcucucuuuagaagacuu

SEQ ID NO: 1910501 - RNA, 19 nt, Artificial Sequence
  Description of Artificial Sequence: Synthetic oligonucleotide
gguugagaggcgcagggcc

SEQ ID NO: 1910502 - RNA, 19 nt, Artificial Sequence
  Description of Artificial Sequence: Synthetic oligonucleotide
acucuucugauggacaaga

SEQ ID NO: 1910503 - RNA, 19 nt, Artificial Sequence
  Description of Artificial Sequence: Synthetic oligonucleotide
agaacaucagcgcggcggu

SEQ ID NO: 1910504 - RNA, 19 nt, Artificial Sequence
  Description of Artificial Sequence: Synthetic oligonucleotide
acgaccuuccgcgcgaacg

SEQ ID NO: 1910505 - RNA, 19 nt, Artificial Sequence
  Description of Artificial Sequence: Synthetic oligonucleotide
cacugcucucuuuagaaga

SEQ ID NO: 1910506 - RNA, 19 nt, Artificial Sequence
  Description of Artificial Sequence: Synthetic oligonucleotide
guaagagaagccuuuucua

SEQ ID NO: 1910507 - RNA, 19 nt, Artificial Sequence
  Description of Artificial Sequence: Synthetic oligonucleotide
ggaauaucagacaacuuga

SEQ ID NO: 1910508 - RNA, 19 nt, Artificial Sequence
  Description of Artificial Sequence: Synthetic oligonucleotide
cuccuugccggucagagga

SEQ ID NO: 1910509 - RNA, 19 nt, Artificial Sequence
  Description of Artificial Sequence: Synthetic oligonucleotide
cuugccggucagaggaacg

SEQ ID NO: 1910510 - RNA, 19 nt, Artificial Sequence
  Description of Artificial Sequence: Synthetic oligonucleotide
ucuucgacauggccaguac

SEQ ID NO: 1910511 - RNA, 19 nt, Artificial Sequence
  Description of Artificial Sequence: Synthetic oligonucleotide
cacguucacaacaggcggc

SEQ ID NO: 1910512 - RNA, 19 nt, Artificial Sequence
  Description of Artificial Sequence: Synthetic oligonucleotide
caugggcaauaauagccac

SEQ ID NO: 1910513 - RNA, 19 nt, Artificial Sequence
  Description of Artificial Sequence: Synthetic oligonucleotide
agacuuuguacuaucuaga

SEQ ID NO: 1910514 - RNA, 19 nt, Artificial Sequence
  Description of Artificial Sequence: Synthetic oligonucleotide
gaugagugcagacaccuau

SEQ ID NO: 1910515 - RNA, 19 nt, Artificial Sequence
  Description of Artificial Sequence: Synthetic oligonucleotide
ugcguuugcaauggguaca

SEQ ID NO: 1910516 - RNA, 19 nt, Artificial Sequence
  Description of Artificial Sequence: Synthetic oligonucleotide
agcgaccgauaacauggcg

SEQ ID NO: 1910517 - RNA, 19 nt, Artificial Sequence
  Description of Artificial Sequence: Synthetic oligonucleotide
auggguacacaaccaagau

SEQ ID NO: 1910518 - RNA, 19 nt, Artificial Sequence
  Description of Artificial Sequence: Synthetic oligonucleotide
uccugcguuugcaaugggu

SEQ ID NO: 1910519 - RNA, 19 nt, Artificial Sequence
  Description of Artificial Sequence: Synthetic oligonucleotide
cugggugaccacauucuug

SEQ ID NO: 1910520 - RNA, 19 nt, Artificial Sequence
  Description of Artificial Sequence: Synthetic oligonucleotide
acucucgcgacaggaaggg

SEQ ID NO: 1910521 - RNA, 19 nt, Artificial Sequence
  Description of Artificial Sequence: Synthetic oligonucleotide
uccgcgcgaacgcaggccc

SEQ ID NO: 1910522 - RNA, 19 nt, Artificial Sequence
  Description of Artificial Sequence: Synthetic oligonucleotide
acgcgcucaugcuggaaac

SEQ ID NO: 1910523 - RNA, 19 nt, Artificial Sequence
  Description of Artificial Sequence: Synthetic oligonucleotide
guacuaucuagaacaucag

SEQ ID NO: 1910524 - RNA, 19 nt, Artificial Sequence
  Description of Artificial Sequence: Synthetic oligonucleotide
cugcguuugcaauggguac

SEQ ID NO: 1910525 - RNA, 19 nt, Artificial Sequence
  Description of Artificial Sequence: Synthetic oligonucleotide
uggaaacaaacugggugac

SEQ ID NO: 1910526 - RNA, 19 nt, Artificial Sequence
  Description of Artificial Sequence: Synthetic oligonucleotide
gcagacaccuaucagaaua

SEQ ID NO: 1910527 - RNA, 19 nt, Artificial Sequence
  Description of Artificial Sequence: Synthetic oligonucleotide
uccagguugagaggcgcag

SEQ ID NO: 1910528 - RNA, 19 nt, Artificial Sequence
  Description of Artificial Sequence: Synthetic oligonucleotide
agagugaauuaaauuacuu

SEQ ID NO: 1910529 - RNA, 19 nt, Artificial Sequence
  Description of Artificial Sequence: Synthetic oligonucleotide
caccuaucagaauaaccca

SEQ ID NO: 1910530 - RNA, 19 nt, Artificial Sequence
  Description of Artificial Sequence: Synthetic oligonucleotide
caucauagugugacccaug

SEQ ID NO: 1910531 - RNA, 19 nt, Artificial Sequence
  Description of Artificial Sequence: Synthetic oligonucleotide
aacgaccuuccgcgcgaac

SEQ ID NO: 1910532 - RNA, 19 nt, Artificial Sequence
  Description of Artificial Sequence: Synthetic oligonucleotide
auugcaccuuucaagucug

SEQ ID NO: 1910533 - RNA, 19 nt, Artificial Sequence
  Description of Artificial Sequence: Synthetic oligonucleotide
augagugcagacaccuauc

SEQ ID NO: 1910534 - RNA, 19 nt, Artificial Sequence
  Description of Artificial Sequence: Synthetic oligonucleotide
aguuaucagguaagagaag

SEQ ID NO: 1910535 - RNA, 19 nt, Artificial Sequence
  Description of Artificial Sequence: Synthetic oligonucleotide
cauugaggcccaccguggc

SEQ ID NO: 1910536 - RNA, 19 nt, Artificial Sequence
  Description of Artificial Sequence: Synthetic oligonucleotide
cacaacaggcggcuccggg

SEQ ID NO: 1910537 - RNA, 19 nt, Artificial Sequence
  Description of Artificial Sequence: Synthetic oligonucleotide
gcgaccgauaacauggcgg

SEQ ID NO: 1910538 - RNA, 19 nt, Artificial Sequence
  Description of Artificial Sequence: Synthetic oligonucleotide
accaaucuagaaguacaca

SEQ ID NO: 1910539 - RNA, 19 nt, Artificial Sequence
  Description of Artificial Sequence: Synthetic oligonucleotide
caagacggaaagaagccua

SEQ ID NO: 1910540 - RNA, 19 nt, Artificial Sequence
  Description of Artificial Sequence: Synthetic oligonucleotide
agcauaugcaacacccaca

SEQ ID NO: 1910541 - RNA, 19 nt, Artificial Sequence
  Description of Artificial Sequence: Synthetic oligonucleotide
uugcaguuaucagguaaga

SEQ ID NO: 1910542 - RNA, 19 nt, Artificial Sequence
  Description of Artificial Sequence: Synthetic oligonucleotide
cacucagcgacucucgcga

SEQ ID NO: 1910543 - RNA, 19 nt, Artificial Sequence
  Description of Artificial Sequence: Synthetic oligonucleotide
ggucgcuucacguucacaa

SEQ ID NO: 1910544 - RNA, 19 nt, Artificial Sequence
  Description of Artificial Sequence: Synthetic oligonucleotide
cagggcuuacucucaacuc

SEQ ID NO: 1910545 - RNA, 19 nt, Artificial Sequence
  Description of Artificial Sequence: Synthetic oligonucleotide
uacucucaacucuucugau

SEQ ID NO: 1910546 - RNA, 19 nt, Artificial Sequence
  Description of Artificial Sequence: Synthetic oligonucleotide
gcgguagucggagaagucg

SEQ ID NO: 1910547 - RNA, 19 nt, Artificial Sequence
  Description of Artificial Sequence: Synthetic oligonucleotide
acucagcgacucucgcgac

SEQ ID NO: 1910548 - RNA, 19 nt, Artificial Sequence
  Description of Artificial Sequence: Synthetic oligonucleotide
acaguggcuuuauuacgau

SEQ ID NO: 1910549 - RNA, 19 nt, Artificial Sequence
  Description of Artificial Sequence: Synthetic oligonucleotide
guugagaggcgcagggccc

SEQ ID NO: 1910550 - RNA, 19 nt, Artificial Sequence
  Description of Artificial Sequence: Synthetic oligonucleotide
uuguacuaucuagaacauc

SEQ ID NO: 1910551 - RNA, 19 nt, Artificial Sequence
  Description of Artificial Sequence: Synthetic oligonucleotide
guggcgcacaaacagaggu

SEQ ID NO: 1910552 - RNA, 19 nt, Artificial Sequence
  Description of Artificial Sequence: Synthetic oligonucleotide
ccuuuucuagccucacugc

SEQ ID NO: 1910553 - RNA, 19 nt, Artificial Sequence
  Description of Artificial Sequence: Synthetic oligonucleotide
agucgggcaccuugacauc

SEQ ID NO: 1910554 - RNA, 19 nt, Artificial Sequence
  Description of Artificial Sequence: Synthetic oligonucleotide
agugucuaacccacaacaa

SEQ ID NO: 1910555 - RNA, 19 nt, Artificial Sequence
  Description of Artificial Sequence: Synthetic oligonucleotide
gaggaacgaccuuccgcgc

SEQ ID NO: 1910556 - RNA, 19 nt, Artificial Sequence
  Description of Artificial Sequence: Synthetic oligonucleotide
uugccggucagaggaacga

SEQ ID NO: 1910557 - RNA, 19 nt, Artificial Sequence
  Description of Artificial Sequence: Synthetic oligonucleotide
cacauuauucacaauucuu

SEQ ID NO: 1910558 - RNA, 19 nt, Artificial Sequence
  Description of Artificial Sequence: Synthetic oligonucleotide
gcuuuauuacgauaaugcu

SEQ ID NO: 1910559 - RNA, 19 nt, Artificial Sequence
  Description of Artificial Sequence: Synthetic oligonucleotide
uggaucccucagcugggac

SEQ ID NO: 1910560 - RNA, 19 nt, Artificial Sequence
  Description of Artificial Sequence: Synthetic oligonucleotide
aucagguaagagaagccuu

SEQ ID NO: 1910561 - RNA, 19 nt, Artificial Sequence
  Description of Artificial Sequence: Synthetic oligonucleotide
gcgcgaacgggcccgagcg

SEQ ID NO: 1910562 - RNA, 19 nt, Artificial Sequence
  Description of Artificial Sequence: Synthetic oligonucleotide
aacgggcccgagcgggcag

SEQ ID NO: 1910563 - RNA, 19 nt, Artificial Sequence
  Description of Artificial Sequence: Synthetic oligonucleotide
uggcgcacaaacagagguu

SEQ ID NO: 1910564 - RNA, 19 nt, Artificial Sequence
  Description of Artificial Sequence: Synthetic oligonucleotide
cgaccgauaacauggcggc

SEQ ID NO: 1910565 - RNA, 19 nt, Artificial Sequence
  Description of Artificial Sequence: Synthetic oligonucleotide
cacaaccaagaugagugca

SEQ ID NO: 1910566 - RNA, 19 nt, Artificial Sequence
  Description of Artificial Sequence: Synthetic oligonucleotide
acguucacaacaggcggcu

SEQ ID NO: 1910567 - RNA, 19 nt, Artificial Sequence
  Description of Artificial Sequence: Synthetic oligonucleotide
ccaguacaucagcagacgc

SEQ ID NO: 1910568 - RNA, 19 nt, Artificial Sequence
  Description of Artificial Sequence: Synthetic oligonucleotide
cuucgacauggccaguaca

SEQ ID NO: 1910569 - RNA, 19 nt, Artificial Sequence
  Description of Artificial Sequence: Synthetic oligonucleotide
agggucgcuucacguucac

SEQ ID NO: 1910570 - RNA, 19 nt, Artificial Sequence
  Description of Artificial Sequence: Synthetic oligonucleotide
cuccauuugaaagccaugu

SEQ ID NO: 1910571 - RNA, 19 nt, Artificial Sequence
  Description of Artificial Sequence: Synthetic oligonucleotide
ucgacauggccaguacauc

SEQ ID NO: 1910572 - RNA, 19 nt, Artificial Sequence
  Description of Artificial Sequence: Synthetic oligonucleotide
agucugugacuaaauuuaa

SEQ ID NO: 1910573 - RNA, 19 nt, Artificial Sequence
  Description of Artificial Sequence: Synthetic oligonucleotide
gccaguacaucagcagacg

SEQ ID NO: 1910574 - RNA, 19 nt, Artificial Sequence
  Description of Artificial Sequence: Synthetic oligonucleotide
ggcagcgaccgauaacaug

SEQ ID NO: 1910575 - RNA, 19 nt, Artificial Sequence
  Description of Artificial Sequence: Synthetic oligonucleotide
gaauaucagacaacuugau

SEQ ID NO: 1910576 - RNA, 19 nt, Artificial Sequence
  Description of Artificial Sequence: Synthetic oligonucleotide
gagguuugccucuccauuu

SEQ ID NO: 1910577 - RNA, 19 nt, Artificial Sequence
  Description of Artificial Sequence: Synthetic oligonucleotide
ugcucaacaguggcuuuau

SEQ ID NO: 1910578 - RNA, 19 nt, Artificial Sequence
  Description of Artificial Sequence: Synthetic oligonucleotide
ugcagacaccuaucagaau

SEQ ID NO: 1910579 - RNA, 19 nt, Artificial Sequence
  Description of Artificial Sequence: Synthetic oligonucleotide
guuucuuaacucgcucuaa

SEQ ID NO: 1910580 - RNA, 19 nt, Artificial Sequence
  Description of Artificial Sequence: Synthetic oligonucleotide
uuccgcgcgaacgcaggcc

SEQ ID NO: 1910581 - RNA, 19 nt, Artificial Sequence
  Description of Artificial Sequence: Synthetic oligonucleotide
gcaauggguacacaaccaa

SEQ ID NO: 1910582 - RNA, 19 nt, Artificial Sequence
  Description of Artificial Sequence: Synthetic oligonucleotide
cuuccgcgcgaacgcaggc

SEQ ID NO: 1910583 - RNA, 19 nt, Artificial Sequence
  Description of Artificial Sequence: Synthetic oligonucleotide
ggcaucauagugugaccca

SEQ ID NO: 1910584 - RNA, 19 nt, Artificial Sequence
  Description of Artificial Sequence: Synthetic oligonucleotide
acaucagcgcggcgguagu

SEQ ID NO: 1910585 - RNA, 19 nt, Artificial Sequence
  Description of Artificial Sequence: Synthetic oligonucleotide
gccucuccauuugaaagcc

SEQ ID NO: 1910586 - RNA, 19 nt, Artificial Sequence
  Description of Artificial Sequence: Synthetic oligonucleotide
uugcaccuuucaagucugu

SEQ ID NO: 1910587 - RNA, 19 nt, Artificial Sequence
  Description of Artificial Sequence: Synthetic oligonucleotide
uccaaacuccuugccgguc

SEQ ID NO: 1910588 - RNA, 19 nt, Artificial Sequence
  Description of Artificial Sequence: Synthetic oligonucleotide
gucuaacccacaacaacua

SEQ ID NO: 1910589 - RNA, 19 nt, Artificial Sequence
  Description of Artificial Sequence: Synthetic oligonucleotide
aucuucgacauggccagua

SEQ ID NO: 1910590 - RNA, 19 nt, Artificial Sequence
  Description of Artificial Sequence: Synthetic oligonucleotide
cccaccguggcgaccaaag

SEQ ID NO: 1910591 - RNA, 19 nt, Artificial Sequence
  Description of Artificial Sequence: Synthetic oligonucleotide
ggccaguacaucagcagac

SEQ ID NO: 1910592 - RNA, 19 nt, Artificial Sequence
  Description of Artificial Sequence: Synthetic oligonucleotide
gagaagccuuuucuagccu

SEQ ID NO: 1910593 - RNA, 19 nt, Artificial Sequence
  Description of Artificial Sequence: Synthetic oligonucleotide
gcggcuugcaccaggggcc

SEQ ID NO: 1910594 - RNA, 19 nt, Artificial Sequence
  Description of Artificial Sequence: Synthetic oligonucleotide
ggcaccgcggcuugcacca

SEQ ID NO: 1910595 - RNA, 19 nt, Artificial Sequence
  Description of Artificial Sequence: Synthetic oligonucleotide
uccuugccggucagaggaa

SEQ ID NO: 1910596 - RNA, 19 nt, Artificial Sequence
  Description of Artificial Sequence: Synthetic oligonucleotide
uaguugcaguuaucaggua

SEQ ID NO: 1910597 - RNA, 19 nt, Artificial Sequence
  Description of Artificial Sequence: Synthetic oligonucleotide
gcgaacgcaggcccgaaga

SEQ ID NO: 1910598 - RNA, 19 nt, Artificial Sequence
  Description of Artificial Sequence: Synthetic oligonucleotide
ggaacgaccuuccgcgcga

SEQ ID NO: 1910599 - RNA, 19 nt, Artificial Sequence
  Description of Artificial Sequence: Synthetic oligonucleotide
aucagcagacgcgcucaug

SEQ ID NO: 1910600 - RNA, 19 nt, Artificial Sequence
  Description of Artificial Sequence: Synthetic oligonucleotide
gacgggcgcgaacgggccc

SEQ ID NO: 1910601 - RNA, 19 nt, Artificial Sequence
  Description of Artificial Sequence: Synthetic oligonucleotide
aucaaccaaucuagaagua

SEQ ID NO: 1910602 - RNA, 19 nt, Artificial Sequence
  Description of Artificial Sequence: Synthetic oligonucleotide
ccugcguuugcaaugggua

SEQ ID NO: 1910603 - RNA, 19 nt, Artificial Sequence
  Description of Artificial Sequence: Synthetic oligonucleotide
ccagugucuaacccacaac

SEQ ID NO: 1910604 - RNA, 19 nt, Artificial Sequence
  Description of Artificial Sequence: Synthetic oligonucleotide
aggcccaccguggcgacca

SEQ ID NO: 1910605 - RNA, 19 nt, Artificial Sequence
  Description of Artificial Sequence: Synthetic oligonucleotide
caccgcggcuugcaccagg

SEQ ID NO: 1910606 - RNA, 19 nt, Artificial Sequence
  Description of Artificial Sequence: Synthetic oligonucleotide
gcgaacgggcccgagcggg

SEQ ID NO: 1910607 - RNA, 19 nt, Artificial Sequence
  Description of Artificial Sequence: Synthetic oligonucleotide
ccuuucaagucugugacua

SEQ ID NO: 1910608 - RNA, 19 nt, Artificial Sequence
  Description of Artificial Sequence: Synthetic oligonucleotide
agcgggcagcgaccgauaa

SEQ ID NO: 1910609 - RNA, 19 nt, Artificial Sequence
  Description of Artificial Sequence: Synthetic oligonucleotide
cuccugcguuugcaauggg

SEQ ID NO: 1910610 - RNA, 19 nt, Artificial Sequence
  Description of Artificial Sequence: Synthetic oligonucleotide
cucagcgacucucgcgaca

SEQ ID NO: 1910611 - RNA, 19 nt, Artificial Sequence
  Description of Artificial Sequence: Synthetic oligonucleotide
gaccgauaacauggcggca

SEQ ID NO: 1910612 - RNA, 19 nt, Artificial Sequence
  Description of Artificial Sequence: Synthetic oligonucleotide
cgacucucgcgacaggaag

SEQ ID NO: 1910613 - RNA, 19 nt, Artificial Sequence
  Description of Artificial Sequence: Synthetic oligonucleotide
caguggcuuuauuacgaua

SEQ ID NO: 1910614 - RNA, 19 nt, Artificial Sequence
  Description of Artificial Sequence: Synthetic oligonucleotide
gccggucagaggaacgacc

SEQ ID NO: 1910615 - RNA, 19 nt, Artificial Sequence
  Description of Artificial Sequence: Synthetic oligonucleotide
accccgcgggacguggccg

SEQ ID NO: 1910616 - RNA, 19 nt, Artificial Sequence
  Description of Artificial Sequence: Synthetic oligonucleotide
gaaguacacagggcuuacu

SEQ ID NO: 1910617 - RNA, 19 nt, Artificial Sequence
  Description of Artificial Sequence: Synthetic oligonucleotide
gcguuugcaauggguacac

SEQ ID NO: 1910618 - RNA, 19 nt, Artificial Sequence
  Description of Artificial Sequence: Synthetic oligonucleotide
gcuuacucucaacucuucu

SEQ ID NO: 1910619 - RNA, 19 nt, Artificial Sequence
  Description of Artificial Sequence: Synthetic oligonucleotide
ccccuccugauccugccag

SEQ ID NO: 1910620 - RNA, 19 nt, Artificial Sequence
  Description of Artificial Sequence: Synthetic oligonucleotide
guggcuuuauuacgauaau

SEQ ID NO: 1910621 - RNA, 19 nt, Artificial Sequence
  Description of Artificial Sequence: Synthetic oligonucleotide
cgcucuaaaucaugcugug

SEQ ID NO: 1910622 - RNA, 19 nt, Artificial Sequence
  Description of Artificial Sequence: Synthetic oligonucleotide
ggcgcgaacgggcccgagc

SEQ ID NO: 1910623 - RNA, 19 nt, Artificial Sequence
  Description of Artificial Sequence: Synthetic oligonucleotide
ggcccgagcgggcagcgac

SEQ ID NO: 1910624 - RNA, 19 nt, Artificial Sequence
  Description of Artificial Sequence: Synthetic oligonucleotide
acguggccgacaggacggg

SEQ ID NO: 1910625 - RNA, 19 nt, Artificial Sequence
  Description of Artificial Sequence: Synthetic oligonucleotide
ccaccguggcgaccaaagg

SEQ ID NO: 1910626 - RNA, 19 nt, Artificial Sequence
  Description of Artificial Sequence: Synthetic oligonucleotide
gucgcagccuggccacuca

SEQ ID NO: 1910627 - RNA, 19 nt, Artificial Sequence
  Description of Artificial Sequence: Synthetic oligonucleotide
acccauggcaugggcaaua

SEQ ID NO: 1910628 - RNA, 19 nt, Artificial Sequence
  Description of Artificial Sequence: Synthetic oligonucleotide
cagacaacuugaucucaau

SEQ ID NO: 1910629 - RNA, 19 nt, Artificial Sequence
  Description of Artificial Sequence: Synthetic oligonucleotide
cagaggcaucauaguguga

SEQ ID NO: 1910630 - RNA, 19 nt, Artificial Sequence
  Description of Artificial Sequence: Synthetic oligonucleotide
agaugagugcagacaccua

SEQ ID NO: 1910631 - RNA, 19 nt, Artificial Sequence
  Description of Artificial Sequence: Synthetic oligonucleotide
gaacgggcccgagcgggca

SEQ ID NO: 1910632 - RNA, 19 nt, Artificial Sequence
  Description of Artificial Sequence: Synthetic oligonucleotide
ucgcgacaggaagggucgc

SEQ ID NO: 1910633 - RNA, 19 nt, Artificial Sequence
  Description of Artificial Sequence: Synthetic oligonucleotide
cgaacgcaggcccgaagag

SEQ ID NO: 1910634 - RNA, 19 nt, Artificial Sequence
  Description of Artificial Sequence: Synthetic oligonucleotide
gucgggcaccuugacaucu

SEQ ID NO: 1910635 - RNA, 19 nt, Artificial Sequence
  Description of Artificial Sequence: Synthetic oligonucleotide
cguggcgaccaaaggccgg

SEQ ID NO: 1910636 - RNA, 19 nt, Artificial Sequence
  Description of Artificial Sequence: Synthetic oligonucleotide
ggaagggucgcuucacguu

SEQ ID NO: 1910637 - RNA, 19 nt, Artificial Sequence
  Description of Artificial Sequence: Synthetic oligonucleotide
caucagcgcggcgguaguc

SEQ ID NO: 1910638 - RNA, 19 nt, Artificial Sequence
  Description of Artificial Sequence: Synthetic oligonucleotide
cuggguucuguggcgcaca

SEQ ID NO: 1910639 - RNA, 19 nt, Artificial Sequence
  Description of Artificial Sequence: Synthetic oligonucleotide
cgggcagcgaccgauaaca

SEQ ID NO: 1910640 - RNA, 19 nt, Artificial Sequence
  Description of Artificial Sequence: Synthetic oligonucleotide
ggcgaccaaaggccggguc

SEQ ID NO: 1910641 - RNA, 19 nt, Artificial Sequence
  Description of Artificial Sequence: Synthetic oligonucleotide
uggcgaccaaaggccgggu

SEQ ID NO: 1910642 - RNA, 19 nt, Artificial Sequence
  Description of Artificial Sequence: Synthetic oligonucleotide
gaggcccaccguggcgacc

SEQ ID NO: 1910643 - RNA, 19 nt, Artificial Sequence
  Description of Artificial Sequence: Synthetic oligonucleotide
cccgccaccccgcgggacg

SEQ ID NO: 1910644 - RNA, 19 nt, Artificial Sequence
  Description of Artificial Sequence: Synthetic oligonucleotide
ggcgcacaaacagagguuu

SEQ ID NO: 1910645 - RNA, 19 nt, Artificial Sequence
  Description of Artificial Sequence: Synthetic oligonucleotide
gcgcacaaacagagguuug

SEQ ID NO: 1910646 - RNA, 19 nt, Artificial Sequence
  Description of Artificial Sequence: Synthetic oligonucleotide
cugauccugccagaggcau

SEQ ID NO: 1910647 - RNA, 19 nt, Artificial Sequence
  Description of Artificial Sequence: Synthetic oligonucleotide
gcgcucaugcuggaaacaa

SEQ ID NO: 1910648 - RNA, 19 nt, Artificial Sequence
  Description of Artificial Sequence: Synthetic oligonucleotide
ggacgggcgcgaacgggcc

SEQ ID NO: 1910649 - RNA, 19 nt, Artificial Sequence
  Description of Artificial Sequence: Synthetic oligonucleotide
gaacgaccuuccgcgcgaa

SEQ ID NO: 1910650 - RNA, 19 nt, Artificial Sequence
  Description of Artificial Sequence: Synthetic oligonucleotide
cagacgcgcucaugcugga

SEQ ID NO: 1910651 - RNA, 19 nt, Artificial Sequence
  Description of Artificial Sequence: Synthetic oligonucleotide
gcgggcagcgaccgauaac

SEQ ID NO: 1910652 - RNA, 19 nt, Artificial Sequence
  Description of Artificial Sequence: Synthetic oligonucleotide
cagcagacgcgcucaugcu

SEQ ID NO: 1910653 - RNA, 19 nt, Artificial Sequence
  Description of Artificial Sequence: Synthetic oligonucleotide
ggcgguagucggagaaguc

SEQ ID NO: 1910654 - RNA, 19 nt, Artificial Sequence
  Description of Artificial Sequence: Synthetic oligonucleotide
gaacaucagcgcggcggua

SEQ ID NO: 1910655 - RNA, 19 nt, Artificial Sequence
  Description of Artificial Sequence: Synthetic oligonucleotide
cccgagcgggcagcgaccg

SEQ ID NO: 1910656 - RNA, 19 nt, Artificial Sequence
  Description of Artificial Sequence: Synthetic oligonucleotide
cgggguggcgggcaccgcg

SEQ ID NO: 1910657 - RNA, 19 nt, Artificial Sequence
  Description of Artificial Sequence: Synthetic oligonucleotide
cuccgggguggcgggcacc

SEQ ID NO: 1910658 - RNA, 19 nt, Artificial Sequence
  Description of Artificial Sequence: Synthetic oligonucleotide
cgcgggacguggccgacag

SEQ ID NO: 1910659 - RNA, 19 nt, Artificial Sequence
  Description of Artificial Sequence: Synthetic oligonucleotide
gggcaauaauagccaccaa

SEQ ID NO: 1910660 - RNA, 19 nt, Artificial Sequence
  Description of Artificial Sequence: Synthetic oligonucleotide
ggccgacaggacgggcgcg

SEQ ID NO: 1910661 - RNA, 19 nt, Artificial Sequence
  Description of Artificial Sequence: Synthetic oligonucleotide
aggccgggucgcagccugg

SEQ ID NO: 1910662 - RNA, 19 nt, Artificial Sequence
  Description of Artificial Sequence: Synthetic oligonucleotide
gccugaguccagugucuaa

SEQ ID NO: 1910663 - RNA, 19 nt, Artificial Sequence
  Description of Artificial Sequence: Synthetic oligonucleotide
cgaacgggcccgagcgggc

SEQ ID NO: 1910664 - RNA, 19 nt, Artificial Sequence
  Description of Artificial Sequence: Synthetic oligonucleotide
ggucgcagccuggccacuc

SEQ ID NO: 1910665 - RNA, 19 nt, Artificial Sequence
  Description of Artificial Sequence: Synthetic oligonucleotide
cgauaaugcuugacaauau

SEQ ID NO: 1910666 - RNA, 19 nt, Artificial Sequence
  Description of Artificial Sequence: Synthetic oligonucleotide
ccgcgcgaacgcaggcccg

SEQ ID NO: 1910667 - RNA, 19 nt, Artificial Sequence
  Description of Artificial Sequence: Synthetic oligonucleotide
ggccgggucgcagccuggc

SEQ ID NO: 1910668 - RNA, 19 nt, Artificial Sequence
  Description of Artificial Sequence: Synthetic oligonucleotide
caggggccgcagcgcgccc

SEQ ID NO: 1910669 - RNA, 19 nt, Artificial Sequence
  Description of Artificial Sequence: Synthetic oligonucleotide
gagcgggcagcgaccgaua

SEQ ID NO: 1910670 - RNA, 19 nt, Artificial Sequence
  Description of Artificial Sequence: Synthetic oligonucleotide
gcgacucucgcgacaggaa

SEQ ID NO: 1910671 - RNA, 19 nt, Artificial Sequence
  Description of Artificial Sequence: Synthetic oligonucleotide
gcgggacguggccgacagg

SEQ ID NO: 1910672 - RNA, 19 nt, Artificial Sequence
  Description of Artificial Sequence: Synthetic oligonucleotide
gccgacaggacgggcgcga

SEQ ID NO: 1910673 - RNA, 19 nt, Artificial Sequence
  Description of Artificial Sequence: Synthetic oligonucleotide
gggucgcuucacguucaca

SEQ ID NO: 1910674 - RNA, 19 nt, Artificial Sequence
  Description of Artificial Sequence: Synthetic oligonucleotide
gcccgagcgggcagcgacc

SEQ ID NO: 1910675 - RNA, 19 nt, Artificial Sequence
  Description of Artificial Sequence: Synthetic oligonucleotide
ccgcggcuugcaccagggg

SEQ ID NO: 1910676 - RNA, 19 nt, Artificial Sequence
  Description of Artificial Sequence: Synthetic oligonucleotide
cgcgaacgggcccgagcgg

SEQ ID NO: 1910677 - RNA, 19 nt, Artificial Sequence
  Description of Artificial Sequence: Synthetic oligonucleotide
cgcgaacgcaggcccgaag

SEQ ID NO: 1910678 - RNA, 19 nt, Artificial Sequence
  Description of Artificial Sequence: Synthetic oligonucleotide
caucagcagacgcgcucau

SEQ ID NO: 1910679 - RNA, 19 nt, Artificial Sequence
  Description of Artificial Sequence: Synthetic oligonucleotide
ggcuugcaccaggggccgc

SEQ ID NO: 1910680 - RNA, 19 nt, Artificial Sequence
  Description of Artificial Sequence: Synthetic oligonucleotide
cucucgcgacaggaagggu

SEQ ID NO: 1910681 - RNA, 19 nt, Artificial Sequence
  Description of Artificial Sequence: Synthetic oligonucleotide
gcgacaggaagggucgcuu

SEQ ID NO: 1910682 - RNA, 19 nt, Artificial Sequence
  Description of Artificial Sequence: Synthetic oligonucleotide
cgcgcucaugcuggaaaca

SEQ ID NO: 1910683 - RNA, 19 nt, Artificial Sequence
  Description of Artificial Sequence: Synthetic oligonucleotide
ccccgcgggacguggccga

SEQ ID NO: 1910684 - RNA, 19 nt, Artificial Sequence
  Description of Artificial Sequence: Synthetic oligonucleotide
gggcgcgaacgggcccgag

SEQ ID NO: 1910685 - RNA, 19 nt, Artificial Sequence
  Description of Artificial Sequence: Synthetic oligonucleotide
cguuugcaauggguacaca

SEQ ID NO: 1910686 - RNA, 19 nt, Artificial Sequence
  Description of Artificial Sequence: Synthetic oligonucleotide
gggcagcgaccgauaacau

SEQ ID NO: 1910687 - RNA, 19 nt, Artificial Sequence
  Description of Artificial Sequence: Synthetic oligonucleotide
cagcggcuccaaacuccuu

SEQ ID NO: 1910688 - RNA, 19 nt, Artificial Sequence
  Description of Artificial Sequence: Synthetic oligonucleotide
gcccgccaccccgcgggac

SEQ ID NO: 1910689 - RNA, 19 nt, Artificial Sequence
  Description of Artificial Sequence: Synthetic oligonucleotide
gcccaccguggcgaccaaa

SEQ ID NO: 1910690 - RNA, 19 nt, Artificial Sequence
  Description of Artificial Sequence: Synthetic oligonucleotide
cgcgcgaacgcaggcccga

SEQ ID NO: 1910691 - RNA, 19 nt, Artificial Sequence
  Description of Artificial Sequence: Synthetic oligonucleotide
gcgcgaacgcaggcccgaa

SEQ ID NO: 1910692 - RNA, 19 nt, Artificial Sequence
  Description of Artificial Sequence: Synthetic oligonucleotide
gcgcagggccccuccugau

SEQ ID NO: 1910693 - RNA, 19 nt, Artificial Sequence
  Description of Artificial Sequence: Synthetic oligonucleotide
ccgacaggacgggcgcgaa

SEQ ID NO: 1910694 - RNA, 19 nt, Artificial Sequence
  Description of Artificial Sequence: Synthetic oligonucleotide
ggcccaccguggcgaccaa

SEQ ID NO: 1910695 - RNA, 19 nt, Artificial Sequence
  Description of Artificial Sequence: Synthetic oligonucleotide
ccgagcgggcagcgaccga

SEQ ID NO: 1910696 - RNA, 19 nt, Artificial Sequence
  Description of Artificial Sequence: Synthetic oligonucleotide
cgcgacaggaagggucgcu

SEQ ID NO: 1910697 - RNA, 19 nt, Artificial Sequence
  Description of Artificial Sequence: Synthetic oligonucleotide
ccgcgggacguggccgaca

SEQ ID NO: 1910698 - RNA, 19 nt, Artificial Sequence
  Description of Artificial Sequence: Synthetic oligonucleotide
cgccaccccgcgggacgug

SEQ ID NO: 1910699 - RNA, 19 nt, Artificial Sequence
  Description of Artificial Sequence: Synthetic oligonucleotide
ccgccaccccgcgggacgu

SEQ ID NO: 1910700 - RNA, 19 nt, Artificial Sequence
  Description of Artificial Sequence: Synthetic oligonucleotide
cgcccgccaccccgcggga

SEQ ID NO: 1910701 - RNA, 19 nt, Artificial Sequence
  Description of Artificial Sequence: Synthetic oligonucleotide
cgggcgcgaacgggcccga

SEQ ID NO: 1910702 - RNA, 19 nt, Artificial Sequence
  Description of Artificial Sequence: Synthetic oligonucleotide
aaauaauuuaucuuuacgg

SEQ ID NO: 1910703 - RNA, 19 nt, Artificial Sequence
  Description of Artificial Sequence: Synthetic oligonucleotide
aauauauauauauauauau

SEQ ID NO: 1910704 - RNA, 19 nt, Artificial Sequence
  Description of Artificial Sequence: Synthetic oligonucleotide
uauauauauauauauauca

SEQ ID NO: 1910705 - RNA, 19 nt, Artificial Sequence
  Description of Artificial Sequence: Synthetic oligonucleotide
aaauuuauuccucuggagg

SEQ ID NO: 1910706 - RNA, 19 nt, Artificial Sequence
  Description of Artificial Sequence: Synthetic oligonucleotide
ugaacuaagaauuuggcag

SEQ ID NO: 1910707 - RNA, 19 nt, Artificial Sequence
  Description of Artificial Sequence: Synthetic oligonucleotide
aauaauuuaucuuuacggu

SEQ ID NO: 1910708 - RNA, 19 nt, Artificial Sequence
  Description of Artificial Sequence: Synthetic oligonucleotide
uauauauauauauauauau

SEQ ID NO: 1910709 - RNA, 19 nt, Artificial Sequence
  Description of Artificial Sequence: Synthetic oligonucleotide
ugugauaauauauauauau

SEQ ID NO: 1910710 - RNA, 19 nt, Artificial Sequence
  Description of Artificial Sequence: Synthetic oligonucleotide
uauccuguuauccagaaug

SEQ ID NO: 1910711 - RNA, 19 nt, Artificial Sequence
  Description of Artificial Sequence: Synthetic oligonucleotide
ucuauaaucuggaaguucc

SEQ ID NO: 1910712 - RNA, 19 nt, Artificial Sequence
  Description of Artificial Sequence: Synthetic oligonucleotide
aaguuccgaaaccauaucc

SEQ ID NO: 1910713 - RNA, 19 nt, Artificial Sequence
  Description of Artificial Sequence: Synthetic oligonucleotide
auaauauauauauauauau

SEQ ID NO: 1910714 - RNA, 19 nt, Artificial Sequence
  Description of Artificial Sequence: Synthetic oligonucleotide
aauuaagaguucuuuuaac

SEQ ID NO: 1910715 - RNA, 19 nt, Artificial Sequence
  Description of Artificial Sequence: Synthetic oligonucleotide
uaauuuaucuuuacggucc

SEQ ID NO: 1910716 - RNA, 19 nt, Artificial Sequence
  Description of Artificial Sequence: Synthetic oligonucleotide
uuuaacaaagcauaaugug

SEQ ID NO: 1910717 - RNA, 19 nt, Artificial Sequence
  Description of Artificial Sequence: Synthetic oligonucleotide
ucuucuauaaucuggaagu

SEQ ID NO: 1910718 - RNA, 19 nt, Artificial Sequence
  Description of Artificial Sequence: Synthetic oligonucleotide
uuuaucacaaauaauuuau

SEQ ID NO: 1910719 - RNA, 19 nt, Artificial Sequence
  Description of Artificial Sequence: Synthetic oligonucleotide
aucuuuauaagauuuaaga

SEQ ID NO: 1910720 - RNA, 19 nt, Artificial Sequence
  Description of Artificial Sequence: Synthetic oligonucleotide
uguacuaaagaucugaauu

SEQ ID NO: 1910721 - RNA, 19 nt, Artificial Sequence
  Description of Artificial Sequence: Synthetic oligonucleotide
auuugaaagccacauauag

SEQ ID NO: 1910722 - RNA, 19 nt, Artificial Sequence
  Description of Artificial Sequence: Synthetic oligonucleotide
ugauaauauauauauauau

SEQ ID NO: 1910723 - RNA, 19 nt, Artificial Sequence
  Description of Artificial Sequence: Synthetic oligonucleotide
uuuaguaucugcuuuagaa

SEQ ID NO: 1910724 - RNA, 19 nt, Artificial Sequence
  Description of Artificial Sequence: Synthetic oligonucleotide
auaauuuaucuuuacgguc

SEQ ID NO: 1910725 - RNA, 19 nt, Artificial Sequence
  Description of Artificial Sequence: Synthetic oligonucleotide
aaaagaguuauccacuggu

SEQ ID NO: 1910726 - RNA, 19 nt, Artificial Sequence
  Description of Artificial Sequence: Synthetic oligonucleotide
ugugagaucuacuuuaggc

SEQ ID NO: 1910727 - RNA, 19 nt, Artificial Sequence
  Description of Artificial Sequence: Synthetic oligonucleotide
aauuuauuccucuggagga

SEQ ID NO: 1910728 - RNA, 19 nt, Artificial Sequence
  Description of Artificial Sequence: Synthetic oligonucleotide
uccuauuuccacuagagca

SEQ ID NO: 1910729 - RNA, 19 nt, Artificial Sequence
  Description of Artificial Sequence: Synthetic oligonucleotide
cuuuuaacaaagcauaaug

SEQ ID NO: 1910730 - RNA, 19 nt, Artificial Sequence
  Description of Artificial Sequence: Synthetic oligonucleotide
cuaagaauuuggcagacgg

SEQ ID NO: 1910731 - RNA, 19 nt, Artificial Sequence
  Description of Artificial Sequence: Synthetic oligonucleotide
acaaaaggggacgagaacc

SEQ ID NO: 1910732 - RNA, 19 nt, Artificial Sequence
  Description of Artificial Sequence: Synthetic oligonucleotide
ugaggauuuucauauaaag

SEQ ID NO: 1910733 - RNA, 19 nt, Artificial Sequence
  Description of Artificial Sequence: Synthetic oligonucleotide
uggcaauucaucaaaagca

SEQ ID NO: 1910734 - RNA, 19 nt, Artificial Sequence
  Description of Artificial Sequence: Synthetic oligonucleotide
aaaguugguccuccaaagc

SEQ ID NO: 1910735 - RNA, 19 nt, Artificial Sequence
  Description of Artificial Sequence: Synthetic oligonucleotide
auuuaagacaaaucgaggu

SEQ ID NO: 1910736 - RNA, 19 nt, Artificial Sequence
  Description of Artificial Sequence: Synthetic oligonucleotide
ugguauaucaaagacaucu

SEQ ID NO: 1910737 - RNA, 19 nt, Artificial Sequence
  Description of Artificial Sequence: Synthetic oligonucleotide
caauucaucaaaagcaggg

SEQ ID NO: 1910738 - RNA, 19 nt, Artificial Sequence
  Description of Artificial Sequence: Synthetic oligonucleotide
uauauauauauauaucauc

SEQ ID NO: 1910739 - RNA, 19 nt, Artificial Sequence
  Description of Artificial Sequence: Synthetic oligonucleotide
auauauauauauaucaucu

SEQ ID NO: 1910740 - RNA, 19 nt, Artificial Sequence
  Description of Artificial Sequence: Synthetic oligonucleotide
gacucuuuggaugauaccg

SEQ ID NO: 1910741 - RNA, 19 nt, Artificial Sequence
  Description of Artificial Sequence: Synthetic oligonucleotide
uuugaacuaagaauuuggc

SEQ ID NO: 1910742 - RNA, 19 nt, Artificial Sequence
  Description of Artificial Sequence: Synthetic oligonucleotide
ugaauguaaacacaugguc

SEQ ID NO: 1910743 - RNA, 19 nt, Artificial Sequence
  Description of Artificial Sequence: Synthetic oligonucleotide
auauauauauaucaucuaa

SEQ ID NO: 1910744 - RNA, 19 nt, Artificial Sequence
  Description of Artificial Sequence: Synthetic oligonucleotide
ggugaauguaaacacaugg

SEQ ID NO: 1910745 - RNA, 19 nt, Artificial Sequence
  Description of Artificial Sequence: Synthetic oligonucleotide
augaggugaauuugaaagc

SEQ ID NO: 1910746 - RNA, 19 nt, Artificial Sequence
  Description of Artificial Sequence: Synthetic oligonucleotide
aaugaggauuuucauauaa

SEQ ID NO: 1910747 - RNA, 19 nt, Artificial Sequence
  Description of Artificial Sequence: Synthetic oligonucleotide
gaauguaaacacauggucc

SEQ ID NO: 1910748 - RNA, 19 nt, Artificial Sequence
  Description of Artificial Sequence: Synthetic oligonucleotide
uaauauauauauauauaua

SEQ ID NO: 1910749 - RNA, 19 nt, Artificial Sequence
  Description of Artificial Sequence: Synthetic oligonucleotide
gaagaauagucuuugguuc

SEQ ID NO: 1910750 - RNA, 19 nt, Artificial Sequence
  Description of Artificial Sequence: Synthetic oligonucleotide
uuaagacaaaucgaggucc

SEQ ID NO: 1910751 - RNA, 19 nt, Artificial Sequence
  Description of Artificial Sequence: Synthetic oligonucleotide
agauuuaagacaaaucgag

SEQ ID NO: 1910752 - RNA, 19 nt, Artificial Sequence
  Description of Artificial Sequence: Synthetic oligonucleotide
auauauauauauauauauc

SEQ ID NO: 1910753 - RNA, 19 nt, Artificial Sequence
  Description of Artificial Sequence: Synthetic oligonucleotide
ugauggaccuuacaauacg

SEQ ID NO: 1910754 - RNA, 19 nt, Artificial Sequence
  Description of Artificial Sequence: Synthetic oligonucleotide
uuuaagacaaaucgagguc

SEQ ID NO: 1910755 - RNA, 19 nt, Artificial Sequence
  Description of Artificial Sequence: Synthetic oligonucleotide
gaauggugaauguaaacac

SEQ ID NO: 1910756 - RNA, 19 nt, Artificial Sequence
  Description of Artificial Sequence: Synthetic oligonucleotide
uuugccugaaccuccaagc

SEQ ID NO: 1910757 - RNA, 19 nt, Artificial Sequence
  Description of Artificial Sequence: Synthetic oligonucleotide
gaaccuuucaagcaguuuc

SEQ ID NO: 1910758 - RNA, 19 nt, Artificial Sequence
  Description of Artificial Sequence: Synthetic oligonucleotide
uggaccuuacaauacgccg

SEQ ID NO: 1910759 - RNA, 19 nt, Artificial Sequence
  Description of Artificial Sequence: Synthetic oligonucleotide
uuauccagaauggugaaug

SEQ ID NO: 1910760 - RNA, 19 nt, Artificial Sequence
  Description of Artificial Sequence: Synthetic oligonucleotide
gauuuaagacaaaucgagg

SEQ ID NO: 1910761 - RNA, 19 nt, Artificial Sequence
  Description of Artificial Sequence: Synthetic oligonucleotide
uggaaugcgaucucuaucu

SEQ ID NO: 1910762 - RNA, 19 nt, Artificial Sequence
  Description of Artificial Sequence: Synthetic oligonucleotide
ugaauuaagaguucuuuua

SEQ ID NO: 1910763 - RNA, 19 nt, Artificial Sequence
  Description of Artificial Sequence: Synthetic oligonucleotide
uuugaaagccacauauaga

SEQ ID NO: 1910764 - RNA, 19 nt, Artificial Sequence
  Description of Artificial Sequence: Synthetic oligonucleotide
uacaauacgccgaugcaug

SEQ ID NO: 1910765 - RNA, 19 nt, Artificial Sequence
  Description of Artificial Sequence: Synthetic oligonucleotide
aaguugguccuccaaagcu

SEQ ID NO: 1910766 - RNA, 19 nt, Artificial Sequence
  Description of Artificial Sequence: Synthetic oligonucleotide
uuuacgguccauuuuagua

SEQ ID NO: 1910767 - RNA, 19 nt, Artificial Sequence
  Description of Artificial Sequence: Synthetic oligonucleotide
uuaggcucugguuucaccc

SEQ ID NO: 1910768 - RNA, 19 nt, Artificial Sequence
  Description of Artificial Sequence: Synthetic oligonucleotide
ucugcuuuagaauggggca

SEQ ID NO: 1910769 - RNA, 19 nt, Artificial Sequence
  Description of Artificial Sequence: Synthetic oligonucleotide
cauaauguggcaauucauc

SEQ ID NO: 1910770 - RNA, 19 nt, Artificial Sequence
  Description of Artificial Sequence: Synthetic oligonucleotide
aaucuuuauaagauuuaag

SEQ ID NO: 1910771 - RNA, 19 nt, Artificial Sequence
  Description of Artificial Sequence: Synthetic oligonucleotide
uccagaauggugaauguaa

SEQ ID NO: 1910772 - RNA, 19 nt, Artificial Sequence
  Description of Artificial Sequence: Synthetic oligonucleotide
agaauggugaauguaaaca

SEQ ID NO: 1910773 - RNA, 19 nt, Artificial Sequence
  Description of Artificial Sequence: Synthetic oligonucleotide
guauaucaaagacaucugc

SEQ ID NO: 1910774 - RNA, 19 nt, Artificial Sequence
  Description of Artificial Sequence: Synthetic oligonucleotide
ucuggaggaaaagaugagg

SEQ ID NO: 1910775 - RNA, 19 nt, Artificial Sequence
  Description of Artificial Sequence: Synthetic oligonucleotide
aaugcgaucucuaucuucu

SEQ ID NO: 1910776 - RNA, 19 nt, Artificial Sequence
  Description of Artificial Sequence: Synthetic oligonucleotide
caaaagacaaaaggggacg

SEQ ID NO: 1910777 - RNA, 19 nt, Artificial Sequence
  Description of Artificial Sequence: Synthetic oligonucleotide
uguauuuugcagcugugau

SEQ ID NO: 1910778 - RNA, 19 nt, Artificial Sequence
  Description of Artificial Sequence: Synthetic oligonucleotide
ugaggugaauuugaaagcc

SEQ ID NO: 1910779 - RNA, 19 nt, Artificial Sequence
  Description of Artificial Sequence: Synthetic oligonucleotide
uuugcacucccucuguuca

SEQ ID NO: 1910780 - RNA, 19 nt, Artificial Sequence
  Description of Artificial Sequence: Synthetic oligonucleotide
gaauuugaaagccacauau

SEQ ID NO: 1910781 - RNA, 19 nt, Artificial Sequence
  Description of Artificial Sequence: Synthetic oligonucleotide
uggaagaauagucuuuggu

SEQ ID NO: 1910782 - RNA, 19 nt, Artificial Sequence
  Description of Artificial Sequence: Synthetic oligonucleotide
uggagacugguaaugagga

SEQ ID NO: 1910783 - RNA, 19 nt, Artificial Sequence
  Description of Artificial Sequence: Synthetic oligonucleotide
ugugugugauaauauauau

SEQ ID NO: 1910784 - RNA, 19 nt, Artificial Sequence
  Description of Artificial Sequence: Synthetic oligonucleotide
ucucucuguauuuugcagc

SEQ ID NO: 1910785 - RNA, 19 nt, Artificial Sequence
  Description of Artificial Sequence: Synthetic oligonucleotide
ucauuuugcacucccucug

SEQ ID NO: 1910786 - RNA, 19 nt, Artificial Sequence
  Description of Artificial Sequence: Synthetic oligonucleotide
agaguuauccacugguuca

SEQ ID NO: 1910787 - RNA, 19 nt, Artificial Sequence
  Description of Artificial Sequence: Synthetic oligonucleotide
aaagacaucugcagugggg

SEQ ID NO: 1910788 - RNA, 19 nt, Artificial Sequence
  Description of Artificial Sequence: Synthetic oligonucleotide
gauaauauauauauauaua

SEQ ID NO: 1910789 - RNA, 19 nt, Artificial Sequence
  Description of Artificial Sequence: Synthetic oligonucleotide
gaaugguugacucuuugga

SEQ ID NO: 1910790 - RNA, 19 nt, Artificial Sequence
  Description of Artificial Sequence: Synthetic oligonucleotide
aacuaagaauuuggcagac

SEQ ID NO: 1910791 - RNA, 19 nt, Artificial Sequence
  Description of Artificial Sequence: Synthetic oligonucleotide
ugagaucuacuuuaggcuc

SEQ ID NO: 1910792 - RNA, 19 nt, Artificial Sequence
  Description of Artificial Sequence: Synthetic oligonucleotide
uauccacugguucauuuug

SEQ ID NO: 1910793 - RNA, 19 nt, Artificial Sequence
  Description of Artificial Sequence: Synthetic oligonucleotide
ucucaagucuugcauuaag

SEQ ID NO: 1910794 - RNA, 19 nt, Artificial Sequence
  Description of Artificial Sequence: Synthetic oligonucleotide
uauauauauauaucaucua

SEQ ID NO: 1910795 - RNA, 19 nt, Artificial Sequence
  Description of Artificial Sequence: Synthetic oligonucleotide
aacauucucaagucuugca

SEQ ID NO: 1910796 - RNA, 19 nt, Artificial Sequence
  Description of Artificial Sequence: Synthetic oligonucleotide
acgagaaccuuucaagcag

SEQ ID NO: 1910797 - RNA, 19 nt, Artificial Sequence
  Description of Artificial Sequence: Synthetic oligonucleotide
gguaugaauauuuugaacu

SEQ ID NO: 1910798 - RNA, 19 nt, Artificial Sequence
  Description of Artificial Sequence: Synthetic oligonucleotide
uuuggagacugguaaugag

SEQ ID NO: 1910799 - RNA, 19 nt, Artificial Sequence
  Description of Artificial Sequence: Synthetic oligonucleotide
uugacucuuuggaugauac

SEQ ID NO: 1910800 - RNA, 19 nt, Artificial Sequence
  Description of Artificial Sequence: Synthetic oligonucleotide
uguggaagaauagucuuug

SEQ ID NO: 1910801 - RNA, 19 nt, Artificial Sequence
  Description of Artificial Sequence: Synthetic oligonucleotide
accauauccuguuauccag

SEQ ID NO: 1910802 - RNA, 19 nt, Artificial Sequence
  Description of Artificial Sequence: Synthetic oligonucleotide
uguaaacacaugguccacg

SEQ ID NO: 1910803 - RNA, 19 nt, Artificial Sequence
  Description of Artificial Sequence: Synthetic oligonucleotide
aauuuaucuuuacggucca

SEQ ID NO: 1910804 - RNA, 19 nt, Artificial Sequence
  Description of Artificial Sequence: Synthetic oligonucleotide
uuugacuugcuguuucucu

SEQ ID NO: 1910805 - RNA, 19 nt, Artificial Sequence
  Description of Artificial Sequence: Synthetic oligonucleotide
acagaccucauuuaucaca

SEQ ID NO: 1910806 - RNA, 19 nt, Artificial Sequence
  Description of Artificial Sequence: Synthetic oligonucleotide
cuuagcuucaaaguagaug

SEQ ID NO: 1910807 - RNA, 19 nt, Artificial Sequence
  Description of Artificial Sequence: Synthetic oligonucleotide
gggucaaaagacaaaaggg

SEQ ID NO: 1910808 - RNA, 19 nt, Artificial Sequence
  Description of Artificial Sequence: Synthetic oligonucleotide
auaaaguugguccuccaaa

SEQ ID NO: 1910809 - RNA, 19 nt, Artificial Sequence
  Description of Artificial Sequence: Synthetic oligonucleotide
agcauaauguggcaauuca

SEQ ID NO: 1910810 - RNA, 19 nt, Artificial Sequence
  Description of Artificial Sequence: Synthetic oligonucleotide
uuacgguccauuuuaguau

SEQ ID NO: 1910811 - RNA, 19 nt, Artificial Sequence
  Description of Artificial Sequence: Synthetic oligonucleotide
aagcauaauguggcaauuc

SEQ ID NO: 1910812 - RNA, 19 nt, Artificial Sequence
  Description of Artificial Sequence: Synthetic oligonucleotide
caggguaugaauauuuuga

SEQ ID NO: 1910813 - RNA, 19 nt, Artificial Sequence
  Description of Artificial Sequence: Synthetic oligonucleotide
uuggaugauaccguggugu

SEQ ID NO: 1910814 - RNA, 19 nt, Artificial Sequence
  Description of Artificial Sequence: Synthetic oligonucleotide
gaacuaagaauuuggcaga

SEQ ID NO: 1910815 - RNA, 19 nt, Artificial Sequence
  Description of Artificial Sequence: Synthetic oligonucleotide
uuaagugucuuguucugaa

SEQ ID NO: 1910816 - RNA, 19 nt, Artificial Sequence
  Description of Artificial Sequence: Synthetic oligonucleotide
ucuugcauuaagugucuug

SEQ ID NO: 1910817 - RNA, 19 nt, Artificial Sequence
  Description of Artificial Sequence: Synthetic oligonucleotide
aauacgccgaugcauguuu

SEQ ID NO: 1910818 - RNA, 19 nt, Artificial Sequence
  Description of Artificial Sequence: Synthetic oligonucleotide
aucgagguccuauuuccac

SEQ ID NO: 1910819 - RNA, 19 nt, Artificial Sequence
  Description of Artificial Sequence: Synthetic oligonucleotide
uuucacagaccucauuuau

SEQ ID NO: 1910820 - RNA, 19 nt, Artificial Sequence
  Description of Artificial Sequence: Synthetic oligonucleotide
auuuugaacuaagaauuug

SEQ ID NO: 1910821 - RNA, 19 nt, Artificial Sequence
  Description of Artificial Sequence: Synthetic oligonucleotide
gaggaaaagaugaggauuc

SEQ ID NO: 1910822 - RNA, 19 nt, Artificial Sequence
  Description of Artificial Sequence: Synthetic oligonucleotide
aagacaaaaggggacgaga

SEQ ID NO: 1910823 - RNA, 19 nt, Artificial Sequence
  Description of Artificial Sequence: Synthetic oligonucleotide
uuugcccuugcaaacggga

SEQ ID NO: 1910824 - RNA, 19 nt, Artificial Sequence
  Description of Artificial Sequence: Synthetic oligonucleotide
ucuuuacgguccauuuuag

SEQ ID NO: 1910825 - RNA, 19 nt, Artificial Sequence
  Description of Artificial Sequence: Synthetic oligonucleotide
auauauauauauauaucau

SEQ ID NO: 1910826 - RNA, 19 nt, Artificial Sequence
  Description of Artificial Sequence: Synthetic oligonucleotide
ucuacuuuaggcucugguu

SEQ ID NO: 1910827 - RNA, 19 nt, Artificial Sequence
  Description of Artificial Sequence: Synthetic oligonucleotide
cuauaaucuggaaguuccg

SEQ ID NO: 1910828 - RNA, 19 nt, Artificial Sequence
  Description of Artificial Sequence: Synthetic oligonucleotide
uucaguucagccaggguau

SEQ ID NO: 1910829 - RNA, 19 nt, Artificial Sequence
  Description of Artificial Sequence: Synthetic oligonucleotide
aguaucugcuuuagaaugg

SEQ ID NO: 1910830 - RNA, 19 nt, Artificial Sequence
  Description of Artificial Sequence: Synthetic oligonucleotide
aaagccacauauagagauc

SEQ ID NO: 1910831 - RNA, 19 nt, Artificial Sequence
  Description of Artificial Sequence: Synthetic oligonucleotide
gaaaccauauccuguuauc

SEQ ID NO: 1910832 - RNA, 19 nt, Artificial Sequence
  Description of Artificial Sequence: Synthetic oligonucleotide
cauauaaaguugguccucc

SEQ ID NO: 1910833 - RNA, 19 nt, Artificial Sequence
  Description of Artificial Sequence: Synthetic oligonucleotide
uauaaucuggaaguuccga

SEQ ID NO: 1910834 - RNA, 19 nt, Artificial Sequence
  Description of Artificial Sequence: Synthetic oligonucleotide
ugcugugagaucuacuuua

SEQ ID NO: 1910835 - RNA, 19 nt, Artificial Sequence
  Description of Artificial Sequence: Synthetic oligonucleotide
aucuuuacgguccauuuua

SEQ ID NO: 1910836 - RNA, 19 nt, Artificial Sequence
  Description of Artificial Sequence: Synthetic oligonucleotide
aaaagacaaaaggggacga

SEQ ID NO: 1910837 - RNA, 19 nt, Artificial Sequence
  Description of Artificial Sequence: Synthetic oligonucleotide
ugugugugugugauaauau

SEQ ID NO: 1910838 - RNA, 19 nt, Artificial Sequence
  Description of Artificial Sequence: Synthetic oligonucleotide
uuaucuuuacgguccauuu

SEQ ID NO: 1910839 - RNA, 19 nt, Artificial Sequence
  Description of Artificial Sequence: Synthetic oligonucleotide
aggugaauuugaaagccac

SEQ ID NO: 1910840 - RNA, 19 nt, Artificial Sequence
  Description of Artificial Sequence: Synthetic oligonucleotide
uaagacaaaucgagguccu

SEQ ID NO: 1910841 - RNA, 19 nt, Artificial Sequence
  Description of Artificial Sequence: Synthetic oligonucleotide
auauauauauauauauaua

SEQ ID NO: 1910842 - RNA, 19 nt, Artificial Sequence
  Description of Artificial Sequence: Synthetic oligonucleotide
agaguucuuuuaacaaagc

SEQ ID NO: 1910843 - RNA, 19 nt, Artificial Sequence
  Description of Artificial Sequence: Synthetic oligonucleotide
uucuacagaggccugcuua

SEQ ID NO: 1910844 - RNA, 19 nt, Artificial Sequence
  Description of Artificial Sequence: Synthetic oligonucleotide
gacgagaaccuuucaagca

SEQ ID NO: 1910845 - RNA, 19 nt, Artificial Sequence
  Description of Artificial Sequence: Synthetic oligonucleotide
uccauuugcccuugcaaac

SEQ ID NO: 1910846 - RNA, 19 nt, Artificial Sequence
  Description of Artificial Sequence: Synthetic oligonucleotide
gauaccgugguguacuaaa

SEQ ID NO: 1910847 - RNA, 19 nt, Artificial Sequence
  Description of Artificial Sequence: Synthetic oligonucleotide
uuccgaaaccauauccugu

SEQ ID NO: 1910848 - RNA, 19 nt, Artificial Sequence
  Description of Artificial Sequence: Synthetic oligonucleotide
ucuuuuaacaaagcauaau

SEQ ID NO: 1910849 - RNA, 19 nt, Artificial Sequence
  Description of Artificial Sequence: Synthetic oligonucleotide
cauguuuggagacugguaa

SEQ ID NO: 1910850 - RNA, 19 nt, Artificial Sequence
  Description of Artificial Sequence: Synthetic oligonucleotide
ugaauuugaaagccacaua

SEQ ID NO: 1910851 - RNA, 19 nt, Artificial Sequence
  Description of Artificial Sequence: Synthetic oligonucleotide
uugccugaaccuccaagcc

SEQ ID NO: 1910852 - RNA, 19 nt, Artificial Sequence
  Description of Artificial Sequence: Synthetic oligonucleotide
gauggaccuuacaauacgc

SEQ ID NO: 1910853 - RNA, 19 nt, Artificial Sequence
  Description of Artificial Sequence: Synthetic oligonucleotide
uuuggaugauaccguggug

SEQ ID NO: 1910854 - RNA, 19 nt, Artificial Sequence
  Description of Artificial Sequence: Synthetic oligonucleotide
auggaccuuacaauacgcc

SEQ ID NO: 1910855 - RNA, 19 nt, Artificial Sequence
  Description of Artificial Sequence: Synthetic oligonucleotide
uacuaaagaucugaauuaa

SEQ ID NO: 1910856 - RNA, 19 nt, Artificial Sequence
  Description of Artificial Sequence: Synthetic oligonucleotide
cauuaagugucuuguucug

SEQ ID NO: 1910857 - RNA, 19 nt, Artificial Sequence
  Description of Artificial Sequence: Synthetic oligonucleotide
ugcccuugcaaacgggacc

SEQ ID NO: 1910858 - RNA, 19 nt, Artificial Sequence
  Description of Artificial Sequence: Synthetic oligonucleotide
ucuacagaggccugcuuaa

SEQ ID NO: 1910859 - RNA, 19 nt, Artificial Sequence
  Description of Artificial Sequence: Synthetic oligonucleotide
ugcuuaacuggcugcccgg

SEQ ID NO: 1910860 - RNA, 19 nt, Artificial Sequence
  Description of Artificial Sequence: Synthetic oligonucleotide
uacagaggccugcuuaacu

SEQ ID NO: 1910861 - RNA, 19 nt, Artificial Sequence
  Description of Artificial Sequence: Synthetic oligonucleotide
uuuaggcucugguuucacc

SEQ ID NO: 1910862 - RNA, 19 nt, Artificial Sequence
  Description of Artificial Sequence: Synthetic oligonucleotide
aggguaugaauauuuugaa

SEQ ID NO: 1910863 - RNA, 19 nt, Artificial Sequence
  Description of Artificial Sequence: Synthetic oligonucleotide
aaggggacgagaaccuuuc

SEQ ID NO: 1910864 - RNA, 19 nt, Artificial Sequence
  Description of Artificial Sequence: Synthetic oligonucleotide
ccuuacaauacgccgaugc

SEQ ID NO: 1910865 - RNA, 19 nt, Artificial Sequence
  Description of Artificial Sequence: Synthetic oligonucleotide
gggacgagaaccuuucaag

SEQ ID NO: 1910866 - RNA, 19 nt, Artificial Sequence
  Description of Artificial Sequence: Synthetic oligonucleotide
cagaauggugaauguaaac

SEQ ID NO: 1910867 - RNA, 19 nt, Artificial Sequence
  Description of Artificial Sequence: Synthetic oligonucleotide
cauuugcccuugcaaacgg

SEQ ID NO: 1910868 - RNA, 19 nt, Artificial Sequence
  Description of Artificial Sequence: Synthetic oligonucleotide
cuuugccugaaccuccaag

SEQ ID NO: 1910869 - RNA, 19 nt, Artificial Sequence
  Description of Artificial Sequence: Synthetic oligonucleotide
uuaacuggcugcccggaau

SEQ ID NO: 1910870 - RNA, 19 nt, Artificial Sequence
  Description of Artificial Sequence: Synthetic oligonucleotide
guaucugcuuuagaauggg

SEQ ID NO: 1910871 - RNA, 19 nt, Artificial Sequence
  Description of Artificial Sequence: Synthetic oligonucleotide
accgugguguacuaaagau

SEQ ID NO: 1910872 - RNA, 19 nt, Artificial Sequence
  Description of Artificial Sequence: Synthetic oligonucleotide
gucgccaccaucuugccuc

SEQ ID NO: 1910873 - RNA, 19 nt, Artificial Sequence
  Description of Artificial Sequence: Synthetic oligonucleotide
ccuauuuccacuagagcag

SEQ ID NO: 1910874 - RNA, 19 nt, Artificial Sequence
  Description of Artificial Sequence: Synthetic oligonucleotide
aucuacuuuaggcucuggu

SEQ ID NO: 1910875 - RNA, 19 nt, Artificial Sequence
  Description of Artificial Sequence: Synthetic oligonucleotide
uaccgugguguacuaaaga

SEQ ID NO: 1910876 - RNA, 19 nt, Artificial Sequence
  Description of Artificial Sequence: Synthetic oligonucleotide
uuuggcagacggcccauga

SEQ ID NO: 1910877 - RNA, 19 nt, Artificial Sequence
  Description of Artificial Sequence: Synthetic oligonucleotide
uccuccaaagcuucccuga

SEQ ID NO: 1910878 - RNA, 19 nt, Artificial Sequence
  Description of Artificial Sequence: Synthetic oligonucleotide
gaauuuggcagacggccca

SEQ ID NO: 1910879 - RNA, 19 nt, Artificial Sequence
  Description of Artificial Sequence: Synthetic oligonucleotide
uuuaucuuuacgguccauu

SEQ ID NO: 1910880 - RNA, 19 nt, Artificial Sequence
  Description of Artificial Sequence: Synthetic oligonucleotide
auucucaagucuugcauua

SEQ ID NO: 1910881 - RNA, 19 nt, Artificial Sequence
  Description of Artificial Sequence: Synthetic oligonucleotide
uggaaguuccgaaaccaua

SEQ ID NO: 1910882 - RNA, 19 nt, Artificial Sequence
  Description of Artificial Sequence: Synthetic oligonucleotide
uucuauaaucuggaaguuc

SEQ ID NO: 1910883 - RNA, 19 nt, Artificial Sequence
  Description of Artificial Sequence: Synthetic oligonucleotide
guaaacacaugguccacga

SEQ ID NO: 1910884 - RNA, 19 nt, Artificial Sequence
  Description of Artificial Sequence: Synthetic oligonucleotide
uuuugcacucccucuguuc

SEQ ID NO: 1910885 - RNA, 19 nt, Artificial Sequence
  Description of Artificial Sequence: Synthetic oligonucleotide
cugcuuaacuggcugcccg

SEQ ID NO: 1910886 - RNA, 19 nt, Artificial Sequence
  Description of Artificial Sequence: Synthetic oligonucleotide
gcaaacgggaccuggaaug

SEQ ID NO: 1910887 - RNA, 19 nt, Artificial Sequence
  Description of Artificial Sequence: Synthetic oligonucleotide
uacuuuaggcucugguuuc

SEQ ID NO: 1910888 - RNA, 19 nt, Artificial Sequence
  Description of Artificial Sequence: Synthetic oligonucleotide
uaucuuuacgguccauuuu

SEQ ID NO: 1910889 - RNA, 19 nt, Artificial Sequence
  Description of Artificial Sequence: Synthetic oligonucleotide
uacgccgaugcauguuugg

SEQ ID NO: 1910890 - RNA, 19 nt, Artificial Sequence
  Description of Artificial Sequence: Synthetic oligonucleotide
caugguccacgaaugguug

SEQ ID NO: 1910891 - RNA, 19 nt, Artificial Sequence
  Description of Artificial Sequence: Synthetic oligonucleotide
acccacuguauuucuacug

SEQ ID NO: 1910892 - RNA, 19 nt, Artificial Sequence
  Description of Artificial Sequence: Synthetic oligonucleotide
uccgaaaccauauccuguu

SEQ ID NO: 1910893 - RNA, 19 nt, Artificial Sequence
  Description of Artificial Sequence: Synthetic oligonucleotide
aguuccgaaaccauauccu

SEQ ID NO: 1910894 - RNA, 19 nt, Artificial Sequence
  Description of Artificial Sequence: Synthetic oligonucleotide
ucuuugacuugcuguuucu

SEQ ID NO: 1910895 - RNA, 19 nt, Artificial Sequence
  Description of Artificial Sequence: Synthetic oligonucleotide
ucauauaaaguugguccuc

SEQ ID NO: 1910896 - RNA, 19 nt, Artificial Sequence
  Description of Artificial Sequence: Synthetic oligonucleotide
ugacuugcuguuucucucu

SEQ ID NO: 1910897 - RNA, 19 nt, Artificial Sequence
  Description of Artificial Sequence: Synthetic oligonucleotide
uggaggaaaagaugaggau

SEQ ID NO: 1910898 - RNA, 19 nt, Artificial Sequence
  Description of Artificial Sequence: Synthetic oligonucleotide
ugaggauucgcuccuuguu

SEQ ID NO: 1910899 - RNA, 19 nt, Artificial Sequence
  Description of Artificial Sequence: Synthetic oligonucleotide
guggaagaauagucuuugg

SEQ ID NO: 1910900 - RNA, 19 nt, Artificial Sequence
  Description of Artificial Sequence: Synthetic oligonucleotide
ugacucuuuggaugauacc

SEQ ID NO: 1910901 - RNA, 19 nt, Artificial Sequence
  Description of Artificial Sequence: Synthetic oligonucleotide
uuuucuacagaggccugcu

SEQ ID NO: 1910902 - RNA, 19 nt, Artificial Sequence
  Description of Artificial Sequence: Synthetic oligonucleotide
aaacgggaccuggaaugcg

SEQ ID NO: 1910903 - RNA, 19 nt, Artificial Sequence
  Description of Artificial Sequence: Synthetic oligonucleotide
uacgguccauuuuaguauc

SEQ ID NO: 1910904 - RNA, 19 nt, Artificial Sequence
  Description of Artificial Sequence: Synthetic oligonucleotide
gugagaucuacuuuaggcu

SEQ ID NO: 1910905 - RNA, 19 nt, Artificial Sequence
  Description of Artificial Sequence: Synthetic oligonucleotide
ggacgagaaccuuucaagc

SEQ ID NO: 1910906 - RNA, 19 nt, Artificial Sequence
  Description of Artificial Sequence: Synthetic oligonucleotide
ugguaaugaggauuuucau

SEQ ID NO: 1910907 - RNA, 19 nt, Artificial Sequence
  Description of Artificial Sequence: Synthetic oligonucleotide
ugcaaacgggaccuggaau

SEQ ID NO: 1910908 - RNA, 19 nt, Artificial Sequence
  Description of Artificial Sequence: Synthetic oligonucleotide
ucgagguccuauuuccacu

SEQ ID NO: 1910909 - RNA, 19 nt, Artificial Sequence
  Description of Artificial Sequence: Synthetic oligonucleotide
cuauuuccacuagagcagc

SEQ ID NO: 1910910 - RNA, 19 nt, Artificial Sequence
  Description of Artificial Sequence: Synthetic oligonucleotide
uccacgaaugguugacucu

SEQ ID NO: 1910911 - RNA, 19 nt, Artificial Sequence
  Description of Artificial Sequence: Synthetic oligonucleotide
gaggauuuucauauaaagu

SEQ ID NO: 1910912 - RNA, 19 nt, Artificial Sequence
  Description of Artificial Sequence: Synthetic oligonucleotide
guccuauuuccacuagagc

SEQ ID NO: 1910913 - RNA, 19 nt, Artificial Sequence
  Description of Artificial Sequence: Synthetic oligonucleotide
uaacuggcugcccggaauc

SEQ ID NO: 1910914 - RNA, 19 nt, Artificial Sequence
  Description of Artificial Sequence: Synthetic oligonucleotide
acgaaugguugacucuuug

SEQ ID NO: 1910915 - RNA, 19 nt, Artificial Sequence
  Description of Artificial Sequence: Synthetic oligonucleotide
aaagcauaauguggcaauu

SEQ ID NO: 1910916 - RNA, 19 nt, Artificial Sequence
  Description of Artificial Sequence: Synthetic oligonucleotide
gaugauaccgugguguacu

SEQ ID NO: 1910917 - RNA, 19 nt, Artificial Sequence
  Description of Artificial Sequence: Synthetic oligonucleotide
cugcccggaaucuuuccgg

SEQ ID NO: 1910918 - RNA, 19 nt, Artificial Sequence
  Description of Artificial Sequence: Synthetic oligonucleotide
uauaugggugugugugugu

SEQ ID NO: 1910919 - RNA, 19 nt, Artificial Sequence
  Description of Artificial Sequence: Synthetic oligonucleotide
aaagaguuauccacugguu

SEQ ID NO: 1910920 - RNA, 19 nt, Artificial Sequence
  Description of Artificial Sequence: Synthetic oligonucleotide
cuuacaauacgccgaugca

SEQ ID NO: 1910921 - RNA, 19 nt, Artificial Sequence
  Description of Artificial Sequence: Synthetic oligonucleotide
gaaguuccgaaaccauauc

SEQ ID NO: 1910922 - RNA, 19 nt, Artificial Sequence
  Description of Artificial Sequence: Synthetic oligonucleotide
agaggccugcuuaacuggc

SEQ ID NO: 1910923 - RNA, 19 nt, Artificial Sequence
  Description of Artificial Sequence: Synthetic oligonucleotide
aggaaaagaugaggauucg

SEQ ID NO: 1910924 - RNA, 19 nt, Artificial Sequence
  Description of Artificial Sequence: Synthetic oligonucleotide
gguccuauuuccacuagag

SEQ ID NO: 1910925 - RNA, 19 nt, Artificial Sequence
  Description of Artificial Sequence: Synthetic oligonucleotide
auaugggugugugugugug

SEQ ID NO: 1910926 - RNA, 19 nt, Artificial Sequence
  Description of Artificial Sequence: Synthetic oligonucleotide
uaagugucuuguucugaaa

SEQ ID NO: 1910927 - RNA, 19 nt, Artificial Sequence
  Description of Artificial Sequence: Synthetic oligonucleotide
ggguaugaauauuuugaac

SEQ ID NO: 1910928 - RNA, 19 nt, Artificial Sequence
  Description of Artificial Sequence: Synthetic oligonucleotide
cuggaaugcgaucucuauc

SEQ ID NO: 1910929 - RNA, 19 nt, Artificial Sequence
  Description of Artificial Sequence: Synthetic oligonucleotide
augaggauucgcuccuugu

SEQ ID NO: 1910930 - RNA, 19 nt, Artificial Sequence
  Description of Artificial Sequence: Synthetic oligonucleotide
gugauaauauauauauaua

SEQ ID NO: 1910931 - RNA, 19 nt, Artificial Sequence
  Description of Artificial Sequence: Synthetic oligonucleotide
uugcccuugcaaacgggac

SEQ ID NO: 1910932 - RNA, 19 nt, Artificial Sequence
  Description of Artificial Sequence: Synthetic oligonucleotide
acaauacgccgaugcaugu

SEQ ID NO: 1910933 - RNA, 19 nt, Artificial Sequence
  Description of Artificial Sequence: Synthetic oligonucleotide
ucuuagcuucaaaguagau

SEQ ID NO: 1910934 - RNA, 19 nt, Artificial Sequence
  Description of Artificial Sequence: Synthetic oligonucleotide
gcaauucaucaaaagcagg

SEQ ID NO: 1910935 - RNA, 19 nt, Artificial Sequence
  Description of Artificial Sequence: Synthetic oligonucleotide
cagaccucauuuaucacaa

SEQ ID NO: 1910936 - RNA, 19 nt, Artificial Sequence
  Description of Artificial Sequence: Synthetic oligonucleotide
agacaaaucgagguccuau

SEQ ID NO: 1910937 - RNA, 19 nt, Artificial Sequence
  Description of Artificial Sequence: Synthetic oligonucleotide
uauggguguguguguguga

SEQ ID NO: 1910938 - RNA, 19 nt, Artificial Sequence
  Description of Artificial Sequence: Synthetic oligonucleotide
agacaaaaggggacgagaa

SEQ ID NO: 1910939 - RNA, 19 nt, Artificial Sequence
  Description of Artificial Sequence: Synthetic oligonucleotide
auguuuggagacugguaau

SEQ ID NO: 1910940 - RNA, 19 nt, Artificial Sequence
  Description of Artificial Sequence: Synthetic oligonucleotide
acuagagcagcaucuucuu

SEQ ID NO: 1910941 - RNA, 19 nt, Artificial Sequence
  Description of Artificial Sequence: Synthetic oligonucleotide
caaacgggaccuggaaugc

SEQ ID NO: 1910942 - RNA, 19 nt, Artificial Sequence
  Description of Artificial Sequence: Synthetic oligonucleotide
cuugcauuaagugucuugu

SEQ ID NO: 1910943 - RNA, 19 nt, Artificial Sequence
  Description of Artificial Sequence: Synthetic oligonucleotide
aaucgagguccuauuucca

SEQ ID NO: 1910944 - RNA, 19 nt, Artificial Sequence
  Description of Artificial Sequence: Synthetic oligonucleotide
uggaugauaccguggugua

SEQ ID NO: 1910945 - RNA, 19 nt, Artificial Sequence
  Description of Artificial Sequence: Synthetic oligonucleotide
ugcccggaaucuuuccggc

SEQ ID NO: 1910946 - RNA, 19 nt, Artificial Sequence
  Description of Artificial Sequence: Synthetic oligonucleotide
uaaugaggauuuucauaua

SEQ ID NO: 1910947 - RNA, 19 nt, Artificial Sequence
  Description of Artificial Sequence: Synthetic oligonucleotide
cuuuggaugauaccguggu

SEQ ID NO: 1910948 - RNA, 19 nt, Artificial Sequence
  Description of Artificial Sequence: Synthetic oligonucleotide
aacgggaccuggaaugcga

SEQ ID NO: 1910949 - RNA, 19 nt, Artificial Sequence
  Description of Artificial Sequence: Synthetic oligonucleotide
gugauggaccuuacaauac

SEQ ID NO: 1910950 - RNA, 19 nt, Artificial Sequence
  Description of Artificial Sequence: Synthetic oligonucleotide
aggauucgcuccuuguuuu

SEQ ID NO: 1910951 - RNA, 19 nt, Artificial Sequence
  Description of Artificial Sequence: Synthetic oligonucleotide
gagguccuauuuccacuag

SEQ ID NO: 1910952 - RNA, 19 nt, Artificial Sequence
  Description of Artificial Sequence: Synthetic oligonucleotide
ggaagaauagucuuugguu

SEQ ID NO: 1910953 - RNA, 19 nt, Artificial Sequence
  Description of Artificial Sequence: Synthetic oligonucleotide
ggaaaagaugaggauucgc

SEQ ID NO: 1910954 - RNA, 19 nt, Artificial Sequence
  Description of Artificial Sequence: Synthetic oligonucleotide
acucuuuggaugauaccgu

SEQ ID NO: 1910955 - RNA, 19 nt, Artificial Sequence
  Description of Artificial Sequence: Synthetic oligonucleotide
guccacgaaugguugacuc

SEQ ID NO: 1910956 - RNA, 19 nt, Artificial Sequence
  Description of Artificial Sequence: Synthetic oligonucleotide
ugcuuuagaauggggcauc

SEQ ID NO: 1910957 - RNA, 19 nt, Artificial Sequence
  Description of Artificial Sequence: Synthetic oligonucleotide
gugaauuugaaagccacau

SEQ ID NO: 1910958 - RNA, 19 nt, Artificial Sequence
  Description of Artificial Sequence: Synthetic oligonucleotide
auaccgugguguacuaaag

SEQ ID NO: 1910959 - RNA, 19 nt, Artificial Sequence
  Description of Artificial Sequence: Synthetic oligonucleotide
auuugcccuugcaaacggg

SEQ ID NO: 1910960 - RNA, 19 nt, Artificial Sequence
  Description of Artificial Sequence: Synthetic oligonucleotide
uucacccacuguauuucua

SEQ ID NO: 1910961 - RNA, 19 nt, Artificial Sequence
  Description of Artificial Sequence: Synthetic oligonucleotide
agacugguaaugaggauuu

SEQ ID NO: 1910962 - RNA, 19 nt, Artificial Sequence
  Description of Artificial Sequence: Synthetic oligonucleotide
acuugcuguuucucucugu

SEQ ID NO: 1910963 - RNA, 19 nt, Artificial Sequence
  Description of Artificial Sequence: Synthetic oligonucleotide
cuuugacuugcuguuucuc

SEQ ID NO: 1910964 - RNA, 19 nt, Artificial Sequence
  Description of Artificial Sequence: Synthetic oligonucleotide
aaaaggggacgagaaccuu

SEQ ID NO: 1910965 - RNA, 19 nt, Artificial Sequence
  Description of Artificial Sequence: Synthetic oligonucleotide
gcugcccggaaucuuuccg

SEQ ID NO: 1910966 - RNA, 19 nt, Artificial Sequence
  Description of Artificial Sequence: Synthetic oligonucleotide
cgaaugguugacucuuugg

SEQ ID NO: 1910967 - RNA, 19 nt, Artificial Sequence
  Description of Artificial Sequence: Synthetic oligonucleotide
agaucuacuuuaggcucug

SEQ ID NO: 1910968 - RNA, 19 nt, Artificial Sequence
  Description of Artificial Sequence: Synthetic oligonucleotide
auuuugcacucccucuguu

SEQ ID NO: 1910969 - RNA, 19 nt, Artificial Sequence
  Description of Artificial Sequence: Synthetic oligonucleotide
cucucuguauuuugcagcu

SEQ ID NO: 1910970 - RNA, 19 nt, Artificial Sequence
  Description of Artificial Sequence: Synthetic oligonucleotide
gaucuacuuuaggcucugg

SEQ ID NO: 1910971 - RNA, 19 nt, Artificial Sequence
  Description of Artificial Sequence: Synthetic oligonucleotide
gccugaaccuccaagcccc

SEQ ID NO: 1910972 - RNA, 19 nt, Artificial Sequence
  Description of Artificial Sequence: Synthetic oligonucleotide
caaaaggggacgagaaccu

SEQ ID NO: 1910973 - RNA, 19 nt, Artificial Sequence
  Description of Artificial Sequence: Synthetic oligonucleotide
agcugugauggaccuuaca

SEQ ID NO: 1910974 - RNA, 19 nt, Artificial Sequence
  Description of Artificial Sequence: Synthetic oligonucleotide
gccacauauagagauccug

SEQ ID NO: 1910975 - RNA, 19 nt, Artificial Sequence
  Description of Artificial Sequence: Synthetic oligonucleotide
augggugugugugugugau

SEQ ID NO: 1910976 - RNA, 19 nt, Artificial Sequence
  Description of Artificial Sequence: Synthetic oligonucleotide
gugugugugugugauaaua

SEQ ID NO: 1910977 - RNA, 19 nt, Artificial Sequence
  Description of Artificial Sequence: Synthetic oligonucleotide
agucuugcauuaagugucu

SEQ ID NO: 1910978 - RNA, 19 nt, Artificial Sequence
  Description of Artificial Sequence: Synthetic oligonucleotide
uucucaagucuugcauuaa

SEQ ID NO: 1910979 - RNA, 19 nt, Artificial Sequence
  Description of Artificial Sequence: Synthetic oligonucleotide
ggaccuuacaauacgccga

SEQ ID NO: 1910980 - RNA, 19 nt, Artificial Sequence
  Description of Artificial Sequence: Synthetic oligonucleotide
cugguauaucaaagacauc

SEQ ID NO: 1910981 - RNA, 19 nt, Artificial Sequence
  Description of Artificial Sequence: Synthetic oligonucleotide
ccauuugcccuugcaaacg

SEQ ID NO: 1910982 - RNA, 19 nt, Artificial Sequence
  Description of Artificial Sequence: Synthetic oligonucleotide
gugugugauaauauauaua

SEQ ID NO: 1910983 - RNA, 19 nt, Artificial Sequence
  Description of Artificial Sequence: Synthetic oligonucleotide
gaggauucgcuccuuguuu

SEQ ID NO: 1910984 - RNA, 19 nt, Artificial Sequence
  Description of Artificial Sequence: Synthetic oligonucleotide
gacaaaucgagguccuauu

SEQ ID NO: 1910985 - RNA, 19 nt, Artificial Sequence
  Description of Artificial Sequence: Synthetic oligonucleotide
acuuuaggcucugguuuca

SEQ ID NO: 1910986 - RNA, 19 nt, Artificial Sequence
  Description of Artificial Sequence: Synthetic oligonucleotide
cuucuucuauaaucuggaa

SEQ ID NO: 1910987 - RNA, 19 nt, Artificial Sequence
  Description of Artificial Sequence: Synthetic oligonucleotide
gcugugagaucuacuuuag

SEQ ID NO: 1910988 - RNA, 19 nt, Artificial Sequence
  Description of Artificial Sequence: Synthetic oligonucleotide
acgccgcuuccucuugguc

SEQ ID NO: 1910989 - RNA, 19 nt, Artificial Sequence
  Description of Artificial Sequence: Synthetic oligonucleotide
gagaucuacuuuaggcucu

SEQ ID NO: 1910990 - RNA, 19 nt, Artificial Sequence
  Description of Artificial Sequence: Synthetic oligonucleotide
gaccuuacaauacgccgau

SEQ ID NO: 1910991 - RNA, 19 nt, Artificial Sequence
  Description of Artificial Sequence: Synthetic oligonucleotide
aagacaaaucgagguccua

SEQ ID NO: 1910992 - RNA, 19 nt, Artificial Sequence
  Description of Artificial Sequence: Synthetic oligonucleotide
cgugguguacuaaagaucu

SEQ ID NO: 1910993 - RNA, 19 nt, Artificial Sequence
  Description of Artificial Sequence: Synthetic oligonucleotide
agaaccuuucaagcaguuu

SEQ ID NO: 1910994 - RNA, 19 nt, Artificial Sequence
  Description of Artificial Sequence: Synthetic oligonucleotide
auccagaauggugaaugua

SEQ ID NO: 1910995 - RNA, 19 nt, Artificial Sequence
  Description of Artificial Sequence: Synthetic oligonucleotide
cuuuaggcucugguuucac

SEQ ID NO: 1910996 - RNA, 19 nt, Artificial Sequence
  Description of Artificial Sequence: Synthetic oligonucleotide
gggucauguggaagaauag

SEQ ID NO: 1910997 - RNA, 19 nt, Artificial Sequence
  Description of Artificial Sequence: Synthetic oligonucleotide
agccaggguaugaauauuu

SEQ ID NO: 1910998 - RNA, 19 nt, Artificial Sequence
  Description of Artificial Sequence: Synthetic oligonucleotide
ugauaccgugguguacuaa

SEQ ID NO: 1910999 - RNA, 19 nt, Artificial Sequence
  Description of Artificial Sequence: Synthetic oligonucleotide
ucccucuguucaucuucug

SEQ ID NO: 1911000 - RNA, 19 nt, Artificial Sequence
  Description of Artificial Sequence: Synthetic oligonucleotide
cugugauggaccuuacaau

SEQ ID NO: 1911001 - RNA, 19 nt, Artificial Sequence
  Description of Artificial Sequence: Synthetic oligonucleotide
gggugugugugugugauaa

SEQ ID NO: 1911002 - RNA, 19 nt, Artificial Sequence
  Description of Artificial Sequence: Synthetic oligonucleotide
ccgugguguacuaaagauc

SEQ ID NO: 1911003 - RNA, 19 nt, Artificial Sequence
  Description of Artificial Sequence: Synthetic oligonucleotide
gccgcuuccucuuggucgc

SEQ ID NO: 1911004 - RNA, 19 nt, Artificial Sequence
  Description of Artificial Sequence: Synthetic oligonucleotide
uggucgccaccaucuugcc

SEQ ID NO: 1911005 - RNA, 19 nt, Artificial Sequence
  Description of Artificial Sequence: Synthetic oligonucleotide
cuacagaggccugcuuaac

SEQ ID NO: 1911006 - RNA, 19 nt, Artificial Sequence
  Description of Artificial Sequence: Synthetic oligonucleotide
agcagggucaaaagacaaa

SEQ ID NO: 1911007 - RNA, 19 nt, Artificial Sequence
  Description of Artificial Sequence: Synthetic oligonucleotide
cuuuacgguccauuuuagu

SEQ ID NO: 1911008 - RNA, 19 nt, Artificial Sequence
  Description of Artificial Sequence: Synthetic oligonucleotide
cgccgcuuccucuuggucg

SEQ ID NO: 1911009 - RNA, 19 nt, Artificial Sequence
  Description of Artificial Sequence: Synthetic oligonucleotide
acgccgaugcauguuugga

SEQ ID NO: 1911010 - RNA, 19 nt, Artificial Sequence
  Description of Artificial Sequence: Synthetic oligonucleotide
augauaccgugguguacua

SEQ ID NO: 1911011 - RNA, 19 nt, Artificial Sequence
  Description of Artificial Sequence: Synthetic oligonucleotide
ggggucauguggaagaaua

SEQ ID NO: 1911012 - RNA, 19 nt, Artificial Sequence
  Description of Artificial Sequence: Synthetic oligonucleotide
ggaaguuccgaaaccauau

SEQ ID NO: 1911013 - RNA, 19 nt, Artificial Sequence
  Description of Artificial Sequence: Synthetic oligonucleotide
gguguacuaaagaucugaa

SEQ ID NO: 1911014 - RNA, 19 nt, Artificial Sequence
  Description of Artificial Sequence: Synthetic oligonucleotide
cacauauagagauccuguu

SEQ ID NO: 1911015 - RNA, 19 nt, Artificial Sequence
  Description of Artificial Sequence: Synthetic oligonucleotide
auacgccgaugcauguuug

SEQ ID NO: 1911016 - RNA, 19 nt, Artificial Sequence
  Description of Artificial Sequence: Synthetic oligonucleotide
aggggacgagaaccuuuca

SEQ ID NO: 1911017 - RNA, 19 nt, Artificial Sequence
  Description of Artificial Sequence: Synthetic oligonucleotide
ggccugcuuaacuggcugc

SEQ ID NO: 1911018 - RNA, 19 nt, Artificial Sequence
  Description of Artificial Sequence: Synthetic oligonucleotide
auuuggcagacggcccaug

SEQ ID NO: 1911019 - RNA, 19 nt, Artificial Sequence
  Description of Artificial Sequence: Synthetic oligonucleotide
ggggacgagaaccuuucaa

SEQ ID NO: 1911020 - RNA, 19 nt, Artificial Sequence
  Description of Artificial Sequence: Synthetic oligonucleotide
guugacucuuuggaugaua

SEQ ID NO: 1911021 - RNA, 19 nt, Artificial Sequence
  Description of Artificial Sequence: Synthetic oligonucleotide
ggcccaugaggugaauuug

SEQ ID NO: 1911022 - RNA, 19 nt, Artificial Sequence
  Description of Artificial Sequence: Synthetic oligonucleotide
cuuaacuggcugcccggaa

SEQ ID NO: 1911023 - RNA, 19 nt, Artificial Sequence
  Description of Artificial Sequence: Synthetic oligonucleotide
ccgaugcauguuuggagac

SEQ ID NO: 1911024 - RNA, 19 nt, Artificial Sequence
  Description of Artificial Sequence: Synthetic oligonucleotide
ccacauauagagauccugu

SEQ ID NO: 1911025 - RNA, 19 nt, Artificial Sequence
  Description of Artificial Sequence: Synthetic oligonucleotide
gguuucacccacuguauuu

SEQ ID NO: 1911026 - RNA, 19 nt, Artificial Sequence
  Description of Artificial Sequence: Synthetic oligonucleotide
ggucauguggaagaauagu

SEQ ID NO: 1911027 - RNA, 19 nt, Artificial Sequence
  Description of Artificial Sequence: Synthetic oligonucleotide
gaguuauccacugguucau

SEQ ID NO: 1911028 - RNA, 19 nt, Artificial Sequence
  Description of Artificial Sequence: Synthetic oligonucleotide
ccagaauggugaauguaaa

SEQ ID NO: 1911029 - RNA, 19 nt, Artificial Sequence
  Description of Artificial Sequence: Synthetic oligonucleotide
gcagcugugauggaccuua

SEQ ID NO: 1911030 - RNA, 19 nt, Artificial Sequence
  Description of Artificial Sequence: Synthetic oligonucleotide
ggaugauaccgugguguac

SEQ ID NO: 1911031 - RNA, 19 nt, Artificial Sequence
  Description of Artificial Sequence: Synthetic oligonucleotide
ugggugugugugugugaua

SEQ ID NO: 1911032 - RNA, 19 nt, Artificial Sequence
  Description of Artificial Sequence: Synthetic oligonucleotide
accuuacaauacgccgaug

SEQ ID NO: 1911033 - RNA, 19 nt, Artificial Sequence
  Description of Artificial Sequence: Synthetic oligonucleotide
aguuauccacugguucauu

SEQ ID NO: 1911034 - RNA, 19 nt, Artificial Sequence
  Description of Artificial Sequence: Synthetic oligonucleotide
ccauauccuguuauccaga

SEQ ID NO: 1911035 - RNA, 19 nt, Artificial Sequence
  Description of Artificial Sequence: Synthetic oligonucleotide
cuuuagaauggggcaucaa

SEQ ID NO: 1911036 - RNA, 19 nt, Artificial Sequence
  Description of Artificial Sequence: Synthetic oligonucleotide
cagcugugauggaccuuac

SEQ ID NO: 1911037 - RNA, 19 nt, Artificial Sequence
  Description of Artificial Sequence: Synthetic oligonucleotide
cuggaaguuccgaaaccau

SEQ ID NO: 1911038 - RNA, 19 nt, Artificial Sequence
  Description of Artificial Sequence: Synthetic oligonucleotide
guucagccaggguaugaau

SEQ ID NO: 1911039 - RNA, 19 nt, Artificial Sequence
  Description of Artificial Sequence: Synthetic oligonucleotide
gcccaugaggugaauuuga

SEQ ID NO: 1911040 - RNA, 19 nt, Artificial Sequence
  Description of Artificial Sequence: Synthetic oligonucleotide
gcuuuagaauggggcauca

SEQ ID NO: 1911041 - RNA, 19 nt, Artificial Sequence
  Description of Artificial Sequence: Synthetic oligonucleotide
ccugcuuaacuggcugccc

SEQ ID NO: 1911042 - RNA, 19 nt, Artificial Sequence
  Description of Artificial Sequence: Synthetic oligonucleotide
ccauuuuaguaucugcuuu

SEQ ID NO: 1911043 - RNA, 19 nt, Artificial Sequence
  Description of Artificial Sequence: Synthetic oligonucleotide
cugcuuuagaauggggcau

SEQ ID NO: 1911044 - RNA, 19 nt, Artificial Sequence
  Description of Artificial Sequence: Synthetic oligonucleotide
caucaaaagcagggucaaa

SEQ ID NO: 1911045 - RNA, 19 nt, Artificial Sequence
  Description of Artificial Sequence: Synthetic oligonucleotide
gcauaauguggcaauucau

SEQ ID NO: 1911046 - RNA, 19 nt, Artificial Sequence
  Description of Artificial Sequence: Synthetic oligonucleotide
acgggaccuggaaugcgau

SEQ ID NO: 1911047 - RNA, 19 nt, Artificial Sequence
  Description of Artificial Sequence: Synthetic oligonucleotide
cccaugaggugaauuugaa

SEQ ID NO: 1911048 - RNA, 19 nt, Artificial Sequence
  Description of Artificial Sequence: Synthetic oligonucleotide
gagaaccuuucaagcaguu

SEQ ID NO: 1911049 - RNA, 19 nt, Artificial Sequence
  Description of Artificial Sequence: Synthetic oligonucleotide
gguucauuuugcacucccu

SEQ ID NO: 1911050 - RNA, 19 nt, Artificial Sequence
  Description of Artificial Sequence: Synthetic oligonucleotide
gcuuaacuggcugcccgga

SEQ ID NO: 1911051 - RNA, 19 nt, Artificial Sequence
  Description of Artificial Sequence: Synthetic oligonucleotide
agacggcccaugaggugaa

SEQ ID NO: 1911052 - RNA, 19 nt, Artificial Sequence
  Description of Artificial Sequence: Synthetic oligonucleotide
gcccuugcaaacgggaccu

SEQ ID NO: 1911053 - RNA, 19 nt, Artificial Sequence
  Description of Artificial Sequence: Synthetic oligonucleotide
ccuggaaugcgaucucuau

SEQ ID NO: 1911054 - RNA, 19 nt, Artificial Sequence
  Description of Artificial Sequence: Synthetic oligonucleotide
cgagguccuauuuccacua

SEQ ID NO: 1911055 - RNA, 19 nt, Artificial Sequence
  Description of Artificial Sequence: Synthetic oligonucleotide
cgaaaccauauccuguuau

SEQ ID NO: 1911056 - RNA, 19 nt, Artificial Sequence
  Description of Artificial Sequence: Synthetic oligonucleotide
cacgaaugguugacucuuu

SEQ ID NO: 1911057 - RNA, 19 nt, Artificial Sequence
  Description of Artificial Sequence: Synthetic oligonucleotide
ggaaugcgaucucuaucuu

SEQ ID NO: 1911058 - RNA, 19 nt, Artificial Sequence
  Description of Artificial Sequence: Synthetic oligonucleotide
caauacgccgaugcauguu

SEQ ID NO: 1911059 - RNA, 19 nt, Artificial Sequence
  Description of Artificial Sequence: Synthetic oligonucleotide
gcacucccucuguucaucu

SEQ ID NO: 1911060 - RNA, 19 nt, Artificial Sequence
  Description of Artificial Sequence: Synthetic oligonucleotide
gguccacgaaugguugacu

SEQ ID NO: 1911061 - RNA, 19 nt, Artificial Sequence
  Description of Artificial Sequence: Synthetic oligonucleotide
ggucgccaccaucuugccu

SEQ ID NO: 1911062 - RNA, 19 nt, Artificial Sequence
  Description of Artificial Sequence: Synthetic oligonucleotide
gacugguaaugaggauuuu

SEQ ID NO: 1911063 - RNA, 19 nt, Artificial Sequence
  Description of Artificial Sequence: Synthetic oligonucleotide
ggugugugugugugauaau

SEQ ID NO: 1911064 - RNA, 19 nt, Artificial Sequence
  Description of Artificial Sequence: Synthetic oligonucleotide
cgagaaccuuucaagcagu

SEQ ID NO: 1911065 - RNA, 19 nt, Artificial Sequence
  Description of Artificial Sequence: Synthetic oligonucleotide
ccgaaaccauauccuguua

SEQ ID NO: 1911066 - RNA, 19 nt, Artificial Sequence
  Description of Artificial Sequence: Synthetic oligonucleotide
ccacgaaugguugacucuu

SEQ ID NO: 1911067 - RNA, 19 nt, Artificial Sequence
  Description of Artificial Sequence: Synthetic oligonucleotide
gucuugcauuaagugucuu

SEQ ID NO: 1911068 - RNA, 19 nt, Artificial Sequence
  Description of Artificial Sequence: Synthetic oligonucleotide
cacucccucuguucaucuu

SEQ ID NO: 1911069 - RNA, 19 nt, Artificial Sequence
  Description of Artificial Sequence: Synthetic oligonucleotide
ccggaaucuuuccggcucu

SEQ ID NO: 1911070 - RNA, 19 nt, Artificial Sequence
  Description of Artificial Sequence: Synthetic oligonucleotide
cccuugcaaacgggaccug

SEQ ID NO: 1911071 - RNA, 19 nt, Artificial Sequence
  Description of Artificial Sequence: Synthetic oligonucleotide
cggcccaugaggugaauuu

SEQ ID NO: 1911072 - RNA, 19 nt, Artificial Sequence
  Description of Artificial Sequence: Synthetic oligonucleotide
cgaugcauguuuggagacu

SEQ ID NO: 1911073 - RNA, 19 nt, Artificial Sequence
  Description of Artificial Sequence: Synthetic oligonucleotide
gacggcccaugaggugaau

SEQ ID NO: 1911074 - RNA, 19 nt, Artificial Sequence
  Description of Artificial Sequence: Synthetic oligonucleotide
ccccacgccgcuuccucuu

SEQ ID NO: 1911075 - RNA, 19 nt, Artificial Sequence
  Description of Artificial Sequence: Synthetic oligonucleotide
aauagcaucauauugauuc

SEQ ID NO: 1911076 - RNA, 19 nt, Artificial Sequence
  Description of Artificial Sequence: Synthetic oligonucleotide
aacucaaaaucauaaaccc

SEQ ID NO: 1911077 - RNA, 19 nt, Artificial Sequence
  Description of Artificial Sequence: Synthetic oligonucleotide
aagaauuaaaccaagauca

SEQ ID NO: 1911078 - RNA, 19 nt, Artificial Sequence
  Description of Artificial Sequence: Synthetic oligonucleotide
aaaaucauaaaccccagug

SEQ ID NO: 1911079 - RNA, 19 nt, Artificial Sequence
  Description of Artificial Sequence: Synthetic oligonucleotide
ucuagaagaauccuagugg

SEQ ID NO: 1911080 - RNA, 19 nt, Artificial Sequence
  Description of Artificial Sequence: Synthetic oligonucleotide
aaagacuauagguauacag

SEQ ID NO: 1911081 - RNA, 19 nt, Artificial Sequence
  Description of Artificial Sequence: Synthetic oligonucleotide
ucucuaauggauaugaagc

SEQ ID NO: 1911082 - RNA, 19 nt, Artificial Sequence
  Description of Artificial Sequence: Synthetic oligonucleotide
ucugauaauaguuaaggcc

SEQ ID NO: 1911083 - RNA, 19 nt, Artificial Sequence
  Description of Artificial Sequence: Synthetic oligonucleotide
ugaaggaugaagauuauga

SEQ ID NO: 1911084 - RNA, 19 nt, Artificial Sequence
  Description of Artificial Sequence: Synthetic oligonucleotide
aguaaauccauguaugaag

SEQ ID NO: 1911085 - RNA, 19 nt, Artificial Sequence
  Description of Artificial Sequence: Synthetic oligonucleotide
ugaaaguauacccuaaaga

SEQ ID NO: 1911086 - RNA, 19 nt, Artificial Sequence
  Description of Artificial Sequence: Synthetic oligonucleotide
aaacuuccagucaagaacc

SEQ ID NO: 1911087 - RNA, 19 nt, Artificial Sequence
  Description of Artificial Sequence: Synthetic oligonucleotide
agagcugaucaauaaaagc

SEQ ID NO: 1911088 - RNA, 19 nt, Artificial Sequence
  Description of Artificial Sequence: Synthetic oligonucleotide
uguaguaaauccauguaug

SEQ ID NO: 1911089 - RNA, 19 nt, Artificial Sequence
  Description of Artificial Sequence: Synthetic oligonucleotide
ugugcagaggucaagaucu

SEQ ID NO: 1911090 - RNA, 19 nt, Artificial Sequence
  Description of Artificial Sequence: Synthetic oligonucleotide
uuaaaccaagaucauuugg

SEQ ID NO: 1911091 - RNA, 19 nt, Artificial Sequence
  Description of Artificial Sequence: Synthetic oligonucleotide
aauaguuaaggccccuuuc

SEQ ID NO: 1911092 - RNA, 19 nt, Artificial Sequence
  Description of Artificial Sequence: Synthetic oligonucleotide
aaacuuaucaggauggcag

SEQ ID NO: 1911093 - RNA, 19 nt, Artificial Sequence
  Description of Artificial Sequence: Synthetic oligonucleotide
aaaucauaaaccccaguga

SEQ ID NO: 1911094 - RNA, 19 nt, Artificial Sequence
  Description of Artificial Sequence: Synthetic oligonucleotide
uuuggaacuacugaaaaga

SEQ ID NO: 1911095 - RNA, 19 nt, Artificial Sequence
  Description of Artificial Sequence: Synthetic oligonucleotide
aaguauacccuaaagauga

SEQ ID NO: 1911096 - RNA, 19 nt, Artificial Sequence
  Description of Artificial Sequence: Synthetic oligonucleotide
gaguaaaacagcaaggccc

SEQ ID NO: 1911097 - RNA, 19 nt, Artificial Sequence
  Description of Artificial Sequence: Synthetic oligonucleotide
acugaaaagauugagugag

SEQ ID NO: 1911098 - RNA, 19 nt, Artificial Sequence
  Description of Artificial Sequence: Synthetic oligonucleotide
uccaucguaagauucaggc

SEQ ID NO: 1911099 - RNA, 19 nt, Artificial Sequence
  Description of Artificial Sequence: Synthetic oligonucleotide
aagaucauuuggcuguggg

SEQ ID NO: 1911100 - RNA, 19 nt, Artificial Sequence
  Description of Artificial Sequence: Synthetic oligonucleotide
auauugauucuuuugucag

SEQ ID NO: 1911101 - RNA, 19 nt, Artificial Sequence
  Description of Artificial Sequence: Synthetic oligonucleotide
uguaagauaugccaccugu

SEQ ID NO: 1911102 - RNA, 19 nt, Artificial Sequence
  Description of Artificial Sequence: Synthetic oligonucleotide
uaguagugaaaguauaccc

SEQ ID NO: 1911103 - RNA, 19 nt, Artificial Sequence
  Description of Artificial Sequence: Synthetic oligonucleotide
ugguauguaagauaugcca

SEQ ID NO: 1911104 - RNA, 19 nt, Artificial Sequence
  Description of Artificial Sequence: Synthetic oligonucleotide
uauucgguaaaauuucucu

SEQ ID NO: 1911105 - RNA, 19 nt, Artificial Sequence
  Description of Artificial Sequence: Synthetic oligonucleotide
aaggaugcacaaaacagcg

SEQ ID NO: 1911106 - RNA, 19 nt, Artificial Sequence
  Description of Artificial Sequence: Synthetic oligonucleotide
gauucagugaguccaacug

SEQ ID NO: 1911107 - RNA, 19 nt, Artificial Sequence
  Description of Artificial Sequence: Synthetic oligonucleotide
ucaaguauguuucuauuuc

SEQ ID NO: 1911108 - RNA, 19 nt, Artificial Sequence
  Description of Artificial Sequence: Synthetic oligonucleotide
gaggaauagcaucauauug

SEQ ID NO: 1911109 - RNA, 19 nt, Artificial Sequence
  Description of Artificial Sequence: Synthetic oligonucleotide
uauacagucagcaccgaga

SEQ ID NO: 1911110 - RNA, 19 nt, Artificial Sequence
  Description of Artificial Sequence: Synthetic oligonucleotide
aacuuaucaggauggcagg

SEQ ID NO: 1911111 - RNA, 19 nt, Artificial Sequence
  Description of Artificial Sequence: Synthetic oligonucleotide
guugguauguaagauaugc

SEQ ID NO: 1911112 - RNA, 19 nt, Artificial Sequence
  Description of Artificial Sequence: Synthetic oligonucleotide
aguaaaacagcaaggcccc

SEQ ID NO: 1911113 - RNA, 19 nt, Artificial Sequence
  Description of Artificial Sequence: Synthetic oligonucleotide
uguggguucguuuauuuca

SEQ ID NO: 1911114 - RNA, 19 nt, Artificial Sequence
  Description of Artificial Sequence: Synthetic oligonucleotide
uugaggaauagcaucauau

SEQ ID NO: 1911115 - RNA, 19 nt, Artificial Sequence
  Description of Artificial Sequence: Synthetic oligonucleotide
cuaagaguugguauguaag

SEQ ID NO: 1911116 - RNA, 19 nt, Artificial Sequence
  Description of Artificial Sequence: Synthetic oligonucleotide
gaaaguauacccuaaagau

SEQ ID NO: 1911117 - RNA, 19 nt, Artificial Sequence
  Description of Artificial Sequence: Synthetic oligonucleotide
cuuuauucgguaaaauuuc

SEQ ID NO: 1911118 - RNA, 19 nt, Artificial Sequence
  Description of Artificial Sequence: Synthetic oligonucleotide
augcacaaaacagcgaugc

SEQ ID NO: 1911119 - RNA, 19 nt, Artificial Sequence
  Description of Artificial Sequence: Synthetic oligonucleotide
auagcuacacccaacaaag

SEQ ID NO: 1911120 - RNA, 19 nt, Artificial Sequence
  Description of Artificial Sequence: Synthetic oligonucleotide
uggacaacuacuuugggau

SEQ ID NO: 1911121 - RNA, 19 nt, Artificial Sequence
  Description of Artificial Sequence: Synthetic oligonucleotide
aacagcgaugcaaacuucc

SEQ ID NO: 1911122 - RNA, 19 nt, Artificial Sequence
  Description of Artificial Sequence: Synthetic oligonucleotide
ggaacuacugaaaagauug

SEQ ID NO: 1911123 - RNA, 19 nt, Artificial Sequence
  Description of Artificial Sequence: Synthetic oligonucleotide
ucugguuugugacuauucc

SEQ ID NO: 1911124 - RNA, 19 nt, Artificial Sequence
  Description of Artificial Sequence: Synthetic oligonucleotide
ucgaagauuuucuuggaca

SEQ ID NO: 1911125 - RNA, 19 nt, Artificial Sequence
  Description of Artificial Sequence: Synthetic oligonucleotide
uauacccuaaagaugaauu

SEQ ID NO: 1911126 - RNA, 19 nt, Artificial Sequence
  Description of Artificial Sequence: Synthetic oligonucleotide
caucguaagauucaggcuc

SEQ ID NO: 1911127 - RNA, 19 nt, Artificial Sequence
  Description of Artificial Sequence: Synthetic oligonucleotide
uguguaccgaaguuaaggc

SEQ ID NO: 1911128 - RNA, 19 nt, Artificial Sequence
  Description of Artificial Sequence: Synthetic oligonucleotide
aaauuacagccauauucug

SEQ ID NO: 1911129 - RNA, 19 nt, Artificial Sequence
  Description of Artificial Sequence: Synthetic oligonucleotide
guuaaggccaucucgaaca

SEQ ID NO: 1911130 - RNA, 19 nt, Artificial Sequence
  Description of Artificial Sequence: Synthetic oligonucleotide
cuaguugaugaguuguggg

SEQ ID NO: 1911131 - RNA, 19 nt, Artificial Sequence
  Description of Artificial Sequence: Synthetic oligonucleotide
aagacuauagguauacagu

SEQ ID NO: 1911132 - RNA, 19 nt, Artificial Sequence
  Description of Artificial Sequence: Synthetic oligonucleotide
auauucugcuaucauagca

SEQ ID NO: 1911133 - RNA, 19 nt, Artificial Sequence
  Description of Artificial Sequence: Synthetic oligonucleotide
uaagaguugguauguaaga

SEQ ID NO: 1911134 - RNA, 19 nt, Artificial Sequence
  Description of Artificial Sequence: Synthetic oligonucleotide
accaagaucauuuggcugu

SEQ ID NO: 1911135 - RNA, 19 nt, Artificial Sequence
  Description of Artificial Sequence: Synthetic oligonucleotide
cucuaauggauaugaagcc

SEQ ID NO: 1911136 - RNA, 19 nt, Artificial Sequence
  Description of Artificial Sequence: Synthetic oligonucleotide
aauggauaugaagccaauc

SEQ ID NO: 1911137 - RNA, 19 nt, Artificial Sequence
  Description of Artificial Sequence: Synthetic oligonucleotide
gaaccucauucucuaaugg

SEQ ID NO: 1911138 - RNA, 19 nt, Artificial Sequence
  Description of Artificial Sequence: Synthetic oligonucleotide
guucguuuauuucaguggc

SEQ ID NO: 1911139 - RNA, 19 nt, Artificial Sequence
  Description of Artificial Sequence: Synthetic oligonucleotide
uguucguguaguaaaucca

SEQ ID NO: 1911140 - RNA, 19 nt, Artificial Sequence
  Description of Artificial Sequence: Synthetic oligonucleotide
uuuauucgguaaaauuucu

SEQ ID NO: 1911141 - RNA, 19 nt, Artificial Sequence
  Description of Artificial Sequence: Synthetic oligonucleotide
aguuaaggccaucucgaac

SEQ ID NO: 1911142 - RNA, 19 nt, Artificial Sequence
  Description of Artificial Sequence: Synthetic oligonucleotide
uaagauaugccaccuguuc

SEQ ID NO: 1911143 - RNA, 19 nt, Artificial Sequence
  Description of Artificial Sequence: Synthetic oligonucleotide
agugggcaaccccacaugc

SEQ ID NO: 1911144 - RNA, 19 nt, Artificial Sequence
  Description of Artificial Sequence: Synthetic oligonucleotide
uuaugaaaugagguugccg

SEQ ID NO: 1911145 - RNA, 19 nt, Artificial Sequence
  Description of Artificial Sequence: Synthetic oligonucleotide
gaagaauuccuccucguuc

SEQ ID NO: 1911146 - RNA, 19 nt, Artificial Sequence
  Description of Artificial Sequence: Synthetic oligonucleotide
guauguaagauaugccacc

SEQ ID NO: 1911147 - RNA, 19 nt, Artificial Sequence
  Description of Artificial Sequence: Synthetic oligonucleotide
cuguucguguaguaaaucc

SEQ ID NO: 1911148 - RNA, 19 nt, Artificial Sequence
  Description of Artificial Sequence: Synthetic oligonucleotide
auuaaaccaagaucauuug

SEQ ID NO: 1911149 - RNA, 19 nt, Artificial Sequence
  Description of Artificial Sequence: Synthetic oligonucleotide
ugaucaauaaaagccuuca

SEQ ID NO: 1911150 - RNA, 19 nt, Artificial Sequence
  Description of Artificial Sequence: Synthetic oligonucleotide
ugauaauaguuaaggcccc

SEQ ID NO: 1911151 - RNA, 19 nt, Artificial Sequence
  Description of Artificial Sequence: Synthetic oligonucleotide
uccauguaugaagagaucu

SEQ ID NO: 1911152 - RNA, 19 nt, Artificial Sequence
  Description of Artificial Sequence: Synthetic oligonucleotide
uuucacgggaucugcaaag

SEQ ID NO: 1911153 - RNA, 19 nt, Artificial Sequence
  Description of Artificial Sequence: Synthetic oligonucleotide
uccuccucguucuagaaga

SEQ ID NO: 1911154 - RNA, 19 nt, Artificial Sequence
  Description of Artificial Sequence: Synthetic oligonucleotide
auaguuaaggccccuuuca

SEQ ID NO: 1911155 - RNA, 19 nt, Artificial Sequence
  Description of Artificial Sequence: Synthetic oligonucleotide
uugguauguaagauaugcc

SEQ ID NO: 1911156 - RNA, 19 nt, Artificial Sequence
  Description of Artificial Sequence: Synthetic oligonucleotide
ugaucagucuuuauucggu

SEQ ID NO: 1911157 - RNA, 19 nt, Artificial Sequence
  Description of Artificial Sequence: Synthetic oligonucleotide
uuaucaggauggcaggaug

SEQ ID NO: 1911158 - RNA, 19 nt, Artificial Sequence
  Description of Artificial Sequence: Synthetic oligonucleotide
cuacacccaacaaaguacc

SEQ ID NO: 1911159 - RNA, 19 nt, Artificial Sequence
  Description of Artificial Sequence: Synthetic oligonucleotide
aaaacuuaucaggauggca

SEQ ID NO: 1911160 - RNA, 19 nt, Artificial Sequence
  Description of Artificial Sequence: Synthetic oligonucleotide
uuugugacuauuccaucgu

SEQ ID NO: 1911161 - RNA, 19 nt, Artificial Sequence
  Description of Artificial Sequence: Synthetic oligonucleotide
gguucguuuauuucagugg

SEQ ID NO: 1911162 - RNA, 19 nt, Artificial Sequence
  Description of Artificial Sequence: Synthetic oligonucleotide
ucguguaguaaauccaugu

SEQ ID NO: 1911163 - RNA, 19 nt, Artificial Sequence
  Description of Artificial Sequence: Synthetic oligonucleotide
gaagccaaucuguguaccg

SEQ ID NO: 1911164 - RNA, 19 nt, Artificial Sequence
  Description of Artificial Sequence: Synthetic oligonucleotide
gugaaaguauacccuaaag

SEQ ID NO: 1911165 - RNA, 19 nt, Artificial Sequence
  Description of Artificial Sequence: Synthetic oligonucleotide
gauugagugagcuaagagu

SEQ ID NO: 1911166 - RNA, 19 nt, Artificial Sequence
  Description of Artificial Sequence: Synthetic oligonucleotide
ucuaauggauaugaagcca

SEQ ID NO: 1911167 - RNA, 19 nt, Artificial Sequence
  Description of Artificial Sequence: Synthetic oligonucleotide
agaaccucauucucuaaug

SEQ ID NO: 1911168 - RNA, 19 nt, Artificial Sequence
  Description of Artificial Sequence: Synthetic oligonucleotide
uccucguucuagaagaauc

SEQ ID NO: 1911169 - RNA, 19 nt, Artificial Sequence
  Description of Artificial Sequence: Synthetic oligonucleotide
gagaucugggaucaaagga

SEQ ID NO: 1911170 - RNA, 19 nt, Artificial Sequence
  Description of Artificial Sequence: Synthetic oligonucleotide
uuggacaacuacuuuggga

SEQ ID NO: 1911171 - RNA, 19 nt, Artificial Sequence
  Description of Artificial Sequence: Synthetic oligonucleotide
gugaucagucuuuauucgg

SEQ ID NO: 1911172 - RNA, 19 nt, Artificial Sequence
  Description of Artificial Sequence: Synthetic oligonucleotide
ucgguaaaauuucucugca

SEQ ID NO: 1911173 - RNA, 19 nt, Artificial Sequence
  Description of Artificial Sequence: Synthetic oligonucleotide
aacugccgcacacaugaag

SEQ ID NO: 1911174 - RNA, 19 nt, Artificial Sequence
  Description of Artificial Sequence: Synthetic oligonucleotide
cuugaauauucuguggaag

SEQ ID NO: 1911175 - RNA, 19 nt, Artificial Sequence
  Description of Artificial Sequence: Synthetic oligonucleotide
auuaugaaaugagguugcc

SEQ ID NO: 1911176 - RNA, 19 nt, Artificial Sequence
  Description of Artificial Sequence: Synthetic oligonucleotide
ugacuauuccaucguaaga

SEQ ID NO: 1911177 - RNA, 19 nt, Artificial Sequence
  Description of Artificial Sequence: Synthetic oligonucleotide
uccguuuggaacuacugaa

SEQ ID NO: 1911178 - RNA, 19 nt, Artificial Sequence
  Description of Artificial Sequence: Synthetic oligonucleotide
guaguagugaaaguauacc

SEQ ID NO: 1911179 - RNA, 19 nt, Artificial Sequence
  Description of Artificial Sequence: Synthetic oligonucleotide
cuugguuuuauacgaauca

SEQ ID NO: 1911180 - RNA, 19 nt, Artificial Sequence
  Description of Artificial Sequence: Synthetic oligonucleotide
guaagauucaggcuccuuc

SEQ ID NO: 1911181 - RNA, 19 nt, Artificial Sequence
  Description of Artificial Sequence: Synthetic oligonucleotide
cuacuuugggaucucuccg

SEQ ID NO: 1911182 - RNA, 19 nt, Artificial Sequence
  Description of Artificial Sequence: Synthetic oligonucleotide
uaguugaugaguugugggu

SEQ ID NO: 1911183 - RNA, 19 nt, Artificial Sequence
  Description of Artificial Sequence: Synthetic oligonucleotide
aggaauagcaucauauuga

SEQ ID NO: 1911184 - RNA, 19 nt, Artificial Sequence
  Description of Artificial Sequence: Synthetic oligonucleotide
uuauucgguaaaauuucuc

SEQ ID NO: 1911185 - RNA, 19 nt, Artificial Sequence
  Description of Artificial Sequence: Synthetic oligonucleotide
gaaguuaaggccaucucga

SEQ ID NO: 1911186 - RNA, 19 nt, Artificial Sequence
  Description of Artificial Sequence: Synthetic oligonucleotide
agcgaugcaaacuuccagu

SEQ ID NO: 1911187 - RNA, 19 nt, Artificial Sequence
  Description of Artificial Sequence: Synthetic oligonucleotide
ucguuuauuucaguggcug

SEQ ID NO: 1911188 - RNA, 19 nt, Artificial Sequence
  Description of Artificial Sequence: Synthetic oligonucleotide
agguauacagucagcaccg

SEQ ID NO: 1911189 - RNA, 19 nt, Artificial Sequence
  Description of Artificial Sequence: Synthetic oligonucleotide
ucaagaaccucauucucua

SEQ ID NO: 1911190 - RNA, 19 nt, Artificial Sequence
  Description of Artificial Sequence: Synthetic oligonucleotide
cuauuccaucguaagauuc

SEQ ID NO: 1911191 - RNA, 19 nt, Artificial Sequence
  Description of Artificial Sequence: Synthetic oligonucleotide
ucagugaguccaacugccg

SEQ ID NO: 1911192 - RNA, 19 nt, Artificial Sequence
  Description of Artificial Sequence: Synthetic oligonucleotide
aguagugaaaguauacccu

SEQ ID NO: 1911193 - RNA, 19 nt, Artificial Sequence
  Description of Artificial Sequence: Synthetic oligonucleotide
agauaugccaccuguucgu

SEQ ID NO: 1911194 - RNA, 19 nt, Artificial Sequence
  Description of Artificial Sequence: Synthetic oligonucleotide
uuugccaaccuucgaagau

SEQ ID NO: 1911195 - RNA, 19 nt, Artificial Sequence
  Description of Artificial Sequence: Synthetic oligonucleotide
ucuccguuuggaacuacug

SEQ ID NO: 1911196 - RNA, 19 nt, Artificial Sequence
  Description of Artificial Sequence: Synthetic oligonucleotide
uauguaagauaugccaccu

SEQ ID NO: 1911197 - RNA, 19 nt, Artificial Sequence
  Description of Artificial Sequence: Synthetic oligonucleotide
uggguaguagugaaaguau

SEQ ID NO: 1911198 - RNA, 19 nt, Artificial Sequence
  Description of Artificial Sequence: Synthetic oligonucleotide
acuacugaaaagauugagu

SEQ ID NO: 1911199 - RNA, 19 nt, Artificial Sequence
  Description of Artificial Sequence: Synthetic oligonucleotide
ugucaguugcccuaagaau

SEQ ID NO: 1911200 - RNA, 19 nt, Artificial Sequence
  Description of Artificial Sequence: Synthetic oligonucleotide
uucguguaguaaauccaug

SEQ ID NO: 1911201 - RNA, 19 nt, Artificial Sequence
  Description of Artificial Sequence: Synthetic oligonucleotide
aucguaagauucaggcucc

SEQ ID NO: 1911202 - RNA, 19 nt, Artificial Sequence
  Description of Artificial Sequence: Synthetic oligonucleotide
gagaucugauaauaguuaa

SEQ ID NO: 1911203 - RNA, 19 nt, Artificial Sequence
  Description of Artificial Sequence: Synthetic oligonucleotide
guaaauccauguaugaaga

SEQ ID NO: 1911204 - RNA, 19 nt, Artificial Sequence
  Description of Artificial Sequence: Synthetic oligonucleotide
acccuaaagaugaauuuuc

SEQ ID NO: 1911205 - RNA, 19 nt, Artificial Sequence
  Description of Artificial Sequence: Synthetic oligonucleotide
auagcaucauauugauucu

SEQ ID NO: 1911206 - RNA, 19 nt, Artificial Sequence
  Description of Artificial Sequence: Synthetic oligonucleotide
uuccaucguaagauucagg

SEQ ID NO: 1911207 - RNA, 19 nt, Artificial Sequence
  Description of Artificial Sequence: Synthetic oligonucleotide
ugaauauucuguggaagaa

SEQ ID NO: 1911208 - RNA, 19 nt, Artificial Sequence
  Description of Artificial Sequence: Synthetic oligonucleotide
aacuacuuugggaucucuc

SEQ ID NO: 1911209 - RNA, 19 nt, Artificial Sequence
  Description of Artificial Sequence: Synthetic oligonucleotide
aaccccacaugcuguuuuc

SEQ ID NO: 1911210 - RNA, 19 nt, Artificial Sequence
  Description of Artificial Sequence: Synthetic oligonucleotide
uuggaacuacugaaaagau

SEQ ID NO: 1911211 - RNA, 19 nt, Artificial Sequence
  Description of Artificial Sequence: Synthetic oligonucleotide
uagaagaauccuaguggcu

SEQ ID NO: 1911212 - RNA, 19 nt, Artificial Sequence
  Description of Artificial Sequence: Synthetic oligonucleotide
aaagauugagugagcuaag

SEQ ID NO: 1911213 - RNA, 19 nt, Artificial Sequence
  Description of Artificial Sequence: Synthetic oligonucleotide
aguuaaggccccuuucaga

SEQ ID NO: 1911214 - RNA, 19 nt, Artificial Sequence
  Description of Artificial Sequence: Synthetic oligonucleotide
guugcccuaagaauuaaac

SEQ ID NO: 1911215 - RNA, 19 nt, Artificial Sequence
  Description of Artificial Sequence: Synthetic oligonucleotide
uaauaguuaaggccccuuu

SEQ ID NO: 1911216 - RNA, 19 nt, Artificial Sequence
  Description of Artificial Sequence: Synthetic oligonucleotide
cuauagguauacagucagc

SEQ ID NO: 1911217 - RNA, 19 nt, Artificial Sequence
  Description of Artificial Sequence: Synthetic oligonucleotide
gaucauuuggcugugggua

SEQ ID NO: 1911218 - RNA, 19 nt, Artificial Sequence
  Description of Artificial Sequence: Synthetic oligonucleotide
agaucauuuggcugugggu

SEQ ID NO: 1911219 - RNA, 19 nt, Artificial Sequence
  Description of Artificial Sequence: Synthetic oligonucleotide
cuaauggauaugaagccaa

SEQ ID NO: 1911220 - RNA, 19 nt, Artificial Sequence
  Description of Artificial Sequence: Synthetic oligonucleotide
cuguggguaguagugaaag

SEQ ID NO: 1911221 - RNA, 19 nt, Artificial Sequence
  Description of Artificial Sequence: Synthetic oligonucleotide
agcuacacccaacaaagua

SEQ ID NO: 1911222 - RNA, 19 nt, Artificial Sequence
  Description of Artificial Sequence: Synthetic oligonucleotide
ucaguugcccuaagaauua

SEQ ID NO: 1911223 - RNA, 19 nt, Artificial Sequence
  Description of Artificial Sequence: Synthetic oligonucleotide
cauagcuacacccaacaaa

SEQ ID NO: 1911224 - RNA, 19 nt, Artificial Sequence
  Description of Artificial Sequence: Synthetic oligonucleotide
cugaucaauaaaagccuuc

SEQ ID NO: 1911225 - RNA, 19 nt, Artificial Sequence
  Description of Artificial Sequence: Synthetic oligonucleotide
cugaaaagauugagugagc

SEQ ID NO: 1911226 - RNA, 19 nt, Artificial Sequence
  Description of Artificial Sequence: Synthetic oligonucleotide
uugguuuuauacgaaucaa

SEQ ID NO: 1911227 - RNA, 19 nt, Artificial Sequence
  Description of Artificial Sequence: Synthetic oligonucleotide
ucucgaacaugggagaaaa

SEQ ID NO: 1911228 - RNA, 19 nt, Artificial Sequence
  Description of Artificial Sequence: Synthetic oligonucleotide
guauacagucagcaccgag

SEQ ID NO: 1911229 - RNA, 19 nt, Artificial Sequence
  Description of Artificial Sequence: Synthetic oligonucleotide
aaguauguuucuauuucau

SEQ ID NO: 1911230 - RNA, 19 nt, Artificial Sequence
  Description of Artificial Sequence: Synthetic oligonucleotide
auugauucuuuugucaguu

SEQ ID NO: 1911231 - RNA, 19 nt, Artificial Sequence
  Description of Artificial Sequence: Synthetic oligonucleotide
uagugaaaguauacccuaa

SEQ ID NO: 1911232 - RNA, 19 nt, Artificial Sequence
  Description of Artificial Sequence: Synthetic oligonucleotide
aaguuaaggccaucucgaa

SEQ ID NO: 1911233 - RNA, 19 nt, Artificial Sequence
  Description of Artificial Sequence: Synthetic oligonucleotide
agaucugauaauaguuaag

SEQ ID NO: 1911234 - RNA, 19 nt, Artificial Sequence
  Description of Artificial Sequence: Synthetic oligonucleotide
ccacaugcuguuuucacgg

SEQ ID NO: 1911235 - RNA, 19 nt, Artificial Sequence
  Description of Artificial Sequence: Synthetic oligonucleotide
ucguucuagaagaauccua

SEQ ID NO: 1911236 - RNA, 19 nt, Artificial Sequence
  Description of Artificial Sequence: Synthetic oligonucleotide
cacggaaggucccagaaca

SEQ ID NO: 1911237 - RNA, 19 nt, Artificial Sequence
  Description of Artificial Sequence: Synthetic oligonucleotide
uugccgauucucugggaag

SEQ ID NO: 1911238 - RNA, 19 nt, Artificial Sequence
  Description of Artificial Sequence: Synthetic oligonucleotide
guagugaaaguauacccua

SEQ ID NO: 1911239 - RNA, 19 nt, Artificial Sequence
  Description of Artificial Sequence: Synthetic oligonucleotide
cuuggacaacuacuuuggg

SEQ ID NO: 1911240 - RNA, 19 nt, Artificial Sequence
  Description of Artificial Sequence: Synthetic oligonucleotide
auuccaucguaagauucag

SEQ ID NO: 1911241 - RNA, 19 nt, Artificial Sequence
  Description of Artificial Sequence: Synthetic oligonucleotide
caacauagggauucaguga

SEQ ID NO: 1911242 - RNA, 19 nt, Artificial Sequence
  Description of Artificial Sequence: Synthetic oligonucleotide
gguauguaagauaugccac

SEQ ID NO: 1911243 - RNA, 19 nt, Artificial Sequence
  Description of Artificial Sequence: Synthetic oligonucleotide
ugcaaagacuauagguaua

SEQ ID NO: 1911244 - RNA, 19 nt, Artificial Sequence
  Description of Artificial Sequence: Synthetic oligonucleotide
agaauccuaguggcuuucc

SEQ ID NO: 1911245 - RNA, 19 nt, Artificial Sequence
  Description of Artificial Sequence: Synthetic oligonucleotide
ugaagccaaucuguguacc

SEQ ID NO: 1911246 - RNA, 19 nt, Artificial Sequence
  Description of Artificial Sequence: Synthetic oligonucleotide
gacuauuccaucguaagau

SEQ ID NO: 1911247 - RNA, 19 nt, Artificial Sequence
  Description of Artificial Sequence: Synthetic oligonucleotide
cgaaguuaaggccaucucg

SEQ ID NO: 1911248 - RNA, 19 nt, Artificial Sequence
  Description of Artificial Sequence: Synthetic oligonucleotide
ugcacaaaacagcgaugca

SEQ ID NO: 1911249 - RNA, 19 nt, Artificial Sequence
  Description of Artificial Sequence: Synthetic oligonucleotide
gaugcacaaaacagcgaug

SEQ ID NO: 1911250 - RNA, 19 nt, Artificial Sequence
  Description of Artificial Sequence: Synthetic oligonucleotide
ugcaaacuuccagucaaga

SEQ ID NO: 1911251 - RNA, 19 nt, Artificial Sequence
  Description of Artificial Sequence: Synthetic oligonucleotide
gacuauagguauacaguca

SEQ ID NO: 1911252 - RNA, 19 nt, Artificial Sequence
  Description of Artificial Sequence: Synthetic oligonucleotide
uucugcuaucauagcauuc

SEQ ID NO: 1911253 - RNA, 19 nt, Artificial Sequence
  Description of Artificial Sequence: Synthetic oligonucleotide
ggaugaagauuaugaaaug

SEQ ID NO: 1911254 - RNA, 19 nt, Artificial Sequence
  Description of Artificial Sequence: Synthetic oligonucleotide
uaauggauaugaagccaau

SEQ ID NO: 1911255 - RNA, 19 nt, Artificial Sequence
  Description of Artificial Sequence: Synthetic oligonucleotide
gcaccgagagcugugaugg

SEQ ID NO: 1911256 - RNA, 19 nt, Artificial Sequence
  Description of Artificial Sequence: Synthetic oligonucleotide
agcaccgagagcugugaug

SEQ ID NO: 1911257 - RNA, 19 nt, Artificial Sequence
  Description of Artificial Sequence: Synthetic oligonucleotide
acccacacgucauuggcgu

SEQ ID NO: 1911258 - RNA, 19 nt, Artificial Sequence
  Description of Artificial Sequence: Synthetic oligonucleotide
acuauuccaucguaagauu

SEQ ID NO: 1911259 - RNA, 19 nt, Artificial Sequence
  Description of Artificial Sequence: Synthetic oligonucleotide
aucagucuuuauucgguaa

SEQ ID NO: 1911260 - RNA, 19 nt, Artificial Sequence
  Description of Artificial Sequence: Synthetic oligonucleotide
ucacgggaucugcaaagac

SEQ ID NO: 1911261 - RNA, 19 nt, Artificial Sequence
  Description of Artificial Sequence: Synthetic oligonucleotide
augaaggaugaagauuaug

SEQ ID NO: 1911262 - RNA, 19 nt, Artificial Sequence
  Description of Artificial Sequence: Synthetic oligonucleotide
cugguuugugacuauucca

SEQ ID NO: 1911263 - RNA, 19 nt, Artificial Sequence
  Description of Artificial Sequence: Synthetic oligonucleotide
ugucaacauagggauucag

SEQ ID NO: 1911264 - RNA, 19 nt, Artificial Sequence
  Description of Artificial Sequence: Synthetic oligonucleotide
gguaguagugaaaguauac

SEQ ID NO: 1911265 - RNA, 19 nt, Artificial Sequence
  Description of Artificial Sequence: Synthetic oligonucleotide
ucauuggcgugaucagucu

SEQ ID NO: 1911266 - RNA, 19 nt, Artificial Sequence
  Description of Artificial Sequence: Synthetic oligonucleotide
ggguucguuuauuucagug

SEQ ID NO: 1911267 - RNA, 19 nt, Artificial Sequence
  Description of Artificial Sequence: Synthetic oligonucleotide
augcuguuuucacgggauc

SEQ ID NO: 1911268 - RNA, 19 nt, Artificial Sequence
  Description of Artificial Sequence: Synthetic oligonucleotide
caagaucucccuucugguc

SEQ ID NO: 1911269 - RNA, 19 nt, Artificial Sequence
  Description of Artificial Sequence: Synthetic oligonucleotide
cacccacacgucauuggcg

SEQ ID NO: 1911270 - RNA, 19 nt, Artificial Sequence
  Description of Artificial Sequence: Synthetic oligonucleotide
auucugcuaucauagcauu

SEQ ID NO: 1911271 - RNA, 19 nt, Artificial Sequence
  Description of Artificial Sequence: Synthetic oligonucleotide
guggcugguuucaacaggc

SEQ ID NO: 1911272 - RNA, 19 nt, Artificial Sequence
  Description of Artificial Sequence: Synthetic oligonucleotide
uuaaggccaucucgaacau

SEQ ID NO: 1911273 - RNA, 19 nt, Artificial Sequence
  Description of Artificial Sequence: Synthetic oligonucleotide
ggaucucuccguuuggaac

SEQ ID NO: 1911274 - RNA, 19 nt, Artificial Sequence
  Description of Artificial Sequence: Synthetic oligonucleotide
agcggguaggcuucucaag

SEQ ID NO: 1911275 - RNA, 19 nt, Artificial Sequence
  Description of Artificial Sequence: Synthetic oligonucleotide
ugaaaugagguugccgauu

SEQ ID NO: 1911276 - RNA, 19 nt, Artificial Sequence
  Description of Artificial Sequence: Synthetic oligonucleotide
ccucguucuagaagaaucc

SEQ ID NO: 1911277 - RNA, 19 nt, Artificial Sequence
  Description of Artificial Sequence: Synthetic oligonucleotide
cagcgaugcaaacuuccag

SEQ ID NO: 1911278 - RNA, 19 nt, Artificial Sequence
  Description of Artificial Sequence: Synthetic oligonucleotide
uacacccaacaaaguaccu

SEQ ID NO: 1911279 - RNA, 19 nt, Artificial Sequence
  Description of Artificial Sequence: Synthetic oligonucleotide
accucauucucuaauggau

SEQ ID NO: 1911280 - RNA, 19 nt, Artificial Sequence
  Description of Artificial Sequence: Synthetic oligonucleotide
gcuacacccaacaaaguac

SEQ ID NO: 1911281 - RNA, 19 nt, Artificial Sequence
  Description of Artificial Sequence: Synthetic oligonucleotide
gucauuggcgugaucaguc

SEQ ID NO: 1911282 - RNA, 19 nt, Artificial Sequence
  Description of Artificial Sequence: Synthetic oligonucleotide
aguugaugaguuguggguu

SEQ ID NO: 1911283 - RNA, 19 nt, Artificial Sequence
  Description of Artificial Sequence: Synthetic oligonucleotide
accgaaguuaaggccaucu

SEQ ID NO: 1911284 - RNA, 19 nt, Artificial Sequence
  Description of Artificial Sequence: Synthetic oligonucleotide
uccucucugguuugugacu

SEQ ID NO: 1911285 - RNA, 19 nt, Artificial Sequence
  Description of Artificial Sequence: Synthetic oligonucleotide
guuugccaaccuucgaaga

SEQ ID NO: 1911286 - RNA, 19 nt, Artificial Sequence
  Description of Artificial Sequence: Synthetic oligonucleotide
gcaaagacuauagguauac

SEQ ID NO: 1911287 - RNA, 19 nt, Artificial Sequence
  Description of Artificial Sequence: Synthetic oligonucleotide
gcgugaucagucuuuauuc

SEQ ID NO: 1911288 - RNA, 19 nt, Artificial Sequence
  Description of Artificial Sequence: Synthetic oligonucleotide
gauaugccaccuguucgug

SEQ ID NO: 1911289 - RNA, 19 nt, Artificial Sequence
  Description of Artificial Sequence: Synthetic oligonucleotide
augaguuguggguucguuu

SEQ ID NO: 1911290 - RNA, 19 nt, Artificial Sequence
  Description of Artificial Sequence: Synthetic oligonucleotide
ugccgauucucugggaaga

SEQ ID NO: 1911291 - RNA, 19 nt, Artificial Sequence
  Description of Artificial Sequence: Synthetic oligonucleotide
agaauuaaaccaagaucau

SEQ ID NO: 1911292 - RNA, 19 nt, Artificial Sequence
  Description of Artificial Sequence: Synthetic oligonucleotide
agagcggguaggcuucuca

SEQ ID NO: 1911293 - RNA, 19 nt, Artificial Sequence
  Description of Artificial Sequence: Synthetic oligonucleotide
uacagucagcaccgagagc

SEQ ID NO: 1911294 - RNA, 19 nt, Artificial Sequence
  Description of Artificial Sequence: Synthetic oligonucleotide
cuguuuucacgggaucugc

SEQ ID NO: 1911295 - RNA, 19 nt, Artificial Sequence
  Description of Artificial Sequence: Synthetic oligonucleotide
guuuucacgggaucugcaa

SEQ ID NO: 1911296 - RNA, 19 nt, Artificial Sequence
  Description of Artificial Sequence: Synthetic oligonucleotide
gaucagucuuuauucggua

SEQ ID NO: 1911297 - RNA, 19 nt, Artificial Sequence
  Description of Artificial Sequence: Synthetic oligonucleotide
uucacgggaucugcaaaga

SEQ ID NO: 1911298 - RNA, 19 nt, Artificial Sequence
  Description of Artificial Sequence: Synthetic oligonucleotide
guggguaguagugaaagua

SEQ ID NO: 1911299 - RNA, 19 nt, Artificial Sequence
  Description of Artificial Sequence: Synthetic oligonucleotide
guugccgauucucugggaa

SEQ ID NO: 1911300 - RNA, 19 nt, Artificial Sequence
  Description of Artificial Sequence: Synthetic oligonucleotide
gcauucacaguagccauag

SEQ ID NO: 1911301 - RNA, 19 nt, Artificial Sequence
  Description of Artificial Sequence: Synthetic oligonucleotide
acuuaucaggauggcagga

SEQ ID NO: 1911302 - RNA, 19 nt, Artificial Sequence
  Description of Artificial Sequence: Synthetic oligonucleotide
aguggcuuuccggauguca

SEQ ID NO: 1911303 - RNA, 19 nt, Artificial Sequence
  Description of Artificial Sequence: Synthetic oligonucleotide
uagcuacacccaacaaagu

SEQ ID NO: 1911304 - RNA, 19 nt, Artificial Sequence
  Description of Artificial Sequence: Synthetic oligonucleotide
cgugaucagucuuuauucg

SEQ ID NO: 1911305 - RNA, 19 nt, Artificial Sequence
  Description of Artificial Sequence: Synthetic oligonucleotide
cuccguuuggaacuacuga

SEQ ID NO: 1911306 - RNA, 19 nt, Artificial Sequence
  Description of Artificial Sequence: Synthetic oligonucleotide
acgggaucugcaaagacua

SEQ ID NO: 1911307 - RNA, 19 nt, Artificial Sequence
  Description of Artificial Sequence: Synthetic oligonucleotide
cccacaugcuguuuucacg

SEQ ID NO: 1911308 - RNA, 19 nt, Artificial Sequence
  Description of Artificial Sequence: Synthetic oligonucleotide
auccauguaugaagagauc

SEQ ID NO: 1911309 - RNA, 19 nt, Artificial Sequence
  Description of Artificial Sequence: Synthetic oligonucleotide
ggcuucucaaguauguuuc

SEQ ID NO: 1911310 - RNA, 19 nt, Artificial Sequence
  Description of Artificial Sequence: Synthetic oligonucleotide
guuuauuucaguggcuggu

SEQ ID NO: 1911311 - RNA, 19 nt, Artificial Sequence
  Description of Artificial Sequence: Synthetic oligonucleotide
ugcagcguuugccaaccuu

SEQ ID NO: 1911312 - RNA, 19 nt, Artificial Sequence
  Description of Artificial Sequence: Synthetic oligonucleotide
ugggaucucuccguuugga

SEQ ID NO: 1911313 - RNA, 19 nt, Artificial Sequence
  Description of Artificial Sequence: Synthetic oligonucleotide
ggaugcacaaaacagcgau

SEQ ID NO: 1911314 - RNA, 19 nt, Artificial Sequence
  Description of Artificial Sequence: Synthetic oligonucleotide
auaauaguuaaggccccuu

SEQ ID NO: 1911315 - RNA, 19 nt, Artificial Sequence
  Description of Artificial Sequence: Synthetic oligonucleotide
caccuguucguguaguaaa

SEQ ID NO: 1911316 - RNA, 19 nt, Artificial Sequence
  Description of Artificial Sequence: Synthetic oligonucleotide
agugagcuaagaguuggua

SEQ ID NO: 1911317 - RNA, 19 nt, Artificial Sequence
  Description of Artificial Sequence: Synthetic oligonucleotide
cuucuaguugaugaguugu

SEQ ID NO: 1911318 - RNA, 19 nt, Artificial Sequence
  Description of Artificial Sequence: Synthetic oligonucleotide
gucaguugcccuaagaauu

SEQ ID NO: 1911319 - RNA, 19 nt, Artificial Sequence
  Description of Artificial Sequence: Synthetic oligonucleotide
ccggaugucaacauaggga

SEQ ID NO: 1911320 - RNA, 19 nt, Artificial Sequence
  Description of Artificial Sequence: Synthetic oligonucleotide
gugagcuaagaguugguau

SEQ ID NO: 1911321 - RNA, 19 nt, Artificial Sequence
  Description of Artificial Sequence: Synthetic oligonucleotide
aacuuccagucaagaaccu

SEQ ID NO: 1911322 - RNA, 19 nt, Artificial Sequence
  Description of Artificial Sequence: Synthetic oligonucleotide
gauucucugggaagaguaa

SEQ ID NO: 1911323 - RNA, 19 nt, Artificial Sequence
  Description of Artificial Sequence: Synthetic oligonucleotide
gcuaagaguugguauguaa

SEQ ID NO: 1911324 - RNA, 19 nt, Artificial Sequence
  Description of Artificial Sequence: Synthetic oligonucleotide
uguaaucuucuugguuuua

SEQ ID NO: 1911325 - RNA, 19 nt, Artificial Sequence
  Description of Artificial Sequence: Synthetic oligonucleotide
uggguucguuuauuucagu

SEQ ID NO: 1911326 - RNA, 19 nt, Artificial Sequence
  Description of Artificial Sequence: Synthetic oligonucleotide
ugaguccaacugccgcaca

SEQ ID NO: 1911327 - RNA, 19 nt, Artificial Sequence
  Description of Artificial Sequence: Synthetic oligonucleotide
acacccaacaaaguaccuu

SEQ ID NO: 1911328 - RNA, 19 nt, Artificial Sequence
  Description of Artificial Sequence: Synthetic oligonucleotide
agcguuugccaaccuucga

SEQ ID NO: 1911329 - RNA, 19 nt, Artificial Sequence
  Description of Artificial Sequence: Synthetic oligonucleotide
acagcgaugcaaacuucca

SEQ ID NO: 1911330 - RNA, 19 nt, Artificial Sequence
  Description of Artificial Sequence: Synthetic oligonucleotide
cauucacaguagccauagc

SEQ ID NO: 1911331 - RNA, 19 nt, Artificial Sequence
  Description of Artificial Sequence: Synthetic oligonucleotide
ggaauagcaucauauugau

SEQ ID NO: 1911332 - RNA, 19 nt, Artificial Sequence
  Description of Artificial Sequence: Synthetic oligonucleotide
uaaggccaucucgaacaug

SEQ ID NO: 1911333 - RNA, 19 nt, Artificial Sequence
  Description of Artificial Sequence: Synthetic oligonucleotide
aguugguauguaagauaug

SEQ ID NO: 1911334 - RNA, 19 nt, Artificial Sequence
  Description of Artificial Sequence: Synthetic oligonucleotide
gucaacauagggauucagu

SEQ ID NO: 1911335 - RNA, 19 nt, Artificial Sequence
  Description of Artificial Sequence: Synthetic oligonucleotide
cacgggaucugcaaagacu

SEQ ID NO: 1911336 - RNA, 19 nt, Artificial Sequence
  Description of Artificial Sequence: Synthetic oligonucleotide
auuggcgugaucagucuuu

SEQ ID NO: 1911337 - RNA, 19 nt, Artificial Sequence
  Description of Artificial Sequence: Synthetic oligonucleotide
gcgaugcaaacuuccaguc

SEQ ID NO: 1911338 - RNA, 19 nt, Artificial Sequence
  Description of Artificial Sequence: Synthetic oligonucleotide
gagcggguaggcuucucaa

SEQ ID NO: 1911339 - RNA, 19 nt, Artificial Sequence
  Description of Artificial Sequence: Synthetic oligonucleotide
cuugaggaauagcaucaua

SEQ ID NO: 1911340 - RNA, 19 nt, Artificial Sequence
  Description of Artificial Sequence: Synthetic oligonucleotide
uccccaucacccacacguc

SEQ ID NO: 1911341 - RNA, 19 nt, Artificial Sequence
  Description of Artificial Sequence: Synthetic oligonucleotide
ucccuccaagcuaccugca

SEQ ID NO: 1911342 - RNA, 19 nt, Artificial Sequence
  Description of Artificial Sequence: Synthetic oligonucleotide
ugccgcacacaugaaggau

SEQ ID NO: 1911343 - RNA, 19 nt, Artificial Sequence
  Description of Artificial Sequence: Synthetic oligonucleotide
augucaacauagggauuca

SEQ ID NO: 1911344 - RNA, 19 nt, Artificial Sequence
  Description of Artificial Sequence: Synthetic oligonucleotide
gagcuaagaguugguaugu

SEQ ID NO: 1911345 - RNA, 19 nt, Artificial Sequence
  Description of Artificial Sequence: Synthetic oligonucleotide
gcaggaugugcagagguca

SEQ ID NO: 1911346 - RNA, 19 nt, Artificial Sequence
  Description of Artificial Sequence: Synthetic oligonucleotide
caaaaucauaaaccccagu

SEQ ID NO: 1911347 - RNA, 19 nt, Artificial Sequence
  Description of Artificial Sequence: Synthetic oligonucleotide
aucucgaacaugggagaaa

SEQ ID NO: 1911348 - RNA, 19 nt, Artificial Sequence
  Description of Artificial Sequence: Synthetic oligonucleotide
caugcuguuuucacgggau

SEQ ID NO: 1911349 - RNA, 19 nt, Artificial Sequence
  Description of Artificial Sequence: Synthetic oligonucleotide
guucguguaguaaauccau

SEQ ID NO: 1911350 - RNA, 19 nt, Artificial Sequence
  Description of Artificial Sequence: Synthetic oligonucleotide
ccuaguggcuuuccggaug

SEQ ID NO: 1911351 - RNA, 19 nt, Artificial Sequence
  Description of Artificial Sequence: Synthetic oligonucleotide
uuggcgugaucagucuuua

SEQ ID NO: 1911352 - RNA, 19 nt, Artificial Sequence
  Description of Artificial Sequence: Synthetic oligonucleotide
cacccaacaaaguaccuuu

SEQ ID NO: 1911353 - RNA, 19 nt, Artificial Sequence
  Description of Artificial Sequence: Synthetic oligonucleotide
gccgcacacaugaaggaug

SEQ ID NO: 1911354 - RNA, 19 nt, Artificial Sequence
  Description of Artificial Sequence: Synthetic oligonucleotide
caaagacuauagguauaca

SEQ ID NO: 1911355 - RNA, 19 nt, Artificial Sequence
  Description of Artificial Sequence: Synthetic oligonucleotide
caaggccccacggaagguc

SEQ ID NO: 1911356 - RNA, 19 nt, Artificial Sequence
  Description of Artificial Sequence: Synthetic oligonucleotide
accuguucguguaguaaau

SEQ ID NO: 1911357 - RNA, 19 nt, Artificial Sequence
  Description of Artificial Sequence: Synthetic oligonucleotide
gcguuugccaaccuucgaa

SEQ ID NO: 1911358 - RNA, 19 nt, Artificial Sequence
  Description of Artificial Sequence: Synthetic oligonucleotide
cuuccaaauuacagccaua

SEQ ID NO: 1911359 - RNA, 19 nt, Artificial Sequence
  Description of Artificial Sequence: Synthetic oligonucleotide
ucguaagauucaggcuccu

SEQ ID NO: 1911360 - RNA, 19 nt, Artificial Sequence
  Description of Artificial Sequence: Synthetic oligonucleotide
ggauucagugaguccaacu

SEQ ID NO: 1911361 - RNA, 19 nt, Artificial Sequence
  Description of Artificial Sequence: Synthetic oligonucleotide
aguauacccuaaagaugaa

SEQ ID NO: 1911362 - RNA, 19 nt, Artificial Sequence
  Description of Artificial Sequence: Synthetic oligonucleotide
cuccaagcuaccugcaaau

SEQ ID NO: 1911363 - RNA, 19 nt, Artificial Sequence
  Description of Artificial Sequence: Synthetic oligonucleotide
ggcgugaucagucuuuauu

SEQ ID NO: 1911364 - RNA, 19 nt, Artificial Sequence
  Description of Artificial Sequence: Synthetic oligonucleotide
ccuuucagagcggguaggc

SEQ ID NO: 1911365 - RNA, 19 nt, Artificial Sequence
  Description of Artificial Sequence: Synthetic oligonucleotide
guaccuuuccagccagagu

SEQ ID NO: 1911366 - RNA, 19 nt, Artificial Sequence
  Description of Artificial Sequence: Synthetic oligonucleotide
ggcuguggguaguagugaa

SEQ ID NO: 1911367 - RNA, 19 nt, Artificial Sequence
  Description of Artificial Sequence: Synthetic oligonucleotide
caucucgaacaugggagaa

SEQ ID NO: 1911368 - RNA, 19 nt, Artificial Sequence
  Description of Artificial Sequence: Synthetic oligonucleotide
uggcgugaucagucuuuau

SEQ ID NO: 1911369 - RNA, 19 nt, Artificial Sequence
  Description of Artificial Sequence: Synthetic oligonucleotide
ucagagcggguaggcuucu

SEQ ID NO: 1911370 - RNA, 19 nt, Artificial Sequence
  Description of Artificial Sequence: Synthetic oligonucleotide
ccaucucgaacaugggaga

SEQ ID NO: 1911371 - RNA, 19 nt, Artificial Sequence
  Description of Artificial Sequence: Synthetic oligonucleotide
cuuaucaggauggcaggau

SEQ ID NO: 1911372 - RNA, 19 nt, Artificial Sequence
  Description of Artificial Sequence: Synthetic oligonucleotide
ccgaaguuaaggccaucuc

SEQ ID NO: 1911373 - RNA, 19 nt, Artificial Sequence
  Description of Artificial Sequence: Synthetic oligonucleotide
gaguuguggguucguuuau

SEQ ID NO: 1911374 - RNA, 19 nt, Artificial Sequence
  Description of Artificial Sequence: Synthetic oligonucleotide
guaagauaugccaccuguu

SEQ ID NO: 1911375 - RNA, 19 nt, Artificial Sequence
  Description of Artificial Sequence: Synthetic oligonucleotide
ccgagagcugugaugguga

SEQ ID NO: 1911376 - RNA, 19 nt, Artificial Sequence
  Description of Artificial Sequence: Synthetic oligonucleotide
gaauagcaucauauugauu

SEQ ID NO: 1911377 - RNA, 19 nt, Artificial Sequence
  Description of Artificial Sequence: Synthetic oligonucleotide
ggguaguagugaaaguaua

SEQ ID NO: 1911378 - RNA, 19 nt, Artificial Sequence
  Description of Artificial Sequence: Synthetic oligonucleotide
ccuguucguguaguaaauc

SEQ ID NO: 1911379 - RNA, 19 nt, Artificial Sequence
  Description of Artificial Sequence: Synthetic oligonucleotide
caugaaggaugaagauuau

SEQ ID NO: 1911380 - RNA, 19 nt, Artificial Sequence
  Description of Artificial Sequence: Synthetic oligonucleotide
ccguuuggaacuacugaaa

SEQ ID NO: 1911381 - RNA, 19 nt, Artificial Sequence
  Description of Artificial Sequence: Synthetic oligonucleotide
cucccuucuggucuugaau

SEQ ID NO: 1911382 - RNA, 19 nt, Artificial Sequence
  Description of Artificial Sequence: Synthetic oligonucleotide
ccgcacacaugaaggauga

SEQ ID NO: 1911383 - RNA, 19 nt, Artificial Sequence
  Description of Artificial Sequence: Synthetic oligonucleotide
ccaagaucauuuggcugug

SEQ ID NO: 1911384 - RNA, 19 nt, Artificial Sequence
  Description of Artificial Sequence: Synthetic oligonucleotide
ccuccaagcuaccugcaaa

SEQ ID NO: 1911385 - RNA, 19 nt, Artificial Sequence
  Description of Artificial Sequence: Synthetic oligonucleotide
cccuaaagaugaauuuucu

SEQ ID NO: 1911386 - RNA, 19 nt, Artificial Sequence
  Description of Artificial Sequence: Synthetic oligonucleotide
gagugagcuaagaguuggu

SEQ ID NO: 1911387 - RNA, 19 nt, Artificial Sequence
  Description of Artificial Sequence: Synthetic oligonucleotide
ccaaucuguguaccgaagu

SEQ ID NO: 1911388 - RNA, 19 nt, Artificial Sequence
  Description of Artificial Sequence: Synthetic oligonucleotide
cguguaguaaauccaugua

SEQ ID NO: 1911389 - RNA, 19 nt, Artificial Sequence
  Description of Artificial Sequence: Synthetic oligonucleotide
ggguaggcuucucaaguau

SEQ ID NO: 1911390 - RNA, 19 nt, Artificial Sequence
  Description of Artificial Sequence: Synthetic oligonucleotide
ccaucguaagauucaggcu

SEQ ID NO: 1911391 - RNA, 19 nt, Artificial Sequence
  Description of Artificial Sequence: Synthetic oligonucleotide
gugcagaggucaagaucuc

SEQ ID NO: 1911392 - RNA, 19 nt, Artificial Sequence
  Description of Artificial Sequence: Synthetic oligonucleotide
gguauacagucagcaccga

SEQ ID NO: 1911393 - RNA, 19 nt, Artificial Sequence
  Description of Artificial Sequence: Synthetic oligonucleotide
cauuggcgugaucagucuu

SEQ ID NO: 1911394 - RNA, 19 nt, Artificial Sequence
  Description of Artificial Sequence: Synthetic oligonucleotide
caguugcccuaagaauuaa

SEQ ID NO: 1911395 - RNA, 19 nt, Artificial Sequence
  Description of Artificial Sequence: Synthetic oligonucleotide
gcugaucaauaaaagccuu

SEQ ID NO: 1911396 - RNA, 19 nt, Artificial Sequence
  Description of Artificial Sequence: Synthetic oligonucleotide
uaguggcuuuccggauguc

SEQ ID NO: 1911397 - RNA, 19 nt, Artificial Sequence
  Description of Artificial Sequence: Synthetic oligonucleotide
ccacacgucauuggcguga

SEQ ID NO: 1911398 - RNA, 19 nt, Artificial Sequence
  Description of Artificial Sequence: Synthetic oligonucleotide
cgagagcugugauggugac

SEQ ID NO: 1911399 - RNA, 19 nt, Artificial Sequence
  Description of Artificial Sequence: Synthetic oligonucleotide
ccauagcuacacccaacaa

SEQ ID NO: 1911400 - RNA, 19 nt, Artificial Sequence
  Description of Artificial Sequence: Synthetic oligonucleotide
gccaccuguucguguagua

SEQ ID NO: 1911401 - RNA, 19 nt, Artificial Sequence
  Description of Artificial Sequence: Synthetic oligonucleotide
ccaccuguucguguaguaa

SEQ ID NO: 1911402 - RNA, 19 nt, Artificial Sequence
  Description of Artificial Sequence: Synthetic oligonucleotide
cagagcggguaggcuucuc

SEQ ID NO: 1911403 - RNA, 19 nt, Artificial Sequence
  Description of Artificial Sequence: Synthetic oligonucleotide
cuccucguucuagaagaau

SEQ ID NO: 1911404 - RNA, 19 nt, Artificial Sequence
  Description of Artificial Sequence: Synthetic oligonucleotide
cggguaggcuucucaagua

SEQ ID NO: 1911405 - RNA, 19 nt, Artificial Sequence
  Description of Artificial Sequence: Synthetic oligonucleotide
cugcagcguuugccaaccu

SEQ ID NO: 1911406 - RNA, 19 nt, Artificial Sequence
  Description of Artificial Sequence: Synthetic oligonucleotide
ccgauucucugggaagagu

SEQ ID NO: 1911407 - RNA, 19 nt, Artificial Sequence
  Description of Artificial Sequence: Synthetic oligonucleotide
cgucauuggcgugaucagu

SEQ ID NO: 1911408 - RNA, 19 nt, Artificial Sequence
  Description of Artificial Sequence: Synthetic oligonucleotide
ccaucacccacacgucauu

SEQ ID NO: 1911409 - RNA, 19 nt, Artificial Sequence
  Description of Artificial Sequence: Synthetic oligonucleotide
cgcacacaugaaggaugaa

SEQ ID NO: 1911410 - RNA, 19 nt, Artificial Sequence
  Description of Artificial Sequence: Synthetic oligonucleotide
gaagauuacaauuucauac

SEQ ID NO: 1911411 - RNA, 19 nt, Artificial Sequence
  Description of Artificial Sequence: Synthetic oligonucleotide
aaaccagcaagccagagug

SEQ ID NO: 1911412 - RNA, 19 nt, Artificial Sequence
  Description of Artificial Sequence: Synthetic oligonucleotide
aauauuuguacguccgccg

SEQ ID NO: 1911413 - RNA, 19 nt, Artificial Sequence
  Description of Artificial Sequence: Synthetic oligonucleotide
aaauauuuguacguccgcc

SEQ ID NO: 1911414 - RNA, 19 nt, Artificial Sequence
  Description of Artificial Sequence: Synthetic oligonucleotide
auauagacgaugcugacag

SEQ ID NO: 1911415 - RNA, 19 nt, Artificial Sequence
  Description of Artificial Sequence: Synthetic oligonucleotide
uucuuaaaccuccagccgg

SEQ ID NO: 1911416 - RNA, 19 nt, Artificial Sequence
  Description of Artificial Sequence: Synthetic oligonucleotide
aucauugucgaauucauca

SEQ ID NO: 1911417 - RNA, 19 nt, Artificial Sequence
  Description of Artificial Sequence: Synthetic oligonucleotide
aaaauuggaucauugucga

SEQ ID NO: 1911418 - RNA, 19 nt, Artificial Sequence
  Description of Artificial Sequence: Synthetic oligonucleotide
aguggaaaugcagucaugc

SEQ ID NO: 1911419 - RNA, 19 nt, Artificial Sequence
  Description of Artificial Sequence: Synthetic oligonucleotide
ucaucagggaucuuggugc

SEQ ID NO: 1911420 - RNA, 19 nt, Artificial Sequence
  Description of Artificial Sequence: Synthetic oligonucleotide
aagccuagcagucagggcu

SEQ ID NO: 1911421 - RNA, 19 nt, Artificial Sequence
  Description of Artificial Sequence: Synthetic oligonucleotide
uggaaaugcagucaugcca

SEQ ID NO: 1911422 - RNA, 19 nt, Artificial Sequence
  Description of Artificial Sequence: Synthetic oligonucleotide
gacgguaagagaugaagcc

SEQ ID NO: 1911423 - RNA, 19 nt, Artificial Sequence
  Description of Artificial Sequence: Synthetic oligonucleotide
uguuugaaugcuuccaaug

SEQ ID NO: 1911424 - RNA, 19 nt, Artificial Sequence
  Description of Artificial Sequence: Synthetic oligonucleotide
uuuauuggacacguggcgg

SEQ ID NO: 1911425 - RNA, 19 nt, Artificial Sequence
  Description of Artificial Sequence: Synthetic oligonucleotide
aauuggaucauugucgaau

SEQ ID NO: 1911426 - RNA, 19 nt, Artificial Sequence
  Description of Artificial Sequence: Synthetic oligonucleotide
aauuucauacagaggggcg

SEQ ID NO: 1911427 - RNA, 19 nt, Artificial Sequence
  Description of Artificial Sequence: Synthetic oligonucleotide
cuuuauuggacacguggcg

SEQ ID NO: 1911428 - RNA, 19 nt, Artificial Sequence
  Description of Artificial Sequence: Synthetic oligonucleotide
gaauucaucagggaucuug

SEQ ID NO: 1911429 - RNA, 19 nt, Artificial Sequence
  Description of Artificial Sequence: Synthetic oligonucleotide
ucauugucgaauucaucag

SEQ ID NO: 1911430 - RNA, 19 nt, Artificial Sequence
  Description of Artificial Sequence: Synthetic oligonucleotide
uugaaugcuuccaaugggu

SEQ ID NO: 1911431 - RNA, 19 nt, Artificial Sequence
  Description of Artificial Sequence: Synthetic oligonucleotide
auagacgaugcugacaguc

SEQ ID NO: 1911432 - RNA, 19 nt, Artificial Sequence
  Description of Artificial Sequence: Synthetic oligonucleotide
agacgaugcugacaguccc

SEQ ID NO: 1911433 - RNA, 19 nt, Artificial Sequence
  Description of Artificial Sequence: Synthetic oligonucleotide
aggaccagcguauagggug

SEQ ID NO: 1911434 - RNA, 19 nt, Artificial Sequence
  Description of Artificial Sequence: Synthetic oligonucleotide
auacagaggggcgagcugc

SEQ ID NO: 1911435 - RNA, 19 nt, Artificial Sequence
  Description of Artificial Sequence: Synthetic oligonucleotide
ucugccguuguuugaaugc

SEQ ID NO: 1911436 - RNA, 19 nt, Artificial Sequence
  Description of Artificial Sequence: Synthetic oligonucleotide
uccacgcuaucaaugagug

SEQ ID NO: 1911437 - RNA, 19 nt, Artificial Sequence
  Description of Artificial Sequence: Synthetic oligonucleotide
aaggucucgaugccuggac

SEQ ID NO: 1911438 - RNA, 19 nt, Artificial Sequence
  Description of Artificial Sequence: Synthetic oligonucleotide
caaugggucauccucuagg

SEQ ID NO: 1911439 - RNA, 19 nt, Artificial Sequence
  Description of Artificial Sequence: Synthetic oligonucleotide
cuaucaaugaguggaaaug

SEQ ID NO: 1911440 - RNA, 19 nt, Artificial Sequence
  Description of Artificial Sequence: Synthetic oligonucleotide
agauauagacgaugcugac

SEQ ID NO: 1911441 - RNA, 19 nt, Artificial Sequence
  Description of Artificial Sequence: Synthetic oligonucleotide
cauugucgaauucaucagg

SEQ ID NO: 1911442 - RNA, 19 nt, Artificial Sequence
  Description of Artificial Sequence: Synthetic oligonucleotide
uguacguccgccguaacug

SEQ ID NO: 1911443 - RNA, 19 nt, Artificial Sequence
  Description of Artificial Sequence: Synthetic oligonucleotide
agacgguaagagaugaagc

SEQ ID NO: 1911444 - RNA, 19 nt, Artificial Sequence
  Description of Artificial Sequence: Synthetic oligonucleotide
uauaggguggcugauagua

SEQ ID NO: 1911445 - RNA, 19 nt, Artificial Sequence
  Description of Artificial Sequence: Synthetic oligonucleotide
cuucuuaaaccuccagccg

SEQ ID NO: 1911446 - RNA, 19 nt, Artificial Sequence
  Description of Artificial Sequence: Synthetic oligonucleotide
cugggaugcgcuuuauugg

SEQ ID NO: 1911447 - RNA, 19 nt, Artificial Sequence
  Description of Artificial Sequence: Synthetic oligonucleotide
caauuucauacagaggggc

SEQ ID NO: 1911448 - RNA, 19 nt, Artificial Sequence
  Description of Artificial Sequence: Synthetic oligonucleotide
ucauccaccgaguuguuuc

SEQ ID NO: 1911449 - RNA, 19 nt, Artificial Sequence
  Description of Artificial Sequence: Synthetic oligonucleotide
gacaccacgucagaggaag

SEQ ID NO: 1911450 - RNA, 19 nt, Artificial Sequence
  Description of Artificial Sequence: Synthetic oligonucleotide
ucaugccagucucugaugu

SEQ ID NO: 1911451 - RNA, 19 nt, Artificial Sequence
  Description of Artificial Sequence: Synthetic oligonucleotide
ucccgauucagacaugaaa

SEQ ID NO: 1911452 - RNA, 19 nt, Artificial Sequence
  Description of Artificial Sequence: Synthetic oligonucleotide
uagacgaugcugacagucc

SEQ ID NO: 1911453 - RNA, 19 nt, Artificial Sequence
  Description of Artificial Sequence: Synthetic oligonucleotide
acgacuggcgaucucagca

SEQ ID NO: 1911454 - RNA, 19 nt, Artificial Sequence
  Description of Artificial Sequence: Synthetic oligonucleotide
ucuuaaaccuccagccggu

SEQ ID NO: 1911455 - RNA, 19 nt, Artificial Sequence
  Description of Artificial Sequence: Synthetic oligonucleotide
aacagacgguaagagauga

SEQ ID NO: 1911456 - RNA, 19 nt, Artificial Sequence
  Description of Artificial Sequence: Synthetic oligonucleotide
cuucacauggugucccucc

SEQ ID NO: 1911457 - RNA, 19 nt, Artificial Sequence
  Description of Artificial Sequence: Synthetic oligonucleotide
cacgcuaucaaugagugga

SEQ ID NO: 1911458 - RNA, 19 nt, Artificial Sequence
  Description of Artificial Sequence: Synthetic oligonucleotide
cuuggagccuccacgacug

SEQ ID NO: 1911459 - RNA, 19 nt, Artificial Sequence
  Description of Artificial Sequence: Synthetic oligonucleotide
uuauuggacacguggcggu

SEQ ID NO: 1911460 - RNA, 19 nt, Artificial Sequence
  Description of Artificial Sequence: Synthetic oligonucleotide
aagccuugcucugugagga

SEQ ID NO: 1911461 - RNA, 19 nt, Artificial Sequence
  Description of Artificial Sequence: Synthetic oligonucleotide
ugggucccgauucagacau

SEQ ID NO: 1911462 - RNA, 19 nt, Artificial Sequence
  Description of Artificial Sequence: Synthetic oligonucleotide
ugggaugcgcuuuauugga

SEQ ID NO: 1911463 - RNA, 19 nt, Artificial Sequence
  Description of Artificial Sequence: Synthetic oligonucleotide
auauuuguacguccgccgu

SEQ ID NO: 1911464 - RNA, 19 nt, Artificial Sequence
  Description of Artificial Sequence: Synthetic oligonucleotide
uagggcauagugcuccagc

SEQ ID NO: 1911465 - RNA, 19 nt, Artificial Sequence
  Description of Artificial Sequence: Synthetic oligonucleotide
ugaaugcuuccaauggguc

SEQ ID NO: 1911466 - RNA, 19 nt, Artificial Sequence
  Description of Artificial Sequence: Synthetic oligonucleotide
uuuuggcauagcugggacc

SEQ ID NO: 1911467 - RNA, 19 nt, Artificial Sequence
  Description of Artificial Sequence: Synthetic oligonucleotide
agggcgacaccguuguagg

SEQ ID NO: 1911468 - RNA, 19 nt, Artificial Sequence
  Description of Artificial Sequence: Synthetic oligonucleotide
uccggauguaggaggaccc

SEQ ID NO: 1911469 - RNA, 19 nt, Artificial Sequence
  Description of Artificial Sequence: Synthetic oligonucleotide
auaguagggcucccgaaga

SEQ ID NO: 1911470 - RNA, 19 nt, Artificial Sequence
  Description of Artificial Sequence: Synthetic oligonucleotide
auccucuagggcauagugc

SEQ ID NO: 1911471 - RNA, 19 nt, Artificial Sequence
  Description of Artificial Sequence: Synthetic oligonucleotide
cagacgguaagagaugaag

SEQ ID NO: 1911472 - RNA, 19 nt, Artificial Sequence
  Description of Artificial Sequence: Synthetic oligonucleotide
ugcucaagccgacucugcc

SEQ ID NO: 1911473 - RNA, 19 nt, Artificial Sequence
  Description of Artificial Sequence: Synthetic oligonucleotide
gaugcgcuuuauuggacac

SEQ ID NO: 1911474 - RNA, 19 nt, Artificial Sequence
  Description of Artificial Sequence: Synthetic oligonucleotide
caguccacgaccacuacuc

SEQ ID NO: 1911475 - RNA, 19 nt, Artificial Sequence
  Description of Artificial Sequence: Synthetic oligonucleotide
ugcgcuuuauuggacacgu

SEQ ID NO: 1911476 - RNA, 19 nt, Artificial Sequence
  Description of Artificial Sequence: Synthetic oligonucleotide
guagggcucccgaagaggg

SEQ ID NO: 1911477 - RNA, 19 nt, Artificial Sequence
  Description of Artificial Sequence: Synthetic oligonucleotide
gauauagacgaugcugaca

SEQ ID NO: 1911478 - RNA, 19 nt, Artificial Sequence
  Description of Artificial Sequence: Synthetic oligonucleotide
cacuacucgggcugggucc

SEQ ID NO: 1911479 - RNA, 19 nt, Artificial Sequence
  Description of Artificial Sequence: Synthetic oligonucleotide
cucuagggcauagugcucc

SEQ ID NO: 1911480 - RNA, 19 nt, Artificial Sequence
  Description of Artificial Sequence: Synthetic oligonucleotide
acuggccccaagcaaacca

SEQ ID NO: 1911481 - RNA, 19 nt, Artificial Sequence
  Description of Artificial Sequence: Synthetic oligonucleotide
uccagcaagacccggucau

SEQ ID NO: 1911482 - RNA, 19 nt, Artificial Sequence
  Description of Artificial Sequence: Synthetic oligonucleotide
ucccggaacagacgguaag

SEQ ID NO: 1911483 - RNA, 19 nt, Artificial Sequence
  Description of Artificial Sequence: Synthetic oligonucleotide
uuguacguccgccguaacu

SEQ ID NO: 1911484 - RNA, 19 nt, Artificial Sequence
  Description of Artificial Sequence: Synthetic oligonucleotide
ggagcgaggccacaggcgg

SEQ ID NO: 1911485 - RNA, 19 nt, Artificial Sequence
  Description of Artificial Sequence: Synthetic oligonucleotide
auuggacacguggcggucc

SEQ ID NO: 1911486 - RNA, 19 nt, Artificial Sequence
  Description of Artificial Sequence: Synthetic oligonucleotide
accgaguuguuuccaaaga

SEQ ID NO: 1911487 - RNA, 19 nt, Artificial Sequence
  Description of Artificial Sequence: Synthetic oligonucleotide
aggucucgaugccuggacg

SEQ ID NO: 1911488 - RNA, 19 nt, Artificial Sequence
  Description of Artificial Sequence: Synthetic oligonucleotide
agcaagacccggucaucgg

SEQ ID NO: 1911489 - RNA, 19 nt, Artificial Sequence
  Description of Artificial Sequence: Synthetic oligonucleotide
uggggauccacgcuaucaa

SEQ ID NO: 1911490 - RNA, 19 nt, Artificial Sequence
  Description of Artificial Sequence: Synthetic oligonucleotide
acaaggucucgaugccugg

SEQ ID NO: 1911491 - RNA, 19 nt, Artificial Sequence
  Description of Artificial Sequence: Synthetic oligonucleotide
gaguugccgucccagggcc

SEQ ID NO: 1911492 - RNA, 19 nt, Artificial Sequence
  Description of Artificial Sequence: Synthetic oligonucleotide
acuacucgggcuggguccc

SEQ ID NO: 1911493 - RNA, 19 nt, Artificial Sequence
  Description of Artificial Sequence: Synthetic oligonucleotide
agaugaagccauggggauc

SEQ ID NO: 1911494 - RNA, 19 nt, Artificial Sequence
  Description of Artificial Sequence: Synthetic oligonucleotide
cauccaccgaguuguuucc

SEQ ID NO: 1911495 - RNA, 19 nt, Artificial Sequence
  Description of Artificial Sequence: Synthetic oligonucleotide
acgguaagagaugaagcca

SEQ ID NO: 1911496 - RNA, 19 nt, Artificial Sequence
  Description of Artificial Sequence: Synthetic oligonucleotide
uauuuguacguccgccgua

SEQ ID NO: 1911497 - RNA, 19 nt, Artificial Sequence
  Description of Artificial Sequence: Synthetic oligonucleotide
auguaucugguggcguccc

SEQ ID NO: 1911498 - RNA, 19 nt, Artificial Sequence
  Description of Artificial Sequence: Synthetic oligonucleotide
ucggaguugccgucccagg

SEQ ID NO: 1911499 - RNA, 19 nt, Artificial Sequence
  Description of Artificial Sequence: Synthetic oligonucleotide
ucaucggaguugccguccc

SEQ ID NO: 1911500 - RNA, 19 nt, Artificial Sequence
  Description of Artificial Sequence: Synthetic oligonucleotide
cuagccgcgugcacagucc

SEQ ID NO: 1911501 - RNA, 19 nt, Artificial Sequence
  Description of Artificial Sequence: Synthetic oligonucleotide
ugcacuuggagagcucggc

SEQ ID NO: 1911502 - RNA, 19 nt, Artificial Sequence
  Description of Artificial Sequence: Synthetic oligonucleotide
cauguaucugguggcgucc

SEQ ID NO: 1911503 - RNA, 19 nt, Artificial Sequence
  Description of Artificial Sequence: Synthetic oligonucleotide
gagagcagcgccgccgacg

SEQ ID NO: 1911504 - RNA, 19 nt, Artificial Sequence
  Description of Artificial Sequence: Synthetic oligonucleotide
aagacccggucaucggagu

SEQ ID NO: 1911505 - RNA, 19 nt, Artificial Sequence
  Description of Artificial Sequence: Synthetic oligonucleotide
aggggcgagcugcuggaac

SEQ ID NO: 1911506 - RNA, 19 nt, Artificial Sequence
  Description of Artificial Sequence: Synthetic oligonucleotide
cagcaagacccggucaucg

SEQ ID NO: 1911507 - RNA, 19 nt, Artificial Sequence
  Description of Artificial Sequence: Synthetic oligonucleotide
guaucugguggcgucccgg

SEQ ID NO: 1911508 - RNA, 19 nt, Artificial Sequence
  Description of Artificial Sequence: Synthetic oligonucleotide
uaucugguggcgucccgga

SEQ ID NO: 1911509 - RNA, 19 nt, Artificial Sequence
  Description of Artificial Sequence: Synthetic oligonucleotide
uggcugauaguagggcucc

SEQ ID NO: 1911510 - RNA, 19 nt, Artificial Sequence
  Description of Artificial Sequence: Synthetic oligonucleotide
cuccagcacaguccggacg

SEQ ID NO: 1911511 - RNA, 19 nt, Artificial Sequence
  Description of Artificial Sequence: Synthetic oligonucleotide
agggcucccgaagaggguc

SEQ ID NO: 1911512 - RNA, 19 nt, Artificial Sequence
  Description of Artificial Sequence: Synthetic oligonucleotide
cagacaccacgucagagga

SEQ ID NO: 1911513 - RNA, 19 nt, Artificial Sequence
  Description of Artificial Sequence: Synthetic oligonucleotide
cagggcgacaccguuguag

SEQ ID NO: 1911514 - RNA, 19 nt, Artificial Sequence
  Description of Artificial Sequence: Synthetic oligonucleotide
cuccggauguaggaggacc

SEQ ID NO: 1911515 - RNA, 19 nt, Artificial Sequence
  Description of Artificial Sequence: Synthetic oligonucleotide
uggugucccuccauguauc

SEQ ID NO: 1911516 - RNA, 19 nt, Artificial Sequence
  Description of Artificial Sequence: Synthetic oligonucleotide
auuuguacguccgccguaa

SEQ ID NO: 1911517 - RNA, 19 nt, Artificial Sequence
  Description of Artificial Sequence: Synthetic oligonucleotide
acccggucaucggaguugc

SEQ ID NO: 1911518 - RNA, 19 nt, Artificial Sequence
  Description of Artificial Sequence: Synthetic oligonucleotide
cucugccguuguuugaaug

SEQ ID NO: 1911519 - RNA, 19 nt, Artificial Sequence
  Description of Artificial Sequence: Synthetic oligonucleotide
gaucauugucgaauucauc

SEQ ID NO: 1911520 - RNA, 19 nt, Artificial Sequence
  Description of Artificial Sequence: Synthetic oligonucleotide
uggacgcuucuuaaaccuc

SEQ ID NO: 1911521 - RNA, 19 nt, Artificial Sequence
  Description of Artificial Sequence: Synthetic oligonucleotide
agcgcgagagcagcgccgc

SEQ ID NO: 1911522 - RNA, 19 nt, Artificial Sequence
  Description of Artificial Sequence: Synthetic oligonucleotide
gcucaagccgacucugccg

SEQ ID NO: 1911523 - RNA, 19 nt, Artificial Sequence
  Description of Artificial Sequence: Synthetic oligonucleotide
ugcagucaugccagucucu

SEQ ID NO: 1911524 - RNA, 19 nt, Artificial Sequence
  Description of Artificial Sequence: Synthetic oligonucleotide
cacgucagaggaagccuag

SEQ ID NO: 1911525 - RNA, 19 nt, Artificial Sequence
  Description of Artificial Sequence: Synthetic oligonucleotide
acgucagaggaagccuagc

SEQ ID NO: 1911526 - RNA, 19 nt, Artificial Sequence
  Description of Artificial Sequence: Synthetic oligonucleotide
auccacgcuaucaaugagu

SEQ ID NO: 1911527 - RNA, 19 nt, Artificial Sequence
  Description of Artificial Sequence: Synthetic oligonucleotide
aucggaguugccgucccag

SEQ ID NO: 1911528 - RNA, 19 nt, Artificial Sequence
  Description of Artificial Sequence: Synthetic oligonucleotide
caagcgcgagagcagcgcc

SEQ ID NO: 1911529 - RNA, 19 nt, Artificial Sequence
  Description of Artificial Sequence: Synthetic oligonucleotide
caccacgucagaggaagcc

SEQ ID NO: 1911530 - RNA, 19 nt, Artificial Sequence
  Description of Artificial Sequence: Synthetic oligonucleotide
ggucucgaugccuggacgc

SEQ ID NO: 1911531 - RNA, 19 nt, Artificial Sequence
  Description of Artificial Sequence: Synthetic oligonucleotide
ucuagggcauagugcucca

SEQ ID NO: 1911532 - RNA, 19 nt, Artificial Sequence
  Description of Artificial Sequence: Synthetic oligonucleotide
uauagacgaugcugacagu

SEQ ID NO: 1911533 - RNA, 19 nt, Artificial Sequence
  Description of Artificial Sequence: Synthetic oligonucleotide
uggcgucccggaacagacg

SEQ ID NO: 1911534 - RNA, 19 nt, Artificial Sequence
  Description of Artificial Sequence: Synthetic oligonucleotide
acgcuucuuaaaccuccag

SEQ ID NO: 1911535 - RNA, 19 nt, Artificial Sequence
  Description of Artificial Sequence: Synthetic oligonucleotide
aagccgacucugccguugu

SEQ ID NO: 1911536 - RNA, 19 nt, Artificial Sequence
  Description of Artificial Sequence: Synthetic oligonucleotide
gacuggcgaucucagcaac

SEQ ID NO: 1911537 - RNA, 19 nt, Artificial Sequence
  Description of Artificial Sequence: Synthetic oligonucleotide
guacguccgccguaacugc

SEQ ID NO: 1911538 - RNA, 19 nt, Artificial Sequence
  Description of Artificial Sequence: Synthetic oligonucleotide
cguauaggguggcugauag

SEQ ID NO: 1911539 - RNA, 19 nt, Artificial Sequence
  Description of Artificial Sequence: Synthetic oligonucleotide
ggaguugccgucccagggc

SEQ ID NO: 1911540 - RNA, 19 nt, Artificial Sequence
  Description of Artificial Sequence: Synthetic oligonucleotide
aggaggaccccgguuagcu

SEQ ID NO: 1911541 - RNA, 19 nt, Artificial Sequence
  Description of Artificial Sequence: Synthetic oligonucleotide
uccauguaucugguggcgu

SEQ ID NO: 1911542 - RNA, 19 nt, Artificial Sequence
  Description of Artificial Sequence: Synthetic oligonucleotide
uuuguacguccgccguaac

SEQ ID NO: 1911543 - RNA, 19 nt, Artificial Sequence
  Description of Artificial Sequence: Synthetic oligonucleotide
cugauaguagggcucccga

SEQ ID NO: 1911544 - RNA, 19 nt, Artificial Sequence
  Description of Artificial Sequence: Synthetic oligonucleotide
ccagcgaccacuccggaug

SEQ ID NO: 1911545 - RNA, 19 nt, Artificial Sequence
  Description of Artificial Sequence: Synthetic oligonucleotide
uucauacagaggggcgagc

SEQ ID NO: 1911546 - RNA, 19 nt, Artificial Sequence
  Description of Artificial Sequence: Synthetic oligonucleotide
ccuggacgcuucuuaaacc

SEQ ID NO: 1911547 - RNA, 19 nt, Artificial Sequence
  Description of Artificial Sequence: Synthetic oligonucleotide
cuggacgcuucuuaaaccu

SEQ ID NO: 1911548 - RNA, 19 nt, Artificial Sequence
  Description of Artificial Sequence: Synthetic oligonucleotide
cucgaugccuggacgcuuc

SEQ ID NO: 1911549 - RNA, 19 nt, Artificial Sequence
  Description of Artificial Sequence: Synthetic oligonucleotide
gcugggucccgauucagac

SEQ ID NO: 1911550 - RNA, 19 nt, Artificial Sequence
  Description of Artificial Sequence: Synthetic oligonucleotide
accacgucagaggaagccu

SEQ ID NO: 1911551 - RNA, 19 nt, Artificial Sequence
  Description of Artificial Sequence: Synthetic oligonucleotide
uuguagggcuguagccgga

SEQ ID NO: 1911552 - RNA, 19 nt, Artificial Sequence
  Description of Artificial Sequence: Synthetic oligonucleotide
gucaucggaguugccgucc

SEQ ID NO: 1911553 - RNA, 19 nt, Artificial Sequence
  Description of Artificial Sequence: Synthetic oligonucleotide
cccgaagagggucugggag

SEQ ID NO: 1911554 - RNA, 19 nt, Artificial Sequence
  Description of Artificial Sequence: Synthetic oligonucleotide
ucccgaagagggucuggga

SEQ ID NO: 1911555 - RNA, 19 nt, Artificial Sequence
  Description of Artificial Sequence: Synthetic oligonucleotide
ggaugcgcuuuauuggaca

SEQ ID NO: 1911556 - RNA, 19 nt, Artificial Sequence
  Description of Artificial Sequence: Synthetic oligonucleotide
augccuggacgcuucuuaa

SEQ ID NO: 1911557 - RNA, 19 nt, Artificial Sequence
  Description of Artificial Sequence: Synthetic oligonucleotide
ggaccagcguauagggugg

SEQ ID NO: 1911558 - RNA, 19 nt, Artificial Sequence
  Description of Artificial Sequence: Synthetic oligonucleotide
ggcgacaccguuguagggc

SEQ ID NO: 1911559 - RNA, 19 nt, Artificial Sequence
  Description of Artificial Sequence: Synthetic oligonucleotide
uauuggacacguggcgguc

SEQ ID NO: 1911560 - RNA, 19 nt, Artificial Sequence
  Description of Artificial Sequence: Synthetic oligonucleotide
cacgacuggcgaucucagc

SEQ ID NO: 1911561 - RNA, 19 nt, Artificial Sequence
  Description of Artificial Sequence: Synthetic oligonucleotide
cguuguagggcuguagccg

SEQ ID NO: 1911562 - RNA, 19 nt, Artificial Sequence
  Description of Artificial Sequence: Synthetic oligonucleotide
cagcguauaggguggcuga

SEQ ID NO: 1911563 - RNA, 19 nt, Artificial Sequence
  Description of Artificial Sequence: Synthetic oligonucleotide
agccauggggauccacgcu

SEQ ID NO: 1911564 - RNA, 19 nt, Artificial Sequence
  Description of Artificial Sequence: Synthetic oligonucleotide
caaagauauagacgaugcu

SEQ ID NO: 1911565 - RNA, 19 nt, Artificial Sequence
  Description of Artificial Sequence: Synthetic oligonucleotide
guggcgucccggaacagac

SEQ ID NO: 1911566 - RNA, 19 nt, Artificial Sequence
  Description of Artificial Sequence: Synthetic oligonucleotide
cuccgcaagcgcgagagca

SEQ ID NO: 1911567 - RNA, 19 nt, Artificial Sequence
  Description of Artificial Sequence: Synthetic oligonucleotide
uagggcucccgaagagggu

SEQ ID NO: 1911568 - RNA, 19 nt, Artificial Sequence
  Description of Artificial Sequence: Synthetic oligonucleotide
uguagggcuguagccggaa

SEQ ID NO: 1911569 - RNA, 19 nt, Artificial Sequence
  Description of Artificial Sequence: Synthetic oligonucleotide
gcgagcugcuggaacaagg

SEQ ID NO: 1911570 - RNA, 19 nt, Artificial Sequence
  Description of Artificial Sequence: Synthetic oligonucleotide
gacgaugcugacaguccca

SEQ ID NO: 1911571 - RNA, 19 nt, Artificial Sequence
  Description of Artificial Sequence: Synthetic oligonucleotide
caagccgacucugccguug

SEQ ID NO: 1911572 - RNA, 19 nt, Artificial Sequence
  Description of Artificial Sequence: Synthetic oligonucleotide
gacgcuucuuaaaccucca

SEQ ID NO: 1911573 - RNA, 19 nt, Artificial Sequence
  Description of Artificial Sequence: Synthetic oligonucleotide
caaaccagcaagccagagu

SEQ ID NO: 1911574 - RNA, 19 nt, Artificial Sequence
  Description of Artificial Sequence: Synthetic oligonucleotide
cacuccggauguaggagga

SEQ ID NO: 1911575 - RNA, 19 nt, Artificial Sequence
  Description of Artificial Sequence: Synthetic oligonucleotide
gagcccgcuccgcaagcgc

SEQ ID NO: 1911576 - RNA, 19 nt, Artificial Sequence
  Description of Artificial Sequence: Synthetic oligonucleotide
acaguccggacguccucca

SEQ ID NO: 1911577 - RNA, 19 nt, Artificial Sequence
  Description of Artificial Sequence: Synthetic oligonucleotide
gauguaggaggaccccggu

SEQ ID NO: 1911578 - RNA, 19 nt, Artificial Sequence
  Description of Artificial Sequence: Synthetic oligonucleotide
agcccgcuccgcaagcgcg

SEQ ID NO: 1911579 - RNA, 19 nt, Artificial Sequence
  Description of Artificial Sequence: Synthetic oligonucleotide
gcuaucaaugaguggaaau

SEQ ID NO: 1911580 - RNA, 19 nt, Artificial Sequence
  Description of Artificial Sequence: Synthetic oligonucleotide
ucccuccauguaucuggug

SEQ ID NO: 1911581 - RNA, 19 nt, Artificial Sequence
  Description of Artificial Sequence: Synthetic oligonucleotide
cucaagccgacucugccgu

SEQ ID NO: 1911582 - RNA, 19 nt, Artificial Sequence
  Description of Artificial Sequence: Synthetic oligonucleotide
ccggucaucggaguugccg

SEQ ID NO: 1911583 - RNA, 19 nt, Artificial Sequence
  Description of Artificial Sequence: Synthetic oligonucleotide
ccauguaucugguggcguc

SEQ ID NO: 1911584 - RNA, 19 nt, Artificial Sequence
  Description of Artificial Sequence: Synthetic oligonucleotide
ccuguaaucuuugaaauau

SEQ ID NO: 1911585 - RNA, 19 nt, Artificial Sequence
  Description of Artificial Sequence: Synthetic oligonucleotide
aucugggaugcgcuuuauu

SEQ ID NO: 1911586 - RNA, 19 nt, Artificial Sequence
  Description of Artificial Sequence: Synthetic oligonucleotide
gaccacuacucgggcuggg

SEQ ID NO: 1911587 - RNA, 19 nt, Artificial Sequence
  Description of Artificial Sequence: Synthetic oligonucleotide
cauggugucccuccaugua

SEQ ID NO: 1911588 - RNA, 19 nt, Artificial Sequence
  Description of Artificial Sequence: Synthetic oligonucleotide
cugggucccgauucagaca

SEQ ID NO: 1911589 - RNA, 19 nt, Artificial Sequence
  Description of Artificial Sequence: Synthetic oligonucleotide
gaaaugcagucaugccagu

SEQ ID NO: 1911590 - RNA, 19 nt, Artificial Sequence
  Description of Artificial Sequence: Synthetic oligonucleotide
cccgauucagacaugaaau

SEQ ID NO: 1911591 - RNA, 19 nt, Artificial Sequence
  Description of Artificial Sequence: Synthetic oligonucleotide
agacccggucaucggaguu

SEQ ID NO: 1911592 - RNA, 19 nt, Artificial Sequence
  Description of Artificial Sequence: Synthetic oligonucleotide
cuagggcauagugcuccag

SEQ ID NO: 1911593 - RNA, 19 nt, Artificial Sequence
  Description of Artificial Sequence: Synthetic oligonucleotide
acucugccguuguuugaau

SEQ ID NO: 1911594 - RNA, 19 nt, Artificial Sequence
  Description of Artificial Sequence: Synthetic oligonucleotide
ggucccgauucagacauga

SEQ ID NO: 1911595 - RNA, 19 nt, Artificial Sequence
  Description of Artificial Sequence: Synthetic oligonucleotide
agggaucuuggugccauuu

SEQ ID NO: 1911596 - RNA, 19 nt, Artificial Sequence
  Description of Artificial Sequence: Synthetic oligonucleotide
ccgccguaacugcugaacc

SEQ ID NO: 1911597 - RNA, 19 nt, Artificial Sequence
  Description of Artificial Sequence: Synthetic oligonucleotide
caccguuguagggcuguag

SEQ ID NO: 1911598 - RNA, 19 nt, Artificial Sequence
  Description of Artificial Sequence: Synthetic oligonucleotide
gcgaccacuccggauguag

SEQ ID NO: 1911599 - RNA, 19 nt, Artificial Sequence
  Description of Artificial Sequence: Synthetic oligonucleotide
ccgguuagcuccaggacca

SEQ ID NO: 1911600 - RNA, 19 nt, Artificial Sequence
  Description of Artificial Sequence: Synthetic oligonucleotide
gcuagccgcgugcacaguc

SEQ ID NO: 1911601 - RNA, 19 nt, Artificial Sequence
  Description of Artificial Sequence: Synthetic oligonucleotide
gccguuguuugaaugcuuc

SEQ ID NO: 1911602 - RNA, 19 nt, Artificial Sequence
  Description of Artificial Sequence: Synthetic oligonucleotide
ccggaacagacgguaagag

SEQ ID NO: 1911603 - RNA, 19 nt, Artificial Sequence
  Description of Artificial Sequence: Synthetic oligonucleotide
aguugccgucccagggccg

SEQ ID NO: 1911604 - RNA, 19 nt, Artificial Sequence
  Description of Artificial Sequence: Synthetic oligonucleotide
agcaaaccagcaagccaga

SEQ ID NO: 1911605 - RNA, 19 nt, Artificial Sequence
  Description of Artificial Sequence: Synthetic oligonucleotide
caaccugcucuggggcgcg

SEQ ID NO: 1911606 - RNA, 19 nt, Artificial Sequence
  Description of Artificial Sequence: Synthetic oligonucleotide
ucucgaugccuggacgcuu

SEQ ID NO: 1911607 - RNA, 19 nt, Artificial Sequence
  Description of Artificial Sequence: Synthetic oligonucleotide
ggcgguccaagccuugcuc

SEQ ID NO: 1911608 - RNA, 19 nt, Artificial Sequence
  Description of Artificial Sequence: Synthetic oligonucleotide
accacuacucgggcugggu

SEQ ID NO: 1911609 - RNA, 19 nt, Artificial Sequence
  Description of Artificial Sequence: Synthetic oligonucleotide
ccacgcuaucaaugagugg

SEQ ID NO: 1911610 - RNA, 19 nt, Artificial Sequence
  Description of Artificial Sequence: Synthetic oligonucleotide
gggcgacaccguuguaggg

SEQ ID NO: 1911611 - RNA, 19 nt, Artificial Sequence
  Description of Artificial Sequence: Synthetic oligonucleotide
gccuguaaucuuugaaaua

SEQ ID NO: 1911612 - RNA, 19 nt, Artificial Sequence
  Description of Artificial Sequence: Synthetic oligonucleotide
gugcacaguccccgcgcgc

SEQ ID NO: 1911613 - RNA, 19 nt, Artificial Sequence
  Description of Artificial Sequence: Synthetic oligonucleotide
gaccagcguauaggguggc

SEQ ID NO: 1911614 - RNA, 19 nt, Artificial Sequence
  Description of Artificial Sequence: Synthetic oligonucleotide
agcguauaggguggcugau

SEQ ID NO: 1911615 - RNA, 19 nt, Artificial Sequence
  Description of Artificial Sequence: Synthetic oligonucleotide
uccccgcgcgccgacccgg

SEQ ID NO: 1911616 - RNA, 19 nt, Artificial Sequence
  Description of Artificial Sequence: Synthetic oligonucleotide
acguccgccguaacugcug

SEQ ID NO: 1911617 - RNA, 19 nt, Artificial Sequence
  Description of Artificial Sequence: Synthetic oligonucleotide
gccauggggauccacgcua

SEQ ID NO: 1911618 - RNA, 19 nt, Artificial Sequence
  Description of Artificial Sequence: Synthetic oligonucleotide
ggucaucggaguugccguc

SEQ ID NO: 1911619 - RNA, 19 nt, Artificial Sequence
  Description of Artificial Sequence: Synthetic oligonucleotide
acgcuaucaaugaguggaa

SEQ ID NO: 1911620 - RNA, 19 nt, Artificial Sequence
  Description of Artificial Sequence: Synthetic oligonucleotide
caaggucucgaugccugga

SEQ ID NO: 1911621 - RNA, 19 nt, Artificial Sequence
  Description of Artificial Sequence: Synthetic oligonucleotide
gcgcuagccgcgugcacag

SEQ ID NO: 1911622 - RNA, 19 nt, Artificial Sequence
  Description of Artificial Sequence: Synthetic oligonucleotide
gcaaccugcucuggggcgc

SEQ ID NO: 1911623 - RNA, 19 nt, Artificial Sequence
  Description of Artificial Sequence: Synthetic oligonucleotide
ccaaugggucauccucuag

SEQ ID NO: 1911624 - RNA, 19 nt, Artificial Sequence
  Description of Artificial Sequence: Synthetic oligonucleotide
guauaggguggcugauagu

SEQ ID NO: 1911625 - RNA, 19 nt, Artificial Sequence
  Description of Artificial Sequence: Synthetic oligonucleotide
gcgugcacaguccccgcgc

SEQ ID NO: 1911626 - RNA, 19 nt, Artificial Sequence
  Description of Artificial Sequence: Synthetic oligonucleotide
cacguggcgguccaagccu

SEQ ID NO: 1911627 - RNA, 19 nt, Artificial Sequence
  Description of Artificial Sequence: Synthetic oligonucleotide
ggaucauugucgaauucau

SEQ ID NO: 1911628 - RNA, 19 nt, Artificial Sequence
  Description of Artificial Sequence: Synthetic oligonucleotide
guagccggaaagcuuccuu

SEQ ID NO: 1911629 - RNA, 19 nt, Artificial Sequence
  Description of Artificial Sequence: Synthetic oligonucleotide
ccacgacuggcgaucucag

SEQ ID NO: 1911630 - RNA, 19 nt, Artificial Sequence
  Description of Artificial Sequence: Synthetic oligonucleotide
agccuccacgacuggcgau

SEQ ID NO: 1911631 - RNA, 19 nt, Artificial Sequence
  Description of Artificial Sequence: Synthetic oligonucleotide
guagggcuguagccggaaa

SEQ ID NO: 1911632 - RNA, 19 nt, Artificial Sequence
  Description of Artificial Sequence: Synthetic oligonucleotide
accagcguauaggguggcu

SEQ ID NO: 1911633 - RNA, 19 nt, Artificial Sequence
  Description of Artificial Sequence: Synthetic oligonucleotide
cgaccacuccggauguagg

SEQ ID NO: 1911634 - RNA, 19 nt, Artificial Sequence
  Description of Artificial Sequence: Synthetic oligonucleotide
ggcgcuagccgcgugcaca

SEQ ID NO: 1911635 - RNA, 19 nt, Artificial Sequence
  Description of Artificial Sequence: Synthetic oligonucleotide
ugcuuggagcgaggccaca

SEQ ID NO: 1911636 - RNA, 19 nt, Artificial Sequence
  Description of Artificial Sequence: Synthetic oligonucleotide
ccacuacucgggcuggguc

SEQ ID NO: 1911637 - RNA, 19 nt, Artificial Sequence
  Description of Artificial Sequence: Synthetic oligonucleotide
uggugggcucgaugaucau

SEQ ID NO: 1911638 - RNA, 19 nt, Artificial Sequence
  Description of Artificial Sequence: Synthetic oligonucleotide
agacaccacgucagaggaa

SEQ ID NO: 1911639 - RNA, 19 nt, Artificial Sequence
  Description of Artificial Sequence: Synthetic oligonucleotide
gguggcgucccggaacaga

SEQ ID NO: 1911640 - RNA, 19 nt, Artificial Sequence
  Description of Artificial Sequence: Synthetic oligonucleotide
cuacucgggcugggucccg

SEQ ID NO: 1911641 - RNA, 19 nt, Artificial Sequence
  Description of Artificial Sequence: Synthetic oligonucleotide
cacgaccacuacucgggcu

SEQ ID NO: 1911642 - RNA, 19 nt, Artificial Sequence
  Description of Artificial Sequence: Synthetic oligonucleotide
caucggaguugccguccca

SEQ ID NO: 1911643 - RNA, 19 nt, Artificial Sequence
  Description of Artificial Sequence: Synthetic oligonucleotide
ccggauguaggaggacccc

SEQ ID NO: 1911644 - RNA, 19 nt, Artificial Sequence
  Description of Artificial Sequence: Synthetic oligonucleotide
ggugucccuccauguaucu

SEQ ID NO: 1911645 - RNA, 19 nt, Artificial Sequence
  Description of Artificial Sequence: Synthetic oligonucleotide
ccccgguuagcuccaggac

SEQ ID NO: 1911646 - RNA, 19 nt, Artificial Sequence
  Description of Artificial Sequence: Synthetic oligonucleotide
aggaccccgguuagcucca

SEQ ID NO: 1911647 - RNA, 19 nt, Artificial Sequence
  Description of Artificial Sequence: Synthetic oligonucleotide
gccuccacgacuggcgauc

SEQ ID NO: 1911648 - RNA, 19 nt, Artificial Sequence
  Description of Artificial Sequence: Synthetic oligonucleotide
cgcaagcgcgagagcagcg

SEQ ID NO: 1911649 - RNA, 19 nt, Artificial Sequence
  Description of Artificial Sequence: Synthetic oligonucleotide
gcgacaccguuguagggcu

SEQ ID NO: 1911650 - RNA, 19 nt, Artificial Sequence
  Description of Artificial Sequence: Synthetic oligonucleotide
gcgguccaagccuugcucu

SEQ ID NO: 1911651 - RNA, 19 nt, Artificial Sequence
  Description of Artificial Sequence: Synthetic oligonucleotide
gcugggaccuucugagccu

SEQ ID NO: 1911652 - RNA, 19 nt, Artificial Sequence
  Description of Artificial Sequence: Synthetic oligonucleotide
ccgcaagcgcgagagcagc

SEQ ID NO: 1911653 - RNA, 19 nt, Artificial Sequence
  Description of Artificial Sequence: Synthetic oligonucleotide
gccuuggagccuccacgac

SEQ ID NO: 1911654 - RNA, 19 nt, Artificial Sequence
  Description of Artificial Sequence: Synthetic oligonucleotide
cuccacgacuggcgaucuc

SEQ ID NO: 1911655 - RNA, 19 nt, Artificial Sequence
  Description of Artificial Sequence: Synthetic oligonucleotide
cauagugcuccagcacagu

SEQ ID NO: 1911656 - RNA, 19 nt, Artificial Sequence
  Description of Artificial Sequence: Synthetic oligonucleotide
ccgaguuguuuccaaagau

SEQ ID NO: 1911657 - RNA, 19 nt, Artificial Sequence
  Description of Artificial Sequence: Synthetic oligonucleotide
gucccggaacagacgguaa

SEQ ID NO: 1911658 - RNA, 19 nt, Artificial Sequence
  Description of Artificial Sequence: Synthetic oligonucleotide
gucccgauucagacaugaa

SEQ ID NO: 1911659 - RNA, 19 nt, Artificial Sequence
  Description of Artificial Sequence: Synthetic oligonucleotide
cccggaacagacgguaaga

SEQ ID NO: 1911660 - RNA, 19 nt, Artificial Sequence
  Description of Artificial Sequence: Synthetic oligonucleotide
ccacgucagaggaagccua

SEQ ID NO: 1911661 - RNA, 19 nt, Artificial Sequence
  Description of Artificial Sequence: Synthetic oligonucleotide
ggggcccagacaccacguc

SEQ ID NO: 1911662 - RNA, 19 nt, Artificial Sequence
  Description of Artificial Sequence: Synthetic oligonucleotide
ccgcagggcgacaccguug

SEQ ID NO: 1911663 - RNA, 19 nt, Artificial Sequence
  Description of Artificial Sequence: Synthetic oligonucleotide
agccgacucugccguuguu

SEQ ID NO: 1911664 - RNA, 19 nt, Artificial Sequence
  Description of Artificial Sequence: Synthetic oligonucleotide
ccggagcccgcuccgcaag

SEQ ID NO: 1911665 - RNA, 19 nt, Artificial Sequence
  Description of Artificial Sequence: Synthetic oligonucleotide
cgguaagagaugaagccau

SEQ ID NO: 1911666 - RNA, 19 nt, Artificial Sequence
  Description of Artificial Sequence: Synthetic oligonucleotide
acguggcgguccaagccuu

SEQ ID NO: 1911667 - RNA, 19 nt, Artificial Sequence
  Description of Artificial Sequence: Synthetic oligonucleotide
acaccguuguagggcugua

SEQ ID NO: 1911668 - RNA, 19 nt, Artificial Sequence
  Description of Artificial Sequence: Synthetic oligonucleotide
gguucacugcaauggucuu

SEQ ID NO: 1911669 - RNA, 19 nt, Artificial Sequence
  Description of Artificial Sequence: Synthetic oligonucleotide
gcuccgcaagcgcgagagc

SEQ ID NO: 1911670 - RNA, 19 nt, Artificial Sequence
  Description of Artificial Sequence: Synthetic oligonucleotide
guccgccguaacugcugaa

SEQ ID NO: 1911671 - RNA, 19 nt, Artificial Sequence
  Description of Artificial Sequence: Synthetic oligonucleotide
gcccagacaccacgucaga

SEQ ID NO: 1911672 - RNA, 19 nt, Artificial Sequence
  Description of Artificial Sequence: Synthetic oligonucleotide
gaggggcgagcugcuggaa

SEQ ID NO: 1911673 - RNA, 19 nt, Artificial Sequence
  Description of Artificial Sequence: Synthetic oligonucleotide
cagcgaccacuccggaugu

SEQ ID NO: 1911674 - RNA, 19 nt, Artificial Sequence
  Description of Artificial Sequence: Synthetic oligonucleotide
cacaguccccgcgcgccga

SEQ ID NO: 1911675 - RNA, 19 nt, Artificial Sequence
  Description of Artificial Sequence: Synthetic oligonucleotide
gccuagcagucagggcugc

SEQ ID NO: 1911676 - RNA, 19 nt, Artificial Sequence
  Description of Artificial Sequence: Synthetic oligonucleotide
gcgcuuuauuggacacgug

SEQ ID NO: 1911677 - RNA, 19 nt, Artificial Sequence
  Description of Artificial Sequence: Synthetic oligonucleotide
gcgaucucagcaaccugcu

SEQ ID NO: 1911678 - RNA, 19 nt, Artificial Sequence
  Description of Artificial Sequence: Synthetic oligonucleotide
gcguauaggguggcugaua

SEQ ID NO: 1911679 - RNA, 19 nt, Artificial Sequence
  Description of Artificial Sequence: Synthetic oligonucleotide
ccgcgugcacaguccccgc

SEQ ID NO: 1911680 - RNA, 19 nt, Artificial Sequence
  Description of Artificial Sequence: Synthetic oligonucleotide
ggcuguagccggaaagcuu

SEQ ID NO: 1911681 - RNA, 19 nt, Artificial Sequence
  Description of Artificial Sequence: Synthetic oligonucleotide
ggccagcgaccacuccgga

SEQ ID NO: 1911682 - RNA, 19 nt, Artificial Sequence
  Description of Artificial Sequence: Synthetic oligonucleotide
cggucaucggaguugccgu

SEQ ID NO: 1911683 - RNA, 19 nt, Artificial Sequence
  Description of Artificial Sequence: Synthetic oligonucleotide
cguggcgguccaagccuug

SEQ ID NO: 1911684 - RNA, 19 nt, Artificial Sequence
  Description of Artificial Sequence: Synthetic oligonucleotide
gggucccgauucagacaug

SEQ ID NO: 1911685 - RNA, 19 nt, Artificial Sequence
  Description of Artificial Sequence: Synthetic oligonucleotide
gccggaaagcuuccuucuu

SEQ ID NO: 1911686 - RNA, 19 nt, Artificial Sequence
  Description of Artificial Sequence: Synthetic oligonucleotide
gccagcgaccacuccggau

SEQ ID NO: 1911687 - RNA, 19 nt, Artificial Sequence
  Description of Artificial Sequence: Synthetic oligonucleotide
gcgcgagagcagcgccgcc

SEQ ID NO: 1911688 - RNA, 19 nt, Artificial Sequence
  Description of Artificial Sequence: Synthetic oligonucleotide
gccgacucugccguuguuu

SEQ ID NO: 1911689 - RNA, 19 nt, Artificial Sequence
  Description of Artificial Sequence: Synthetic oligonucleotide
ggaccccgguuagcuccag

SEQ ID NO: 1911690 - RNA, 19 nt, Artificial Sequence
  Description of Artificial Sequence: Synthetic oligonucleotide
gcggcgcuagccgcgugca

SEQ ID NO: 1911691 - RNA, 19 nt, Artificial Sequence
  Description of Artificial Sequence: Synthetic oligonucleotide
cguccgccguaacugcuga

SEQ ID NO: 1911692 - RNA, 19 nt, Artificial Sequence
  Description of Artificial Sequence: Synthetic oligonucleotide
cgcuaucaaugaguggaaa

SEQ ID NO: 1911693 - RNA, 19 nt, Artificial Sequence
  Description of Artificial Sequence: Synthetic oligonucleotide
cgcagggcgacaccguugu

SEQ ID NO: 1911694 - RNA, 19 nt, Artificial Sequence
  Description of Artificial Sequence: Synthetic oligonucleotide
cgucccggaacagacggua

SEQ ID NO: 1911695 - RNA, 19 nt, Artificial Sequence
  Description of Artificial Sequence: Synthetic oligonucleotide
gccgacccggagcccgcuc

SEQ ID NO: 1911696 - RNA, 19 nt, Artificial Sequence
  Description of Artificial Sequence: Synthetic oligonucleotide
gccgcagggcgacaccguu

SEQ ID NO: 1911697 - RNA, 19 nt, Artificial Sequence
  Description of Artificial Sequence: Synthetic oligonucleotide
ccuccacgacuggcgaucu

SEQ ID NO: 1911698 - RNA, 19 nt, Artificial Sequence
  Description of Artificial Sequence: Synthetic oligonucleotide
gcgucccggaacagacggu

SEQ ID NO: 1911699 - RNA, 19 nt, Artificial Sequence
  Description of Artificial Sequence: Synthetic oligonucleotide
cggcgcuagccgcgugcac

SEQ ID NO: 1911700 - RNA, 19 nt, Artificial Sequence
  Description of Artificial Sequence: Synthetic oligonucleotide
ccuagcagucagggcugcu

SEQ ID NO: 1911701 - RNA, 19 nt, Artificial Sequence
  Description of Artificial Sequence: Synthetic oligonucleotide
ccagggccgcagggcgaca

SEQ ID NO: 1911702 - RNA, 19 nt, Artificial Sequence
  Description of Artificial Sequence: Synthetic oligonucleotide
cggcggcgcuagccgcgug

SEQ ID NO: 1911703 - RNA, 19 nt, Artificial Sequence
  Description of Artificial Sequence: Synthetic oligonucleotide
cgaugccuggacgcuucuu

SEQ ID NO: 1911704 - RNA, 19 nt, Artificial Sequence
  Description of Artificial Sequence: Synthetic oligonucleotide
cgaauucaucagggaucuu

SEQ ID NO: 1911705 - RNA, 19 nt, Artificial Sequence
  Description of Artificial Sequence: Synthetic oligonucleotide
uuaguaaugacauugagag

SEQ ID NO: 1911706 - RNA, 19 nt, Artificial Sequence
  Description of Artificial Sequence: Synthetic oligonucleotide
aaagaguuaauuuagcucu

SEQ ID NO: 1911707 - RNA, 19 nt, Artificial Sequence
  Description of Artificial Sequence: Synthetic oligonucleotide
aaaagaguuaauuuagcuc

SEQ ID NO: 1911708 - RNA, 19 nt, Artificial Sequence
  Description of Artificial Sequence: Synthetic oligonucleotide
aguaaugacauugagagac

SEQ ID NO: 1911709 - RNA, 19 nt, Artificial Sequence
  Description of Artificial Sequence: Synthetic oligonucleotide
uuuacuaaaagucuggccu

SEQ ID NO: 1911710 - RNA, 19 nt, Artificial Sequence
  Description of Artificial Sequence: Synthetic oligonucleotide
  modified_base (15)..(15): a, c, u, g, unknown or other
auacuguugaaacunaacc

SEQ ID NO: 1911711 - RNA, 19 nt, Artificial Sequence
  Description of Artificial Sequence: Synthetic oligonucleotide
ugcauaauaggucaugugg

SEQ ID NO: 1911712 - RNA, 19 nt, Artificial Sequence
  Description of Artificial Sequence: Synthetic oligonucleotide
aauggcagaacgcacauag

SEQ ID NO: 1911713 - RNA, 19 nt, Artificial Sequence
  Description of Artificial Sequence: Synthetic oligonucleotide
uucuaugacaaucaucugg

SEQ ID NO: 1911714 - RNA, 19 nt, Artificial Sequence
  Description of Artificial Sequence: Synthetic oligonucleotide
uuacaucagauuuugauag

SEQ ID NO: 1911715 - RNA, 19 nt, Artificial Sequence
  Description of Artificial Sequence: Synthetic oligonucleotide
auuugguuccuuuuaaagc

SEQ ID NO: 1911716 - RNA, 19 nt, Artificial Sequence
  Description of Artificial Sequence: Synthetic oligonucleotide
gauuauaagaaugaggcug

SEQ ID NO: 1911717 - RNA, 19 nt, Artificial Sequence
  Description of Artificial Sequence: Synthetic oligonucleotide
aaaguuuggcauuugaccu

SEQ ID NO: 1911718 - RNA, 19 nt, Artificial Sequence
  Description of Artificial Sequence: Synthetic oligonucleotide
aaaggaauccacaauacuc

SEQ ID NO: 1911719 - RNA, 19 nt, Artificial Sequence
  Description of Artificial Sequence: Synthetic oligonucleotide
ugaauuuccagaaucuugc

SEQ ID NO: 1911720 - RNA, 19 nt, Artificial Sequence
  Description of Artificial Sequence: Synthetic oligonucleotide
uucuuagacagauaaagcc

SEQ ID NO: 1911721 - RNA, 19 nt, Artificial Sequence
  Description of Artificial Sequence: Synthetic oligonucleotide
ugaauauuuggcucgaugc

SEQ ID NO: 1911722 - RNA, 19 nt, Artificial Sequence
  Description of Artificial Sequence: Synthetic oligonucleotide
  modified_base (14)..(14): a, c, u, g, unknown or other
uacuguugaaacunaaccc

SEQ ID NO: 1911723 - RNA, 19 nt, Artificial Sequence
  Description of Artificial Sequence: Synthetic oligonucleotide
uuuaaagcuuuacuaaaag

SEQ ID NO: 1911724 - RNA, 19 nt, Artificial Sequence
  Description of Artificial Sequence: Synthetic oligonucleotide
uuuaguaaugacauugaga

SEQ ID NO: 1911725 - RNA, 19 nt, Artificial Sequence
  Description of Artificial Sequence: Synthetic oligonucleotide
gauguuguuguugugaagg

SEQ ID NO: 1911726 - RNA, 19 nt, Artificial Sequence
  Description of Artificial Sequence: Synthetic oligonucleotide
uuuguguuguccaagugag

SEQ ID NO: 1911727 - RNA, 19 nt, Artificial Sequence
  Description of Artificial Sequence: Synthetic oligonucleotide
gaugcaucaacuuugguga

SEQ ID NO: 1911728 - RNA, 19 nt, Artificial Sequence
  Description of Artificial Sequence: Synthetic oligonucleotide
ugauucugaauauugcagg

SEQ ID NO: 1911729 - RNA, 19 nt, Artificial Sequence
  Description of Artificial Sequence: Synthetic oligonucleotide
agcucuaugaauuacaaaa

SEQ ID NO: 1911730 - RNA, 19 nt, Artificial Sequence
  Description of Artificial Sequence: Synthetic oligonucleotide
aaaugauucugaauauugc

SEQ ID NO: 1911731 - RNA, 19 nt, Artificial Sequence
  Description of Artificial Sequence: Synthetic oligonucleotide
  modified_base (13)..(13): a, c, u, g, unknown or other
acuguugaaacunaacccc

SEQ ID NO: 1911732 - RNA, 19 nt, Artificial Sequence
  Description of Artificial Sequence: Synthetic oligonucleotide
aaccuggauguacuuaugc

SEQ ID NO: 1911733 - RNA, 19 nt, Artificial Sequence
  Description of Artificial Sequence: Synthetic oligonucleotide
  modified_base (4)..(4): a, c, u, g, unknown or other
acunaaccccaacuuagcc

SEQ ID NO: 1911734 - RNA, 19 nt, Artificial Sequence
  Description of Artificial Sequence: Synthetic oligonucleotide
aagguagacaaccuggaug

SEQ ID NO: 1911735 - RNA, 19 nt, Artificial Sequence
  Description of Artificial Sequence: Synthetic oligonucleotide
aguuaauuuagcucuauga

SEQ ID NO: 1911736 - RNA, 19 nt, Artificial Sequence
  Description of Artificial Sequence: Synthetic oligonucleotide
uugucuauggcagagauac

SEQ ID NO: 1911737 - RNA, 19 nt, Artificial Sequence
  Description of Artificial Sequence: Synthetic oligonucleotide
uugaccuuaggucaaaaga

SEQ ID NO: 1911738 - RNA, 19 nt, Artificial Sequence
  Description of Artificial Sequence: Synthetic oligonucleotide
aauauugcaggcaaaauau

SEQ ID NO: 1911739 - RNA, 19 nt, Artificial Sequence
  Description of Artificial Sequence: Synthetic oligonucleotide
aaggagauuaauacauugc

SEQ ID NO: 1911740 - RNA, 19 nt, Artificial Sequence
  Description of Artificial Sequence: Synthetic oligonucleotide
uaauuuagcucuaugaauu

SEQ ID NO: 1911741 - RNA, 19 nt, Artificial Sequence
  Description of Artificial Sequence: Synthetic oligonucleotide
ucuaugacaaucaucuggu

SEQ ID NO: 1911742 - RNA, 19 nt, Artificial Sequence
  Description of Artificial Sequence: Synthetic oligonucleotide
ugguguuguagccaggugg

SEQ ID NO: 1911743 - RNA, 19 nt, Artificial Sequence
  Description of Artificial Sequence: Synthetic oligonucleotide
ucuuagacagauaaagccu

SEQ ID NO: 1911744 - RNA, 19 nt, Artificial Sequence
  Description of Artificial Sequence: Synthetic oligonucleotide
aaugccagaacucuucagu

SEQ ID NO: 1911745 - RNA, 19 nt, Artificial Sequence
  Description of Artificial Sequence: Synthetic oligonucleotide
uuaguucacaucuacagaa

SEQ ID NO: 1911746 - RNA, 19 nt, Artificial Sequence
  Description of Artificial Sequence: Synthetic oligonucleotide
guuacuuguaguuuccuag

SEQ ID NO: 1911747 - RNA, 19 nt, Artificial Sequence
  Description of Artificial Sequence: Synthetic oligonucleotide
ugagagacuggaauuuugg

SEQ ID NO: 1911748 - RNA, 19 nt, Artificial Sequence
  Description of Artificial Sequence: Synthetic oligonucleotide
aauaauaaaggagauuaau

SEQ ID NO: 1911749 - RNA, 19 nt, Artificial Sequence
  Description of Artificial Sequence: Synthetic oligonucleotide
uuuuaguaaugacauugag

SEQ ID NO: 1911750 - RNA, 19 nt, Artificial Sequence
  Description of Artificial Sequence: Synthetic oligonucleotide
ugaggaauagcagugaugu

SEQ ID NO: 1911751 - RNA, 19 nt, Artificial Sequence
  Description of Artificial Sequence: Synthetic oligonucleotide
agacagauaaagccuuucc

SEQ ID NO: 1911752 - RNA, 19 nt, Artificial Sequence
  Description of Artificial Sequence: Synthetic oligonucleotide
augacaaucaucugguuca

SEQ ID NO: 1911753 - RNA, 19 nt, Artificial Sequence
  Description of Artificial Sequence: Synthetic oligonucleotide
agugaaaauuuuacaagcc

SEQ ID NO: 1911754 - RNA, 19 nt, Artificial Sequence
  Description of Artificial Sequence: Synthetic oligonucleotide
auugaacacgguuuuccgc

SEQ ID NO: 1911755 - RNA, 19 nt, Artificial Sequence
  Description of Artificial Sequence: Synthetic oligonucleotide
uuaauuuagcucuaugaau

SEQ ID NO: 1911756 - RNA, 19 nt, Artificial Sequence
  Description of Artificial Sequence: Synthetic oligonucleotide
uguacuuaugcuccgccag

SEQ ID NO: 1911757 - RNA, 19 nt, Artificial Sequence
  Description of Artificial Sequence: Synthetic oligonucleotide
uuuagcucuaugaauuaca

SEQ ID NO: 1911758 - RNA, 19 nt, Artificial Sequence
  Description of Artificial Sequence: Synthetic oligonucleotide
  modified_base (6)..(6): a, c, u, g, unknown or other
aaacunaaccccaacuuag

SEQ ID NO: 1911759 - RNA, 19 nt, Artificial Sequence
  Description of Artificial Sequence: Synthetic oligonucleotide
uuagucaguccuuucaggc

SEQ ID NO: 1911760 - RNA, 19 nt, Artificial Sequence
  Description of Artificial Sequence: Synthetic oligonucleotide
ucaaaagaguuaauuuagc

SEQ ID NO: 1911761 - RNA, 19 nt, Artificial Sequence
  Description of Artificial Sequence: Synthetic oligonucleotide
agaaucuugcuuucucccc

SEQ ID NO: 1911762 - RNA, 19 nt, Artificial Sequence
  Description of Artificial Sequence: Synthetic oligonucleotide
acuuagccaaauuagucag

SEQ ID NO: 1911763 - RNA, 19 nt, Artificial Sequence
  Description of Artificial Sequence: Synthetic oligonucleotide
uuaaagcuuuacuaaaagu

SEQ ID NO: 1911764 - RNA, 19 nt, Artificial Sequence
  Description of Artificial Sequence: Synthetic oligonucleotide
aagaaugaggcugucuggg

SEQ ID NO: 1911765 - RNA, 19 nt, Artificial Sequence
  Description of Artificial Sequence: Synthetic oligonucleotide
gauagcuuaguucacaucu

SEQ ID NO: 1911766 - RNA, 19 nt, Artificial Sequence
  Description of Artificial Sequence: Synthetic oligonucleotide
aguuaaucaaucugaauau

SEQ ID NO: 1911767 - RNA, 19 nt, Artificial Sequence
  Description of Artificial Sequence: Synthetic oligonucleotide
auugccaauaauaaaggag

SEQ ID NO: 1911768 - RNA, 19 nt, Artificial Sequence
  Description of Artificial Sequence: Synthetic oligonucleotide
uuuccuaguugaauggcag

SEQ ID NO: 1911769 - RNA, 19 nt, Artificial Sequence
  Description of Artificial Sequence: Synthetic oligonucleotide
uaugacaaucaucugguuc

SEQ ID NO: 1911770 - RNA, 19 nt, Artificial Sequence
  Description of Artificial Sequence: Synthetic oligonucleotide
aacgcacauagacacaucu

SEQ ID NO: 1911771 - RNA, 19 nt, Artificial Sequence
  Description of Artificial Sequence: Synthetic oligonucleotide
ucuugaauuuccagaaucu

SEQ ID NO: 1911772 - RNA, 19 nt, Artificial Sequence
  Description of Artificial Sequence: Synthetic oligonucleotide
uuaaucaaucugaauauuu

SEQ ID NO: 1911773 - RNA, 19 nt, Artificial Sequence
  Description of Artificial Sequence: Synthetic oligonucleotide
  modified_base (9)..(9): a, c, u, g, unknown or other
uugaaacunaaccccaacu

SEQ ID NO: 1911774 - RNA, 19 nt, Artificial Sequence
  Description of Artificial Sequence: Synthetic oligonucleotide
augacagugaaaauuuuac

SEQ ID NO: 1911775 - RNA, 19 nt, Artificial Sequence
  Description of Artificial Sequence: Synthetic oligonucleotide
aagucauuugacccaacug

SEQ ID NO: 1911776 - RNA, 19 nt, Artificial Sequence
  Description of Artificial Sequence: Synthetic oligonucleotide
uaggcaguuaaucaaucug

SEQ ID NO: 1911777 - RNA, 19 nt, Artificial Sequence
  Description of Artificial Sequence: Synthetic oligonucleotide
aggagauuaauacauugcu

SEQ ID NO: 1911778 - RNA, 19 nt, Artificial Sequence
  Description of Artificial Sequence: Synthetic oligonucleotide
aggcaguuccuucaguugc

SEQ ID NO: 1911779 - RNA, 19 nt, Artificial Sequence
  Description of Artificial Sequence: Synthetic oligonucleotide
uccuuuuaaagcuuuacua

SEQ ID NO: 1911780 - RNA, 19 nt, Artificial Sequence
  Description of Artificial Sequence: Synthetic oligonucleotide
  modified_base (8)..(8): a, c, u, g, unknown or other
ugaaacunaaccccaacuu

SEQ ID NO: 1911781 - RNA, 19 nt, Artificial Sequence
  Description of Artificial Sequence: Synthetic oligonucleotide
aaaggcucacuccagaaua

SEQ ID NO: 1911782 - RNA, 19 nt, Artificial Sequence
  Description of Artificial Sequence: Synthetic oligonucleotide
  modified_base (5)..(5): a, c, u, g, unknown or other
aacunaaccccaacuuagc

SEQ ID NO: 1911783 - RNA, 19 nt, Artificial Sequence
  Description of Artificial Sequence: Synthetic oligonucleotide
cuucuuagacagauaaagc

SEQ ID NO: 1911784 - RNA, 19 nt, Artificial Sequence
  Description of Artificial Sequence: Synthetic oligonucleotide
  modified_base (2)..(2): a, c, u, g, unknown or other
unaaccccaacuuagccaa

SEQ ID NO: 1911785 - RNA, 19 nt, Artificial Sequence
  Description of Artificial Sequence: Synthetic oligonucleotide
cuuuacuaaaagucuggcc

SEQ ID NO: 1911786 - RNA, 19 nt, Artificial Sequence
  Description of Artificial Sequence: Synthetic oligonucleotide
auaaaggagauuaauacau

SEQ ID NO: 1911787 - RNA, 19 nt, Artificial Sequence
  Description of Artificial Sequence: Synthetic oligonucleotide
  modified_base (16)..(16): a, c, u, g, unknown or other
gauacuguugaaacunaac

SEQ ID NO: 1911788 - RNA, 19 nt, Artificial Sequence
  Description of Artificial Sequence: Synthetic oligonucleotide
ugugaagguagacaaccug

SEQ ID NO: 1911789 - RNA, 19 nt, Artificial Sequence
  Description of Artificial Sequence: Synthetic oligonucleotide
aggaauagcagugauguug

SEQ ID NO: 1911790 - RNA, 19 nt, Artificial Sequence
  Description of Artificial Sequence: Synthetic oligonucleotide
uaggucauguggaaaagga

SEQ ID NO: 1911791 - RNA, 19 nt, Artificial Sequence
  Description of Artificial Sequence: Synthetic oligonucleotide
uuuggcucgaugcauaaua

SEQ ID NO: 1911792 - RNA, 19 nt, Artificial Sequence
  Description of Artificial Sequence: Synthetic oligonucleotide
uuguugugaagguagacaa

SEQ ID NO: 1911793 - RNA, 19 nt, Artificial Sequence
  Description of Artificial Sequence: Synthetic oligonucleotide
gaauauugcaggcaaaaua

SEQ ID NO: 1911794 - RNA, 19 nt, Artificial Sequence
  Description of Artificial Sequence: Synthetic oligonucleotide
ucauuugacccaacugcgg

SEQ ID NO: 1911795 - RNA, 19 nt, Artificial Sequence
  Description of Artificial Sequence: Synthetic oligonucleotide
  modified_base (7)..(7): a, c, u, g, unknown or other
gaaacunaaccccaacuua

SEQ ID NO: 1911796 - RNA, 19 nt, Artificial Sequence
  Description of Artificial Sequence: Synthetic oligonucleotide
caauucggauguaugaaag

SEQ ID NO: 1911797 - RNA, 19 nt, Artificial Sequence
  Description of Artificial Sequence: Synthetic oligonucleotide
aauucggauguaugaaagu

SEQ ID NO: 1911798 - RNA, 19 nt, Artificial Sequence
  Description of Artificial Sequence: Synthetic oligonucleotide
cuuuccaauuuuacuagag

SEQ ID NO: 1911799 - RNA, 19 nt, Artificial Sequence
  Description of Artificial Sequence: Synthetic oligonucleotide
aaggaauccacaauacucu

SEQ ID NO: 1911800 - RNA, 19 nt, Artificial Sequence
  Description of Artificial Sequence: Synthetic oligonucleotide
aauagcagugauguuggug

SEQ ID NO: 1911801 - RNA, 19 nt, Artificial Sequence
  Description of Artificial Sequence: Synthetic oligonucleotide
uuuacaagccuguauugaa

SEQ ID NO: 1911802 - RNA, 19 nt, Artificial Sequence
  Description of Artificial Sequence: Synthetic oligonucleotide
uugaauggcagaacgcaca

SEQ ID NO: 1911803 - RNA, 19 nt, Artificial Sequence
  Description of Artificial Sequence: Synthetic oligonucleotide
uucugaauauugcaggcaa

SEQ ID NO: 1911804 - RNA, 19 nt, Artificial Sequence
  Description of Artificial Sequence: Synthetic oligonucleotide
acagauaaagccuuuccaa

SEQ ID NO: 1911805 - RNA, 19 nt, Artificial Sequence
  Description of Artificial Sequence: Synthetic oligonucleotide
uggcagaacgcacauagac

SEQ ID NO: 1911806 - RNA, 19 nt, Artificial Sequence
  Description of Artificial Sequence: Synthetic oligonucleotide
uuugaccuuaggucaaaag

SEQ ID NO: 1911807 - RNA, 19 nt, Artificial Sequence
  Description of Artificial Sequence: Synthetic oligonucleotide
uuuucaggcaguuccuuca

SEQ ID NO: 1911808 - RNA, 19 nt, Artificial Sequence
  Description of Artificial Sequence: Synthetic oligonucleotide
auccagaugcaauucagug

SEQ ID NO: 1911809 - RNA, 19 nt, Artificial Sequence
  Description of Artificial Sequence: Synthetic oligonucleotide
caguuaaucaaucugaaua

SEQ ID NO: 1911810 - RNA, 19 nt, Artificial Sequence
  Description of Artificial Sequence: Synthetic oligonucleotide
auuguaggcaguuaaucaa

SEQ ID NO: 1911811 - RNA, 19 nt, Artificial Sequence
  Description of Artificial Sequence: Synthetic oligonucleotide
uuagcucuaugaauuacaa

SEQ ID NO: 1911812 - RNA, 19 nt, Artificial Sequence
  Description of Artificial Sequence: Synthetic oligonucleotide
aagccuuuccaauuuuacu

SEQ ID NO: 1911813 - RNA, 19 nt, Artificial Sequence
  Description of Artificial Sequence: Synthetic oligonucleotide
ugacagugaaaauuuuaca

SEQ ID NO: 1911814 - RNA, 19 nt, Artificial Sequence
  Description of Artificial Sequence: Synthetic oligonucleotide
uucggauguaugaaagucu

SEQ ID NO: 1911815 - RNA, 19 nt, Artificial Sequence
  Description of Artificial Sequence: Synthetic oligonucleotide
ugguucaguccauugaaca

SEQ ID NO: 1911816 - RNA, 19 nt, Artificial Sequence
  Description of Artificial Sequence: Synthetic oligonucleotide
aauaggucauguggaaaag

SEQ ID NO: 1911817 - RNA, 19 nt, Artificial Sequence
  Description of Artificial Sequence: Synthetic oligonucleotide
cuucaguugcuucuuagac

SEQ ID NO: 1911818 - RNA, 19 nt, Artificial Sequence
  Description of Artificial Sequence: Synthetic oligonucleotide
gcuucuuagacagauaaag

SEQ ID NO: 1911819 - RNA, 19 nt, Artificial Sequence
  Description of Artificial Sequence: Synthetic oligonucleotide
aauauuuggcucgaugcau

SEQ ID NO: 1911820 - RNA, 19 nt, Artificial Sequence
  Description of Artificial Sequence: Synthetic oligonucleotide
uagacaaccuggauguacu

SEQ ID NO: 1911821 - RNA, 19 nt, Artificial Sequence
  Description of Artificial Sequence: Synthetic oligonucleotide
gaauauuuggcucgaugca

SEQ ID NO: 1911822 - RNA, 19 nt, Artificial Sequence
  Description of Artificial Sequence: Synthetic oligonucleotide
acucugaugaguuuguguu

SEQ ID NO: 1911823 - RNA, 19 nt, Artificial Sequence
  Description of Artificial Sequence: Synthetic oligonucleotide
acuuguaguuuccuaguug

SEQ ID NO: 1911824 - RNA, 19 nt, Artificial Sequence
  Description of Artificial Sequence: Synthetic oligonucleotide
ugcaauucagugagagaag

SEQ ID NO: 1911825 - RNA, 19 nt, Artificial Sequence
  Description of Artificial Sequence: Synthetic oligonucleotide
aguuuccuaguugaauggc

SEQ ID NO: 1911826 - RNA, 19 nt, Artificial Sequence
  Description of Artificial Sequence: Synthetic oligonucleotide
uuggcucgaugcauaauag

SEQ ID NO: 1911827 - RNA, 19 nt, Artificial Sequence
  Description of Artificial Sequence: Synthetic oligonucleotide
auuuagcucuaugaauuac

SEQ ID NO: 1911828 - RNA, 19 nt, Artificial Sequence
  Description of Artificial Sequence: Synthetic oligonucleotide
aaaaggcucacuccagaau

SEQ ID NO: 1911829 - RNA, 19 nt, Artificial Sequence
  Description of Artificial Sequence: Synthetic oligonucleotide
guuuguguuguccaaguga

SEQ ID NO: 1911830 - RNA, 19 nt, Artificial Sequence
  Description of Artificial Sequence: Synthetic oligonucleotide
ucggauguaugaaagucuc

SEQ ID NO: 1911831 - RNA, 19 nt, Artificial Sequence
  Description of Artificial Sequence: Synthetic oligonucleotide
ucuauggcagagauacugu

SEQ ID NO: 1911832 - RNA, 19 nt, Artificial Sequence
  Description of Artificial Sequence: Synthetic oligonucleotide
cagaaucuugcuuucuccc

SEQ ID NO: 1911833 - RNA, 19 nt, Artificial Sequence
  Description of Artificial Sequence: Synthetic oligonucleotide
uaguugaauggcagaacgc

SEQ ID NO: 1911834 - RNA, 19 nt, Artificial Sequence
  Description of Artificial Sequence: Synthetic oligonucleotide
aagcuuuacuaaaagucug

SEQ ID NO: 1911835 - RNA, 19 nt, Artificial Sequence
  Description of Artificial Sequence: Synthetic oligonucleotide
uaugguuacaucagauuuu

SEQ ID NO: 1911836 - RNA, 19 nt, Artificial Sequence
  Description of Artificial Sequence: Synthetic oligonucleotide
auaauaaaggagauuaaua

SEQ ID NO: 1911837 - RNA, 19 nt, Artificial Sequence
  Description of Artificial Sequence: Synthetic oligonucleotide
agauuauaagaaugaggcu

SEQ ID NO: 1911838 - RNA, 19 nt, Artificial Sequence
  Description of Artificial Sequence: Synthetic oligonucleotide
  modified_base (10)..(10): a, c, u, g, unknown or other
guugaaacunaaccccaac

SEQ ID NO: 1911839 - RNA, 19 nt, Artificial Sequence
  Description of Artificial Sequence: Synthetic oligonucleotide
gucauuugacccaacugcg

SEQ ID NO: 1911840 - RNA, 19 nt, Artificial Sequence
  Description of Artificial Sequence: Synthetic oligonucleotide
uuacuuguaguuuccuagu

SEQ ID NO: 1911841 - RNA, 19 nt, Artificial Sequence
  Description of Artificial Sequence: Synthetic oligonucleotide
gauguaugaaagucucuuc

SEQ ID NO: 1911842 - RNA, 19 nt, Artificial Sequence
  Description of Artificial Sequence: Synthetic oligonucleotide
  modified_base (19)..(19): a, c, u, g, unknown or other
agagauacuguugaaacun

SEQ ID NO: 1911843 - RNA, 19 nt, Artificial Sequence
  Description of Artificial Sequence: Synthetic oligonucleotide
uggaauuuuggguuguuuu

SEQ ID NO: 1911844 - RNA, 19 nt, Artificial Sequence
  Description of Artificial Sequence: Synthetic oligonucleotide
uguaugaaagucucuucau

SEQ ID NO: 1911845 - RNA, 19 nt, Artificial Sequence
  Description of Artificial Sequence: Synthetic oligonucleotide
aguugaauggcagaacgca

SEQ ID NO: 1911846 - RNA, 19 nt, Artificial Sequence
  Description of Artificial Sequence: Synthetic oligonucleotide
uuacuaaaagucuggccuc

SEQ ID NO: 1911847 - RNA, 19 nt, Artificial Sequence
  Description of Artificial Sequence: Synthetic oligonucleotide
auuauaagaaugaggcugu

SEQ ID NO: 1911848 - RNA, 19 nt, Artificial Sequence
  Description of Artificial Sequence: Synthetic oligonucleotide
agaguaccauugucuaugg

SEQ ID NO: 1911849 - RNA, 19 nt, Artificial Sequence
  Description of Artificial Sequence: Synthetic oligonucleotide
cucgaugcauaauagguca

SEQ ID NO: 1911850 - RNA, 19 nt, Artificial Sequence
  Description of Artificial Sequence: Synthetic oligonucleotide
uggaaaaggaauccacaau

SEQ ID NO: 1911851 - RNA, 19 nt, Artificial Sequence
  Description of Artificial Sequence: Synthetic oligonucleotide
uuagccaaauuagucaguc

SEQ ID NO: 1911852 - RNA, 19 nt, Artificial Sequence
  Description of Artificial Sequence: Synthetic oligonucleotide
aaugaggcauugccaauaa

SEQ ID NO: 1911853 - RNA, 19 nt, Artificial Sequence
  Description of Artificial Sequence: Synthetic oligonucleotide
uggguuggugcccaguucu

SEQ ID NO: 1911854 - RNA, 19 nt, Artificial Sequence
  Description of Artificial Sequence: Synthetic oligonucleotide
acacauucaaaugaggcau

SEQ ID NO: 1911855 - RNA, 19 nt, Artificial Sequence
  Description of Artificial Sequence: Synthetic oligonucleotide
gaguuaauuuagcucuaug

SEQ ID NO: 1911856 - RNA, 19 nt, Artificial Sequence
  Description of Artificial Sequence: Synthetic oligonucleotide
guccuuucaggcuggaugc

SEQ ID NO: 1911857 - RNA, 19 nt, Artificial Sequence
  Description of Artificial Sequence: Synthetic oligonucleotide
augacauugagagacugga

SEQ ID NO: 1911858 - RNA, 19 nt, Artificial Sequence
  Description of Artificial Sequence: Synthetic oligonucleotide
ccagaugcaauucagugag

SEQ ID NO: 1911859 - RNA, 19 nt, Artificial Sequence
  Description of Artificial Sequence: Synthetic oligonucleotide
uguguuguccaagugaguu

SEQ ID NO: 1911860 - RNA, 19 nt, Artificial Sequence
  Description of Artificial Sequence: Synthetic oligonucleotide
acuuaugcuccgccagccc

SEQ ID NO: 1911861 - RNA, 19 nt, Artificial Sequence
  Description of Artificial Sequence: Synthetic oligonucleotide
auuugacccaacugcggag

SEQ ID NO: 1911862 - RNA, 19 nt, Artificial Sequence
  Description of Artificial Sequence: Synthetic oligonucleotide
acauugcuaaaguuuggca

SEQ ID NO: 1911863 - RNA, 19 nt, Artificial Sequence
  Description of Artificial Sequence: Synthetic oligonucleotide
uagcuuaguucacaucuac

SEQ ID NO: 1911864 - RNA, 19 nt, Artificial Sequence
  Description of Artificial Sequence: Synthetic oligonucleotide
uccagaauaagaagccuuu

SEQ ID NO: 1911865 - RNA, 19 nt, Artificial Sequence
  Description of Artificial Sequence: Synthetic oligonucleotide
uuuccauccagaugcaauu

SEQ ID NO: 1911866 - RNA, 19 nt, Artificial Sequence
  Description of Artificial Sequence: Synthetic oligonucleotide
ccuuuuaguaaugacauug

SEQ ID NO: 1911867 - RNA, 19 nt, Artificial Sequence
  Description of Artificial Sequence: Synthetic oligonucleotide
agcuuuacuaaaagucugg

SEQ ID NO: 1911868 - RNA, 19 nt, Artificial Sequence
  Description of Artificial Sequence: Synthetic oligonucleotide
  modified_base (3)..(3): a, c, u, g, unknown or other
cunaaccccaacuuagcca

SEQ ID NO: 1911869 - RNA, 19 nt, Artificial Sequence
  Description of Artificial Sequence: Synthetic oligonucleotide
auaggucauguggaaaagg

SEQ ID NO: 1911870 - RNA, 19 nt, Artificial Sequence
  Description of Artificial Sequence: Synthetic oligonucleotide
ucugggaguuacuuguagu

SEQ ID NO: 1911871 - RNA, 19 nt, Artificial Sequence
  Description of Artificial Sequence: Synthetic oligonucleotide
uacaucagauuuugauagc

SEQ ID NO: 1911872 - RNA, 19 nt, Artificial Sequence
  Description of Artificial Sequence: Synthetic oligonucleotide
uaaugacauugagagacug

SEQ ID NO: 1911873 - RNA, 19 nt, Artificial Sequence
  Description of Artificial Sequence: Synthetic oligonucleotide
augaauuacaaaauacuuu

SEQ ID NO: 1911874 - RNA, 19 nt, Artificial Sequence
  Description of Artificial Sequence: Synthetic oligonucleotide
gcagagauacuguugaaac

SEQ ID NO: 1911875 - RNA, 19 nt, Artificial Sequence
  Description of Artificial Sequence: Synthetic oligonucleotide
uguaggcaguuaaucaauc

SEQ ID NO: 1911876 - RNA, 19 nt, Artificial Sequence
  Description of Artificial Sequence: Synthetic oligonucleotide
cuuuuaguaaugacauuga

SEQ ID NO: 1911877 - RNA, 19 nt, Artificial Sequence
  Description of Artificial Sequence: Synthetic oligonucleotide
gcagaacgcacauagacac

SEQ ID NO: 1911878 - RNA, 19 nt, Artificial Sequence
  Description of Artificial Sequence: Synthetic oligonucleotide
  modified_base (11)..(11): a, c, u, g, unknown or other
uguugaaacunaaccccaa

SEQ ID NO: 1911879 - RNA, 19 nt, Artificial Sequence
  Description of Artificial Sequence: Synthetic oligonucleotide
uguaguuuccuaguugaau

SEQ ID NO: 1911880 - RNA, 19 nt, Artificial Sequence
  Description of Artificial Sequence: Synthetic oligonucleotide
cagaguaccauugucuaug

SEQ ID NO: 1911881 - RNA, 19 nt, Artificial Sequence
  Description of Artificial Sequence: Synthetic oligonucleotide
uuucaggcuggaugcauca

SEQ ID NO: 1911882 - RNA, 19 nt, Artificial Sequence
  Description of Artificial Sequence: Synthetic oligonucleotide
uauaagaaugaggcugucu

SEQ ID NO: 1911883 - RNA, 19 nt, Artificial Sequence
  Description of Artificial Sequence: Synthetic oligonucleotide
ggaaaaggaauccacaaua

SEQ ID NO: 1911884 - RNA, 19 nt, Artificial Sequence
  Description of Artificial Sequence: Synthetic oligonucleotide
guuuuccgcacuuugcuga

SEQ ID NO: 1911885 - RNA, 19 nt, Artificial Sequence
  Description of Artificial Sequence: Synthetic oligonucleotide
cuggaugcaucaacuuugg

SEQ ID NO: 1911886 - RNA, 19 nt, Artificial Sequence
  Description of Artificial Sequence: Synthetic oligonucleotide
gaaaauuuuacaagccugu

SEQ ID NO: 1911887 - RNA, 19 nt, Artificial Sequence
  Description of Artificial Sequence: Synthetic oligonucleotide
uugauagcuuaguucacau

SEQ ID NO: 1911888 - RNA, 19 nt, Artificial Sequence
  Description of Artificial Sequence: Synthetic oligonucleotide
gaaggagggagaccuugag

SEQ ID NO: 1911889 - RNA, 19 nt, Artificial Sequence
  Description of Artificial Sequence: Synthetic oligonucleotide
uguugugaagguagacaac

SEQ ID NO: 1911890 - RNA, 19 nt, Artificial Sequence
  Description of Artificial Sequence: Synthetic oligonucleotide
acaucagauuuugauagcu

SEQ ID NO: 1911891 - RNA, 19 nt, Artificial Sequence
  Description of Artificial Sequence: Synthetic oligonucleotide
agauuuugauagcuuaguu

SEQ ID NO: 1911892 - RNA, 19 nt, Artificial Sequence
  Description of Artificial Sequence: Synthetic oligonucleotide
uuuugguguuguagccagg

SEQ ID NO: 1911893 - RNA, 19 nt, Artificial Sequence
  Description of Artificial Sequence: Synthetic oligonucleotide
aaaauuuuacaagccugua

SEQ ID NO: 1911894 - RNA, 19 nt, Artificial Sequence
  Description of Artificial Sequence: Synthetic oligonucleotide
ugaauggcagaacgcacau

SEQ ID NO: 1911895 - RNA, 19 nt, Artificial Sequence
  Description of Artificial Sequence: Synthetic oligonucleotide
ugcuuucuccccuccaccc

SEQ ID NO: 1911896 - RNA, 19 nt, Artificial Sequence
  Description of Artificial Sequence: Synthetic oligonucleotide
gacauugagagacuggaau

SEQ ID NO: 1911897 - RNA, 19 nt, Artificial Sequence
  Description of Artificial Sequence: Synthetic oligonucleotide
ggucaaaagaguuaauuua

SEQ ID NO: 1911898 - RNA, 19 nt, Artificial Sequence
  Description of Artificial Sequence: Synthetic oligonucleotide
cuuaggucaaaagaguuaa

SEQ ID NO: 1911899 - RNA, 19 nt, Artificial Sequence
  Description of Artificial Sequence: Synthetic oligonucleotide
uacaagccuguauugaauu

SEQ ID NO: 1911900 - RNA, 19 nt, Artificial Sequence
  Description of Artificial Sequence: Synthetic oligonucleotide
ugcaauucggauguaugaa

SEQ ID NO: 1911901 - RNA, 19 nt, Artificial Sequence
  Description of Artificial Sequence: Synthetic oligonucleotide
ucugaauauugcaggcaaa

SEQ ID NO: 1911902 - RNA, 19 nt, Artificial Sequence
  Description of Artificial Sequence: Synthetic oligonucleotide
accuggauguacuuaugcu

SEQ ID NO: 1911903 - RNA, 19 nt, Artificial Sequence
  Description of Artificial Sequence: Synthetic oligonucleotide
guccaagugaguuccucag

SEQ ID NO: 1911904 - RNA, 19 nt, Artificial Sequence
  Description of Artificial Sequence: Synthetic oligonucleotide
aguuuguguuguccaagug

SEQ ID NO: 1911905 - RNA, 19 nt, Artificial Sequence
  Description of Artificial Sequence: Synthetic oligonucleotide
gaugcaauucagugagaga

SEQ ID NO: 1911906 - RNA, 19 nt, Artificial Sequence
  Description of Artificial Sequence: Synthetic oligonucleotide
uaguaaugacauugagaga

SEQ ID NO: 1911907 - RNA, 19 nt, Artificial Sequence
  Description of Artificial Sequence: Synthetic oligonucleotide
uagucaguccuuucaggcu

SEQ ID NO: 1911908 - RNA, 19 nt, Artificial Sequence
  Description of Artificial Sequence: Synthetic oligonucleotide
uuugacccaacugcggaga

SEQ ID NO: 1911909 - RNA, 19 nt, Artificial Sequence
  Description of Artificial Sequence: Synthetic oligonucleotide
uccuaguugaauggcagaa

SEQ ID NO: 1911910 - RNA, 19 nt, Artificial Sequence
  Description of Artificial Sequence: Synthetic oligonucleotide
auguuggugucugcaauuc

SEQ ID NO: 1911911 - RNA, 19 nt, Artificial Sequence
  Description of Artificial Sequence: Synthetic oligonucleotide
ugaauauugcaggcaaaau

SEQ ID NO: 1911912 - RNA, 19 nt, Artificial Sequence
  Description of Artificial Sequence: Synthetic oligonucleotide
gaguguuggccagaguacc

SEQ ID NO: 1911913 - RNA, 19 nt, Artificial Sequence
  Description of Artificial Sequence: Synthetic oligonucleotide
acgguuuuccgcacuuugc

SEQ ID NO: 1911914 - RNA, 19 nt, Artificial Sequence
  Description of Artificial Sequence: Synthetic oligonucleotide
aggcaguuaaucaaucuga

SEQ ID NO: 1911915 - RNA, 19 nt, Artificial Sequence
  Description of Artificial Sequence: Synthetic oligonucleotide
agaacgcacauagacacau

SEQ ID NO: 1911916 - RNA, 19 nt, Artificial Sequence
  Description of Artificial Sequence: Synthetic oligonucleotide
uacuuaugcuccgccagcc

SEQ ID NO: 1911917 - RNA, 19 nt, Artificial Sequence
  Description of Artificial Sequence: Synthetic oligonucleotide
uauuuggcucgaugcauaa

SEQ ID NO: 1911918 - RNA, 19 nt, Artificial Sequence
  Description of Artificial Sequence: Synthetic oligonucleotide
uuccuaguugaauggcaga

SEQ ID NO: 1911919 - RNA, 19 nt, Artificial Sequence
  Description of Artificial Sequence: Synthetic oligonucleotide
cauaauaggucauguggaa

SEQ ID NO: 1911920 - RNA, 19 nt, Artificial Sequence
  Description of Artificial Sequence: Synthetic oligonucleotide
auacauugcuaaaguuugg

SEQ ID NO: 1911921 - RNA, 19 nt, Artificial Sequence
  Description of Artificial Sequence: Synthetic oligonucleotide
cauugccaauaauaaagga

SEQ ID NO: 1911922 - RNA, 19 nt, Artificial Sequence
  Description of Artificial Sequence: Synthetic oligonucleotide
cucugaugaguuuguguug

SEQ ID NO: 1911923 - RNA, 19 nt, Artificial Sequence
  Description of Artificial Sequence: Synthetic oligonucleotide
auguacuuaugcuccgcca

SEQ ID NO: 1911924 - RNA, 19 nt, Artificial Sequence
  Description of Artificial Sequence: Synthetic oligonucleotide
ugacauugagagacuggaa

SEQ ID NO: 1911925 - RNA, 19 nt, Artificial Sequence
  Description of Artificial Sequence: Synthetic oligonucleotide
uuaugcuccgccagcccac

SEQ ID NO: 1911926 - RNA, 19 nt, Artificial Sequence
  Description of Artificial Sequence: Synthetic oligonucleotide
uguuguugugaagguagac

SEQ ID NO: 1911927 - RNA, 19 nt, Artificial Sequence
  Description of Artificial Sequence: Synthetic oligonucleotide
gucauguggaaaaggaauc

SEQ ID NO: 1911928 - RNA, 19 nt, Artificial Sequence
  Description of Artificial Sequence: Synthetic oligonucleotide
ugauagcuuaguucacauc

SEQ ID NO: 1911929 - RNA, 19 nt, Artificial Sequence
  Description of Artificial Sequence: Synthetic oligonucleotide
aacacgguuuuccgcacuu

SEQ ID NO: 1911930 - RNA, 19 nt, Artificial Sequence
  Description of Artificial Sequence: Synthetic oligonucleotide
cauuugacccaacugcgga

SEQ ID NO: 1911931 - RNA, 19 nt, Artificial Sequence
  Description of Artificial Sequence: Synthetic oligonucleotide
ugcuucuuagacagauaaa

SEQ ID NO: 1911932 - RNA, 19 nt, Artificial Sequence
  Description of Artificial Sequence: Synthetic oligonucleotide
cugcaauucggauguauga

SEQ ID NO: 1911933 - RNA, 19 nt, Artificial Sequence
  Description of Artificial Sequence: Synthetic oligonucleotide
cauucucaugggcacggag

SEQ ID NO: 1911934 - RNA, 19 nt, Artificial Sequence
  Description of Artificial Sequence: Synthetic oligonucleotide
uuagacagauaaagccuuu

SEQ ID NO: 1911935 - RNA, 19 nt, Artificial Sequence
  Description of Artificial Sequence: Synthetic oligonucleotide
gaagguggauggcuggauc

SEQ ID NO: 1911936 - RNA, 19 nt, Artificial Sequence
  Description of Artificial Sequence: Synthetic oligonucleotide
  modified_base (12)..(12): a, c, u, g, unknown or other
cuguugaaacunaacccca

SEQ ID NO: 1911937 - RNA, 19 nt, Artificial Sequence
  Description of Artificial Sequence: Synthetic oligonucleotide
gaagucauuugacccaacu

SEQ ID NO: 1911938 - RNA, 19 nt, Artificial Sequence
  Description of Artificial Sequence: Synthetic oligonucleotide
auaauaggucauguggaaa

SEQ ID NO: 1911939 - RNA, 19 nt, Artificial Sequence
  Description of Artificial Sequence: Synthetic oligonucleotide
aguccauugaacacgguuu

SEQ ID NO: 1911940 - RNA, 19 nt, Artificial Sequence
  Description of Artificial Sequence: Synthetic oligonucleotide
gucugggaguuacuuguag

SEQ ID NO: 1911941 - RNA, 19 nt, Artificial Sequence
  Description of Artificial Sequence: Synthetic oligonucleotide
cuuucaggcuggaugcauc

SEQ ID NO: 1911942 - RNA, 19 nt, Artificial Sequence
  Description of Artificial Sequence: Synthetic oligonucleotide
cuaugguuacaucagauuu

SEQ ID NO: 1911943 - RNA, 19 nt, Artificial Sequence
  Description of Artificial Sequence: Synthetic oligonucleotide
cauugcuaaaguuuggcau

SEQ ID NO: 1911944 - RNA, 19 nt, Artificial Sequence
  Description of Artificial Sequence: Synthetic oligonucleotide
ugcggagauguuguuguug

SEQ ID NO: 1911945 - RNA, 19 nt, Artificial Sequence
  Description of Artificial Sequence: Synthetic oligonucleotide
uacuaaaagucuggccucu

SEQ ID NO: 1911946 - RNA, 19 nt, Artificial Sequence
  Description of Artificial Sequence: Synthetic oligonucleotide
gaucucccaguacuggaca

SEQ ID NO: 1911947 - RNA, 19 nt, Artificial Sequence
  Description of Artificial Sequence: Synthetic oligonucleotide
caaugccagaacucuucag

SEQ ID NO: 1911948 - RNA, 19 nt, Artificial Sequence
  Description of Artificial Sequence: Synthetic oligonucleotide
ucauucccuggaaggcucc

SEQ ID NO: 1911949 - RNA, 19 nt, Artificial Sequence
  Description of Artificial Sequence: Synthetic oligonucleotide
gggaguuacuuguaguuuc

SEQ ID NO: 1911950 - RNA, 19 nt, Artificial Sequence
  Description of Artificial Sequence: Synthetic oligonucleotide
gaugcauaauaggucaugu

SEQ ID NO: 1911951 - RNA, 19 nt, Artificial Sequence
  Description of Artificial Sequence: Synthetic oligonucleotide
uuaggucaaaagaguuaau

SEQ ID NO: 1911952 - RNA, 19 nt, Artificial Sequence
  Description of Artificial Sequence: Synthetic oligonucleotide
gcuggaugcaucaacuuug

SEQ ID NO: 1911953 - RNA, 19 nt, Artificial Sequence
  Description of Artificial Sequence: Synthetic oligonucleotide
guugaauggcagaacgcac

SEQ ID NO: 1911954 - RNA, 19 nt, Artificial Sequence
  Description of Artificial Sequence: Synthetic oligonucleotide
gaaucuugcuuucuccccu

SEQ ID NO: 1911955 - RNA, 19 nt, Artificial Sequence
  Description of Artificial Sequence: Synthetic oligonucleotide
gguuacaucagauuuugau

SEQ ID NO: 1911956 - RNA, 19 nt, Artificial Sequence
  Description of Artificial Sequence: Synthetic oligonucleotide
uagcucuaugaauuacaaa

SEQ ID NO: 1911957 - RNA, 19 nt, Artificial Sequence
  Description of Artificial Sequence: Synthetic oligonucleotide
ugaacacgguuuuccgcac

SEQ ID NO: 1911958 - RNA, 19 nt, Artificial Sequence
  Description of Artificial Sequence: Synthetic oligonucleotide
uagacagauaaagccuuuc

SEQ ID NO: 1911959 - RNA, 19 nt, Artificial Sequence
  Description of Artificial Sequence: Synthetic oligonucleotide
cuuaugcuccgccagccca

SEQ ID NO: 1911960 - RNA, 19 nt, Artificial Sequence
  Description of Artificial Sequence: Synthetic oligonucleotide
acaagccuguauugaauuu

SEQ ID NO: 1911961 - RNA, 19 nt, Artificial Sequence
  Description of Artificial Sequence: Synthetic oligonucleotide
aggcacucugaugaguuug

SEQ ID NO: 1911962 - RNA, 19 nt, Artificial Sequence
  Description of Artificial Sequence: Synthetic oligonucleotide
uuguguuguccaagugagu

SEQ ID NO: 1911963 - RNA, 19 nt, Artificial Sequence
  Description of Artificial Sequence: Synthetic oligonucleotide
ggccucuaugguuacauca

SEQ ID NO: 1911964 - RNA, 19 nt, Artificial Sequence
  Description of Artificial Sequence: Synthetic oligonucleotide
cuuucaaugccagaacucu

SEQ ID NO: 1911965 - RNA, 19 nt, Artificial Sequence
  Description of Artificial Sequence: Synthetic oligonucleotide
ucgaugcauaauaggucau

SEQ ID NO: 1911966 - RNA, 19 nt, Artificial Sequence
  Description of Artificial Sequence: Synthetic oligonucleotide
ccauugaacacgguuuucc

SEQ ID NO: 1911967 - RNA, 19 nt, Artificial Sequence
  Description of Artificial Sequence: Synthetic oligonucleotide
ugguuacaucagauuuuga

SEQ ID NO: 1911968 - RNA, 19 nt, Artificial Sequence
  Description of Artificial Sequence: Synthetic oligonucleotide
caguacuggacaggguugc

SEQ ID NO: 1911969 - RNA, 19 nt, Artificial Sequence
  Description of Artificial Sequence: Synthetic oligonucleotide
gcagaagucauuugaccca

SEQ ID NO: 1911970 - RNA, 19 nt, Artificial Sequence
  Description of Artificial Sequence: Synthetic oligonucleotide
cuuagacagauaaagccuu

SEQ ID NO: 1911971 - RNA, 19 nt, Artificial Sequence
  Description of Artificial Sequence: Synthetic oligonucleotide
gguuuuccgcacuuugcug

SEQ ID NO: 1911972 - RNA, 19 nt, Artificial Sequence
  Description of Artificial Sequence: Synthetic oligonucleotide
ugggaguuacuuguaguuu

SEQ ID NO: 1911973 - RNA, 19 nt, Artificial Sequence
  Description of Artificial Sequence: Synthetic oligonucleotide
aagaguuaauuuagcucua

SEQ ID NO: 1911974 - RNA, 19 nt, Artificial Sequence
  Description of Artificial Sequence: Synthetic oligonucleotide
uuauaagaaugaggcuguc

SEQ ID NO: 1911975 - RNA, 19 nt, Artificial Sequence
  Description of Artificial Sequence: Synthetic oligonucleotide
guaggcaguuaaucaaucu

SEQ ID NO: 1911976 - RNA, 19 nt, Artificial Sequence
  Description of Artificial Sequence: Synthetic oligonucleotide
ugucuauggcagagauacu

SEQ ID NO: 1911977 - RNA, 19 nt, Artificial Sequence
  Description of Artificial Sequence: Synthetic oligonucleotide
agaguuaauuuagcucuau

SEQ ID NO: 1911978 - RNA, 19 nt, Artificial Sequence
  Description of Artificial Sequence: Synthetic oligonucleotide
uuccauccagaugcaauuc

SEQ ID NO: 1911979 - RNA, 19 nt, Artificial Sequence
  Description of Artificial Sequence: Synthetic oligonucleotide
auugagagacuggaauuuu

SEQ ID NO: 1911980 - RNA, 19 nt, Artificial Sequence
  Description of Artificial Sequence: Synthetic oligonucleotide
agcuuaguucacaucuaca

SEQ ID NO: 1911981 - RNA, 19 nt, Artificial Sequence
  Description of Artificial Sequence: Synthetic oligonucleotide
agacacaucugaaggugga

SEQ ID NO: 1911982 - RNA, 19 nt, Artificial Sequence
  Description of Artificial Sequence: Synthetic oligonucleotide
ugucugggaguuacuugua

SEQ ID NO: 1911983 - RNA, 19 nt, Artificial Sequence
  Description of Artificial Sequence: Synthetic oligonucleotide
guacuggacaggguugcug

SEQ ID NO: 1911984 - RNA, 19 nt, Artificial Sequence
  Description of Artificial Sequence: Synthetic oligonucleotide
uggaaggcuccgcuuucaa

SEQ ID NO: 1911985 - RNA, 19 nt, Artificial Sequence
  Description of Artificial Sequence: Synthetic oligonucleotide
ugcuaaaguuuggcauuug

SEQ ID NO: 1911986 - RNA, 19 nt, Artificial Sequence
  Description of Artificial Sequence: Synthetic oligonucleotide
gcacggagcuccugaaggg

SEQ ID NO: 1911987 - RNA, 19 nt, Artificial Sequence
  Description of Artificial Sequence: Synthetic oligonucleotide
aguuuggcauuugaccuua

SEQ ID NO: 1911988 - RNA, 19 nt, Artificial Sequence
  Description of Artificial Sequence: Synthetic oligonucleotide
auauuuggcucgaugcaua

SEQ ID NO: 1911989 - RNA, 19 nt, Artificial Sequence
  Description of Artificial Sequence: Synthetic oligonucleotide
uugacccaacugcggagau

SEQ ID NO: 1911990 - RNA, 19 nt, Artificial Sequence
  Description of Artificial Sequence: Synthetic oligonucleotide
cagauaaagccuuuccaau

SEQ ID NO: 1911991 - RNA, 19 nt, Artificial Sequence
  Description of Artificial Sequence: Synthetic oligonucleotide
  modified_base (17)..(17): a, c, u, g, unknown or other
agauacuguugaaacunaa

SEQ ID NO: 1911992 - RNA, 19 nt, Artificial Sequence
  Description of Artificial Sequence: Synthetic oligonucleotide
uccauugaacacgguuuuc

SEQ ID NO: 1911993 - RNA, 19 nt, Artificial Sequence
  Description of Artificial Sequence: Synthetic oligonucleotide
agucuggccucuaugguua

SEQ ID NO: 1911994 - RNA, 19 nt, Artificial Sequence
  Description of Artificial Sequence: Synthetic oligonucleotide
cagagauacuguugaaacu

SEQ ID NO: 1911995 - RNA, 19 nt, Artificial Sequence
  Description of Artificial Sequence: Synthetic oligonucleotide
cauugucuauggcagagau

SEQ ID NO: 1911996 - RNA, 19 nt, Artificial Sequence
  Description of Artificial Sequence: Synthetic oligonucleotide
gaagguagacaaccuggau

SEQ ID NO: 1911997 - RNA, 19 nt, Artificial Sequence
  Description of Artificial Sequence: Synthetic oligonucleotide
acgcacauagacacaucug

SEQ ID NO: 1911998 - RNA, 19 nt, Artificial Sequence
  Description of Artificial Sequence: Synthetic oligonucleotide
aguguuggccagaguacca

SEQ ID NO: 1911999 - RNA, 19 nt, Artificial Sequence
  Description of Artificial Sequence: Synthetic oligonucleotide
auauugcaggcaaaauauu

SEQ ID NO: 1912000 - RNA, 19 nt, Artificial Sequence
  Description of Artificial Sequence: Synthetic oligonucleotide
ggagauuaauacauugcua

SEQ ID NO: 1912001 - RNA, 19 nt, Artificial Sequence
  Description of Artificial Sequence: Synthetic oligonucleotide
caagccuguauugaauuua

SEQ ID NO: 1912002 - RNA, 19 nt, Artificial Sequence
  Description of Artificial Sequence: Synthetic oligonucleotide
uccucagaugaggaguguu

SEQ ID NO: 1912003 - RNA, 19 nt, Artificial Sequence
  Description of Artificial Sequence: Synthetic oligonucleotide
ggaguguuggccagaguac

SEQ ID NO: 1912004 - RNA, 19 nt, Artificial Sequence
  Description of Artificial Sequence: Synthetic oligonucleotide
cccaguucuaugacaauca

SEQ ID NO: 1912005 - RNA, 19 nt, Artificial Sequence
  Description of Artificial Sequence: Synthetic oligonucleotide
uaugcuccgccagcccacc

SEQ ID NO: 1912006 - RNA, 19 nt, Artificial Sequence
  Description of Artificial Sequence: Synthetic oligonucleotide
auagcuuaguucacaucua

SEQ ID NO: 1912007 - RNA, 19 nt, Artificial Sequence
  Description of Artificial Sequence: Synthetic oligonucleotide
cauucccuggaaggcuccg

SEQ ID NO: 1912008 - RNA, 19 nt, Artificial Sequence
  Description of Artificial Sequence: Synthetic oligonucleotide
augcaucaacuuuggugau

SEQ ID NO: 1912009 - RNA, 19 nt, Artificial Sequence
  Description of Artificial Sequence: Synthetic oligonucleotide
gugcccaguucuaugacaa

SEQ ID NO: 1912010 - RNA, 19 nt, Artificial Sequence
  Description of Artificial Sequence: Synthetic oligonucleotide
agacaaccuggauguacuu

SEQ ID NO: 1912011 - RNA, 19 nt, Artificial Sequence
  Description of Artificial Sequence: Synthetic oligonucleotide
auuugaccuuaggucaaaa

SEQ ID NO: 1912012 - RNA, 19 nt, Artificial Sequence
  Description of Artificial Sequence: Synthetic oligonucleotide
guuuccauccagaugcaau

SEQ ID NO: 1912013 - RNA, 19 nt, Artificial Sequence
  Description of Artificial Sequence: Synthetic oligonucleotide
aggugggcagaagucauuu

SEQ ID NO: 1912014 - RNA, 19 nt, Artificial Sequence
  Description of Artificial Sequence: Synthetic oligonucleotide
cagauuuugauagcuuagu

SEQ ID NO: 1912015 - RNA, 19 nt, Artificial Sequence
  Description of Artificial Sequence: Synthetic oligonucleotide
gcucgaugcauaauagguc

SEQ ID NO: 1912016 - RNA, 19 nt, Artificial Sequence
  Description of Artificial Sequence: Synthetic oligonucleotide
cugggaguuacuuguaguu

SEQ ID NO: 1912017 - RNA, 19 nt, Artificial Sequence
  Description of Artificial Sequence: Synthetic oligonucleotide
gguggauggcuggaucucc

SEQ ID NO: 1912018 - RNA, 19 nt, Artificial Sequence
  Description of Artificial Sequence: Synthetic oligonucleotide
cuuagccaaauuagucagu

SEQ ID NO: 1912019 - RNA, 19 nt, Artificial Sequence
  Description of Artificial Sequence: Synthetic oligonucleotide
cuccagaauaagaagccuu

SEQ ID NO: 1912020 - RNA, 19 nt, Artificial Sequence
  Description of Artificial Sequence: Synthetic oligonucleotide
ggaucucccaguacuggac

SEQ ID NO: 1912021 - RNA, 19 nt, Artificial Sequence
  Description of Artificial Sequence: Synthetic oligonucleotide
guuaaucaaucugaauauu

SEQ ID NO: 1912022 - RNA, 19 nt, Artificial Sequence
  Description of Artificial Sequence: Synthetic oligonucleotide
ugggcacggagcuccugaa

SEQ ID NO: 1912023 - RNA, 19 nt, Artificial Sequence
  Description of Artificial Sequence: Synthetic oligonucleotide
aguacuggacaggguugcu

SEQ ID NO: 1912024 - RNA, 19 nt, Artificial Sequence
  Description of Artificial Sequence: Synthetic oligonucleotide
guggguuggugcccaguuc

SEQ ID NO: 1912025 - RNA, 19 nt, Artificial Sequence
  Description of Artificial Sequence: Synthetic oligonucleotide
guagccaggugggcagaag

SEQ ID NO: 1912026 - RNA, 19 nt, Artificial Sequence
  Description of Artificial Sequence: Synthetic oligonucleotide
gaacgcacauagacacauc

SEQ ID NO: 1912027 - RNA, 19 nt, Artificial Sequence
  Description of Artificial Sequence: Synthetic oligonucleotide
ccuaguugaauggcagaac

SEQ ID NO: 1912028 - RNA, 19 nt, Artificial Sequence
  Description of Artificial Sequence: Synthetic oligonucleotide
gcccaguucuaugacaauc

SEQ ID NO: 1912029 - RNA, 19 nt, Artificial Sequence
  Description of Artificial Sequence: Synthetic oligonucleotide
uuguagccaggugggcaga

SEQ ID NO: 1912030 - RNA, 19 nt, Artificial Sequence
  Description of Artificial Sequence: Synthetic oligonucleotide
ugcccaguucuaugacaau

SEQ ID NO: 1912031 - RNA, 19 nt, Artificial Sequence
  Description of Artificial Sequence: Synthetic oligonucleotide
ggagaccuugaggaauagc

SEQ ID NO: 1912032 - RNA, 19 nt, Artificial Sequence
  Description of Artificial Sequence: Synthetic oligonucleotide
agggagaccuugaggaaua

SEQ ID NO: 1912033 - RNA, 19 nt, Artificial Sequence
  Description of Artificial Sequence: Synthetic oligonucleotide
agccuguauugaauuuaca

SEQ ID NO: 1912034 - RNA, 19 nt, Artificial Sequence
  Description of Artificial Sequence: Synthetic oligonucleotide
caguccauugaacacgguu

SEQ ID NO: 1912035 - RNA, 19 nt, Artificial Sequence
  Description of Artificial Sequence: Synthetic oligonucleotide
acuaaaagucuggccucua

SEQ ID NO: 1912036 - RNA, 19 nt, Artificial Sequence
  Description of Artificial Sequence: Synthetic oligonucleotide
gaauagcagugauguuggu

SEQ ID NO: 1912037 - RNA, 19 nt, Artificial Sequence
  Description of Artificial Sequence: Synthetic oligonucleotide
guuuggcauuugaccuuag

SEQ ID NO: 1912038 - RNA, 19 nt, Artificial Sequence
  Description of Artificial Sequence: Synthetic oligonucleotide
uccgcacuuugcugaucuc

SEQ ID NO: 1912039 - RNA, 19 nt, Artificial Sequence
  Description of Artificial Sequence: Synthetic oligonucleotide
ccuuuccaauuuuacuaga

SEQ ID NO: 1912040 - RNA, 19 nt, Artificial Sequence
  Description of Artificial Sequence: Synthetic oligonucleotide
cagaugcaauucagugaga

SEQ ID NO: 1912041 - RNA, 19 nt, Artificial Sequence
  Description of Artificial Sequence: Synthetic oligonucleotide
gcacauagacacaucugaa

SEQ ID NO: 1912042 - RNA, 19 nt, Artificial Sequence
  Description of Artificial Sequence: Synthetic oligonucleotide
gucuggccucuaugguuac

SEQ ID NO: 1912043 - RNA, 19 nt, Artificial Sequence
  Description of Artificial Sequence: Synthetic oligonucleotide
caacuuuggugauuuuguu

SEQ ID NO: 1912044 - RNA, 19 nt, Artificial Sequence
  Description of Artificial Sequence: Synthetic oligonucleotide
ggagggagaccuugaggaa

SEQ ID NO: 1912045 - RNA, 19 nt, Artificial Sequence
  Description of Artificial Sequence: Synthetic oligonucleotide
cauuugaccuuaggucaaa

SEQ ID NO: 1912046 - RNA, 19 nt, Artificial Sequence
  Description of Artificial Sequence: Synthetic oligonucleotide
cccaccaggcacucugaug

SEQ ID NO: 1912047 - RNA, 19 nt, Artificial Sequence
  Description of Artificial Sequence: Synthetic oligonucleotide
gaauggcagaacgcacaua

SEQ ID NO: 1912048 - RNA, 19 nt, Artificial Sequence
  Description of Artificial Sequence: Synthetic oligonucleotide
ggccagaguaccauugucu

SEQ ID NO: 1912049 - RNA, 19 nt, Artificial Sequence
  Description of Artificial Sequence: Synthetic oligonucleotide
gccaggugggcagaaguca

SEQ ID NO: 1912050 - RNA, 19 nt, Artificial Sequence
  Description of Artificial Sequence: Synthetic oligonucleotide
gcuccgcuuucaaugccag

SEQ ID NO: 1912051 - RNA, 19 nt, Artificial Sequence
  Description of Artificial Sequence: Synthetic oligonucleotide
ccucuaugguuacaucaga

SEQ ID NO: 1912052 - RNA, 19 nt, Artificial Sequence
  Description of Artificial Sequence: Synthetic oligonucleotide
gaggaauagcagugauguu

SEQ ID NO: 1912053 - RNA, 19 nt, Artificial Sequence
  Description of Artificial Sequence: Synthetic oligonucleotide
cuggaaggcuccgcuuuca

SEQ ID NO: 1912054 - RNA, 19 nt, Artificial Sequence
  Description of Artificial Sequence: Synthetic oligonucleotide
ggcuggaugcaucaacuuu

SEQ ID NO: 1912055 - RNA, 19 nt, Artificial Sequence
  Description of Artificial Sequence: Synthetic oligonucleotide
ggcuccgcuuucaaugcca

SEQ ID NO: 1912056 - RNA, 19 nt, Artificial Sequence
  Description of Artificial Sequence: Synthetic oligonucleotide
cuccgcuuucaaugccaga

SEQ ID NO: 1912057 - RNA, 19 nt, Artificial Sequence
  Description of Artificial Sequence: Synthetic oligonucleotide
gggagaccuugaggaauag

SEQ ID NO: 1912058 - RNA, 19 nt, Artificial Sequence
  Description of Artificial Sequence: Synthetic oligonucleotide
cuaugacaaucaucugguu

SEQ ID NO: 1912059 - RNA, 19 nt, Artificial Sequence
  Description of Artificial Sequence: Synthetic oligonucleotide
acacgguuuuccgcacuuu

SEQ ID NO: 1912060 - RNA, 19 nt, Artificial Sequence
  Description of Artificial Sequence: Synthetic oligonucleotide
cagaacucuucaguggguu

SEQ ID NO: 1912061 - RNA, 19 nt, Artificial Sequence
  Description of Artificial Sequence: Synthetic oligonucleotide
ugucugcaauucggaugua

SEQ ID NO: 1912062 - RNA, 19 nt, Artificial Sequence
  Description of Artificial Sequence: Synthetic oligonucleotide
cccaguacuggacaggguu

SEQ ID NO: 1912063 - RNA, 19 nt, Artificial Sequence
  Description of Artificial Sequence: Synthetic oligonucleotide
ggaaggcuccgcuuucaau

SEQ ID NO: 1912064 - RNA, 19 nt, Artificial Sequence
  Description of Artificial Sequence: Synthetic oligonucleotide
cacggagcuccugaagggu

SEQ ID NO: 1912065 - RNA, 19 nt, Artificial Sequence
  Description of Artificial Sequence: Synthetic oligonucleotide
ggcacucugaugaguuugu

SEQ ID NO: 1912066 - RNA, 19 nt, Artificial Sequence
  Description of Artificial Sequence: Synthetic oligonucleotide
aggcugucugggaguuacu

SEQ ID NO: 1912067 - RNA, 19 nt, Artificial Sequence
  Description of Artificial Sequence: Synthetic oligonucleotide
gccaaauuagucaguccuu

SEQ ID NO: 1912068 - RNA, 19 nt, Artificial Sequence
  Description of Artificial Sequence: Synthetic oligonucleotide
cgguuuuccgcacuuugcu

SEQ ID NO: 1912069 - RNA, 19 nt, Artificial Sequence
  Description of Artificial Sequence: Synthetic oligonucleotide
gguuggugcccaguucuau

SEQ ID NO: 1912070 - RNA, 19 nt, Artificial Sequence
  Description of Artificial Sequence: Synthetic oligonucleotide
caggcacucugaugaguuu

SEQ ID NO: 1912071 - RNA, 19 nt, Artificial Sequence
  Description of Artificial Sequence: Synthetic oligonucleotide
gguagacaaccuggaugua

SEQ ID NO: 1912072 - RNA, 19 nt, Artificial Sequence
  Description of Artificial Sequence: Synthetic oligonucleotide
ccagaguaccauugucuau

SEQ ID NO: 1912073 - RNA, 19 nt, Artificial Sequence
  Description of Artificial Sequence: Synthetic oligonucleotide
caggugggcagaagucauu

SEQ ID NO: 1912074 - RNA, 19 nt, Artificial Sequence
  Description of Artificial Sequence: Synthetic oligonucleotide
caacugcggagauguuguu

SEQ ID NO: 1912075 - RNA, 19 nt, Artificial Sequence
  Description of Artificial Sequence: Synthetic oligonucleotide
ggguuggugcccaguucua

SEQ ID NO: 1912076 - RNA, 19 nt, Artificial Sequence
  Description of Artificial Sequence: Synthetic oligonucleotide
cggauguaugaaagucucu

SEQ ID NO: 1912077 - RNA, 19 nt, Artificial Sequence
  Description of Artificial Sequence: Synthetic oligonucleotide
caguggguuggugcccagu

SEQ ID NO: 1912078 - RNA, 19 nt, Artificial Sequence
  Description of Artificial Sequence: Synthetic oligonucleotide
acccaacugcggagauguu

SEQ ID NO: 1912079 - RNA, 19 nt, Artificial Sequence
  Description of Artificial Sequence: Synthetic oligonucleotide
  modified_base (1)..(1): a, c, u, g, unknown or other
naaccccaacuuagccaaa

SEQ ID NO: 1912080 - RNA, 19 nt, Artificial Sequence
  Description of Artificial Sequence: Synthetic oligonucleotide
aauagaaacaagcagaucc

SEQ ID NO: 1912081 - RNA, 19 nt, Artificial Sequence
  Description of Artificial Sequence: Synthetic oligonucleotide
acaaagagcagccauaagc

SEQ ID NO: 1912082 - RNA, 19 nt, Artificial Sequence
  Description of Artificial Sequence: Synthetic oligonucleotide
ugugaauagaaacaagcag

SEQ ID NO: 1912083 - RNA, 19 nt, Artificial Sequence
  Description of Artificial Sequence: Synthetic oligonucleotide
uauaaaaggauaccuggcc

SEQ ID NO: 1912084 - RNA, 19 nt, Artificial Sequence
  Description of Artificial Sequence: Synthetic oligonucleotide
uaagcucacauccugcugg

SEQ ID NO: 1912085 - RNA, 19 nt, Artificial Sequence
  Description of Artificial Sequence: Synthetic oligonucleotide
gaugugaauagaaacaagc

SEQ ID NO: 1912086 - RNA, 19 nt, Artificial Sequence
  Description of Artificial Sequence: Synthetic oligonucleotide
aaaacgacaaggaaccagg

SEQ ID NO: 1912087 - RNA, 19 nt, Artificial Sequence
  Description of Artificial Sequence: Synthetic oligonucleotide
uuugaccucaggaugaccc

SEQ ID NO: 1912088 - RNA, 19 nt, Artificial Sequence
  Description of Artificial Sequence: Synthetic oligonucleotide
auaugcacuaccugcaugg

SEQ ID NO: 1912089 - RNA, 19 nt, Artificial Sequence
  Description of Artificial Sequence: Synthetic oligonucleotide
acuguugucacuccguguc

SEQ ID NO: 1912090 - RNA, 19 nt, Artificial Sequence
  Description of Artificial Sequence: Synthetic oligonucleotide
aaguguuggauacggggcg

SEQ ID NO: 1912091 - RNA, 19 nt, Artificial Sequence
  Description of Artificial Sequence: Synthetic oligonucleotide
ucuaggacaccacuaagca

SEQ ID NO: 1912092 - RNA, 19 nt, Artificial Sequence
  Description of Artificial Sequence: Synthetic oligonucleotide
gacaccacuaagcaggaag

SEQ ID NO: 1912093 - RNA, 19 nt, Artificial Sequence
  Description of Artificial Sequence: Synthetic oligonucleotide
acaacuaccucacggcagc

SEQ ID NO: 1912094 - RNA, 19 nt, Artificial Sequence
  Description of Artificial Sequence: Synthetic oligonucleotide
agcuucuugaggcaccucc

SEQ ID NO: 1912095 - RNA, 19 nt, Artificial Sequence
  Description of Artificial Sequence: Synthetic oligonucleotide
ugaauagaaacaagcagau

SEQ ID NO: 1912096 - RNA, 19 nt, Artificial Sequence
  Description of Artificial Sequence: Synthetic oligonucleotide
uaccaagugucccacagcc

SEQ ID NO: 1912097 - RNA, 19 nt, Artificial Sequence
  Description of Artificial Sequence: Synthetic oligonucleotide
cucuagaccggccauaugc

SEQ ID NO: 1912098 - RNA, 19 nt, Artificial Sequence
  Description of Artificial Sequence: Synthetic oligonucleotide
cuauaaaaggauaccuggc

SEQ ID NO: 1912099 - RNA, 19 nt, Artificial Sequence
  Description of Artificial Sequence: Synthetic oligonucleotide
guugcuuugagucaggaaa

SEQ ID NO: 1912100 - RNA, 19 nt, Artificial Sequence
  Description of Artificial Sequence: Synthetic oligonucleotide
uccaagagcgcucucagcu

SEQ ID NO: 1912101 - RNA, 19 nt, Artificial Sequence
  Description of Artificial Sequence: Synthetic oligonucleotide
ugcacuaccugcauggaga

SEQ ID NO: 1912102 - RNA, 19 nt, Artificial Sequence
  Description of Artificial Sequence: Synthetic oligonucleotide
gauacgcuguagcacacgg

SEQ ID NO: 1912103 - RNA, 19 nt, Artificial Sequence
  Description of Artificial Sequence: Synthetic oligonucleotide
acgacaaggaaccaggaga

SEQ ID NO: 1912104 - RNA, 19 nt, Artificial Sequence
  Description of Artificial Sequence: Synthetic oligonucleotide
ugacaucgcgcccagagcc

SEQ ID NO: 1912105 - RNA, 19 nt, Artificial Sequence
  Description of Artificial Sequence: Synthetic oligonucleotide
ugacuuugaccucaggaug

SEQ ID NO: 1912106 - RNA, 19 nt, Artificial Sequence
  Description of Artificial Sequence: Synthetic oligonucleotide
auaaaaggauaccuggccu

SEQ ID NO: 1912107 - RNA, 19 nt, Artificial Sequence
  Description of Artificial Sequence: Synthetic oligonucleotide
aucagggagaagucagucc

SEQ ID NO: 1912108 - RNA, 19 nt, Artificial Sequence
  Description of Artificial Sequence: Synthetic oligonucleotide
agugagccccuauaaaagg

SEQ ID NO: 1912109 - RNA, 19 nt, Artificial Sequence
  Description of Artificial Sequence: Synthetic oligonucleotide
ccuauaaaaggauaccugg

SEQ ID NO: 1912110 - RNA, 19 nt, Artificial Sequence
  Description of Artificial Sequence: Synthetic oligonucleotide
aacgacaaggaaccaggag

SEQ ID NO: 1912111 - RNA, 19 nt, Artificial Sequence
  Description of Artificial Sequence: Synthetic oligonucleotide
cagccauaagcucacaucc

SEQ ID NO: 1912112 - RNA, 19 nt, Artificial Sequence
  Description of Artificial Sequence: Synthetic oligonucleotide
caucccugaauucaugccg

SEQ ID NO: 1912113 - RNA, 19 nt, Artificial Sequence
  Description of Artificial Sequence: Synthetic oligonucleotide
agcgcucucagcucuagac

SEQ ID NO: 1912114 - RNA, 19 nt, Artificial Sequence
  Description of Artificial Sequence: Synthetic oligonucleotide
gugaauagaaacaagcaga

SEQ ID NO: 1912115 - RNA, 19 nt, Artificial Sequence
  Description of Artificial Sequence: Synthetic oligonucleotide
caaguguuggauacggggc

SEQ ID NO: 1912116 - RNA, 19 nt, Artificial Sequence
  Description of Artificial Sequence: Synthetic oligonucleotide
cucuaggacaccacuaagc

SEQ ID NO: 1912117 - RNA, 19 nt, Artificial Sequence
  Description of Artificial Sequence: Synthetic oligonucleotide
ucuaggucauuccaacugu

SEQ ID NO: 1912118 - RNA, 19 nt, Artificial Sequence
  Description of Artificial Sequence: Synthetic oligonucleotide
cucacaacuaccucacggc

SEQ ID NO: 1912119 - RNA, 19 nt, Artificial Sequence
  Description of Artificial Sequence: Synthetic oligonucleotide
uaauguacaccuccuuuac

SEQ ID NO: 1912120 - RNA, 19 nt, Artificial Sequence
  Description of Artificial Sequence: Synthetic oligonucleotide
acuaccucacggcagcgac

SEQ ID NO: 1912121 - RNA, 19 nt, Artificial Sequence
  Description of Artificial Sequence: Synthetic oligonucleotide
uccaacuguugucacuccg

SEQ ID NO: 1912122 - RNA, 19 nt, Artificial Sequence
  Description of Artificial Sequence: Synthetic oligonucleotide
cguaaaacgacaaggaacc

SEQ ID NO: 1912123 - RNA, 19 nt, Artificial Sequence
  Description of Artificial Sequence: Synthetic oligonucleotide
auucuucagaugugaauag

SEQ ID NO: 1912124 - RNA, 19 nt, Artificial Sequence
  Description of Artificial Sequence: Synthetic oligonucleotide
aagucaguccccugcccac

SEQ ID NO: 1912125 - RNA, 19 nt, Artificial Sequence
  Description of Artificial Sequence: Synthetic oligonucleotide
ugagaggcuacagcaaggg

SEQ ID NO: 1912126 - RNA, 19 nt, Artificial Sequence
  Description of Artificial Sequence: Synthetic oligonucleotide
aguagaguccucaggggcc

SEQ ID NO: 1912127 - RNA, 19 nt, Artificial Sequence
  Description of Artificial Sequence: Synthetic oligonucleotide
ggaaaggugacuuugaccu

SEQ ID NO: 1912128 - RNA, 19 nt, Artificial Sequence
  Description of Artificial Sequence: Synthetic oligonucleotide
aacaagcagauccugccau

SEQ ID NO: 1912129 - RNA, 19 nt, Artificial Sequence
  Description of Artificial Sequence: Synthetic oligonucleotide
agcagauccugccauccac

SEQ ID NO: 1912130 - RNA, 19 nt, Artificial Sequence
  Description of Artificial Sequence: Synthetic oligonucleotide
uaaaaggauaccuggccuc

SEQ ID NO: 1912131 - RNA, 19 nt, Artificial Sequence
  Description of Artificial Sequence: Synthetic oligonucleotide
agugcaucugugcccuucc

SEQ ID NO: 1912132 - RNA, 19 nt, Artificial Sequence
  Description of Artificial Sequence: Synthetic oligonucleotide
gauaccuggccucgaacag

SEQ ID NO: 1912133 - RNA, 19 nt, Artificial Sequence
  Description of Artificial Sequence: Synthetic oligonucleotide
cugaauucaugccggauac

SEQ ID NO: 1912134 - RNA, 19 nt, Artificial Sequence
  Description of Artificial Sequence: Synthetic oligonucleotide
gcaaguguuggauacgggg

SEQ ID NO: 1912135 - RNA, 19 nt, Artificial Sequence
  Description of Artificial Sequence: Synthetic oligonucleotide
ggauacggggcguaaaacg

SEQ ID NO: 1912136 - RNA, 19 nt, Artificial Sequence
  Description of Artificial Sequence: Synthetic oligonucleotide
aguggggcaccugacaucg

SEQ ID NO: 1912137 - RNA, 19 nt, Artificial Sequence
  Description of Artificial Sequence: Synthetic oligonucleotide
ucuagaccggccauaugca

SEQ ID NO: 1912138 - RNA, 19 nt, Artificial Sequence
  Description of Artificial Sequence: Synthetic oligonucleotide
cucuaggucauuccaacug

SEQ ID NO: 1912139 - RNA, 19 nt, Artificial Sequence
  Description of Artificial Sequence: Synthetic oligonucleotide
cuaagcaggaagucaugag

SEQ ID NO: 1912140 - RNA, 19 nt, Artificial Sequence
  Description of Artificial Sequence: Synthetic oligonucleotide
uacgcuguagcacacggua

SEQ ID NO: 1912141 - RNA, 19 nt, Artificial Sequence
  Description of Artificial Sequence: Synthetic oligonucleotide
guugugguaauguacaccu

SEQ ID NO: 1912142 - RNA, 19 nt, Artificial Sequence
  Description of Artificial Sequence: Synthetic oligonucleotide
ucacaacuaccucacggca

SEQ ID NO: 1912143 - RNA, 19 nt, Artificial Sequence
  Description of Artificial Sequence: Synthetic oligonucleotide
gucucgguaacuugauggg

SEQ ID NO: 1912144 - RNA, 19 nt, Artificial Sequence
  Description of Artificial Sequence: Synthetic oligonucleotide
augccggauacgcuguagc

SEQ ID NO: 1912145 - RNA, 19 nt, Artificial Sequence
  Description of Artificial Sequence: Synthetic oligonucleotide
uggggcaccugacaucgcg

SEQ ID NO: 1912146 - RNA, 19 nt, Artificial Sequence
  Description of Artificial Sequence: Synthetic oligonucleotide
ucaucccugaauucaugcc

SEQ ID NO: 1912147 - RNA, 19 nt, Artificial Sequence
  Description of Artificial Sequence: Synthetic oligonucleotide
aggaccuagucucgaggcc

SEQ ID NO: 1912148 - RNA, 19 nt, Artificial Sequence
  Description of Artificial Sequence: Synthetic oligonucleotide
aaguggggcaccugacauc

SEQ ID NO: 1912149 - RNA, 19 nt, Artificial Sequence
  Description of Artificial Sequence: Synthetic oligonucleotide
ugacccgaggagcagagaa

SEQ ID NO: 1912150 - RNA, 19 nt, Artificial Sequence
  Description of Artificial Sequence: Synthetic oligonucleotide
uugaccucaggaugacccg

SEQ ID NO: 1912151 - RNA, 19 nt, Artificial Sequence
  Description of Artificial Sequence: Synthetic oligonucleotide
caguagaguccucaggggc

SEQ ID NO: 1912152 - RNA, 19 nt, Artificial Sequence
  Description of Artificial Sequence: Synthetic oligonucleotide
uagggcaugccuagguuca

SEQ ID NO: 1912153 - RNA, 19 nt, Artificial Sequence
  Description of Artificial Sequence: Synthetic oligonucleotide
augugaauagaaacaagca

SEQ ID NO: 1912154 - RNA, 19 nt, Artificial Sequence
  Description of Artificial Sequence: Synthetic oligonucleotide
gguaacuugaugggcaagg

SEQ ID NO: 1912155 - RNA, 19 nt, Artificial Sequence
  Description of Artificial Sequence: Synthetic oligonucleotide
uaccucacggcagcgacgg

SEQ ID NO: 1912156 - RNA, 19 nt, Artificial Sequence
  Description of Artificial Sequence: Synthetic oligonucleotide
uuggauacggggcguaaaa

SEQ ID NO: 1912157 - RNA, 19 nt, Artificial Sequence
  Description of Artificial Sequence: Synthetic oligonucleotide
ugagucaggaaaccaguuu

SEQ ID NO: 1912158 - RNA, 19 nt, Artificial Sequence
  Description of Artificial Sequence: Synthetic oligonucleotide
cauccugcuggaaagccac

SEQ ID NO: 1912159 - RNA, 19 nt, Artificial Sequence
  Description of Artificial Sequence: Synthetic oligonucleotide
aacuguugucacuccgugu

SEQ ID NO: 1912160 - RNA, 19 nt, Artificial Sequence
  Description of Artificial Sequence: Synthetic oligonucleotide
agcaggaagucaugagguc

SEQ ID NO: 1912161 - RNA, 19 nt, Artificial Sequence
  Description of Artificial Sequence: Synthetic oligonucleotide
auagaaacaagcagauccu

SEQ ID NO: 1912162 - RNA, 19 nt, Artificial Sequence
  Description of Artificial Sequence: Synthetic oligonucleotide
gagaagucaguccccugcc

SEQ ID NO: 1912163 - RNA, 19 nt, Artificial Sequence
  Description of Artificial Sequence: Synthetic oligonucleotide
caggaccuagucucgaggc

SEQ ID NO: 1912164 - RNA, 19 nt, Artificial Sequence
  Description of Artificial Sequence: Synthetic oligonucleotide
gauacggggcguaaaacga

SEQ ID NO: 1912165 - RNA, 19 nt, Artificial Sequence
  Description of Artificial Sequence: Synthetic oligonucleotide
cacaacuaccucacggcag

SEQ ID NO: 1912166 - RNA, 19 nt, Artificial Sequence
  Description of Artificial Sequence: Synthetic oligonucleotide
acaagcagauccugccauc

SEQ ID NO: 1912167 - RNA, 19 nt, Artificial Sequence
  Description of Artificial Sequence: Synthetic oligonucleotide
auaagcucacauccugcug

SEQ ID NO: 1912168 - RNA, 19 nt, Artificial Sequence
  Description of Artificial Sequence: Synthetic oligonucleotide
aagucucgguaacuugaug

SEQ ID NO: 1912169 - RNA, 19 nt, Artificial Sequence
  Description of Artificial Sequence: Synthetic oligonucleotide
ucuuccaagagcgcucuca

SEQ ID NO: 1912170 - RNA, 19 nt, Artificial Sequence
  Description of Artificial Sequence: Synthetic oligonucleotide
uagaccggccauaugcacu

SEQ ID NO: 1912171 - RNA, 19 nt, Artificial Sequence
  Description of Artificial Sequence: Synthetic oligonucleotide
gauggcucgcacuucuuca

SEQ ID NO: 1912172 - RNA, 19 nt, Artificial Sequence
  Description of Artificial Sequence: Synthetic oligonucleotide
uccguguccucacaacuac

SEQ ID NO: 1912173 - RNA, 19 nt, Artificial Sequence
  Description of Artificial Sequence: Synthetic oligonucleotide
aggauaccuggccucgaac

SEQ ID NO: 1912174 - RNA, 19 nt, Artificial Sequence
  Description of Artificial Sequence: Synthetic oligonucleotide
auaccuggccucgaacagc

SEQ ID NO: 1912175 - RNA, 19 nt, Artificial Sequence
  Description of Artificial Sequence: Synthetic oligonucleotide
acuaccugcauggagacuu

SEQ ID NO: 1912176 - RNA, 19 nt, Artificial Sequence
  Description of Artificial Sequence: Synthetic oligonucleotide
ggggcguaaaacgacaagg

SEQ ID NO: 1912177 - RNA, 19 nt, Artificial Sequence
  Description of Artificial Sequence: Synthetic oligonucleotide
caaagagcagccauaagcu

SEQ ID NO: 1912178 - RNA, 19 nt, Artificial Sequence
  Description of Artificial Sequence: Synthetic oligonucleotide
ugagccccuauaaaaggau

SEQ ID NO: 1912179 - RNA, 19 nt, Artificial Sequence
  Description of Artificial Sequence: Synthetic oligonucleotide
aucugugcccuuccucugg

SEQ ID NO: 1912180 - RNA, 19 nt, Artificial Sequence
  Description of Artificial Sequence: Synthetic oligonucleotide
uagucucgaggccacacuc

SEQ ID NO: 1912181 - RNA, 19 nt, Artificial Sequence
  Description of Artificial Sequence: Synthetic oligonucleotide
uacggggcguaaaacgaca

SEQ ID NO: 1912182 - RNA, 19 nt, Artificial Sequence
  Description of Artificial Sequence: Synthetic oligonucleotide
ugaauucaugccggauacg

SEQ ID NO: 1912183 - RNA, 19 nt, Artificial Sequence
  Description of Artificial Sequence: Synthetic oligonucleotide
agggccuguaccaaguguc

SEQ ID NO: 1912184 - RNA, 19 nt, Artificial Sequence
  Description of Artificial Sequence: Synthetic oligonucleotide
acuaagcaggaagucauga

SEQ ID NO: 1912185 - RNA, 19 nt, Artificial Sequence
  Description of Artificial Sequence: Synthetic oligonucleotide
aggcaaguguuggauacgg

SEQ ID NO: 1912186 - RNA, 19 nt, Artificial Sequence
  Description of Artificial Sequence: Synthetic oligonucleotide
agaugugaauagaaacaag

SEQ ID NO: 1912187 - RNA, 19 nt, Artificial Sequence
  Description of Artificial Sequence: Synthetic oligonucleotide
agaaguggggcaccugaca

SEQ ID NO: 1912188 - RNA, 19 nt, Artificial Sequence
  Description of Artificial Sequence: Synthetic oligonucleotide
cucgaggccacacucagca

SEQ ID NO: 1912189 - RNA, 19 nt, Artificial Sequence
  Description of Artificial Sequence: Synthetic oligonucleotide
ucucuaggucauuccaacu

SEQ ID NO: 1912190 - RNA, 19 nt, Artificial Sequence
  Description of Artificial Sequence: Synthetic oligonucleotide
agagcagccauaagcucac

SEQ ID NO: 1912191 - RNA, 19 nt, Artificial Sequence
  Description of Artificial Sequence: Synthetic oligonucleotide
aauucaugccggauacgcu

SEQ ID NO: 1912192 - RNA, 19 nt, Artificial Sequence
  Description of Artificial Sequence: Synthetic oligonucleotide
gacuuugaccucaggauga

SEQ ID NO: 1912193 - RNA, 19 nt, Artificial Sequence
  Description of Artificial Sequence: Synthetic oligonucleotide
agcucuaggacaccacuaa

SEQ ID NO: 1912194 - RNA, 19 nt, Artificial Sequence
  Description of Artificial Sequence: Synthetic oligonucleotide
augcacuaccugcauggag

SEQ ID NO: 1912195 - RNA, 19 nt, Artificial Sequence
  Description of Artificial Sequence: Synthetic oligonucleotide
aucccugaauucaugccgg

SEQ ID NO: 1912196 - RNA, 19 nt, Artificial Sequence
  Description of Artificial Sequence: Synthetic oligonucleotide
agucaugaggucccaggga

SEQ ID NO: 1912197 - RNA, 19 nt, Artificial Sequence
  Description of Artificial Sequence: Synthetic oligonucleotide
gcaaggggcucacugaugc

SEQ ID NO: 1912198 - RNA, 19 nt, Artificial Sequence
  Description of Artificial Sequence: Synthetic oligonucleotide
guagggcaugccuagguuc

SEQ ID NO: 1912199 - RNA, 19 nt, Artificial Sequence
  Description of Artificial Sequence: Synthetic oligonucleotide
ccucacaacuaccucacgg

SEQ ID NO: 1912200 - RNA, 19 nt, Artificial Sequence
  Description of Artificial Sequence: Synthetic oligonucleotide
agcagguugcuuugaguca

SEQ ID NO: 1912201 - RNA, 19 nt, Artificial Sequence
  Description of Artificial Sequence: Synthetic oligonucleotide
cuucagaugugaauagaaa

SEQ ID NO: 1912202 - RNA, 19 nt, Artificial Sequence
  Description of Artificial Sequence: Synthetic oligonucleotide
caagcagauccugccaucc

SEQ ID NO: 1912203 - RNA, 19 nt, Artificial Sequence
  Description of Artificial Sequence: Synthetic oligonucleotide
uugaggcaccuccauggga

SEQ ID NO: 1912204 - RNA, 19 nt, Artificial Sequence
  Description of Artificial Sequence: Synthetic oligonucleotide
ugggucucuaggucauucc

SEQ ID NO: 1912205 - RNA, 19 nt, Artificial Sequence
  Description of Artificial Sequence: Synthetic oligonucleotide
gcguaaaacgacaaggaac

SEQ ID NO: 1912206 - RNA, 19 nt, Artificial Sequence
  Description of Artificial Sequence: Synthetic oligonucleotide
aaggauaccuggccucgaa

SEQ ID NO: 1912207 - RNA, 19 nt, Artificial Sequence
  Description of Artificial Sequence: Synthetic oligonucleotide
ucgaacagccugagcuucc

SEQ ID NO: 1912208 - RNA, 19 nt, Artificial Sequence
  Description of Artificial Sequence: Synthetic oligonucleotide
ccugcauggagacuugccg

SEQ ID NO: 1912209 - RNA, 19 nt, Artificial Sequence
  Description of Artificial Sequence: Synthetic oligonucleotide
ucccgguccaagguugugg

SEQ ID NO: 1912210 - RNA, 19 nt, Artificial Sequence
  Description of Artificial Sequence: Synthetic oligonucleotide
acuuugaccucaggaugac

SEQ ID NO: 1912211 - RNA, 19 nt, Artificial Sequence
  Description of Artificial Sequence: Synthetic oligonucleotide
gucucgaggccacacucag

SEQ ID NO: 1912212 - RNA, 19 nt, Artificial Sequence
  Description of Artificial Sequence: Synthetic oligonucleotide
gaugacccgaggagcagag

SEQ ID NO: 1912213 - RNA, 19 nt, Artificial Sequence
  Description of Artificial Sequence: Synthetic oligonucleotide
cacgguagggcaugccuag

SEQ ID NO: 1912214 - RNA, 19 nt, Artificial Sequence
  Description of Artificial Sequence: Synthetic oligonucleotide
ugccggauacgcuguagca

SEQ ID NO: 1912215 - RNA, 19 nt, Artificial Sequence
  Description of Artificial Sequence: Synthetic oligonucleotide
ggcaugccuagguucaggg

SEQ ID NO: 1912216 - RNA, 19 nt, Artificial Sequence
  Description of Artificial Sequence: Synthetic oligonucleotide
auacggggcguaaaacgac

SEQ ID NO: 1912217 - RNA, 19 nt, Artificial Sequence
  Description of Artificial Sequence: Synthetic oligonucleotide
uguggccccagagggaaag

SEQ ID NO: 1912218 - RNA, 19 nt, Artificial Sequence
  Description of Artificial Sequence: Synthetic oligonucleotide
caacuguugucacuccgug

SEQ ID NO: 1912219 - RNA, 19 nt, Artificial Sequence
  Description of Artificial Sequence: Synthetic oligonucleotide
ucauuccaacuguugucac

SEQ ID NO: 1912220 - RNA, 19 nt, Artificial Sequence
  Description of Artificial Sequence: Synthetic oligonucleotide
aagcagauccugccaucca

SEQ ID NO: 1912221 - RNA, 19 nt, Artificial Sequence
  Description of Artificial Sequence: Synthetic oligonucleotide
ugggaagugagccccuaua

SEQ ID NO: 1912222 - RNA, 19 nt, Artificial Sequence
  Description of Artificial Sequence: Synthetic oligonucleotide
ggaaccaggagaagugggg

SEQ ID NO: 1912223 - RNA, 19 nt, Artificial Sequence
  Description of Artificial Sequence: Synthetic oligonucleotide
gaauagaaacaagcagauc

SEQ ID NO: 1912224 - RNA, 19 nt, Artificial Sequence
  Description of Artificial Sequence: Synthetic oligonucleotide
uccucacaacuaccucacg

SEQ ID NO: 1912225 - RNA, 19 nt, Artificial Sequence
  Description of Artificial Sequence: Synthetic oligonucleotide
cuagaccggccauaugcac

SEQ ID NO: 1912226 - RNA, 19 nt, Artificial Sequence
  Description of Artificial Sequence: Synthetic oligonucleotide
accugcauggagacuugcc

SEQ ID NO: 1912227 - RNA, 19 nt, Artificial Sequence
  Description of Artificial Sequence: Synthetic oligonucleotide
gcagcgacggacucguggg

SEQ ID NO: 1912228 - RNA, 19 nt, Artificial Sequence
  Description of Artificial Sequence: Synthetic oligonucleotide
uccugauacuuguggcggc

SEQ ID NO: 1912229 - RNA, 19 nt, Artificial Sequence
  Description of Artificial Sequence: Synthetic oligonucleotide
caugaggucccagggagac

SEQ ID NO: 1912230 - RNA, 19 nt, Artificial Sequence
  Description of Artificial Sequence: Synthetic oligonucleotide
cauggagacuugccggggc

SEQ ID NO: 1912231 - RNA, 19 nt, Artificial Sequence
  Description of Artificial Sequence: Synthetic oligonucleotide
cccuauaaaaggauaccug

SEQ ID NO: 1912232 - RNA, 19 nt, Artificial Sequence
  Description of Artificial Sequence: Synthetic oligonucleotide
ugauacuuguggcggccaa

SEQ ID NO: 1912233 - RNA, 19 nt, Artificial Sequence
  Description of Artificial Sequence: Synthetic oligonucleotide
cagaugugaauagaaacaa

SEQ ID NO: 1912234 - RNA, 19 nt, Artificial Sequence
  Description of Artificial Sequence: Synthetic oligonucleotide
cuccaugggaagugagccc

SEQ ID NO: 1912235 - RNA, 19 nt, Artificial Sequence
  Description of Artificial Sequence: Synthetic oligonucleotide
cggccaagcuccaagaugg

SEQ ID NO: 1912236 - RNA, 19 nt, Artificial Sequence
  Description of Artificial Sequence: Synthetic oligonucleotide
ucagcucuagaccggccau

SEQ ID NO: 1912237 - RNA, 19 nt, Artificial Sequence
  Description of Artificial Sequence: Synthetic oligonucleotide
cuagguucagggccacggc

SEQ ID NO: 1912238 - RNA, 19 nt, Artificial Sequence
  Description of Artificial Sequence: Synthetic oligonucleotide
cuaccucacggcagcgacg

SEQ ID NO: 1912239 - RNA, 19 nt, Artificial Sequence
  Description of Artificial Sequence: Synthetic oligonucleotide
guaccaagugucccacagc

SEQ ID NO: 1912240 - RNA, 19 nt, Artificial Sequence
  Description of Artificial Sequence: Synthetic oligonucleotide
aaacgacaaggaaccagga

SEQ ID NO: 1912241 - RNA, 19 nt, Artificial Sequence
  Description of Artificial Sequence: Synthetic oligonucleotide
ucgguaacuugaugggcaa

SEQ ID NO: 1912242 - RNA, 19 nt, Artificial Sequence
  Description of Artificial Sequence: Synthetic oligonucleotide
ggauaccuggccucgaaca

SEQ ID NO: 1912243 - RNA, 19 nt, Artificial Sequence
  Description of Artificial Sequence: Synthetic oligonucleotide
cugacaucgcgcccagagc

SEQ ID NO: 1912244 - RNA, 19 nt, Artificial Sequence
  Description of Artificial Sequence: Synthetic oligonucleotide
cucuucuguggccccagag

SEQ ID NO: 1912245 - RNA, 19 nt, Artificial Sequence
  Description of Artificial Sequence: Synthetic oligonucleotide
cucgcacuucuucagccac

SEQ ID NO: 1912246 - RNA, 19 nt, Artificial Sequence
  Description of Artificial Sequence: Synthetic oligonucleotide
gccauaagcucacauccug

SEQ ID NO: 1912247 - RNA, 19 nt, Artificial Sequence
  Description of Artificial Sequence: Synthetic oligonucleotide
auccaggucaucccugaau

SEQ ID NO: 1912248 - RNA, 19 nt, Artificial Sequence
  Description of Artificial Sequence: Synthetic oligonucleotide
uuaggccugggcagacucu

SEQ ID NO: 1912249 - RNA, 19 nt, Artificial Sequence
  Description of Artificial Sequence: Synthetic oligonucleotide
agcauguggcggaucugcc

SEQ ID NO: 1912250 - RNA, 19 nt, Artificial Sequence
  Description of Artificial Sequence: Synthetic oligonucleotide
accaagugucccacagccc

SEQ ID NO: 1912251 - RNA, 19 nt, Artificial Sequence
  Description of Artificial Sequence: Synthetic oligonucleotide
uggauacggggcguaaaac

SEQ ID NO: 1912252 - RNA, 19 nt, Artificial Sequence
  Description of Artificial Sequence: Synthetic oligonucleotide
ccaagcuccaagauggcuc

SEQ ID NO: 1912253 - RNA, 19 nt, Artificial Sequence
  Description of Artificial Sequence: Synthetic oligonucleotide
uggcucgcacuucuucagc

SEQ ID NO: 1912254 - RNA, 19 nt, Artificial Sequence
  Description of Artificial Sequence: Synthetic oligonucleotide
cagauccugccauccacac

SEQ ID NO: 1912255 - RNA, 19 nt, Artificial Sequence
  Description of Artificial Sequence: Synthetic oligonucleotide
cuguugucacuccgugucc

SEQ ID NO: 1912256 - RNA, 19 nt, Artificial Sequence
  Description of Artificial Sequence: Synthetic oligonucleotide
ccggaugcuguccugauac

SEQ ID NO: 1912257 - RNA, 19 nt, Artificial Sequence
  Description of Artificial Sequence: Synthetic oligonucleotide
ccugacaucgcgcccagag

SEQ ID NO: 1912258 - RNA, 19 nt, Artificial Sequence
  Description of Artificial Sequence: Synthetic oligonucleotide
ggaaagccaccccaugggc

SEQ ID NO: 1912259 - RNA, 19 nt, Artificial Sequence
  Description of Artificial Sequence: Synthetic oligonucleotide
ugucacuccguguccucac

SEQ ID NO: 1912260 - RNA, 19 nt, Artificial Sequence
  Description of Artificial Sequence: Synthetic oligonucleotide
accucaggaugacccgagg

SEQ ID NO: 1912261 - RNA, 19 nt, Artificial Sequence
  Description of Artificial Sequence: Synthetic oligonucleotide
ucucgaggccacacucagc

SEQ ID NO: 1912262 - RNA, 19 nt, Artificial Sequence
  Description of Artificial Sequence: Synthetic oligonucleotide
gucaggaaaccaguuucug

SEQ ID NO: 1912263 - RNA, 19 nt, Artificial Sequence
  Description of Artificial Sequence: Synthetic oligonucleotide
uacuuguggcggccaagcu

SEQ ID NO: 1912264 - RNA, 19 nt, Artificial Sequence
  Description of Artificial Sequence: Synthetic oligonucleotide
cacuaagcaggaagucaug

SEQ ID NO: 1912265 - RNA, 19 nt, Artificial Sequence
  Description of Artificial Sequence: Synthetic oligonucleotide
ucucagcucuagaccggcc

SEQ ID NO: 1912266 - RNA, 19 nt, Artificial Sequence
  Description of Artificial Sequence: Synthetic oligonucleotide
agcagccauaagcucacau

SEQ ID NO: 1912267 - RNA, 19 nt, Artificial Sequence
  Description of Artificial Sequence: Synthetic oligonucleotide
agaccggccauaugcacua

SEQ ID NO: 1912268 - RNA, 19 nt, Artificial Sequence
  Description of Artificial Sequence: Synthetic oligonucleotide
ucacuccguguccucacaa

SEQ ID NO: 1912269 - RNA, 19 nt, Artificial Sequence
  Description of Artificial Sequence: Synthetic oligonucleotide
ccauaagcucacauccugc

SEQ ID NO: 1912270 - RNA, 19 nt, Artificial Sequence
  Description of Artificial Sequence: Synthetic oligonucleotide
ugcaucacccagguucaga

SEQ ID NO: 1912271 - RNA, 19 nt, Artificial Sequence
  Description of Artificial Sequence: Synthetic oligonucleotide
ugaccucaggaugacccga

SEQ ID NO: 1912272 - RNA, 19 nt, Artificial Sequence
  Description of Artificial Sequence: Synthetic oligonucleotide
acagucuggacggucucug

SEQ ID NO: 1912273 - RNA, 19 nt, Artificial Sequence
  Description of Artificial Sequence: Synthetic oligonucleotide
gaaguggggcaccugacau

SEQ ID NO: 1912274 - RNA, 19 nt, Artificial Sequence
  Description of Artificial Sequence: Synthetic oligonucleotide
uaugcacuaccugcaugga

SEQ ID NO: 1912275 - RNA, 19 nt, Artificial Sequence
  Description of Artificial Sequence: Synthetic oligonucleotide
agauccugccauccacaca

SEQ ID NO: 1912276 - RNA, 19 nt, Artificial Sequence
  Description of Artificial Sequence: Synthetic oligonucleotide
aaaggauaccuggccucga

SEQ ID NO: 1912277 - RNA, 19 nt, Artificial Sequence
  Description of Artificial Sequence: Synthetic oligonucleotide
aagcuccaagauggcucgc

SEQ ID NO: 1912278 - RNA, 19 nt, Artificial Sequence
  Description of Artificial Sequence: Synthetic oligonucleotide
aacuaccucacggcagcga

SEQ ID NO: 1912279 - RNA, 19 nt, Artificial Sequence
  Description of Artificial Sequence: Synthetic oligonucleotide
uugucacuccguguccuca

SEQ ID NO: 1912280 - RNA, 19 nt, Artificial Sequence
  Description of Artificial Sequence: Synthetic oligonucleotide
cgcucucagcucuagaccg

SEQ ID NO: 1912281 - RNA, 19 nt, Artificial Sequence
  Description of Artificial Sequence: Synthetic oligonucleotide
cauaagcucacauccugcu

SEQ ID NO: 1912282 - RNA, 19 nt, Artificial Sequence
  Description of Artificial Sequence: Synthetic oligonucleotide
gcagguugcuuugagucag

SEQ ID NO: 1912283 - RNA, 19 nt, Artificial Sequence
  Description of Artificial Sequence: Synthetic oligonucleotide
caggugggucucuagguca

SEQ ID NO: 1912284 - RNA, 19 nt, Artificial Sequence
  Description of Artificial Sequence: Synthetic oligonucleotide
cuguagcacacgguagggc

SEQ ID NO: 1912285 - RNA, 19 nt, Artificial Sequence
  Description of Artificial Sequence: Synthetic oligonucleotide
cucagcucuagaccggcca

SEQ ID NO: 1912286 - RNA, 19 nt, Artificial Sequence
  Description of Artificial Sequence: Synthetic oligonucleotide
gaagccgaggugccaggca

SEQ ID NO: 1912287 - RNA, 19 nt, Artificial Sequence
  Description of Artificial Sequence: Synthetic oligonucleotide
cacuccguguccucacaac

SEQ ID NO: 1912288 - RNA, 19 nt, Artificial Sequence
  Description of Artificial Sequence: Synthetic oligonucleotide
ccuagguucagggccacgg

SEQ ID NO: 1912289 - RNA, 19 nt, Artificial Sequence
  Description of Artificial Sequence: Synthetic oligonucleotide
cucgaacagccugagcuuc

SEQ ID NO: 1912290 - RNA, 19 nt, Artificial Sequence
  Description of Artificial Sequence: Synthetic oligonucleotide
caucugugcccuuccucug

SEQ ID NO: 1912291 - RNA, 19 nt, Artificial Sequence
  Description of Artificial Sequence: Synthetic oligonucleotide
ggcucgcacuucuucagcc

SEQ ID NO: 1912292 - RNA, 19 nt, Artificial Sequence
  Description of Artificial Sequence: Synthetic oligonucleotide
agcccaggagaagagcaug

SEQ ID NO: 1912293 - RNA, 19 nt, Artificial Sequence
  Description of Artificial Sequence: Synthetic oligonucleotide
uggcggaucugcccaucca

SEQ ID NO: 1912294 - RNA, 19 nt, Artificial Sequence
  Description of Artificial Sequence: Synthetic oligonucleotide
caaggggcucacugaugcc

SEQ ID NO: 1912295 - RNA, 19 nt, Artificial Sequence
  Description of Artificial Sequence: Synthetic oligonucleotide
cucucagcucuagaccggc

SEQ ID NO: 1912296 - RNA, 19 nt, Artificial Sequence
  Description of Artificial Sequence: Synthetic oligonucleotide
gaggcaucagggagaaguc

SEQ ID NO: 1912297 - RNA, 19 nt, Artificial Sequence
  Description of Artificial Sequence: Synthetic oligonucleotide
gugagccccuauaaaagga

SEQ ID NO: 1912298 - RNA, 19 nt, Artificial Sequence
  Description of Artificial Sequence: Synthetic oligonucleotide
ugugcgccggaugcugucc

SEQ ID NO: 1912299 - RNA, 19 nt, Artificial Sequence
  Description of Artificial Sequence: Synthetic oligonucleotide
uggggucugugaagccgag

SEQ ID NO: 1912300 - RNA, 19 nt, Artificial Sequence
  Description of Artificial Sequence: Synthetic oligonucleotide
agguucagggccacggcug

SEQ ID NO: 1912301 - RNA, 19 nt, Artificial Sequence
  Description of Artificial Sequence: Synthetic oligonucleotide
gcucuaggacaccacuaag

SEQ ID NO: 1912302 - RNA, 19 nt, Artificial Sequence
  Description of Artificial Sequence: Synthetic oligonucleotide
aguguuggauacggggcgu

SEQ ID NO: 1912303 - RNA, 19 nt, Artificial Sequence
  Description of Artificial Sequence: Synthetic oligonucleotide
ggcguaaaacgacaaggaa

SEQ ID NO: 1912304 - RNA, 19 nt, Artificial Sequence
  Description of Artificial Sequence: Synthetic oligonucleotide
ucccugaauucaugccgga

SEQ ID NO: 1912305 - RNA, 19 nt, Artificial Sequence
  Description of Artificial Sequence: Synthetic oligonucleotide
uggcggccaagcuccaaga

SEQ ID NO: 1912306 - RNA, 19 nt, Artificial Sequence
  Description of Artificial Sequence: Synthetic oligonucleotide
ugcccacuucccuggggcc

SEQ ID NO: 1912307 - RNA, 19 nt, Artificial Sequence
  Description of Artificial Sequence: Synthetic oligonucleotide
ugggcaagguggccaucca

SEQ ID NO: 1912308 - RNA, 19 nt, Artificial Sequence
  Description of Artificial Sequence: Synthetic oligonucleotide
ggaagugagccccuauaaa

SEQ ID NO: 1912309 - RNA, 19 nt, Artificial Sequence
  Description of Artificial Sequence: Synthetic oligonucleotide
acaucgcgcccagagccuc

SEQ ID NO: 1912310 - RNA, 19 nt, Artificial Sequence
  Description of Artificial Sequence: Synthetic oligonucleotide
cugggcagacucugggguc

SEQ ID NO: 1912311 - RNA, 19 nt, Artificial Sequence
  Description of Artificial Sequence: Synthetic oligonucleotide
gcuguagcacacgguaggg

SEQ ID NO: 1912312 - RNA, 19 nt, Artificial Sequence
  Description of Artificial Sequence: Synthetic oligonucleotide
uguuggauacggggcguaa

SEQ ID NO: 1912313 - RNA, 19 nt, Artificial Sequence
  Description of Artificial Sequence: Synthetic oligonucleotide
agacuugccggggcucuuc

SEQ ID NO: 1912314 - RNA, 19 nt, Artificial Sequence
  Description of Artificial Sequence: Synthetic oligonucleotide
guguccucacaacuaccuc

SEQ ID NO: 1912315 - RNA, 19 nt, Artificial Sequence
  Description of Artificial Sequence: Synthetic oligonucleotide
gaaagccaccccaugggcu

SEQ ID NO: 1912316 - RNA, 19 nt, Artificial Sequence
  Description of Artificial Sequence: Synthetic oligonucleotide
aggcaucagggagaaguca

SEQ ID NO: 1912317 - RNA, 19 nt, Artificial Sequence
  Description of Artificial Sequence: Synthetic oligonucleotide
caugccggauacgcuguag

SEQ ID NO: 1912318 - RNA, 19 nt, Artificial Sequence
  Description of Artificial Sequence: Synthetic oligonucleotide
gggaagugagccccuauaa

SEQ ID NO: 1912319 - RNA, 19 nt, Artificial Sequence
  Description of Artificial Sequence: Synthetic oligonucleotide
ccacagugcaucugugccc

SEQ ID NO: 1912320 - RNA, 19 nt, Artificial Sequence
  Description of Artificial Sequence: Synthetic oligonucleotide
gcauguggcggaucugccc

SEQ ID NO: 1912321 - RNA, 19 nt, Artificial Sequence
  Description of Artificial Sequence: Synthetic oligonucleotide
guaaaacgacaaggaacca

SEQ ID NO: 1912322 - RNA, 19 nt, Artificial Sequence
  Description of Artificial Sequence: Synthetic oligonucleotide
gcggccaagcuccaagaug

SEQ ID NO: 1912323 - RNA, 19 nt, Artificial Sequence
  Description of Artificial Sequence: Synthetic oligonucleotide
uaccugcauggagacuugc

SEQ ID NO: 1912324 - RNA, 19 nt, Artificial Sequence
  Description of Artificial Sequence: Synthetic oligonucleotide
cugugcccuuccucuggcg

SEQ ID NO: 1912325 - RNA, 19 nt, Artificial Sequence
  Description of Artificial Sequence: Synthetic oligonucleotide
agccauaagcucacauccu

SEQ ID NO: 1912326 - RNA, 19 nt, Artificial Sequence
  Description of Artificial Sequence: Synthetic oligonucleotide
acgcuguagcacacgguag

SEQ ID NO: 1912327 - RNA, 19 nt, Artificial Sequence
  Description of Artificial Sequence: Synthetic oligonucleotide
agcucuagaccggccauau

SEQ ID NO: 1912328 - RNA, 19 nt, Artificial Sequence
  Description of Artificial Sequence: Synthetic oligonucleotide
gcgcucucagcucuagacc

SEQ ID NO: 1912329 - RNA, 19 nt, Artificial Sequence
  Description of Artificial Sequence: Synthetic oligonucleotide
agcuucccgguccaagguu

SEQ ID NO: 1912330 - RNA, 19 nt, Artificial Sequence
  Description of Artificial Sequence: Synthetic oligonucleotide
augggaagugagccccuau

SEQ ID NO: 1912331 - RNA, 19 nt, Artificial Sequence
  Description of Artificial Sequence: Synthetic oligonucleotide
agguggccauccacagugc

SEQ ID NO: 1912332 - RNA, 19 nt, Artificial Sequence
  Description of Artificial Sequence: Synthetic oligonucleotide
agucucgaggccacacuca

SEQ ID NO: 1912333 - RNA, 19 nt, Artificial Sequence
  Description of Artificial Sequence: Synthetic oligonucleotide
gccccuauaaaaggauacc

SEQ ID NO: 1912334 - RNA, 19 nt, Artificial Sequence
  Description of Artificial Sequence: Synthetic oligonucleotide
caacuaccucacggcagcg

SEQ ID NO: 1912335 - RNA, 19 nt, Artificial Sequence
  Description of Artificial Sequence: Synthetic oligonucleotide
agucaggaccuagucucga

SEQ ID NO: 1912336 - RNA, 19 nt, Artificial Sequence
  Description of Artificial Sequence: Synthetic oligonucleotide
caccacuaagcaggaaguc

SEQ ID NO: 1912337 - RNA, 19 nt, Artificial Sequence
  Description of Artificial Sequence: Synthetic oligonucleotide
gggcguaaaacgacaagga

SEQ ID NO: 1912338 - RNA, 19 nt, Artificial Sequence
  Description of Artificial Sequence: Synthetic oligonucleotide
agagcgcucucagcucuag

SEQ ID NO: 1912339 - RNA, 19 nt, Artificial Sequence
  Description of Artificial Sequence: Synthetic oligonucleotide
caccuccuuuacauucuuc

SEQ ID NO: 1912340 - RNA, 19 nt, Artificial Sequence
  Description of Artificial Sequence: Synthetic oligonucleotide
cauuccaacuguugucacu

SEQ ID NO: 1912341 - RNA, 19 nt, Artificial Sequence
  Description of Artificial Sequence: Synthetic oligonucleotide
gggcaccugacaucgcgcc

SEQ ID NO: 1912342 - RNA, 19 nt, Artificial Sequence
  Description of Artificial Sequence: Synthetic oligonucleotide
gcaucugugcccuuccucu

SEQ ID NO: 1912343 - RNA, 19 nt, Artificial Sequence
  Description of Artificial Sequence: Synthetic oligonucleotide
ggacaaagagcagccauaa

SEQ ID NO: 1912344 - RNA, 19 nt, Artificial Sequence
  Description of Artificial Sequence: Synthetic oligonucleotide
cagcgacggacucgugggg

SEQ ID NO: 1912345 - RNA, 19 nt, Artificial Sequence
  Description of Artificial Sequence: Synthetic oligonucleotide
gaccuagucucgaggccac

SEQ ID NO: 1912346 - RNA, 19 nt, Artificial Sequence
  Description of Artificial Sequence: Synthetic oligonucleotide
ggaccuagucucgaggcca

SEQ ID NO: 1912347 - RNA, 19 nt, Artificial Sequence
  Description of Artificial Sequence: Synthetic oligonucleotide
agguugcuuugagucagga

SEQ ID NO: 1912348 - RNA, 19 nt, Artificial Sequence
  Description of Artificial Sequence: Synthetic oligonucleotide
ggcaaguguuggauacggg

SEQ ID NO: 1912349 - RNA, 19 nt, Artificial Sequence
  Description of Artificial Sequence: Synthetic oligonucleotide
ucaugccggauacgcugua

SEQ ID NO: 1912350 - RNA, 19 nt, Artificial Sequence
  Description of Artificial Sequence: Synthetic oligonucleotide
ccggauacgcuguagcaca

SEQ ID NO: 1912351 - RNA, 19 nt, Artificial Sequence
  Description of Artificial Sequence: Synthetic oligonucleotide
gcacuaccugcauggagac

SEQ ID NO: 1912352 - RNA, 19 nt, Artificial Sequence
  Description of Artificial Sequence: Synthetic oligonucleotide
cgaagucucgguaacuuga

SEQ ID NO: 1912353 - RNA, 19 nt, Artificial Sequence
  Description of Artificial Sequence: Synthetic oligonucleotide
guaacuugaugggcaaggu

SEQ ID NO: 1912354 - RNA, 19 nt, Artificial Sequence
  Description of Artificial Sequence: Synthetic oligonucleotide
ccugaauucaugccggaua

SEQ ID NO: 1912355 - RNA, 19 nt, Artificial Sequence
  Description of Artificial Sequence: Synthetic oligonucleotide
auacgcuguagcacacggu

SEQ ID NO: 1912356 - RNA, 19 nt, Artificial Sequence
  Description of Artificial Sequence: Synthetic oligonucleotide
agcaaggggcucacugaug

SEQ ID NO: 1912357 - RNA, 19 nt, Artificial Sequence
  Description of Artificial Sequence: Synthetic oligonucleotide
gcuuugagucaggaaacca

SEQ ID NO: 1912358 - RNA, 19 nt, Artificial Sequence
  Description of Artificial Sequence: Synthetic oligonucleotide
cacacgguagggcaugccu

SEQ ID NO: 1912359 - RNA, 19 nt, Artificial Sequence
  Description of Artificial Sequence: Synthetic oligonucleotide
ccgaagucucgguaacuug

SEQ ID NO: 1912360 - RNA, 19 nt, Artificial Sequence
  Description of Artificial Sequence: Synthetic oligonucleotide
ccugauacuuguggcggcc

SEQ ID NO: 1912361 - RNA, 19 nt, Artificial Sequence
  Description of Artificial Sequence: Synthetic oligonucleotide
guuggauacggggcguaaa

SEQ ID NO: 1912362 - RNA, 19 nt, Artificial Sequence
  Description of Artificial Sequence: Synthetic oligonucleotide
cagugcaucugugcccuuc

SEQ ID NO: 1912363 - RNA, 19 nt, Artificial Sequence
  Description of Artificial Sequence: Synthetic oligonucleotide
gaagucucgguaacuugau

SEQ ID NO: 1912364 - RNA, 19 nt, Artificial Sequence
  Description of Artificial Sequence: Synthetic oligonucleotide
cagcucuaggacaccacua

SEQ ID NO: 1912365 - RNA, 19 nt, Artificial Sequence
  Description of Artificial Sequence: Synthetic oligonucleotide
acacgguagggcaugccua

SEQ ID NO: 1912366 - RNA, 19 nt, Artificial Sequence
  Description of Artificial Sequence: Synthetic oligonucleotide
caccccaugggcugcagcu

SEQ ID NO: 1912367 - RNA, 19 nt, Artificial Sequence
  Description of Artificial Sequence: Synthetic oligonucleotide
ggucaucccugaauucaug

SEQ ID NO: 1912368 - RNA, 19 nt, Artificial Sequence
  Description of Artificial Sequence: Synthetic oligonucleotide
gcauggagacuugccgggg

SEQ ID NO: 1912369 - RNA, 19 nt, Artificial Sequence
  Description of Artificial Sequence: Synthetic oligonucleotide
ggcaccugacaucgcgccc

SEQ ID NO: 1912370 - RNA, 19 nt, Artificial Sequence
  Description of Artificial Sequence: Synthetic oligonucleotide
cugugcgccggaugcuguc

SEQ ID NO: 1912371 - RNA, 19 nt, Artificial Sequence
  Description of Artificial Sequence: Synthetic oligonucleotide
uucccgguccaagguugug

SEQ ID NO: 1912372 - RNA, 19 nt, Artificial Sequence
  Description of Artificial Sequence: Synthetic oligonucleotide
ugcucccucuggcggcaac

SEQ ID NO: 1912373 - RNA, 19 nt, Artificial Sequence
  Description of Artificial Sequence: Synthetic oligonucleotide
cagggccacggcuggccag

SEQ ID NO: 1912374 - RNA, 19 nt, Artificial Sequence
  Description of Artificial Sequence: Synthetic oligonucleotide
gccggauacgcuguagcac

SEQ ID NO: 1912375 - RNA, 19 nt, Artificial Sequence
  Description of Artificial Sequence: Synthetic oligonucleotide
gcucucagcucuagaccgg

SEQ ID NO: 1912376 - RNA, 19 nt, Artificial Sequence
  Description of Artificial Sequence: Synthetic oligonucleotide
agggcaugccuagguucag

SEQ ID NO: 1912377 - RNA, 19 nt, Artificial Sequence
  Description of Artificial Sequence: Synthetic oligonucleotide
ggacggucucugugagagg

SEQ ID NO: 1912378 - RNA, 19 nt, Artificial Sequence
  Description of Artificial Sequence: Synthetic oligonucleotide
ccaagagcgcucucagcuc

SEQ ID NO: 1912379 - RNA, 19 nt, Artificial Sequence
  Description of Artificial Sequence: Synthetic oligonucleotide
cuagucucgaggccacacu

SEQ ID NO: 1912380 - RNA, 19 nt, Artificial Sequence
  Description of Artificial Sequence: Synthetic oligonucleotide
uguggcggaucugcccauc

SEQ ID NO: 1912381 - RNA, 19 nt, Artificial Sequence
  Description of Artificial Sequence: Synthetic oligonucleotide
aggcaccuccaugggaagu

SEQ ID NO: 1912382 - RNA, 19 nt, Artificial Sequence
  Description of Artificial Sequence: Synthetic oligonucleotide
ggucucuaggucauuccaa

SEQ ID NO: 1912383 - RNA, 19 nt, Artificial Sequence
  Description of Artificial Sequence: Synthetic oligonucleotide
ccguguccucacaacuacc

SEQ ID NO: 1912384 - RNA, 19 nt, Artificial Sequence
  Description of Artificial Sequence: Synthetic oligonucleotide
auguggcggaucugcccau

SEQ ID NO: 1912385 - RNA, 19 nt, Artificial Sequence
  Description of Artificial Sequence: Synthetic oligonucleotide
cugauacuuguggcggcca

SEQ ID NO: 1912386 - RNA, 19 nt, Artificial Sequence
  Description of Artificial Sequence: Synthetic oligonucleotide
ggccccagagggaaaggug

SEQ ID NO: 1912387 - RNA, 19 nt, Artificial Sequence
  Description of Artificial Sequence: Synthetic oligonucleotide
gcucgcacuucuucagcca

SEQ ID NO: 1912388 - RNA, 19 nt, Artificial Sequence
  Description of Artificial Sequence: Synthetic oligonucleotide
cacggcuggccagucagga

SEQ ID NO: 1912389 - RNA, 19 nt, Artificial Sequence
  Description of Artificial Sequence: Synthetic oligonucleotide
ccuagucucgaggccacac

SEQ ID NO: 1912390 - RNA, 19 nt, Artificial Sequence
  Description of Artificial Sequence: Synthetic oligonucleotide
ggcuacagcaaggggcuca

SEQ ID NO: 1912391 - RNA, 19 nt, Artificial Sequence
  Description of Artificial Sequence: Synthetic oligonucleotide
acccagguucagaggcauc

SEQ ID NO: 1912392 - RNA, 19 nt, Artificial Sequence
  Description of Artificial Sequence: Synthetic oligonucleotide
aggcuacagcaaggggcuc

SEQ ID NO: 1912393 - RNA, 19 nt, Artificial Sequence
  Description of Artificial Sequence: Synthetic oligonucleotide
aggugggucucuaggucau

SEQ ID NO: 1912394 - RNA, 19 nt, Artificial Sequence
  Description of Artificial Sequence: Synthetic oligonucleotide
gcagauccugccauccaca

SEQ ID NO: 1912395 - RNA, 19 nt, Artificial Sequence
  Description of Artificial Sequence: Synthetic oligonucleotide
ccucaggaugacccgagga

SEQ ID NO: 1912396 - RNA, 19 nt, Artificial Sequence
  Description of Artificial Sequence: Synthetic oligonucleotide
gcagagaagugcucccucu

SEQ ID NO: 1912397 - RNA, 19 nt, Artificial Sequence
  Description of Artificial Sequence: Synthetic oligonucleotide
gaugggcaagguggccauc

SEQ ID NO: 1912398 - RNA, 19 nt, Artificial Sequence
  Description of Artificial Sequence: Synthetic oligonucleotide
ucgcgcccagagccucuug

SEQ ID NO: 1912399 - RNA, 19 nt, Artificial Sequence
  Description of Artificial Sequence: Synthetic oligonucleotide
cuggacggucucugugaga

SEQ ID NO: 1912400 - RNA, 19 nt, Artificial Sequence
  Description of Artificial Sequence: Synthetic oligonucleotide
gcuacagcaaggggcucac

SEQ ID NO: 1912401 - RNA, 19 nt, Artificial Sequence
  Description of Artificial Sequence: Synthetic oligonucleotide
acggggcguaaaacgacaa

SEQ ID NO: 1912402 - RNA, 19 nt, Artificial Sequence
  Description of Artificial Sequence: Synthetic oligonucleotide
ccugccugucacucuguuc

SEQ ID NO: 1912403 - RNA, 19 nt, Artificial Sequence
  Description of Artificial Sequence: Synthetic oligonucleotide
ggaugacccgaggagcaga

SEQ ID NO: 1912404 - RNA, 19 nt, Artificial Sequence
  Description of Artificial Sequence: Synthetic oligonucleotide
ugccuagguucagggccac

SEQ ID NO: 1912405 - RNA, 19 nt, Artificial Sequence
  Description of Artificial Sequence: Synthetic oligonucleotide
ggggcaccugacaucgcgc

SEQ ID NO: 1912406 - RNA, 19 nt, Artificial Sequence
  Description of Artificial Sequence: Synthetic oligonucleotide
gccagucaggaccuagucu

SEQ ID NO: 1912407 - RNA, 19 nt, Artificial Sequence
  Description of Artificial Sequence: Synthetic oligonucleotide
gacaucgcgcccagagccu

SEQ ID NO: 1912408 - RNA, 19 nt, Artificial Sequence
  Description of Artificial Sequence: Synthetic oligonucleotide
augacccgaggagcagaga

SEQ ID NO: 1912409 - RNA, 19 nt, Artificial Sequence
  Description of Artificial Sequence: Synthetic oligonucleotide
cucuggcggcaacaggcaa

SEQ ID NO: 1912410 - RNA, 19 nt, Artificial Sequence
  Description of Artificial Sequence: Synthetic oligonucleotide
acggucucugugagaggcu

SEQ ID NO: 1912411 - RNA, 19 nt, Artificial Sequence
  Description of Artificial Sequence: Synthetic oligonucleotide
cugcaucacccagguucag

SEQ ID NO: 1912412 - RNA, 19 nt, Artificial Sequence
  Description of Artificial Sequence: Synthetic oligonucleotide
gccgaggugccaggcacag

SEQ ID NO: 1912413 - RNA, 19 nt, Artificial Sequence
  Description of Artificial Sequence: Synthetic oligonucleotide
gcucuagaccggccauaug

SEQ ID NO: 1912414 - RNA, 19 nt, Artificial Sequence
  Description of Artificial Sequence: Synthetic oligonucleotide
gggccagcccugugcgccg

SEQ ID NO: 1912415 - RNA, 19 nt, Artificial Sequence
  Description of Artificial Sequence: Synthetic oligonucleotide
cgcgcccagagccucuugg

SEQ ID NO: 1912416 - RNA, 19 nt, Artificial Sequence
  Description of Artificial Sequence: Synthetic oligonucleotide
ccuccaggugggucucuag

SEQ ID NO: 1912417 - RNA, 19 nt, Artificial Sequence
  Description of Artificial Sequence: Synthetic oligonucleotide
cugugaagccgaggugcca

SEQ ID NO: 1912418 - RNA, 19 nt, Artificial Sequence
  Description of Artificial Sequence: Synthetic oligonucleotide
accuagucucgaggccaca

SEQ ID NO: 1912419 - RNA, 19 nt, Artificial Sequence
  Description of Artificial Sequence: Synthetic oligonucleotide
ccacggcuggccagucagg

SEQ ID NO: 1912420 - RNA, 19 nt, Artificial Sequence
  Description of Artificial Sequence: Synthetic oligonucleotide
gguagggcaugccuagguu

SEQ ID NO: 1912421 - RNA, 19 nt, Artificial Sequence
  Description of Artificial Sequence: Synthetic oligonucleotide
ccccuauaaaaggauaccu

SEQ ID NO: 1912422 - RNA, 19 nt, Artificial Sequence
  Description of Artificial Sequence: Synthetic oligonucleotide
uggcggcaacaggcaagug

SEQ ID NO: 1912423 - RNA, 19 nt, Artificial Sequence
  Description of Artificial Sequence: Synthetic oligonucleotide
agcucacauccugcuggaa

SEQ ID NO: 1912424 - RNA, 19 nt, Artificial Sequence
  Description of Artificial Sequence: Synthetic oligonucleotide
cggggcguaaaacgacaag

SEQ ID NO: 1912425 - RNA, 19 nt, Artificial Sequence
  Description of Artificial Sequence: Synthetic oligonucleotide
gaccggccauaugcacuac

SEQ ID NO: 1912426 - RNA, 19 nt, Artificial Sequence
  Description of Artificial Sequence: Synthetic oligonucleotide
gcggcaacaggcaaguguu

SEQ ID NO: 1912427 - RNA, 19 nt, Artificial Sequence
  Description of Artificial Sequence: Synthetic oligonucleotide
cgaacagccugagcuuccc

SEQ ID NO: 1912428 - RNA, 19 nt, Artificial Sequence
  Description of Artificial Sequence: Synthetic oligonucleotide
cggccauaugcacuaccug

SEQ ID NO: 1912429 - RNA, 19 nt, Artificial Sequence
  Description of Artificial Sequence: Synthetic oligonucleotide
agccuggcgcucagcccag

SEQ ID NO: 1912430 - RNA, 19 nt, Artificial Sequence
  Description of Artificial Sequence: Synthetic oligonucleotide
ccaugggcugcagcucuag

SEQ ID NO: 1912431 - RNA, 19 nt, Artificial Sequence
  Description of Artificial Sequence: Synthetic oligonucleotide
auccugccauccacacagu

SEQ ID NO: 1912432 - RNA, 19 nt, Artificial Sequence
  Description of Artificial Sequence: Synthetic oligonucleotide
cagcccaggagaagagcau

SEQ ID NO: 1912433 - RNA, 19 nt, Artificial Sequence
  Description of Artificial Sequence: Synthetic oligonucleotide
cagaggcaucagggagaag

SEQ ID NO: 1912434 - RNA, 19 nt, Artificial Sequence
  Description of Artificial Sequence: Synthetic oligonucleotide
gccuagguucagggccacg

SEQ ID NO: 1912435 - RNA, 19 nt, Artificial Sequence
  Description of Artificial Sequence: Synthetic oligonucleotide
gcacacgguagggcaugcc

SEQ ID NO: 1912436 - RNA, 19 nt, Artificial Sequence
  Description of Artificial Sequence: Synthetic oligonucleotide
gcucccucuggcggcaaca

SEQ ID NO: 1912437 - RNA, 19 nt, Artificial Sequence
  Description of Artificial Sequence: Synthetic oligonucleotide
cccugugcgccggaugcug

SEQ ID NO: 1912438 - RNA, 19 nt, Artificial Sequence
  Description of Artificial Sequence: Synthetic oligonucleotide
aucgcgcccagagccucuu

SEQ ID NO: 1912439 - RNA, 19 nt, Artificial Sequence
  Description of Artificial Sequence: Synthetic oligonucleotide
guggggcaccugacaucgc

SEQ ID NO: 1912440 - RNA, 19 nt, Artificial Sequence
  Description of Artificial Sequence: Synthetic oligonucleotide
cuguggccccagagggaaa

SEQ ID NO: 1912441 - RNA, 19 nt, Artificial Sequence
  Description of Artificial Sequence: Synthetic oligonucleotide
accugacaucgcgcccaga

SEQ ID NO: 1912442 - RNA, 19 nt, Artificial Sequence
  Description of Artificial Sequence: Synthetic oligonucleotide
cacccagguucagaggcau

SEQ ID NO: 1912443 - RNA, 19 nt, Artificial Sequence
  Description of Artificial Sequence: Synthetic oligonucleotide
ggccagcccugugcgccgg

SEQ ID NO: 1912444 - RNA, 19 nt, Artificial Sequence
  Description of Artificial Sequence: Synthetic oligonucleotide
cccgguccaagguuguggu

SEQ ID NO: 1912445 - RNA, 19 nt, Artificial Sequence
  Description of Artificial Sequence: Synthetic oligonucleotide
caucgcgcccagagccucu

SEQ ID NO: 1912446 - RNA, 19 nt, Artificial Sequence
  Description of Artificial Sequence: Synthetic oligonucleotide
ggcggccaagcuccaagau

SEQ ID NO: 1912447 - RNA, 19 nt, Artificial Sequence
  Description of Artificial Sequence: Synthetic oligonucleotide
cacuaccugcauggagacu

SEQ ID NO: 1912448 - RNA, 19 nt, Artificial Sequence
  Description of Artificial Sequence: Synthetic oligonucleotide
gagacuugccggggcucuu

SEQ ID NO: 1912449 - RNA, 19 nt, Artificial Sequence
  Description of Artificial Sequence: Synthetic oligonucleotide
cuacagcaaggggcucacu

SEQ ID NO: 1912450 - RNA, 19 nt, Artificial Sequence
  Description of Artificial Sequence: Synthetic oligonucleotide
cccgaagucucgguaacuu

SEQ ID NO: 1912451 - RNA, 19 nt, Artificial Sequence
  Description of Artificial Sequence: Synthetic oligonucleotide
ccugugcgccggaugcugu

SEQ ID NO: 1912452 - RNA, 19 nt, Artificial Sequence
  Description of Artificial Sequence: Synthetic oligonucleotide
cgguagggcaugccuaggu

SEQ ID NO: 1912453 - RNA, 19 nt, Artificial Sequence
  Description of Artificial Sequence: Synthetic oligonucleotide
ccgguccaagguuguggua

SEQ ID NO: 1912454 - RNA, 19 nt, Artificial Sequence
  Description of Artificial Sequence: Synthetic oligonucleotide
cccugaauucaugccggau

SEQ ID NO: 1912455 - RNA, 19 nt, Artificial Sequence
  Description of Artificial Sequence: Synthetic oligonucleotide
ggcagacucuggggucugu

SEQ ID NO: 1912456 - RNA, 19 nt, Artificial Sequence
  Description of Artificial Sequence: Synthetic oligonucleotide
gggccacggcuggccaguc

SEQ ID NO: 1912457 - RNA, 19 nt, Artificial Sequence
  Description of Artificial Sequence: Synthetic oligonucleotide
ggugggucucuaggucauu

SEQ ID NO: 1912458 - RNA, 19 nt, Artificial Sequence
  Description of Artificial Sequence: Synthetic oligonucleotide
ccucaggggccagcccugu

SEQ ID NO: 1912459 - RNA, 19 nt, Artificial Sequence
  Description of Artificial Sequence: Synthetic oligonucleotide
ccagcccugugcgccggau

SEQ ID NO: 1912460 - RNA, 19 nt, Artificial Sequence
  Description of Artificial Sequence: Synthetic oligonucleotide
ccgaggugccaggcacagu

SEQ ID NO: 1912461 - RNA, 19 nt, Artificial Sequence
  Description of Artificial Sequence: Synthetic oligonucleotide
aaaauaaucaggauaagcc

SEQ ID NO: 1912462 - RNA, 19 nt, Artificial Sequence
  Description of Artificial Sequence: Synthetic oligonucleotide
aauuugaaucacuuuacgc

SEQ ID NO: 1912463 - RNA, 19 nt, Artificial Sequence
  Description of Artificial Sequence: Synthetic oligonucleotide
aaucacuuuacgcagauuc

SEQ ID NO: 1912464 - RNA, 19 nt, Artificial Sequence
  Description of Artificial Sequence: Synthetic oligonucleotide
augguuacuguuuauaucc

SEQ ID NO: 1912465 - RNA, 19 nt, Artificial Sequence
  Description of Artificial Sequence: Synthetic oligonucleotide
aaaaucaucaacaagcuca

SEQ ID NO: 1912466 - RNA, 19 nt, Artificial Sequence
  Description of Artificial Sequence: Synthetic oligonucleotide
cugacuucgaaauagaacc

SEQ ID NO: 1912467 - RNA, 19 nt, Artificial Sequence
  Description of Artificial Sequence: Synthetic oligonucleotide
aucaggauaagccaccucc

SEQ ID NO: 1912468 - RNA, 19 nt, Artificial Sequence
  Description of Artificial Sequence: Synthetic oligonucleotide
uuuaauuuaaacuggcugu

SEQ ID NO: 1912469 - RNA, 19 nt, Artificial Sequence
  Description of Artificial Sequence: Synthetic oligonucleotide
ucuaugauguucauucugg

SEQ ID NO: 1912470 - RNA, 19 nt, Artificial Sequence
  Description of Artificial Sequence: Synthetic oligonucleotide
ucuaauuugaaucacuuua

SEQ ID NO: 1912471 - RNA, 19 nt, Artificial Sequence
  Description of Artificial Sequence: Synthetic oligonucleotide
uagagauuaauucauaguc

SEQ ID NO: 1912472 - RNA, 19 nt, Artificial Sequence
  Description of Artificial Sequence: Synthetic oligonucleotide
aacaauagggccucgaacu

SEQ ID NO: 1912473 - RNA, 19 nt, Artificial Sequence
  Description of Artificial Sequence: Synthetic oligonucleotide
aaauaaucaggauaagcca

SEQ ID NO: 1912474 - RNA, 19 nt, Artificial Sequence
  Description of Artificial Sequence: Synthetic oligonucleotide
auuugaaucacuuuacgca

SEQ ID NO: 1912475 - RNA, 19 nt, Artificial Sequence
  Description of Artificial Sequence: Synthetic oligonucleotide
uuugaauggagguggaacg

SEQ ID NO: 1912476 - RNA, 19 nt, Artificial Sequence
  Description of Artificial Sequence: Synthetic oligonucleotide
acaaugucgcuguugaagc

SEQ ID NO: 1912477 - RNA, 19 nt, Artificial Sequence
  Description of Artificial Sequence: Synthetic oligonucleotide
uuugaaucacuuuacgcag

SEQ ID NO: 1912478 - RNA, 19 nt, Artificial Sequence
  Description of Artificial Sequence: Synthetic oligonucleotide
uggaacgugaccaaaauaa

SEQ ID NO: 1912479 - RNA, 19 nt, Artificial Sequence
  Description of Artificial Sequence: Synthetic oligonucleotide
ugugauucggucuaaggcc

SEQ ID NO: 1912480 - RNA, 19 nt, Artificial Sequence
  Description of Artificial Sequence: Synthetic oligonucleotide
agaaugaggucauacucgc

SEQ ID NO: 1912481 - RNA, 19 nt, Artificial Sequence
  Description of Artificial Sequence: Synthetic oligonucleotide
uucacaaucucaauguaga

SEQ ID NO: 1912482 - RNA, 19 nt, Artificial Sequence
  Description of Artificial Sequence: Synthetic oligonucleotide
uauauccgaguucagaaug

SEQ ID NO: 1912483 - RNA, 19 nt, Artificial Sequence
  Description of Artificial Sequence: Synthetic oligonucleotide
uucgaaauagaaccacugg

SEQ ID NO: 1912484 - RNA, 19 nt, Artificial Sequence
  Description of Artificial Sequence: Synthetic oligonucleotide
uccaguacaacacagcuuc

SEQ ID NO: 1912485 - RNA, 19 nt, Artificial Sequence
  Description of Artificial Sequence: Synthetic oligonucleotide
aggaaagagguguucauac

SEQ ID NO: 1912486 - RNA, 19 nt, Artificial Sequence
  Description of Artificial Sequence: Synthetic oligonucleotide
aauaucuccgucuucugga

SEQ ID NO: 1912487 - RNA, 19 nt, Artificial Sequence
  Description of Artificial Sequence: Synthetic oligonucleotide
uuuauauccgaguucagaa

SEQ ID NO: 1912488 - RNA, 19 nt, Artificial Sequence
  Description of Artificial Sequence: Synthetic oligonucleotide
uccgaguucagaaugaggu

SEQ ID NO: 1912489 - RNA, 19 nt, Artificial Sequence
  Description of Artificial Sequence: Synthetic oligonucleotide
acuaccugaauucccagac

SEQ ID NO: 1912490 - RNA, 19 nt, Artificial Sequence
  Description of Artificial Sequence: Synthetic oligonucleotide
ugauguugaaccuguaugc

SEQ ID NO: 1912491 - RNA, 19 nt, Artificial Sequence
  Description of Artificial Sequence: Synthetic oligonucleotide
ugaguuaaacuucaaaaua

SEQ ID NO: 1912492 - RNA, 19 nt, Artificial Sequence
  Description of Artificial Sequence: Synthetic oligonucleotide
uuuugcacaccauaaggcc

SEQ ID NO: 1912493 - RNA, 19 nt, Artificial Sequence
  Description of Artificial Sequence: Synthetic oligonucleotide
aaagacgcgguucuguucu

SEQ ID NO: 1912494 - RNA, 19 nt, Artificial Sequence
  Description of Artificial Sequence: Synthetic oligonucleotide
guucuuuagagauuaauuc

SEQ ID NO: 1912495 - RNA, 19 nt, Artificial Sequence
  Description of Artificial Sequence: Synthetic oligonucleotide
uuaauuuguuaauaucugu

SEQ ID NO: 1912496 - RNA, 19 nt, Artificial Sequence
  Description of Artificial Sequence: Synthetic oligonucleotide
caugagacgacagugagag

SEQ ID NO: 1912497 - RNA, 19 nt, Artificial Sequence
  Description of Artificial Sequence: Synthetic oligonucleotide
ucgaaauagaaccacuggu

SEQ ID NO: 1912498 - RNA, 19 nt, Artificial Sequence
  Description of Artificial Sequence: Synthetic oligonucleotide
uccccucaaacacaaaagg

SEQ ID NO: 1912499 - RNA, 19 nt, Artificial Sequence
  Description of Artificial Sequence: Synthetic oligonucleotide
uucacaaugucgcuguuga

SEQ ID NO: 1912500 - RNA, 19 nt, Artificial Sequence
  Description of Artificial Sequence: Synthetic oligonucleotide
cauaguugggguuaucuag

SEQ ID NO: 1912501 - RNA, 19 nt, Artificial Sequence
  Description of Artificial Sequence: Synthetic oligonucleotide
uuagagauuaauucauagu

SEQ ID NO: 1912502 - RNA, 19 nt, Artificial Sequence
  Description of Artificial Sequence: Synthetic oligonucleotide
acuucaaaauaucuccguc

SEQ ID NO: 1912503 - RNA, 19 nt, Artificial Sequence
  Description of Artificial Sequence: Synthetic oligonucleotide
cuaauuugaaucacuuuac

SEQ ID NO: 1912504 - RNA, 19 nt, Artificial Sequence
  Description of Artificial Sequence: Synthetic oligonucleotide
cagaaugaggucauacucg

SEQ ID NO: 1912505 - RNA, 19 nt, Artificial Sequence
  Description of Artificial Sequence: Synthetic oligonucleotide
aggaguuggacucacuauc

SEQ ID NO: 1912506 - RNA, 19 nt, Artificial Sequence
  Description of Artificial Sequence: Synthetic oligonucleotide
caaaauaaucaggauaagc

SEQ ID NO: 1912507 - RNA, 19 nt, Artificial Sequence
  Description of Artificial Sequence: Synthetic oligonucleotide
aaugaggucauacucgcuu

SEQ ID NO: 1912508 - RNA, 19 nt, Artificial Sequence
  Description of Artificial Sequence: Synthetic oligonucleotide
uuggacuucucacaguuga

SEQ ID NO: 1912509 - RNA, 19 nt, Artificial Sequence
  Description of Artificial Sequence: Synthetic oligonucleotide
uaccugaauucccagacgc

SEQ ID NO: 1912510 - RNA, 19 nt, Artificial Sequence
  Description of Artificial Sequence: Synthetic oligonucleotide
uuuugaguuaaacuucaaa

SEQ ID NO: 1912511 - RNA, 19 nt, Artificial Sequence
  Description of Artificial Sequence: Synthetic oligonucleotide
cuauuguucguccugguac

SEQ ID NO: 1912512 - RNA, 19 nt, Artificial Sequence
  Description of Artificial Sequence: Synthetic oligonucleotide
aagcugugaacuaaagacg

SEQ ID NO: 1912513 - RNA, 19 nt, Artificial Sequence
  Description of Artificial Sequence: Synthetic oligonucleotide
ugaaccuguaugcaaugcc

SEQ ID NO: 1912514 - RNA, 19 nt, Artificial Sequence
  Description of Artificial Sequence: Synthetic oligonucleotide
agcugugaacuaaagacgc

SEQ ID NO: 1912515 - RNA, 19 nt, Artificial Sequence
  Description of Artificial Sequence: Synthetic oligonucleotide
agggccucgaacuuucccc

SEQ ID NO: 1912516 - RNA, 19 nt, Artificial Sequence
  Description of Artificial Sequence: Synthetic oligonucleotide
caauguagagaucaggguc

SEQ ID NO: 1912517 - RNA, 19 nt, Artificial Sequence
  Description of Artificial Sequence: Synthetic oligonucleotide
ucaggauaagccaccuccg

SEQ ID NO: 1912518 - RNA, 19 nt, Artificial Sequence
  Description of Artificial Sequence: Synthetic oligonucleotide
uacgcagauucccagauuc

SEQ ID NO: 1912519 - RNA, 19 nt, Artificial Sequence
  Description of Artificial Sequence: Synthetic oligonucleotide
ugcaugagacgacagugag

SEQ ID NO: 1912520 - RNA, 19 nt, Artificial Sequence
  Description of Artificial Sequence: Synthetic oligonucleotide
auaaucaggauaagccacc

SEQ ID NO: 1912521 - RNA, 19 nt, Artificial Sequence
  Description of Artificial Sequence: Synthetic oligonucleotide
guagagaucagggucgugg

SEQ ID NO: 1912522 - RNA, 19 nt, Artificial Sequence
  Description of Artificial Sequence: Synthetic oligonucleotide
uaugauguucauucuggug

SEQ ID NO: 1912523 - RNA, 19 nt, Artificial Sequence
  Description of Artificial Sequence: Synthetic oligonucleotide
ucuucuauuguucguccug

SEQ ID NO: 1912524 - RNA, 19 nt, Artificial Sequence
  Description of Artificial Sequence: Synthetic oligonucleotide
uguaucagccucucgauau

SEQ ID NO: 1912525 - RNA, 19 nt, Artificial Sequence
  Description of Artificial Sequence: Synthetic oligonucleotide
uuugcacaccauaaggccu

SEQ ID NO: 1912526 - RNA, 19 nt, Artificial Sequence
  Description of Artificial Sequence: Synthetic oligonucleotide
ugcucuacggaggaguugg

SEQ ID NO: 1912527 - RNA, 19 nt, Artificial Sequence
  Description of Artificial Sequence: Synthetic oligonucleotide
aaauagaaccacuggugau

SEQ ID NO: 1912528 - RNA, 19 nt, Artificial Sequence
  Description of Artificial Sequence: Synthetic oligonucleotide
ucugggacagacuuuugug

SEQ ID NO: 1912529 - RNA, 19 nt, Artificial Sequence
  Description of Artificial Sequence: Synthetic oligonucleotide
cuaggucauacauuacccg

SEQ ID NO: 1912530 - RNA, 19 nt, Artificial Sequence
  Description of Artificial Sequence: Synthetic oligonucleotide
acaacacagcuucccaagc

SEQ ID NO: 1912531 - RNA, 19 nt, Artificial Sequence
  Description of Artificial Sequence: Synthetic oligonucleotide
uuaaacuggcuguuggacu

SEQ ID NO: 1912532 - RNA, 19 nt, Artificial Sequence
  Description of Artificial Sequence: Synthetic oligonucleotide
ucgaacuuuccccucaaac

SEQ ID NO: 1912533 - RNA, 19 nt, Artificial Sequence
  Description of Artificial Sequence: Synthetic oligonucleotide
uucaaauuuugaguuaaac

SEQ ID NO: 1912534 - RNA, 19 nt, Artificial Sequence
  Description of Artificial Sequence: Synthetic oligonucleotide
caccauaaggccuuucuag

SEQ ID NO: 1912535 - RNA, 19 nt, Artificial Sequence
  Description of Artificial Sequence: Synthetic oligonucleotide
ucaauguagagaucagggu

SEQ ID NO: 1912536 - RNA, 19 nt, Artificial Sequence
  Description of Artificial Sequence: Synthetic oligonucleotide
uguucugcagugugauucg

SEQ ID NO: 1912537 - RNA, 19 nt, Artificial Sequence
  Description of Artificial Sequence: Synthetic oligonucleotide
uucagaaugaggucauacu

SEQ ID NO: 1912538 - RNA, 19 nt, Artificial Sequence
  Description of Artificial Sequence: Synthetic oligonucleotide
cuucgaaauagaaccacug

SEQ ID NO: 1912539 - RNA, 19 nt, Artificial Sequence
  Description of Artificial Sequence: Synthetic oligonucleotide
ucuguucugaccaccuggc

SEQ ID NO: 1912540 - RNA, 19 nt, Artificial Sequence
  Description of Artificial Sequence: Synthetic oligonucleotide
uuuaaacuggcuguuggac

SEQ ID NO: 1912541 - RNA, 19 nt, Artificial Sequence
  Description of Artificial Sequence: Synthetic oligonucleotide
gaaugggcucuuugaaugg

SEQ ID NO: 1912542 - RNA, 19 nt, Artificial Sequence
  Description of Artificial Sequence: Synthetic oligonucleotide
aauagggccucgaacuuuc

SEQ ID NO: 1912543 - RNA, 19 nt, Artificial Sequence
  Description of Artificial Sequence: Synthetic oligonucleotide
ucuacggaggaguuggacu

SEQ ID NO: 1912544 - RNA, 19 nt, Artificial Sequence
  Description of Artificial Sequence: Synthetic oligonucleotide
uccacuaccugaauuccca

SEQ ID NO: 1912545 - RNA, 19 nt, Artificial Sequence
  Description of Artificial Sequence: Synthetic oligonucleotide
ugaacuaaagacgcgguuc

SEQ ID NO: 1912546 - RNA, 19 nt, Artificial Sequence
  Description of Artificial Sequence: Synthetic oligonucleotide
ugguuacuguuuauauccg

SEQ ID NO: 1912547 - RNA, 19 nt, Artificial Sequence
  Description of Artificial Sequence: Synthetic oligonucleotide
guuacuguuuauauccgag

SEQ ID NO: 1912548 - RNA, 19 nt, Artificial Sequence
  Description of Artificial Sequence: Synthetic oligonucleotide
gagauuaauucauaguccu

SEQ ID NO: 1912549 - RNA, 19 nt, Artificial Sequence
  Description of Artificial Sequence: Synthetic oligonucleotide
uguuggacuucucacaguu

SEQ ID NO: 1912550 - RNA, 19 nt, Artificial Sequence
  Description of Artificial Sequence: Synthetic oligonucleotide
ugauaaugguuacuguuua

SEQ ID NO: 1912551 - RNA, 19 nt, Artificial Sequence
  Description of Artificial Sequence: Synthetic oligonucleotide
aaucaggauaagccaccuc

SEQ ID NO: 1912552 - RNA, 19 nt, Artificial Sequence
  Description of Artificial Sequence: Synthetic oligonucleotide
aauagaaccacuggugaua

SEQ ID NO: 1912553 - RNA, 19 nt, Artificial Sequence
  Description of Artificial Sequence: Synthetic oligonucleotide
ugaauucccagacgcuucc

SEQ ID NO: 1912554 - RNA, 19 nt, Artificial Sequence
  Description of Artificial Sequence: Synthetic oligonucleotide
uccacacguagccacaugu

SEQ ID NO: 1912555 - RNA, 19 nt, Artificial Sequence
  Description of Artificial Sequence: Synthetic oligonucleotide
uuuacgcagauucccagau

SEQ ID NO: 1912556 - RNA, 19 nt, Artificial Sequence
  Description of Artificial Sequence: Synthetic oligonucleotide
uuaauucauaguccugaaa

SEQ ID NO: 1912557 - RNA, 19 nt, Artificial Sequence
  Description of Artificial Sequence: Synthetic oligonucleotide
augcuuucgugcaugagac

SEQ ID NO: 1912558 - RNA, 19 nt, Artificial Sequence
  Description of Artificial Sequence: Synthetic oligonucleotide
uuacuguuuauauccgagu

SEQ ID NO: 1912559 - RNA, 19 nt, Artificial Sequence
  Description of Artificial Sequence: Synthetic oligonucleotide
cacacguagccacaugugg

SEQ ID NO: 1912560 - RNA, 19 nt, Artificial Sequence
  Description of Artificial Sequence: Synthetic oligonucleotide
agaguacuuccacacguag

SEQ ID NO: 1912561 - RNA, 19 nt, Artificial Sequence
  Description of Artificial Sequence: Synthetic oligonucleotide
cuuugaauggagguggaac

SEQ ID NO: 1912562 - RNA, 19 nt, Artificial Sequence
  Description of Artificial Sequence: Synthetic oligonucleotide
ugugaacuaaagacgcggu

SEQ ID NO: 1912563 - RNA, 19 nt, Artificial Sequence
  Description of Artificial Sequence: Synthetic oligonucleotide
uuaggagaugccuucuccu

SEQ ID NO: 1912564 - RNA, 19 nt, Artificial Sequence
  Description of Artificial Sequence: Synthetic oligonucleotide
cugugaacuaaagacgcgg

SEQ ID NO: 1912565 - RNA, 19 nt, Artificial Sequence
  Description of Artificial Sequence: Synthetic oligonucleotide
ucacuuuacgcagauuccc

SEQ ID NO: 1912566 - RNA, 19 nt, Artificial Sequence
  Description of Artificial Sequence: Synthetic oligonucleotide
cacaaugucgcuguugaag

SEQ ID NO: 1912567 - RNA, 19 nt, Artificial Sequence
  Description of Artificial Sequence: Synthetic oligonucleotide
auaguugggguuaucuagg

SEQ ID NO: 1912568 - RNA, 19 nt, Artificial Sequence
  Description of Artificial Sequence: Synthetic oligonucleotide
auuuaaacuggcuguugga

SEQ ID NO: 1912569 - RNA, 19 nt, Artificial Sequence
  Description of Artificial Sequence: Synthetic oligonucleotide
uggaguguugguccaucgg

SEQ ID NO: 1912570 - RNA, 19 nt, Artificial Sequence
  Description of Artificial Sequence: Synthetic oligonucleotide
uauuguucguccugguacu

SEQ ID NO: 1912571 - RNA, 19 nt, Artificial Sequence
  Description of Artificial Sequence: Synthetic oligonucleotide
uguucguccugguacuugc

SEQ ID NO: 1912572 - RNA, 19 nt, Artificial Sequence
  Description of Artificial Sequence: Synthetic oligonucleotide
aguacaacacagcuuccca

SEQ ID NO: 1912573 - RNA, 19 nt, Artificial Sequence
  Description of Artificial Sequence: Synthetic oligonucleotide
agaggcagaccauaguccu

SEQ ID NO: 1912574 - RNA, 19 nt, Artificial Sequence
  Description of Artificial Sequence: Synthetic oligonucleotide
acuuuacgcagauucccag

SEQ ID NO: 1912575 - RNA, 19 nt, Artificial Sequence
  Description of Artificial Sequence: Synthetic oligonucleotide
uggggucuuaauuuguuaa

SEQ ID NO: 1912576 - RNA, 19 nt, Artificial Sequence
  Description of Artificial Sequence: Synthetic oligonucleotide
uguccuuuugcacaccaua

SEQ ID NO: 1912577 - RNA, 19 nt, Artificial Sequence
  Description of Artificial Sequence: Synthetic oligonucleotide
uucccagauucaaauuuug

SEQ ID NO: 1912578 - RNA, 19 nt, Artificial Sequence
  Description of Artificial Sequence: Synthetic oligonucleotide
gucuaugauguucauucug

SEQ ID NO: 1912579 - RNA, 19 nt, Artificial Sequence
  Description of Artificial Sequence: Synthetic oligonucleotide
aggauaagccaccuccgag

SEQ ID NO: 1912580 - RNA, 19 nt, Artificial Sequence
  Description of Artificial Sequence: Synthetic oligonucleotide
ggaguguugguccaucggg

SEQ ID NO: 1912581 - RNA, 19 nt, Artificial Sequence
  Description of Artificial Sequence: Synthetic oligonucleotide
ggacucacuaucgucaucg

SEQ ID NO: 1912582 - RNA, 19 nt, Artificial Sequence
  Description of Artificial Sequence: Synthetic oligonucleotide
ucauacucgcuucuucuaa

SEQ ID NO: 1912583 - RNA, 19 nt, Artificial Sequence
  Description of Artificial Sequence: Synthetic oligonucleotide
uuauauccgaguucagaau

SEQ ID NO: 1912584 - RNA, 19 nt, Artificial Sequence
  Description of Artificial Sequence: Synthetic oligonucleotide
uaaacuggcuguuggacuu

SEQ ID NO: 1912585 - RNA, 19 nt, Artificial Sequence
  Description of Artificial Sequence: Synthetic oligonucleotide
accauaaggccuuucuaga

SEQ ID NO: 1912586 - RNA, 19 nt, Artificial Sequence
  Description of Artificial Sequence: Synthetic oligonucleotide
uugaaucacuuuacgcaga

SEQ ID NO: 1912587 - RNA, 19 nt, Artificial Sequence
  Description of Artificial Sequence: Synthetic oligonucleotide
ugaaucacuuuacgcagau

SEQ ID NO: 1912588 - RNA, 19 nt, Artificial Sequence
  Description of Artificial Sequence: Synthetic oligonucleotide
ucauaguccugaaaaucau

SEQ ID NO: 1912589 - RNA, 19 nt, Artificial Sequence
  Description of Artificial Sequence: Synthetic oligonucleotide
acgacagugagaggcagac

SEQ ID NO: 1912590 - RNA, 19 nt, Artificial Sequence
  Description of Artificial Sequence: Synthetic oligonucleotide
auuaauucauaguccugaa

SEQ ID NO: 1912591 - RNA, 19 nt, Artificial Sequence
  Description of Artificial Sequence: Synthetic oligonucleotide
uuuccgcuccaguacaaca

SEQ ID NO: 1912592 - RNA, 19 nt, Artificial Sequence
  Description of Artificial Sequence: Synthetic oligonucleotide
agaccauaguccuuccuca

SEQ ID NO: 1912593 - RNA, 19 nt, Artificial Sequence
  Description of Artificial Sequence: Synthetic oligonucleotide
cuguuuauauccgaguuca

SEQ ID NO: 1912594 - RNA, 19 nt, Artificial Sequence
  Description of Artificial Sequence: Synthetic oligonucleotide
ugggacagacuuuuguggu

SEQ ID NO: 1912595 - RNA, 19 nt, Artificial Sequence
  Description of Artificial Sequence: Synthetic oligonucleotide
ucaacaagcucaggaaaga

SEQ ID NO: 1912596 - RNA, 19 nt, Artificial Sequence
  Description of Artificial Sequence: Synthetic oligonucleotide
uguuuauauccgaguucag

SEQ ID NO: 1912597 - RNA, 19 nt, Artificial Sequence
  Description of Artificial Sequence: Synthetic oligonucleotide
gaacgugaccaaaauaauc

SEQ ID NO: 1912598 - RNA, 19 nt, Artificial Sequence
  Description of Artificial Sequence: Synthetic oligonucleotide
ugcagugugauucggucua

SEQ ID NO: 1912599 - RNA, 19 nt, Artificial Sequence
  Description of Artificial Sequence: Synthetic oligonucleotide
cauuacccggucuaugaug

SEQ ID NO: 1912600 - RNA, 19 nt, Artificial Sequence
  Description of Artificial Sequence: Synthetic oligonucleotide
ucauuccugcacccaagcc

SEQ ID NO: 1912601 - RNA, 19 nt, Artificial Sequence
  Description of Artificial Sequence: Synthetic oligonucleotide
ucgguuuccgcuccaguac

SEQ ID NO: 1912602 - RNA, 19 nt, Artificial Sequence
  Description of Artificial Sequence: Synthetic oligonucleotide
aggucauacucgcuucuuc

SEQ ID NO: 1912603 - RNA, 19 nt, Artificial Sequence
  Description of Artificial Sequence: Synthetic oligonucleotide
ucaaaauaucuccgucuuc

SEQ ID NO: 1912604 - RNA, 19 nt, Artificial Sequence
  Description of Artificial Sequence: Synthetic oligonucleotide
aucgucaucgucuucgguu

SEQ ID NO: 1912605 - RNA, 19 nt, Artificial Sequence
  Description of Artificial Sequence: Synthetic oligonucleotide
uucccaagcuguacugucc

SEQ ID NO: 1912606 - RNA, 19 nt, Artificial Sequence
  Description of Artificial Sequence: Synthetic oligonucleotide
ugugggcaugcuuucgugc

SEQ ID NO: 1912607 - RNA, 19 nt, Artificial Sequence
  Description of Artificial Sequence: Synthetic oligonucleotide
uacuuccacacguagccac

SEQ ID NO: 1912608 - RNA, 19 nt, Artificial Sequence
  Description of Artificial Sequence: Synthetic oligonucleotide
aaccacuggugauaauggu

SEQ ID NO: 1912609 - RNA, 19 nt, Artificial Sequence
  Description of Artificial Sequence: Synthetic oligonucleotide
cuacggaggaguuggacuc

SEQ ID NO: 1912610 - RNA, 19 nt, Artificial Sequence
  Description of Artificial Sequence: Synthetic oligonucleotide
cuuagucacagcuccuuuc

SEQ ID NO: 1912611 - RNA, 19 nt, Artificial Sequence
  Description of Artificial Sequence: Synthetic oligonucleotide
auaucuccgucuucuggag

SEQ ID NO: 1912612 - RNA, 19 nt, Artificial Sequence
  Description of Artificial Sequence: Synthetic oligonucleotide
uuccacuaccugaauuccc

SEQ ID NO: 1912613 - RNA, 19 nt, Artificial Sequence
  Description of Artificial Sequence: Synthetic oligonucleotide
caacaauagggccucgaac

SEQ ID NO: 1912614 - RNA, 19 nt, Artificial Sequence
  Description of Artificial Sequence: Synthetic oligonucleotide
uguuaauaucuguuucaau

SEQ ID NO: 1912615 - RNA, 19 nt, Artificial Sequence
  Description of Artificial Sequence: Synthetic oligonucleotide
ucuauuguucguccuggua

SEQ ID NO: 1912616 - RNA, 19 nt, Artificial Sequence
  Description of Artificial Sequence: Synthetic oligonucleotide
cacguagccacaugugggc

SEQ ID NO: 1912617 - RNA, 19 nt, Artificial Sequence
  Description of Artificial Sequence: Synthetic oligonucleotide
cauaguccugaaaaucauc

SEQ ID NO: 1912618 - RNA, 19 nt, Artificial Sequence
  Description of Artificial Sequence: Synthetic oligonucleotide
uucuaauuugaaucacuuu

SEQ ID NO: 1912619 - RNA, 19 nt, Artificial Sequence
  Description of Artificial Sequence: Synthetic oligonucleotide
agccucucgauaucuuggg

SEQ ID NO: 1912620 - RNA, 19 nt, Artificial Sequence
  Description of Artificial Sequence: Synthetic oligonucleotide
guuggacucacuaucguca

SEQ ID NO: 1912621 - RNA, 19 nt, Artificial Sequence
  Description of Artificial Sequence: Synthetic oligonucleotide
cagccucucgauaucuugg

SEQ ID NO: 1912622 - RNA, 19 nt, Artificial Sequence
  Description of Artificial Sequence: Synthetic oligonucleotide
gcaaucuuuguccuuuugc

SEQ ID NO: 1912623 - RNA, 19 nt, Artificial Sequence
  Description of Artificial Sequence: Synthetic oligonucleotide
uguacuguccgcccuucaa

SEQ ID NO: 1912624 - RNA, 19 nt, Artificial Sequence
  Description of Artificial Sequence: Synthetic oligonucleotide
auuacccggucuaugaugu

SEQ ID NO: 1912625 - RNA, 19 nt, Artificial Sequence
  Description of Artificial Sequence: Synthetic oligonucleotide
agaucagggucguggagug

SEQ ID NO: 1912626 - RNA, 19 nt, Artificial Sequence
  Description of Artificial Sequence: Synthetic oligonucleotide
acacguagccacauguggg

SEQ ID NO: 1912627 - RNA, 19 nt, Artificial Sequence
  Description of Artificial Sequence: Synthetic oligonucleotide
gcucuuugaauggaggugg

SEQ ID NO: 1912628 - RNA, 19 nt, Artificial Sequence
  Description of Artificial Sequence: Synthetic oligonucleotide
uccuuuaggagaugccuuc

SEQ ID NO: 1912629 - RNA, 19 nt, Artificial Sequence
  Description of Artificial Sequence: Synthetic oligonucleotide
gaguuaaacuucaaaauau

SEQ ID NO: 1912630 - RNA, 19 nt, Artificial Sequence
  Description of Artificial Sequence: Synthetic oligonucleotide
ucggucuaaggccuucaca

SEQ ID NO: 1912631 - RNA, 19 nt, Artificial Sequence
  Description of Artificial Sequence: Synthetic oligonucleotide
cuaccugaauucccagacg

SEQ ID NO: 1912632 - RNA, 19 nt, Artificial Sequence
  Description of Artificial Sequence: Synthetic oligonucleotide
ucgcuguugaagcugugaa

SEQ ID NO: 1912633 - RNA, 19 nt, Artificial Sequence
  Description of Artificial Sequence: Synthetic oligonucleotide
gaaccuguaugcaaugcca

SEQ ID NO: 1912634 - RNA, 19 nt, Artificial Sequence
  Description of Artificial Sequence: Synthetic oligonucleotide
auaaugguuacuguuuaua

SEQ ID NO: 1912635 - RNA, 19 nt, Artificial Sequence
  Description of Artificial Sequence: Synthetic oligonucleotide
ugaauggagguggaacgug

SEQ ID NO: 1912636 - RNA, 19 nt, Artificial Sequence
  Description of Artificial Sequence: Synthetic oligonucleotide
uucgugcaugagacgacag

SEQ ID NO: 1912637 - RNA, 19 nt, Artificial Sequence
  Description of Artificial Sequence: Synthetic oligonucleotide
gauguugaaccuguaugca

SEQ ID NO: 1912638 - RNA, 19 nt, Artificial Sequence
  Description of Artificial Sequence: Synthetic oligonucleotide
cauaguccuuccucauucc

SEQ ID NO: 1912639 - RNA, 19 nt, Artificial Sequence
  Description of Artificial Sequence: Synthetic oligonucleotide
uauccgaguucagaaugag

SEQ ID NO: 1912640 - RNA, 19 nt, Artificial Sequence
  Description of Artificial Sequence: Synthetic oligonucleotide
gacuucgaaauagaaccac

SEQ ID NO: 1912641 - RNA, 19 nt, Artificial Sequence
  Description of Artificial Sequence: Synthetic oligonucleotide
auaagccaccuccgaguac

SEQ ID NO: 1912642 - RNA, 19 nt, Artificial Sequence
  Description of Artificial Sequence: Synthetic oligonucleotide
uugcuggggucuuaauuug

SEQ ID NO: 1912643 - RNA, 19 nt, Artificial Sequence
  Description of Artificial Sequence: Synthetic oligonucleotide
uuuugguucuuuagagauu

SEQ ID NO: 1912644 - RNA, 19 nt, Artificial Sequence
  Description of Artificial Sequence: Synthetic oligonucleotide
ugaggucauacucgcuucu

SEQ ID NO: 1912645 - RNA, 19 nt, Artificial Sequence
  Description of Artificial Sequence: Synthetic oligonucleotide
uucgguuuccgcuccagua

SEQ ID NO: 1912646 - RNA, 19 nt, Artificial Sequence
  Description of Artificial Sequence: Synthetic oligonucleotide
acgcgguucuguucugacc

SEQ ID NO: 1912647 - RNA, 19 nt, Artificial Sequence
  Description of Artificial Sequence: Synthetic oligonucleotide
uccgaguacucugggacag

SEQ ID NO: 1912648 - RNA, 19 nt, Artificial Sequence
  Description of Artificial Sequence: Synthetic oligonucleotide
acuaaagacgcgguucugu

SEQ ID NO: 1912649 - RNA, 19 nt, Artificial Sequence
  Description of Artificial Sequence: Synthetic oligonucleotide
auguugaaccuguaugcaa

SEQ ID NO: 1912650 - RNA, 19 nt, Artificial Sequence
  Description of Artificial Sequence: Synthetic oligonucleotide
cucgcuucuucuaauuuga

SEQ ID NO: 1912651 - RNA, 19 nt, Artificial Sequence
  Description of Artificial Sequence: Synthetic oligonucleotide
ugauguucauucuggugua

SEQ ID NO: 1912652 - RNA, 19 nt, Artificial Sequence
  Description of Artificial Sequence: Synthetic oligonucleotide
agagaucagggucguggag

SEQ ID NO: 1912653 - RNA, 19 nt, Artificial Sequence
  Description of Artificial Sequence: Synthetic oligonucleotide
auaguccuuccucauuccu

SEQ ID NO: 1912654 - RNA, 19 nt, Artificial Sequence
  Description of Artificial Sequence: Synthetic oligonucleotide
gaguacuuccacacguagc

SEQ ID NO: 1912655 - RNA, 19 nt, Artificial Sequence
  Description of Artificial Sequence: Synthetic oligonucleotide
gaacuaaagacgcgguucu

SEQ ID NO: 1912656 - RNA, 19 nt, Artificial Sequence
  Description of Artificial Sequence: Synthetic oligonucleotide
agaggaggccugcucuacg

SEQ ID NO: 1912657 - RNA, 19 nt, Artificial Sequence
  Description of Artificial Sequence: Synthetic oligonucleotide
uuucgugcaugagacgaca

SEQ ID NO: 1912658 - RNA, 19 nt, Artificial Sequence
  Description of Artificial Sequence: Synthetic oligonucleotide
uaucuaggucauacauuac

SEQ ID NO: 1912659 - RNA, 19 nt, Artificial Sequence
  Description of Artificial Sequence: Synthetic oligonucleotide
aaagagguguucauacauu

SEQ ID NO: 1912660 - RNA, 19 nt, Artificial Sequence
  Description of Artificial Sequence: Synthetic oligonucleotide
uaugcaaugccaggccgca

SEQ ID NO: 1912661 - RNA, 19 nt, Artificial Sequence
  Description of Artificial Sequence: Synthetic oligonucleotide
ucgugcaugagacgacagu

SEQ ID NO: 1912662 - RNA, 19 nt, Artificial Sequence
  Description of Artificial Sequence: Synthetic oligonucleotide
uacuguccgcccuucaaaa

SEQ ID NO: 1912663 - RNA, 19 nt, Artificial Sequence
  Description of Artificial Sequence: Synthetic oligonucleotide
ugcuuucgugcaugagacg

SEQ ID NO: 1912664 - RNA, 19 nt, Artificial Sequence
  Description of Artificial Sequence: Synthetic oligonucleotide
ggaguuggacucacuaucg

SEQ ID NO: 1912665 - RNA, 19 nt, Artificial Sequence
  Description of Artificial Sequence: Synthetic oligonucleotide
ucaucgucuucgguuuccg

SEQ ID NO: 1912666 - RNA, 19 nt, Artificial Sequence
  Description of Artificial Sequence: Synthetic oligonucleotide
agugacauaguugggguua

SEQ ID NO: 1912667 - RNA, 19 nt, Artificial Sequence
  Description of Artificial Sequence: Synthetic oligonucleotide
uucugcagugugauucggu

SEQ ID NO: 1912668 - RNA, 19 nt, Artificial Sequence
  Description of Artificial Sequence: Synthetic oligonucleotide
guggaguguugguccaucg

SEQ ID NO: 1912669 - RNA, 19 nt, Artificial Sequence
  Description of Artificial Sequence: Synthetic oligonucleotide
agugagaggcagaccauag

SEQ ID NO: 1912670 - RNA, 19 nt, Artificial Sequence
  Description of Artificial Sequence: Synthetic oligonucleotide
agucacagcuccuuucuuu

SEQ ID NO: 1912671 - RNA, 19 nt, Artificial Sequence
  Description of Artificial Sequence: Synthetic oligonucleotide
cggucuaugauguucauuc

SEQ ID NO: 1912672 - RNA, 19 nt, Artificial Sequence
  Description of Artificial Sequence: Synthetic oligonucleotide
uaaucaggauaagccaccu

SEQ ID NO: 1912673 - RNA, 19 nt, Artificial Sequence
  Description of Artificial Sequence: Synthetic oligonucleotide
uccugguacuugcuggggu

SEQ ID NO: 1912674 - RNA, 19 nt, Artificial Sequence
  Description of Artificial Sequence: Synthetic oligonucleotide
ugguucuuuagagauuaau

SEQ ID NO: 1912675 - RNA, 19 nt, Artificial Sequence
  Description of Artificial Sequence: Synthetic oligonucleotide
gauaagccaccuccgagua

SEQ ID NO: 1912676 - RNA, 19 nt, Artificial Sequence
  Description of Artificial Sequence: Synthetic oligonucleotide
gauaucuugggcaaucuuu

SEQ ID NO: 1912677 - RNA, 19 nt, Artificial Sequence
  Description of Artificial Sequence: Synthetic oligonucleotide
cuuucgugcaugagacgac

SEQ ID NO: 1912678 - RNA, 19 nt, Artificial Sequence
  Description of Artificial Sequence: Synthetic oligonucleotide
cuagaaugggcucuuugaa

SEQ ID NO: 1912679 - RNA, 19 nt, Artificial Sequence
  Description of Artificial Sequence: Synthetic oligonucleotide
ucgucuucgguuuccgcuc

SEQ ID NO: 1912680 - RNA, 19 nt, Artificial Sequence
  Description of Artificial Sequence: Synthetic oligonucleotide
uaguugggguuaucuaggu

SEQ ID NO: 1912681 - RNA, 19 nt, Artificial Sequence
  Description of Artificial Sequence: Synthetic oligonucleotide
cuggggcuacuugugaagg

SEQ ID NO: 1912682 - RNA, 19 nt, Artificial Sequence
  Description of Artificial Sequence: Synthetic oligonucleotide
uugggguuaucuaggucau

SEQ ID NO: 1912683 - RNA, 19 nt, Artificial Sequence
  Description of Artificial Sequence: Synthetic oligonucleotide
agcauccugucacugcccu

SEQ ID NO: 1912684 - RNA, 19 nt, Artificial Sequence
  Description of Artificial Sequence: Synthetic oligonucleotide
ugcuggggucuuaauuugu

SEQ ID NO: 1912685 - RNA, 19 nt, Artificial Sequence
  Description of Artificial Sequence: Synthetic oligonucleotide
auacauuacccggucuaug

SEQ ID NO: 1912686 - RNA, 19 nt, Artificial Sequence
  Description of Artificial Sequence: Synthetic oligonucleotide
cuguggggacaacaauagg

SEQ ID NO: 1912687 - RNA, 19 nt, Artificial Sequence
  Description of Artificial Sequence: Synthetic oligonucleotide
guaugcaaugccaggccgc

SEQ ID NO: 1912688 - RNA, 19 nt, Artificial Sequence
  Description of Artificial Sequence: Synthetic oligonucleotide
gacauaguugggguuaucu

SEQ ID NO: 1912689 - RNA, 19 nt, Artificial Sequence
  Description of Artificial Sequence: Synthetic oligonucleotide
cuuuacgcagauucccaga

SEQ ID NO: 1912690 - RNA, 19 nt, Artificial Sequence
  Description of Artificial Sequence: Synthetic oligonucleotide
uaucuccgucuucuggagu

SEQ ID NO: 1912691 - RNA, 19 nt, Artificial Sequence
  Description of Artificial Sequence: Synthetic oligonucleotide
augugggcaugcuuucgug

SEQ ID NO: 1912692 - RNA, 19 nt, Artificial Sequence
  Description of Artificial Sequence: Synthetic oligonucleotide
acauuacccggucuaugau

SEQ ID NO: 1912693 - RNA, 19 nt, Artificial Sequence
  Description of Artificial Sequence: Synthetic oligonucleotide
auauccgaguucagaauga

SEQ ID NO: 1912694 - RNA, 19 nt, Artificial Sequence
  Description of Artificial Sequence: Synthetic oligonucleotide
uuggacucacuaucgucau

SEQ ID NO: 1912695 - RNA, 19 nt, Artificial Sequence
  Description of Artificial Sequence: Synthetic oligonucleotide
gggguuaucuaggucauac

SEQ ID NO: 1912696 - RNA, 19 nt, Artificial Sequence
  Description of Artificial Sequence: Synthetic oligonucleotide
ugggcaaucuuuguccuuu

SEQ ID NO: 1912697 - RNA, 19 nt, Artificial Sequence
  Description of Artificial Sequence: Synthetic oligonucleotide
auccgaguucagaaugagg

SEQ ID NO: 1912698 - RNA, 19 nt, Artificial Sequence
  Description of Artificial Sequence: Synthetic oligonucleotide
cauuccugcacccaagccu

SEQ ID NO: 1912699 - RNA, 19 nt, Artificial Sequence
  Description of Artificial Sequence: Synthetic oligonucleotide
ucagggucguggaguguug

SEQ ID NO: 1912700 - RNA, 19 nt, Artificial Sequence
  Description of Artificial Sequence: Synthetic oligonucleotide
gcuguggggacaacaauag

SEQ ID NO: 1912701 - RNA, 19 nt, Artificial Sequence
  Description of Artificial Sequence: Synthetic oligonucleotide
cacuuuacgcagauuccca

SEQ ID NO: 1912702 - RNA, 19 nt, Artificial Sequence
  Description of Artificial Sequence: Synthetic oligonucleotide
guacaacacagcuucccaa

SEQ ID NO: 1912703 - RNA, 19 nt, Artificial Sequence
  Description of Artificial Sequence: Synthetic oligonucleotide
ucgauaucuugggcaaucu

SEQ ID NO: 1912704 - RNA, 19 nt, Artificial Sequence
  Description of Artificial Sequence: Synthetic oligonucleotide
cuucuaauuugaaucacuu

SEQ ID NO: 1912705 - RNA, 19 nt, Artificial Sequence
  Description of Artificial Sequence: Synthetic oligonucleotide
uuguucguccugguacuug

SEQ ID NO: 1912706 - RNA, 19 nt, Artificial Sequence
  Description of Artificial Sequence: Synthetic oligonucleotide
acuggugauaaugguuacu

SEQ ID NO: 1912707 - RNA, 19 nt, Artificial Sequence
  Description of Artificial Sequence: Synthetic oligonucleotide
gauaaugguuacuguuuau

SEQ ID NO: 1912708 - RNA, 19 nt, Artificial Sequence
  Description of Artificial Sequence: Synthetic oligonucleotide
uuccacacguagccacaug

SEQ ID NO: 1912709 - RNA, 19 nt, Artificial Sequence
  Description of Artificial Sequence: Synthetic oligonucleotide
gguuaucuaggucauacau

SEQ ID NO: 1912710 - RNA, 19 nt, Artificial Sequence
  Description of Artificial Sequence: Synthetic oligonucleotide
uacccggucuaugauguuc

SEQ ID NO: 1912711 - RNA, 19 nt, Artificial Sequence
  Description of Artificial Sequence: Synthetic oligonucleotide
ccauaguccuuccucauuc

SEQ ID NO: 1912712 - RNA, 19 nt, Artificial Sequence
  Description of Artificial Sequence: Synthetic oligonucleotide
aagaguacuuccacacgua

SEQ ID NO: 1912713 - RNA, 19 nt, Artificial Sequence
  Description of Artificial Sequence: Synthetic oligonucleotide
gacgcgguucuguucugac

SEQ ID NO: 1912714 - RNA, 19 nt, Artificial Sequence
  Description of Artificial Sequence: Synthetic oligonucleotide
guucuguucugaccaccug

SEQ ID NO: 1912715 - RNA, 19 nt, Artificial Sequence
  Description of Artificial Sequence: Synthetic oligonucleotide
cacaaaagguuuugguucu

SEQ ID NO: 1912716 - RNA, 19 nt, Artificial Sequence
  Description of Artificial Sequence: Synthetic oligonucleotide
cacuggugauaaugguuac

SEQ ID NO: 1912717 - RNA, 19 nt, Artificial Sequence
  Description of Artificial Sequence: Synthetic oligonucleotide
caaucucaauguagagauc

SEQ ID NO: 1912718 - RNA, 19 nt, Artificial Sequence
  Description of Artificial Sequence: Synthetic oligonucleotide
aagacgcgguucuguucug

SEQ ID NO: 1912719 - RNA, 19 nt, Artificial Sequence
  Description of Artificial Sequence: Synthetic oligonucleotide
gguuacuguuuauauccga

SEQ ID NO: 1912720 - RNA, 19 nt, Artificial Sequence
  Description of Artificial Sequence: Synthetic oligonucleotide
gcuuucgugcaugagacga

SEQ ID NO: 1912721 - RNA, 19 nt, Artificial Sequence
  Description of Artificial Sequence: Synthetic oligonucleotide
ccuccgaguacucugggac

SEQ ID NO: 1912722 - RNA, 19 nt, Artificial Sequence
  Description of Artificial Sequence: Synthetic oligonucleotide
augagacgacagugagagg

SEQ ID NO: 1912723 - RNA, 19 nt, Artificial Sequence
  Description of Artificial Sequence: Synthetic oligonucleotide
guugaagcugugaacuaaa

SEQ ID NO: 1912724 - RNA, 19 nt, Artificial Sequence
  Description of Artificial Sequence: Synthetic oligonucleotide
agcuguggggacaacaaua

SEQ ID NO: 1912725 - RNA, 19 nt, Artificial Sequence
  Description of Artificial Sequence: Synthetic oligonucleotide
uuccugcacccaagccugg

SEQ ID NO: 1912726 - RNA, 19 nt, Artificial Sequence
  Description of Artificial Sequence: Synthetic oligonucleotide
uuacgcagauucccagauu

SEQ ID NO: 1912727 - RNA, 19 nt, Artificial Sequence
  Description of Artificial Sequence: Synthetic oligonucleotide
gaauguucugcagugugau

SEQ ID NO: 1912728 - RNA, 19 nt, Artificial Sequence
  Description of Artificial Sequence: Synthetic oligonucleotide
guacuguccgcccuucaaa

SEQ ID NO: 1912729 - RNA, 19 nt, Artificial Sequence
  Description of Artificial Sequence: Synthetic oligonucleotide
accauaguccuuccucauu

SEQ ID NO: 1912730 - RNA, 19 nt, Artificial Sequence
  Description of Artificial Sequence: Synthetic oligonucleotide
cugguguaucagccucucg

SEQ ID NO: 1912731 - RNA, 19 nt, Artificial Sequence
  Description of Artificial Sequence: Synthetic oligonucleotide
cgaacuuuccccucaaaca

SEQ ID NO: 1912732 - RNA, 19 nt, Artificial Sequence
  Description of Artificial Sequence: Synthetic oligonucleotide
uccuuagucacagcuccuu

SEQ ID NO: 1912733 - RNA, 19 nt, Artificial Sequence
  Description of Artificial Sequence: Synthetic oligonucleotide
gcugugaacuaaagacgcg

SEQ ID NO: 1912734 - RNA, 19 nt, Artificial Sequence
  Description of Artificial Sequence: Synthetic oligonucleotide
uggacucacuaucgucauc

SEQ ID NO: 1912735 - RNA, 19 nt, Artificial Sequence
  Description of Artificial Sequence: Synthetic oligonucleotide
ucacaaugucgcuguugaa

SEQ ID NO: 1912736 - RNA, 19 nt, Artificial Sequence
  Description of Artificial Sequence: Synthetic oligonucleotide
gaggaguuggacucacuau

SEQ ID NO: 1912737 - RNA, 19 nt, Artificial Sequence
  Description of Artificial Sequence: Synthetic oligonucleotide
aggccugcucuacggagga

SEQ ID NO: 1912738 - RNA, 19 nt, Artificial Sequence
  Description of Artificial Sequence: Synthetic oligonucleotide
cccgcugacuucgaaauag

SEQ ID NO: 1912739 - RNA, 19 nt, Artificial Sequence
  Description of Artificial Sequence: Synthetic oligonucleotide
guggaacgugaccaaaaua

SEQ ID NO: 1912740 - RNA, 19 nt, Artificial Sequence
  Description of Artificial Sequence: Synthetic oligonucleotide
cucuacggaggaguuggac

SEQ ID NO: 1912741 - RNA, 19 nt, Artificial Sequence
  Description of Artificial Sequence: Synthetic oligonucleotide
ggauaagccaccuccgagu

SEQ ID NO: 1912742 - RNA, 19 nt, Artificial Sequence
  Description of Artificial Sequence: Synthetic oligonucleotide
uuccucauuccugcaccca

SEQ ID NO: 1912743 - RNA, 19 nt, Artificial Sequence
  Description of Artificial Sequence: Synthetic oligonucleotide
ugggcaugcuuucgugcau

SEQ ID NO: 1912744 - RNA, 19 nt, Artificial Sequence
  Description of Artificial Sequence: Synthetic oligonucleotide
gugauaaugguuacuguuu

SEQ ID NO: 1912745 - RNA, 19 nt, Artificial Sequence
  Description of Artificial Sequence: Synthetic oligonucleotide
auagggccucgaacuuucc

SEQ ID NO: 1912746 - RNA, 19 nt, Artificial Sequence
  Description of Artificial Sequence: Synthetic oligonucleotide
cuaugauguucauucuggu

SEQ ID NO: 1912747 - RNA, 19 nt, Artificial Sequence
  Description of Artificial Sequence: Synthetic oligonucleotide
uguagagaucagggucgug

SEQ ID NO: 1912748 - RNA, 19 nt, Artificial Sequence
  Description of Artificial Sequence: Synthetic oligonucleotide
gucauacucgcuucuucua

SEQ ID NO: 1912749 - RNA, 19 nt, Artificial Sequence
  Description of Artificial Sequence: Synthetic oligonucleotide
ugucgcuguugaagcugug

SEQ ID NO: 1912750 - RNA, 19 nt, Artificial Sequence
  Description of Artificial Sequence: Synthetic oligonucleotide
ccucucgauaucuugggca

SEQ ID NO: 1912751 - RNA, 19 nt, Artificial Sequence
  Description of Artificial Sequence: Synthetic oligonucleotide
acagaggaggccugcucua

SEQ ID NO: 1912752 - RNA, 19 nt, Artificial Sequence
  Description of Artificial Sequence: Synthetic oligonucleotide
ggagugacauaguuggggu

SEQ ID NO: 1912753 - RNA, 19 nt, Artificial Sequence
  Description of Artificial Sequence: Synthetic oligonucleotide
caggauaagccaccuccga

SEQ ID NO: 1912754 - RNA, 19 nt, Artificial Sequence
  Description of Artificial Sequence: Synthetic oligonucleotide
ggucauacucgcuucuucu

SEQ ID NO: 1912755 - RNA, 19 nt, Artificial Sequence
  Description of Artificial Sequence: Synthetic oligonucleotide
cuuuguccuuuugcacacc

SEQ ID NO: 1912756 - RNA, 19 nt, Artificial Sequence
  Description of Artificial Sequence: Synthetic oligonucleotide
acccggucuaugauguuca

SEQ ID NO: 1912757 - RNA, 19 nt, Artificial Sequence
  Description of Artificial Sequence: Synthetic oligonucleotide
caucccgcugacuucgaaa

SEQ ID NO: 1912758 - RNA, 19 nt, Artificial Sequence
  Description of Artificial Sequence: Synthetic oligonucleotide
cuccgaguacucugggaca

SEQ ID NO: 1912759 - RNA, 19 nt, Artificial Sequence
  Description of Artificial Sequence: Synthetic oligonucleotide
augucgcuguugaagcugu

SEQ ID NO: 1912760 - RNA, 19 nt, Artificial Sequence
  Description of Artificial Sequence: Synthetic oligonucleotide
caccuccgaguacucuggg

SEQ ID NO: 1912761 - RNA, 19 nt, Artificial Sequence
  Description of Artificial Sequence: Synthetic oligonucleotide
acuuccacacguagccaca

SEQ ID NO: 1912762 - RNA, 19 nt, Artificial Sequence
  Description of Artificial Sequence: Synthetic oligonucleotide
gucgcuguugaagcuguga

SEQ ID NO: 1912763 - RNA, 19 nt, Artificial Sequence
  Description of Artificial Sequence: Synthetic oligonucleotide
uugggcaaucuuuguccuu

SEQ ID NO: 1912764 - RNA, 19 nt, Artificial Sequence
  Description of Artificial Sequence: Synthetic oligonucleotide
ccaccuccgaguacucugg

SEQ ID NO: 1912765 - RNA, 19 nt, Artificial Sequence
  Description of Artificial Sequence: Synthetic oligonucleotide
gucguggaguguuggucca

SEQ ID NO: 1912766 - RNA, 19 nt, Artificial Sequence
  Description of Artificial Sequence: Synthetic oligonucleotide
cagugugauucggucuaag

SEQ ID NO: 1912767 - RNA, 19 nt, Artificial Sequence
  Description of Artificial Sequence: Synthetic oligonucleotide
agagguguucauacauuuu

SEQ ID NO: 1912768 - RNA, 19 nt, Artificial Sequence
  Description of Artificial Sequence: Synthetic oligonucleotide
agguggaacgugaccaaaa

SEQ ID NO: 1912769 - RNA, 19 nt, Artificial Sequence
  Description of Artificial Sequence: Synthetic oligonucleotide
guguaucagccucucgaua

SEQ ID NO: 1912770 - RNA, 19 nt, Artificial Sequence
  Description of Artificial Sequence: Synthetic oligonucleotide
ggguuaucuaggucauaca

SEQ ID NO: 1912771 - RNA, 19 nt, Artificial Sequence
  Description of Artificial Sequence: Synthetic oligonucleotide
cuggggucuuaauuuguua

SEQ ID NO: 1912772 - RNA, 19 nt, Artificial Sequence
  Description of Artificial Sequence: Synthetic oligonucleotide
ccucauuccugcacccaag

SEQ ID NO: 1912773 - RNA, 19 nt, Artificial Sequence
  Description of Artificial Sequence: Synthetic oligonucleotide
ucucgauaucuugggcaau

SEQ ID NO: 1912774 - RNA, 19 nt, Artificial Sequence
  Description of Artificial Sequence: Synthetic oligonucleotide
cucugggacagacuuuugu

SEQ ID NO: 1912775 - RNA, 19 nt, Artificial Sequence
  Description of Artificial Sequence: Synthetic oligonucleotide
ucccgcugacuucgaaaua

SEQ ID NO: 1912776 - RNA, 19 nt, Artificial Sequence
  Description of Artificial Sequence: Synthetic oligonucleotide
cuaaagacgcgguucuguu

SEQ ID NO: 1912777 - RNA, 19 nt, Artificial Sequence
  Description of Artificial Sequence: Synthetic oligonucleotide
acguagccacaugugggca

SEQ ID NO: 1912778 - RNA, 19 nt, Artificial Sequence
  Description of Artificial Sequence: Synthetic oligonucleotide
ccgaguucagaaugagguc

SEQ ID NO: 1912779 - RNA, 19 nt, Artificial Sequence
  Description of Artificial Sequence: Synthetic oligonucleotide
ccucuccuuuaggagaugc

SEQ ID NO: 1912780 - RNA, 19 nt, Artificial Sequence
  Description of Artificial Sequence: Synthetic oligonucleotide
cauacucgcuucuucuaau

SEQ ID NO: 1912781 - RNA, 19 nt, Artificial Sequence
  Description of Artificial Sequence: Synthetic oligonucleotide
ccacacguagccacaugug

SEQ ID NO: 1912782 - RNA, 19 nt, Artificial Sequence
  Description of Artificial Sequence: Synthetic oligonucleotide
gccuuucuagaaugggcuc

SEQ ID NO: 1912783 - RNA, 19 nt, Artificial Sequence
  Description of Artificial Sequence: Synthetic oligonucleotide
gagguggaacgugaccaaa

SEQ ID NO: 1912784 - RNA, 19 nt, Artificial Sequence
  Description of Artificial Sequence: Synthetic oligonucleotide
guacuuccacacguagcca

SEQ ID NO: 1912785 - RNA, 19 nt, Artificial Sequence
  Description of Artificial Sequence: Synthetic oligonucleotide
gccucucgauaucuugggc

SEQ ID NO: 1912786 - RNA, 19 nt, Artificial Sequence
  Description of Artificial Sequence: Synthetic oligonucleotide
gugaacuaaagacgcgguu

SEQ ID NO: 1912787 - RNA, 19 nt, Artificial Sequence
  Description of Artificial Sequence: Synthetic oligonucleotide
gugagaggcagaccauagu

SEQ ID NO: 1912788 - RNA, 19 nt, Artificial Sequence
  Description of Artificial Sequence: Synthetic oligonucleotide
gaccauaguccuuccucau

SEQ ID NO: 1912789 - RNA, 19 nt, Artificial Sequence
  Description of Artificial Sequence: Synthetic oligonucleotide
ugacauaguugggguuauc

SEQ ID NO: 1912790 - RNA, 19 nt, Artificial Sequence
  Description of Artificial Sequence: Synthetic oligonucleotide
acgcagauucccagauuca

SEQ ID NO: 1912791 - RNA, 19 nt, Artificial Sequence
  Description of Artificial Sequence: Synthetic oligonucleotide
cuacuugugaaggaauguu

SEQ ID NO: 1912792 - RNA, 19 nt, Artificial Sequence
  Description of Artificial Sequence: Synthetic oligonucleotide
ucugaccaccuggcugcug

SEQ ID NO: 1912793 - RNA, 19 nt, Artificial Sequence
  Description of Artificial Sequence: Synthetic oligonucleotide
ccucaaacacaaaagguuu

SEQ ID NO: 1912794 - RNA, 19 nt, Artificial Sequence
  Description of Artificial Sequence: Synthetic oligonucleotide
ggccuuucuagaaugggcu

SEQ ID NO: 1912795 - RNA, 19 nt, Artificial Sequence
  Description of Artificial Sequence: Synthetic oligonucleotide
ccauaaggccuuucuagaa

SEQ ID NO: 1912796 - RNA, 19 nt, Artificial Sequence
  Description of Artificial Sequence: Synthetic oligonucleotide
gagugacauaguugggguu

SEQ ID NO: 1912797 - RNA, 19 nt, Artificial Sequence
  Description of Artificial Sequence: Synthetic oligonucleotide
gguguaucagccucucgau

SEQ ID NO: 1912798 - RNA, 19 nt, Artificial Sequence
  Description of Artificial Sequence: Synthetic oligonucleotide
agacgcgguucuguucuga

SEQ ID NO: 1912799 - RNA, 19 nt, Artificial Sequence
  Description of Artificial Sequence: Synthetic oligonucleotide
acaaaagguuuugguucuu

SEQ ID NO: 1912800 - RNA, 19 nt, Artificial Sequence
  Description of Artificial Sequence: Synthetic oligonucleotide
cgcgguucuguucugacca

SEQ ID NO: 1912801 - RNA, 19 nt, Artificial Sequence
  Description of Artificial Sequence: Synthetic oligonucleotide
gguggaacgugaccaaaau

SEQ ID NO: 1912802 - RNA, 19 nt, Artificial Sequence
  Description of Artificial Sequence: Synthetic oligonucleotide
ccgcuccaguacaacacag

SEQ ID NO: 1912803 - RNA, 19 nt, Artificial Sequence
  Description of Artificial Sequence: Synthetic oligonucleotide
gccuucacaaugucgcugu

SEQ ID NO: 1912804 - RNA, 19 nt, Artificial Sequence
  Description of Artificial Sequence: Synthetic oligonucleotide
gaaugaggucauacucgcu

SEQ ID NO: 1912805 - RNA, 19 nt, Artificial Sequence
  Description of Artificial Sequence: Synthetic oligonucleotide
gacucacuaucgucaucgu

SEQ ID NO: 1912806 - RNA, 19 nt, Artificial Sequence
  Description of Artificial Sequence: Synthetic oligonucleotide
cgcuccaguacaacacagc

SEQ ID NO: 1912807 - RNA, 19 nt, Artificial Sequence
  Description of Artificial Sequence: Synthetic oligonucleotide
agcucaggaaagagguguu

SEQ ID NO: 1912808 - RNA, 19 nt, Artificial Sequence
  Description of Artificial Sequence: Synthetic oligonucleotide
cauacauuacccggucuau

SEQ ID NO: 1912809 - RNA, 19 nt, Artificial Sequence
  Description of Artificial Sequence: Synthetic oligonucleotide
ggagguggaacgugaccaa

SEQ ID NO: 1912810 - RNA, 19 nt, Artificial Sequence
  Description of Artificial Sequence: Synthetic oligonucleotide
ggucuaugauguucauucu

SEQ ID NO: 1912811 - RNA, 19 nt, Artificial Sequence
  Description of Artificial Sequence: Synthetic oligonucleotide
ggggucuuaauuuguuaau

SEQ ID NO: 1912812 - RNA, 19 nt, Artificial Sequence
  Description of Artificial Sequence: Synthetic oligonucleotide
gggcaugcuuucgugcaug

SEQ ID NO: 1912813 - RNA, 19 nt, Artificial Sequence
  Description of Artificial Sequence: Synthetic oligonucleotide
gcuacuugugaaggaaugu

SEQ ID NO: 1912814 - RNA, 19 nt, Artificial Sequence
  Description of Artificial Sequence: Synthetic oligonucleotide
uucugaccaccuggcugcu

SEQ ID NO: 1912815 - RNA, 19 nt, Artificial Sequence
  Description of Artificial Sequence: Synthetic oligonucleotide
ccgcaucccgcugacuucg

SEQ ID NO: 1912816 - RNA, 19 nt, Artificial Sequence
  Description of Artificial Sequence: Synthetic oligonucleotide
gccucgaacuuuccccuca

SEQ ID NO: 1912817 - RNA, 19 nt, Artificial Sequence
  Description of Artificial Sequence: Synthetic oligonucleotide
cuccaguacaacacagcuu

SEQ ID NO: 1912818 - RNA, 19 nt, Artificial Sequence
  Description of Artificial Sequence: Synthetic oligonucleotide
gauguucauucugguguau

SEQ ID NO: 1912819 - RNA, 19 nt, Artificial Sequence
  Description of Artificial Sequence: Synthetic oligonucleotide
cagcuucccaagcuguacu

SEQ ID NO: 1912820 - RNA, 19 nt, Artificial Sequence
  Description of Artificial Sequence: Synthetic oligonucleotide
gcaugcuuucgugcaugag

SEQ ID NO: 1912821 - RNA, 19 nt, Artificial Sequence
  Description of Artificial Sequence: Synthetic oligonucleotide
cagugagaggcagaccaua

SEQ ID NO: 1912822 - RNA, 19 nt, Artificial Sequence
  Description of Artificial Sequence: Synthetic oligonucleotide
gcaugagacgacagugaga

SEQ ID NO: 1912823 - RNA, 19 nt, Artificial Sequence
  Description of Artificial Sequence: Synthetic oligonucleotide
ucguggaguguugguccau

SEQ ID NO: 1912824 - RNA, 19 nt, Artificial Sequence
  Description of Artificial Sequence: Synthetic oligonucleotide
ugggguuaucuaggucaua

SEQ ID NO: 1912825 - RNA, 19 nt, Artificial Sequence
  Description of Artificial Sequence: Synthetic oligonucleotide
ggaacgugaccaaaauaau

SEQ ID NO: 1912826 - RNA, 19 nt, Artificial Sequence
  Description of Artificial Sequence: Synthetic oligonucleotide
cccaagcuguacuguccgc

SEQ ID NO: 1912827 - RNA, 19 nt, Artificial Sequence
  Description of Artificial Sequence: Synthetic oligonucleotide
ggacaacaauagggccucg

SEQ ID NO: 1912828 - RNA, 19 nt, Artificial Sequence
  Description of Artificial Sequence: Synthetic oligonucleotide
gaauucccagacgcuuccu

SEQ ID NO: 1912829 - RNA, 19 nt, Artificial Sequence
  Description of Artificial Sequence: Synthetic oligonucleotide
cuucgguuuccgcuccagu

SEQ ID NO: 1912830 - RNA, 19 nt, Artificial Sequence
  Description of Artificial Sequence: Synthetic oligonucleotide
ggucuaaggccuucacaau

SEQ ID NO: 1912831 - RNA, 19 nt, Artificial Sequence
  Description of Artificial Sequence: Synthetic oligonucleotide
ggcuuccacagaggaggcc

SEQ ID NO: 1912832 - RNA, 19 nt, Artificial Sequence
  Description of Artificial Sequence: Synthetic oligonucleotide
gcgguucuguucugaccac

SEQ ID NO: 1912833 - RNA, 19 nt, Artificial Sequence
  Description of Artificial Sequence: Synthetic oligonucleotide
cuguucugaccaccuggcu

SEQ ID NO: 1912834 - RNA, 19 nt, Artificial Sequence
  Description of Artificial Sequence: Synthetic oligonucleotide
gccgcaucccgcugacuuc

SEQ ID NO: 1912835 - RNA, 19 nt, Artificial Sequence
  Description of Artificial Sequence: Synthetic oligonucleotide
gaggucauacucgcuucuu

SEQ ID NO: 1912836 - RNA, 19 nt, Artificial Sequence
  Description of Artificial Sequence: Synthetic oligonucleotide
gggccucgaacuuuccccu

SEQ ID NO: 1912837 - RNA, 19 nt, Artificial Sequence
  Description of Artificial Sequence: Synthetic oligonucleotide
cgucuucgguuuccgcucc

SEQ ID NO: 1912838 - RNA, 19 nt, Artificial Sequence
  Description of Artificial Sequence: Synthetic oligonucleotide
cugguacuugcuggggucu

SEQ ID NO: 1912839 - RNA, 19 nt, Artificial Sequence
  Description of Artificial Sequence: Synthetic oligonucleotide
ccuuucuagaaugggcucu

SEQ ID NO: 1912840 - RNA, 19 nt, Artificial Sequence
  Description of Artificial Sequence: Synthetic oligonucleotide
ggccgcaucccgcugacuu

SEQ ID NO: 1912841 - RNA, 19 nt, Artificial Sequence
  Description of Artificial Sequence: Synthetic oligonucleotide
gaucagggucguggagugu

SEQ ID NO: 1912842 - RNA, 19 nt, Artificial Sequence
  Description of Artificial Sequence: Synthetic oligonucleotide
gggacagacuuuugugguu

SEQ ID NO: 1912843 - RNA, 19 nt, Artificial Sequence
  Description of Artificial Sequence: Synthetic oligonucleotide
cgguucuguucugaccacc

SEQ ID NO: 1912844 - RNA, 19 nt, Artificial Sequence
  Description of Artificial Sequence: Synthetic oligonucleotide
ccgcugacuucgaaauaga

SEQ ID NO: 1912845 - RNA, 19 nt, Artificial Sequence
  Description of Artificial Sequence: Synthetic oligonucleotide
gguuuccgcuccaguacaa

SEQ ID NO: 1912846 - RNA, 19 nt, Artificial Sequence
  Description of Artificial Sequence: Synthetic oligonucleotide
gcagaccauaguccuuccu

SEQ ID NO: 1912847 - RNA, 19 nt, Artificial Sequence
  Description of Artificial Sequence: Synthetic oligonucleotide
cgcugacuucgaaauagaa

SEQ ID NO: 1912848 - RNA, 19 nt, Artificial Sequence
  Description of Artificial Sequence: Synthetic oligonucleotide
ccugaauucccagacgcuu

SEQ ID NO: 1912849 - RNA, 19 nt, Artificial Sequence
  Description of Artificial Sequence: Synthetic oligonucleotide
cguggaguguugguccauc

SEQ ID NO: 1912850 - RNA, 19 nt, Artificial Sequence
  Description of Artificial Sequence: Synthetic oligonucleotide
gcaucccgcugacuucgaa

SEQ ID NO: 1912851 - RNA, 19 nt, Artificial Sequence
  Description of Artificial Sequence: Synthetic oligonucleotide
gggcuacuugugaaggaau

SEQ ID NO: 1912852 - RNA, 19 nt, Artificial Sequence
  Description of Artificial Sequence: Synthetic oligonucleotide
aggccgcaucccgcugacu

SEQ ID NO: 1912853 - RNA, 19 nt, Artificial Sequence
  Description of Artificial Sequence: Synthetic oligonucleotide
gcucuacggaggaguugga

SEQ ID NO: 1912854 - RNA, 19 nt, Artificial Sequence
  Description of Artificial Sequence: Synthetic oligonucleotide
gggcaaucuuuguccuuuu

SEQ ID NO: 1912855 - RNA, 19 nt, Artificial Sequence
  Description of Artificial Sequence: Synthetic oligonucleotide
cguagccacaugugggcau

SEQ ID NO: 1912856 - RNA, 19 nt, Artificial Sequence
  Description of Artificial Sequence: Synthetic oligonucleotide
ccgaguacucugggacaga

SEQ ID NO: 1912857 - RNA, 19 nt, Artificial Sequence
  Description of Artificial Sequence: Synthetic oligonucleotide
cgauaucuugggcaaucuu

SEQ ID NO: 1912858 - RNA, 19 nt, Artificial Sequence
  Description of Artificial Sequence: Synthetic oligonucleotide
ccggucuaugauguucauu

SEQ ID NO: 1912859 - RNA, 19 nt, Artificial Sequence
  Description of Artificial Sequence: Synthetic oligonucleotide
cccggucuaugauguucau

SEQ ID NO: 1912860 - RNA, 19 nt, Artificial Sequence
  Description of Artificial Sequence: Synthetic oligonucleotide
cgcaucccgcugacuucga

SEQ ID NO: 1912861 - RNA, 19 nt, Artificial Sequence
  Description of Artificial Sequence: Synthetic oligonucleotide
aagaaauacauuuacauuc

SEQ ID NO: 1912862 - RNA, 19 nt, Artificial Sequence
  Description of Artificial Sequence: Synthetic oligonucleotide
uuuuauuucagaauaccgg

SEQ ID NO: 1912863 - RNA, 19 nt, Artificial Sequence
  Description of Artificial Sequence: Synthetic oligonucleotide
ugauuaaaagguuacacgg

SEQ ID NO: 1912864 - RNA, 19 nt, Artificial Sequence
  Description of Artificial Sequence: Synthetic oligonucleotide
uagaaaauaauaauuagga

SEQ ID NO: 1912865 - RNA, 19 nt, Artificial Sequence
  Description of Artificial Sequence: Synthetic oligonucleotide
aaagguuacacgguuaugc

SEQ ID NO: 1912866 - RNA, 19 nt, Artificial Sequence
  Description of Artificial Sequence: Synthetic oligonucleotide
uuuauuucagaauaccggg

SEQ ID NO: 1912867 - RNA, 19 nt, Artificial Sequence
  Description of Artificial Sequence: Synthetic oligonucleotide
auggcuaacagucaugacc

SEQ ID NO: 1912868 - RNA, 19 nt, Artificial Sequence
  Description of Artificial Sequence: Synthetic oligonucleotide
uguucuuuaaaacggaaug

SEQ ID NO: 1912869 - RNA, 19 nt, Artificial Sequence
  Description of Artificial Sequence: Synthetic oligonucleotide
aaaaugugaacauauguau

SEQ ID NO: 1912870 - RNA, 19 nt, Artificial Sequence
  Description of Artificial Sequence: Synthetic oligonucleotide
acagucaugaccucugacc

SEQ ID NO: 1912871 - RNA, 19 nt, Artificial Sequence
  Description of Artificial Sequence: Synthetic oligonucleotide
cuuuuauuucagaauaccg

SEQ ID NO: 1912872 - RNA, 19 nt, Artificial Sequence
  Description of Artificial Sequence: Synthetic oligonucleotide
uuuuccagaucuaaaacca

SEQ ID NO: 1912873 - RNA, 19 nt, Artificial Sequence
  Description of Artificial Sequence: Synthetic oligonucleotide
aaugucagcaucgucauug

SEQ ID NO: 1912874 - RNA, 19 nt, Artificial Sequence
  Description of Artificial Sequence: Synthetic oligonucleotide
agcagcauaaucugaaaac

SEQ ID NO: 1912875 - RNA, 19 nt, Artificial Sequence
  Description of Artificial Sequence: Synthetic oligonucleotide
ggugauuuaacuuacgagc

SEQ ID NO: 1912876 - RNA, 19 nt, Artificial Sequence
  Description of Artificial Sequence: Synthetic oligonucleotide
agugauuaaaagguuacac

SEQ ID NO: 1912877 - RNA, 19 nt, Artificial Sequence
  Description of Artificial Sequence: Synthetic oligonucleotide
uaaaacggaaugugcaugg

SEQ ID NO: 1912878 - RNA, 19 nt, Artificial Sequence
  Description of Artificial Sequence: Synthetic oligonucleotide
gugauuaaaagguuacacg

SEQ ID NO: 1912879 - RNA, 19 nt, Artificial Sequence
  Description of Artificial Sequence: Synthetic oligonucleotide
auuccaaagcauuuuauug

SEQ ID NO: 1912880 - RNA, 19 nt, Artificial Sequence
  Description of Artificial Sequence: Synthetic oligonucleotide
ugugaacauauguaugugg

SEQ ID NO: 1912881 - RNA, 19 nt, Artificial Sequence
  Description of Artificial Sequence: Synthetic oligonucleotide
uaacuuacgagcuucaguc

SEQ ID NO: 1912882 - RNA, 19 nt, Artificial Sequence
  Description of Artificial Sequence: Synthetic oligonucleotide
ucuuuaaaacggaaugugc

SEQ ID NO: 1912883 - RNA, 19 nt, Artificial Sequence
  Description of Artificial Sequence: Synthetic oligonucleotide
uauuucagaauaccgggug

SEQ ID NO: 1912884 - RNA, 19 nt, Artificial Sequence
  Description of Artificial Sequence: Synthetic oligonucleotide
uuugcaggcaacuuaaguc

SEQ ID NO: 1912885 - RNA, 19 nt, Artificial Sequence
  Description of Artificial Sequence: Synthetic oligonucleotide
uccaugucagguuugaucu

SEQ ID NO: 1912886 - RNA, 19 nt, Artificial Sequence
  Description of Artificial Sequence: Synthetic oligonucleotide
ucagcaucgucauuguagg

SEQ ID NO: 1912887 - RNA, 19 nt, Artificial Sequence
  Description of Artificial Sequence: Synthetic oligonucleotide
uaaucugaaaaccccaagu

SEQ ID NO: 1912888 - RNA, 19 nt, Artificial Sequence
  Description of Artificial Sequence: Synthetic oligonucleotide
uuuccugugaggaaggcac

SEQ ID NO: 1912889 - RNA, 19 nt, Artificial Sequence
  Description of Artificial Sequence: Synthetic oligonucleotide
ucaagcacgaaaaugugaa

SEQ ID NO: 1912890 - RNA, 19 nt, Artificial Sequence
  Description of Artificial Sequence: Synthetic oligonucleotide
uccagaucuaaaaccaucc

SEQ ID NO: 1912891 - RNA, 19 nt, Artificial Sequence
  Description of Artificial Sequence: Synthetic oligonucleotide
aacuuacgagcuucagucc

SEQ ID NO: 1912892 - RNA, 19 nt, Artificial Sequence
  Description of Artificial Sequence: Synthetic oligonucleotide
ucguucauaacuuuccaug

SEQ ID NO: 1912893 - RNA, 19 nt, Artificial Sequence
  Description of Artificial Sequence: Synthetic oligonucleotide
aacaacaucacuacaagaa

SEQ ID NO: 1912894 - RNA, 19 nt, Artificial Sequence
  Description of Artificial Sequence: Synthetic oligonucleotide
gaacauauguaugugggag

SEQ ID NO: 1912895 - RNA, 19 nt, Artificial Sequence
  Description of Artificial Sequence: Synthetic oligonucleotide
uucaguccgcuucagaugc

SEQ ID NO: 1912896 - RNA, 19 nt, Artificial Sequence
  Description of Artificial Sequence: Synthetic oligonucleotide
uuccugaugacacccaaag

SEQ ID NO: 1912897 - RNA, 19 nt, Artificial Sequence
  Description of Artificial Sequence: Synthetic oligonucleotide
agcauaaucugaaaacccc

SEQ ID NO: 1912898 - RNA, 19 nt, Artificial Sequence
  Description of Artificial Sequence: Synthetic oligonucleotide
uggugauuuaacuuacgag

SEQ ID NO: 1912899 - RNA, 19 nt, Artificial Sequence
  Description of Artificial Sequence: Synthetic oligonucleotide
uuaugcacauuuacaauac

SEQ ID NO: 1912900 - RNA, 19 nt, Artificial Sequence
  Description of Artificial Sequence: Synthetic oligonucleotide
aaaaccauccugucaauuu

SEQ ID NO: 1912901 - RNA, 19 nt, Artificial Sequence
  Description of Artificial Sequence: Synthetic oligonucleotide
uggcuaacagucaugaccu

SEQ ID NO: 1912902 - RNA, 19 nt, Artificial Sequence
  Description of Artificial Sequence: Synthetic oligonucleotide
uuaacuuacgagcuucagu

SEQ ID NO: 1912903 - RNA, 19 nt, Artificial Sequence
  Description of Artificial Sequence: Synthetic oligonucleotide
acuuacgagcuucaguccg

SEQ ID NO: 1912904 - RNA, 19 nt, Artificial Sequence
  Description of Artificial Sequence: Synthetic oligonucleotide
aagacuguuggaugucggg

SEQ ID NO: 1912905 - RNA, 19 nt, Artificial Sequence
  Description of Artificial Sequence: Synthetic oligonucleotide
aaacaacaucacuacaaga

SEQ ID NO: 1912906 - RNA, 19 nt, Artificial Sequence
  Description of Artificial Sequence: Synthetic oligonucleotide
guguacuucccguagaacc

SEQ ID NO: 1912907 - RNA, 19 nt, Artificial Sequence
  Description of Artificial Sequence: Synthetic oligonucleotide
cuuuaaaacggaaugugca

SEQ ID NO: 1912908 - RNA, 19 nt, Artificial Sequence
  Description of Artificial Sequence: Synthetic oligonucleotide
ucauaacuuuccaugucag

SEQ ID NO: 1912909 - RNA, 19 nt, Artificial Sequence
  Description of Artificial Sequence: Synthetic oligonucleotide
aaaaccccaagucaggguu

SEQ ID NO: 1912910 - RNA, 19 nt, Artificial Sequence
  Description of Artificial Sequence: Synthetic oligonucleotide
uuacaauacauagaaaaua

SEQ ID NO: 1912911 - RNA, 19 nt, Artificial Sequence
  Description of Artificial Sequence: Synthetic oligonucleotide
ugcgcugaucuccagaagc

SEQ ID NO: 1912912 - RNA, 19 nt, Artificial Sequence
  Description of Artificial Sequence: Synthetic oligonucleotide
gugaacauauguauguggg

SEQ ID NO: 1912913 - RNA, 19 nt, Artificial Sequence
  Description of Artificial Sequence: Synthetic oligonucleotide
uguuucucuguccucaccu

SEQ ID NO: 1912914 - RNA, 19 nt, Artificial Sequence
  Description of Artificial Sequence: Synthetic oligonucleotide
caagugauuaaaagguuac

SEQ ID NO: 1912915 - RNA, 19 nt, Artificial Sequence
  Description of Artificial Sequence: Synthetic oligonucleotide
aaaugugaacauauguaug

SEQ ID NO: 1912916 - RNA, 19 nt, Artificial Sequence
  Description of Artificial Sequence: Synthetic oligonucleotide
uuuaaaacggaaugugcau

SEQ ID NO: 1912917 - RNA, 19 nt, Artificial Sequence
  Description of Artificial Sequence: Synthetic oligonucleotide
aacauauguaugugggagu

SEQ ID NO: 1912918 - RNA, 19 nt, Artificial Sequence
  Description of Artificial Sequence: Synthetic oligonucleotide
aagcacgaaaaugugaaca

SEQ ID NO: 1912919 - RNA, 19 nt, Artificial Sequence
  Description of Artificial Sequence: Synthetic oligonucleotide
cacacgaaccaucuaagcc

SEQ ID NO: 1912920 - RNA, 19 nt, Artificial Sequence
  Description of Artificial Sequence: Synthetic oligonucleotide
ugucaauuuccugugagga

SEQ ID NO: 1912921 - RNA, 19 nt, Artificial Sequence
  Description of Artificial Sequence: Synthetic oligonucleotide
agaucuaaaaccauccugu

SEQ ID NO: 1912922 - RNA, 19 nt, Artificial Sequence
  Description of Artificial Sequence: Synthetic oligonucleotide
uuaaaacggaaugugcaug

SEQ ID NO: 1912923 - RNA, 19 nt, Artificial Sequence
  Description of Artificial Sequence: Synthetic oligonucleotide
uccaaacgcgcuuucuugg

SEQ ID NO: 1912924 - RNA, 19 nt, Artificial Sequence
  Description of Artificial Sequence: Synthetic oligonucleotide
ugcacauuuacaauacaua

SEQ ID NO: 1912925 - RNA, 19 nt, Artificial Sequence
  Description of Artificial Sequence: Synthetic oligonucleotide
uucaagcacgaaaauguga

SEQ ID NO: 1912926 - RNA, 19 nt, Artificial Sequence
  Description of Artificial Sequence: Synthetic oligonucleotide
guagcuucuguccacuucc

SEQ ID NO: 1912927 - RNA, 19 nt, Artificial Sequence
  Description of Artificial Sequence: Synthetic oligonucleotide
acacacgaaccaucuaagc

SEQ ID NO: 1912928 - RNA, 19 nt, Artificial Sequence
  Description of Artificial Sequence: Synthetic oligonucleotide
uaugugggagugaagcuga

SEQ ID NO: 1912929 - RNA, 19 nt, Artificial Sequence
  Description of Artificial Sequence: Synthetic oligonucleotide
ugccagaaccccaggagcg

SEQ ID NO: 1912930 - RNA, 19 nt, Artificial Sequence
  Description of Artificial Sequence: Synthetic oligonucleotide
uuauuucagaauaccgggu

SEQ ID NO: 1912931 - RNA, 19 nt, Artificial Sequence
  Description of Artificial Sequence: Synthetic oligonucleotide
uacacgguuaugcacauuu

SEQ ID NO: 1912932 - RNA, 19 nt, Artificial Sequence
  Description of Artificial Sequence: Synthetic oligonucleotide
ucuguccacuuccugauga

SEQ ID NO: 1912933 - RNA, 19 nt, Artificial Sequence
  Description of Artificial Sequence: Synthetic oligonucleotide
gaaaaugugaacauaugua

SEQ ID NO: 1912934 - RNA, 19 nt, Artificial Sequence
  Description of Artificial Sequence: Synthetic oligonucleotide
aaaacggaaugugcauggc

SEQ ID NO: 1912935 - RNA, 19 nt, Artificial Sequence
  Description of Artificial Sequence: Synthetic oligonucleotide
ugaaaaccccaagucaggg

SEQ ID NO: 1912936 - RNA, 19 nt, Artificial Sequence
  Description of Artificial Sequence: Synthetic oligonucleotide
agcgacugcaccugcacac

SEQ ID NO: 1912937 - RNA, 19 nt, Artificial Sequence
  Description of Artificial Sequence: Synthetic oligonucleotide
ugcaccugcacacacgaac

SEQ ID NO: 1912938 - RNA, 19 nt, Artificial Sequence
  Description of Artificial Sequence: Synthetic oligonucleotide
cagcauaaucugaaaaccc

SEQ ID NO: 1912939 - RNA, 19 nt, Artificial Sequence
  Description of Artificial Sequence: Synthetic oligonucleotide
ucucccaucucucagcguc

SEQ ID NO: 1912940 - RNA, 19 nt, Artificial Sequence
  Description of Artificial Sequence: Synthetic oligonucleotide
acgagcuucaguccgcuuc

SEQ ID NO: 1912941 - RNA, 19 nt, Artificial Sequence
  Description of Artificial Sequence: Synthetic oligonucleotide
agguuacacgguuaugcac

SEQ ID NO: 1912942 - RNA, 19 nt, Artificial Sequence
  Description of Artificial Sequence: Synthetic oligonucleotide
aauuuccugugaggaaggc

SEQ ID NO: 1912943 - RNA, 19 nt, Artificial Sequence
  Description of Artificial Sequence: Synthetic oligonucleotide
aaccaucuaagccccaagu

SEQ ID NO: 1912944 - RNA, 19 nt, Artificial Sequence
  Description of Artificial Sequence: Synthetic oligonucleotide
gauuuaacuuacgagcuuc

SEQ ID NO: 1912945 - RNA, 19 nt, Artificial Sequence
  Description of Artificial Sequence: Synthetic oligonucleotide
cauucaagcacgaaaaugu

SEQ ID NO: 1912946 - RNA, 19 nt, Artificial Sequence
  Description of Artificial Sequence: Synthetic oligonucleotide
guuaugcacauuuacaaua

SEQ ID NO: 1912947 - RNA, 19 nt, Artificial Sequence
  Description of Artificial Sequence: Synthetic oligonucleotide
aacuuaagucuuuugucuu

SEQ ID NO: 1912948 - RNA, 19 nt, Artificial Sequence
  Description of Artificial Sequence: Synthetic oligonucleotide
ugaacauauguauguggga

SEQ ID NO: 1912949 - RNA, 19 nt, Artificial Sequence
  Description of Artificial Sequence: Synthetic oligonucleotide
cauaacuuuccaugucagg

SEQ ID NO: 1912950 - RNA, 19 nt, Artificial Sequence
  Description of Artificial Sequence: Synthetic oligonucleotide
cagucaugaccucugaccc

SEQ ID NO: 1912951 - RNA, 19 nt, Artificial Sequence
  Description of Artificial Sequence: Synthetic oligonucleotide
cugucguucauaacuuucc

SEQ ID NO: 1912952 - RNA, 19 nt, Artificial Sequence
  Description of Artificial Sequence: Synthetic oligonucleotide
cucgcagccgccauuacag

SEQ ID NO: 1912953 - RNA, 19 nt, Artificial Sequence
  Description of Artificial Sequence: Synthetic oligonucleotide
uguuccucucuccagguuc

SEQ ID NO: 1912954 - RNA, 19 nt, Artificial Sequence
  Description of Artificial Sequence: Synthetic oligonucleotide
aaugugcauggcuaacagu

SEQ ID NO: 1912955 - RNA, 19 nt, Artificial Sequence
  Description of Artificial Sequence: Synthetic oligonucleotide
uggagaagacuguuggaug

SEQ ID NO: 1912956 - RNA, 19 nt, Artificial Sequence
  Description of Artificial Sequence: Synthetic oligonucleotide
cuaacagucaugaccucug

SEQ ID NO: 1912957 - RNA, 19 nt, Artificial Sequence
  Description of Artificial Sequence: Synthetic oligonucleotide
agucaugaccucugacccc

SEQ ID NO: 1912958 - RNA, 19 nt, Artificial Sequence
  Description of Artificial Sequence: Synthetic oligonucleotide
ucugucguucauaacuuuc

SEQ ID NO: 1912959 - RNA, 19 nt, Artificial Sequence
  Description of Artificial Sequence: Synthetic oligonucleotide
gauuuauacaaauuagauu

SEQ ID NO: 1912960 - RNA, 19 nt, Artificial Sequence
  Description of Artificial Sequence: Synthetic oligonucleotide
uagucuuccccucucgcug

SEQ ID NO: 1912961 - RNA, 19 nt, Artificial Sequence
  Description of Artificial Sequence: Synthetic oligonucleotide
uuucucguagucuuccccu

SEQ ID NO: 1912962 - RNA, 19 nt, Artificial Sequence
  Description of Artificial Sequence: Synthetic oligonucleotide
ucugcuguguacuucccgu

SEQ ID NO: 1912963 - RNA, 19 nt, Artificial Sequence
  Description of Artificial Sequence: Synthetic oligonucleotide
cugucaauuuccugugagg

SEQ ID NO: 1912964 - RNA, 19 nt, Artificial Sequence
  Description of Artificial Sequence: Synthetic oligonucleotide
guuugaucugcuuggucag

SEQ ID NO: 1912965 - RNA, 19 nt, Artificial Sequence
  Description of Artificial Sequence: Synthetic oligonucleotide
agccccaagugauuaaaag

SEQ ID NO: 1912966 - RNA, 19 nt, Artificial Sequence
  Description of Artificial Sequence: Synthetic oligonucleotide
uuccuggugauuuaacuua

SEQ ID NO: 1912967 - RNA, 19 nt, Artificial Sequence
  Description of Artificial Sequence: Synthetic oligonucleotide
ugucguucauaacuuucca

SEQ ID NO: 1912968 - RNA, 19 nt, Artificial Sequence
  Description of Artificial Sequence: Synthetic oligonucleotide
accaucuaagccccaagug

SEQ ID NO: 1912969 - RNA, 19 nt, Artificial Sequence
  Description of Artificial Sequence: Synthetic oligonucleotide
uguaugugggagugaagcu

SEQ ID NO: 1912970 - RNA, 19 nt, Artificial Sequence
  Description of Artificial Sequence: Synthetic oligonucleotide
uguugaacuuggcauuccu

SEQ ID NO: 1912971 - RNA, 19 nt, Artificial Sequence
  Description of Artificial Sequence: Synthetic oligonucleotide
acuggcguaacugggcagc

SEQ ID NO: 1912972 - RNA, 19 nt, Artificial Sequence
  Description of Artificial Sequence: Synthetic oligonucleotide
uaugcacauuuacaauaca

SEQ ID NO: 1912973 - RNA, 19 nt, Artificial Sequence
  Description of Artificial Sequence: Synthetic oligonucleotide
ugcuguguacuucccguag

SEQ ID NO: 1912974 - RNA, 19 nt, Artificial Sequence
  Description of Artificial Sequence: Synthetic oligonucleotide
gguuugaucugcuugguca

SEQ ID NO: 1912975 - RNA, 19 nt, Artificial Sequence
  Description of Artificial Sequence: Synthetic oligonucleotide
ggagcgucugucuugaggc

SEQ ID NO: 1912976 - RNA, 19 nt, Artificial Sequence
  Description of Artificial Sequence: Synthetic oligonucleotide
uucccguagaaccucucug

SEQ ID NO: 1912977 - RNA, 19 nt, Artificial Sequence
  Description of Artificial Sequence: Synthetic oligonucleotide
cauuguagggucgucuccg

SEQ ID NO: 1912978 - RNA, 19 nt, Artificial Sequence
  Description of Artificial Sequence: Synthetic oligonucleotide
gauacuggcguaacugggc

SEQ ID NO: 1912979 - RNA, 19 nt, Artificial Sequence
  Description of Artificial Sequence: Synthetic oligonucleotide
acauauguaugugggagug

SEQ ID NO: 1912980 - RNA, 19 nt, Artificial Sequence
  Description of Artificial Sequence: Synthetic oligonucleotide
ucccguagaaccucucugc

SEQ ID NO: 1912981 - RNA, 19 nt, Artificial Sequence
  Description of Artificial Sequence: Synthetic oligonucleotide
acaugugucccauggagaa

SEQ ID NO: 1912982 - RNA, 19 nt, Artificial Sequence
  Description of Artificial Sequence: Synthetic oligonucleotide
uguagggucgucuccggcu

SEQ ID NO: 1912983 - RNA, 19 nt, Artificial Sequence
  Description of Artificial Sequence: Synthetic oligonucleotide
uucucucugucguucauaa

SEQ ID NO: 1912984 - RNA, 19 nt, Artificial Sequence
  Description of Artificial Sequence: Synthetic oligonucleotide
uucagaugcagcucccgga

SEQ ID NO: 1912985 - RNA, 19 nt, Artificial Sequence
  Description of Artificial Sequence: Synthetic oligonucleotide
cucauugauguagucaaug

SEQ ID NO: 1912986 - RNA, 19 nt, Artificial Sequence
  Description of Artificial Sequence: Synthetic oligonucleotide
aacgcgcuuucuuggcuuc

SEQ ID NO: 1912987 - RNA, 19 nt, Artificial Sequence
  Description of Artificial Sequence: Synthetic oligonucleotide
aagugauuaaaagguuaca

SEQ ID NO: 1912988 - RNA, 19 nt, Artificial Sequence
  Description of Artificial Sequence: Synthetic oligonucleotide
ccaacuguagcuucugucc

SEQ ID NO: 1912989 - RNA, 19 nt, Artificial Sequence
  Description of Artificial Sequence: Synthetic oligonucleotide
uccggcuguauuugucucg

SEQ ID NO: 1912990 - RNA, 19 nt, Artificial Sequence
  Description of Artificial Sequence: Synthetic oligonucleotide
cacacacgaaccaucuaag

SEQ ID NO: 1912991 - RNA, 19 nt, Artificial Sequence
  Description of Artificial Sequence: Synthetic oligonucleotide
ucugcgcugaucuccagaa

SEQ ID NO: 1912992 - RNA, 19 nt, Artificial Sequence
  Description of Artificial Sequence: Synthetic oligonucleotide
cuucagaugcagcucccgg

SEQ ID NO: 1912993 - RNA, 19 nt, Artificial Sequence
  Description of Artificial Sequence: Synthetic oligonucleotide
agcauuuuauuguucuuua

SEQ ID NO: 1912994 - RNA, 19 nt, Artificial Sequence
  Description of Artificial Sequence: Synthetic oligonucleotide
caucacuacaagaaauaca

SEQ ID NO: 1912995 - RNA, 19 nt, Artificial Sequence
  Description of Artificial Sequence: Synthetic oligonucleotide
uguagcuucuguccacuuc

SEQ ID NO: 1912996 - RNA, 19 nt, Artificial Sequence
  Description of Artificial Sequence: Synthetic oligonucleotide
caugucagguuugaucugc

SEQ ID NO: 1912997 - RNA, 19 nt, Artificial Sequence
  Description of Artificial Sequence: Synthetic oligonucleotide
gaagacuguuggaugucgg

SEQ ID NO: 1912998 - RNA, 19 nt, Artificial Sequence
  Description of Artificial Sequence: Synthetic oligonucleotide
uaacugggcagcagcauaa

SEQ ID NO: 1912999 - RNA, 19 nt, Artificial Sequence
  Description of Artificial Sequence: Synthetic oligonucleotide
aaaagguuacacgguuaug

SEQ ID NO: 1913000 - RNA, 19 nt, Artificial Sequence
  Description of Artificial Sequence: Synthetic oligonucleotide
guaugugggagugaagcug

SEQ ID NO: 1913001 - RNA, 19 nt, Artificial Sequence
  Description of Artificial Sequence: Synthetic oligonucleotide
uccuggugauuuaacuuac

SEQ ID NO: 1913002 - RNA, 19 nt, Artificial Sequence
  Description of Artificial Sequence: Synthetic oligonucleotide
aacuugcgcagucucugcu

SEQ ID NO: 1913003 - RNA, 19 nt, Artificial Sequence
  Description of Artificial Sequence: Synthetic oligonucleotide
acugcaccugcacacacga

SEQ ID NO: 1913004 - RNA, 19 nt, Artificial Sequence
  Description of Artificial Sequence: Synthetic oligonucleotide
gcaguucccacuccaaacg

SEQ ID NO: 1913005 - RNA, 19 nt, Artificial Sequence
  Description of Artificial Sequence: Synthetic oligonucleotide
ugauuuaacuuacgagcuu

SEQ ID NO: 1913006 - RNA, 19 nt, Artificial Sequence
  Description of Artificial Sequence: Synthetic oligonucleotide
ucucugucguucauaacuu

SEQ ID NO: 1913007 - RNA, 19 nt, Artificial Sequence
  Description of Artificial Sequence: Synthetic oligonucleotide
auuguagggucgucuccgg

SEQ ID NO: 1913008 - RNA, 19 nt, Artificial Sequence
  Description of Artificial Sequence: Synthetic oligonucleotide
agcaucgucauuguagggu

SEQ ID NO: 1913009 - RNA, 19 nt, Artificial Sequence
  Description of Artificial Sequence: Synthetic oligonucleotide
cacuacaagaaauacauuu

SEQ ID NO: 1913010 - RNA, 19 nt, Artificial Sequence
  Description of Artificial Sequence: Synthetic oligonucleotide
gaaccaucuaagccccaag

SEQ ID NO: 1913011 - RNA, 19 nt, Artificial Sequence
  Description of Artificial Sequence: Synthetic oligonucleotide
ccugaugacacccaaagca

SEQ ID NO: 1913012 - RNA, 19 nt, Artificial Sequence
  Description of Artificial Sequence: Synthetic oligonucleotide
auauguaugugggagugaa

SEQ ID NO: 1913013 - RNA, 19 nt, Artificial Sequence
  Description of Artificial Sequence: Synthetic oligonucleotide
cuucaguccgcuucagaug

SEQ ID NO: 1913014 - RNA, 19 nt, Artificial Sequence
  Description of Artificial Sequence: Synthetic oligonucleotide
uuuccagaucuaaaaccau

SEQ ID NO: 1913015 - RNA, 19 nt, Artificial Sequence
  Description of Artificial Sequence: Synthetic oligonucleotide
uugaucugcuuggucagcc

SEQ ID NO: 1913016 - RNA, 19 nt, Artificial Sequence
  Description of Artificial Sequence: Synthetic oligonucleotide
ggugauacuggcguaacug

SEQ ID NO: 1913017 - RNA, 19 nt, Artificial Sequence
  Description of Artificial Sequence: Synthetic oligonucleotide
ucuccggcuguauuugucu

SEQ ID NO: 1913018 - RNA, 19 nt, Artificial Sequence
  Description of Artificial Sequence: Synthetic oligonucleotide
ccauggagaagacuguugg

SEQ ID NO: 1913019 - RNA, 19 nt, Artificial Sequence
  Description of Artificial Sequence: Synthetic oligonucleotide
uggcauuccucucauugau

SEQ ID NO: 1913020 - RNA, 19 nt, Artificial Sequence
  Description of Artificial Sequence: Synthetic oligonucleotide
gcagcauaaucugaaaacc

SEQ ID NO: 1913021 - RNA, 19 nt, Artificial Sequence
  Description of Artificial Sequence: Synthetic oligonucleotide
cuccaaacgcgcuuucuug

SEQ ID NO: 1913022 - RNA, 19 nt, Artificial Sequence
  Description of Artificial Sequence: Synthetic oligonucleotide
auacuggcguaacugggca

SEQ ID NO: 1913023 - RNA, 19 nt, Artificial Sequence
  Description of Artificial Sequence: Synthetic oligonucleotide
agguuugaucugcuugguc

SEQ ID NO: 1913024 - RNA, 19 nt, Artificial Sequence
  Description of Artificial Sequence: Synthetic oligonucleotide
guucauaacuuuccauguc

SEQ ID NO: 1913025 - RNA, 19 nt, Artificial Sequence
  Description of Artificial Sequence: Synthetic oligonucleotide
cacagugccagaaccccag

SEQ ID NO: 1913026 - RNA, 19 nt, Artificial Sequence
  Description of Artificial Sequence: Synthetic oligonucleotide
caacuuaagucuuuugucu

SEQ ID NO: 1913027 - RNA, 19 nt, Artificial Sequence
  Description of Artificial Sequence: Synthetic oligonucleotide
cauccugucaauuuccugu

SEQ ID NO: 1913028 - RNA, 19 nt, Artificial Sequence
  Description of Artificial Sequence: Synthetic oligonucleotide
gaugacacccaaagcagga

SEQ ID NO: 1913029 - RNA, 19 nt, Artificial Sequence
  Description of Artificial Sequence: Synthetic oligonucleotide
aaacgcgcuuucuuggcuu

SEQ ID NO: 1913030 - RNA, 19 nt, Artificial Sequence
  Description of Artificial Sequence: Synthetic oligonucleotide
gaaauacauuuacauucaa

SEQ ID NO: 1913031 - RNA, 19 nt, Artificial Sequence
  Description of Artificial Sequence: Synthetic oligonucleotide
cuggugauuuaacuuacga

SEQ ID NO: 1913032 - RNA, 19 nt, Artificial Sequence
  Description of Artificial Sequence: Synthetic oligonucleotide
aaaccccaagucaggguuc

SEQ ID NO: 1913033 - RNA, 19 nt, Artificial Sequence
  Description of Artificial Sequence: Synthetic oligonucleotide
gugccagaaccccaggagc

SEQ ID NO: 1913034 - RNA, 19 nt, Artificial Sequence
  Description of Artificial Sequence: Synthetic oligonucleotide
cucugcucgcgcuucugcg

SEQ ID NO: 1913035 - RNA, 19 nt, Artificial Sequence
  Description of Artificial Sequence: Synthetic oligonucleotide
gauuaaaagguuacacggu

SEQ ID NO: 1913036 - RNA, 19 nt, Artificial Sequence
  Description of Artificial Sequence: Synthetic oligonucleotide
auucaagcacgaaaaugug

SEQ ID NO: 1913037 - RNA, 19 nt, Artificial Sequence
  Description of Artificial Sequence: Synthetic oligonucleotide
gaacuugcgcagucucugc

SEQ ID NO: 1913038 - RNA, 19 nt, Artificial Sequence
  Description of Artificial Sequence: Synthetic oligonucleotide
caucgucauuguagggucg

SEQ ID NO: 1913039 - RNA, 19 nt, Artificial Sequence
  Description of Artificial Sequence: Synthetic oligonucleotide
gacuguuggaugucgggaa

SEQ ID NO: 1913040 - RNA, 19 nt, Artificial Sequence
  Description of Artificial Sequence: Synthetic oligonucleotide
acgguuaugcacauuuaca

SEQ ID NO: 1913041 - RNA, 19 nt, Artificial Sequence
  Description of Artificial Sequence: Synthetic oligonucleotide
agaauaccggguggggagg

SEQ ID NO: 1913042 - RNA, 19 nt, Artificial Sequence
  Description of Artificial Sequence: Synthetic oligonucleotide
gguuacacgguuaugcaca

SEQ ID NO: 1913043 - RNA, 19 nt, Artificial Sequence
  Description of Artificial Sequence: Synthetic oligonucleotide
cuuggucagccggugauac

SEQ ID NO: 1913044 - RNA, 19 nt, Artificial Sequence
  Description of Artificial Sequence: Synthetic oligonucleotide
acgaaaaugugaacauaug

SEQ ID NO: 1913045 - RNA, 19 nt, Artificial Sequence
  Description of Artificial Sequence: Synthetic oligonucleotide
caguucccacuccaaacgc

SEQ ID NO: 1913046 - RNA, 19 nt, Artificial Sequence
  Description of Artificial Sequence: Synthetic oligonucleotide
cacgaaaaugugaacauau

SEQ ID NO: 1913047 - RNA, 19 nt, Artificial Sequence
  Description of Artificial Sequence: Synthetic oligonucleotide
uuguagggucgucuccggc

SEQ ID NO: 1913048 - RNA, 19 nt, Artificial Sequence
  Description of Artificial Sequence: Synthetic oligonucleotide
ugcgcagucucugcucgcg

SEQ ID NO: 1913049 - RNA, 19 nt, Artificial Sequence
  Description of Artificial Sequence: Synthetic oligonucleotide
guucccacuccaaacgcgc

SEQ ID NO: 1913050 - RNA, 19 nt, Artificial Sequence
  Description of Artificial Sequence: Synthetic oligonucleotide
cucucagcguccucugcgc

SEQ ID NO: 1913051 - RNA, 19 nt, Artificial Sequence
  Description of Artificial Sequence: Synthetic oligonucleotide
gaagcuucacuuucucgua

SEQ ID NO: 1913052 - RNA, 19 nt, Artificial Sequence
  Description of Artificial Sequence: Synthetic oligonucleotide
agacuguuggaugucggga

SEQ ID NO: 1913053 - RNA, 19 nt, Artificial Sequence
  Description of Artificial Sequence: Synthetic oligonucleotide
gaauaccggguggggaggg

SEQ ID NO: 1913054 - RNA, 19 nt, Artificial Sequence
  Description of Artificial Sequence: Synthetic oligonucleotide
guagggucgucuccggcug

SEQ ID NO: 1913055 - RNA, 19 nt, Artificial Sequence
  Description of Artificial Sequence: Synthetic oligonucleotide
acuccaaacgcgcuuucuu

SEQ ID NO: 1913056 - RNA, 19 nt, Artificial Sequence
  Description of Artificial Sequence: Synthetic oligonucleotide
auuuccugugaggaaggca

SEQ ID NO: 1913057 - RNA, 19 nt, Artificial Sequence
  Description of Artificial Sequence: Synthetic oligonucleotide
caguuugcaggcaacuuaa

SEQ ID NO: 1913058 - RNA, 19 nt, Artificial Sequence
  Description of Artificial Sequence: Synthetic oligonucleotide
ucacuacaagaaauacauu

SEQ ID NO: 1913059 - RNA, 19 nt, Artificial Sequence
  Description of Artificial Sequence: Synthetic oligonucleotide
uuguugaacuuggcauucc

SEQ ID NO: 1913060 - RNA, 19 nt, Artificial Sequence
  Description of Artificial Sequence: Synthetic oligonucleotide
ggcaacuuaagucuuuugu

SEQ ID NO: 1913061 - RNA, 19 nt, Artificial Sequence
  Description of Artificial Sequence: Synthetic oligonucleotide
ggcguaacugggcagcagc

SEQ ID NO: 1913062 - RNA, 19 nt, Artificial Sequence
  Description of Artificial Sequence: Synthetic oligonucleotide
ucugcuuggucagccggug

SEQ ID NO: 1913063 - RNA, 19 nt, Artificial Sequence
  Description of Artificial Sequence: Synthetic oligonucleotide
ccugucaauuuccugugag

SEQ ID NO: 1913064 - RNA, 19 nt, Artificial Sequence
  Description of Artificial Sequence: Synthetic oligonucleotide
ggauuuauacaaauuagau

SEQ ID NO: 1913065 - RNA, 19 nt, Artificial Sequence
  Description of Artificial Sequence: Synthetic oligonucleotide
acagugccagaaccccagg

SEQ ID NO: 1913066 - RNA, 19 nt, Artificial Sequence
  Description of Artificial Sequence: Synthetic oligonucleotide
ugcaggcaacuuaagucuu

SEQ ID NO: 1913067 - RNA, 19 nt, Artificial Sequence
  Description of Artificial Sequence: Synthetic oligonucleotide
aaggcacaugugucccaug

SEQ ID NO: 1913068 - RNA, 19 nt, Artificial Sequence
  Description of Artificial Sequence: Synthetic oligonucleotide
aggcaacuuaagucuuuug

SEQ ID NO: 1913069 - RNA, 19 nt, Artificial Sequence
  Description of Artificial Sequence: Synthetic oligonucleotide
ucagcguccucugcgcuga

SEQ ID NO: 1913070 - RNA, 19 nt, Artificial Sequence
  Description of Artificial Sequence: Synthetic oligonucleotide
ucgucuccggcuguauuug

SEQ ID NO: 1913071 - RNA, 19 nt, Artificial Sequence
  Description of Artificial Sequence: Synthetic oligonucleotide
acaacuuccuggugauuua

SEQ ID NO: 1913072 - RNA, 19 nt, Artificial Sequence
  Description of Artificial Sequence: Synthetic oligonucleotide
ggaacuugcgcagucucug

SEQ ID NO: 1913073 - RNA, 19 nt, Artificial Sequence
  Description of Artificial Sequence: Synthetic oligonucleotide
acggaaugugcauggcuaa

SEQ ID NO: 1913074 - RNA, 19 nt, Artificial Sequence
  Description of Artificial Sequence: Synthetic oligonucleotide
caacuguagcuucugucca

SEQ ID NO: 1913075 - RNA, 19 nt, Artificial Sequence
  Description of Artificial Sequence: Synthetic oligonucleotide
cauggagaagacuguugga

SEQ ID NO: 1913076 - RNA, 19 nt, Artificial Sequence
  Description of Artificial Sequence: Synthetic oligonucleotide
gaaaaccccaagucagggu

SEQ ID NO: 1913077 - RNA, 19 nt, Artificial Sequence
  Description of Artificial Sequence: Synthetic oligonucleotide
gagcgucugucuugaggcc

SEQ ID NO: 1913078 - RNA, 19 nt, Artificial Sequence
  Description of Artificial Sequence: Synthetic oligonucleotide
gcacacacgaaccaucuaa

SEQ ID NO: 1913079 - RNA, 19 nt, Artificial Sequence
  Description of Artificial Sequence: Synthetic oligonucleotide
guccgagcccaacuguagc

SEQ ID NO: 1913080 - RNA, 19 nt, Artificial Sequence
  Description of Artificial Sequence: Synthetic oligonucleotide
cagcaucgucauuguaggg

SEQ ID NO: 1913081 - RNA, 19 nt, Artificial Sequence
  Description of Artificial Sequence: Synthetic oligonucleotide
acuguagcuucuguccacu

SEQ ID NO: 1913082 - RNA, 19 nt, Artificial Sequence
  Description of Artificial Sequence: Synthetic oligonucleotide
ucucagcguccucugcgcu

SEQ ID NO: 1913083 - RNA, 19 nt, Artificial Sequence
  Description of Artificial Sequence: Synthetic oligonucleotide
ugugggagugaagcugaga

SEQ ID NO: 1913084 - RNA, 19 nt, Artificial Sequence
  Description of Artificial Sequence: Synthetic oligonucleotide
caucucucagcguccucug

SEQ ID NO: 1913085 - RNA, 19 nt, Artificial Sequence
  Description of Artificial Sequence: Synthetic oligonucleotide
cauuuacauucaagcacga

SEQ ID NO: 1913086 - RNA, 19 nt, Artificial Sequence
  Description of Artificial Sequence: Synthetic oligonucleotide
gcaucgucauuguaggguc

SEQ ID NO: 1913087 - RNA, 19 nt, Artificial Sequence
  Description of Artificial Sequence: Synthetic oligonucleotide
ggagaagacuguuggaugu

SEQ ID NO: 1913088 - RNA, 19 nt, Artificial Sequence
  Description of Artificial Sequence: Synthetic oligonucleotide
caucuaagccccaagugau

SEQ ID NO: 1913089 - RNA, 19 nt, Artificial Sequence
  Description of Artificial Sequence: Synthetic oligonucleotide
cugagaaaagacuuuuauu

SEQ ID NO: 1913090 - RNA, 19 nt, Artificial Sequence
  Description of Artificial Sequence: Synthetic oligonucleotide
cucagcguccucugcgcug

SEQ ID NO: 1913091 - RNA, 19 nt, Artificial Sequence
  Description of Artificial Sequence: Synthetic oligonucleotide
gagaagacuguuggauguc

SEQ ID NO: 1913092 - RNA, 19 nt, Artificial Sequence
  Description of Artificial Sequence: Synthetic oligonucleotide
aucgucauuguagggucgu

SEQ ID NO: 1913093 - RNA, 19 nt, Artificial Sequence
  Description of Artificial Sequence: Synthetic oligonucleotide
aguccgagcccaacuguag

SEQ ID NO: 1913094 - RNA, 19 nt, Artificial Sequence
  Description of Artificial Sequence: Synthetic oligonucleotide
uagaaccucucugcuuucu

SEQ ID NO: 1913095 - RNA, 19 nt, Artificial Sequence
  Description of Artificial Sequence: Synthetic oligonucleotide
uuacgagcuucaguccgcu

SEQ ID NO: 1913096 - RNA, 19 nt, Artificial Sequence
  Description of Artificial Sequence: Synthetic oligonucleotide
cagcagcauaaucugaaaa

SEQ ID NO: 1913097 - RNA, 19 nt, Artificial Sequence
  Description of Artificial Sequence: Synthetic oligonucleotide
auaccggguggggagggag

SEQ ID NO: 1913098 - RNA, 19 nt, Artificial Sequence
  Description of Artificial Sequence: Synthetic oligonucleotide
ugucagcaucgucauugua

SEQ ID NO: 1913099 - RNA, 19 nt, Artificial Sequence
  Description of Artificial Sequence: Synthetic oligonucleotide
agcuucaguccgcuucaga

SEQ ID NO: 1913100 - RNA, 19 nt, Artificial Sequence
  Description of Artificial Sequence: Synthetic oligonucleotide
aguuugcaggcaacuuaag

SEQ ID NO: 1913101 - RNA, 19 nt, Artificial Sequence
  Description of Artificial Sequence: Synthetic oligonucleotide
gucagccggugauacuggc

SEQ ID NO: 1913102 - RNA, 19 nt, Artificial Sequence
  Description of Artificial Sequence: Synthetic oligonucleotide
agcgucugucuugaggccu

SEQ ID NO: 1913103 - RNA, 19 nt, Artificial Sequence
  Description of Artificial Sequence: Synthetic oligonucleotide
cacccaaagcaggagcgac

SEQ ID NO: 1913104 - RNA, 19 nt, Artificial Sequence
  Description of Artificial Sequence: Synthetic oligonucleotide
ccuggugauuuaacuuacg

SEQ ID NO: 1913105 - RNA, 19 nt, Artificial Sequence
  Description of Artificial Sequence: Synthetic oligonucleotide
cucguagucuuccccucuc

SEQ ID NO: 1913106 - RNA, 19 nt, Artificial Sequence
  Description of Artificial Sequence: Synthetic oligonucleotide
ugcacacacgaaccaucua

SEQ ID NO: 1913107 - RNA, 19 nt, Artificial Sequence
  Description of Artificial Sequence: Synthetic oligonucleotide
gcugagaaaagacuuuuau

SEQ ID NO: 1913108 - RNA, 19 nt, Artificial Sequence
  Description of Artificial Sequence: Synthetic oligonucleotide
cuuuccaugucagguuuga

SEQ ID NO: 1913109 - RNA, 19 nt, Artificial Sequence
  Description of Artificial Sequence: Synthetic oligonucleotide
uuccccucucgcugcacac

SEQ ID NO: 1913110 - RNA, 19 nt, Artificial Sequence
  Description of Artificial Sequence: Synthetic oligonucleotide
ucaugaccucugaccccag

SEQ ID NO: 1913111 - RNA, 19 nt, Artificial Sequence
  Description of Artificial Sequence: Synthetic oligonucleotide
accucggcuucgcucgcag

SEQ ID NO: 1913112 - RNA, 19 nt, Artificial Sequence
  Description of Artificial Sequence: Synthetic oligonucleotide
ucaguccgcuucagaugca

SEQ ID NO: 1913113 - RNA, 19 nt, Artificial Sequence
  Description of Artificial Sequence: Synthetic oligonucleotide
ggaaugugcauggcuaaca

SEQ ID NO: 1913114 - RNA, 19 nt, Artificial Sequence
  Description of Artificial Sequence: Synthetic oligonucleotide
aggccggucuuccgcgccg

SEQ ID NO: 1913115 - RNA, 19 nt, Artificial Sequence
  Description of Artificial Sequence: Synthetic oligonucleotide
cuguguacuucccguagaa

SEQ ID NO: 1913116 - RNA, 19 nt, Artificial Sequence
  Description of Artificial Sequence: Synthetic oligonucleotide
guagucuuccccucucgcu

SEQ ID NO: 1913117 - RNA, 19 nt, Artificial Sequence
  Description of Artificial Sequence: Synthetic oligonucleotide
uuggucagccggugauacu

SEQ ID NO: 1913118 - RNA, 19 nt, Artificial Sequence
  Description of Artificial Sequence: Synthetic oligonucleotide
gagcgacugcaccugcaca

SEQ ID NO: 1913119 - RNA, 19 nt, Artificial Sequence
  Description of Artificial Sequence: Synthetic oligonucleotide
aauaccggguggggaggga

SEQ ID NO: 1913120 - RNA, 19 nt, Artificial Sequence
  Description of Artificial Sequence: Synthetic oligonucleotide
cuuaagucuuuugucuucu

SEQ ID NO: 1913121 - RNA, 19 nt, Artificial Sequence
  Description of Artificial Sequence: Synthetic oligonucleotide
cuccggcuguauuugucuc

SEQ ID NO: 1913122 - RNA, 19 nt, Artificial Sequence
  Description of Artificial Sequence: Synthetic oligonucleotide
ccaaacgcgcuuucuuggc

SEQ ID NO: 1913123 - RNA, 19 nt, Artificial Sequence
  Description of Artificial Sequence: Synthetic oligonucleotide
ccccaagugauuaaaaggu

SEQ ID NO: 1913124 - RNA, 19 nt, Artificial Sequence
  Description of Artificial Sequence: Synthetic oligonucleotide
gcaccugcacacacgaacc

SEQ ID NO: 1913125 - RNA, 19 nt, Artificial Sequence
  Description of Artificial Sequence: Synthetic oligonucleotide
acuuuccaugucagguuug

SEQ ID NO: 1913126 - RNA, 19 nt, Artificial Sequence
  Description of Artificial Sequence: Synthetic oligonucleotide
gcauggcuaacagucauga

SEQ ID NO: 1913127 - RNA, 19 nt, Artificial Sequence
  Description of Artificial Sequence: Synthetic oligonucleotide
gguuaugcacauuuacaau

SEQ ID NO: 1913128 - RNA, 19 nt, Artificial Sequence
  Description of Artificial Sequence: Synthetic oligonucleotide
guagaaccucucugcuuuc

SEQ ID NO: 1913129 - RNA, 19 nt, Artificial Sequence
  Description of Artificial Sequence: Synthetic oligonucleotide
ggagggcucacacagcugu

SEQ ID NO: 1913130 - RNA, 19 nt, Artificial Sequence
  Description of Artificial Sequence: Synthetic oligonucleotide
accccaggagcgucugucu

SEQ ID NO: 1913131 - RNA, 19 nt, Artificial Sequence
  Description of Artificial Sequence: Synthetic oligonucleotide
acgcgcuuucuuggcuucc

SEQ ID NO: 1913132 - RNA, 19 nt, Artificial Sequence
  Description of Artificial Sequence: Synthetic oligonucleotide
gcugaucuccagaagcuuc

SEQ ID NO: 1913133 - RNA, 19 nt, Artificial Sequence
  Description of Artificial Sequence: Synthetic oligonucleotide
aacugggcagcagcauaau

SEQ ID NO: 1913134 - RNA, 19 nt, Artificial Sequence
  Description of Artificial Sequence: Synthetic oligonucleotide
gccaguccgagcccaacug

SEQ ID NO: 1913135 - RNA, 19 nt, Artificial Sequence
  Description of Artificial Sequence: Synthetic oligonucleotide
acacccaaagcaggagcga

SEQ ID NO: 1913136 - RNA, 19 nt, Artificial Sequence
  Description of Artificial Sequence: Synthetic oligonucleotide
gucguucauaacuuuccau

SEQ ID NO: 1913137 - RNA, 19 nt, Artificial Sequence
  Description of Artificial Sequence: Synthetic oligonucleotide
cccauggagaagacuguug

SEQ ID NO: 1913138 - RNA, 19 nt, Artificial Sequence
  Description of Artificial Sequence: Synthetic oligonucleotide
cauauguaugugggaguga

SEQ ID NO: 1913139 - RNA, 19 nt, Artificial Sequence
  Description of Artificial Sequence: Synthetic oligonucleotide
agaaccccaggagcgucug

SEQ ID NO: 1913140 - RNA, 19 nt, Artificial Sequence
  Description of Artificial Sequence: Synthetic oligonucleotide
cuucuguccacuuccugau

SEQ ID NO: 1913141 - RNA, 19 nt, Artificial Sequence
  Description of Artificial Sequence: Synthetic oligonucleotide
ccacuuccugaugacaccc

SEQ ID NO: 1913142 - RNA, 19 nt, Artificial Sequence
  Description of Artificial Sequence: Synthetic oligonucleotide
cugcgcugaucuccagaag

SEQ ID NO: 1913143 - RNA, 19 nt, Artificial Sequence
  Description of Artificial Sequence: Synthetic oligonucleotide
cgguuaugcacauuuacaa

SEQ ID NO: 1913144 - RNA, 19 nt, Artificial Sequence
  Description of Artificial Sequence: Synthetic oligonucleotide
cugaccccagccccagcac

SEQ ID NO: 1913145 - RNA, 19 nt, Artificial Sequence
  Description of Artificial Sequence: Synthetic oligonucleotide
cucgcuuuucaauuugcuu

SEQ ID NO: 1913146 - RNA, 19 nt, Artificial Sequence
  Description of Artificial Sequence: Synthetic oligonucleotide
uagggucgucuccggcugu

SEQ ID NO: 1913147 - RNA, 19 nt, Artificial Sequence
  Description of Artificial Sequence: Synthetic oligonucleotide
cucugcgcugaucuccaga

SEQ ID NO: 1913148 - RNA, 19 nt, Artificial Sequence
  Description of Artificial Sequence: Synthetic oligonucleotide
ccaugcuuuucucucuguc

SEQ ID NO: 1913149 - RNA, 19 nt, Artificial Sequence
  Description of Artificial Sequence: Synthetic oligonucleotide
uucgcucgcagccgccauu

SEQ ID NO: 1913150 - RNA, 19 nt, Artificial Sequence
  Description of Artificial Sequence: Synthetic oligonucleotide
gcuguguacuucccguaga

SEQ ID NO: 1913151 - RNA, 19 nt, Artificial Sequence
  Description of Artificial Sequence: Synthetic oligonucleotide
cagugccagaaccccagga

SEQ ID NO: 1913152 - RNA, 19 nt, Artificial Sequence
  Description of Artificial Sequence: Synthetic oligonucleotide
cacaacuuccuggugauuu

SEQ ID NO: 1913153 - RNA, 19 nt, Artificial Sequence
  Description of Artificial Sequence: Synthetic oligonucleotide
cuuccccucucgcugcaca

SEQ ID NO: 1913154 - RNA, 19 nt, Artificial Sequence
  Description of Artificial Sequence: Synthetic oligonucleotide
ggcauuccucucauugaug

SEQ ID NO: 1913155 - RNA, 19 nt, Artificial Sequence
  Description of Artificial Sequence: Synthetic oligonucleotide
ccgaaggccggucuuccgc

SEQ ID NO: 1913156 - RNA, 19 nt, Artificial Sequence
  Description of Artificial Sequence: Synthetic oligonucleotide
guuacacgguuaugcacau

SEQ ID NO: 1913157 - RNA, 19 nt, Artificial Sequence
  Description of Artificial Sequence: Synthetic oligonucleotide
cacuuccugaugacaccca

SEQ ID NO: 1913158 - RNA, 19 nt, Artificial Sequence
  Description of Artificial Sequence: Synthetic oligonucleotide
agucaggguucuuccucuu

SEQ ID NO: 1913159 - RNA, 19 nt, Artificial Sequence
  Description of Artificial Sequence: Synthetic oligonucleotide
gagcuucaguccgcuucag

SEQ ID NO: 1913160 - RNA, 19 nt, Artificial Sequence
  Description of Artificial Sequence: Synthetic oligonucleotide
gcuguauuugucucgcuuu

SEQ ID NO: 1913161 - RNA, 19 nt, Artificial Sequence
  Description of Artificial Sequence: Synthetic oligonucleotide
ucgucauuguagggucguc

SEQ ID NO: 1913162 - RNA, 19 nt, Artificial Sequence
  Description of Artificial Sequence: Synthetic oligonucleotide
ucgcucgcagccgccauua

SEQ ID NO: 1913163 - RNA, 19 nt, Artificial Sequence
  Description of Artificial Sequence: Synthetic oligonucleotide
gucgucuccggcuguauuu

SEQ ID NO: 1913164 - RNA, 19 nt, Artificial Sequence
  Description of Artificial Sequence: Synthetic oligonucleotide
agcguccucugcgcugauc

SEQ ID NO: 1913165 - RNA, 19 nt, Artificial Sequence
  Description of Artificial Sequence: Synthetic oligonucleotide
caacuuccuggugauuuaa

SEQ ID NO: 1913166 - RNA, 19 nt, Artificial Sequence
  Description of Artificial Sequence: Synthetic oligonucleotide
augugggagugaagcugag

SEQ ID NO: 1913167 - RNA, 19 nt, Artificial Sequence
  Description of Artificial Sequence: Synthetic oligonucleotide
ccggcuguauuugucucgc

SEQ ID NO: 1913168 - RNA, 19 nt, Artificial Sequence
  Description of Artificial Sequence: Synthetic oligonucleotide
cccaggagcgucugucuug

SEQ ID NO: 1913169 - RNA, 19 nt, Artificial Sequence
  Description of Artificial Sequence: Synthetic oligonucleotide
caaacgcgcuuucuuggcu

SEQ ID NO: 1913170 - RNA, 19 nt, Artificial Sequence
  Description of Artificial Sequence: Synthetic oligonucleotide
ggaaggcacauguguccca

SEQ ID NO: 1913171 - RNA, 19 nt, Artificial Sequence
  Description of Artificial Sequence: Synthetic oligonucleotide
gcucgcagccgccauuaca

SEQ ID NO: 1913172 - RNA, 19 nt, Artificial Sequence
  Description of Artificial Sequence: Synthetic oligonucleotide
cugcuguguacuucccgua

SEQ ID NO: 1913173 - RNA, 19 nt, Artificial Sequence
  Description of Artificial Sequence: Synthetic oligonucleotide
uacgagcuucaguccgcuu

SEQ ID NO: 1913174 - RNA, 19 nt, Artificial Sequence
  Description of Artificial Sequence: Synthetic oligonucleotide
cucggccgccgaaggccgg

SEQ ID NO: 1913175 - RNA, 19 nt, Artificial Sequence
  Description of Artificial Sequence: Synthetic oligonucleotide
ucgcgcuucugcgccgcca

SEQ ID NO: 1913176 - RNA, 19 nt, Artificial Sequence
  Description of Artificial Sequence: Synthetic oligonucleotide
cguucauaacuuuccaugu

SEQ ID NO: 1913177 - RNA, 19 nt, Artificial Sequence
  Description of Artificial Sequence: Synthetic oligonucleotide
uuacacgguuaugcacauu

SEQ ID NO: 1913178 - RNA, 19 nt, Artificial Sequence
  Description of Artificial Sequence: Synthetic oligonucleotide
ggcuguauuugucucgcuu

SEQ ID NO: 1913179 - RNA, 19 nt, Artificial Sequence
  Description of Artificial Sequence: Synthetic oligonucleotide
ccggaacuugcgcagucuc

SEQ ID NO: 1913180 - RNA, 19 nt, Artificial Sequence
  Description of Artificial Sequence: Synthetic oligonucleotide
cuccagguucuguuuaauu

SEQ ID NO: 1913181 - RNA, 19 nt, Artificial Sequence
  Description of Artificial Sequence: Synthetic oligonucleotide
cugcgccgccagcuccucg

SEQ ID NO: 1913182 - RNA, 19 nt, Artificial Sequence
  Description of Artificial Sequence: Synthetic oligonucleotide
caggagcgucugucuugag

SEQ ID NO: 1913183 - RNA, 19 nt, Artificial Sequence
  Description of Artificial Sequence: Synthetic oligonucleotide
cugcuuggucagccgguga

SEQ ID NO: 1913184 - RNA, 19 nt, Artificial Sequence
  Description of Artificial Sequence: Synthetic oligonucleotide
gggcaccucggcuucgcuc

SEQ ID NO: 1913185 - RNA, 19 nt, Artificial Sequence
  Description of Artificial Sequence: Synthetic oligonucleotide
gagcccaacuguagcuucu

SEQ ID NO: 1913186 - RNA, 19 nt, Artificial Sequence
  Description of Artificial Sequence: Synthetic oligonucleotide
cggucuuccgcgccgcccg

SEQ ID NO: 1913187 - RNA, 19 nt, Artificial Sequence
  Description of Artificial Sequence: Synthetic oligonucleotide
gcacgaaaaugugaacaua

SEQ ID NO: 1913188 - RNA, 19 nt, Artificial Sequence
  Description of Artificial Sequence: Synthetic oligonucleotide
ggcuaacagucaugaccuc

SEQ ID NO: 1913189 - RNA, 19 nt, Artificial Sequence
  Description of Artificial Sequence: Synthetic oligonucleotide
ccccaagucaggguucuuc

SEQ ID NO: 1913190 - RNA, 19 nt, Artificial Sequence
  Description of Artificial Sequence: Synthetic oligonucleotide
cuggcguaacugggcagca

SEQ ID NO: 1913191 - RNA, 19 nt, Artificial Sequence
  Description of Artificial Sequence: Synthetic oligonucleotide
ucggccgccgaaggccggu

SEQ ID NO: 1913192 - RNA, 19 nt, Artificial Sequence
  Description of Artificial Sequence: Synthetic oligonucleotide
gcguaacugggcagcagca

SEQ ID NO: 1913193 - RNA, 19 nt, Artificial Sequence
  Description of Artificial Sequence: Synthetic oligonucleotide
cgagcccaacuguagcuuc

SEQ ID NO: 1913194 - RNA, 19 nt, Artificial Sequence
  Description of Artificial Sequence: Synthetic oligonucleotide
gccgcccgcgggcaccucg

SEQ ID NO: 1913195 - RNA, 19 nt, Artificial Sequence
  Description of Artificial Sequence: Synthetic oligonucleotide
cguagaaccucucugcuuu

SEQ ID NO: 1913196 - RNA, 19 nt, Artificial Sequence
  Description of Artificial Sequence: Synthetic oligonucleotide
cucgcgcuucugcgccgcc

SEQ ID NO: 1913197 - RNA, 19 nt, Artificial Sequence
  Description of Artificial Sequence: Synthetic oligonucleotide
cucgcugcacacuccuuuu

SEQ ID NO: 1913198 - RNA, 19 nt, Artificial Sequence
  Description of Artificial Sequence: Synthetic oligonucleotide
gcgcagucucugcucgcgc

SEQ ID NO: 1913199 - RNA, 19 nt, Artificial Sequence
  Description of Artificial Sequence: Synthetic oligonucleotide
cgcuucagaugcagcuccc

SEQ ID NO: 1913200 - RNA, 19 nt, Artificial Sequence
  Description of Artificial Sequence: Synthetic oligonucleotide
acgaaccaucuaagcccca

SEQ ID NO: 1913201 - RNA, 19 nt, Artificial Sequence
  Description of Artificial Sequence: Synthetic oligonucleotide
gaaccccaggagcgucugu

SEQ ID NO: 1913202 - RNA, 19 nt, Artificial Sequence
  Description of Artificial Sequence: Synthetic oligonucleotide
gcacagugccagaacccca

SEQ ID NO: 1913203 - RNA, 19 nt, Artificial Sequence
  Description of Artificial Sequence: Synthetic oligonucleotide
ccaggagcgucugucuuga

SEQ ID NO: 1913204 - RNA, 19 nt, Artificial Sequence
  Description of Artificial Sequence: Synthetic oligonucleotide
gugucccauggagaagacu

SEQ ID NO: 1913205 - RNA, 19 nt, Artificial Sequence
  Description of Artificial Sequence: Synthetic oligonucleotide
agggucgucuccggcugua

SEQ ID NO: 1913206 - RNA, 19 nt, Artificial Sequence
  Description of Artificial Sequence: Synthetic oligonucleotide
cugcaccugcacacacgaa

SEQ ID NO: 1913207 - RNA, 19 nt, Artificial Sequence
  Description of Artificial Sequence: Synthetic oligonucleotide
caggcaacuuaagucuuuu

SEQ ID NO: 1913208 - RNA, 19 nt, Artificial Sequence
  Description of Artificial Sequence: Synthetic oligonucleotide
ccggugauacuggcguaac

SEQ ID NO: 1913209 - RNA, 19 nt, Artificial Sequence
  Description of Artificial Sequence: Synthetic oligonucleotide
gcgacugcaccugcacaca

SEQ ID NO: 1913210 - RNA, 19 nt, Artificial Sequence
  Description of Artificial Sequence: Synthetic oligonucleotide
cccaagugauuaaaagguu

SEQ ID NO: 1913211 - RNA, 19 nt, Artificial Sequence
  Description of Artificial Sequence: Synthetic oligonucleotide
cggaaugugcauggcuaac

SEQ ID NO: 1913212 - RNA, 19 nt, Artificial Sequence
  Description of Artificial Sequence: Synthetic oligonucleotide
gcuucgcucgcagccgcca

SEQ ID NO: 1913213 - RNA, 19 nt, Artificial Sequence
  Description of Artificial Sequence: Synthetic oligonucleotide
gcaccucggcuucgcucgc

SEQ ID NO: 1913214 - RNA, 19 nt, Artificial Sequence
  Description of Artificial Sequence: Synthetic oligonucleotide
ccacuccaaacgcgcuuuc

SEQ ID NO: 1913215 - RNA, 19 nt, Artificial Sequence
  Description of Artificial Sequence: Synthetic oligonucleotide
ccggucuuccgcgccgccc

SEQ ID NO: 1913216 - RNA, 19 nt, Artificial Sequence
  Description of Artificial Sequence: Synthetic oligonucleotide
gcucgcgcuucugcgccgc

SEQ ID NO: 1913217 - RNA, 19 nt, Artificial Sequence
  Description of Artificial Sequence: Synthetic oligonucleotide
ggcuucgcucgcagccgcc

SEQ ID NO: 1913218 - RNA, 19 nt, Artificial Sequence
  Description of Artificial Sequence: Synthetic oligonucleotide
cuguagcuucuguccacuu

SEQ ID NO: 1913219 - RNA, 19 nt, Artificial Sequence
  Description of Artificial Sequence: Synthetic oligonucleotide
ccgcccgcgggcaccucgg

SEQ ID NO: 1913220 - RNA, 19 nt, Artificial Sequence
  Description of Artificial Sequence: Synthetic oligonucleotide
cccguagaaccucucugcu

SEQ ID NO: 1913221 - RNA, 19 nt, Artificial Sequence
  Description of Artificial Sequence: Synthetic oligonucleotide
cggcuucgcucgcagccgc

SEQ ID NO: 1913222 - RNA, 19 nt, Artificial Sequence
  Description of Artificial Sequence: Synthetic oligonucleotide
ccaguccgagcccaacugu

SEQ ID NO: 1913223 - RNA, 19 nt, Artificial Sequence
  Description of Artificial Sequence: Synthetic oligonucleotide
ggccggucuuccgcgccgc

SEQ ID NO: 1913224 - RNA, 19 nt, Artificial Sequence
  Description of Artificial Sequence: Synthetic oligonucleotide
cuucgcucgcagccgccau

SEQ ID NO: 1913225 - RNA, 19 nt, Artificial Sequence
  Description of Artificial Sequence: Synthetic oligonucleotide
ggucgucuccggcuguauu

SEQ ID NO: 1913226 - RNA, 19 nt, Artificial Sequence
  Description of Artificial Sequence: Synthetic oligonucleotide
gccggucuuccgcgccgcc

SEQ ID NO: 1913227 - RNA, 19 nt, Artificial Sequence
  Description of Artificial Sequence: Synthetic oligonucleotide
gcgggcaccucggcuucgc

SEQ ID NO: 1913228 - RNA, 19 nt, Artificial Sequence
  Description of Artificial Sequence: Synthetic oligonucleotide
cgucauuguagggucgucu

SEQ ID NO: 1913229 - RNA, 19 nt, Artificial Sequence
  Description of Artificial Sequence: Synthetic oligonucleotide
gccagaaccccaggagcgu

SEQ ID NO: 1913230 - RNA, 19 nt, Artificial Sequence
  Description of Artificial Sequence: Synthetic oligonucleotide
cucccggaacuugcgcagu

SEQ ID NO: 1913231 - RNA, 19 nt, Artificial Sequence
  Description of Artificial Sequence: Synthetic oligonucleotide
cucucgcugcacacuccuu

SEQ ID NO: 1913232 - RNA, 19 nt, Artificial Sequence
  Description of Artificial Sequence: Synthetic oligonucleotide
gcaggcaacuuaagucuuu

SEQ ID NO: 1913233 - RNA, 19 nt, Artificial Sequence
  Description of Artificial Sequence: Synthetic oligonucleotide
cggaacuugcgcagucucu

SEQ ID NO: 1913234 - RNA, 19 nt, Artificial Sequence
  Description of Artificial Sequence: Synthetic oligonucleotide
ccguagaaccucucugcuu

SEQ ID NO: 1913235 - RNA, 19 nt, Artificial Sequence
  Description of Artificial Sequence: Synthetic oligonucleotide
ccgcgggcaccucggcuuc

SEQ ID NO: 1913236 - RNA, 19 nt, Artificial Sequence
  Description of Artificial Sequence: Synthetic oligonucleotide
ggccgccgaaggccggucu

SEQ ID NO: 1913237 - RNA, 19 nt, Artificial Sequence
  Description of Artificial Sequence: Synthetic oligonucleotide
cccacuccaaacgcgcuuu

SEQ ID NO: 1913238 - RNA, 19 nt, Artificial Sequence
  Description of Artificial Sequence: Synthetic oligonucleotide
cggugauacuggcguaacu

SEQ ID NO: 1913239 - RNA, 19 nt, Artificial Sequence
  Description of Artificial Sequence: Synthetic oligonucleotide
gccgccgaaggccggucuu

SEQ ID NO: 1913240 - RNA, 19 nt, Artificial Sequence
  Description of Artificial Sequence: Synthetic oligonucleotide
cccggaacuugcgcagucu

SEQ ID NO: 1913241 - RNA, 19 nt, Artificial Sequence
  Description of Artificial Sequence: Synthetic oligonucleotide
cgcucgcagccgccauuac

SEQ ID NO: 1913242 - RNA, 19 nt, Artificial Sequence
  Description of Artificial Sequence: Synthetic oligonucleotide
cgucuccggcuguauuugu

SEQ ID NO: 1913243 - RNA, 19 nt, Artificial Sequence
  Description of Artificial Sequence: Synthetic oligonucleotide
ccgagcccaacuguagcuu

SEQ ID NO: 1913244 - RNA, 19 nt, Artificial Sequence
  Description of Artificial Sequence: Synthetic oligonucleotide
gggucgucuccggcuguau

SEQ ID NO: 1913245 - RNA, 19 nt, Artificial Sequence
  Description of Artificial Sequence: Synthetic oligonucleotide
cgcugaucuccagaagcuu

SEQ ID NO: 1913246 - RNA, 19 nt, Artificial Sequence
  Description of Artificial Sequence: Synthetic oligonucleotide
cggcuguauuugucucgcu

SEQ ID NO: 1913247 - RNA, 19 nt, Artificial Sequence
  Description of Artificial Sequence: Synthetic oligonucleotide
cagcguccucugcgcugau

SEQ ID NO: 1913248 - RNA, 19 nt, Artificial Sequence
  Description of Artificial Sequence: Synthetic oligonucleotide
ccgcgccgcccgcgggcac

SEQ ID NO: 1913249 - RNA, 19 nt, Artificial Sequence
  Description of Artificial Sequence: Synthetic oligonucleotide
ccacaacuuccuggugauu

SEQ ID NO: 1913250 - RNA, 19 nt, Artificial Sequence
  Description of Artificial Sequence: Synthetic oligonucleotide
uuuaaaaccaaguucaagg

SEQ ID NO: 1913251 - RNA, 19 nt, Artificial Sequence
  Description of Artificial Sequence: Synthetic oligonucleotide
aauagauacgaacuugucc

SEQ ID NO: 1913252 - RNA, 19 nt, Artificial Sequence
  Description of Artificial Sequence: Synthetic oligonucleotide
aaaaucaucuacuugaagu

SEQ ID NO: 1913253 - RNA, 19 nt, Artificial Sequence
  Description of Artificial Sequence: Synthetic oligonucleotide
aagaaauaggaguauuugc

SEQ ID NO: 1913254 - RNA, 19 nt, Artificial Sequence
  Description of Artificial Sequence: Synthetic oligonucleotide
uguauuaaauaccuguggg

SEQ ID NO: 1913255 - RNA, 19 nt, Artificial Sequence
  Description of Artificial Sequence: Synthetic oligonucleotide
  modified_base (3)..(3): a, c, u, g, unknown or other
uunuaucuuagacaaaucc

SEQ ID NO: 1913256 - RNA, 19 nt, Artificial Sequence
  Description of Artificial Sequence: Synthetic oligonucleotide
uuaaagaauauauuaaacu

SEQ ID NO: 1913257 - RNA, 19 nt, Artificial Sequence
  Description of Artificial Sequence: Synthetic oligonucleotide
uaagucuuaauucccaugg

SEQ ID NO: 1913258 - RNA, 19 nt, Artificial Sequence
  Description of Artificial Sequence: Synthetic oligonucleotide
aaggcgaacaaccagaucu

SEQ ID NO: 1913259 - RNA, 19 nt, Artificial Sequence
  Description of Artificial Sequence: Synthetic oligonucleotide
uauauaaucaaaagucucc

SEQ ID NO: 1913260 - RNA, 19 nt, Artificial Sequence
  Description of Artificial Sequence: Synthetic oligonucleotide
cauauuuucuuucacaggc

SEQ ID NO: 1913261 - RNA, 19 nt, Artificial Sequence
  Description of Artificial Sequence: Synthetic oligonucleotide
auacucuuguauuaaauac

SEQ ID NO: 1913262 - RNA, 19 nt, Artificial Sequence
  Description of Artificial Sequence: Synthetic oligonucleotide
uguguauauaaucaaaagu

SEQ ID NO: 1913263 - RNA, 19 nt, Artificial Sequence
  Description of Artificial Sequence: Synthetic oligonucleotide
gaaacuauuccacaaggag

SEQ ID NO: 1913264 - RNA, 19 nt, Artificial Sequence
  Description of Artificial Sequence: Synthetic oligonucleotide
gaauuugacaaugaugugg

SEQ ID NO: 1913265 - RNA, 19 nt, Artificial Sequence
  Description of Artificial Sequence: Synthetic oligonucleotide
auagauacgaacuugucca

SEQ ID NO: 1913266 - RNA, 19 nt, Artificial Sequence
  Description of Artificial Sequence: Synthetic oligonucleotide
  modified_base (2)..(2): a, c, u, g, unknown or other
unuaucuuagacaaaucca

SEQ ID NO: 1913267 - RNA, 19 nt, Artificial Sequence
  Description of Artificial Sequence: Synthetic oligonucleotide
  modified_base (9)..(9): a, c, u, g, unknown or other
augucuuunuaucuuagac

SEQ ID NO: 1913268 - RNA, 19 nt, Artificial Sequence
  Description of Artificial Sequence: Synthetic oligonucleotide
aauucuggugaccauaugu

SEQ ID NO: 1913269 - RNA, 19 nt, Artificial Sequence
  Description of Artificial Sequence: Synthetic oligonucleotide
uuguauuaaauaccugugg

SEQ ID NO: 1913270 - RNA, 19 nt, Artificial Sequence
  Description of Artificial Sequence: Synthetic oligonucleotide
uguauauaaucaaaagucu

SEQ ID NO: 1913271 - RNA, 19 nt, Artificial Sequence
  Description of Artificial Sequence: Synthetic oligonucleotide
uuuacucaaaaucaucuac

SEQ ID NO: 1913272 - RNA, 19 nt, Artificial Sequence
  Description of Artificial Sequence: Synthetic oligonucleotide
aacuaaagcgucuuuuaag

SEQ ID NO: 1913273 - RNA, 19 nt, Artificial Sequence
  Description of Artificial Sequence: Synthetic oligonucleotide
ucuacuugaaguuuuggca

SEQ ID NO: 1913274 - RNA, 19 nt, Artificial Sequence
  Description of Artificial Sequence: Synthetic oligonucleotide
aaacuauuccacaaggagg

SEQ ID NO: 1913275 - RNA, 19 nt, Artificial Sequence
  Description of Artificial Sequence: Synthetic oligonucleotide
aucaggaauagauacgaac

SEQ ID NO: 1913276 - RNA, 19 nt, Artificial Sequence
  Description of Artificial Sequence: Synthetic oligonucleotide
uauguagucuccaagugug

SEQ ID NO: 1913277 - RNA, 19 nt, Artificial Sequence
  Description of Artificial Sequence: Synthetic oligonucleotide
cucggaaugaucuauguag

SEQ ID NO: 1913278 - RNA, 19 nt, Artificial Sequence
  Description of Artificial Sequence: Synthetic oligonucleotide
aagucuuuaagaaauagga

SEQ ID NO: 1913279 - RNA, 19 nt, Artificial Sequence
  Description of Artificial Sequence: Synthetic oligonucleotide
agaagcucaacagaaaugg

SEQ ID NO: 1913280 - RNA, 19 nt, Artificial Sequence
  Description of Artificial Sequence: Synthetic oligonucleotide
aauuuacucaaaaucaucu

SEQ ID NO: 1913281 - RNA, 19 nt, Artificial Sequence
  Description of Artificial Sequence: Synthetic oligonucleotide
aaguucaaggcgauaaacc

SEQ ID NO: 1913282 - RNA, 19 nt, Artificial Sequence
  Description of Artificial Sequence: Synthetic oligonucleotide
aaucaaaagucuccguaag

SEQ ID NO: 1913283 - RNA, 19 nt, Artificial Sequence
  Description of Artificial Sequence: Synthetic oligonucleotide
aaagaacuguucucuugcc

SEQ ID NO: 1913284 - RNA, 19 nt, Artificial Sequence
  Description of Artificial Sequence: Synthetic oligonucleotide
auuaucuccggcuuuucac

SEQ ID NO: 1913285 - RNA, 19 nt, Artificial Sequence
  Description of Artificial Sequence: Synthetic oligonucleotide
agccuuuccacagagaagc

SEQ ID NO: 1913286 - RNA, 19 nt, Artificial Sequence
  Description of Artificial Sequence: Synthetic oligonucleotide
agaggacaacaacagagcc

SEQ ID NO: 1913287 - RNA, 19 nt, Artificial Sequence
  Description of Artificial Sequence: Synthetic oligonucleotide
ugcgauaucugccuuagug

SEQ ID NO: 1913288 - RNA, 19 nt, Artificial Sequence
  Description of Artificial Sequence: Synthetic oligonucleotide
uuugcagaacacuucauca

SEQ ID NO: 1913289 - RNA, 19 nt, Artificial Sequence
  Description of Artificial Sequence: Synthetic oligonucleotide
uuugcuggaucauacugcg

SEQ ID NO: 1913290 - RNA, 19 nt, Artificial Sequence
  Description of Artificial Sequence: Synthetic oligonucleotide
ucuuuaagaaauaggagua

SEQ ID NO: 1913291 - RNA, 19 nt, Artificial Sequence
  Description of Artificial Sequence: Synthetic oligonucleotide
uacucuuguauuaaauacc

SEQ ID NO: 1913292 - RNA, 19 nt, Artificial Sequence
  Description of Artificial Sequence: Synthetic oligonucleotide
agacaauggagguaagucg

SEQ ID NO: 1913293 - RNA, 19 nt, Artificial Sequence
  Description of Artificial Sequence: Synthetic oligonucleotide
guguauauaaucaaaaguc

SEQ ID NO: 1913294 - RNA, 19 nt, Artificial Sequence
  Description of Artificial Sequence: Synthetic oligonucleotide
ugcgcuuuucccaaguagg

SEQ ID NO: 1913295 - RNA, 19 nt, Artificial Sequence
  Description of Artificial Sequence: Synthetic oligonucleotide
uuugauuguagauaggcua

SEQ ID NO: 1913296 - RNA, 19 nt, Artificial Sequence
  Description of Artificial Sequence: Synthetic oligonucleotide
aaaagucuccguaaguuuc

SEQ ID NO: 1913297 - RNA, 19 nt, Artificial Sequence
  Description of Artificial Sequence: Synthetic oligonucleotide
  modified_base (7)..(7): a, c, u, g, unknown or other
gucuuunuaucuuagacaa

SEQ ID NO: 1913298 - RNA, 19 nt, Artificial Sequence
  Description of Artificial Sequence: Synthetic oligonucleotide
aaaucccagucuguuaucc

SEQ ID NO: 1913299 - RNA, 19 nt, Artificial Sequence
  Description of Artificial Sequence: Synthetic oligonucleotide
uucaucaggaauagauacg

SEQ ID NO: 1913300 - RNA, 19 nt, Artificial Sequence
  Description of Artificial Sequence: Synthetic oligonucleotide
  modified_base (8)..(8): a, c, u, g, unknown or other
ugucuuunuaucuuagaca

SEQ ID NO: 1913301 - RNA, 19 nt, Artificial Sequence
  Description of Artificial Sequence: Synthetic oligonucleotide
aguuuuggcaauuucuuug

SEQ ID NO: 1913302 - RNA, 19 nt, Artificial Sequence
  Description of Artificial Sequence: Synthetic oligonucleotide
ucuccaagugugaaggagg

SEQ ID NO: 1913303 - RNA, 19 nt, Artificial Sequence
  Description of Artificial Sequence: Synthetic oligonucleotide
cuucaucaggaauagauac

SEQ ID NO: 1913304 - RNA, 19 nt, Artificial Sequence
  Description of Artificial Sequence: Synthetic oligonucleotide
gagaaagcaauugucagag

SEQ ID NO: 1913305 - RNA, 19 nt, Artificial Sequence
  Description of Artificial Sequence: Synthetic oligonucleotide
acuaaagcgucuuuuaaga

SEQ ID NO: 1913306 - RNA, 19 nt, Artificial Sequence
  Description of Artificial Sequence: Synthetic oligonucleotide
gaaagcaauugucagagga

SEQ ID NO: 1913307 - RNA, 19 nt, Artificial Sequence
  Description of Artificial Sequence: Synthetic oligonucleotide
  modified_base (15)..(15): a, c, u, g, unknown or other
aucuacaugucuuunuauc

SEQ ID NO: 1913308 - RNA, 19 nt, Artificial Sequence
  Description of Artificial Sequence: Synthetic oligonucleotide
ugcaacaaucugaauagcc

SEQ ID NO: 1913309 - RNA, 19 nt, Artificial Sequence
  Description of Artificial Sequence: Synthetic oligonucleotide
aaaucaucuacuugaaguu

SEQ ID NO: 1913310 - RNA, 19 nt, Artificial Sequence
  Description of Artificial Sequence: Synthetic oligonucleotide
uugucagaggacaacaaca

SEQ ID NO: 1913311 - RNA, 19 nt, Artificial Sequence
  Description of Artificial Sequence: Synthetic oligonucleotide
ucaagacuggguauuaucu

SEQ ID NO: 1913312 - RNA, 19 nt, Artificial Sequence
  Description of Artificial Sequence: Synthetic oligonucleotide
aaacccaagucuuuaagaa

SEQ ID NO: 1913313 - RNA, 19 nt, Artificial Sequence
  Description of Artificial Sequence: Synthetic oligonucleotide
uuacucaaaaucaucuacu

SEQ ID NO: 1913314 - RNA, 19 nt, Artificial Sequence
  Description of Artificial Sequence: Synthetic oligonucleotide
uacgaacuuguccaaagag

SEQ ID NO: 1913315 - RNA, 19 nt, Artificial Sequence
  Description of Artificial Sequence: Synthetic oligonucleotide
aauugguugcaugggagac

SEQ ID NO: 1913316 - RNA, 19 nt, Artificial Sequence
  Description of Artificial Sequence: Synthetic oligonucleotide
aaagcaauugucagaggac

SEQ ID NO: 1913317 - RNA, 19 nt, Artificial Sequence
  Description of Artificial Sequence: Synthetic oligonucleotide
ucagauucaagacugggua

SEQ ID NO: 1913318 - RNA, 19 nt, Artificial Sequence
  Description of Artificial Sequence: Synthetic oligonucleotide
agcucaacagaaauggugc

SEQ ID NO: 1913319 - RNA, 19 nt, Artificial Sequence
  Description of Artificial Sequence: Synthetic oligonucleotide
gauacgaacuuguccaaag

SEQ ID NO: 1913320 - RNA, 19 nt, Artificial Sequence
  Description of Artificial Sequence: Synthetic oligonucleotide
aauuugacaaugauguggu

SEQ ID NO: 1913321 - RNA, 19 nt, Artificial Sequence
  Description of Artificial Sequence: Synthetic oligonucleotide
aggaguauuugcuuaaugu

SEQ ID NO: 1913322 - RNA, 19 nt, Artificial Sequence
  Description of Artificial Sequence: Synthetic oligonucleotide
uauuccacaaggaggaagu

SEQ ID NO: 1913323 - RNA, 19 nt, Artificial Sequence
  Description of Artificial Sequence: Synthetic oligonucleotide
acucaguucaaguucuuuc

SEQ ID NO: 1913324 - RNA, 19 nt, Artificial Sequence
  Description of Artificial Sequence: Synthetic oligonucleotide
ucuauguagucuccaagug

SEQ ID NO: 1913325 - RNA, 19 nt, Artificial Sequence
  Description of Artificial Sequence: Synthetic oligonucleotide
aucuucuaaacccaagucu

SEQ ID NO: 1913326 - RNA, 19 nt, Artificial Sequence
  Description of Artificial Sequence: Synthetic oligonucleotide
agucuuaauucccauggag

SEQ ID NO: 1913327 - RNA, 19 nt, Artificial Sequence
  Description of Artificial Sequence: Synthetic oligonucleotide
aguucaaggcgauaaaccu

SEQ ID NO: 1913328 - RNA, 19 nt, Artificial Sequence
  Description of Artificial Sequence: Synthetic oligonucleotide
uguagauaggcuacucuug

SEQ ID NO: 1913329 - RNA, 19 nt, Artificial Sequence
  Description of Artificial Sequence: Synthetic oligonucleotide
uugauuguagauaggcuac

SEQ ID NO: 1913330 - RNA, 19 nt, Artificial Sequence
  Description of Artificial Sequence: Synthetic oligonucleotide
ugaaauugguugcauggga

SEQ ID NO: 1913331 - RNA, 19 nt, Artificial Sequence
  Description of Artificial Sequence: Synthetic oligonucleotide
aaauaggaguauuugcuua

SEQ ID NO: 1913332 - RNA, 19 nt, Artificial Sequence
  Description of Artificial Sequence: Synthetic oligonucleotide
guugguuaucuucuaaacc

SEQ ID NO: 1913333 - RNA, 19 nt, Artificial Sequence
  Description of Artificial Sequence: Synthetic oligonucleotide
uauuggaguuggcagacug

SEQ ID NO: 1913334 - RNA, 19 nt, Artificial Sequence
  Description of Artificial Sequence: Synthetic oligonucleotide
aauaggaguauuugcuuaa

SEQ ID NO: 1913335 - RNA, 19 nt, Artificial Sequence
  Description of Artificial Sequence: Synthetic oligonucleotide
gaaugaucuauguagucuc

SEQ ID NO: 1913336 - RNA, 19 nt, Artificial Sequence
  Description of Artificial Sequence: Synthetic oligonucleotide
uuaagaaauaggaguauuu

SEQ ID NO: 1913337 - RNA, 19 nt, Artificial Sequence
  Description of Artificial Sequence: Synthetic oligonucleotide
uuauccagccuuuccacag

SEQ ID NO: 1913338 - RNA, 19 nt, Artificial Sequence
  Description of Artificial Sequence: Synthetic oligonucleotide
uucaaggcgauaaaccuuc

SEQ ID NO: 1913339 - RNA, 19 nt, Artificial Sequence
  Description of Artificial Sequence: Synthetic oligonucleotide
aaauugguugcaugggaga

SEQ ID NO: 1913340 - RNA, 19 nt, Artificial Sequence
  Description of Artificial Sequence: Synthetic oligonucleotide
aagagggugugcaacaauc

SEQ ID NO: 1913341 - RNA, 19 nt, Artificial Sequence
  Description of Artificial Sequence: Synthetic oligonucleotide
agaaauaggaguauuugcu

SEQ ID NO: 1913342 - RNA, 19 nt, Artificial Sequence
  Description of Artificial Sequence: Synthetic oligonucleotide
aucauacugcgcuuuuccc

SEQ ID NO: 1913343 - RNA, 19 nt, Artificial Sequence
  Description of Artificial Sequence: Synthetic oligonucleotide
uaaucaaaagucuccguaa

SEQ ID NO: 1913344 - RNA, 19 nt, Artificial Sequence
  Description of Artificial Sequence: Synthetic oligonucleotide
uuuucacucacugaaggga

SEQ ID NO: 1913345 - RNA, 19 nt, Artificial Sequence
  Description of Artificial Sequence: Synthetic oligonucleotide
ucaucaggaauagauacga

SEQ ID NO: 1913346 - RNA, 19 nt, Artificial Sequence
  Description of Artificial Sequence: Synthetic oligonucleotide
ucccaaguaggcaagaaau

SEQ ID NO: 1913347 - RNA, 19 nt, Artificial Sequence
  Description of Artificial Sequence: Synthetic oligonucleotide
ucuguuauccagccuuucc

SEQ ID NO: 1913348 - RNA, 19 nt, Artificial Sequence
  Description of Artificial Sequence: Synthetic oligonucleotide
auaaucaaaagucuccgua

SEQ ID NO: 1913349 - RNA, 19 nt, Artificial Sequence
  Description of Artificial Sequence: Synthetic oligonucleotide
aauuucuuugcagaacacu

SEQ ID NO: 1913350 - RNA, 19 nt, Artificial Sequence
  Description of Artificial Sequence: Synthetic oligonucleotide
aauccagucuuagaaggag

SEQ ID NO: 1913351 - RNA, 19 nt, Artificial Sequence
  Description of Artificial Sequence: Synthetic oligonucleotide
acaacaacagagccugagg

SEQ ID NO: 1913352 - RNA, 19 nt, Artificial Sequence
  Description of Artificial Sequence: Synthetic oligonucleotide
aaacuaaagcgucuuuuaa

SEQ ID NO: 1913353 - RNA, 19 nt, Artificial Sequence
  Description of Artificial Sequence: Synthetic oligonucleotide
  modified_base (4)..(4): a, c, u, g, unknown or other
uuunuaucuuagacaaauc

SEQ ID NO: 1913354 - RNA, 19 nt, Artificial Sequence
  Description of Artificial Sequence: Synthetic oligonucleotide
aucuauguagucuccaagu

SEQ ID NO: 1913355 - RNA, 19 nt, Artificial Sequence
  Description of Artificial Sequence: Synthetic oligonucleotide
ucuuaagauuuucaagguc

SEQ ID NO: 1913356 - RNA, 19 nt, Artificial Sequence
  Description of Artificial Sequence: Synthetic oligonucleotide
uaaagcgucuuuuaagaau

SEQ ID NO: 1913357 - RNA, 19 nt, Artificial Sequence
  Description of Artificial Sequence: Synthetic oligonucleotide
aaggcgauaaaccuucaua

SEQ ID NO: 1913358 - RNA, 19 nt, Artificial Sequence
  Description of Artificial Sequence: Synthetic oligonucleotide
ucuugucuuaagauuuuca

SEQ ID NO: 1913359 - RNA, 19 nt, Artificial Sequence
  Description of Artificial Sequence: Synthetic oligonucleotide
gucuuuaagaaauaggagu

SEQ ID NO: 1913360 - RNA, 19 nt, Artificial Sequence
  Description of Artificial Sequence: Synthetic oligonucleotide
agguaagucguccagcucu

SEQ ID NO: 1913361 - RNA, 19 nt, Artificial Sequence
  Description of Artificial Sequence: Synthetic oligonucleotide
ucuagucuucuucacacuc

SEQ ID NO: 1913362 - RNA, 19 nt, Artificial Sequence
  Description of Artificial Sequence: Synthetic oligonucleotide
gaaauggugcauuucucac

SEQ ID NO: 1913363 - RNA, 19 nt, Artificial Sequence
  Description of Artificial Sequence: Synthetic oligonucleotide
gaaauugguugcaugggag

SEQ ID NO: 1913364 - RNA, 19 nt, Artificial Sequence
  Description of Artificial Sequence: Synthetic oligonucleotide
ucuuucacaggcuccagac

SEQ ID NO: 1913365 - RNA, 19 nt, Artificial Sequence
  Description of Artificial Sequence: Synthetic oligonucleotide
aguccuguaagucuuaauu

SEQ ID NO: 1913366 - RNA, 19 nt, Artificial Sequence
  Description of Artificial Sequence: Synthetic oligonucleotide
uggaaggcgaacaaccaga

SEQ ID NO: 1913367 - RNA, 19 nt, Artificial Sequence
  Description of Artificial Sequence: Synthetic oligonucleotide
cuuaagauuuucaaggucu

SEQ ID NO: 1913368 - RNA, 19 nt, Artificial Sequence
  Description of Artificial Sequence: Synthetic oligonucleotide
uugcaguuagcaucuuugg

SEQ ID NO: 1913369 - RNA, 19 nt, Artificial Sequence
  Description of Artificial Sequence: Synthetic oligonucleotide
aagcucaacagaaauggug

SEQ ID NO: 1913370 - RNA, 19 nt, Artificial Sequence
  Description of Artificial Sequence: Synthetic oligonucleotide
uuggaaggcgaacaaccag

SEQ ID NO: 1913371 - RNA, 19 nt, Artificial Sequence
  Description of Artificial Sequence: Synthetic oligonucleotide
cauggagaaagcaauuguc

SEQ ID NO: 1913372 - RNA, 19 nt, Artificial Sequence
  Description of Artificial Sequence: Synthetic oligonucleotide
acuggguauuaucuccggc

SEQ ID NO: 1913373 - RNA, 19 nt, Artificial Sequence
  Description of Artificial Sequence: Synthetic oligonucleotide
aauggagguaagucgucca

SEQ ID NO: 1913374 - RNA, 19 nt, Artificial Sequence
  Description of Artificial Sequence: Synthetic oligonucleotide
accugugggaauuugacaa

SEQ ID NO: 1913375 - RNA, 19 nt, Artificial Sequence
  Description of Artificial Sequence: Synthetic oligonucleotide
ucaaaaucaucuacuugaa

SEQ ID NO: 1913376 - RNA, 19 nt, Artificial Sequence
  Description of Artificial Sequence: Synthetic oligonucleotide
uuaguagccuuggaaggcg

SEQ ID NO: 1913377 - RNA, 19 nt, Artificial Sequence
  Description of Artificial Sequence: Synthetic oligonucleotide
ucacguuguguauauaauc

SEQ ID NO: 1913378 - RNA, 19 nt, Artificial Sequence
  Description of Artificial Sequence: Synthetic oligonucleotide
aagcaauugucagaggaca

SEQ ID NO: 1913379 - RNA, 19 nt, Artificial Sequence
  Description of Artificial Sequence: Synthetic oligonucleotide
uucaaaauccagucuuaga

SEQ ID NO: 1913380 - RNA, 19 nt, Artificial Sequence
  Description of Artificial Sequence: Synthetic oligonucleotide
aauggucccaguugguuau

SEQ ID NO: 1913381 - RNA, 19 nt, Artificial Sequence
  Description of Artificial Sequence: Synthetic oligonucleotide
aggcgauaaaccuucauau

SEQ ID NO: 1913382 - RNA, 19 nt, Artificial Sequence
  Description of Artificial Sequence: Synthetic oligonucleotide
caggaauggucccaguugg

SEQ ID NO: 1913383 - RNA, 19 nt, Artificial Sequence
  Description of Artificial Sequence: Synthetic oligonucleotide
uauaaucaaaagucuccgu

SEQ ID NO: 1913384 - RNA, 19 nt, Artificial Sequence
  Description of Artificial Sequence: Synthetic oligonucleotide
uuaaauaccugugggaauu

SEQ ID NO: 1913385 - RNA, 19 nt, Artificial Sequence
  Description of Artificial Sequence: Synthetic oligonucleotide
aaagcgucuuuuaagaauu

SEQ ID NO: 1913386 - RNA, 19 nt, Artificial Sequence
  Description of Artificial Sequence: Synthetic oligonucleotide
cuaaacccaagucuuuaag

SEQ ID NO: 1913387 - RNA, 19 nt, Artificial Sequence
  Description of Artificial Sequence: Synthetic oligonucleotide
ucuucaagaggcagcucag

SEQ ID NO: 1913388 - RNA, 19 nt, Artificial Sequence
  Description of Artificial Sequence: Synthetic oligonucleotide
uucucuugccuauuggagu

SEQ ID NO: 1913389 - RNA, 19 nt, Artificial Sequence
  Description of Artificial Sequence: Synthetic oligonucleotide
uuucucaccauccgugcga

SEQ ID NO: 1913390 - RNA, 19 nt, Artificial Sequence
  Description of Artificial Sequence: Synthetic oligonucleotide
auuucucaccauccgugcg

SEQ ID NO: 1913391 - RNA, 19 nt, Artificial Sequence
  Description of Artificial Sequence: Synthetic oligonucleotide
ugcaguuagcaucuuugga

SEQ ID NO: 1913392 - RNA, 19 nt, Artificial Sequence
  Description of Artificial Sequence: Synthetic oligonucleotide
guuuaaaaccaaguucaag

SEQ ID NO: 1913393 - RNA, 19 nt, Artificial Sequence
  Description of Artificial Sequence: Synthetic oligonucleotide
ucggaaugaucuauguagu

SEQ ID NO: 1913394 - RNA, 19 nt, Artificial Sequence
  Description of Artificial Sequence: Synthetic oligonucleotide
cacguuguguauauaauca

SEQ ID NO: 1913395 - RNA, 19 nt, Artificial Sequence
  Description of Artificial Sequence: Synthetic oligonucleotide
uuaucuccggcuuuucacu

SEQ ID NO: 1913396 - RNA, 19 nt, Artificial Sequence
  Description of Artificial Sequence: Synthetic oligonucleotide
caacaaucugaauagccuc

SEQ ID NO: 1913397 - RNA, 19 nt, Artificial Sequence
  Description of Artificial Sequence: Synthetic oligonucleotide
ucaaaagucuccguaaguu

SEQ ID NO: 1913398 - RNA, 19 nt, Artificial Sequence
  Description of Artificial Sequence: Synthetic oligonucleotide
cacugaagggagcagagug

SEQ ID NO: 1913399 - RNA, 19 nt, Artificial Sequence
  Description of Artificial Sequence: Synthetic oligonucleotide
uguuauccagccuuuccac

SEQ ID NO: 1913400 - RNA, 19 nt, Artificial Sequence
  Description of Artificial Sequence: Synthetic oligonucleotide
acaaauccacuccaagcug

SEQ ID NO: 1913401 - RNA, 19 nt, Artificial Sequence
  Description of Artificial Sequence: Synthetic oligonucleotide
ugugggaauuugacaauga

SEQ ID NO: 1913402 - RNA, 19 nt, Artificial Sequence
  Description of Artificial Sequence: Synthetic oligonucleotide
ugcauuucucaccauccgu

SEQ ID NO: 1913403 - RNA, 19 nt, Artificial Sequence
  Description of Artificial Sequence: Synthetic oligonucleotide
ucugccuuagugaaauuuu

SEQ ID NO: 1913404 - RNA, 19 nt, Artificial Sequence
  Description of Artificial Sequence: Synthetic oligonucleotide
ucguccagcucuucaagag

SEQ ID NO: 1913405 - RNA, 19 nt, Artificial Sequence
  Description of Artificial Sequence: Synthetic oligonucleotide
guaagucuuaauucccaug

SEQ ID NO: 1913406 - RNA, 19 nt, Artificial Sequence
  Description of Artificial Sequence: Synthetic oligonucleotide
acucuuguauuaaauaccu

SEQ ID NO: 1913407 - RNA, 19 nt, Artificial Sequence
  Description of Artificial Sequence: Synthetic oligonucleotide
uccggcuuuucacucacug

SEQ ID NO: 1913408 - RNA, 19 nt, Artificial Sequence
  Description of Artificial Sequence: Synthetic oligonucleotide
aagucuuaauucccaugga

SEQ ID NO: 1913409 - RNA, 19 nt, Artificial Sequence
  Description of Artificial Sequence: Synthetic oligonucleotide
aaguuuuggcaauuucuuu

SEQ ID NO: 1913410 - RNA, 19 nt, Artificial Sequence
  Description of Artificial Sequence: Synthetic oligonucleotide
uucaagaggcagcucagau

SEQ ID NO: 1913411 - RNA, 19 nt, Artificial Sequence
  Description of Artificial Sequence: Synthetic oligonucleotide
cagucuuagaaggagguug

SEQ ID NO: 1913412 - RNA, 19 nt, Artificial Sequence
  Description of Artificial Sequence: Synthetic oligonucleotide
cauuucucaccauccgugc

SEQ ID NO: 1913413 - RNA, 19 nt, Artificial Sequence
  Description of Artificial Sequence: Synthetic oligonucleotide
gacaacaacagagccugag

SEQ ID NO: 1913414 - RNA, 19 nt, Artificial Sequence
  Description of Artificial Sequence: Synthetic oligonucleotide
aguucaaguucuuucugaa

SEQ ID NO: 1913415 - RNA, 19 nt, Artificial Sequence
  Description of Artificial Sequence: Synthetic oligonucleotide
agucuuagaaggagguugg

SEQ ID NO: 1913416 - RNA, 19 nt, Artificial Sequence
  Description of Artificial Sequence: Synthetic oligonucleotide
aguaggcaagaaaugagug

SEQ ID NO: 1913417 - RNA, 19 nt, Artificial Sequence
  Description of Artificial Sequence: Synthetic oligonucleotide
caaaaucaucuacuugaag

SEQ ID NO: 1913418 - RNA, 19 nt, Artificial Sequence
  Description of Artificial Sequence: Synthetic oligonucleotide
cugaaauugguugcauggg

SEQ ID NO: 1913419 - RNA, 19 nt, Artificial Sequence
  Description of Artificial Sequence: Synthetic oligonucleotide
auuuacucaaaaucaucua

SEQ ID NO: 1913420 - RNA, 19 nt, Artificial Sequence
  Description of Artificial Sequence: Synthetic oligonucleotide
uguaagucuuaauucccau

SEQ ID NO: 1913421 - RNA, 19 nt, Artificial Sequence
  Description of Artificial Sequence: Synthetic oligonucleotide
guagucuccaagugugaag

SEQ ID NO: 1913422 - RNA, 19 nt, Artificial Sequence
  Description of Artificial Sequence: Synthetic oligonucleotide
ucuaaacccaagucuuuaa

SEQ ID NO: 1913423 - RNA, 19 nt, Artificial Sequence
  Description of Artificial Sequence: Synthetic oligonucleotide
gagaagcucaacagaaaug

SEQ ID NO: 1913424 - RNA, 19 nt, Artificial Sequence
  Description of Artificial Sequence: Synthetic oligonucleotide
ugcuuugcaaagaacuguu

SEQ ID NO: 1913425 - RNA, 19 nt, Artificial Sequence
  Description of Artificial Sequence: Synthetic oligonucleotide
cuccaagcugcacuagucg

SEQ ID NO: 1913426 - RNA, 19 nt, Artificial Sequence
  Description of Artificial Sequence: Synthetic oligonucleotide
caaagucucggaaugaucu

SEQ ID NO: 1913427 - RNA, 19 nt, Artificial Sequence
  Description of Artificial Sequence: Synthetic oligonucleotide
  modified_base (12)..(12): a, c, u, g, unknown or other
uacaugucuuunuaucuua

SEQ ID NO: 1913428 - RNA, 19 nt, Artificial Sequence
  Description of Artificial Sequence: Synthetic oligonucleotide
guccuguaagucuuaauuc

SEQ ID NO: 1913429 - RNA, 19 nt, Artificial Sequence
  Description of Artificial Sequence: Synthetic oligonucleotide
ucuuagaaggagguuggcu

SEQ ID NO: 1913430 - RNA, 19 nt, Artificial Sequence
  Description of Artificial Sequence: Synthetic oligonucleotide
guuaguagccuuggaaggc

SEQ ID NO: 1913431 - RNA, 19 nt, Artificial Sequence
  Description of Artificial Sequence: Synthetic oligonucleotide
uccguaaguuuccuuuugu

SEQ ID NO: 1913432 - RNA, 19 nt, Artificial Sequence
  Description of Artificial Sequence: Synthetic oligonucleotide
cuccucugaaauugguugc

SEQ ID NO: 1913433 - RNA, 19 nt, Artificial Sequence
  Description of Artificial Sequence: Synthetic oligonucleotide
ugaucuauguagucuccaa

SEQ ID NO: 1913434 - RNA, 19 nt, Artificial Sequence
  Description of Artificial Sequence: Synthetic oligonucleotide
uucccaaguaggcaagaaa

SEQ ID NO: 1913435 - RNA, 19 nt, Artificial Sequence
  Description of Artificial Sequence: Synthetic oligonucleotide
cauccgugcgauaucugcc

SEQ ID NO: 1913436 - RNA, 19 nt, Artificial Sequence
  Description of Artificial Sequence: Synthetic oligonucleotide
cuucagaaaagauacuaua

SEQ ID NO: 1913437 - RNA, 19 nt, Artificial Sequence
  Description of Artificial Sequence: Synthetic oligonucleotide
ccuuggaaggcgaacaacc

SEQ ID NO: 1913438 - RNA, 19 nt, Artificial Sequence
  Description of Artificial Sequence: Synthetic oligonucleotide
aaagagggugugcaacaau

SEQ ID NO: 1913439 - RNA, 19 nt, Artificial Sequence
  Description of Artificial Sequence: Synthetic oligonucleotide
guuaucuucuaaacccaag

SEQ ID NO: 1913440 - RNA, 19 nt, Artificial Sequence
  Description of Artificial Sequence: Synthetic oligonucleotide
agaaagcaauugucagagg

SEQ ID NO: 1913441 - RNA, 19 nt, Artificial Sequence
  Description of Artificial Sequence: Synthetic oligonucleotide
cuuuucccaaguaggcaag

SEQ ID NO: 1913442 - RNA, 19 nt, Artificial Sequence
  Description of Artificial Sequence: Synthetic oligonucleotide
uucacucacugaagggagc

SEQ ID NO: 1913443 - RNA, 19 nt, Artificial Sequence
  Description of Artificial Sequence: Synthetic oligonucleotide
auggagguaagucguccag

SEQ ID NO: 1913444 - RNA, 19 nt, Artificial Sequence
  Description of Artificial Sequence: Synthetic oligonucleotide
auacgaacuuguccaaaga

SEQ ID NO: 1913445 - RNA, 19 nt, Artificial Sequence
  Description of Artificial Sequence: Synthetic oligonucleotide
gacuggguauuaucuccgg

SEQ ID NO: 1913446 - RNA, 19 nt, Artificial Sequence
  Description of Artificial Sequence: Synthetic oligonucleotide
  modified_base (18)..(18): a, c, u, g, unknown or other
ugcaucuacaugucuuunu

SEQ ID NO: 1913447 - RNA, 19 nt, Artificial Sequence
  Description of Artificial Sequence: Synthetic oligonucleotide
  modified_base (10)..(10): a, c, u, g, unknown or other
caugucuuunuaucuuaga

SEQ ID NO: 1913448 - RNA, 19 nt, Artificial Sequence
  Description of Artificial Sequence: Synthetic oligonucleotide
  modified_base (6)..(6): a, c, u, g, unknown or other
ucuuunuaucuuagacaaa

SEQ ID NO: 1913449 - RNA, 19 nt, Artificial Sequence
  Description of Artificial Sequence: Synthetic oligonucleotide
aaauaccugugggaauuug

SEQ ID NO: 1913450 - RNA, 19 nt, Artificial Sequence
  Description of Artificial Sequence: Synthetic oligonucleotide
  modified_base (5)..(5): a, c, u, g, unknown or other
cuuunuaucuuagacaaau

SEQ ID NO: 1913451 - RNA, 19 nt, Artificial Sequence
  Description of Artificial Sequence: Synthetic oligonucleotide
gugcauuucucaccauccg

SEQ ID NO: 1913452 - RNA, 19 nt, Artificial Sequence
  Description of Artificial Sequence: Synthetic oligonucleotide
ucucuugccuauuggaguu

SEQ ID NO: 1913453 - RNA, 19 nt, Artificial Sequence
  Description of Artificial Sequence: Synthetic oligonucleotide
accaaguucaaggcgauaa

SEQ ID NO: 1913454 - RNA, 19 nt, Artificial Sequence
  Description of Artificial Sequence: Synthetic oligonucleotide
aaagucucggaaugaucua

SEQ ID NO: 1913455 - RNA, 19 nt, Artificial Sequence
  Description of Artificial Sequence: Synthetic oligonucleotide
gguugcaugggagacaaug

SEQ ID NO: 1913456 - RNA, 19 nt, Artificial Sequence
  Description of Artificial Sequence: Synthetic oligonucleotide
caucacguuguguauauaa

SEQ ID NO: 1913457 - RNA, 19 nt, Artificial Sequence
  Description of Artificial Sequence: Synthetic oligonucleotide
caaaagagggugugcaaca

SEQ ID NO: 1913458 - RNA, 19 nt, Artificial Sequence
  Description of Artificial Sequence: Synthetic oligonucleotide
ugaccauauguugaauuuc

SEQ ID NO: 1913459 - RNA, 19 nt, Artificial Sequence
  Description of Artificial Sequence: Synthetic oligonucleotide
caauuucuuugcagaacac

SEQ ID NO: 1913460 - RNA, 19 nt, Artificial Sequence
  Description of Artificial Sequence: Synthetic oligonucleotide
ucucggaaugaucuaugua

SEQ ID NO: 1913461 - RNA, 19 nt, Artificial Sequence
  Description of Artificial Sequence: Synthetic oligonucleotide
ucaagaggcagcucagauu

SEQ ID NO: 1913462 - RNA, 19 nt, Artificial Sequence
  Description of Artificial Sequence: Synthetic oligonucleotide
aggaggauagaggcaaaag

SEQ ID NO: 1913463 - RNA, 19 nt, Artificial Sequence
  Description of Artificial Sequence: Synthetic oligonucleotide
aagucucggaaugaucuau

SEQ ID NO: 1913464 - RNA, 19 nt, Artificial Sequence
  Description of Artificial Sequence: Synthetic oligonucleotide
auuggaguuggcagacugg

SEQ ID NO: 1913465 - RNA, 19 nt, Artificial Sequence
  Description of Artificial Sequence: Synthetic oligonucleotide
acgaacuuguccaaagaga

SEQ ID NO: 1913466 - RNA, 19 nt, Artificial Sequence
  Description of Artificial Sequence: Synthetic oligonucleotide
uggguauuaucuccggcuu

SEQ ID NO: 1913467 - RNA, 19 nt, Artificial Sequence
  Description of Artificial Sequence: Synthetic oligonucleotide
gaauagauacgaacuuguc

SEQ ID NO: 1913468 - RNA, 19 nt, Artificial Sequence
  Description of Artificial Sequence: Synthetic oligonucleotide
aaaagagggugugcaacaa

SEQ ID NO: 1913469 - RNA, 19 nt, Artificial Sequence
  Description of Artificial Sequence: Synthetic oligonucleotide
agacuggguauuaucuccg

SEQ ID NO: 1913470 - RNA, 19 nt, Artificial Sequence
  Description of Artificial Sequence: Synthetic oligonucleotide
cuuugcaaagaacuguucu

SEQ ID NO: 1913471 - RNA, 19 nt, Artificial Sequence
  Description of Artificial Sequence: Synthetic oligonucleotide
ccguuaguagccuuggaag

SEQ ID NO: 1913472 - RNA, 19 nt, Artificial Sequence
  Description of Artificial Sequence: Synthetic oligonucleotide
ccuguaagucuuaauuccc

SEQ ID NO: 1913473 - RNA, 19 nt, Artificial Sequence
  Description of Artificial Sequence: Synthetic oligonucleotide
agagugcuuugcaaagaac

SEQ ID NO: 1913474 - RNA, 19 nt, Artificial Sequence
  Description of Artificial Sequence: Synthetic oligonucleotide
cucuuguauuaaauaccug

SEQ ID NO: 1913475 - RNA, 19 nt, Artificial Sequence
  Description of Artificial Sequence: Synthetic oligonucleotide
  modified_base (11)..(11): a, c, u, g, unknown or other
acaugucuuunuaucuuag

SEQ ID NO: 1913476 - RNA, 19 nt, Artificial Sequence
  Description of Artificial Sequence: Synthetic oligonucleotide
uauccagccuuuccacaga

SEQ ID NO: 1913477 - RNA, 19 nt, Artificial Sequence
  Description of Artificial Sequence: Synthetic oligonucleotide
agucgcugcaaagucucgg

SEQ ID NO: 1913478 - RNA, 19 nt, Artificial Sequence
  Description of Artificial Sequence: Synthetic oligonucleotide
gucuccaagugugaaggag

SEQ ID NO: 1913479 - RNA, 19 nt, Artificial Sequence
  Description of Artificial Sequence: Synthetic oligonucleotide
acuccaagcugcacuaguc

SEQ ID NO: 1913480 - RNA, 19 nt, Artificial Sequence
  Description of Artificial Sequence: Synthetic oligonucleotide
ccuccucugaaauugguug

SEQ ID NO: 1913481 - RNA, 19 nt, Artificial Sequence
  Description of Artificial Sequence: Synthetic oligonucleotide
uagccuuggaaggcgaaca

SEQ ID NO: 1913482 - RNA, 19 nt, Artificial Sequence
  Description of Artificial Sequence: Synthetic oligonucleotide
gaauggucccaguugguua

SEQ ID NO: 1913483 - RNA, 19 nt, Artificial Sequence
  Description of Artificial Sequence: Synthetic oligonucleotide
cuucccguuaguagccuug

SEQ ID NO: 1913484 - RNA, 19 nt, Artificial Sequence
  Description of Artificial Sequence: Synthetic oligonucleotide
gacaauggagguaagucgu

SEQ ID NO: 1913485 - RNA, 19 nt, Artificial Sequence
  Description of Artificial Sequence: Synthetic oligonucleotide
uucccguuaguagccuugg

SEQ ID NO: 1913486 - RNA, 19 nt, Artificial Sequence
  Description of Artificial Sequence: Synthetic oligonucleotide
ggugcauuucucaccaucc

SEQ ID NO: 1913487 - RNA, 19 nt, Artificial Sequence
  Description of Artificial Sequence: Synthetic oligonucleotide
gcaaagaacuguucucuug

SEQ ID NO: 1913488 - RNA, 19 nt, Artificial Sequence
  Description of Artificial Sequence: Synthetic oligonucleotide
gauuguagauaggcuacuc

SEQ ID NO: 1913489 - RNA, 19 nt, Artificial Sequence
  Description of Artificial Sequence: Synthetic oligonucleotide
uagucgcugcaaagucucg

SEQ ID NO: 1913490 - RNA, 19 nt, Artificial Sequence
  Description of Artificial Sequence: Synthetic oligonucleotide
auccagucuuagaaggagg

SEQ ID NO: 1913491 - RNA, 19 nt, Artificial Sequence
  Description of Artificial Sequence: Synthetic oligonucleotide
aaguccuguaagucuuaau

SEQ ID NO: 1913492 - RNA, 19 nt, Artificial Sequence
  Description of Artificial Sequence: Synthetic oligonucleotide
ugauuguagauaggcuacu

SEQ ID NO: 1913493 - RNA, 19 nt, Artificial Sequence
  Description of Artificial Sequence: Synthetic oligonucleotide
gaauucuggugaccauaug

SEQ ID NO: 1913494 - RNA, 19 nt, Artificial Sequence
  Description of Artificial Sequence: Synthetic oligonucleotide
cacuagucgcugcaaaguc

SEQ ID NO: 1913495 - RNA, 19 nt, Artificial Sequence
  Description of Artificial Sequence: Synthetic oligonucleotide
auccgugcgauaucugccu

SEQ ID NO: 1913496 - RNA, 19 nt, Artificial Sequence
  Description of Artificial Sequence: Synthetic oligonucleotide
uccacuccaagcugcacua

SEQ ID NO: 1913497 - RNA, 19 nt, Artificial Sequence
  Description of Artificial Sequence: Synthetic oligonucleotide
uccucugaaauugguugca

SEQ ID NO: 1913498 - RNA, 19 nt, Artificial Sequence
  Description of Artificial Sequence: Synthetic oligonucleotide
uagauacgaacuuguccaa

SEQ ID NO: 1913499 - RNA, 19 nt, Artificial Sequence
  Description of Artificial Sequence: Synthetic oligonucleotide
caauugucagaggacaaca

SEQ ID NO: 1913500 - RNA, 19 nt, Artificial Sequence
  Description of Artificial Sequence: Synthetic oligonucleotide
cauacugcgcuuuucccaa

SEQ ID NO: 1913501 - RNA, 19 nt, Artificial Sequence
  Description of Artificial Sequence: Synthetic oligonucleotide
uuggcugcaucuacauguc

SEQ ID NO: 1913502 - RNA, 19 nt, Artificial Sequence
  Description of Artificial Sequence: Synthetic oligonucleotide
cguuaguagccuuggaagg

SEQ ID NO: 1913503 - RNA, 19 nt, Artificial Sequence
  Description of Artificial Sequence: Synthetic oligonucleotide
uaucuccggcuuuucacuc

SEQ ID NO: 1913504 - RNA, 19 nt, Artificial Sequence
  Description of Artificial Sequence: Synthetic oligonucleotide
uagauaggcuacucuuguc

SEQ ID NO: 1913505 - RNA, 19 nt, Artificial Sequence
  Description of Artificial Sequence: Synthetic oligonucleotide
ggaauuugacaaugaugug

SEQ ID NO: 1913506 - RNA, 19 nt, Artificial Sequence
  Description of Artificial Sequence: Synthetic oligonucleotide
guagauaggcuacucuugu

SEQ ID NO: 1913507 - RNA, 19 nt, Artificial Sequence
  Description of Artificial Sequence: Synthetic oligonucleotide
aaauccacuccaagcugca

SEQ ID NO: 1913508 - RNA, 19 nt, Artificial Sequence
  Description of Artificial Sequence: Synthetic oligonucleotide
agauucaagacuggguauu

SEQ ID NO: 1913509 - RNA, 19 nt, Artificial Sequence
  Description of Artificial Sequence: Synthetic oligonucleotide
uccuccucugaaauugguu

SEQ ID NO: 1913510 - RNA, 19 nt, Artificial Sequence
  Description of Artificial Sequence: Synthetic oligonucleotide
uacugcgcuuuucccaagu

SEQ ID NO: 1913511 - RNA, 19 nt, Artificial Sequence
  Description of Artificial Sequence: Synthetic oligonucleotide
cuaaagcgucuuuuaagaa

SEQ ID NO: 1913512 - RNA, 19 nt, Artificial Sequence
  Description of Artificial Sequence: Synthetic oligonucleotide
uaguagccuuggaaggcga

SEQ ID NO: 1913513 - RNA, 19 nt, Artificial Sequence
  Description of Artificial Sequence: Synthetic oligonucleotide
ucuccguaaguuuccuuuu

SEQ ID NO: 1913514 - RNA, 19 nt, Artificial Sequence
  Description of Artificial Sequence: Synthetic oligonucleotide
acucacugaagggagcaga

SEQ ID NO: 1913515 - RNA, 19 nt, Artificial Sequence
  Description of Artificial Sequence: Synthetic oligonucleotide
acuagucgcugcaaagucu

SEQ ID NO: 1913516 - RNA, 19 nt, Artificial Sequence
  Description of Artificial Sequence: Synthetic oligonucleotide
ucaaggcgauaaaccuuca

SEQ ID NO: 1913517 - RNA, 19 nt, Artificial Sequence
  Description of Artificial Sequence: Synthetic oligonucleotide
augaucuauguagucucca

SEQ ID NO: 1913518 - RNA, 19 nt, Artificial Sequence
  Description of Artificial Sequence: Synthetic oligonucleotide
aguuagcaucuuuggaauu

SEQ ID NO: 1913519 - RNA, 19 nt, Artificial Sequence
  Description of Artificial Sequence: Synthetic oligonucleotide
uggcagacuggaaacuauu

SEQ ID NO: 1913520 - RNA, 19 nt, Artificial Sequence
  Description of Artificial Sequence: Synthetic oligonucleotide
acuucaucaggaauagaua

SEQ ID NO: 1913521 - RNA, 19 nt, Artificial Sequence
  Description of Artificial Sequence: Synthetic oligonucleotide
gcgauaucugccuuaguga

SEQ ID NO: 1913522 - RNA, 19 nt, Artificial Sequence
  Description of Artificial Sequence: Synthetic oligonucleotide
cuauguagucuccaagugu

SEQ ID NO: 1913523 - RNA, 19 nt, Artificial Sequence
  Description of Artificial Sequence: Synthetic oligonucleotide
cuggguauuaucuccggcu

SEQ ID NO: 1913524 - RNA, 19 nt, Artificial Sequence
  Description of Artificial Sequence: Synthetic oligonucleotide
gcgucuuuuaagaauuuac

SEQ ID NO: 1913525 - RNA, 19 nt, Artificial Sequence
  Description of Artificial Sequence: Synthetic oligonucleotide
uuucccaaguaggcaagaa

SEQ ID NO: 1913526 - RNA, 19 nt, Artificial Sequence
  Description of Artificial Sequence: Synthetic oligonucleotide
caacagagccugaggugag

SEQ ID NO: 1913527 - RNA, 19 nt, Artificial Sequence
  Description of Artificial Sequence: Synthetic oligonucleotide
cuugccuauuggaguuggc

SEQ ID NO: 1913528 - RNA, 19 nt, Artificial Sequence
  Description of Artificial Sequence: Synthetic oligonucleotide
aggcgaacaaccagaucuc

SEQ ID NO: 1913529 - RNA, 19 nt, Artificial Sequence
  Description of Artificial Sequence: Synthetic oligonucleotide
ucccauggagaaagcaauu

SEQ ID NO: 1913530 - RNA, 19 nt, Artificial Sequence
  Description of Artificial Sequence: Synthetic oligonucleotide
agagggugugcaacaaucu

SEQ ID NO: 1913531 - RNA, 19 nt, Artificial Sequence
  Description of Artificial Sequence: Synthetic oligonucleotide
caagcugcacuagucgcug

SEQ ID NO: 1913532 - RNA, 19 nt, Artificial Sequence
  Description of Artificial Sequence: Synthetic oligonucleotide
aucacguuguguauauaau

SEQ ID NO: 1913533 - RNA, 19 nt, Artificial Sequence
  Description of Artificial Sequence: Synthetic oligonucleotide
gcaaaagagggugugcaac

SEQ ID NO: 1913534 - RNA, 19 nt, Artificial Sequence
  Description of Artificial Sequence: Synthetic oligonucleotide
ucgcugcaaagucucggaa

SEQ ID NO: 1913535 - RNA, 19 nt, Artificial Sequence
  Description of Artificial Sequence: Synthetic oligonucleotide
aagucuccguaaguuuccu

SEQ ID NO: 1913536 - RNA, 19 nt, Artificial Sequence
  Description of Artificial Sequence: Synthetic oligonucleotide
gaaggcgaacaaccagauc

SEQ ID NO: 1913537 - RNA, 19 nt, Artificial Sequence
  Description of Artificial Sequence: Synthetic oligonucleotide
cucagauucaagacugggu

SEQ ID NO: 1913538 - RNA, 19 nt, Artificial Sequence
  Description of Artificial Sequence: Synthetic oligonucleotide
uggaucauacugcgcuuuu

SEQ ID NO: 1913539 - RNA, 19 nt, Artificial Sequence
  Description of Artificial Sequence: Synthetic oligonucleotide
uggaguuggcagacuggaa

SEQ ID NO: 1913540 - RNA, 19 nt, Artificial Sequence
  Description of Artificial Sequence: Synthetic oligonucleotide
agucucggaaugaucuaug

SEQ ID NO: 1913541 - RNA, 19 nt, Artificial Sequence
  Description of Artificial Sequence: Synthetic oligonucleotide
gucgcugcaaagucucgga

SEQ ID NO: 1913542 - RNA, 19 nt, Artificial Sequence
  Description of Artificial Sequence: Synthetic oligonucleotide
gauauucaucacguugugu

SEQ ID NO: 1913543 - RNA, 19 nt, Artificial Sequence
  Description of Artificial Sequence: Synthetic oligonucleotide
cacacucaguucaaguucu

SEQ ID NO: 1913544 - RNA, 19 nt, Artificial Sequence
  Description of Artificial Sequence: Synthetic oligonucleotide
aacagagccugaggugaga

SEQ ID NO: 1913545 - RNA, 19 nt, Artificial Sequence
  Description of Artificial Sequence: Synthetic oligonucleotide
ggaaacuauuccacaagga

SEQ ID NO: 1913546 - RNA, 19 nt, Artificial Sequence
  Description of Artificial Sequence: Synthetic oligonucleotide
gagguaagucguccagcuc

SEQ ID NO: 1913547 - RNA, 19 nt, Artificial Sequence
  Description of Artificial Sequence: Synthetic oligonucleotide
cagagugcuuugcaaagaa

SEQ ID NO: 1913548 - RNA, 19 nt, Artificial Sequence
  Description of Artificial Sequence: Synthetic oligonucleotide
gugaccauauguugaauuu

SEQ ID NO: 1913549 - RNA, 19 nt, Artificial Sequence
  Description of Artificial Sequence: Synthetic oligonucleotide
gaacaaccagaucucuagu

SEQ ID NO: 1913550 - RNA, 19 nt, Artificial Sequence
  Description of Artificial Sequence: Synthetic oligonucleotide
gucguccagcucuucaaga

SEQ ID NO: 1913551 - RNA, 19 nt, Artificial Sequence
  Description of Artificial Sequence: Synthetic oligonucleotide
gaggacaacaacagagccu

SEQ ID NO: 1913552 - RNA, 19 nt, Artificial Sequence
  Description of Artificial Sequence: Synthetic oligonucleotide
agcucagauucaagacugg

SEQ ID NO: 1913553 - RNA, 19 nt, Artificial Sequence
  Description of Artificial Sequence: Synthetic oligonucleotide
ggaauagauacgaacuugu

SEQ ID NO: 1913554 - RNA, 19 nt, Artificial Sequence
  Description of Artificial Sequence: Synthetic oligonucleotide
uccagacuucccguuagua

SEQ ID NO: 1913555 - RNA, 19 nt, Artificial Sequence
  Description of Artificial Sequence: Synthetic oligonucleotide
ggcuacucuugucuuaaga

SEQ ID NO: 1913556 - RNA, 19 nt, Artificial Sequence
  Description of Artificial Sequence: Synthetic oligonucleotide
auacugcgcuuuucccaag

SEQ ID NO: 1913557 - RNA, 19 nt, Artificial Sequence
  Description of Artificial Sequence: Synthetic oligonucleotide
ccaaguaggcaagaaauga

SEQ ID NO: 1913558 - RNA, 19 nt, Artificial Sequence
  Description of Artificial Sequence: Synthetic oligonucleotide
agauacgaacuuguccaaa

SEQ ID NO: 1913559 - RNA, 19 nt, Artificial Sequence
  Description of Artificial Sequence: Synthetic oligonucleotide
gcgauaaaccuucauauuu

SEQ ID NO: 1913560 - RNA, 19 nt, Artificial Sequence
  Description of Artificial Sequence: Synthetic oligonucleotide
auaggaguauuugcuuaau

SEQ ID NO: 1913561 - RNA, 19 nt, Artificial Sequence
  Description of Artificial Sequence: Synthetic oligonucleotide
guagccuuggaaggcgaac

SEQ ID NO: 1913562 - RNA, 19 nt, Artificial Sequence
  Description of Artificial Sequence: Synthetic oligonucleotide
ucccguuaguagccuugga

SEQ ID NO: 1913563 - RNA, 19 nt, Artificial Sequence
  Description of Artificial Sequence: Synthetic oligonucleotide
agccuuggaaggcgaacaa

SEQ ID NO: 1913564 - RNA, 19 nt, Artificial Sequence
  Description of Artificial Sequence: Synthetic oligonucleotide
agcaauugucagaggacaa

SEQ ID NO: 1913565 - RNA, 19 nt, Artificial Sequence
  Description of Artificial Sequence: Synthetic oligonucleotide
uuccacagagaagcucaac

SEQ ID NO: 1913566 - RNA, 19 nt, Artificial Sequence
  Description of Artificial Sequence: Synthetic oligonucleotide
cagucuguuauccagccuu

SEQ ID NO: 1913567 - RNA, 19 nt, Artificial Sequence
  Description of Artificial Sequence: Synthetic oligonucleotide
ggcuuuucacucacugaag

SEQ ID NO: 1913568 - RNA, 19 nt, Artificial Sequence
  Description of Artificial Sequence: Synthetic oligonucleotide
agcgucuuuuaagaauuua

SEQ ID NO: 1913569 - RNA, 19 nt, Artificial Sequence
  Description of Artificial Sequence: Synthetic oligonucleotide
uucucaccauccgugcgau

SEQ ID NO: 1913570 - RNA, 19 nt, Artificial Sequence
  Description of Artificial Sequence: Synthetic oligonucleotide
gcaacaaucugaauagccu

SEQ ID NO: 1913571 - RNA, 19 nt, Artificial Sequence
  Description of Artificial Sequence: Synthetic oligonucleotide
gaaguccuguaagucuuaa

SEQ ID NO: 1913572 - RNA, 19 nt, Artificial Sequence
  Description of Artificial Sequence: Synthetic oligonucleotide
gucuuagaaggagguuggc

SEQ ID NO: 1913573 - RNA, 19 nt, Artificial Sequence
  Description of Artificial Sequence: Synthetic oligonucleotide
ccuauuggaguuggcagac

SEQ ID NO: 1913574 - RNA, 19 nt, Artificial Sequence
  Description of Artificial Sequence: Synthetic oligonucleotide
acugcgcuuuucccaagua

SEQ ID NO: 1913575 - RNA, 19 nt, Artificial Sequence
  Description of Artificial Sequence: Synthetic oligonucleotide
caucaggaauagauacgaa

SEQ ID NO: 1913576 - RNA, 19 nt, Artificial Sequence
  Description of Artificial Sequence: Synthetic oligonucleotide
gucucggaaugaucuaugu

SEQ ID NO: 1913577 - RNA, 19 nt, Artificial Sequence
  Description of Artificial Sequence: Synthetic oligonucleotide
caaggucuucagaaaagau

SEQ ID NO: 1913578 - RNA, 19 nt, Artificial Sequence
  Description of Artificial Sequence: Synthetic oligonucleotide
cccauggagaaagcaauug

SEQ ID NO: 1913579 - RNA, 19 nt, Artificial Sequence
  Description of Artificial Sequence: Synthetic oligonucleotide
gaagcucaacagaaauggu

SEQ ID NO: 1913580 - RNA, 19 nt, Artificial Sequence
  Description of Artificial Sequence: Synthetic oligonucleotide
gcagaacacuucaucagga

SEQ ID NO: 1913581 - RNA, 19 nt, Artificial Sequence
  Description of Artificial Sequence: Synthetic oligonucleotide
uccgugcgauaucugccuu

SEQ ID NO: 1913582 - RNA, 19 nt, Artificial Sequence
  Description of Artificial Sequence: Synthetic oligonucleotide
ggugaccauauguugaauu

SEQ ID NO: 1913583 - RNA, 19 nt, Artificial Sequence
  Description of Artificial Sequence: Synthetic oligonucleotide
cacucacugaagggagcag

SEQ ID NO: 1913584 - RNA, 19 nt, Artificial Sequence
  Description of Artificial Sequence: Synthetic oligonucleotide
guauuaucuccggcuuuuc

SEQ ID NO: 1913585 - RNA, 19 nt, Artificial Sequence
  Description of Artificial Sequence: Synthetic oligonucleotide
cucaccauccgugcgauau

SEQ ID NO: 1913586 - RNA, 19 nt, Artificial Sequence
  Description of Artificial Sequence: Synthetic oligonucleotide
agucuccguaaguuuccuu

SEQ ID NO: 1913587 - RNA, 19 nt, Artificial Sequence
  Description of Artificial Sequence: Synthetic oligonucleotide
ccaagugugaaggaggaua

SEQ ID NO: 1913588 - RNA, 19 nt, Artificial Sequence
  Description of Artificial Sequence: Synthetic oligonucleotide
gcgcuuuucccaaguaggc

SEQ ID NO: 1913589 - RNA, 19 nt, Artificial Sequence
  Description of Artificial Sequence: Synthetic oligonucleotide
aaccaaguucaaggcgaua

SEQ ID NO: 1913590 - RNA, 19 nt, Artificial Sequence
  Description of Artificial Sequence: Synthetic oligonucleotide
acuauuccacaaggaggaa

SEQ ID NO: 1913591 - RNA, 19 nt, Artificial Sequence
  Description of Artificial Sequence: Synthetic oligonucleotide
gucaggaauggucccaguu

SEQ ID NO: 1913592 - RNA, 19 nt, Artificial Sequence
  Description of Artificial Sequence: Synthetic oligonucleotide
uaucugccuuagugaaauu

SEQ ID NO: 1913593 - RNA, 19 nt, Artificial Sequence
  Description of Artificial Sequence: Synthetic oligonucleotide
ggcaaaagagggugugcaa

SEQ ID NO: 1913594 - RNA, 19 nt, Artificial Sequence
  Description of Artificial Sequence: Synthetic oligonucleotide
auggucccaguugguuauc

SEQ ID NO: 1913595 - RNA, 19 nt, Artificial Sequence
  Description of Artificial Sequence: Synthetic oligonucleotide
ucaucacguuguguauaua

SEQ ID NO: 1913596 - RNA, 19 nt, Artificial Sequence
  Description of Artificial Sequence: Synthetic oligonucleotide
guuugcaguuagcaucuuu

SEQ ID NO: 1913597 - RNA, 19 nt, Artificial Sequence
  Description of Artificial Sequence: Synthetic oligonucleotide
agucuguuauccagccuuu

SEQ ID NO: 1913598 - RNA, 19 nt, Artificial Sequence
  Description of Artificial Sequence: Synthetic oligonucleotide
guucaaggcgauaaaccuu

SEQ ID NO: 1913599 - RNA, 19 nt, Artificial Sequence
  Description of Artificial Sequence: Synthetic oligonucleotide
caaccagaucucuagucuu

SEQ ID NO: 1913600 - RNA, 19 nt, Artificial Sequence
  Description of Artificial Sequence: Synthetic oligonucleotide
gucuguuauccagccuuuc

SEQ ID NO: 1913601 - RNA, 19 nt, Artificial Sequence
  Description of Artificial Sequence: Synthetic oligonucleotide
aguagccuuggaaggcgaa

SEQ ID NO: 1913602 - RNA, 19 nt, Artificial Sequence
  Description of Artificial Sequence: Synthetic oligonucleotide
ggaucauacugcgcuuuuc

SEQ ID NO: 1913603 - RNA, 19 nt, Artificial Sequence
  Description of Artificial Sequence: Synthetic oligonucleotide
cggaaugaucuauguaguc

SEQ ID NO: 1913604 - RNA, 19 nt, Artificial Sequence
  Description of Artificial Sequence: Synthetic oligonucleotide
cucuagucuucuucacacu

SEQ ID NO: 1913605 - RNA, 19 nt, Artificial Sequence
  Description of Artificial Sequence: Synthetic oligonucleotide
cccguuaguagccuuggaa

SEQ ID NO: 1913606 - RNA, 19 nt, Artificial Sequence
  Description of Artificial Sequence: Synthetic oligonucleotide
cgugcgauaucugccuuag

SEQ ID NO: 1913607 - RNA, 19 nt, Artificial Sequence
  Description of Artificial Sequence: Synthetic oligonucleotide
auggugcauuucucaccau

SEQ ID NO: 1913608 - RNA, 19 nt, Artificial Sequence
  Description of Artificial Sequence: Synthetic oligonucleotide
accauccgugcgauaucug

SEQ ID NO: 1913609 - RNA, 19 nt, Artificial Sequence
  Description of Artificial Sequence: Synthetic oligonucleotide
gguauuaucuccggcuuuu

SEQ ID NO: 1913610 - RNA, 19 nt, Artificial Sequence
  Description of Artificial Sequence: Synthetic oligonucleotide
guaagucguccagcucuuc

SEQ ID NO: 1913611 - RNA, 19 nt, Artificial Sequence
  Description of Artificial Sequence: Synthetic oligonucleotide
ggcgauaaaccuucauauu

SEQ ID NO: 1913612 - RNA, 19 nt, Artificial Sequence
  Description of Artificial Sequence: Synthetic oligonucleotide
gccuuggaaggcgaacaac

SEQ ID NO: 1913613 - RNA, 19 nt, Artificial Sequence
  Description of Artificial Sequence: Synthetic oligonucleotide
caggcuccagacuucccgu

SEQ ID NO: 1913614 - RNA, 19 nt, Artificial Sequence
  Description of Artificial Sequence: Synthetic oligonucleotide
uguuugcaguuagcaucuu

SEQ ID NO: 1913615 - RNA, 19 nt, Artificial Sequence
  Description of Artificial Sequence: Synthetic oligonucleotide
ucucaccauccgugcgaua

SEQ ID NO: 1913616 - RNA, 19 nt, Artificial Sequence
  Description of Artificial Sequence: Synthetic oligonucleotide
ccaguugguuaucuucuaa

SEQ ID NO: 1913617 - RNA, 19 nt, Artificial Sequence
  Description of Artificial Sequence: Synthetic oligonucleotide
ccaaguucaaggcgauaaa

SEQ ID NO: 1913618 - RNA, 19 nt, Artificial Sequence
  Description of Artificial Sequence: Synthetic oligonucleotide
ugguugcaugggagacaau

SEQ ID NO: 1913619 - RNA, 19 nt, Artificial Sequence
  Description of Artificial Sequence: Synthetic oligonucleotide
caccauccgugcgauaucu

SEQ ID NO: 1913620 - RNA, 19 nt, Artificial Sequence
  Description of Artificial Sequence: Synthetic oligonucleotide
caaggcgauaaaccuucau

SEQ ID NO: 1913621 - RNA, 19 nt, Artificial Sequence
  Description of Artificial Sequence: Synthetic oligonucleotide
ccggcuuuucacucacuga

SEQ ID NO: 1913622 - RNA, 19 nt, Artificial Sequence
  Description of Artificial Sequence: Synthetic oligonucleotide
gcaagaaaugagugucuuu

SEQ ID NO: 1913623 - RNA, 19 nt, Artificial Sequence
  Description of Artificial Sequence: Synthetic oligonucleotide
gggagacaauggagguaag

SEQ ID NO: 1913624 - RNA, 19 nt, Artificial Sequence
  Description of Artificial Sequence: Synthetic oligonucleotide
ggcuccagacuucccguua

SEQ ID NO: 1913625 - RNA, 19 nt, Artificial Sequence
  Description of Artificial Sequence: Synthetic oligonucleotide
ccaaagagacauaguuagu

SEQ ID NO: 1913626 - RNA, 19 nt, Artificial Sequence
  Description of Artificial Sequence: Synthetic oligonucleotide
ggcugcaucuacaugucuu

SEQ ID NO: 1913627 - RNA, 19 nt, Artificial Sequence
  Description of Artificial Sequence: Synthetic oligonucleotide
ggaaggcgaacaaccagau

SEQ ID NO: 1913628 - RNA, 19 nt, Artificial Sequence
  Description of Artificial Sequence: Synthetic oligonucleotide
cuggaucauacugcgcuuu

SEQ ID NO: 1913629 - RNA, 19 nt, Artificial Sequence
  Description of Artificial Sequence: Synthetic oligonucleotide
ggguauuaucuccggcuuu

SEQ ID NO: 1913630 - RNA, 19 nt, Artificial Sequence
  Description of Artificial Sequence: Synthetic oligonucleotide
ggaaguccuguaagucuua

SEQ ID NO: 1913631 - RNA, 19 nt, Artificial Sequence
  Description of Artificial Sequence: Synthetic oligonucleotide
ggcgaacaaccagaucucu

SEQ ID NO: 1913632 - RNA, 19 nt, Artificial Sequence
  Description of Artificial Sequence: Synthetic oligonucleotide
cacucaguucaaguucuuu

SEQ ID NO: 1913633 - RNA, 19 nt, Artificial Sequence
  Description of Artificial Sequence: Synthetic oligonucleotide
gcugcacuagucgcugcaa

SEQ ID NO: 1913634 - RNA, 19 nt, Artificial Sequence
  Description of Artificial Sequence: Synthetic oligonucleotide
ggugugcaacaaucugaau

SEQ ID NO: 1913635 - RNA, 19 nt, Artificial Sequence
  Description of Artificial Sequence: Synthetic oligonucleotide
cgcuuuucccaaguaggca

SEQ ID NO: 1913636 - RNA, 19 nt, Artificial Sequence
  Description of Artificial Sequence: Synthetic oligonucleotide
gugcgauaucugccuuagu

SEQ ID NO: 1913637 - RNA, 19 nt, Artificial Sequence
  Description of Artificial Sequence: Synthetic oligonucleotide
ccugugggaauuugacaau

SEQ ID NO: 1913638 - RNA, 19 nt, Artificial Sequence
  Description of Artificial Sequence: Synthetic oligonucleotide
gguaagucguccagcucuu

SEQ ID NO: 1913639 - RNA, 19 nt, Artificial Sequence
  Description of Artificial Sequence: Synthetic oligonucleotide
ggucccaguugguuaucuu

SEQ ID NO: 1913640 - RNA, 19 nt, Artificial Sequence
  Description of Artificial Sequence: Synthetic oligonucleotide
ccgugcgauaucugccuua

SEQ ID NO: 1913641 - RNA, 19 nt, Artificial Sequence
  Description of Artificial Sequence: Synthetic oligonucleotide
ccagucuguuauccagccu

SEQ ID NO: 1913642 - RNA, 19 nt, Artificial Sequence
  Description of Artificial Sequence: Synthetic oligonucleotide
ccucugaaauugguugcau

SEQ ID NO: 1913643 - RNA, 19 nt, Artificial Sequence
  Description of Artificial Sequence: Synthetic oligonucleotide
ccagucuuagaaggagguu

SEQ ID NO: 1913644 - RNA, 19 nt, Artificial Sequence
  Description of Artificial Sequence: Synthetic oligonucleotide
  modified_base (1)..(1): a, c, u, g, unknown or other
nuaucuuagacaaauccac

SEQ ID NO: 1913645 - RNA, 19 nt, Artificial Sequence
  Description of Artificial Sequence: Synthetic oligonucleotide
ucauugaggagacagaugc

SEQ ID NO: 1913646 - RNA, 19 nt, Artificial Sequence
  Description of Artificial Sequence: Synthetic oligonucleotide
acagguaacaaacaugggg

SEQ ID NO: 1913647 - RNA, 19 nt, Artificial Sequence
  Description of Artificial Sequence: Synthetic oligonucleotide
aaguguuucccacacagag

SEQ ID NO: 1913648 - RNA, 19 nt, Artificial Sequence
  Description of Artificial Sequence: Synthetic oligonucleotide
ucugagaacccucugagcc

SEQ ID NO: 1913649 - RNA, 19 nt, Artificial Sequence
  Description of Artificial Sequence: Synthetic oligonucleotide
uuagcuagaaucuuucuca

SEQ ID NO: 1913650 - RNA, 19 nt, Artificial Sequence
  Description of Artificial Sequence: Synthetic oligonucleotide
uuacuggugaucauugagg

SEQ ID NO: 1913651 - RNA, 19 nt, Artificial Sequence
  Description of Artificial Sequence: Synthetic oligonucleotide
gauuauggaucccugaggc

SEQ ID NO: 1913652 - RNA, 19 nt, Artificial Sequence
  Description of Artificial Sequence: Synthetic oligonucleotide
cauucuacaaagugaaggg

SEQ ID NO: 1913653 - RNA, 19 nt, Artificial Sequence
  Description of Artificial Sequence: Synthetic oligonucleotide
aaaauuggagauaucacug

SEQ ID NO: 1913654 - RNA, 19 nt, Artificial Sequence
  Description of Artificial Sequence: Synthetic oligonucleotide
gucaagguggacuauaugc

SEQ ID NO: 1913655 - RNA, 19 nt, Artificial Sequence
  Description of Artificial Sequence: Synthetic oligonucleotide
agauguaaggcgcugguuc

SEQ ID NO: 1913656 - RNA, 19 nt, Artificial Sequence
  Description of Artificial Sequence: Synthetic oligonucleotide
ugucacagcgguauggccg

SEQ ID NO: 1913657 - RNA, 19 nt, Artificial Sequence
  Description of Artificial Sequence: Synthetic oligonucleotide
ucauugaaguguuuuacug

SEQ ID NO: 1913658 - RNA, 19 nt, Artificial Sequence
  Description of Artificial Sequence: Synthetic oligonucleotide
accgauauggcuucucccc

SEQ ID NO: 1913659 - RNA, 19 nt, Artificial Sequence
  Description of Artificial Sequence: Synthetic oligonucleotide
ugaaguguuuuacugguga

SEQ ID NO: 1913660 - RNA, 19 nt, Artificial Sequence
  Description of Artificial Sequence: Synthetic oligonucleotide
aaugucacagcgguauggc

SEQ ID NO: 1913661 - RNA, 19 nt, Artificial Sequence
  Description of Artificial Sequence: Synthetic oligonucleotide
ugaaaguccgcccacacuc

SEQ ID NO: 1913662 - RNA, 19 nt, Artificial Sequence
  Description of Artificial Sequence: Synthetic oligonucleotide
acagagugcaccgauaugg

SEQ ID NO: 1913663 - RNA, 19 nt, Artificial Sequence
  Description of Artificial Sequence: Synthetic oligonucleotide
ugcaaguugggguaggaag

SEQ ID NO: 1913664 - RNA, 19 nt, Artificial Sequence
  Description of Artificial Sequence: Synthetic oligonucleotide
uuuagcuagaaucuuucuc

SEQ ID NO: 1913665 - RNA, 19 nt, Artificial Sequence
  Description of Artificial Sequence: Synthetic oligonucleotide
uggauuauggaucccugag

SEQ ID NO: 1913666 - RNA, 19 nt, Artificial Sequence
  Description of Artificial Sequence: Synthetic oligonucleotide
gugacuuucugacauggcg

SEQ ID NO: 1913667 - RNA, 19 nt, Artificial Sequence
  Description of Artificial Sequence: Synthetic oligonucleotide
ugagguucgaacuucggga

SEQ ID NO: 1913668 - RNA, 19 nt, Artificial Sequence
  Description of Artificial Sequence: Synthetic oligonucleotide
auugaaguguuuuacuggu

SEQ ID NO: 1913669 - RNA, 19 nt, Artificial Sequence
  Description of Artificial Sequence: Synthetic oligonucleotide
aaauuggagauaucacuga

SEQ ID NO: 1913670 - RNA, 19 nt, Artificial Sequence
  Description of Artificial Sequence: Synthetic oligonucleotide
ucgagaaaagcucuugcca

SEQ ID NO: 1913671 - RNA, 19 nt, Artificial Sequence
  Description of Artificial Sequence: Synthetic oligonucleotide
uucgaugauggacagccag

SEQ ID NO: 1913672 - RNA, 19 nt, Artificial Sequence
  Description of Artificial Sequence: Synthetic oligonucleotide
cuggugugcaccaaaauug

SEQ ID NO: 1913673 - RNA, 19 nt, Artificial Sequence
  Description of Artificial Sequence: Synthetic oligonucleotide
acucacagcagauguaagg

SEQ ID NO: 1913674 - RNA, 19 nt, Artificial Sequence
  Description of Artificial Sequence: Synthetic oligonucleotide
aagggaccauucuacaaag

SEQ ID NO: 1913675 - RNA, 19 nt, Artificial Sequence
  Description of Artificial Sequence: Synthetic oligonucleotide
aaaugucacagcgguaugg

SEQ ID NO: 1913676 - RNA, 19 nt, Artificial Sequence
  Description of Artificial Sequence: Synthetic oligonucleotide
ucaagguggacuauaugcu

SEQ ID NO: 1913677 - RNA, 19 nt, Artificial Sequence
  Description of Artificial Sequence: Synthetic oligonucleotide
auugguaguguuucucuuc

SEQ ID NO: 1913678 - RNA, 19 nt, Artificial Sequence
  Description of Artificial Sequence: Synthetic oligonucleotide
uggagcuucgagaaaagcu

SEQ ID NO: 1913679 - RNA, 19 nt, Artificial Sequence
  Description of Artificial Sequence: Synthetic oligonucleotide
caaacauggggaaugugag

SEQ ID NO: 1913680 - RNA, 19 nt, Artificial Sequence
  Description of Artificial Sequence: Synthetic oligonucleotide
ugugcaccaaaauuggaga

SEQ ID NO: 1913681 - RNA, 19 nt, Artificial Sequence
  Description of Artificial Sequence: Synthetic oligonucleotide
ggagauaucacugaaaguc

SEQ ID NO: 1913682 - RNA, 19 nt, Artificial Sequence
  Description of Artificial Sequence: Synthetic oligonucleotide
cuugaagccccuucgacag

SEQ ID NO: 1913683 - RNA, 19 nt, Artificial Sequence
  Description of Artificial Sequence: Synthetic oligonucleotide
gaaggguuugcagucaagg

SEQ ID NO: 1913684 - RNA, 19 nt, Artificial Sequence
  Description of Artificial Sequence: Synthetic oligonucleotide
uuugcagucaagguggcug

SEQ ID NO: 1913685 - RNA, 19 nt, Artificial Sequence
  Description of Artificial Sequence: Synthetic oligonucleotide
auaaaaggcuucucauccg

SEQ ID NO: 1913686 - RNA, 19 nt, Artificial Sequence
  Description of Artificial Sequence: Synthetic oligonucleotide
auaucacugaaaguccgcc

SEQ ID NO: 1913687 - RNA, 19 nt, Artificial Sequence
  Description of Artificial Sequence: Synthetic oligonucleotide
guguuucccacacagagug

SEQ ID NO: 1913688 - RNA, 19 nt, Artificial Sequence
  Description of Artificial Sequence: Synthetic oligonucleotide
uucgagaaaagcucuugcc

SEQ ID NO: 1913689 - RNA, 19 nt, Artificial Sequence
  Description of Artificial Sequence: Synthetic oligonucleotide
augagguucgaacuucggg

SEQ ID NO: 1913690 - RNA, 19 nt, Artificial Sequence
  Description of Artificial Sequence: Synthetic oligonucleotide
agaaucuuucucauccugc

SEQ ID NO: 1913691 - RNA, 19 nt, Artificial Sequence
  Description of Artificial Sequence: Synthetic oligonucleotide
ugacuuucugacauggcgu

SEQ ID NO: 1913692 - RNA, 19 nt, Artificial Sequence
  Description of Artificial Sequence: Synthetic oligonucleotide
aaguguuuuacuggugauc

SEQ ID NO: 1913693 - RNA, 19 nt, Artificial Sequence
  Description of Artificial Sequence: Synthetic oligonucleotide
aguguuuuacuggugauca

SEQ ID NO: 1913694 - RNA, 19 nt, Artificial Sequence
  Description of Artificial Sequence: Synthetic oligonucleotide
gugaucauugaggagacag

SEQ ID NO: 1913695 - RNA, 19 nt, Artificial Sequence
  Description of Artificial Sequence: Synthetic oligonucleotide
ucaagguggcugcagcagg

SEQ ID NO: 1913696 - RNA, 19 nt, Artificial Sequence
  Description of Artificial Sequence: Synthetic oligonucleotide
cauaugcaaucugagaacc

SEQ ID NO: 1913697 - RNA, 19 nt, Artificial Sequence
  Description of Artificial Sequence: Synthetic oligonucleotide
gauguaaggcgcugguucc

SEQ ID NO: 1913698 - RNA, 19 nt, Artificial Sequence
  Description of Artificial Sequence: Synthetic oligonucleotide
ucuggugugcaccaaaauu

SEQ ID NO: 1913699 - RNA, 19 nt, Artificial Sequence
  Description of Artificial Sequence: Synthetic oligonucleotide
ugacauggcguuuuggggu

SEQ ID NO: 1913700 - RNA, 19 nt, Artificial Sequence
  Description of Artificial Sequence: Synthetic oligonucleotide
ugcacacauauaaaaggcu

SEQ ID NO: 1913701 - RNA, 19 nt, Artificial Sequence
  Description of Artificial Sequence: Synthetic oligonucleotide
agguggauccucucgugcc

SEQ ID NO: 1913702 - RNA, 19 nt, Artificial Sequence
  Description of Artificial Sequence: Synthetic oligonucleotide
uacuggugaucauugagga

SEQ ID NO: 1913703 - RNA, 19 nt, Artificial Sequence
  Description of Artificial Sequence: Synthetic oligonucleotide
uccccuuuagcuagaaucu

SEQ ID NO: 1913704 - RNA, 19 nt, Artificial Sequence
  Description of Artificial Sequence: Synthetic oligonucleotide
cuaaaugccuccuucuguc

SEQ ID NO: 1913705 - RNA, 19 nt, Artificial Sequence
  Description of Artificial Sequence: Synthetic oligonucleotide
aaaaggcuucucauccgcc

SEQ ID NO: 1913706 - RNA, 19 nt, Artificial Sequence
  Description of Artificial Sequence: Synthetic oligonucleotide
aaaggcuucucauccgccu

SEQ ID NO: 1913707 - RNA, 19 nt, Artificial Sequence
  Description of Artificial Sequence: Synthetic oligonucleotide
cagguaacaaacaugggga

SEQ ID NO: 1913708 - RNA, 19 nt, Artificial Sequence
  Description of Artificial Sequence: Synthetic oligonucleotide
cuugcugguguguagugag

SEQ ID NO: 1913709 - RNA, 19 nt, Artificial Sequence
  Description of Artificial Sequence: Synthetic oligonucleotide
uguagugaggucugagcgc

SEQ ID NO: 1913710 - RNA, 19 nt, Artificial Sequence
  Description of Artificial Sequence: Synthetic oligonucleotide
aacaagggaccauucuaca

SEQ ID NO: 1913711 - RNA, 19 nt, Artificial Sequence
  Description of Artificial Sequence: Synthetic oligonucleotide
ugucggaugagguucgaac

SEQ ID NO: 1913712 - RNA, 19 nt, Artificial Sequence
  Description of Artificial Sequence: Synthetic oligonucleotide
caacaagggaccauucuac

SEQ ID NO: 1913713 - RNA, 19 nt, Artificial Sequence
  Description of Artificial Sequence: Synthetic oligonucleotide
acaaaugucacagcgguau

SEQ ID NO: 1913714 - RNA, 19 nt, Artificial Sequence
  Description of Artificial Sequence: Synthetic oligonucleotide
acccaaguguguuuucugg

SEQ ID NO: 1913715 - RNA, 19 nt, Artificial Sequence
  Description of Artificial Sequence: Synthetic oligonucleotide
gagguucgaacuucgggag

SEQ ID NO: 1913716 - RNA, 19 nt, Artificial Sequence
  Description of Artificial Sequence: Synthetic oligonucleotide
ugaucauugaggagacaga

SEQ ID NO: 1913717 - RNA, 19 nt, Artificial Sequence
  Description of Artificial Sequence: Synthetic oligonucleotide
cucggugcacucauaaggc

SEQ ID NO: 1913718 - RNA, 19 nt, Artificial Sequence
  Description of Artificial Sequence: Synthetic oligonucleotide
agcgguauggccgcugucc

SEQ ID NO: 1913719 - RNA, 19 nt, Artificial Sequence
  Description of Artificial Sequence: Synthetic oligonucleotide
gguucgaugauggacagcc

SEQ ID NO: 1913720 - RNA, 19 nt, Artificial Sequence
  Description of Artificial Sequence: Synthetic oligonucleotide
agauaucacugaaaguccg

SEQ ID NO: 1913721 - RNA, 19 nt, Artificial Sequence
  Description of Artificial Sequence: Synthetic oligonucleotide
auccucucgugccggaugc

SEQ ID NO: 1913722 - RNA, 19 nt, Artificial Sequence
  Description of Artificial Sequence: Synthetic oligonucleotide
agcaggguuccccuuuagc

SEQ ID NO: 1913723 - RNA, 19 nt, Artificial Sequence
  Description of Artificial Sequence: Synthetic oligonucleotide
cuucgagaaaagcucuugc

SEQ ID NO: 1913724 - RNA, 19 nt, Artificial Sequence
  Description of Artificial Sequence: Synthetic oligonucleotide
uguuuucuggugucggaug

SEQ ID NO: 1913725 - RNA, 19 nt, Artificial Sequence
  Description of Artificial Sequence: Synthetic oligonucleotide
ugugugugcaggauuuccu

SEQ ID NO: 1913726 - RNA, 19 nt, Artificial Sequence
  Description of Artificial Sequence: Synthetic oligonucleotide
guauuguugaagguuuugc

SEQ ID NO: 1913727 - RNA, 19 nt, Artificial Sequence
  Description of Artificial Sequence: Synthetic oligonucleotide
ucgaugauggacagccagc

SEQ ID NO: 1913728 - RNA, 19 nt, Artificial Sequence
  Description of Artificial Sequence: Synthetic oligonucleotide
aaugugagggucccuggau

SEQ ID NO: 1913729 - RNA, 19 nt, Artificial Sequence
  Description of Artificial Sequence: Synthetic oligonucleotide
ugcgguuggagcuucgaga

SEQ ID NO: 1913730 - RNA, 19 nt, Artificial Sequence
  Description of Artificial Sequence: Synthetic oligonucleotide
agaaaagcucuugccacac

SEQ ID NO: 1913731 - RNA, 19 nt, Artificial Sequence
  Description of Artificial Sequence: Synthetic oligonucleotide
guuuuacuggugaucauug

SEQ ID NO: 1913732 - RNA, 19 nt, Artificial Sequence
  Description of Artificial Sequence: Synthetic oligonucleotide
cacacauauaaaaggcuuc

SEQ ID NO: 1913733 - RNA, 19 nt, Artificial Sequence
  Description of Artificial Sequence: Synthetic oligonucleotide
uggacuauaugcucucccu

SEQ ID NO: 1913734 - RNA, 19 nt, Artificial Sequence
  Description of Artificial Sequence: Synthetic oligonucleotide
ggauuuccugauuucaaag

SEQ ID NO: 1913735 - RNA, 19 nt, Artificial Sequence
  Description of Artificial Sequence: Synthetic oligonucleotide
uccccauaugcaaucugag

SEQ ID NO: 1913736 - RNA, 19 nt, Artificial Sequence
  Description of Artificial Sequence: Synthetic oligonucleotide
ccauucuacaaagugaagg

SEQ ID NO: 1913737 - RNA, 19 nt, Artificial Sequence
  Description of Artificial Sequence: Synthetic oligonucleotide
agacagaugcaaguugggg

SEQ ID NO: 1913738 - RNA, 19 nt, Artificial Sequence
  Description of Artificial Sequence: Synthetic oligonucleotide
ucugaacacuuguauggcu

SEQ ID NO: 1913739 - RNA, 19 nt, Artificial Sequence
  Description of Artificial Sequence: Synthetic oligonucleotide
uuauggaucccugaggcuu

SEQ ID NO: 1913740 - RNA, 19 nt, Artificial Sequence
  Description of Artificial Sequence: Synthetic oligonucleotide
ggauuauggaucccugagg

SEQ ID NO: 1913741 - RNA, 19 nt, Artificial Sequence
  Description of Artificial Sequence: Synthetic oligonucleotide
cacucugaacacuuguaug

SEQ ID NO: 1913742 - RNA, 19 nt, Artificial Sequence
  Description of Artificial Sequence: Synthetic oligonucleotide
ggguuugcagucaaggugg

SEQ ID NO: 1913743 - RNA, 19 nt, Artificial Sequence
  Description of Artificial Sequence: Synthetic oligonucleotide
auaugcaaucugagaaccc

SEQ ID NO: 1913744 - RNA, 19 nt, Artificial Sequence
  Description of Artificial Sequence: Synthetic oligonucleotide
aggagacagaugcaaguug

SEQ ID NO: 1913745 - RNA, 19 nt, Artificial Sequence
  Description of Artificial Sequence: Synthetic oligonucleotide
acagaugcaaguuggggua

SEQ ID NO: 1913746 - RNA, 19 nt, Artificial Sequence
  Description of Artificial Sequence: Synthetic oligonucleotide
aaaugccuccuucugucaa

SEQ ID NO: 1913747 - RNA, 19 nt, Artificial Sequence
  Description of Artificial Sequence: Synthetic oligonucleotide
gauaucacugaaaguccgc

SEQ ID NO: 1913748 - RNA, 19 nt, Artificial Sequence
  Description of Artificial Sequence: Synthetic oligonucleotide
cuggugaucauugaggaga

SEQ ID NO: 1913749 - RNA, 19 nt, Artificial Sequence
  Description of Artificial Sequence: Synthetic oligonucleotide
ugugugcaggauuuccuga

SEQ ID NO: 1913750 - RNA, 19 nt, Artificial Sequence
  Description of Artificial Sequence: Synthetic oligonucleotide
ugucaagguggacuauaug

SEQ ID NO: 1913751 - RNA, 19 nt, Artificial Sequence
  Description of Artificial Sequence: Synthetic oligonucleotide
cagguggguucgaugaugg

SEQ ID NO: 1913752 - RNA, 19 nt, Artificial Sequence
  Description of Artificial Sequence: Synthetic oligonucleotide
acacauauaaaaggcuucu

SEQ ID NO: 1913753 - RNA, 19 nt, Artificial Sequence
  Description of Artificial Sequence: Synthetic oligonucleotide
acucucuaagcaggguucc

SEQ ID NO: 1913754 - RNA, 19 nt, Artificial Sequence
  Description of Artificial Sequence: Synthetic oligonucleotide
caaugggcuucccagggcc

SEQ ID NO: 1913755 - RNA, 19 nt, Artificial Sequence
  Description of Artificial Sequence: Synthetic oligonucleotide
ugagguuggagguauuguu

SEQ ID NO: 1913756 - RNA, 19 nt, Artificial Sequence
  Description of Artificial Sequence: Synthetic oligonucleotide
gaccauucuacaaagugaa

SEQ ID NO: 1913757 - RNA, 19 nt, Artificial Sequence
  Description of Artificial Sequence: Synthetic oligonucleotide
agcuagaaucuuucucauc

SEQ ID NO: 1913758 - RNA, 19 nt, Artificial Sequence
  Description of Artificial Sequence: Synthetic oligonucleotide
gacagaugcaaguuggggu

SEQ ID NO: 1913759 - RNA, 19 nt, Artificial Sequence
  Description of Artificial Sequence: Synthetic oligonucleotide
ugguguguucugagguugg

SEQ ID NO: 1913760 - RNA, 19 nt, Artificial Sequence
  Description of Artificial Sequence: Synthetic oligonucleotide
aagguggacuauaugcucu

SEQ ID NO: 1913761 - RNA, 19 nt, Artificial Sequence
  Description of Artificial Sequence: Synthetic oligonucleotide
guagugaggucugagcgcc

SEQ ID NO: 1913762 - RNA, 19 nt, Artificial Sequence
  Description of Artificial Sequence: Synthetic oligonucleotide
uucgggagaaguguuuccc

SEQ ID NO: 1913763 - RNA, 19 nt, Artificial Sequence
  Description of Artificial Sequence: Synthetic oligonucleotide
uucucauugaaguguuuua

SEQ ID NO: 1913764 - RNA, 19 nt, Artificial Sequence
  Description of Artificial Sequence: Synthetic oligonucleotide
acacucugaacacuuguau

SEQ ID NO: 1913765 - RNA, 19 nt, Artificial Sequence
  Description of Artificial Sequence: Synthetic oligonucleotide
uuuugggguguguuccuug

SEQ ID NO: 1913766 - RNA, 19 nt, Artificial Sequence
  Description of Artificial Sequence: Synthetic oligonucleotide
ugaacacuuguauggcuuc

SEQ ID NO: 1913767 - RNA, 19 nt, Artificial Sequence
  Description of Artificial Sequence: Synthetic oligonucleotide
ugaaggguuugcagucaag

SEQ ID NO: 1913768 - RNA, 19 nt, Artificial Sequence
  Description of Artificial Sequence: Synthetic oligonucleotide
gacauggcguuuuggggug

SEQ ID NO: 1913769 - RNA, 19 nt, Artificial Sequence
  Description of Artificial Sequence: Synthetic oligonucleotide
uggugucggaugagguucg

SEQ ID NO: 1913770 - RNA, 19 nt, Artificial Sequence
  Description of Artificial Sequence: Synthetic oligonucleotide
uugggguaggaagacaggu

SEQ ID NO: 1913771 - RNA, 19 nt, Artificial Sequence
  Description of Artificial Sequence: Synthetic oligonucleotide
caagguggacuauaugcuc

SEQ ID NO: 1913772 - RNA, 19 nt, Artificial Sequence
  Description of Artificial Sequence: Synthetic oligonucleotide
uggugaucauugaggagac

SEQ ID NO: 1913773 - RNA, 19 nt, Artificial Sequence
  Description of Artificial Sequence: Synthetic oligonucleotide
aggauuuccugauuucaaa

SEQ ID NO: 1913774 - RNA, 19 nt, Artificial Sequence
  Description of Artificial Sequence: Synthetic oligonucleotide
ugucugcccauguuccucc

SEQ ID NO: 1913775 - RNA, 19 nt, Artificial Sequence
  Description of Artificial Sequence: Synthetic oligonucleotide
auuauggaucccugaggcu

SEQ ID NO: 1913776 - RNA, 19 nt, Artificial Sequence
  Description of Artificial Sequence: Synthetic oligonucleotide
acacagagugcaccgauau

SEQ ID NO: 1913777 - RNA, 19 nt, Artificial Sequence
  Description of Artificial Sequence: Synthetic oligonucleotide
uugcagucaagguggcugc

SEQ ID NO: 1913778 - RNA, 19 nt, Artificial Sequence
  Description of Artificial Sequence: Synthetic oligonucleotide
ugugugugugugcaggauu

SEQ ID NO: 1913779 - RNA, 19 nt, Artificial Sequence
  Description of Artificial Sequence: Synthetic oligonucleotide
auucuacaaagugaagggu

SEQ ID NO: 1913780 - RNA, 19 nt, Artificial Sequence
  Description of Artificial Sequence: Synthetic oligonucleotide
ugaagccccuucgacaggc

SEQ ID NO: 1913781 - RNA, 19 nt, Artificial Sequence
  Description of Artificial Sequence: Synthetic oligonucleotide
gaaaguccgcccacacucg

SEQ ID NO: 1913782 - RNA, 19 nt, Artificial Sequence
  Description of Artificial Sequence: Synthetic oligonucleotide
agugaggucugagcgccgc

SEQ ID NO: 1913783 - RNA, 19 nt, Artificial Sequence
  Description of Artificial Sequence: Synthetic oligonucleotide
ugguguguagugaggucug

SEQ ID NO: 1913784 - RNA, 19 nt, Artificial Sequence
  Description of Artificial Sequence: Synthetic oligonucleotide
ugugugugugugugcagga

SEQ ID NO: 1913785 - RNA, 19 nt, Artificial Sequence
  Description of Artificial Sequence: Synthetic oligonucleotide
gugugugugugugugcagg

SEQ ID NO: 1913786 - RNA, 19 nt, Artificial Sequence
  Description of Artificial Sequence: Synthetic oligonucleotide
ugugugugugugugugugc

SEQ ID NO: 1913787 - RNA, 19 nt, Artificial Sequence
  Description of Artificial Sequence: Synthetic oligonucleotide
cacucucuaagcaggguuc

SEQ ID NO: 1913788 - RNA, 19 nt, Artificial Sequence
  Description of Artificial Sequence: Synthetic oligonucleotide
ugagccauccacucuccaa

SEQ ID NO: 1913789 - RNA, 19 nt, Artificial Sequence
  Description of Artificial Sequence: Synthetic oligonucleotide
ucgggcagugacuuucuga

SEQ ID NO: 1913790 - RNA, 19 nt, Artificial Sequence
  Description of Artificial Sequence: Synthetic oligonucleotide
ucggugcacucauaaggcc

SEQ ID NO: 1913791 - RNA, 19 nt, Artificial Sequence
  Description of Artificial Sequence: Synthetic oligonucleotide
agugacuuucugacauggc

SEQ ID NO: 1913792 - RNA, 19 nt, Artificial Sequence
  Description of Artificial Sequence: Synthetic oligonucleotide
cagagugcaccgauauggc

SEQ ID NO: 1913793 - RNA, 19 nt, Artificial Sequence
  Description of Artificial Sequence: Synthetic oligonucleotide
uccugugugugugugugug

SEQ ID NO: 1913794 - RNA, 19 nt, Artificial Sequence
  Description of Artificial Sequence: Synthetic oligonucleotide
uauggaucccugaggcuuc

SEQ ID NO: 1913795 - RNA, 19 nt, Artificial Sequence
  Description of Artificial Sequence: Synthetic oligonucleotide
uggguucgaugauggacag

SEQ ID NO: 1913796 - RNA, 19 nt, Artificial Sequence
  Description of Artificial Sequence: Synthetic oligonucleotide
uccgcugguguguucugag

SEQ ID NO: 1913797 - RNA, 19 nt, Artificial Sequence
  Description of Artificial Sequence: Synthetic oligonucleotide
ugugugugugugugugcag

SEQ ID NO: 1913798 - RNA, 19 nt, Artificial Sequence
  Description of Artificial Sequence: Synthetic oligonucleotide
cucugaacacuuguauggc

SEQ ID NO: 1913799 - RNA, 19 nt, Artificial Sequence
  Description of Artificial Sequence: Synthetic oligonucleotide
uggagguauuguugaaggu

SEQ ID NO: 1913800 - RNA, 19 nt, Artificial Sequence
  Description of Artificial Sequence: Synthetic oligonucleotide
ugugagggucccuggauua

SEQ ID NO: 1913801 - RNA, 19 nt, Artificial Sequence
  Description of Artificial Sequence: Synthetic oligonucleotide
caaucugagaacccucuga

SEQ ID NO: 1913802 - RNA, 19 nt, Artificial Sequence
  Description of Artificial Sequence: Synthetic oligonucleotide
uucgacaggcuugucugcc

SEQ ID NO: 1913803 - RNA, 19 nt, Artificial Sequence
  Description of Artificial Sequence: Synthetic oligonucleotide
agucaagguggcugcagca

SEQ ID NO: 1913804 - RNA, 19 nt, Artificial Sequence
  Description of Artificial Sequence: Synthetic oligonucleotide
cuuccugugugugugugug

SEQ ID NO: 1913805 - RNA, 19 nt, Artificial Sequence
  Description of Artificial Sequence: Synthetic oligonucleotide
gucacagcgguauggccgc

SEQ ID NO: 1913806 - RNA, 19 nt, Artificial Sequence
  Description of Artificial Sequence: Synthetic oligonucleotide
aaggcgcugguuccaggug

SEQ ID NO: 1913807 - RNA, 19 nt, Artificial Sequence
  Description of Artificial Sequence: Synthetic oligonucleotide
agguaacaaacauggggaa

SEQ ID NO: 1913808 - RNA, 19 nt, Artificial Sequence
  Description of Artificial Sequence: Synthetic oligonucleotide
ugcaggauuuccugauuuc

SEQ ID NO: 1913809 - RNA, 19 nt, Artificial Sequence
  Description of Artificial Sequence: Synthetic oligonucleotide
ucggaugagguucgaacuu

SEQ ID NO: 1913810 - RNA, 19 nt, Artificial Sequence
  Description of Artificial Sequence: Synthetic oligonucleotide
ggcaaugggcuucccaggg

SEQ ID NO: 1913811 - RNA, 19 nt, Artificial Sequence
  Description of Artificial Sequence: Synthetic oligonucleotide
agagugcaccgauauggcu

SEQ ID NO: 1913812 - RNA, 19 nt, Artificial Sequence
  Description of Artificial Sequence: Synthetic oligonucleotide
caccgauauggcuucuccc

SEQ ID NO: 1913813 - RNA, 19 nt, Artificial Sequence
  Description of Artificial Sequence: Synthetic oligonucleotide
cagcguggcacucuggcug

SEQ ID NO: 1913814 - RNA, 19 nt, Artificial Sequence
  Description of Artificial Sequence: Synthetic oligonucleotide
gaaugugagggucccugga

SEQ ID NO: 1913815 - RNA, 19 nt, Artificial Sequence
  Description of Artificial Sequence: Synthetic oligonucleotide
uugaagccccuucgacagg

SEQ ID NO: 1913816 - RNA, 19 nt, Artificial Sequence
  Description of Artificial Sequence: Synthetic oligonucleotide
uucucuggugugcaccaaa

SEQ ID NO: 1913817 - RNA, 19 nt, Artificial Sequence
  Description of Artificial Sequence: Synthetic oligonucleotide
uguaaggcgcugguuccag

SEQ ID NO: 1913818 - RNA, 19 nt, Artificial Sequence
  Description of Artificial Sequence: Synthetic oligonucleotide
auaugcucucccucacucu

SEQ ID NO: 1913819 - RNA, 19 nt, Artificial Sequence
  Description of Artificial Sequence: Synthetic oligonucleotide
gggguguguuccuugaagc

SEQ ID NO: 1913820 - RNA, 19 nt, Artificial Sequence
  Description of Artificial Sequence: Synthetic oligonucleotide
uagcuagaaucuuucucau

SEQ ID NO: 1913821 - RNA, 19 nt, Artificial Sequence
  Description of Artificial Sequence: Synthetic oligonucleotide
ggagcuucgagaaaagcuc

SEQ ID NO: 1913822 - RNA, 19 nt, Artificial Sequence
  Description of Artificial Sequence: Synthetic oligonucleotide
acgguggugcaccccaaag

SEQ ID NO: 1913823 - RNA, 19 nt, Artificial Sequence
  Description of Artificial Sequence: Synthetic oligonucleotide
aguccgcccacacucggug

SEQ ID NO: 1913824 - RNA, 19 nt, Artificial Sequence
  Description of Artificial Sequence: Synthetic oligonucleotide
guggguucgaugauggaca

SEQ ID NO: 1913825 - RNA, 19 nt, Artificial Sequence
  Description of Artificial Sequence: Synthetic oligonucleotide
acacucggugcacucauaa

SEQ ID NO: 1913826 - RNA, 19 nt, Artificial Sequence
  Description of Artificial Sequence: Synthetic oligonucleotide
ucacccaaguguguuuucu

SEQ ID NO: 1913827 - RNA, 19 nt, Artificial Sequence
  Description of Artificial Sequence: Synthetic oligonucleotide
ugggguaggaagacaggua

SEQ ID NO: 1913828 - RNA, 19 nt, Artificial Sequence
  Description of Artificial Sequence: Synthetic oligonucleotide
ucugucaagguggacuaua

SEQ ID NO: 1913829 - RNA, 19 nt, Artificial Sequence
  Description of Artificial Sequence: Synthetic oligonucleotide
gguguguuccuugaagccc

SEQ ID NO: 1913830 - RNA, 19 nt, Artificial Sequence
  Description of Artificial Sequence: Synthetic oligonucleotide
aucuugcugguguguagug

SEQ ID NO: 1913831 - RNA, 19 nt, Artificial Sequence
  Description of Artificial Sequence: Synthetic oligonucleotide
augcgguuggagcuucgag

SEQ ID NO: 1913832 - RNA, 19 nt, Artificial Sequence
  Description of Artificial Sequence: Synthetic oligonucleotide
ugcaccaaaauuggagaua

SEQ ID NO: 1913833 - RNA, 19 nt, Artificial Sequence
  Description of Artificial Sequence: Synthetic oligonucleotide
ccauaugcaaucugagaac

SEQ ID NO: 1913834 - RNA, 19 nt, Artificial Sequence
  Description of Artificial Sequence: Synthetic oligonucleotide
ugugugugugugugugugu

SEQ ID NO: 1913835 - RNA, 19 nt, Artificial Sequence
  Description of Artificial Sequence: Synthetic oligonucleotide
ggaaugugagggucccugg

SEQ ID NO: 1913836 - RNA, 19 nt, Artificial Sequence
  Description of Artificial Sequence: Synthetic oligonucleotide
cuucgacaggcuugucugc

SEQ ID NO: 1913837 - RNA, 19 nt, Artificial Sequence
  Description of Artificial Sequence: Synthetic oligonucleotide
ccuucgacaggcuugucug

SEQ ID NO: 1913838 - RNA, 19 nt, Artificial Sequence
  Description of Artificial Sequence: Synthetic oligonucleotide
cagguggauccucucgugc

SEQ ID NO: 1913839 - RNA, 19 nt, Artificial Sequence
  Description of Artificial Sequence: Synthetic oligonucleotide
gucaagguggcugcagcag

SEQ ID NO: 1913840 - RNA, 19 nt, Artificial Sequence
  Description of Artificial Sequence: Synthetic oligonucleotide
aucauugaggagacagaug

SEQ ID NO: 1913841 - RNA, 19 nt, Artificial Sequence
  Description of Artificial Sequence: Synthetic oligonucleotide
cugugugugugugugugug

SEQ ID NO: 1913842 - RNA, 19 nt, Artificial Sequence
  Description of Artificial Sequence: Synthetic oligonucleotide
ucgacaggcuugucugccc

SEQ ID NO: 1913843 - RNA, 19 nt, Artificial Sequence
  Description of Artificial Sequence: Synthetic oligonucleotide
gugugugugugugugugug

SEQ ID NO: 1913844 - RNA, 19 nt, Artificial Sequence
  Description of Artificial Sequence: Synthetic oligonucleotide
ugagaacccucugagccau

SEQ ID NO: 1913845 - RNA, 19 nt, Artificial Sequence
  Description of Artificial Sequence: Synthetic oligonucleotide
caaguugggguaggaagac

SEQ ID NO: 1913846 - RNA, 19 nt, Artificial Sequence
  Description of Artificial Sequence: Synthetic oligonucleotide
guggguacgguggugcacc

SEQ ID NO: 1913847 - RNA, 19 nt, Artificial Sequence
  Description of Artificial Sequence: Synthetic oligonucleotide
auuggagauaucacugaaa

SEQ ID NO: 1913848 - RNA, 19 nt, Artificial Sequence
  Description of Artificial Sequence: Synthetic oligonucleotide
agaugcaaguugggguagg

SEQ ID NO: 1913849 - RNA, 19 nt, Artificial Sequence
  Description of Artificial Sequence: Synthetic oligonucleotide
uccgcccacacucggugca

SEQ ID NO: 1913850 - RNA, 19 nt, Artificial Sequence
  Description of Artificial Sequence: Synthetic oligonucleotide
ugugcaggauuuccugauu

SEQ ID NO: 1913851 - RNA, 19 nt, Artificial Sequence
  Description of Artificial Sequence: Synthetic oligonucleotide
ggguguguuccuugaagcc

SEQ ID NO: 1913852 - RNA, 19 nt, Artificial Sequence
  Description of Artificial Sequence: Synthetic oligonucleotide
ucugagcgccgccggaaac

SEQ ID NO: 1913853 - RNA, 19 nt, Artificial Sequence
  Description of Artificial Sequence: Synthetic oligonucleotide
gugugugugcaggauuucc

SEQ ID NO: 1913854 - RNA, 19 nt, Artificial Sequence
  Description of Artificial Sequence: Synthetic oligonucleotide
guaaggcgcugguuccagg

SEQ ID NO: 1913855 - RNA, 19 nt, Artificial Sequence
  Description of Artificial Sequence: Synthetic oligonucleotide
acuuggcacauugguagug

SEQ ID NO: 1913856 - RNA, 19 nt, Artificial Sequence
  Description of Artificial Sequence: Synthetic oligonucleotide
ggaccauucuacaaaguga

SEQ ID NO: 1913857 - RNA, 19 nt, Artificial Sequence
  Description of Artificial Sequence: Synthetic oligonucleotide
ugucccaggugaucuugcu

SEQ ID NO: 1913858 - RNA, 19 nt, Artificial Sequence
  Description of Artificial Sequence: Synthetic oligonucleotide
ccugacacuuggcacauug

SEQ ID NO: 1913859 - RNA, 19 nt, Artificial Sequence
  Description of Artificial Sequence: Synthetic oligonucleotide
cucuugccacaaaugucac

SEQ ID NO: 1913860 - RNA, 19 nt, Artificial Sequence
  Description of Artificial Sequence: Synthetic oligonucleotide
aggugaucuugcuggugug

SEQ ID NO: 1913861 - RNA, 19 nt, Artificial Sequence
  Description of Artificial Sequence: Synthetic oligonucleotide
cacucggugcacucauaag

SEQ ID NO: 1913862 - RNA, 19 nt, Artificial Sequence
  Description of Artificial Sequence: Synthetic oligonucleotide
cuggauuauggaucccuga

SEQ ID NO: 1913863 - RNA, 19 nt, Artificial Sequence
  Description of Artificial Sequence: Synthetic oligonucleotide
cuucugucaagguggacua

SEQ ID NO: 1913864 - RNA, 19 nt, Artificial Sequence
  Description of Artificial Sequence: Synthetic oligonucleotide
cacauauaaaaggcuucuc

SEQ ID NO: 1913865 - RNA, 19 nt, Artificial Sequence
  Description of Artificial Sequence: Synthetic oligonucleotide
ucgugccggaugcgguugg

SEQ ID NO: 1913866 - RNA, 19 nt, Artificial Sequence
  Description of Artificial Sequence: Synthetic oligonucleotide
guguguucugagguuggag

SEQ ID NO: 1913867 - RNA, 19 nt, Artificial Sequence
  Description of Artificial Sequence: Synthetic oligonucleotide
cugucccaggugaucuugc

SEQ ID NO: 1913868 - RNA, 19 nt, Artificial Sequence
  Description of Artificial Sequence: Synthetic oligonucleotide
agugaaggguuugcaguca

SEQ ID NO: 1913869 - RNA, 19 nt, Artificial Sequence
  Description of Artificial Sequence: Synthetic oligonucleotide
ggaugagguucgaacuucg

SEQ ID NO: 1913870 - RNA, 19 nt, Artificial Sequence
  Description of Artificial Sequence: Synthetic oligonucleotide
uguucugagguuggaggua

SEQ ID NO: 1913871 - RNA, 19 nt, Artificial Sequence
  Description of Artificial Sequence: Synthetic oligonucleotide
augugagggucccuggauu

SEQ ID NO: 1913872 - RNA, 19 nt, Artificial Sequence
  Description of Artificial Sequence: Synthetic oligonucleotide
gacacuuggcacauuggua

SEQ ID NO: 1913873 - RNA, 19 nt, Artificial Sequence
  Description of Artificial Sequence: Synthetic oligonucleotide
gaaguguuucccacacaga

SEQ ID NO: 1913874 - RNA, 19 nt, Artificial Sequence
  Description of Artificial Sequence: Synthetic oligonucleotide
gguauggccgcugucccag

SEQ ID NO: 1913875 - RNA, 19 nt, Artificial Sequence
  Description of Artificial Sequence: Synthetic oligonucleotide
agguucgaacuucgggaga

SEQ ID NO: 1913876 - RNA, 19 nt, Artificial Sequence
  Description of Artificial Sequence: Synthetic oligonucleotide
ucuccccucuguguguucu

SEQ ID NO: 1913877 - RNA, 19 nt, Artificial Sequence
  Description of Artificial Sequence: Synthetic oligonucleotide
ucccugaggcuuccugugu

SEQ ID NO: 1913878 - RNA, 19 nt, Artificial Sequence
  Description of Artificial Sequence: Synthetic oligonucleotide
cucauccugcucacccaag

SEQ ID NO: 1913879 - RNA, 19 nt, Artificial Sequence
  Description of Artificial Sequence: Synthetic oligonucleotide
gcugguuccagguggguuc

SEQ ID NO: 1913880 - RNA, 19 nt, Artificial Sequence
  Description of Artificial Sequence: Synthetic oligonucleotide
gguacgguggugcacccca

SEQ ID NO: 1913881 - RNA, 19 nt, Artificial Sequence
  Description of Artificial Sequence: Synthetic oligonucleotide
uccgccucugggcuugaaa

SEQ ID NO: 1913882 - RNA, 19 nt, Artificial Sequence
  Description of Artificial Sequence: Synthetic oligonucleotide
cacagagugcaccgauaug

SEQ ID NO: 1913883 - RNA, 19 nt, Artificial Sequence
  Description of Artificial Sequence: Synthetic oligonucleotide
guaggaagacagguaacaa

SEQ ID NO: 1913884 - RNA, 19 nt, Artificial Sequence
  Description of Artificial Sequence: Synthetic oligonucleotide
accauucuacaaagugaag

SEQ ID NO: 1913885 - RNA, 19 nt, Artificial Sequence
  Description of Artificial Sequence: Synthetic oligonucleotide
gguggugcaccccaaagcu

SEQ ID NO: 1913886 - RNA, 19 nt, Artificial Sequence
  Description of Artificial Sequence: Synthetic oligonucleotide
cugguuccagguggguucg

SEQ ID NO: 1913887 - RNA, 19 nt, Artificial Sequence
  Description of Artificial Sequence: Synthetic oligonucleotide
gaugcaaguugggguagga

SEQ ID NO: 1913888 - RNA, 19 nt, Artificial Sequence
  Description of Artificial Sequence: Synthetic oligonucleotide
gugugugugugugugugca

SEQ ID NO: 1913889 - RNA, 19 nt, Artificial Sequence
  Description of Artificial Sequence: Synthetic oligonucleotide
ggacuauaugcucucccuc

SEQ ID NO: 1913890 - RNA, 19 nt, Artificial Sequence
  Description of Artificial Sequence: Synthetic oligonucleotide
gagcuauugcugaagcucu

SEQ ID NO: 1913891 - RNA, 19 nt, Artificial Sequence
  Description of Artificial Sequence: Synthetic oligonucleotide
agcguggcacucuggcuga

SEQ ID NO: 1913892 - RNA, 19 nt, Artificial Sequence
  Description of Artificial Sequence: Synthetic oligonucleotide
guguucugagguuggaggu

SEQ ID NO: 1913893 - RNA, 19 nt, Artificial Sequence
  Description of Artificial Sequence: Synthetic oligonucleotide
cagaugcaaguugggguag

SEQ ID NO: 1913894 - RNA, 19 nt, Artificial Sequence
  Description of Artificial Sequence: Synthetic oligonucleotide
gcaaguugggguaggaaga

SEQ ID NO: 1913895 - RNA, 19 nt, Artificial Sequence
  Description of Artificial Sequence: Synthetic oligonucleotide
aacuucgggagaaguguuu

SEQ ID NO: 1913896 - RNA, 19 nt, Artificial Sequence
  Description of Artificial Sequence: Synthetic oligonucleotide
acagcagauguaaggcgcu

SEQ ID NO: 1913897 - RNA, 19 nt, Artificial Sequence
  Description of Artificial Sequence: Synthetic oligonucleotide
auggccgcugucccaggug

SEQ ID NO: 1913898 - RNA, 19 nt, Artificial Sequence
  Description of Artificial Sequence: Synthetic oligonucleotide
gauccgcugguguguucug

SEQ ID NO: 1913899 - RNA, 19 nt, Artificial Sequence
  Description of Artificial Sequence: Synthetic oligonucleotide
uuccugugugugugugugu

SEQ ID NO: 1913900 - RNA, 19 nt, Artificial Sequence
  Description of Artificial Sequence: Synthetic oligonucleotide
gcaaucugagaacccucug

SEQ ID NO: 1913901 - RNA, 19 nt, Artificial Sequence
  Description of Artificial Sequence: Synthetic oligonucleotide
gcuucgagaaaagcucuug

SEQ ID NO: 1913902 - RNA, 19 nt, Artificial Sequence
  Description of Artificial Sequence: Synthetic oligonucleotide
ugugugugugcaggauuuc

SEQ ID NO: 1913903 - RNA, 19 nt, Artificial Sequence
  Description of Artificial Sequence: Synthetic oligonucleotide
gccagcguggcacucuggc

SEQ ID NO: 1913904 - RNA, 19 nt, Artificial Sequence
  Description of Artificial Sequence: Synthetic oligonucleotide
ucucgugccggaugcgguu

SEQ ID NO: 1913905 - RNA, 19 nt, Artificial Sequence
  Description of Artificial Sequence: Synthetic oligonucleotide
ccuggauuauggaucccug

SEQ ID NO: 1913906 - RNA, 19 nt, Artificial Sequence
  Description of Artificial Sequence: Synthetic oligonucleotide
aggcaacaagggaccauuc

SEQ ID NO: 1913907 - RNA, 19 nt, Artificial Sequence
  Description of Artificial Sequence: Synthetic oligonucleotide
ugcucacccaaguguguuu

SEQ ID NO: 1913908 - RNA, 19 nt, Artificial Sequence
  Description of Artificial Sequence: Synthetic oligonucleotide
cgaugauggacagccagcg

SEQ ID NO: 1913909 - RNA, 19 nt, Artificial Sequence
  Description of Artificial Sequence: Synthetic oligonucleotide
agccccuucgacaggcuug

SEQ ID NO: 1913910 - RNA, 19 nt, Artificial Sequence
  Description of Artificial Sequence: Synthetic oligonucleotide
uggguacgguggugcaccc

SEQ ID NO: 1913911 - RNA, 19 nt, Artificial Sequence
  Description of Artificial Sequence: Synthetic oligonucleotide
gugaaggguuugcagucaa

SEQ ID NO: 1913912 - RNA, 19 nt, Artificial Sequence
  Description of Artificial Sequence: Synthetic oligonucleotide
ccuugaagccccuucgaca

SEQ ID NO: 1913913 - RNA, 19 nt, Artificial Sequence
  Description of Artificial Sequence: Synthetic oligonucleotide
gagugcaccgauauggcuu

SEQ ID NO: 1913914 - RNA, 19 nt, Artificial Sequence
  Description of Artificial Sequence: Synthetic oligonucleotide
gaugauggacagccagcgu

SEQ ID NO: 1913915 - RNA, 19 nt, Artificial Sequence
  Description of Artificial Sequence: Synthetic oligonucleotide
ggcguuuugggguguguuc

SEQ ID NO: 1913916 - RNA, 19 nt, Artificial Sequence
  Description of Artificial Sequence: Synthetic oligonucleotide
guucgaacuucgggagaag

SEQ ID NO: 1913917 - RNA, 19 nt, Artificial Sequence
  Description of Artificial Sequence: Synthetic oligonucleotide
gcgguuggagcuucgagaa

SEQ ID NO: 1913918 - RNA, 19 nt, Artificial Sequence
  Description of Artificial Sequence: Synthetic oligonucleotide
gaugcgguuggagcuucga

SEQ ID NO: 1913919 - RNA, 19 nt, Artificial Sequence
  Description of Artificial Sequence: Synthetic oligonucleotide
auguaaggcgcugguucca

SEQ ID NO: 1913920 - RNA, 19 nt, Artificial Sequence
  Description of Artificial Sequence: Synthetic oligonucleotide
gagcuucgagaaaagcucu

SEQ ID NO: 1913921 - RNA, 19 nt, Artificial Sequence
  Description of Artificial Sequence: Synthetic oligonucleotide
gacucugcuccuucucacu

SEQ ID NO: 1913922 - RNA, 19 nt, Artificial Sequence
  Description of Artificial Sequence: Synthetic oligonucleotide
guauggccgcugucccagg

SEQ ID NO: 1913923 - RNA, 19 nt, Artificial Sequence
  Description of Artificial Sequence: Synthetic oligonucleotide
ugcagucaagguggcugca

SEQ ID NO: 1913924 - RNA, 19 nt, Artificial Sequence
  Description of Artificial Sequence: Synthetic oligonucleotide
ugagcgccgccggaaacuc

SEQ ID NO: 1913925 - RNA, 19 nt, Artificial Sequence
  Description of Artificial Sequence: Synthetic oligonucleotide
aaguccgcccacacucggu

SEQ ID NO: 1913926 - RNA, 19 nt, Artificial Sequence
  Description of Artificial Sequence: Synthetic oligonucleotide
uccucucgugccggaugcg

SEQ ID NO: 1913927 - RNA, 19 nt, Artificial Sequence
  Description of Artificial Sequence: Synthetic oligonucleotide
gcagugacuuucugacaug

SEQ ID NO: 1913928 - RNA, 19 nt, Artificial Sequence
  Description of Artificial Sequence: Synthetic oligonucleotide
gcaggugugcuucuggacu

SEQ ID NO: 1913929 - RNA, 19 nt, Artificial Sequence
  Description of Artificial Sequence: Synthetic oligonucleotide
aggugcuaaaugccuccuu

SEQ ID NO: 1913930 - RNA, 19 nt, Artificial Sequence
  Description of Artificial Sequence: Synthetic oligonucleotide
gguucgaacuucgggagaa

SEQ ID NO: 1913931 - RNA, 19 nt, Artificial Sequence
  Description of Artificial Sequence: Synthetic oligonucleotide
gcaaugggcuucccagggc

SEQ ID NO: 1913932 - RNA, 19 nt, Artificial Sequence
  Description of Artificial Sequence: Synthetic oligonucleotide
gugcaccaaaauuggagau

SEQ ID NO: 1913933 - RNA, 19 nt, Artificial Sequence
  Description of Artificial Sequence: Synthetic oligonucleotide
augcaaguugggguaggaa

SEQ ID NO: 1913934 - RNA, 19 nt, Artificial Sequence
  Description of Artificial Sequence: Synthetic oligonucleotide
cucuaagcaggguuccccu

SEQ ID NO: 1913935 - RNA, 19 nt, Artificial Sequence
  Description of Artificial Sequence: Synthetic oligonucleotide
uggcguuuugggguguguu

SEQ ID NO: 1913936 - RNA, 19 nt, Artificial Sequence
  Description of Artificial Sequence: Synthetic oligonucleotide
agguggguucgaugaugga

SEQ ID NO: 1913937 - RNA, 19 nt, Artificial Sequence
  Description of Artificial Sequence: Synthetic oligonucleotide
ggagguauuguugaagguu

SEQ ID NO: 1913938 - RNA, 19 nt, Artificial Sequence
  Description of Artificial Sequence: Synthetic oligonucleotide
cauccacucuccaaggcuu

SEQ ID NO: 1913939 - RNA, 19 nt, Artificial Sequence
  Description of Artificial Sequence: Synthetic oligonucleotide
ccacaaaugucacagcggu

SEQ ID NO: 1913940 - RNA, 19 nt, Artificial Sequence
  Description of Artificial Sequence: Synthetic oligonucleotide
gcgguauggccgcuguccc

SEQ ID NO: 1913941 - RNA, 19 nt, Artificial Sequence
  Description of Artificial Sequence: Synthetic oligonucleotide
gugcaggauuuccugauuu

SEQ ID NO: 1913942 - RNA, 19 nt, Artificial Sequence
  Description of Artificial Sequence: Synthetic oligonucleotide
gugaucuugcuggugugua

SEQ ID NO: 1913943 - RNA, 19 nt, Artificial Sequence
  Description of Artificial Sequence: Synthetic oligonucleotide
cacaaaugucacagcggua

SEQ ID NO: 1913944 - RNA, 19 nt, Artificial Sequence
  Description of Artificial Sequence: Synthetic oligonucleotide
cugggcuugaaaaggcaau

SEQ ID NO: 1913945 - RNA, 19 nt, Artificial Sequence
  Description of Artificial Sequence: Synthetic oligonucleotide
cucgugccggaugcgguug

SEQ ID NO: 1913946 - RNA, 19 nt, Artificial Sequence
  Description of Artificial Sequence: Synthetic oligonucleotide
gccggaaacucuccugaca

SEQ ID NO: 1913947 - RNA, 19 nt, Artificial Sequence
  Description of Artificial Sequence: Synthetic oligonucleotide
gcaccaaaauuggagauau

SEQ ID NO: 1913948 - RNA, 19 nt, Artificial Sequence
  Description of Artificial Sequence: Synthetic oligonucleotide
gcagucaagguggcugcag

SEQ ID NO: 1913949 - RNA, 19 nt, Artificial Sequence
  Description of Artificial Sequence: Synthetic oligonucleotide
cucgggcagugacuuucug

SEQ ID NO: 1913950 - RNA, 19 nt, Artificial Sequence
  Description of Artificial Sequence: Synthetic oligonucleotide
cauugguaguguuucucuu

SEQ ID NO: 1913951 - RNA, 19 nt, Artificial Sequence
  Description of Artificial Sequence: Synthetic oligonucleotide
cauggcguuuuggggugug

SEQ ID NO: 1913952 - RNA, 19 nt, Artificial Sequence
  Description of Artificial Sequence: Synthetic oligonucleotide
cccucugagccauccacuc

SEQ ID NO: 1913953 - RNA, 19 nt, Artificial Sequence
  Description of Artificial Sequence: Synthetic oligonucleotide
gugcaccccaaagcuggag

SEQ ID NO: 1913954 - RNA, 19 nt, Artificial Sequence
  Description of Artificial Sequence: Synthetic oligonucleotide
gcugucccaggugaucuug

SEQ ID NO: 1913955 - RNA, 19 nt, Artificial Sequence
  Description of Artificial Sequence: Synthetic oligonucleotide
agguauuguugaagguuuu

SEQ ID NO: 1913956 - RNA, 19 nt, Artificial Sequence
  Description of Artificial Sequence: Synthetic oligonucleotide
gugccggaugcgguuggag

SEQ ID NO: 1913957 - RNA, 19 nt, Artificial Sequence
  Description of Artificial Sequence: Synthetic oligonucleotide
auccgcugguguguucuga

SEQ ID NO: 1913958 - RNA, 19 nt, Artificial Sequence
  Description of Artificial Sequence: Synthetic oligonucleotide
gguuugcagucaagguggc

SEQ ID NO: 1913959 - RNA, 19 nt, Artificial Sequence
  Description of Artificial Sequence: Synthetic oligonucleotide
cuugucugcccauguuccu

SEQ ID NO: 1913960 - RNA, 19 nt, Artificial Sequence
  Description of Artificial Sequence: Synthetic oligonucleotide
ggugugcaccaaaauugga

SEQ ID NO: 1913961 - RNA, 19 nt, Artificial Sequence
  Description of Artificial Sequence: Synthetic oligonucleotide
ccccauaugcaaucugaga

SEQ ID NO: 1913962 - RNA, 19 nt, Artificial Sequence
  Description of Artificial Sequence: Synthetic oligonucleotide
cuaagcaggguuccccuuu

SEQ ID NO: 1913963 - RNA, 19 nt, Artificial Sequence
  Description of Artificial Sequence: Synthetic oligonucleotide
ccagguggauccucucgug

SEQ ID NO: 1913964 - RNA, 19 nt, Artificial Sequence
  Description of Artificial Sequence: Synthetic oligonucleotide
guguuuucuggugucggau

SEQ ID NO: 1913965 - RNA, 19 nt, Artificial Sequence
  Description of Artificial Sequence: Synthetic oligonucleotide
uggauccgcugguguguuc

SEQ ID NO: 1913966 - RNA, 19 nt, Artificial Sequence
  Description of Artificial Sequence: Synthetic oligonucleotide
agcuucgagaaaagcucuu

SEQ ID NO: 1913967 - RNA, 19 nt, Artificial Sequence
  Description of Artificial Sequence: Synthetic oligonucleotide
guucgaugauggacagcca

SEQ ID NO: 1913968 - RNA, 19 nt, Artificial Sequence
  Description of Artificial Sequence: Synthetic oligonucleotide
gaacuucgggagaaguguu

SEQ ID NO: 1913969 - RNA, 19 nt, Artificial Sequence
  Description of Artificial Sequence: Synthetic oligonucleotide
ccucucgugccggaugcgg

SEQ ID NO: 1913970 - RNA, 19 nt, Artificial Sequence
  Description of Artificial Sequence: Synthetic oligonucleotide
ggcuuccugugugugugug

SEQ ID NO: 1913971 - RNA, 19 nt, Artificial Sequence
  Description of Artificial Sequence: Synthetic oligonucleotide
auggcguuuuggggugugu

SEQ ID NO: 1913972 - RNA, 19 nt, Artificial Sequence
  Description of Artificial Sequence: Synthetic oligonucleotide
gcagauguaaggcgcuggu

SEQ ID NO: 1913973 - RNA, 19 nt, Artificial Sequence
  Description of Artificial Sequence: Synthetic oligonucleotide
ccacacucacagcagaugu

SEQ ID NO: 1913974 - RNA, 19 nt, Artificial Sequence
  Description of Artificial Sequence: Synthetic oligonucleotide
gccggaugcgguuggagcu

SEQ ID NO: 1913975 - RNA, 19 nt, Artificial Sequence
  Description of Artificial Sequence: Synthetic oligonucleotide
ccgccucugggcuugaaaa

SEQ ID NO: 1913976 - RNA, 19 nt, Artificial Sequence
  Description of Artificial Sequence: Synthetic oligonucleotide
acauggcguuuuggggugu

SEQ ID NO: 1913977 - RNA, 19 nt, Artificial Sequence
  Description of Artificial Sequence: Synthetic oligonucleotide
gggcagugacuuucugaca

SEQ ID NO: 1913978 - RNA, 19 nt, Artificial Sequence
  Description of Artificial Sequence: Synthetic oligonucleotide
cacucuccaaggcuucccu

SEQ ID NO: 1913979 - RNA, 19 nt, Artificial Sequence
  Description of Artificial Sequence: Synthetic oligonucleotide
gguguguucugagguugga

SEQ ID NO: 1913980 - RNA, 19 nt, Artificial Sequence
  Description of Artificial Sequence: Synthetic oligonucleotide
ggauccgcugguguguucu

SEQ ID NO: 1913981 - RNA, 19 nt, Artificial Sequence
  Description of Artificial Sequence: Synthetic oligonucleotide
agccagcguggcacucugg

SEQ ID NO: 1913982 - RNA, 19 nt, Artificial Sequence
  Description of Artificial Sequence: Synthetic oligonucleotide
uggaucccugaggcuuccu

SEQ ID NO: 1913983 - RNA, 19 nt, Artificial Sequence
  Description of Artificial Sequence: Synthetic oligonucleotide
ggaugcgguuggagcuucg

SEQ ID NO: 1913984 - RNA, 19 nt, Artificial Sequence
  Description of Artificial Sequence: Synthetic oligonucleotide
ccacucuccaaggcuuccc

SEQ ID NO: 1913985 - RNA, 19 nt, Artificial Sequence
  Description of Artificial Sequence: Synthetic oligonucleotide
cucuggugugcaccaaaau

SEQ ID NO: 1913986 - RNA, 19 nt, Artificial Sequence
  Description of Artificial Sequence: Synthetic oligonucleotide
gacaggcuugucugcccau

SEQ ID NO: 1913987 - RNA, 19 nt, Artificial Sequence
  Description of Artificial Sequence: Synthetic oligonucleotide
gguguguagugaggucuga

SEQ ID NO: 1913988 - RNA, 19 nt, Artificial Sequence
  Description of Artificial Sequence: Synthetic oligonucleotide
ggcugcagcaggugcuaaa

SEQ ID NO: 1913989 - RNA, 19 nt, Artificial Sequence
  Description of Artificial Sequence: Synthetic oligonucleotide
ggguucgaugauggacagc

SEQ ID NO: 1913990 - RNA, 19 nt, Artificial Sequence
  Description of Artificial Sequence: Synthetic oligonucleotide
cagcgguauggccgcuguc

SEQ ID NO: 1913991 - RNA, 19 nt, Artificial Sequence
  Description of Artificial Sequence: Synthetic oligonucleotide
gugucggaugagguucgaa

SEQ ID NO: 1913992 - RNA, 19 nt, Artificial Sequence
  Description of Artificial Sequence: Synthetic oligonucleotide
ccgccggaaacucuccuga

SEQ ID NO: 1913993 - RNA, 19 nt, Artificial Sequence
  Description of Artificial Sequence: Synthetic oligonucleotide
cugagcgccgccggaaacu

SEQ ID NO: 1913994 - RNA, 19 nt, Artificial Sequence
  Description of Artificial Sequence: Synthetic oligonucleotide
cgaacuucgggagaagugu

SEQ ID NO: 1913995 - RNA, 19 nt, Artificial Sequence
  Description of Artificial Sequence: Synthetic oligonucleotide
guuccccuuuagcuagaau

SEQ ID NO: 1913996 - RNA, 19 nt, Artificial Sequence
  Description of Artificial Sequence: Synthetic oligonucleotide
ggugaucauugaggagaca

SEQ ID NO: 1913997 - RNA, 19 nt, Artificial Sequence
  Description of Artificial Sequence: Synthetic oligonucleotide
guucucuggugugcaccaa

SEQ ID NO: 1913998 - RNA, 19 nt, Artificial Sequence
  Description of Artificial Sequence: Synthetic oligonucleotide
gcugguguguucugagguu

SEQ ID NO: 1913999 - RNA, 19 nt, Artificial Sequence
  Description of Artificial Sequence: Synthetic oligonucleotide
gugugugugugugcaggau

SEQ ID NO: 1914000 - RNA, 19 nt, Artificial Sequence
  Description of Artificial Sequence: Synthetic oligonucleotide
gcuuccugugugugugugu

SEQ ID NO: 1914001 - RNA, 19 nt, Artificial Sequence
  Description of Artificial Sequence: Synthetic oligonucleotide
guuuugggguguguuccuu

SEQ ID NO: 1914002 - RNA, 19 nt, Artificial Sequence
  Description of Artificial Sequence: Synthetic oligonucleotide
ggguacgguggugcacccc

SEQ ID NO: 1914003 - RNA, 19 nt, Artificial Sequence
  Description of Artificial Sequence: Synthetic oligonucleotide
cccuuuagcuagaaucuuu

SEQ ID NO: 1914004 - RNA, 19 nt, Artificial Sequence
  Description of Artificial Sequence: Synthetic oligonucleotide
gaagccccuucgacaggcu

SEQ ID NO: 1914005 - RNA, 19 nt, Artificial Sequence
  Description of Artificial Sequence: Synthetic oligonucleotide
cccuucgacaggcuugucu

SEQ ID NO: 1914006 - RNA, 19 nt, Artificial Sequence
  Description of Artificial Sequence: Synthetic oligonucleotide
caggugcuaaaugccuccu

SEQ ID NO: 1914007 - RNA, 19 nt, Artificial Sequence
  Description of Artificial Sequence: Synthetic oligonucleotide
guacgguggugcaccccaa

SEQ ID NO: 1914008 - RNA, 19 nt, Artificial Sequence
  Description of Artificial Sequence: Synthetic oligonucleotide
gguuccccuuuagcuagaa

SEQ ID NO: 1914009 - RNA, 19 nt, Artificial Sequence
  Description of Artificial Sequence: Synthetic oligonucleotide
ggugcaccccaaagcugga

SEQ ID NO: 1914010 - RNA, 19 nt, Artificial Sequence
  Description of Artificial Sequence: Synthetic oligonucleotide
cggugcacucauaaggccu

SEQ ID NO: 1914011 - RNA, 19 nt, Artificial Sequence
  Description of Artificial Sequence: Synthetic oligonucleotide
uccugacacuuggcacauu

SEQ ID NO: 1914012 - RNA, 19 nt, Artificial Sequence
  Description of Artificial Sequence: Synthetic oligonucleotide
ccgauauggcuucuccccu

SEQ ID NO: 1914013 - RNA, 19 nt, Artificial Sequence
  Description of Artificial Sequence: Synthetic oligonucleotide
cuccugacacuuggcacau

SEQ ID NO: 1914014 - RNA, 19 nt, Artificial Sequence
  Description of Artificial Sequence: Synthetic oligonucleotide
cgccggaaacucuccugac

SEQ ID NO: 1914015 - RNA, 19 nt, Artificial Sequence
  Description of Artificial Sequence: Synthetic oligonucleotide
ggugucggaugagguucga

SEQ ID NO: 1914016 - RNA, 19 nt, Artificial Sequence
  Description of Artificial Sequence: Synthetic oligonucleotide
cccuggauuauggaucccu

SEQ ID NO: 1914017 - RNA, 19 nt, Artificial Sequence
  Description of Artificial Sequence: Synthetic oligonucleotide
cgacaggcuugucugccca

SEQ ID NO: 1914018 - RNA, 19 nt, Artificial Sequence
  Description of Artificial Sequence: Synthetic oligonucleotide
gcucacccaaguguguuuu

SEQ ID NO: 1914019 - RNA, 19 nt, Artificial Sequence
  Description of Artificial Sequence: Synthetic oligonucleotide
cucauccgccucugggcuu

SEQ ID NO: 1914020 - RNA, 19 nt, Artificial Sequence
  Description of Artificial Sequence: Synthetic oligonucleotide
ccugugugugugugugugu

SEQ ID NO: 1914021 - RNA, 19 nt, Artificial Sequence
  Description of Artificial Sequence: Synthetic oligonucleotide
gguuccagguggguucgau

SEQ ID NO: 1914022 - RNA, 19 nt, Artificial Sequence
  Description of Artificial Sequence: Synthetic oligonucleotide
gccccuucgacaggcuugu

SEQ ID NO: 1914023 - RNA, 19 nt, Artificial Sequence
  Description of Artificial Sequence: Synthetic oligonucleotide
auccgccucugggcuugaa

SEQ ID NO: 1914024 - RNA, 19 nt, Artificial Sequence
  Description of Artificial Sequence: Synthetic oligonucleotide
cguuuugggguguguuccu

SEQ ID NO: 1914025 - RNA, 19 nt, Artificial Sequence
  Description of Artificial Sequence: Synthetic oligonucleotide
ccagcucgggcagugacuu

SEQ ID NO: 1914026 - RNA, 19 nt, Artificial Sequence
  Description of Artificial Sequence: Synthetic oligonucleotide
ggauccucucgugccggau

SEQ ID NO: 1914027 - RNA, 19 nt, Artificial Sequence
  Description of Artificial Sequence: Synthetic oligonucleotide
ccgcccacacucggugcac

SEQ ID NO: 1914028 - RNA, 19 nt, Artificial Sequence
  Description of Artificial Sequence: Synthetic oligonucleotide
cggaugcgguuggagcuuc

SEQ ID NO: 1914029 - RNA, 19 nt, Artificial Sequence
  Description of Artificial Sequence: Synthetic oligonucleotide
gcucgggcagugacuuucu

SEQ ID NO: 1914030 - RNA, 19 nt, Artificial Sequence
  Description of Artificial Sequence: Synthetic oligonucleotide
cagcucgggcagugacuuu

SEQ ID NO: 1914031 - RNA, 19 nt, Artificial Sequence
  Description of Artificial Sequence: Synthetic oligonucleotide
gcguggcacucuggcugaa

SEQ ID NO: 1914032 - RNA, 19 nt, Artificial Sequence
  Description of Artificial Sequence: Synthetic oligonucleotide
cgugccggaugcgguugga

SEQ ID NO: 1914033 - RNA, 19 nt, Artificial Sequence
  Description of Artificial Sequence: Synthetic oligonucleotide
ggccgcugucccaggugau

SEQ ID NO: 1914034 - RNA, 19 nt, Artificial Sequence
  Description of Artificial Sequence: Synthetic oligonucleotide
ccccuucgacaggcuuguc

SEQ ID NO: 1914035 - RNA, 19 nt, Artificial Sequence
  Description of Artificial Sequence: Synthetic oligonucleotide
ccggaugcgguuggagcuu

SEQ ID NO: 1914036 - RNA, 19 nt, Artificial Sequence
  Description of Artificial Sequence: Synthetic oligonucleotide
uucauuuacacacagaacu

SEQ ID NO: 1914037 - RNA, 19 nt, Artificial Sequence
  Description of Artificial Sequence: Synthetic oligonucleotide
gaaucagaggaucagaagc

SEQ ID NO: 1914038 - RNA, 19 nt, Artificial Sequence
  Description of Artificial Sequence: Synthetic oligonucleotide
aagagcacugccuucuugc

SEQ ID NO: 1914039 - RNA, 19 nt, Artificial Sequence
  Description of Artificial Sequence: Synthetic oligonucleotide
uguaauucgugcuugauuc

SEQ ID NO: 1914040 - RNA, 19 nt, Artificial Sequence
  Description of Artificial Sequence: Synthetic oligonucleotide
uuagaaguuggcagcaugg

SEQ ID NO: 1914041 - RNA, 19 nt, Artificial Sequence
  Description of Artificial Sequence: Synthetic oligonucleotide
uccgcuucaacccaagagg

SEQ ID NO: 1914042 - RNA, 19 nt, Artificial Sequence
  Description of Artificial Sequence: Synthetic oligonucleotide
aaggggugcacucucaggg

SEQ ID NO: 1914043 - RNA, 19 nt, Artificial Sequence
  Description of Artificial Sequence: Synthetic oligonucleotide
ugugguuagaaguuggcag

SEQ ID NO: 1914044 - RNA, 19 nt, Artificial Sequence
  Description of Artificial Sequence: Synthetic oligonucleotide
uuccguuuaaguaggagcc

SEQ ID NO: 1914045 - RNA, 19 nt, Artificial Sequence
  Description of Artificial Sequence: Synthetic oligonucleotide
gacaccaucagagacagcc

SEQ ID NO: 1914046 - RNA, 19 nt, Artificial Sequence
  Description of Artificial Sequence: Synthetic oligonucleotide
uauugugguuagaaguugg

SEQ ID NO: 1914047 - RNA, 19 nt, Artificial Sequence
  Description of Artificial Sequence: Synthetic oligonucleotide
acuugguccgcuucaaccc

SEQ ID NO: 1914048 - RNA, 19 nt, Artificial Sequence
  Description of Artificial Sequence: Synthetic oligonucleotide
aaaggcuugcccuccagag

SEQ ID NO: 1914049 - RNA, 19 nt, Artificial Sequence
  Description of Artificial Sequence: Synthetic oligonucleotide
acaaaagugguguaggggu

SEQ ID NO: 1914050 - RNA, 19 nt, Artificial Sequence
  Description of Artificial Sequence: Synthetic oligonucleotide
cuuccguuuaaguaggagc

SEQ ID NO: 1914051 - RNA, 19 nt, Artificial Sequence
  Description of Artificial Sequence: Synthetic oligonucleotide
agcacagucacuauugugg

SEQ ID NO: 1914052 - RNA, 19 nt, Artificial Sequence
  Description of Artificial Sequence: Synthetic oligonucleotide
uugaacacuuugaugacac

SEQ ID NO: 1914053 - RNA, 19 nt, Artificial Sequence
  Description of Artificial Sequence: Synthetic oligonucleotide
uuugcuuguaauucgugcu

SEQ ID NO: 1914054 - RNA, 19 nt, Artificial Sequence
  Description of Artificial Sequence: Synthetic oligonucleotide
uugacaaaagugguguagg

SEQ ID NO: 1914055 - RNA, 19 nt, Artificial Sequence
  Description of Artificial Sequence: Synthetic oligonucleotide
auagcggcaguccuugucg

SEQ ID NO: 1914056 - RNA, 19 nt, Artificial Sequence
  Description of Artificial Sequence: Synthetic oligonucleotide
uaaauugaaggucccuuac

SEQ ID NO: 1914057 - RNA, 19 nt, Artificial Sequence
  Description of Artificial Sequence: Synthetic oligonucleotide
uaucauugaacacuuugau

SEQ ID NO: 1914058 - RNA, 19 nt, Artificial Sequence
  Description of Artificial Sequence: Synthetic oligonucleotide
ucguagagagcauagcggc

SEQ ID NO: 1914059 - RNA, 19 nt, Artificial Sequence
  Description of Artificial Sequence: Synthetic oligonucleotide
aaaagugguguaggggucg

SEQ ID NO: 1914060 - RNA, 19 nt, Artificial Sequence
  Description of Artificial Sequence: Synthetic oligonucleotide
ugacaaaagugguguaggg

SEQ ID NO: 1914061 - RNA, 19 nt, Artificial Sequence
  Description of Artificial Sequence: Synthetic oligonucleotide
ugcaacacccaugagcagg

SEQ ID NO: 1914062 - RNA, 19 nt, Artificial Sequence
  Description of Artificial Sequence: Synthetic oligonucleotide
cuugauuccugucagcuuc

SEQ ID NO: 1914063 - RNA, 19 nt, Artificial Sequence
  Description of Artificial Sequence: Synthetic oligonucleotide
gacaaaagugguguagggg

SEQ ID NO: 1914064 - RNA, 19 nt, Artificial Sequence
  Description of Artificial Sequence: Synthetic oligonucleotide
guuuccggaagcgaaaggg

SEQ ID NO: 1914065 - RNA, 19 nt, Artificial Sequence
  Description of Artificial Sequence: Synthetic oligonucleotide
gaggacauuuggcaacugg

SEQ ID NO: 1914066 - RNA, 19 nt, Artificial Sequence
  Description of Artificial Sequence: Synthetic oligonucleotide
ucgggcagcaucuugacaa

SEQ ID NO: 1914067 - RNA, 19 nt, Artificial Sequence
  Description of Artificial Sequence: Synthetic oligonucleotide
ucagagacagccacaccag

SEQ ID NO: 1914068 - RNA, 19 nt, Artificial Sequence
  Description of Artificial Sequence: Synthetic oligonucleotide
gaggaucagaagcaguuug

SEQ ID NO: 1914069 - RNA, 19 nt, Artificial Sequence
  Description of Artificial Sequence: Synthetic oligonucleotide
ucacuauugugguuagaag

SEQ ID NO: 1914070 - RNA, 19 nt, Artificial Sequence
  Description of Artificial Sequence: Synthetic oligonucleotide
aaaggggcagccugcaaca

SEQ ID NO: 1914071 - RNA, 19 nt, Artificial Sequence
  Description of Artificial Sequence: Synthetic oligonucleotide
gacagaagagcugagccgc

SEQ ID NO: 1914072 - RNA, 19 nt, Artificial Sequence
  Description of Artificial Sequence: Synthetic oligonucleotide
agugguguaggggucgucc

SEQ ID NO: 1914073 - RNA, 19 nt, Artificial Sequence
  Description of Artificial Sequence: Synthetic oligonucleotide
uuaaauugaaggucccuua

SEQ ID NO: 1914074 - RNA, 19 nt, Artificial Sequence
  Description of Artificial Sequence: Synthetic oligonucleotide
uuccggaagcgaaagggag

SEQ ID NO: 1914075 - RNA, 19 nt, Artificial Sequence
  Description of Artificial Sequence: Synthetic oligonucleotide
aagaugaacaccagguccu

SEQ ID NO: 1914076 - RNA, 19 nt, Artificial Sequence
  Description of Artificial Sequence: Synthetic oligonucleotide
aaacagacaagcacaguca

SEQ ID NO: 1914077 - RNA, 19 nt, Artificial Sequence
  Description of Artificial Sequence: Synthetic oligonucleotide
uuaaggggugcacucucag

SEQ ID NO: 1914078 - RNA, 19 nt, Artificial Sequence
  Description of Artificial Sequence: Synthetic oligonucleotide
gaaccgucaggguggaggg

SEQ ID NO: 1914079 - RNA, 19 nt, Artificial Sequence
  Description of Artificial Sequence: Synthetic oligonucleotide
aagcacagucacuauugug

SEQ ID NO: 1914080 - RNA, 19 nt, Artificial Sequence
  Description of Artificial Sequence: Synthetic oligonucleotide
aucuugacaaaaguggugu

SEQ ID NO: 1914081 - RNA, 19 nt, Artificial Sequence
  Description of Artificial Sequence: Synthetic oligonucleotide
aaguuggcagcaugggaug

SEQ ID NO: 1914082 - RNA, 19 nt, Artificial Sequence
  Description of Artificial Sequence: Synthetic oligonucleotide
aacgcggccucucccggcc

SEQ ID NO: 1914083 - RNA, 19 nt, Artificial Sequence
  Description of Artificial Sequence: Synthetic oligonucleotide
cuugacaaaagugguguag

SEQ ID NO: 1914084 - RNA, 19 nt, Artificial Sequence
  Description of Artificial Sequence: Synthetic oligonucleotide
ucgugcuugauuccuguca

SEQ ID NO: 1914085 - RNA, 19 nt, Artificial Sequence
  Description of Artificial Sequence: Synthetic oligonucleotide
aggacauuuggcaacuggg

SEQ ID NO: 1914086 - RNA, 19 nt, Artificial Sequence
  Description of Artificial Sequence: Synthetic oligonucleotide
agcaguuugggauggccag

SEQ ID NO: 1914087 - RNA, 19 nt, Artificial Sequence
  Description of Artificial Sequence: Synthetic oligonucleotide
aaacugggugccugggaag

SEQ ID NO: 1914088 - RNA, 19 nt, Artificial Sequence
  Description of Artificial Sequence: Synthetic oligonucleotide
guuagaaguuggcagcaug

SEQ ID NO: 1914089 - RNA, 19 nt, Artificial Sequence
  Description of Artificial Sequence: Synthetic oligonucleotide
uguuuccggaagcgaaagg

SEQ ID NO: 1914090 - RNA, 19 nt, Artificial Sequence
  Description of Artificial Sequence: Synthetic oligonucleotide
acugaacgcggccucuccc

SEQ ID NO: 1914091 - RNA, 19 nt, Artificial Sequence
  Description of Artificial Sequence: Synthetic oligonucleotide
cuggaggcggcucacaaag

SEQ ID NO: 1914092 - RNA, 19 nt, Artificial Sequence
  Description of Artificial Sequence: Synthetic oligonucleotide
ugcgucguagagagcauag

SEQ ID NO: 1914093 - RNA, 19 nt, Artificial Sequence
  Description of Artificial Sequence: Synthetic oligonucleotide
ucugccagggugcagcggu

SEQ ID NO: 1914094 - RNA, 19 nt, Artificial Sequence
  Description of Artificial Sequence: Synthetic oligonucleotide
uuguaauucgugcuugauu

SEQ ID NO: 1914095 - RNA, 19 nt, Artificial Sequence
  Description of Artificial Sequence: Synthetic oligonucleotide
cauagguugcgucguagag

SEQ ID NO: 1914096 - RNA, 19 nt, Artificial Sequence
  Description of Artificial Sequence: Synthetic oligonucleotide
caucuugacaaaaguggug

SEQ ID NO: 1914097 - RNA, 19 nt, Artificial Sequence
  Description of Artificial Sequence: Synthetic oligonucleotide
uggcguugaagacuugcgc

SEQ ID NO: 1914098 - RNA, 19 nt, Artificial Sequence
  Description of Artificial Sequence: Synthetic oligonucleotide
uugucgggcagcaucuuga

SEQ ID NO: 1914099 - RNA, 19 nt, Artificial Sequence
  Description of Artificial Sequence: Synthetic oligonucleotide
agaacuaaacagacaagca

SEQ ID NO: 1914100 - RNA, 19 nt, Artificial Sequence
  Description of Artificial Sequence: Synthetic oligonucleotide
ggucucauagguugcgucg

SEQ ID NO: 1914101 - RNA, 19 nt, Artificial Sequence
  Description of Artificial Sequence: Synthetic oligonucleotide
gcaguuugcuuguaauucg

SEQ ID NO: 1914102 - RNA, 19 nt, Artificial Sequence
  Description of Artificial Sequence: Synthetic oligonucleotide
gaaaggggagggcaaccag

SEQ ID NO: 1914103 - RNA, 19 nt, Artificial Sequence
  Description of Artificial Sequence: Synthetic oligonucleotide
agagcgacagaagagcuga

SEQ ID NO: 1914104 - RNA, 19 nt, Artificial Sequence
  Description of Artificial Sequence: Synthetic oligonucleotide
agagcacugccuucuugcg

SEQ ID NO: 1914105 - RNA, 19 nt, Artificial Sequence
  Description of Artificial Sequence: Synthetic oligonucleotide
guccgcuucaacccaagag

SEQ ID NO: 1914106 - RNA, 19 nt, Artificial Sequence
  Description of Artificial Sequence: Synthetic oligonucleotide
uccuugaccuccucguagc

SEQ ID NO: 1914107 - RNA, 19 nt, Artificial Sequence
  Description of Artificial Sequence: Synthetic oligonucleotide
aggccauguuuccggaagc

SEQ ID NO: 1914108 - RNA, 19 nt, Artificial Sequence
  Description of Artificial Sequence: Synthetic oligonucleotide
ucauagguugcgucguaga

SEQ ID NO: 1914109 - RNA, 19 nt, Artificial Sequence
  Description of Artificial Sequence: Synthetic oligonucleotide
cauugaacacuuugaugac

SEQ ID NO: 1914110 - RNA, 19 nt, Artificial Sequence
  Description of Artificial Sequence: Synthetic oligonucleotide
ggaagcgaaagggagacag

SEQ ID NO: 1914111 - RNA, 19 nt, Artificial Sequence
  Description of Artificial Sequence: Synthetic oligonucleotide
ucuggcguugaagacuugc

SEQ ID NO: 1914112 - RNA, 19 nt, Artificial Sequence
  Description of Artificial Sequence: Synthetic oligonucleotide
uaauucgugcuugauuccu

SEQ ID NO: 1914113 - RNA, 19 nt, Artificial Sequence
  Description of Artificial Sequence: Synthetic oligonucleotide
agcgacagaagagcugagc

SEQ ID NO: 1914114 - RNA, 19 nt, Artificial Sequence
  Description of Artificial Sequence: Synthetic oligonucleotide
auguucuucuuguccucac

SEQ ID NO: 1914115 - RNA, 19 nt, Artificial Sequence
  Description of Artificial Sequence: Synthetic oligonucleotide
caggaaaaggggcagccug

SEQ ID NO: 1914116 - RNA, 19 nt, Artificial Sequence
  Description of Artificial Sequence: Synthetic oligonucleotide
aggaaaaggggcagccugc

SEQ ID NO: 1914117 - RNA, 19 nt, Artificial Sequence
  Description of Artificial Sequence: Synthetic oligonucleotide
gcgaaagggagacagggag

SEQ ID NO: 1914118 - RNA, 19 nt, Artificial Sequence
  Description of Artificial Sequence: Synthetic oligonucleotide
guaauucgugcuugauucc

SEQ ID NO: 1914119 - RNA, 19 nt, Artificial Sequence
  Description of Artificial Sequence: Synthetic oligonucleotide
acccaagaggaaucagagg

SEQ ID NO: 1914120 - RNA, 19 nt, Artificial Sequence
  Description of Artificial Sequence: Synthetic oligonucleotide
aagaggaaucagaggauca

SEQ ID NO: 1914121 - RNA, 19 nt, Artificial Sequence
  Description of Artificial Sequence: Synthetic oligonucleotide
uccguuuaaguaggagccg

SEQ ID NO: 1914122 - RNA, 19 nt, Artificial Sequence
  Description of Artificial Sequence: Synthetic oligonucleotide
cacuauugugguuagaagu

SEQ ID NO: 1914123 - RNA, 19 nt, Artificial Sequence
  Description of Artificial Sequence: Synthetic oligonucleotide
uugugguuagaaguuggca

SEQ ID NO: 1914124 - RNA, 19 nt, Artificial Sequence
  Description of Artificial Sequence: Synthetic oligonucleotide
caggaugauguucuucuug

SEQ ID NO: 1914125 - RNA, 19 nt, Artificial Sequence
  Description of Artificial Sequence: Synthetic oligonucleotide
aggaucagaagcaguuugg

SEQ ID NO: 1914126 - RNA, 19 nt, Artificial Sequence
  Description of Artificial Sequence: Synthetic oligonucleotide
cagucugccccacaucucc

SEQ ID NO: 1914127 - RNA, 19 nt, Artificial Sequence
  Description of Artificial Sequence: Synthetic oligonucleotide
aggggcagccugcaacacc

SEQ ID NO: 1914128 - RNA, 19 nt, Artificial Sequence
  Description of Artificial Sequence: Synthetic oligonucleotide
cuucaacccaagaggaauc

SEQ ID NO: 1914129 - RNA, 19 nt, Artificial Sequence
  Description of Artificial Sequence: Synthetic oligonucleotide
cuccagagagaugacggcg

SEQ ID NO: 1914130 - RNA, 19 nt, Artificial Sequence
  Description of Artificial Sequence: Synthetic oligonucleotide
ugcuuguaauucgugcuug

SEQ ID NO: 1914131 - RNA, 19 nt, Artificial Sequence
  Description of Artificial Sequence: Synthetic oligonucleotide
gccgggauccgacugaacg

SEQ ID NO: 1914132 - RNA, 19 nt, Artificial Sequence
  Description of Artificial Sequence: Synthetic oligonucleotide
acuauugugguuagaaguu

SEQ ID NO: 1914133 - RNA, 19 nt, Artificial Sequence
  Description of Artificial Sequence: Synthetic oligonucleotide
cugaacgcggccucucccg

SEQ ID NO: 1914134 - RNA, 19 nt, Artificial Sequence
  Description of Artificial Sequence: Synthetic oligonucleotide
ccucguagcaguuugcuug

SEQ ID NO: 1914135 - RNA, 19 nt, Artificial Sequence
  Description of Artificial Sequence: Synthetic oligonucleotide
gaagcgaaagggagacagg

SEQ ID NO: 1914136 - RNA, 19 nt, Artificial Sequence
  Description of Artificial Sequence: Synthetic oligonucleotide
ugaacacuuugaugacacc

SEQ ID NO: 1914137 - RNA, 19 nt, Artificial Sequence
  Description of Artificial Sequence: Synthetic oligonucleotide
aauucgugcuugauuccug

SEQ ID NO: 1914138 - RNA, 19 nt, Artificial Sequence
  Description of Artificial Sequence: Synthetic oligonucleotide
uucaacccaagaggaauca

SEQ ID NO: 1914139 - RNA, 19 nt, Artificial Sequence
  Description of Artificial Sequence: Synthetic oligonucleotide
guggggaggacauuuggca

SEQ ID NO: 1914140 - RNA, 19 nt, Artificial Sequence
  Description of Artificial Sequence: Synthetic oligonucleotide
caaaagugguguagggguc

SEQ ID NO: 1914141 - RNA, 19 nt, Artificial Sequence
  Description of Artificial Sequence: Synthetic oligonucleotide
cuauugugguuagaaguug

SEQ ID NO: 1914142 - RNA, 19 nt, Artificial Sequence
  Description of Artificial Sequence: Synthetic oligonucleotide
auucgugcuugauuccugu

SEQ ID NO: 1914143 - RNA, 19 nt, Artificial Sequence
  Description of Artificial Sequence: Synthetic oligonucleotide
gagagcauagcggcagucc

SEQ ID NO: 1914144 - RNA, 19 nt, Artificial Sequence
  Description of Artificial Sequence: Synthetic oligonucleotide
gucacuauugugguuagaa

SEQ ID NO: 1914145 - RNA, 19 nt, Artificial Sequence
  Description of Artificial Sequence: Synthetic oligonucleotide
guccuugaccuccucguag

SEQ ID NO: 1914146 - RNA, 19 nt, Artificial Sequence
  Description of Artificial Sequence: Synthetic oligonucleotide
gauccgacugaacgcggcc

SEQ ID NO: 1914147 - RNA, 19 nt, Artificial Sequence
  Description of Artificial Sequence: Synthetic oligonucleotide
auagguugcgucguagaga

SEQ ID NO: 1914148 - RNA, 19 nt, Artificial Sequence
  Description of Artificial Sequence: Synthetic oligonucleotide
uuuugcucuuaaggggugc

SEQ ID NO: 1914149 - RNA, 19 nt, Artificial Sequence
  Description of Artificial Sequence: Synthetic oligonucleotide
cucacucaggcagaagagc

SEQ ID NO: 1914150 - RNA, 19 nt, Artificial Sequence
  Description of Artificial Sequence: Synthetic oligonucleotide
gccccuuccguuuaaguag

SEQ ID NO: 1914151 - RNA, 19 nt, Artificial Sequence
  Description of Artificial Sequence: Synthetic oligonucleotide
gacauuuggcaacuggggu

SEQ ID NO: 1914152 - RNA, 19 nt, Artificial Sequence
  Description of Artificial Sequence: Synthetic oligonucleotide
gacagggagagcgacagaa

SEQ ID NO: 1914153 - RNA, 19 nt, Artificial Sequence
  Description of Artificial Sequence: Synthetic oligonucleotide
caagaggaaucagaggauc

SEQ ID NO: 1914154 - RNA, 19 nt, Artificial Sequence
  Description of Artificial Sequence: Synthetic oligonucleotide
uggcaacuggggugaaggg

SEQ ID NO: 1914155 - RNA, 19 nt, Artificial Sequence
  Description of Artificial Sequence: Synthetic oligonucleotide
cauuuugcucuuaaggggu

SEQ ID NO: 1914156 - RNA, 19 nt, Artificial Sequence
  Description of Artificial Sequence: Synthetic oligonucleotide
gcugcuagaugcuccaggc

SEQ ID NO: 1914157 - RNA, 19 nt, Artificial Sequence
  Description of Artificial Sequence: Synthetic oligonucleotide
ggugcagcgguccuugacc

SEQ ID NO: 1914158 - RNA, 19 nt, Artificial Sequence
  Description of Artificial Sequence: Synthetic oligonucleotide
ggaucagaagcaguuuggg

SEQ ID NO: 1914159 - RNA, 19 nt, Artificial Sequence
  Description of Artificial Sequence: Synthetic oligonucleotide
auguuuccggaagcgaaag

SEQ ID NO: 1914160 - RNA, 19 nt, Artificial Sequence
  Description of Artificial Sequence: Synthetic oligonucleotide
ugcucuuaaggggugcacu

SEQ ID NO: 1914161 - RNA, 19 nt, Artificial Sequence
  Description of Artificial Sequence: Synthetic oligonucleotide
uggaggcggcucacaaagg

SEQ ID NO: 1914162 - RNA, 19 nt, Artificial Sequence
  Description of Artificial Sequence: Synthetic oligonucleotide
gguugcgucguagagagca

SEQ ID NO: 1914163 - RNA, 19 nt, Artificial Sequence
  Description of Artificial Sequence: Synthetic oligonucleotide
agcauagcggcaguccuug

SEQ ID NO: 1914164 - RNA, 19 nt, Artificial Sequence
  Description of Artificial Sequence: Synthetic oligonucleotide
uagcggcaguccuugucgg

SEQ ID NO: 1914165 - RNA, 19 nt, Artificial Sequence
  Description of Artificial Sequence: Synthetic oligonucleotide
ucacaaaggcuugcccucc

SEQ ID NO: 1914166 - RNA, 19 nt, Artificial Sequence
  Description of Artificial Sequence: Synthetic oligonucleotide
cagaagcaguuugggaugg

SEQ ID NO: 1914167 - RNA, 19 nt, Artificial Sequence
  Description of Artificial Sequence: Synthetic oligonucleotide
agggagagcgacagaagag

SEQ ID NO: 1914168 - RNA, 19 nt, Artificial Sequence
  Description of Artificial Sequence: Synthetic oligonucleotide
ggaggcggcucacaaaggc

SEQ ID NO: 1914169 - RNA, 19 nt, Artificial Sequence
  Description of Artificial Sequence: Synthetic oligonucleotide
auccuuggagcuggcauag

SEQ ID NO: 1914170 - RNA, 19 nt, Artificial Sequence
  Description of Artificial Sequence: Synthetic oligonucleotide
ggcguugaagacuugcgca

SEQ ID NO: 1914171 - RNA, 19 nt, Artificial Sequence
  Description of Artificial Sequence: Synthetic oligonucleotide
gguccugcuuccaugagug

SEQ ID NO: 1914172 - RNA, 19 nt, Artificial Sequence
  Description of Artificial Sequence: Synthetic oligonucleotide
acucaggcagaagagcacu

SEQ ID NO: 1914173 - RNA, 19 nt, Artificial Sequence
  Description of Artificial Sequence: Synthetic oligonucleotide
gaagacuugcgcaccuuca

SEQ ID NO: 1914174 - RNA, 19 nt, Artificial Sequence
  Description of Artificial Sequence: Synthetic oligonucleotide
cagacaagcacagucacua

SEQ ID NO: 1914175 - RNA, 19 nt, Artificial Sequence
  Description of Artificial Sequence: Synthetic oligonucleotide
agggucauuuccacauuuc

SEQ ID NO: 1914176 - RNA, 19 nt, Artificial Sequence
  Description of Artificial Sequence: Synthetic oligonucleotide
gacugaacgcggccucucc

SEQ ID NO: 1914177 - RNA, 19 nt, Artificial Sequence
  Description of Artificial Sequence: Synthetic oligonucleotide
cauagcggcaguccuuguc

SEQ ID NO: 1914178 - RNA, 19 nt, Artificial Sequence
  Description of Artificial Sequence: Synthetic oligonucleotide
cuugucgggcagcaucuug

SEQ ID NO: 1914179 - RNA, 19 nt, Artificial Sequence
  Description of Artificial Sequence: Synthetic oligonucleotide
accagaggccauguuuccg

SEQ ID NO: 1914180 - RNA, 19 nt, Artificial Sequence
  Description of Artificial Sequence: Synthetic oligonucleotide
agaugacggcgcugccacc

SEQ ID NO: 1914181 - RNA, 19 nt, Artificial Sequence
  Description of Artificial Sequence: Synthetic oligonucleotide
gagagcgacagaagagcug

SEQ ID NO: 1914182 - RNA, 19 nt, Artificial Sequence
  Description of Artificial Sequence: Synthetic oligonucleotide
uuacugguccugcuuccau

SEQ ID NO: 1914183 - RNA, 19 nt, Artificial Sequence
  Description of Artificial Sequence: Synthetic oligonucleotide
ccagaggccauguuuccgg

SEQ ID NO: 1914184 - RNA, 19 nt, Artificial Sequence
  Description of Artificial Sequence: Synthetic oligonucleotide
uugcgcaccuucauaucau

SEQ ID NO: 1914185 - RNA, 19 nt, Artificial Sequence
  Description of Artificial Sequence: Synthetic oligonucleotide
ugggauggccagaaccguc

SEQ ID NO: 1914186 - RNA, 19 nt, Artificial Sequence
  Description of Artificial Sequence: Synthetic oligonucleotide
ugcugccgggauccgacug

SEQ ID NO: 1914187 - RNA, 19 nt, Artificial Sequence
  Description of Artificial Sequence: Synthetic oligonucleotide
gacuugcgcaccuucauau

SEQ ID NO: 1914188 - RNA, 19 nt, Artificial Sequence
  Description of Artificial Sequence: Synthetic oligonucleotide
cucauagguugcgucguag

SEQ ID NO: 1914189 - RNA, 19 nt, Artificial Sequence
  Description of Artificial Sequence: Synthetic oligonucleotide
cauuuacacacagaacuaa

SEQ ID NO: 1914190 - RNA, 19 nt, Artificial Sequence
  Description of Artificial Sequence: Synthetic oligonucleotide
aaagugguguaggggucgu

SEQ ID NO: 1914191 - RNA, 19 nt, Artificial Sequence
  Description of Artificial Sequence: Synthetic oligonucleotide
uccggucuggcaggaaaag

SEQ ID NO: 1914192 - RNA, 19 nt, Artificial Sequence
  Description of Artificial Sequence: Synthetic oligonucleotide
ggccagaaccgucagggug

SEQ ID NO: 1914193 - RNA, 19 nt, Artificial Sequence
  Description of Artificial Sequence: Synthetic oligonucleotide
ugggauggggcggggauga

SEQ ID NO: 1914194 - RNA, 19 nt, Artificial Sequence
  Description of Artificial Sequence: Synthetic oligonucleotide
gaagagcugagccgccgca

SEQ ID NO: 1914195 - RNA, 19 nt, Artificial Sequence
  Description of Artificial Sequence: Synthetic oligonucleotide
ugucgggcagcaucuugac

SEQ ID NO: 1914196 - RNA, 19 nt, Artificial Sequence
  Description of Artificial Sequence: Synthetic oligonucleotide
cagucacuauugugguuag

SEQ ID NO: 1914197 - RNA, 19 nt, Artificial Sequence
  Description of Artificial Sequence: Synthetic oligonucleotide
agcggcaguccuugucggg

SEQ ID NO: 1914198 - RNA, 19 nt, Artificial Sequence
  Description of Artificial Sequence: Synthetic oligonucleotide
cuuaaggggugcacucuca

SEQ ID NO: 1914199 - RNA, 19 nt, Artificial Sequence
  Description of Artificial Sequence: Synthetic oligonucleotide
cauguuuccggaagcgaaa

SEQ ID NO: 1914200 - RNA, 19 nt, Artificial Sequence
  Description of Artificial Sequence: Synthetic oligonucleotide
ugacggcgcugccaccuag

SEQ ID NO: 1914201 - RNA, 19 nt, Artificial Sequence
  Description of Artificial Sequence: Synthetic oligonucleotide
gggucauuuccacauuuca

SEQ ID NO: 1914202 - RNA, 19 nt, Artificial Sequence
  Description of Artificial Sequence: Synthetic oligonucleotide
uccgacugaacgcggccuc

SEQ ID NO: 1914203 - RNA, 19 nt, Artificial Sequence
  Description of Artificial Sequence: Synthetic oligonucleotide
cuggggugaagggauuacc

SEQ ID NO: 1914204 - RNA, 19 nt, Artificial Sequence
  Description of Artificial Sequence: Synthetic oligonucleotide
guagcaguuugcuuguaau

SEQ ID NO: 1914205 - RNA, 19 nt, Artificial Sequence
  Description of Artificial Sequence: Synthetic oligonucleotide
aaggucccuuacugguccu

SEQ ID NO: 1914206 - RNA, 19 nt, Artificial Sequence
  Description of Artificial Sequence: Synthetic oligonucleotide
agucugccccacaucuccc

SEQ ID NO: 1914207 - RNA, 19 nt, Artificial Sequence
  Description of Artificial Sequence: Synthetic oligonucleotide
cagaagagcugagccgccg

SEQ ID NO: 1914208 - RNA, 19 nt, Artificial Sequence
  Description of Artificial Sequence: Synthetic oligonucleotide
agggagggucauuuccaca

SEQ ID NO: 1914209 - RNA, 19 nt, Artificial Sequence
  Description of Artificial Sequence: Synthetic oligonucleotide
agacuugcgcaccuucaua

SEQ ID NO: 1914210 - RNA, 19 nt, Artificial Sequence
  Description of Artificial Sequence: Synthetic oligonucleotide
ucucauagguugcgucgua

SEQ ID NO: 1914211 - RNA, 19 nt, Artificial Sequence
  Description of Artificial Sequence: Synthetic oligonucleotide
uugggauggccagaaccgu

SEQ ID NO: 1914212 - RNA, 19 nt, Artificial Sequence
  Description of Artificial Sequence: Synthetic oligonucleotide
ggggaggacauuuggcaac

SEQ ID NO: 1914213 - RNA, 19 nt, Artificial Sequence
  Description of Artificial Sequence: Synthetic oligonucleotide
gagagaugacggcgcugcc

SEQ ID NO: 1914214 - RNA, 19 nt, Artificial Sequence
  Description of Artificial Sequence: Synthetic oligonucleotide
cuugguccgcuucaaccca

SEQ ID NO: 1914215 - RNA, 19 nt, Artificial Sequence
  Description of Artificial Sequence: Synthetic oligonucleotide
ccccacaucucccaccagg

SEQ ID NO: 1914216 - RNA, 19 nt, Artificial Sequence
  Description of Artificial Sequence: Synthetic oligonucleotide
acagacaagcacagucacu

SEQ ID NO: 1914217 - RNA, 19 nt, Artificial Sequence
  Description of Artificial Sequence: Synthetic oligonucleotide
ggcucacaaaggcuugccc

SEQ ID NO: 1914218 - RNA, 19 nt, Artificial Sequence
  Description of Artificial Sequence: Synthetic oligonucleotide
gguggggaggacauuuggc

SEQ ID NO: 1914219 - RNA, 19 nt, Artificial Sequence
  Description of Artificial Sequence: Synthetic oligonucleotide
guugaagacuugcgcaccu

SEQ ID NO: 1914220 - RNA, 19 nt, Artificial Sequence
  Description of Artificial Sequence: Synthetic oligonucleotide
agaggaucagaagcaguuu

SEQ ID NO: 1914221 - RNA, 19 nt, Artificial Sequence
  Description of Artificial Sequence: Synthetic oligonucleotide
uugcucuuaaggggugcac

SEQ ID NO: 1914222 - RNA, 19 nt, Artificial Sequence
  Description of Artificial Sequence: Synthetic oligonucleotide
cgugcuugauuccugucag

SEQ ID NO: 1914223 - RNA, 19 nt, Artificial Sequence
  Description of Artificial Sequence: Synthetic oligonucleotide
gaacgcggccucucccggc

SEQ ID NO: 1914224 - RNA, 19 nt, Artificial Sequence
  Description of Artificial Sequence: Synthetic oligonucleotide
ggccauguuuccggaagcg

SEQ ID NO: 1914225 - RNA, 19 nt, Artificial Sequence
  Description of Artificial Sequence: Synthetic oligonucleotide
ccccuuccguuuaaguagg

SEQ ID NO: 1914226 - RNA, 19 nt, Artificial Sequence
  Description of Artificial Sequence: Synthetic oligonucleotide
ugcgcaccuucauaucauu

SEQ ID NO: 1914227 - RNA, 19 nt, Artificial Sequence
  Description of Artificial Sequence: Synthetic oligonucleotide
ggcgcugccaccuaguuuu

SEQ ID NO: 1914228 - RNA, 19 nt, Artificial Sequence
  Description of Artificial Sequence: Synthetic oligonucleotide
ccuuacugguccugcuucc

SEQ ID NO: 1914229 - RNA, 19 nt, Artificial Sequence
  Description of Artificial Sequence: Synthetic oligonucleotide
accgucaggguggagggaa

SEQ ID NO: 1914230 - RNA, 19 nt, Artificial Sequence
  Description of Artificial Sequence: Synthetic oligonucleotide
cuugcccuccagagagaug

SEQ ID NO: 1914231 - RNA, 19 nt, Artificial Sequence
  Description of Artificial Sequence: Synthetic oligonucleotide
agcgaaagggagacaggga

SEQ ID NO: 1914232 - RNA, 19 nt, Artificial Sequence
  Description of Artificial Sequence: Synthetic oligonucleotide
gaugacggcgcugccaccu

SEQ ID NO: 1914233 - RNA, 19 nt, Artificial Sequence
  Description of Artificial Sequence: Synthetic oligonucleotide
ccgggauccgacugaacgc

SEQ ID NO: 1914234 - RNA, 19 nt, Artificial Sequence
  Description of Artificial Sequence: Synthetic oligonucleotide
uggagcuggcauagaucau

SEQ ID NO: 1914235 - RNA, 19 nt, Artificial Sequence
  Description of Artificial Sequence: Synthetic oligonucleotide
gcagcaugggauggggcgg

SEQ ID NO: 1914236 - RNA, 19 nt, Artificial Sequence
  Description of Artificial Sequence: Synthetic oligonucleotide
uugcgcuucuucacuucuu

SEQ ID NO: 1914237 - RNA, 19 nt, Artificial Sequence
  Description of Artificial Sequence: Synthetic oligonucleotide
ccguuuaaguaggagccgc

SEQ ID NO: 1914238 - RNA, 19 nt, Artificial Sequence
  Description of Artificial Sequence: Synthetic oligonucleotide
gcucacaaaggcuugcccu

SEQ ID NO: 1914239 - RNA, 19 nt, Artificial Sequence
  Description of Artificial Sequence: Synthetic oligonucleotide
cagcaugggauggggcggg

SEQ ID NO: 1914240 - RNA, 19 nt, Artificial Sequence
  Description of Artificial Sequence: Synthetic oligonucleotide
auccgacugaacgcggccu

SEQ ID NO: 1914241 - RNA, 19 nt, Artificial Sequence
  Description of Artificial Sequence: Synthetic oligonucleotide
gcgguccuugaccuccucg

SEQ ID NO: 1914242 - RNA, 19 nt, Artificial Sequence
  Description of Artificial Sequence: Synthetic oligonucleotide
caguuugcuuguaauucgu

SEQ ID NO: 1914243 - RNA, 19 nt, Artificial Sequence
  Description of Artificial Sequence: Synthetic oligonucleotide
ucucccggccccuuccguu

SEQ ID NO: 1914244 - RNA, 19 nt, Artificial Sequence
  Description of Artificial Sequence: Synthetic oligonucleotide
cagggugcagcgguccuug

SEQ ID NO: 1914245 - RNA, 19 nt, Artificial Sequence
  Description of Artificial Sequence: Synthetic oligonucleotide
cuucuggcguugaagacuu

SEQ ID NO: 1914246 - RNA, 19 nt, Artificial Sequence
  Description of Artificial Sequence: Synthetic oligonucleotide
aggggagggcaaccagcug

SEQ ID NO: 1914247 - RNA, 19 nt, Artificial Sequence
  Description of Artificial Sequence: Synthetic oligonucleotide
uugcgucguagagagcaua

SEQ ID NO: 1914248 - RNA, 19 nt, Artificial Sequence
  Description of Artificial Sequence: Synthetic oligonucleotide
cuuacugguccugcuucca

SEQ ID NO: 1914249 - RNA, 19 nt, Artificial Sequence
  Description of Artificial Sequence: Synthetic oligonucleotide
gggagggucauuuccacau

SEQ ID NO: 1914250 - RNA, 19 nt, Artificial Sequence
  Description of Artificial Sequence: Synthetic oligonucleotide
ccauguuuccggaagcgaa

SEQ ID NO: 1914251 - RNA, 19 nt, Artificial Sequence
  Description of Artificial Sequence: Synthetic oligonucleotide
cugcuagaugcuccaggca

SEQ ID NO: 1914252 - RNA, 19 nt, Artificial Sequence
  Description of Artificial Sequence: Synthetic oligonucleotide
cacaccagaggccauguuu

SEQ ID NO: 1914253 - RNA, 19 nt, Artificial Sequence
  Description of Artificial Sequence: Synthetic oligonucleotide
ggcaacuggggugaaggga

SEQ ID NO: 1914254 - RNA, 19 nt, Artificial Sequence
  Description of Artificial Sequence: Synthetic oligonucleotide
cgcagggagggucauuucc

SEQ ID NO: 1914255 - RNA, 19 nt, Artificial Sequence
  Description of Artificial Sequence: Synthetic oligonucleotide
uucuggcguugaagacuug

SEQ ID NO: 1914256 - RNA, 19 nt, Artificial Sequence
  Description of Artificial Sequence: Synthetic oligonucleotide
cuugcgcuucuucacuucu

SEQ ID NO: 1914257 - RNA, 19 nt, Artificial Sequence
  Description of Artificial Sequence: Synthetic oligonucleotide
ggcggggaugaggaguagg

SEQ ID NO: 1914258 - RNA, 19 nt, Artificial Sequence
  Description of Artificial Sequence: Synthetic oligonucleotide
gucugccccacaucuccca

SEQ ID NO: 1914259 - RNA, 19 nt, Artificial Sequence
  Description of Artificial Sequence: Synthetic oligonucleotide
auggggcggggaugaggag

SEQ ID NO: 1914260 - RNA, 19 nt, Artificial Sequence
  Description of Artificial Sequence: Synthetic oligonucleotide
ggaaaggggagggcaacca

SEQ ID NO: 1914261 - RNA, 19 nt, Artificial Sequence
  Description of Artificial Sequence: Synthetic oligonucleotide
gagcgacagaagagcugag

SEQ ID NO: 1914262 - RNA, 19 nt, Artificial Sequence
  Description of Artificial Sequence: Synthetic oligonucleotide
ggccccuuccguuuaagua

SEQ ID NO: 1914263 - RNA, 19 nt, Artificial Sequence
  Description of Artificial Sequence: Synthetic oligonucleotide
ccggaagcgaaagggagac

SEQ ID NO: 1914264 - RNA, 19 nt, Artificial Sequence
  Description of Artificial Sequence: Synthetic oligonucleotide
ccuuccguuuaaguaggag

SEQ ID NO: 1914265 - RNA, 19 nt, Artificial Sequence
  Description of Artificial Sequence: Synthetic oligonucleotide
cucguagcaguuugcuugu

SEQ ID NO: 1914266 - RNA, 19 nt, Artificial Sequence
  Description of Artificial Sequence: Synthetic oligonucleotide
cccuuacugguccugcuuc

SEQ ID NO: 1914267 - RNA, 19 nt, Artificial Sequence
  Description of Artificial Sequence: Synthetic oligonucleotide
ggauccgacugaacgcggc

SEQ ID NO: 1914268 - RNA, 19 nt, Artificial Sequence
  Description of Artificial Sequence: Synthetic oligonucleotide
agucacuauugugguuaga

SEQ ID NO: 1914269 - RNA, 19 nt, Artificial Sequence
  Description of Artificial Sequence: Synthetic oligonucleotide
aaccgucaggguggaggga

SEQ ID NO: 1914270 - RNA, 19 nt, Artificial Sequence
  Description of Artificial Sequence: Synthetic oligonucleotide
ggucccuuacugguccugc

SEQ ID NO: 1914271 - RNA, 19 nt, Artificial Sequence
  Description of Artificial Sequence: Synthetic oligonucleotide
gggaaaggggagggcaacc

SEQ ID NO: 1914272 - RNA, 19 nt, Artificial Sequence
  Description of Artificial Sequence: Synthetic oligonucleotide
ugcagcgguccuugaccuc

SEQ ID NO: 1914273 - RNA, 19 nt, Artificial Sequence
  Description of Artificial Sequence: Synthetic oligonucleotide
agccugcaacacccaugag

SEQ ID NO: 1914274 - RNA, 19 nt, Artificial Sequence
  Description of Artificial Sequence: Synthetic oligonucleotide
cuccggucuggcaggaaaa

SEQ ID NO: 1914275 - RNA, 19 nt, Artificial Sequence
  Description of Artificial Sequence: Synthetic oligonucleotide
ugcuuccaugaguggccaa

SEQ ID NO: 1914276 - RNA, 19 nt, Artificial Sequence
  Description of Artificial Sequence: Synthetic oligonucleotide
cuuccaugaguggccaaaa

SEQ ID NO: 1914277 - RNA, 19 nt, Artificial Sequence
  Description of Artificial Sequence: Synthetic oligonucleotide
ccgcuucaacccaagagga

SEQ ID NO: 1914278 - RNA, 19 nt, Artificial Sequence
  Description of Artificial Sequence: Synthetic oligonucleotide
gugcagcgguccuugaccu

SEQ ID NO: 1914279 - RNA, 19 nt, Artificial Sequence
  Description of Artificial Sequence: Synthetic oligonucleotide
ggggugaagggauuacccu

SEQ ID NO: 1914280 - RNA, 19 nt, Artificial Sequence
  Description of Artificial Sequence: Synthetic oligonucleotide
cgggauccgacugaacgcg

SEQ ID NO: 1914281 - RNA, 19 nt, Artificial Sequence
  Description of Artificial Sequence: Synthetic oligonucleotide
aggucccuuacugguccug

SEQ ID NO: 1914282 - RNA, 19 nt, Artificial Sequence
  Description of Artificial Sequence: Synthetic oligonucleotide
gcuucaacccaagaggaau

SEQ ID NO: 1914283 - RNA, 19 nt, Artificial Sequence
  Description of Artificial Sequence: Synthetic oligonucleotide
cuucacuucuucuggcguu

SEQ ID NO: 1914284 - RNA, 19 nt, Artificial Sequence
  Description of Artificial Sequence: Synthetic oligonucleotide
agcaugggauggggcgggg

SEQ ID NO: 1914285 - RNA, 19 nt, Artificial Sequence
  Description of Artificial Sequence: Synthetic oligonucleotide
gucucauagguugcgucgu

SEQ ID NO: 1914286 - RNA, 19 nt, Artificial Sequence
  Description of Artificial Sequence: Synthetic oligonucleotide
ggacuugguccgcuucaac

SEQ ID NO: 1914287 - RNA, 19 nt, Artificial Sequence
  Description of Artificial Sequence: Synthetic oligonucleotide
gcacagucacuauuguggu

SEQ ID NO: 1914288 - RNA, 19 nt, Artificial Sequence
  Description of Artificial Sequence: Synthetic oligonucleotide
agguugcgucguagagagc

SEQ ID NO: 1914289 - RNA, 19 nt, Artificial Sequence
  Description of Artificial Sequence: Synthetic oligonucleotide
ggucauuuccacauuucau

SEQ ID NO: 1914290 - RNA, 19 nt, Artificial Sequence
  Description of Artificial Sequence: Synthetic oligonucleotide
gggauccgacugaacgcgg

SEQ ID NO: 1914291 - RNA, 19 nt, Artificial Sequence
  Description of Artificial Sequence: Synthetic oligonucleotide
ccggucuggcaggaaaagg

SEQ ID NO: 1914292 - RNA, 19 nt, Artificial Sequence
  Description of Artificial Sequence: Synthetic oligonucleotide
ccuccucguagcaguuugc

SEQ ID NO: 1914293 - RNA, 19 nt, Artificial Sequence
  Description of Artificial Sequence: Synthetic oligonucleotide
gcgcaccuucauaucauug

SEQ ID NO: 1914294 - RNA, 19 nt, Artificial Sequence
  Description of Artificial Sequence: Synthetic oligonucleotide
acggcgcugccaccuaguu

SEQ ID NO: 1914295 - RNA, 19 nt, Artificial Sequence
  Description of Artificial Sequence: Synthetic oligonucleotide
cuuguaauucgugcuugau

SEQ ID NO: 1914296 - RNA, 19 nt, Artificial Sequence
  Description of Artificial Sequence: Synthetic oligonucleotide
cguugaagacuugcgcacc

SEQ ID NO: 1914297 - RNA, 19 nt, Artificial Sequence
  Description of Artificial Sequence: Synthetic oligonucleotide
ggucguccacagucugccc

SEQ ID NO: 1914298 - RNA, 19 nt, Artificial Sequence
  Description of Artificial Sequence: Synthetic oligonucleotide
gcaacuggggugaagggau

SEQ ID NO: 1914299 - RNA, 19 nt, Artificial Sequence
  Description of Artificial Sequence: Synthetic oligonucleotide
gcugccgggauccgacuga

SEQ ID NO: 1914300 - RNA, 19 nt, Artificial Sequence
  Description of Artificial Sequence: Synthetic oligonucleotide
caguccuugucgggcagca

SEQ ID NO: 1914301 - RNA, 19 nt, Artificial Sequence
  Description of Artificial Sequence: Synthetic oligonucleotide
gccccuccggucuggcagg

SEQ ID NO: 1914302 - RNA, 19 nt, Artificial Sequence
  Description of Artificial Sequence: Synthetic oligonucleotide
cucuuaaggggugcacucu

SEQ ID NO: 1914303 - RNA, 19 nt, Artificial Sequence
  Description of Artificial Sequence: Synthetic oligonucleotide
gcgucguagagagcauagc

SEQ ID NO: 1914304 - RNA, 19 nt, Artificial Sequence
  Description of Artificial Sequence: Synthetic oligonucleotide
gaagggacuugguccgcuu

SEQ ID NO: 1914305 - RNA, 19 nt, Artificial Sequence
  Description of Artificial Sequence: Synthetic oligonucleotide
ugcucuccuuggucucaua

SEQ ID NO: 1914306 - RNA, 19 nt, Artificial Sequence
  Description of Artificial Sequence: Synthetic oligonucleotide
augacggcgcugccaccua

SEQ ID NO: 1914307 - RNA, 19 nt, Artificial Sequence
  Description of Artificial Sequence: Synthetic oligonucleotide
ggcggcucacaaaggcuug

SEQ ID NO: 1914308 - RNA, 19 nt, Artificial Sequence
  Description of Artificial Sequence: Synthetic oligonucleotide
ggagggcaaccagcuggcg

SEQ ID NO: 1914309 - RNA, 19 nt, Artificial Sequence
  Description of Artificial Sequence: Synthetic oligonucleotide
ccaggaucuccuugcccuc

SEQ ID NO: 1914310 - RNA, 19 nt, Artificial Sequence
  Description of Artificial Sequence: Synthetic oligonucleotide
caaccagcuggcgcaggga

SEQ ID NO: 1914311 - RNA, 19 nt, Artificial Sequence
  Description of Artificial Sequence: Synthetic oligonucleotide
ggaggacauuuggcaacug

SEQ ID NO: 1914312 - RNA, 19 nt, Artificial Sequence
  Description of Artificial Sequence: Synthetic oligonucleotide
gcaguuugggauggccaga

SEQ ID NO: 1914313 - RNA, 19 nt, Artificial Sequence
  Description of Artificial Sequence: Synthetic oligonucleotide
gcuggaggcggcucacaaa

SEQ ID NO: 1914314 - RNA, 19 nt, Artificial Sequence
  Description of Artificial Sequence: Synthetic oligonucleotide
ucguagcaguuugcuugua

SEQ ID NO: 1914315 - RNA, 19 nt, Artificial Sequence
  Description of Artificial Sequence: Synthetic oligonucleotide
gcaacacccaugagcaggu

SEQ ID NO: 1914316 - RNA, 19 nt, Artificial Sequence
  Description of Artificial Sequence: Synthetic oligonucleotide
gggaggacauuuggcaacu

SEQ ID NO: 1914317 - RNA, 19 nt, Artificial Sequence
  Description of Artificial Sequence: Synthetic oligonucleotide
ccgucaggguggagggaag

SEQ ID NO: 1914318 - RNA, 19 nt, Artificial Sequence
  Description of Artificial Sequence: Synthetic oligonucleotide
ccucucccggccccuuccg

SEQ ID NO: 1914319 - RNA, 19 nt, Artificial Sequence
  Description of Artificial Sequence: Synthetic oligonucleotide
gggaagggacuugguccgc

SEQ ID NO: 1914320 - RNA, 19 nt, Artificial Sequence
  Description of Artificial Sequence: Synthetic oligonucleotide
ccuccggucuggcaggaaa

SEQ ID NO: 1914321 - RNA, 19 nt, Artificial Sequence
  Description of Artificial Sequence: Synthetic oligonucleotide
cguagcaguuugcuuguaa

SEQ ID NO: 1914322 - RNA, 19 nt, Artificial Sequence
  Description of Artificial Sequence: Synthetic oligonucleotide
ccuugaccuccucguagca

SEQ ID NO: 1914323 - RNA, 19 nt, Artificial Sequence
  Description of Artificial Sequence: Synthetic oligonucleotide
gggacuugguccgcuucaa

SEQ ID NO: 1914324 - RNA, 19 nt, Artificial Sequence
  Description of Artificial Sequence: Synthetic oligonucleotide
cugccgggauccgacugaa

SEQ ID NO: 1914325 - RNA, 19 nt, Artificial Sequence
  Description of Artificial Sequence: Synthetic oligonucleotide
gggcagcaucuugacaaaa

SEQ ID NO: 1914326 - RNA, 19 nt, Artificial Sequence
  Description of Artificial Sequence: Synthetic oligonucleotide
guggagggaagaggacggu

SEQ ID NO: 1914327 - RNA, 19 nt, Artificial Sequence
  Description of Artificial Sequence: Synthetic oligonucleotide
ggaagggacuugguccgcu

SEQ ID NO: 1914328 - RNA, 19 nt, Artificial Sequence
  Description of Artificial Sequence: Synthetic oligonucleotide
gguuagaaguuggcagcau

SEQ ID NO: 1914329 - RNA, 19 nt, Artificial Sequence
  Description of Artificial Sequence: Synthetic oligonucleotide
ggcgcagggagggucauuu

SEQ ID NO: 1914330 - RNA, 19 nt, Artificial Sequence
  Description of Artificial Sequence: Synthetic oligonucleotide
cggcucacaaaggcuugcc

SEQ ID NO: 1914331 - RNA, 19 nt, Artificial Sequence
  Description of Artificial Sequence: Synthetic oligonucleotide
cagccccuccggucuggca

SEQ ID NO: 1914332 - RNA, 19 nt, Artificial Sequence
  Description of Artificial Sequence: Synthetic oligonucleotide
gugcacucucaggggccca

SEQ ID NO: 1914333 - RNA, 19 nt, Artificial Sequence
  Description of Artificial Sequence: Synthetic oligonucleotide
gcgcagggagggucauuuc

SEQ ID NO: 1914334 - RNA, 19 nt, Artificial Sequence
  Description of Artificial Sequence: Synthetic oligonucleotide
uggcgcagggagggucauu

SEQ ID NO: 1914335 - RNA, 19 nt, Artificial Sequence
  Description of Artificial Sequence: Synthetic oligonucleotide
gcaugggauggggcgggga

SEQ ID NO: 1914336 - RNA, 19 nt, Artificial Sequence
  Description of Artificial Sequence: Synthetic oligonucleotide
gaccuccucguagcaguuu

SEQ ID NO: 1914337 - RNA, 19 nt, Artificial Sequence
  Description of Artificial Sequence: Synthetic oligonucleotide
cgcuucaacccaagaggaa

SEQ ID NO: 1914338 - RNA, 19 nt, Artificial Sequence
  Description of Artificial Sequence: Synthetic oligonucleotide
gccgcagcugcugccggga

SEQ ID NO: 1914339 - RNA, 19 nt, Artificial Sequence
  Description of Artificial Sequence: Synthetic oligonucleotide
cucccggccccuuccguuu

SEQ ID NO: 1914340 - RNA, 19 nt, Artificial Sequence
  Description of Artificial Sequence: Synthetic oligonucleotide
cugcugccgggauccgacu

SEQ ID NO: 1914341 - RNA, 19 nt, Artificial Sequence
  Description of Artificial Sequence: Synthetic oligonucleotide
cucucccggccccuuccgu

SEQ ID NO: 1914342 - RNA, 19 nt, Artificial Sequence
  Description of Artificial Sequence: Synthetic oligonucleotide
gggcggggaugaggaguag

SEQ ID NO: 1914343 - RNA, 19 nt, Artificial Sequence
  Description of Artificial Sequence: Synthetic oligonucleotide
cagcgguccuugaccuccu

SEQ ID NO: 1914344 - RNA, 19 nt, Artificial Sequence
  Description of Artificial Sequence: Synthetic oligonucleotide
ccggccccuuccguuuaag

SEQ ID NO: 1914345 - RNA, 19 nt, Artificial Sequence
  Description of Artificial Sequence: Synthetic oligonucleotide
ccagccccuccggucuggc

SEQ ID NO: 1914346 - RNA, 19 nt, Artificial Sequence
  Description of Artificial Sequence: Synthetic oligonucleotide
cggcaguccuugucgggca

SEQ ID NO: 1914347 - RNA, 19 nt, Artificial Sequence
  Description of Artificial Sequence: Synthetic oligonucleotide
cgacugaacgcggccucuc

SEQ ID NO: 1914348 - RNA, 19 nt, Artificial Sequence
  Description of Artificial Sequence: Synthetic oligonucleotide
gcauagcggcaguccuugu

SEQ ID NO: 1914349 - RNA, 19 nt, Artificial Sequence
  Description of Artificial Sequence: Synthetic oligonucleotide
cgggcagcaucuugacaaa

SEQ ID NO: 1914350 - RNA, 19 nt, Artificial Sequence
  Description of Artificial Sequence: Synthetic oligonucleotide
cuggcgcagggagggucau

SEQ ID NO: 1914351 - RNA, 19 nt, Artificial Sequence
  Description of Artificial Sequence: Synthetic oligonucleotide
ccgacugaacgcggccucu

SEQ ID NO: 1914352 - RNA, 19 nt, Artificial Sequence
  Description of Artificial Sequence: Synthetic oligonucleotide
cggccccuuccguuuaagu

SEQ ID NO: 1914353 - RNA, 19 nt, Artificial Sequence
  Description of Artificial Sequence: Synthetic oligonucleotide
cccggccccuuccguuuaa

SEQ ID NO: 1914354 - RNA, 19 nt, Artificial Sequence
  Description of Artificial Sequence: Synthetic oligonucleotide
ccccuccggucuggcagga

SEQ ID NO: 1914355 - RNA, 19 nt, Artificial Sequence
  Description of Artificial Sequence: Synthetic oligonucleotide
ccuugucgggcagcaucuu

SEQ ID NO: 1914356 - RNA, 19 nt, Artificial Sequence
  Description of Artificial Sequence: Synthetic oligonucleotide
cccuccggucuggcaggaa

SEQ ID NO: 1914357 - RNA, 19 nt, Artificial Sequence
  Description of Artificial Sequence: Synthetic oligonucleotide
uuaacgauggguucaaggg

SEQ ID NO: 1914358 - RNA, 19 nt, Artificial Sequence
  Description of Artificial Sequence: Synthetic oligonucleotide
gaugguguuggauucaucg

SEQ ID NO: 1914359 - RNA, 19 nt, Artificial Sequence
  Description of Artificial Sequence: Synthetic oligonucleotide
uuauuuacaaaaccaagga

SEQ ID NO: 1914360 - RNA, 19 nt, Artificial Sequence
  Description of Artificial Sequence: Synthetic oligonucleotide
gauuccaucaauauagggg

SEQ ID NO: 1914361 - RNA, 19 nt, Artificial Sequence
  Description of Artificial Sequence: Synthetic oligonucleotide
auagugauauguuccagcc

SEQ ID NO: 1914362 - RNA, 19 nt, Artificial Sequence
  Description of Artificial Sequence: Synthetic oligonucleotide
auuuacaaaaccaaggauc

SEQ ID NO: 1914363 - RNA, 19 nt, Artificial Sequence
  Description of Artificial Sequence: Synthetic oligonucleotide
aacaccguaguacagcagg

SEQ ID NO: 1914364 - RNA, 19 nt, Artificial Sequence
  Description of Artificial Sequence: Synthetic oligonucleotide
ucuaguguggucaaguagc

SEQ ID NO: 1914365 - RNA, 19 nt, Artificial Sequence
  Description of Artificial Sequence: Synthetic oligonucleotide
aaaaccaaggaucacucca

SEQ ID NO: 1914366 - RNA, 19 nt, Artificial Sequence
  Description of Artificial Sequence: Synthetic oligonucleotide
uuuaacgauggguucaagg

SEQ ID NO: 1914367 - RNA, 19 nt, Artificial Sequence
  Description of Artificial Sequence: Synthetic oligonucleotide
ucuguggacacaaagcugc

SEQ ID NO: 1914368 - RNA, 19 nt, Artificial Sequence
  Description of Artificial Sequence: Synthetic oligonucleotide
aaccauagugauauguucc

SEQ ID NO: 1914369 - RNA, 19 nt, Artificial Sequence
  Description of Artificial Sequence: Synthetic oligonucleotide
aguguggucaaguagccgg

SEQ ID NO: 1914370 - RNA, 19 nt, Artificial Sequence
  Description of Artificial Sequence: Synthetic oligonucleotide
auuccaucaauauagggga

SEQ ID NO: 1914371 - RNA, 19 nt, Artificial Sequence
  Description of Artificial Sequence: Synthetic oligonucleotide
cuuaguagggguaaguaac

SEQ ID NO: 1914372 - RNA, 19 nt, Artificial Sequence
  Description of Artificial Sequence: Synthetic oligonucleotide
aguucaugguagcucaugc

SEQ ID NO: 1914373 - RNA, 19 nt, Artificial Sequence
  Description of Artificial Sequence: Synthetic oligonucleotide
uguaacucaggcuugggug

SEQ ID NO: 1914374 - RNA, 19 nt, Artificial Sequence
  Description of Artificial Sequence: Synthetic oligonucleotide
cagcaaaugaugauguugg

SEQ ID NO: 1914375 - RNA, 19 nt, Artificial Sequence
  Description of Artificial Sequence: Synthetic oligonucleotide
agccuacuugucuagaccc

SEQ ID NO: 1914376 - RNA, 19 nt, Artificial Sequence
  Description of Artificial Sequence: Synthetic oligonucleotide
agaucuucuggacauggcg

SEQ ID NO: 1914377 - RNA, 19 nt, Artificial Sequence
  Description of Artificial Sequence: Synthetic oligonucleotide
auaccagugucacaacacc

SEQ ID NO: 1914378 - RNA, 19 nt, Artificial Sequence
  Description of Artificial Sequence: Synthetic oligonucleotide
uguaaagccgggcagggug

SEQ ID NO: 1914379 - RNA, 19 nt, Artificial Sequence
  Description of Artificial Sequence: Synthetic oligonucleotide
auauguacuagccuacuug

SEQ ID NO: 1914380 - RNA, 19 nt, Artificial Sequence
  Description of Artificial Sequence: Synthetic oligonucleotide
uguacuagccuacuugucu

SEQ ID NO: 1914381 - RNA, 19 nt, Artificial Sequence
  Description of Artificial Sequence: Synthetic oligonucleotide
ucaauauaggggaggaucu

SEQ ID NO: 1914382 - RNA, 19 nt, Artificial Sequence
  Description of Artificial Sequence: Synthetic oligonucleotide
ugacguaggacagacaugc

SEQ ID NO: 1914383 - RNA, 19 nt, Artificial Sequence
  Description of Artificial Sequence: Synthetic oligonucleotide
uugucuguaacucaggcuu

SEQ ID NO: 1914384 - RNA, 19 nt, Artificial Sequence
  Description of Artificial Sequence: Synthetic oligonucleotide
uucaucgaugggaagagug

SEQ ID NO: 1914385 - RNA, 19 nt, Artificial Sequence
  Description of Artificial Sequence: Synthetic oligonucleotide
cuugguaaagacaggcacg

SEQ ID NO: 1914386 - RNA, 19 nt, Artificial Sequence
  Description of Artificial Sequence: Synthetic oligonucleotide
uccagaggcauuuagcucu

SEQ ID NO: 1914387 - RNA, 19 nt, Artificial Sequence
  Description of Artificial Sequence: Synthetic oligonucleotide
auaagcuugucuguaacuc

SEQ ID NO: 1914388 - RNA, 19 nt, Artificial Sequence
  Description of Artificial Sequence: Synthetic oligonucleotide
gauacuucuguagucuccg

SEQ ID NO: 1914389 - RNA, 19 nt, Artificial Sequence
  Description of Artificial Sequence: Synthetic oligonucleotide
uauguacuagccuacuugu

SEQ ID NO: 1914390 - RNA, 19 nt, Artificial Sequence
  Description of Artificial Sequence: Synthetic oligonucleotide
agaggcauuuagcucuucc

SEQ ID NO: 1914391 - RNA, 19 nt, Artificial Sequence
  Description of Artificial Sequence: Synthetic oligonucleotide
cauagugauauguuccagc

SEQ ID NO: 1914392 - RNA, 19 nt, Artificial Sequence
  Description of Artificial Sequence: Synthetic oligonucleotide
uugucuagaccccaugggc

SEQ ID NO: 1914393 - RNA, 19 nt, Artificial Sequence
  Description of Artificial Sequence: Synthetic oligonucleotide
uuaguagggguaaguaacc

SEQ ID NO: 1914394 - RNA, 19 nt, Artificial Sequence
  Description of Artificial Sequence: Synthetic oligonucleotide
auauuccugagccacagga

SEQ ID NO: 1914395 - RNA, 19 nt, Artificial Sequence
  Description of Artificial Sequence: Synthetic oligonucleotide
aguggaugguguuggauuc

SEQ ID NO: 1914396 - RNA, 19 nt, Artificial Sequence
  Description of Artificial Sequence: Synthetic oligonucleotide
ucgcucauccaguucaugg

SEQ ID NO: 1914397 - RNA, 19 nt, Artificial Sequence
  Description of Artificial Sequence: Synthetic oligonucleotide
acuugucuagaccccaugg

SEQ ID NO: 1914398 - RNA, 19 nt, Artificial Sequence
  Description of Artificial Sequence: Synthetic oligonucleotide
uaacgauggguucaagggc

SEQ ID NO: 1914399 - RNA, 19 nt, Artificial Sequence
  Description of Artificial Sequence: Synthetic oligonucleotide
uaccagugucacaacaccg

SEQ ID NO: 1914400 - RNA, 19 nt, Artificial Sequence
  Description of Artificial Sequence: Synthetic oligonucleotide
agacaggcacgucauauuc

SEQ ID NO: 1914401 - RNA, 19 nt, Artificial Sequence
  Description of Artificial Sequence: Synthetic oligonucleotide
uguagucuccggaugaggu

SEQ ID NO: 1914402 - RNA, 19 nt, Artificial Sequence
  Description of Artificial Sequence: Synthetic oligonucleotide
acuggauacuucuguaguc

SEQ ID NO: 1914403 - RNA, 19 nt, Artificial Sequence
  Description of Artificial Sequence: Synthetic oligonucleotide
cugagaguugaagaaaucc

SEQ ID NO: 1914404 - RNA, 19 nt, Artificial Sequence
  Description of Artificial Sequence: Synthetic oligonucleotide
gauuagcuuccuuucauca

SEQ ID NO: 1914405 - RNA, 19 nt, Artificial Sequence
  Description of Artificial Sequence: Synthetic oligonucleotide
cuucuuguguucaaugcac

SEQ ID NO: 1914406 - RNA, 19 nt, Artificial Sequence
  Description of Artificial Sequence: Synthetic oligonucleotide
uuuagcucuuccaguaaga

SEQ ID NO: 1914407 - RNA, 19 nt, Artificial Sequence
  Description of Artificial Sequence: Synthetic oligonucleotide
accguaguacagcagguuc

SEQ ID NO: 1914408 - RNA, 19 nt, Artificial Sequence
  Description of Artificial Sequence: Synthetic oligonucleotide
ugucacaacaccguaguac

SEQ ID NO: 1914409 - RNA, 19 nt, Artificial Sequence
  Description of Artificial Sequence: Synthetic oligonucleotide
ugauguuggggucauuuuc

SEQ ID NO: 1914410 - RNA, 19 nt, Artificial Sequence
  Description of Artificial Sequence: Synthetic oligonucleotide
ugugguaaggucccacuga

SEQ ID NO: 1914411 - RNA, 19 nt, Artificial Sequence
  Description of Artificial Sequence: Synthetic oligonucleotide
uccaguucaugguagcuca

SEQ ID NO: 1914412 - RNA, 19 nt, Artificial Sequence
  Description of Artificial Sequence: Synthetic oligonucleotide
ugauaagcuugucuguaac

SEQ ID NO: 1914413 - RNA, 19 nt, Artificial Sequence
  Description of Artificial Sequence: Synthetic oligonucleotide
aaccaaggaucacuccagg

SEQ ID NO: 1914414 - RNA, 19 nt, Artificial Sequence
  Description of Artificial Sequence: Synthetic oligonucleotide
agcagaucucaucauagcu

SEQ ID NO: 1914415 - RNA, 19 nt, Artificial Sequence
  Description of Artificial Sequence: Synthetic oligonucleotide
agugucacaacaccguagu

SEQ ID NO: 1914416 - RNA, 19 nt, Artificial Sequence
  Description of Artificial Sequence: Synthetic oligonucleotide
gcuaaugagggcuuaguag

SEQ ID NO: 1914417 - RNA, 19 nt, Artificial Sequence
  Description of Artificial Sequence: Synthetic oligonucleotide
cuugucuagaccccauggg

SEQ ID NO: 1914418 - RNA, 19 nt, Artificial Sequence
  Description of Artificial Sequence: Synthetic oligonucleotide
ugaauggcaaugcgcacca

SEQ ID NO: 1914419 - RNA, 19 nt, Artificial Sequence
  Description of Artificial Sequence: Synthetic oligonucleotide
uuccagcaaaugaugaugu

SEQ ID NO: 1914420 - RNA, 19 nt, Artificial Sequence
  Description of Artificial Sequence: Synthetic oligonucleotide
aaguggaugguguuggauu

SEQ ID NO: 1914421 - RNA, 19 nt, Artificial Sequence
  Description of Artificial Sequence: Synthetic oligonucleotide
uuuggcguugggcaguaca

SEQ ID NO: 1914422 - RNA, 19 nt, Artificial Sequence
  Description of Artificial Sequence: Synthetic oligonucleotide
auggcugugacagugauaa

SEQ ID NO: 1914423 - RNA, 19 nt, Artificial Sequence
  Description of Artificial Sequence: Synthetic oligonucleotide
gauucaucgaugggaagag

SEQ ID NO: 1914424 - RNA, 19 nt, Artificial Sequence
  Description of Artificial Sequence: Synthetic oligonucleotide
uugggcaguacacauugga

SEQ ID NO: 1914425 - RNA, 19 nt, Artificial Sequence
  Description of Artificial Sequence: Synthetic oligonucleotide
uuggauucaucgaugggaa

SEQ ID NO: 1914426 - RNA, 19 nt, Artificial Sequence
  Description of Artificial Sequence: Synthetic oligonucleotide
uucuguagucuccggauga

SEQ ID NO: 1914427 - RNA, 19 nt, Artificial Sequence
  Description of Artificial Sequence: Synthetic oligonucleotide
ucacuuccagcaaaugaug

SEQ ID NO: 1914428 - RNA, 19 nt, Artificial Sequence
  Description of Artificial Sequence: Synthetic oligonucleotide
aaagacaggcacgucauau

SEQ ID NO: 1914429 - RNA, 19 nt, Artificial Sequence
  Description of Artificial Sequence: Synthetic oligonucleotide
ucaucuaccagguccugga

SEQ ID NO: 1914430 - RNA, 19 nt, Artificial Sequence
  Description of Artificial Sequence: Synthetic oligonucleotide
uaagcuugucuguaacuca

SEQ ID NO: 1914431 - RNA, 19 nt, Artificial Sequence
  Description of Artificial Sequence: Synthetic oligonucleotide
guguuggauucaucgaugg

SEQ ID NO: 1914432 - RNA, 19 nt, Artificial Sequence
  Description of Artificial Sequence: Synthetic oligonucleotide
aaaccaaggaucacuccag

SEQ ID NO: 1914433 - RNA, 19 nt, Artificial Sequence
  Description of Artificial Sequence: Synthetic oligonucleotide
gcggauuccaucaauauag

SEQ ID NO: 1914434 - RNA, 19 nt, Artificial Sequence
  Description of Artificial Sequence: Synthetic oligonucleotide
cuuggccugagcaucacac

SEQ ID NO: 1914435 - RNA, 19 nt, Artificial Sequence
  Description of Artificial Sequence: Synthetic oligonucleotide
uugaagaaauccuccuugu

SEQ ID NO: 1914436 - RNA, 19 nt, Artificial Sequence
  Description of Artificial Sequence: Synthetic oligonucleotide
caggccauauguacuagcc

SEQ ID NO: 1914437 - RNA, 19 nt, Artificial Sequence
  Description of Artificial Sequence: Synthetic oligonucleotide
aacgauggguucaagggca

SEQ ID NO: 1914438 - RNA, 19 nt, Artificial Sequence
  Description of Artificial Sequence: Synthetic oligonucleotide
guuggauucaucgauggga

SEQ ID NO: 1914439 - RNA, 19 nt, Artificial Sequence
  Description of Artificial Sequence: Synthetic oligonucleotide
ugauauguuccagccagcc

SEQ ID NO: 1914440 - RNA, 19 nt, Artificial Sequence
  Description of Artificial Sequence: Synthetic oligonucleotide
ugguguuggauucaucgau

SEQ ID NO: 1914441 - RNA, 19 nt, Artificial Sequence
  Description of Artificial Sequence: Synthetic oligonucleotide
ucccgagacacucggacug

SEQ ID NO: 1914442 - RNA, 19 nt, Artificial Sequence
  Description of Artificial Sequence: Synthetic oligonucleotide
auaggggaggaucugcugu

SEQ ID NO: 1914443 - RNA, 19 nt, Artificial Sequence
  Description of Artificial Sequence: Synthetic oligonucleotide
acaacaccguaguacagca

SEQ ID NO: 1914444 - RNA, 19 nt, Artificial Sequence
  Description of Artificial Sequence: Synthetic oligonucleotide
aagcuugucuguaacucag

SEQ ID NO: 1914445 - RNA, 19 nt, Artificial Sequence
  Description of Artificial Sequence: Synthetic oligonucleotide
guaagauggucaugauggg

SEQ ID NO: 1914446 - RNA, 19 nt, Artificial Sequence
  Description of Artificial Sequence: Synthetic oligonucleotide
uacacuuggacagugucaa

SEQ ID NO: 1914447 - RNA, 19 nt, Artificial Sequence
  Description of Artificial Sequence: Synthetic oligonucleotide
ucuuguguucaaugcacac

SEQ ID NO: 1914448 - RNA, 19 nt, Artificial Sequence
  Description of Artificial Sequence: Synthetic oligonucleotide
agacuggcccuuuuguguc

SEQ ID NO: 1914449 - RNA, 19 nt, Artificial Sequence
  Description of Artificial Sequence: Synthetic oligonucleotide
uggggucauuuucuagucg

SEQ ID NO: 1914450 - RNA, 19 nt, Artificial Sequence
  Description of Artificial Sequence: Synthetic oligonucleotide
uguguucaaugcacacggg

SEQ ID NO: 1914451 - RNA, 19 nt, Artificial Sequence
  Description of Artificial Sequence: Synthetic oligonucleotide
uucuuguguucaaugcaca

SEQ ID NO: 1914452 - RNA, 19 nt, Artificial Sequence
  Description of Artificial Sequence: Synthetic oligonucleotide
augggaagagugcaccguc

SEQ ID NO: 1914453 - RNA, 19 nt, Artificial Sequence
  Description of Artificial Sequence: Synthetic oligonucleotide
agcaaaugaugauguuggg

SEQ ID NO: 1914454 - RNA, 19 nt, Artificial Sequence
  Description of Artificial Sequence: Synthetic oligonucleotide
accauagugauauguucca

SEQ ID NO: 1914455 - RNA, 19 nt, Artificial Sequence
  Description of Artificial Sequence: Synthetic oligonucleotide
ucccacugagaguugaaga

SEQ ID NO: 1914456 - RNA, 19 nt, Artificial Sequence
  Description of Artificial Sequence: Synthetic oligonucleotide
guacacauuggaguacugg

SEQ ID NO: 1914457 - RNA, 19 nt, Artificial Sequence
  Description of Artificial Sequence: Synthetic oligonucleotide
cugcugugugguaaggucc

SEQ ID NO: 1914458 - RNA, 19 nt, Artificial Sequence
  Description of Artificial Sequence: Synthetic oligonucleotide
ucggacuggauacuucugu

SEQ ID NO: 1914459 - RNA, 19 nt, Artificial Sequence
  Description of Artificial Sequence: Synthetic oligonucleotide
acaggcacgucauauuccu

SEQ ID NO: 1914460 - RNA, 19 nt, Artificial Sequence
  Description of Artificial Sequence: Synthetic oligonucleotide
uggauuagcuuccuuucau

SEQ ID NO: 1914461 - RNA, 19 nt, Artificial Sequence
  Description of Artificial Sequence: Synthetic oligonucleotide
cucuaguguggucaaguag

SEQ ID NO: 1914462 - RNA, 19 nt, Artificial Sequence
  Description of Artificial Sequence: Synthetic oligonucleotide
gacuuuuggcguugggcag

SEQ ID NO: 1914463 - RNA, 19 nt, Artificial Sequence
  Description of Artificial Sequence: Synthetic oligonucleotide
cagacaugccuccugcagg

SEQ ID NO: 1914464 - RNA, 19 nt, Artificial Sequence
  Description of Artificial Sequence: Synthetic oligonucleotide
gugguaaggucccacugag

SEQ ID NO: 1914465 - RNA, 19 nt, Artificial Sequence
  Description of Artificial Sequence: Synthetic oligonucleotide
uccuugguaaagacaggca

SEQ ID NO: 1914466 - RNA, 19 nt, Artificial Sequence
  Description of Artificial Sequence: Synthetic oligonucleotide
aaugcgcaccagguugagc

SEQ ID NO: 1914467 - RNA, 19 nt, Artificial Sequence
  Description of Artificial Sequence: Synthetic oligonucleotide
ggauuccaucaauauaggg

SEQ ID NO: 1914468 - RNA, 19 nt, Artificial Sequence
  Description of Artificial Sequence: Synthetic oligonucleotide
uguggcagcccguguaaag

SEQ ID NO: 1914469 - RNA, 19 nt, Artificial Sequence
  Description of Artificial Sequence: Synthetic oligonucleotide
ugggugauuggauguacac

SEQ ID NO: 1914470 - RNA, 19 nt, Artificial Sequence
  Description of Artificial Sequence: Synthetic oligonucleotide
cugaauggcaaugcgcacc

SEQ ID NO: 1914471 - RNA, 19 nt, Artificial Sequence
  Description of Artificial Sequence: Synthetic oligonucleotide
uauaggggaggaucugcug

SEQ ID NO: 1914472 - RNA, 19 nt, Artificial Sequence
  Description of Artificial Sequence: Synthetic oligonucleotide
uuggcguugggcaguacac

SEQ ID NO: 1914473 - RNA, 19 nt, Artificial Sequence
  Description of Artificial Sequence: Synthetic oligonucleotide
gcugcaauacagcuggaag

SEQ ID NO: 1914474 - RNA, 19 nt, Artificial Sequence
  Description of Artificial Sequence: Synthetic oligonucleotide
caaaaccaaggaucacucc

SEQ ID NO: 1914475 - RNA, 19 nt, Artificial Sequence
  Description of Artificial Sequence: Synthetic oligonucleotide
cuuuuguguccuugcuugg

SEQ ID NO: 1914476 - RNA, 19 nt, Artificial Sequence
  Description of Artificial Sequence: Synthetic oligonucleotide
guucaugguagcucaugcc

SEQ ID NO: 1914477 - RNA, 19 nt, Artificial Sequence
  Description of Artificial Sequence: Synthetic oligonucleotide
caguaagauggucaugaug

SEQ ID NO: 1914478 - RNA, 19 nt, Artificial Sequence
  Description of Artificial Sequence: Synthetic oligonucleotide
cugcaauacagcuggaaga

SEQ ID NO: 1914479 - RNA, 19 nt, Artificial Sequence
  Description of Artificial Sequence: Synthetic oligonucleotide
auuagcuuccuuucaucaa

SEQ ID NO: 1914480 - RNA, 19 nt, Artificial Sequence
  Description of Artificial Sequence: Synthetic oligonucleotide
gauguacacuuggacagug

SEQ ID NO: 1914481 - RNA, 19 nt, Artificial Sequence
  Description of Artificial Sequence: Synthetic oligonucleotide
gaggcauuuagcucuucca

SEQ ID NO: 1914482 - RNA, 19 nt, Artificial Sequence
  Description of Artificial Sequence: Synthetic oligonucleotide
cuagccuacuugucuagac

SEQ ID NO: 1914483 - RNA, 19 nt, Artificial Sequence
  Description of Artificial Sequence: Synthetic oligonucleotide
guaacucaggcuuggguga

SEQ ID NO: 1914484 - RNA, 19 nt, Artificial Sequence
  Description of Artificial Sequence: Synthetic oligonucleotide
ucgaugggaagagugcacc

SEQ ID NO: 1914485 - RNA, 19 nt, Artificial Sequence
  Description of Artificial Sequence: Synthetic oligonucleotide
uugggugauuggauguaca

SEQ ID NO: 1914486 - RNA, 19 nt, Artificial Sequence
  Description of Artificial Sequence: Synthetic oligonucleotide
uacuagccuacuugucuag

SEQ ID NO: 1914487 - RNA, 19 nt, Artificial Sequence
  Description of Artificial Sequence: Synthetic oligonucleotide
cacaacaccguaguacagc

SEQ ID NO: 1914488 - RNA, 19 nt, Artificial Sequence
  Description of Artificial Sequence: Synthetic oligonucleotide
uacuugucuagaccccaug

SEQ ID NO: 1914489 - RNA, 19 nt, Artificial Sequence
  Description of Artificial Sequence: Synthetic oligonucleotide
auccaguucaugguagcuc

SEQ ID NO: 1914490 - RNA, 19 nt, Artificial Sequence
  Description of Artificial Sequence: Synthetic oligonucleotide
uagcuuccuuucaucaaca

SEQ ID NO: 1914491 - RNA, 19 nt, Artificial Sequence
  Description of Artificial Sequence: Synthetic oligonucleotide
ggggucauuuucuagucgc

SEQ ID NO: 1914492 - RNA, 19 nt, Artificial Sequence
  Description of Artificial Sequence: Synthetic oligonucleotide
ccaaggaucacuccaggcc

SEQ ID NO: 1914493 - RNA, 19 nt, Artificial Sequence
  Description of Artificial Sequence: Synthetic oligonucleotide
aagacaggcacgucauauu

SEQ ID NO: 1914494 - RNA, 19 nt, Artificial Sequence
  Description of Artificial Sequence: Synthetic oligonucleotide
uuguguccuugcuugguga

SEQ ID NO: 1914495 - RNA, 19 nt, Artificial Sequence
  Description of Artificial Sequence: Synthetic oligonucleotide
uauguuccagccagccaga

SEQ ID NO: 1914496 - RNA, 19 nt, Artificial Sequence
  Description of Artificial Sequence: Synthetic oligonucleotide
uuggugacguaggacagac

SEQ ID NO: 1914497 - RNA, 19 nt, Artificial Sequence
  Description of Artificial Sequence: Synthetic oligonucleotide
guggcguccgaugaggucc

SEQ ID NO: 1914498 - RNA, 19 nt, Artificial Sequence
  Description of Artificial Sequence: Synthetic oligonucleotide
guaggacagacaugccucc

SEQ ID NO: 1914499 - RNA, 19 nt, Artificial Sequence
  Description of Artificial Sequence: Synthetic oligonucleotide
ucugaauggcaaugcgcac

SEQ ID NO: 1914500 - RNA, 19 nt, Artificial Sequence
  Description of Artificial Sequence: Synthetic oligonucleotide
aucuaccagguccuggacu

SEQ ID NO: 1914501 - RNA, 19 nt, Artificial Sequence
  Description of Artificial Sequence: Synthetic oligonucleotide
ucaugccugucuugcagca

SEQ ID NO: 1914502 - RNA, 19 nt, Artificial Sequence
  Description of Artificial Sequence: Synthetic oligonucleotide
cagugucacaacaccguag

SEQ ID NO: 1914503 - RNA, 19 nt, Artificial Sequence
  Description of Artificial Sequence: Synthetic oligonucleotide
ggacuuuuggcguugggca

SEQ ID NO: 1914504 - RNA, 19 nt, Artificial Sequence
  Description of Artificial Sequence: Synthetic oligonucleotide
gauaagcuugucuguaacu

SEQ ID NO: 1914505 - RNA, 19 nt, Artificial Sequence
  Description of Artificial Sequence: Synthetic oligonucleotide
auacuucuguagucuccgg

SEQ ID NO: 1914506 - RNA, 19 nt, Artificial Sequence
  Description of Artificial Sequence: Synthetic oligonucleotide
agggcacaagucuuggccu

SEQ ID NO: 1914507 - RNA, 19 nt, Artificial Sequence
  Description of Artificial Sequence: Synthetic oligonucleotide
guuggggucauuuucuagu

SEQ ID NO: 1914508 - RNA, 19 nt, Artificial Sequence
  Description of Artificial Sequence: Synthetic oligonucleotide
uggcagcccguguaaagcc

SEQ ID NO: 1914509 - RNA, 19 nt, Artificial Sequence
  Description of Artificial Sequence: Synthetic oligonucleotide
ucggagacuggcccuuuug

SEQ ID NO: 1914510 - RNA, 19 nt, Artificial Sequence
  Description of Artificial Sequence: Synthetic oligonucleotide
uggauucaucgaugggaag

SEQ ID NO: 1914511 - RNA, 19 nt, Artificial Sequence
  Description of Artificial Sequence: Synthetic oligonucleotide
ccuugguaaagacaggcac

SEQ ID NO: 1914512 - RNA, 19 nt, Artificial Sequence
  Description of Artificial Sequence: Synthetic oligonucleotide
uggauacuucuguagucuc

SEQ ID NO: 1914513 - RNA, 19 nt, Artificial Sequence
  Description of Artificial Sequence: Synthetic oligonucleotide
acugagaguugaagaaauc

SEQ ID NO: 1914514 - RNA, 19 nt, Artificial Sequence
  Description of Artificial Sequence: Synthetic oligonucleotide
guaaagccgggcagggugg

SEQ ID NO: 1914515 - RNA, 19 nt, Artificial Sequence
  Description of Artificial Sequence: Synthetic oligonucleotide
ggacuggauacuucuguag

SEQ ID NO: 1914516 - RNA, 19 nt, Artificial Sequence
  Description of Artificial Sequence: Synthetic oligonucleotide
uagucuccggaugagguuc

SEQ ID NO: 1914517 - RNA, 19 nt, Artificial Sequence
  Description of Artificial Sequence: Synthetic oligonucleotide
aagacaucucggagacugg

SEQ ID NO: 1914518 - RNA, 19 nt, Artificial Sequence
  Description of Artificial Sequence: Synthetic oligonucleotide
accguccagaggcauuuag

SEQ ID NO: 1914519 - RNA, 19 nt, Artificial Sequence
  Description of Artificial Sequence: Synthetic oligonucleotide
gacuggauacuucuguagu

SEQ ID NO: 1914520 - RNA, 19 nt, Artificial Sequence
  Description of Artificial Sequence: Synthetic oligonucleotide
uaguagggguaaguaacca

SEQ ID NO: 1914521 - RNA, 19 nt, Artificial Sequence
  Description of Artificial Sequence: Synthetic oligonucleotide
agggcucaggcugcaauac

SEQ ID NO: 1914522 - RNA, 19 nt, Artificial Sequence
  Description of Artificial Sequence: Synthetic oligonucleotide
gagacuggcccuuuugugu

SEQ ID NO: 1914523 - RNA, 19 nt, Artificial Sequence
  Description of Artificial Sequence: Synthetic oligonucleotide
gggaggaucugcugugugg

SEQ ID NO: 1914524 - RNA, 19 nt, Artificial Sequence
  Description of Artificial Sequence: Synthetic oligonucleotide
aucgaugggaagagugcac

SEQ ID NO: 1914525 - RNA, 19 nt, Artificial Sequence
  Description of Artificial Sequence: Synthetic oligonucleotide
cucacuuccagcaaaugau

SEQ ID NO: 1914526 - RNA, 19 nt, Artificial Sequence
  Description of Artificial Sequence: Synthetic oligonucleotide
gcuugucuguaacucaggc

SEQ ID NO: 1914527 - RNA, 19 nt, Artificial Sequence
  Description of Artificial Sequence: Synthetic oligonucleotide
cuugcucuccucuguggac

SEQ ID NO: 1914528 - RNA, 19 nt, Artificial Sequence
  Description of Artificial Sequence: Synthetic oligonucleotide
cuucaaguggaugguguug

SEQ ID NO: 1914529 - RNA, 19 nt, Artificial Sequence
  Description of Artificial Sequence: Synthetic oligonucleotide
aggccauauguacuagccu

SEQ ID NO: 1914530 - RNA, 19 nt, Artificial Sequence
  Description of Artificial Sequence: Synthetic oligonucleotide
gugugguaaggucccacug

SEQ ID NO: 1914531 - RNA, 19 nt, Artificial Sequence
  Description of Artificial Sequence: Synthetic oligonucleotide
gacaucucggagacuggcc

SEQ ID NO: 1914532 - RNA, 19 nt, Artificial Sequence
  Description of Artificial Sequence: Synthetic oligonucleotide
uuuuaacgauggguucaag

SEQ ID NO: 1914533 - RNA, 19 nt, Artificial Sequence
  Description of Artificial Sequence: Synthetic oligonucleotide
gagacacucggacuggaua

SEQ ID NO: 1914534 - RNA, 19 nt, Artificial Sequence
  Description of Artificial Sequence: Synthetic oligonucleotide
ucagcccaaacuggauuag

SEQ ID NO: 1914535 - RNA, 19 nt, Artificial Sequence
  Description of Artificial Sequence: Synthetic oligonucleotide
acuugucaucuaccagguc

SEQ ID NO: 1914536 - RNA, 19 nt, Artificial Sequence
  Description of Artificial Sequence: Synthetic oligonucleotide
ucuagucgcucauccaguu

SEQ ID NO: 1914537 - RNA, 19 nt, Artificial Sequence
  Description of Artificial Sequence: Synthetic oligonucleotide
uccuuguccuugguaaaga

SEQ ID NO: 1914538 - RNA, 19 nt, Artificial Sequence
  Description of Artificial Sequence: Synthetic oligonucleotide
cuccggaugagguucuuca

SEQ ID NO: 1914539 - RNA, 19 nt, Artificial Sequence
  Description of Artificial Sequence: Synthetic oligonucleotide
ggauucaucgaugggaaga

SEQ ID NO: 1914540 - RNA, 19 nt, Artificial Sequence
  Description of Artificial Sequence: Synthetic oligonucleotide
uccguuccucccgagacac

SEQ ID NO: 1914541 - RNA, 19 nt, Artificial Sequence
  Description of Artificial Sequence: Synthetic oligonucleotide
uggcggauuccaucaauau

SEQ ID NO: 1914542 - RNA, 19 nt, Artificial Sequence
  Description of Artificial Sequence: Synthetic oligonucleotide
gguucaagggcacaagucu

SEQ ID NO: 1914543 - RNA, 19 nt, Artificial Sequence
  Description of Artificial Sequence: Synthetic oligonucleotide
ugagggcuuaguaggggua

SEQ ID NO: 1914544 - RNA, 19 nt, Artificial Sequence
  Description of Artificial Sequence: Synthetic oligonucleotide
auauaggggaggaucugcu

SEQ ID NO: 1914545 - RNA, 19 nt, Artificial Sequence
  Description of Artificial Sequence: Synthetic oligonucleotide
ugguaaggucccacugaga

SEQ ID NO: 1914546 - RNA, 19 nt, Artificial Sequence
  Description of Artificial Sequence: Synthetic oligonucleotide
ggugauuggauguacacuu

SEQ ID NO: 1914547 - RNA, 19 nt, Artificial Sequence
  Description of Artificial Sequence: Synthetic oligonucleotide
accagugucacaacaccgu

SEQ ID NO: 1914548 - RNA, 19 nt, Artificial Sequence
  Description of Artificial Sequence: Synthetic oligonucleotide
gguaaguaaccauagugau

SEQ ID NO: 1914549 - RNA, 19 nt, Artificial Sequence
  Description of Artificial Sequence: Synthetic oligonucleotide
caagggcacaagucuuggc

SEQ ID NO: 1914550 - RNA, 19 nt, Artificial Sequence
  Description of Artificial Sequence: Synthetic oligonucleotide
ccagcaaaugaugauguug

SEQ ID NO: 1914551 - RNA, 19 nt, Artificial Sequence
  Description of Artificial Sequence: Synthetic oligonucleotide
uaaagacaggcacgucaua

SEQ ID NO: 1914552 - RNA, 19 nt, Artificial Sequence
  Description of Artificial Sequence: Synthetic oligonucleotide
gauggucaugaugggcacc

SEQ ID NO: 1914553 - RNA, 19 nt, Artificial Sequence
  Description of Artificial Sequence: Synthetic oligonucleotide
guagggguaaguaaccaua

SEQ ID NO: 1914554 - RNA, 19 nt, Artificial Sequence
  Description of Artificial Sequence: Synthetic oligonucleotide
ggugacguaggacagacau

SEQ ID NO: 1914555 - RNA, 19 nt, Artificial Sequence
  Description of Artificial Sequence: Synthetic oligonucleotide
cuugggugauuggauguac

SEQ ID NO: 1914556 - RNA, 19 nt, Artificial Sequence
  Description of Artificial Sequence: Synthetic oligonucleotide
caauauaggggaggaucug

SEQ ID NO: 1914557 - RNA, 19 nt, Artificial Sequence
  Description of Artificial Sequence: Synthetic oligonucleotide
ggagacuggcccuuuugug

SEQ ID NO: 1914558 - RNA, 19 nt, Artificial Sequence
  Description of Artificial Sequence: Synthetic oligonucleotide
caccagguugagcuccacg

SEQ ID NO: 1914559 - RNA, 19 nt, Artificial Sequence
  Description of Artificial Sequence: Synthetic oligonucleotide
ugggcuaaugagggcuuag

SEQ ID NO: 1914560 - RNA, 19 nt, Artificial Sequence
  Description of Artificial Sequence: Synthetic oligonucleotide
guacuagccuacuugucua

SEQ ID NO: 1914561 - RNA, 19 nt, Artificial Sequence
  Description of Artificial Sequence: Synthetic oligonucleotide
agcccaaacuggauuagcu

SEQ ID NO: 1914562 - RNA, 19 nt, Artificial Sequence
  Description of Artificial Sequence: Synthetic oligonucleotide
ggccauauguacuagccua

SEQ ID NO: 1914563 - RNA, 19 nt, Artificial Sequence
  Description of Artificial Sequence: Synthetic oligonucleotide
accuucaaguggauggugu

SEQ ID NO: 1914564 - RNA, 19 nt, Artificial Sequence
  Description of Artificial Sequence: Synthetic oligonucleotide
ggauaccagugucacaaca

SEQ ID NO: 1914565 - RNA, 19 nt, Artificial Sequence
  Description of Artificial Sequence: Synthetic oligonucleotide
ggcaguacacauuggagua

SEQ ID NO: 1914566 - RNA, 19 nt, Artificial Sequence
  Description of Artificial Sequence: Synthetic oligonucleotide
guaaguaaccauagugaua

SEQ ID NO: 1914567 - RNA, 19 nt, Artificial Sequence
  Description of Artificial Sequence: Synthetic oligonucleotide
cuggauuagcuuccuuuca

SEQ ID NO: 1914568 - RNA, 19 nt, Artificial Sequence
  Description of Artificial Sequence: Synthetic oligonucleotide
cacaguggugccagggcuc

SEQ ID NO: 1914569 - RNA, 19 nt, Artificial Sequence
  Description of Artificial Sequence: Synthetic oligonucleotide
caacaccguaguacagcag

SEQ ID NO: 1914570 - RNA, 19 nt, Artificial Sequence
  Description of Artificial Sequence: Synthetic oligonucleotide
gugauuggauguacacuug

SEQ ID NO: 1914571 - RNA, 19 nt, Artificial Sequence
  Description of Artificial Sequence: Synthetic oligonucleotide
gacuggcccuuuugugucc

SEQ ID NO: 1914572 - RNA, 19 nt, Artificial Sequence
  Description of Artificial Sequence: Synthetic oligonucleotide
gcuuaguagggguaaguaa

SEQ ID NO: 1914573 - RNA, 19 nt, Artificial Sequence
  Description of Artificial Sequence: Synthetic oligonucleotide
caggccgcugcucaaucac

SEQ ID NO: 1914574 - RNA, 19 nt, Artificial Sequence
  Description of Artificial Sequence: Synthetic oligonucleotide
acuuuuggcguugggcagu

SEQ ID NO: 1914575 - RNA, 19 nt, Artificial Sequence
  Description of Artificial Sequence: Synthetic oligonucleotide
gaguacuggaggauggaua

SEQ ID NO: 1914576 - RNA, 19 nt, Artificial Sequence
  Description of Artificial Sequence: Synthetic oligonucleotide
ggauacuucuguagucucc

SEQ ID NO: 1914577 - RNA, 19 nt, Artificial Sequence
  Description of Artificial Sequence: Synthetic oligonucleotide
cagccagacucacuuccag

SEQ ID NO: 1914578 - RNA, 19 nt, Artificial Sequence
  Description of Artificial Sequence: Synthetic oligonucleotide
cucggacuggauacuucug

SEQ ID NO: 1914579 - RNA, 19 nt, Artificial Sequence
  Description of Artificial Sequence: Synthetic oligonucleotide
ggcacgucauauuccugag

SEQ ID NO: 1914580 - RNA, 19 nt, Artificial Sequence
  Description of Artificial Sequence: Synthetic oligonucleotide
guguccuugcuuggugacg

SEQ ID NO: 1914581 - RNA, 19 nt, Artificial Sequence
  Description of Artificial Sequence: Synthetic oligonucleotide
caucgaugggaagagugca

SEQ ID NO: 1914582 - RNA, 19 nt, Artificial Sequence
  Description of Artificial Sequence: Synthetic oligonucleotide
cuugucuguaacucaggcu

SEQ ID NO: 1914583 - RNA, 19 nt, Artificial Sequence
  Description of Artificial Sequence: Synthetic oligonucleotide
cuagucgcucauccaguuc

SEQ ID NO: 1914584 - RNA, 19 nt, Artificial Sequence
  Description of Artificial Sequence: Synthetic oligonucleotide
uucaagcucuagugugguc

SEQ ID NO: 1914585 - RNA, 19 nt, Artificial Sequence
  Description of Artificial Sequence: Synthetic oligonucleotide
agcccguguaaagccgggc

SEQ ID NO: 1914586 - RNA, 19 nt, Artificial Sequence
  Description of Artificial Sequence: Synthetic oligonucleotide
cguaggacagacaugccuc

SEQ ID NO: 1914587 - RNA, 19 nt, Artificial Sequence
  Description of Artificial Sequence: Synthetic oligonucleotide
cacaagucuuggccugagc

SEQ ID NO: 1914588 - RNA, 19 nt, Artificial Sequence
  Description of Artificial Sequence: Synthetic oligonucleotide
cauuuucuagucgcucauc

SEQ ID NO: 1914589 - RNA, 19 nt, Artificial Sequence
  Description of Artificial Sequence: Synthetic oligonucleotide
auguuccagccagccagac

SEQ ID NO: 1914590 - RNA, 19 nt, Artificial Sequence
  Description of Artificial Sequence: Synthetic oligonucleotide
uggcguccgaugagguccc

SEQ ID NO: 1914591 - RNA, 19 nt, Artificial Sequence
  Description of Artificial Sequence: Synthetic oligonucleotide
cguugggcaguacacauug

SEQ ID NO: 1914592 - RNA, 19 nt, Artificial Sequence
  Description of Artificial Sequence: Synthetic oligonucleotide
guggacacaaagcugcuuu

SEQ ID NO: 1914593 - RNA, 19 nt, Artificial Sequence
  Description of Artificial Sequence: Synthetic oligonucleotide
guuccucccgagacacucg

SEQ ID NO: 1914594 - RNA, 19 nt, Artificial Sequence
  Description of Artificial Sequence: Synthetic oligonucleotide
aggccgcugcucaaucacc

SEQ ID NO: 1914595 - RNA, 19 nt, Artificial Sequence
  Description of Artificial Sequence: Synthetic oligonucleotide
caucuaccagguccuggac

SEQ ID NO: 1914596 - RNA, 19 nt, Artificial Sequence
  Description of Artificial Sequence: Synthetic oligonucleotide
ggucaugaugggcaccaac

SEQ ID NO: 1914597 - RNA, 19 nt, Artificial Sequence
  Description of Artificial Sequence: Synthetic oligonucleotide
acuagccuacuugucuaga

SEQ ID NO: 1914598 - RNA, 19 nt, Artificial Sequence
  Description of Artificial Sequence: Synthetic oligonucleotide
cucaggcugcaauacagcu

SEQ ID NO: 1914599 - RNA, 19 nt, Artificial Sequence
  Description of Artificial Sequence: Synthetic oligonucleotide
gcugcuuucaagcucuagu

SEQ ID NO: 1914600 - RNA, 19 nt, Artificial Sequence
  Description of Artificial Sequence: Synthetic oligonucleotide
gugacguaggacagacaug

SEQ ID NO: 1914601 - RNA, 19 nt, Artificial Sequence
  Description of Artificial Sequence: Synthetic oligonucleotide
cagacucacuuccagcaaa

SEQ ID NO: 1914602 - RNA, 19 nt, Artificial Sequence
  Description of Artificial Sequence: Synthetic oligonucleotide
uggcguugggcaguacaca

SEQ ID NO: 1914603 - RNA, 19 nt, Artificial Sequence
  Description of Artificial Sequence: Synthetic oligonucleotide
gugauauguuccagccagc

SEQ ID NO: 1914604 - RNA, 19 nt, Artificial Sequence
  Description of Artificial Sequence: Synthetic oligonucleotide
aguacacauuggaguacug

SEQ ID NO: 1914605 - RNA, 19 nt, Artificial Sequence
  Description of Artificial Sequence: Synthetic oligonucleotide
gacuugucaucuaccaggu

SEQ ID NO: 1914606 - RNA, 19 nt, Artificial Sequence
  Description of Artificial Sequence: Synthetic oligonucleotide
caggccaaucagcuucuuc

SEQ ID NO: 1914607 - RNA, 19 nt, Artificial Sequence
  Description of Artificial Sequence: Synthetic oligonucleotide
gggcaguacacauuggagu

SEQ ID NO: 1914608 - RNA, 19 nt, Artificial Sequence
  Description of Artificial Sequence: Synthetic oligonucleotide
ucuagaccccaugggcuaa

SEQ ID NO: 1914609 - RNA, 19 nt, Artificial Sequence
  Description of Artificial Sequence: Synthetic oligonucleotide
guggucaaguagccggcca

SEQ ID NO: 1914610 - RNA, 19 nt, Artificial Sequence
  Description of Artificial Sequence: Synthetic oligonucleotide
gaugggaagagugcaccgu

SEQ ID NO: 1914611 - RNA, 19 nt, Artificial Sequence
  Description of Artificial Sequence: Synthetic oligonucleotide
gacguaggacagacaugcc

SEQ ID NO: 1914612 - RNA, 19 nt, Artificial Sequence
  Description of Artificial Sequence: Synthetic oligonucleotide
ucuggacauggcggauucc

SEQ ID NO: 1914613 - RNA, 19 nt, Artificial Sequence
  Description of Artificial Sequence: Synthetic oligonucleotide
ccuuguccuugguaaagac

SEQ ID NO: 1914614 - RNA, 19 nt, Artificial Sequence
  Description of Artificial Sequence: Synthetic oligonucleotide
gucuagaccccaugggcua

SEQ ID NO: 1914615 - RNA, 19 nt, Artificial Sequence
  Description of Artificial Sequence: Synthetic oligonucleotide
cagcccaaacuggauuagc

SEQ ID NO: 1914616 - RNA, 19 nt, Artificial Sequence
  Description of Artificial Sequence: Synthetic oligonucleotide
ugccugucuugcagcagau

SEQ ID NO: 1914617 - RNA, 19 nt, Artificial Sequence
  Description of Artificial Sequence: Synthetic oligonucleotide
agggcuuaguagggguaag

SEQ ID NO: 1914618 - RNA, 19 nt, Artificial Sequence
  Description of Artificial Sequence: Synthetic oligonucleotide
auucaucgaugggaagagu

SEQ ID NO: 1914619 - RNA, 19 nt, Artificial Sequence
  Description of Artificial Sequence: Synthetic oligonucleotide
acaguggugccagggcuca

SEQ ID NO: 1914620 - RNA, 19 nt, Artificial Sequence
  Description of Artificial Sequence: Synthetic oligonucleotide
cuggauacuucuguagucu

SEQ ID NO: 1914621 - RNA, 19 nt, Artificial Sequence
  Description of Artificial Sequence: Synthetic oligonucleotide
cagcccguguaaagccggg

SEQ ID NO: 1914622 - RNA, 19 nt, Artificial Sequence
  Description of Artificial Sequence: Synthetic oligonucleotide
gagggcuuaguagggguaa

SEQ ID NO: 1914623 - RNA, 19 nt, Artificial Sequence
  Description of Artificial Sequence: Synthetic oligonucleotide
ccguccagaggcauuuagc

SEQ ID NO: 1914624 - RNA, 19 nt, Artificial Sequence
  Description of Artificial Sequence: Synthetic oligonucleotide
ugcaccguccagaggcauu

SEQ ID NO: 1914625 - RNA, 19 nt, Artificial Sequence
  Description of Artificial Sequence: Synthetic oligonucleotide
agucuuggccugagcauca

SEQ ID NO: 1914626 - RNA, 19 nt, Artificial Sequence
  Description of Artificial Sequence: Synthetic oligonucleotide
uguggacacaaagcugcuu

SEQ ID NO: 1914627 - RNA, 19 nt, Artificial Sequence
  Description of Artificial Sequence: Synthetic oligonucleotide
ggcauugcggcuguacuuc

SEQ ID NO: 1914628 - RNA, 19 nt, Artificial Sequence
  Description of Artificial Sequence: Synthetic oligonucleotide
caaguagccggccagcuuu

SEQ ID NO: 1914629 - RNA, 19 nt, Artificial Sequence
  Description of Artificial Sequence: Synthetic oligonucleotide
cugugugguaaggucccac

SEQ ID NO: 1914630 - RNA, 19 nt, Artificial Sequence
  Description of Artificial Sequence: Synthetic oligonucleotide
agacucacuuccagcaaau

SEQ ID NO: 1914631 - RNA, 19 nt, Artificial Sequence
  Description of Artificial Sequence: Synthetic oligonucleotide
acaccguaguacagcaggu

SEQ ID NO: 1914632 - RNA, 19 nt, Artificial Sequence
  Description of Artificial Sequence: Synthetic oligonucleotide
guaaggucccacugagagu

SEQ ID NO: 1914633 - RNA, 19 nt, Artificial Sequence
  Description of Artificial Sequence: Synthetic oligonucleotide
caugguagcucaugccugu

SEQ ID NO: 1914634 - RNA, 19 nt, Artificial Sequence
  Description of Artificial Sequence: Synthetic oligonucleotide
caugccugucuugcagcag

SEQ ID NO: 1914635 - RNA, 19 nt, Artificial Sequence
  Description of Artificial Sequence: Synthetic oligonucleotide
uccucccgagacacucgga

SEQ ID NO: 1914636 - RNA, 19 nt, Artificial Sequence
  Description of Artificial Sequence: Synthetic oligonucleotide
auggcggauuccaucaaua

SEQ ID NO: 1914637 - RNA, 19 nt, Artificial Sequence
  Description of Artificial Sequence: Synthetic oligonucleotide
ugcgcaccagguugagcuc

SEQ ID NO: 1914638 - RNA, 19 nt, Artificial Sequence
  Description of Artificial Sequence: Synthetic oligonucleotide
auguacacuuggacagugu

SEQ ID NO: 1914639 - RNA, 19 nt, Artificial Sequence
  Description of Artificial Sequence: Synthetic oligonucleotide
cggauuccaucaauauagg

SEQ ID NO: 1914640 - RNA, 19 nt, Artificial Sequence
  Description of Artificial Sequence: Synthetic oligonucleotide
gguugagcuccacgucugc

SEQ ID NO: 1914641 - RNA, 19 nt, Artificial Sequence
  Description of Artificial Sequence: Synthetic oligonucleotide
gccauauguacuagccuac

SEQ ID NO: 1914642 - RNA, 19 nt, Artificial Sequence
  Description of Artificial Sequence: Synthetic oligonucleotide
ggcggauuccaucaauaua

SEQ ID NO: 1914643 - RNA, 19 nt, Artificial Sequence
  Description of Artificial Sequence: Synthetic oligonucleotide
ggguucaagggcacaaguc

SEQ ID NO: 1914644 - RNA, 19 nt, Artificial Sequence
  Description of Artificial Sequence: Synthetic oligonucleotide
gggguggcguccgaugagg

SEQ ID NO: 1914645 - RNA, 19 nt, Artificial Sequence
  Description of Artificial Sequence: Synthetic oligonucleotide
cuguaacucaggcuugggu

SEQ ID NO: 1914646 - RNA, 19 nt, Artificial Sequence
  Description of Artificial Sequence: Synthetic oligonucleotide
gaauggcaaugcgcaccag

SEQ ID NO: 1914647 - RNA, 19 nt, Artificial Sequence
  Description of Artificial Sequence: Synthetic oligonucleotide
guccgaugaggucccgcac

SEQ ID NO: 1914648 - RNA, 19 nt, Artificial Sequence
  Description of Artificial Sequence: Synthetic oligonucleotide
aggucccacugagaguuga

SEQ ID NO: 1914649 - RNA, 19 nt, Artificial Sequence
  Description of Artificial Sequence: Synthetic oligonucleotide
aaagccgggcaggguggcu

SEQ ID NO: 1914650 - RNA, 19 nt, Artificial Sequence
  Description of Artificial Sequence: Synthetic oligonucleotide
ugcagggacuugucaucua

SEQ ID NO: 1914651 - RNA, 19 nt, Artificial Sequence
  Description of Artificial Sequence: Synthetic oligonucleotide
ggucaaguagccggccagc

SEQ ID NO: 1914652 - RNA, 19 nt, Artificial Sequence
  Description of Artificial Sequence: Synthetic oligonucleotide
gcagcccguguaaagccgg

SEQ ID NO: 1914653 - RNA, 19 nt, Artificial Sequence
  Description of Artificial Sequence: Synthetic oligonucleotide
ccauagugauauguuccag

SEQ ID NO: 1914654 - RNA, 19 nt, Artificial Sequence
  Description of Artificial Sequence: Synthetic oligonucleotide
acuggcccuuuuguguccu

SEQ ID NO: 1914655 - RNA, 19 nt, Artificial Sequence
  Description of Artificial Sequence: Synthetic oligonucleotide
ccguguaaagccgggcagg

SEQ ID NO: 1914656 - RNA, 19 nt, Artificial Sequence
  Description of Artificial Sequence: Synthetic oligonucleotide
caaugcgcaccagguugag

SEQ ID NO: 1914657 - RNA, 19 nt, Artificial Sequence
  Description of Artificial Sequence: Synthetic oligonucleotide
cauauguacuagccuacuu

SEQ ID NO: 1914658 - RNA, 19 nt, Artificial Sequence
  Description of Artificial Sequence: Synthetic oligonucleotide
aaggucccacugagaguug

SEQ ID NO: 1914659 - RNA, 19 nt, Artificial Sequence
  Description of Artificial Sequence: Synthetic oligonucleotide
ggggaggaucugcugugug

SEQ ID NO: 1914660 - RNA, 19 nt, Artificial Sequence
  Description of Artificial Sequence: Synthetic oligonucleotide
gcaguacacauuggaguac

SEQ ID NO: 1914661 - RNA, 19 nt, Artificial Sequence
  Description of Artificial Sequence: Synthetic oligonucleotide
gucgcucauccaguucaug

SEQ ID NO: 1914662 - RNA, 19 nt, Artificial Sequence
  Description of Artificial Sequence: Synthetic oligonucleotide
acgucugccucagcagaga

SEQ ID NO: 1914663 - RNA, 19 nt, Artificial Sequence
  Description of Artificial Sequence: Synthetic oligonucleotide
agugcaccguccagaggca

SEQ ID NO: 1914664 - RNA, 19 nt, Artificial Sequence
  Description of Artificial Sequence: Synthetic oligonucleotide
caguacacauuggaguacu

SEQ ID NO: 1914665 - RNA, 19 nt, Artificial Sequence
  Description of Artificial Sequence: Synthetic oligonucleotide
guggcuccguuccucccga

SEQ ID NO: 1914666 - RNA, 19 nt, Artificial Sequence
  Description of Artificial Sequence: Synthetic oligonucleotide
cguguaaagccgggcaggg

SEQ ID NO: 1914667 - RNA, 19 nt, Artificial Sequence
  Description of Artificial Sequence: Synthetic oligonucleotide
gcccguguaaagccgggca

SEQ ID NO: 1914668 - RNA, 19 nt, Artificial Sequence
  Description of Artificial Sequence: Synthetic oligonucleotide
cauggcugugacagugaua

SEQ ID NO: 1914669 - RNA, 19 nt, Artificial Sequence
  Description of Artificial Sequence: Synthetic oligonucleotide
agucuccggaugagguucu

SEQ ID NO: 1914670 - RNA, 19 nt, Artificial Sequence
  Description of Artificial Sequence: Synthetic oligonucleotide
gccuacuugucuagacccc

SEQ ID NO: 1914671 - RNA, 19 nt, Artificial Sequence
  Description of Artificial Sequence: Synthetic oligonucleotide
ggcuuaguagggguaagua

SEQ ID NO: 1914672 - RNA, 19 nt, Artificial Sequence
  Description of Artificial Sequence: Synthetic oligonucleotide
ggcuugggugauuggaugu

SEQ ID NO: 1914673 - RNA, 19 nt, Artificial Sequence
  Description of Artificial Sequence: Synthetic oligonucleotide
aaguagccggccagcuuuu

SEQ ID NO: 1914674 - RNA, 19 nt, Artificial Sequence
  Description of Artificial Sequence: Synthetic oligonucleotide
gguggcguccgaugagguc

SEQ ID NO: 1914675 - RNA, 19 nt, Artificial Sequence
  Description of Artificial Sequence: Synthetic oligonucleotide
guagucuccggaugagguu

SEQ ID NO: 1914676 - RNA, 19 nt, Artificial Sequence
  Description of Artificial Sequence: Synthetic oligonucleotide
gacacucggacuggauacu

SEQ ID NO: 1914677 - RNA, 19 nt, Artificial Sequence
  Description of Artificial Sequence: Synthetic oligonucleotide
gcggcuguacuucuugugu

SEQ ID NO: 1914678 - RNA, 19 nt, Artificial Sequence
  Description of Artificial Sequence: Synthetic oligonucleotide
gugucacaacaccguagua

SEQ ID NO: 1914679 - RNA, 19 nt, Artificial Sequence
  Description of Artificial Sequence: Synthetic oligonucleotide
uggcuccguuccucccgag

SEQ ID NO: 1914680 - RNA, 19 nt, Artificial Sequence
  Description of Artificial Sequence: Synthetic oligonucleotide
gcaaugcgcaccagguuga

SEQ ID NO: 1914681 - RNA, 19 nt, Artificial Sequence
  Description of Artificial Sequence: Synthetic oligonucleotide
gcucuaguguggucaagua

SEQ ID NO: 1914682 - RNA, 19 nt, Artificial Sequence
  Description of Artificial Sequence: Synthetic oligonucleotide
gcaauacagcuggaagaca

SEQ ID NO: 1914683 - RNA, 19 nt, Artificial Sequence
  Description of Artificial Sequence: Synthetic oligonucleotide
gucaaguagccggccagcu

SEQ ID NO: 1914684 - RNA, 19 nt, Artificial Sequence
  Description of Artificial Sequence: Synthetic oligonucleotide
ccucagcagagaucuucug

SEQ ID NO: 1914685 - RNA, 19 nt, Artificial Sequence
  Description of Artificial Sequence: Synthetic oligonucleotide
uuuuggcguugggcaguac

SEQ ID NO: 1914686 - RNA, 19 nt, Artificial Sequence
  Description of Artificial Sequence: Synthetic oligonucleotide
cauccaguucaugguagcu

SEQ ID NO: 1914687 - RNA, 19 nt, Artificial Sequence
  Description of Artificial Sequence: Synthetic oligonucleotide
ggcguugggcaguacacau

SEQ ID NO: 1914688 - RNA, 19 nt, Artificial Sequence
  Description of Artificial Sequence: Synthetic oligonucleotide
gggugauuggauguacacu

SEQ ID NO: 1914689 - RNA, 19 nt, Artificial Sequence
  Description of Artificial Sequence: Synthetic oligonucleotide
ccuacuugucuagacccca

SEQ ID NO: 1914690 - RNA, 19 nt, Artificial Sequence
  Description of Artificial Sequence: Synthetic oligonucleotide
gacaugccuccugcaggga

SEQ ID NO: 1914691 - RNA, 19 nt, Artificial Sequence
  Description of Artificial Sequence: Synthetic oligonucleotide
cauggcggauuccaucaau

SEQ ID NO: 1914692 - RNA, 19 nt, Artificial Sequence
  Description of Artificial Sequence: Synthetic oligonucleotide
cguccagaggcauuuagcu

SEQ ID NO: 1914693 - RNA, 19 nt, Artificial Sequence
  Description of Artificial Sequence: Synthetic oligonucleotide
cuacuugucuagaccccau

SEQ ID NO: 1914694 - RNA, 19 nt, Artificial Sequence
  Description of Artificial Sequence: Synthetic oligonucleotide
uggucaugaugggcaccaa

SEQ ID NO: 1914695 - RNA, 19 nt, Artificial Sequence
  Description of Artificial Sequence: Synthetic oligonucleotide
gcacaagucuuggccugag

SEQ ID NO: 1914696 - RNA, 19 nt, Artificial Sequence
  Description of Artificial Sequence: Synthetic oligonucleotide
augggcuaaugagggcuua

SEQ ID NO: 1914697 - RNA, 19 nt, Artificial Sequence
  Description of Artificial Sequence: Synthetic oligonucleotide
gggcucaggcugcaauaca

SEQ ID NO: 1914698 - RNA, 19 nt, Artificial Sequence
  Description of Artificial Sequence: Synthetic oligonucleotide
cauuggaguacuggaggau

SEQ ID NO: 1914699 - RNA, 19 nt, Artificial Sequence
  Description of Artificial Sequence: Synthetic oligonucleotide
ggcugcaauacagcuggaa

SEQ ID NO: 1914700 - RNA, 19 nt, Artificial Sequence
  Description of Artificial Sequence: Synthetic oligonucleotide
ccacgucugccucagcaga

SEQ ID NO: 1914701 - RNA, 19 nt, Artificial Sequence
  Description of Artificial Sequence: Synthetic oligonucleotide
caaguggaugguguuggau

SEQ ID NO: 1914702 - RNA, 19 nt, Artificial Sequence
  Description of Artificial Sequence: Synthetic oligonucleotide
caugggcuaaugagggcuu

SEQ ID NO: 1914703 - RNA, 19 nt, Artificial Sequence
  Description of Artificial Sequence: Synthetic oligonucleotide
aggaucacuccaggccaua

SEQ ID NO: 1914704 - RNA, 19 nt, Artificial Sequence
  Description of Artificial Sequence: Synthetic oligonucleotide
ccgcacaguggugccaggg

SEQ ID NO: 1914705 - RNA, 19 nt, Artificial Sequence
  Description of Artificial Sequence: Synthetic oligonucleotide
ggcuccguuccucccgaga

SEQ ID NO: 1914706 - RNA, 19 nt, Artificial Sequence
  Description of Artificial Sequence: Synthetic oligonucleotide
ccuggacuuuuggcguugg

SEQ ID NO: 1914707 - RNA, 19 nt, Artificial Sequence
  Description of Artificial Sequence: Synthetic oligonucleotide
cuuuuggcguugggcagua

SEQ ID NO: 1914708 - RNA, 19 nt, Artificial Sequence
  Description of Artificial Sequence: Synthetic oligonucleotide
cccgagacacucggacugg

SEQ ID NO: 1914709 - RNA, 19 nt, Artificial Sequence
  Description of Artificial Sequence: Synthetic oligonucleotide
ccaugggcuaaugagggcu

SEQ ID NO: 1914710 - RNA, 19 nt, Artificial Sequence
  Description of Artificial Sequence: Synthetic oligonucleotide
ggcacaagucuuggccuga

SEQ ID NO: 1914711 - RNA, 19 nt, Artificial Sequence
  Description of Artificial Sequence: Synthetic oligonucleotide
cguccgaugaggucccgca

SEQ ID NO: 1914712 - RNA, 19 nt, Artificial Sequence
  Description of Artificial Sequence: Synthetic oligonucleotide
gcuugggugauuggaugua

SEQ ID NO: 1914713 - RNA, 19 nt, Artificial Sequence
  Description of Artificial Sequence: Synthetic oligonucleotide
ggaguacuggaggauggau

SEQ ID NO: 1914714 - RNA, 19 nt, Artificial Sequence
  Description of Artificial Sequence: Synthetic oligonucleotide
ccagacucacuuccagcaa

SEQ ID NO: 1914715 - RNA, 19 nt, Artificial Sequence
  Description of Artificial Sequence: Synthetic oligonucleotide
guguaaagccgggcagggu

SEQ ID NO: 1914716 - RNA, 19 nt, Artificial Sequence
  Description of Artificial Sequence: Synthetic oligonucleotide
gggcauugcggcuguacuu

SEQ ID NO: 1914717 - RNA, 19 nt, Artificial Sequence
  Description of Artificial Sequence: Synthetic oligonucleotide
gcccuuuuguguccuugcu

SEQ ID NO: 1914718 - RNA, 19 nt, Artificial Sequence
  Description of Artificial Sequence: Synthetic oligonucleotide
gcauugcggcuguacuucu

SEQ ID NO: 1914719 - RNA, 19 nt, Artificial Sequence
  Description of Artificial Sequence: Synthetic oligonucleotide
cauugcggcuguacuucuu

SEQ ID NO: 1914720 - RNA, 19 nt, Artificial Sequence
  Description of Artificial Sequence: Synthetic oligonucleotide
gggcuaaugagggcuuagu

SEQ ID NO: 1914721 - RNA, 19 nt, Artificial Sequence
  Description of Artificial Sequence: Synthetic oligonucleotide
gcguccgaugaggucccgc

SEQ ID NO: 1914722 - RNA, 19 nt, Artificial Sequence
  Description of Artificial Sequence: Synthetic oligonucleotide
aggcugcaauacagcugga

SEQ ID NO: 1914723 - RNA, 19 nt, Artificial Sequence
  Description of Artificial Sequence: Synthetic oligonucleotide
ccuucaaguggaugguguu

SEQ ID NO: 1914724 - RNA, 19 nt, Artificial Sequence
  Description of Artificial Sequence: Synthetic oligonucleotide
caccguaguacagcagguu

SEQ ID NO: 1914725 - RNA, 19 nt, Artificial Sequence
  Description of Artificial Sequence: Synthetic oligonucleotide
gccugucuugcagcagauc

SEQ ID NO: 1914726 - RNA, 19 nt, Artificial Sequence
  Description of Artificial Sequence: Synthetic oligonucleotide
ggaucacuccaggccauau

SEQ ID NO: 1914727 - RNA, 19 nt, Artificial Sequence
  Description of Artificial Sequence: Synthetic oligonucleotide
ccaguaagauggucaugau

SEQ ID NO: 1914728 - RNA, 19 nt, Artificial Sequence
  Description of Artificial Sequence: Synthetic oligonucleotide
ggcguccgaugaggucccg

SEQ ID NO: 1914729 - RNA, 19 nt, Artificial Sequence
  Description of Artificial Sequence: Synthetic oligonucleotide
gcaccguccagaggcauuu

SEQ ID NO: 1914730 - RNA, 19 nt, Artificial Sequence
  Description of Artificial Sequence: Synthetic oligonucleotide
ccugagcaucacacacaaa

SEQ ID NO: 1914731 - RNA, 19 nt, Artificial Sequence
  Description of Artificial Sequence: Synthetic oligonucleotide
cuagaccccaugggcuaau

SEQ ID NO: 1914732 - RNA, 19 nt, Artificial Sequence
  Description of Artificial Sequence: Synthetic oligonucleotide
cggagacuggcccuuuugu

SEQ ID NO: 1914733 - RNA, 19 nt, Artificial Sequence
  Description of Artificial Sequence: Synthetic oligonucleotide
gugcaccguccagaggcau

SEQ ID NO: 1914734 - RNA, 19 nt, Artificial Sequence
  Description of Artificial Sequence: Synthetic oligonucleotide
ccgagacacucggacugga

SEQ ID NO: 1914735 - RNA, 19 nt, Artificial Sequence
  Description of Artificial Sequence: Synthetic oligonucleotide
caccguccagaggcauuua

SEQ ID NO: 1914736 - RNA, 19 nt, Artificial Sequence
  Description of Artificial Sequence: Synthetic oligonucleotide
cuaccagguccuggacuuu

SEQ ID NO: 1914737 - RNA, 19 nt, Artificial Sequence
  Description of Artificial Sequence: Synthetic oligonucleotide
ccagaggcauuuagcucuu

SEQ ID NO: 1914738 - RNA, 19 nt, Artificial Sequence
  Description of Artificial Sequence: Synthetic oligonucleotide
gcguugggcaguacacauu

SEQ ID NO: 1914739 - RNA, 19 nt, Artificial Sequence
  Description of Artificial Sequence: Synthetic oligonucleotide
cgucugccucagcagagau

SEQ ID NO: 1914740 - RNA, 19 nt, Artificial Sequence
  Description of Artificial Sequence: Synthetic oligonucleotide
gucuccggaugagguucuu

SEQ ID NO: 1914741 - RNA, 19 nt, Artificial Sequence
  Description of Artificial Sequence: Synthetic oligonucleotide
ccgggcaggguggcuccgu

SEQ ID NO: 1914742 - RNA, 19 nt, Artificial Sequence
  Description of Artificial Sequence: Synthetic oligonucleotide
ucuagaaucauccaaaucu

SEQ ID NO: 1914743 - RNA, 19 nt, Artificial Sequence
  Description of Artificial Sequence: Synthetic oligonucleotide
aagagcuucaaccagacuc

SEQ ID NO: 1914744 - RNA, 19 nt, Artificial Sequence
  Description of Artificial Sequence: Synthetic oligonucleotide
ugauagguaaccuugauug

SEQ ID NO: 1914745 - RNA, 19 nt, Artificial Sequence
  Description of Artificial Sequence: Synthetic oligonucleotide
  modified_base (11)..(11): a, c, u, g, unknown or other
uaauuuauuunuuauaacu

SEQ ID NO: 1914746 - RNA, 19 nt, Artificial Sequence
  Description of Artificial Sequence: Synthetic oligonucleotide
auaguaagugaauacuucc

SEQ ID NO: 1914747 - RNA, 19 nt, Artificial Sequence
  Description of Artificial Sequence: Synthetic oligonucleotide
  modified_base (18)..(18): a, c, u, g, unknown or other
uuaaguuuaauuuauuunu

SEQ ID NO: 1914748 - RNA, 19 nt, Artificial Sequence
  Description of Artificial Sequence: Synthetic oligonucleotide
auuagcaccauucacagug

SEQ ID NO: 1914749 - RNA, 19 nt, Artificial Sequence
  Description of Artificial Sequence: Synthetic oligonucleotide
aaauuguggcuauaauugc

SEQ ID NO: 1914750 - RNA, 19 nt, Artificial Sequence
  Description of Artificial Sequence: Synthetic oligonucleotide
cuugaugggauuuagaaac

SEQ ID NO: 1914751 - RNA, 19 nt, Artificial Sequence
  Description of Artificial Sequence: Synthetic oligonucleotide
uuaaugacaaccuggaaca

SEQ ID NO: 1914752 - RNA, 19 nt, Artificial Sequence
  Description of Artificial Sequence: Synthetic oligonucleotide
  modified_base (7)..(7): a, c, u, g, unknown or other
uuauuunuuauaacugucu

SEQ ID NO: 1914753 - RNA, 19 nt, Artificial Sequence
  Description of Artificial Sequence: Synthetic oligonucleotide
auuucucucuguuaguacc

SEQ ID NO: 1914754 - RNA, 19 nt, Artificial Sequence
  Description of Artificial Sequence: Synthetic oligonucleotide
uuuaauuagaagagggaca

SEQ ID NO: 1914755 - RNA, 19 nt, Artificial Sequence
  Description of Artificial Sequence: Synthetic oligonucleotide
cauagaauauagaaguuag

SEQ ID NO: 1914756 - RNA, 19 nt, Artificial Sequence
  Description of Artificial Sequence: Synthetic oligonucleotide
  modified_base (5)..(5): a, c, u, g, unknown or other
uuuunuuuuaaguuuaauu

SEQ ID NO: 1914757 - RNA, 19 nt, Artificial Sequence
  Description of Artificial Sequence: Synthetic oligonucleotide
  modified_base (9)..(9): a, c, u, g, unknown or other
auuuauuunuuauaacugu

SEQ ID NO: 1914758 - RNA, 19 nt, Artificial Sequence
  Description of Artificial Sequence: Synthetic oligonucleotide
auacaaugugaccagcugc

SEQ ID NO: 1914759 - RNA, 19 nt, Artificial Sequence
  Description of Artificial Sequence: Synthetic oligonucleotide
uguacuuuaaauuguggcu

SEQ ID NO: 1914760 - RNA, 19 nt, Artificial Sequence
  Description of Artificial Sequence: Synthetic oligonucleotide
  modified_base (2)..(2): a, c, u, g, unknown or other
unuuuuaaguuuaauuuau

SEQ ID NO: 1914761 - RNA, 19 nt, Artificial Sequence
  Description of Artificial Sequence: Synthetic oligonucleotide
  modified_base (8)..(8): a, c, u, g, unknown or other
uuuauuunuuauaacuguc

SEQ ID NO: 1914762 - RNA, 19 nt, Artificial Sequence
  Description of Artificial Sequence: Synthetic oligonucleotide
uuguacuuuaaauuguggc

SEQ ID NO: 1914763 - RNA, 19 nt, Artificial Sequence
  Description of Artificial Sequence: Synthetic oligonucleotide
  modified_base (4)..(4): a, c, u, g, unknown or other
uuunuuauaacugucucua

SEQ ID NO: 1914764 - RNA, 19 nt, Artificial Sequence
  Description of Artificial Sequence: Synthetic oligonucleotide
ucuucagucauccccuugg

SEQ ID NO: 1914765 - RNA, 19 nt, Artificial Sequence
  Description of Artificial Sequence: Synthetic oligonucleotide
agaauauagaaguuagugu

SEQ ID NO: 1914766 - RNA, 19 nt, Artificial Sequence
  Description of Artificial Sequence: Synthetic oligonucleotide
  modified_base (3)..(3): a, c, u, g, unknown or other
uunuuuuaaguuuaauuua

SEQ ID NO: 1914767 - RNA, 19 nt, Artificial Sequence
  Description of Artificial Sequence: Synthetic oligonucleotide
aacacuaguagcaccauuc

SEQ ID NO: 1914768 - RNA, 19 nt, Artificial Sequence
  Description of Artificial Sequence: Synthetic oligonucleotide
uguggauacaaugugacca

SEQ ID NO: 1914769 - RNA, 19 nt, Artificial Sequence
  Description of Artificial Sequence: Synthetic oligonucleotide
aaaacacaccucugggugg

SEQ ID NO: 1914770 - RNA, 19 nt, Artificial Sequence
  Description of Artificial Sequence: Synthetic oligonucleotide
auauuagcaccauucacag

SEQ ID NO: 1914771 - RNA, 19 nt, Artificial Sequence
  Description of Artificial Sequence: Synthetic oligonucleotide
ucuauauuagcaccauuca

SEQ ID NO: 1914772 - RNA, 19 nt, Artificial Sequence
  Description of Artificial Sequence: Synthetic oligonucleotide
  modified_base (6)..(6): a, c, u, g, unknown or other
uauuunuuauaacugucuc

SEQ ID NO: 1914773 - RNA, 19 nt, Artificial Sequence
  Description of Artificial Sequence: Synthetic oligonucleotide
uucugggagcccaugaugg

SEQ ID NO: 1914774 - RNA, 19 nt, Artificial Sequence
  Description of Artificial Sequence: Synthetic oligonucleotide
uguuaguaccucuacucgg

SEQ ID NO: 1914775 - RNA, 19 nt, Artificial Sequence
  Description of Artificial Sequence: Synthetic oligonucleotide
aguagcaccauuccugggg

SEQ ID NO: 1914776 - RNA, 19 nt, Artificial Sequence
  Description of Artificial Sequence: Synthetic oligonucleotide
aguaccucuacucggcccc

SEQ ID NO: 1914777 - RNA, 19 nt, Artificial Sequence
  Description of Artificial Sequence: Synthetic oligonucleotide
uguggcuauaauugcauag

SEQ ID NO: 1914778 - RNA, 19 nt, Artificial Sequence
  Description of Artificial Sequence: Synthetic oligonucleotide
aauauagaaguuaguguag

SEQ ID NO: 1914779 - RNA, 19 nt, Artificial Sequence
  Description of Artificial Sequence: Synthetic oligonucleotide
cucuauauuagcaccauuc

SEQ ID NO: 1914780 - RNA, 19 nt, Artificial Sequence
  Description of Artificial Sequence: Synthetic oligonucleotide
  modified_base (5)..(5): a, c, u, g, unknown or other
auuunuuauaacugucucu

SEQ ID NO: 1914781 - RNA, 19 nt, Artificial Sequence
  Description of Artificial Sequence: Synthetic oligonucleotide
aaacauccugaaaacacac

SEQ ID NO: 1914782 - RNA, 19 nt, Artificial Sequence
  Description of Artificial Sequence: Synthetic oligonucleotide
aaugucaugacgguacaug

SEQ ID NO: 1914783 - RNA, 19 nt, Artificial Sequence
  Description of Artificial Sequence: Synthetic oligonucleotide
ugugucagcauucccagcu

SEQ ID NO: 1914784 - RNA, 19 nt, Artificial Sequence
  Description of Artificial Sequence: Synthetic oligonucleotide
gacaaccuggaacagguag

SEQ ID NO: 1914785 - RNA, 19 nt, Artificial Sequence
  Description of Artificial Sequence: Synthetic oligonucleotide
uacucggccccucauaggg

SEQ ID NO: 1914786 - RNA, 19 nt, Artificial Sequence
  Description of Artificial Sequence: Synthetic oligonucleotide
  modified_base (2)..(2): a, c, u, g, unknown or other
unuuauaacugucucuaua

SEQ ID NO: 1914787 - RNA, 19 nt, Artificial Sequence
  Description of Artificial Sequence: Synthetic oligonucleotide
gaagagguuuaauuagaag

SEQ ID NO: 1914788 - RNA, 19 nt, Artificial Sequence
  Description of Artificial Sequence: Synthetic oligonucleotide
guuuaauuagaagagggac

SEQ ID NO: 1914789 - RNA, 19 nt, Artificial Sequence
  Description of Artificial Sequence: Synthetic oligonucleotide
agugaauacuuccaugcug

SEQ ID NO: 1914790 - RNA, 19 nt, Artificial Sequence
  Description of Artificial Sequence: Synthetic oligonucleotide
agguuuaauuagaagaggg

SEQ ID NO: 1914791 - RNA, 19 nt, Artificial Sequence
  Description of Artificial Sequence: Synthetic oligonucleotide
guaggcggaauacaaagag

SEQ ID NO: 1914792 - RNA, 19 nt, Artificial Sequence
  Description of Artificial Sequence: Synthetic oligonucleotide
ucuacucggccccucauag

SEQ ID NO: 1914793 - RNA, 19 nt, Artificial Sequence
  Description of Artificial Sequence: Synthetic oligonucleotide
agagguuuaauuagaagag

SEQ ID NO: 1914794 - RNA, 19 nt, Artificial Sequence
  Description of Artificial Sequence: Synthetic oligonucleotide
gaauguugcaucucacacc

SEQ ID NO: 1914795 - RNA, 19 nt, Artificial Sequence
  Description of Artificial Sequence: Synthetic oligonucleotide
acacucauaacucuucuga

SEQ ID NO: 1914796 - RNA, 19 nt, Artificial Sequence
  Description of Artificial Sequence: Synthetic oligonucleotide
gauacaaugugaccagcug

SEQ ID NO: 1914797 - RNA, 19 nt, Artificial Sequence
  Description of Artificial Sequence: Synthetic oligonucleotide
aaugugaccagcugccggu

SEQ ID NO: 1914798 - RNA, 19 nt, Artificial Sequence
  Description of Artificial Sequence: Synthetic oligonucleotide
ugcuauuguacuuuaaauu

SEQ ID NO: 1914799 - RNA, 19 nt, Artificial Sequence
  Description of Artificial Sequence: Synthetic oligonucleotide
uauaauugcauagaauaua

SEQ ID NO: 1914800 - RNA, 19 nt, Artificial Sequence
  Description of Artificial Sequence: Synthetic oligonucleotide
uggagcaccagcauucacc

SEQ ID NO: 1914801 - RNA, 19 nt, Artificial Sequence
  Description of Artificial Sequence: Synthetic oligonucleotide
gucaugacgguacaugucc

SEQ ID NO: 1914802 - RNA, 19 nt, Artificial Sequence
  Description of Artificial Sequence: Synthetic oligonucleotide
aacagguagucuccagggg

SEQ ID NO: 1914803 - RNA, 19 nt, Artificial Sequence
  Description of Artificial Sequence: Synthetic oligonucleotide
uuuaaauuguggcuauaau

SEQ ID NO: 1914804 - RNA, 19 nt, Artificial Sequence
  Description of Artificial Sequence: Synthetic oligonucleotide
accuggaacagguagucuc

SEQ ID NO: 1914805 - RNA, 19 nt, Artificial Sequence
  Description of Artificial Sequence: Synthetic oligonucleotide
acccauuucucucuguuag

SEQ ID NO: 1914806 - RNA, 19 nt, Artificial Sequence
  Description of Artificial Sequence: Synthetic oligonucleotide
uaggcggaauacaaagagg

SEQ ID NO: 1914807 - RNA, 19 nt, Artificial Sequence
  Description of Artificial Sequence: Synthetic oligonucleotide
augaugggaauguugcauc

SEQ ID NO: 1914808 - RNA, 19 nt, Artificial Sequence
  Description of Artificial Sequence: Synthetic oligonucleotide
cauaguaagugaauacuuc

SEQ ID NO: 1914809 - RNA, 19 nt, Artificial Sequence
  Description of Artificial Sequence: Synthetic oligonucleotide
gcuauaauugcauagaaua

SEQ ID NO: 1914810 - RNA, 19 nt, Artificial Sequence
  Description of Artificial Sequence: Synthetic oligonucleotide
cuauucugucucuagaauc

SEQ ID NO: 1914811 - RNA, 19 nt, Artificial Sequence
  Description of Artificial Sequence: Synthetic oligonucleotide
uggggcggaagucagacug

SEQ ID NO: 1914812 - RNA, 19 nt, Artificial Sequence
  Description of Artificial Sequence: Synthetic oligonucleotide
guugugauagguaaccuug

SEQ ID NO: 1914813 - RNA, 19 nt, Artificial Sequence
  Description of Artificial Sequence: Synthetic oligonucleotide
cuguaggcggaauacaaag

SEQ ID NO: 1914814 - RNA, 19 nt, Artificial Sequence
  Description of Artificial Sequence: Synthetic oligonucleotide
auagguaaccuugauuguc

SEQ ID NO: 1914815 - RNA, 19 nt, Artificial Sequence
  Description of Artificial Sequence: Synthetic oligonucleotide
ugucucuauauuagcacca

SEQ ID NO: 1914816 - RNA, 19 nt, Artificial Sequence
  Description of Artificial Sequence: Synthetic oligonucleotide
cuauauuagcaccauucac

SEQ ID NO: 1914817 - RNA, 19 nt, Artificial Sequence
  Description of Artificial Sequence: Synthetic oligonucleotide
gagguuuaauuagaagagg

SEQ ID NO: 1914818 - RNA, 19 nt, Artificial Sequence
  Description of Artificial Sequence: Synthetic oligonucleotide
ucaccaauuggcuuccuga

SEQ ID NO: 1914819 - RNA, 19 nt, Artificial Sequence
  Description of Artificial Sequence: Synthetic oligonucleotide
ugacuguggauacaaugug

SEQ ID NO: 1914820 - RNA, 19 nt, Artificial Sequence
  Description of Artificial Sequence: Synthetic oligonucleotide
ucauccaaaucuucaguca

SEQ ID NO: 1914821 - RNA, 19 nt, Artificial Sequence
  Description of Artificial Sequence: Synthetic oligonucleotide
ugucucuagaaucauccaa

SEQ ID NO: 1914822 - RNA, 19 nt, Artificial Sequence
  Description of Artificial Sequence: Synthetic oligonucleotide
aucugauucuggcaccucg

SEQ ID NO: 1914823 - RNA, 19 nt, Artificial Sequence
  Description of Artificial Sequence: Synthetic oligonucleotide
cugucucuauauuagcacc

SEQ ID NO: 1914824 - RNA, 19 nt, Artificial Sequence
  Description of Artificial Sequence: Synthetic oligonucleotide
uagguaaccuugauuguca

SEQ ID NO: 1914825 - RNA, 19 nt, Artificial Sequence
  Description of Artificial Sequence: Synthetic oligonucleotide
auccugaaaacacaccucu

SEQ ID NO: 1914826 - RNA, 19 nt, Artificial Sequence
  Description of Artificial Sequence: Synthetic oligonucleotide
ugaaaacacaccucugggu

SEQ ID NO: 1914827 - RNA, 19 nt, Artificial Sequence
  Description of Artificial Sequence: Synthetic oligonucleotide
ugauucuggcaccucguag

SEQ ID NO: 1914828 - RNA, 19 nt, Artificial Sequence
  Description of Artificial Sequence: Synthetic oligonucleotide
acuaguagcaccauuccug

SEQ ID NO: 1914829 - RNA, 19 nt, Artificial Sequence
  Description of Artificial Sequence: Synthetic oligonucleotide
cuguuaguaccucuacucg

SEQ ID NO: 1914830 - RNA, 19 nt, Artificial Sequence
  Description of Artificial Sequence: Synthetic oligonucleotide
auagaaguuaguguagcug

SEQ ID NO: 1914831 - RNA, 19 nt, Artificial Sequence
  Description of Artificial Sequence: Synthetic oligonucleotide
guaagugaauacuuccaug

SEQ ID NO: 1914832 - RNA, 19 nt, Artificial Sequence
  Description of Artificial Sequence: Synthetic oligonucleotide
cuggaagagguugugauag

SEQ ID NO: 1914833 - RNA, 19 nt, Artificial Sequence
  Description of Artificial Sequence: Synthetic oligonucleotide
auggcggccauucuugggg

SEQ ID NO: 1914834 - RNA, 19 nt, Artificial Sequence
  Description of Artificial Sequence: Synthetic oligonucleotide
cucagcaggucauaguaag

SEQ ID NO: 1914835 - RNA, 19 nt, Artificial Sequence
  Description of Artificial Sequence: Synthetic oligonucleotide
aagugaauacuuccaugcu

SEQ ID NO: 1914836 - RNA, 19 nt, Artificial Sequence
  Description of Artificial Sequence: Synthetic oligonucleotide
aucauagcggcuccugcac

SEQ ID NO: 1914837 - RNA, 19 nt, Artificial Sequence
  Description of Artificial Sequence: Synthetic oligonucleotide
aauguaugucuugcuauug

SEQ ID NO: 1914838 - RNA, 19 nt, Artificial Sequence
  Description of Artificial Sequence: Synthetic oligonucleotide
gaauacuuccaugcugugg

SEQ ID NO: 1914839 - RNA, 19 nt, Artificial Sequence
  Description of Artificial Sequence: Synthetic oligonucleotide
cuuggaauguaugucuugc

SEQ ID NO: 1914840 - RNA, 19 nt, Artificial Sequence
  Description of Artificial Sequence: Synthetic oligonucleotide
gaaugucucccucacacuc

SEQ ID NO: 1914841 - RNA, 19 nt, Artificial Sequence
  Description of Artificial Sequence: Synthetic oligonucleotide
aguaagugaauacuuccau

SEQ ID NO: 1914842 - RNA, 19 nt, Artificial Sequence
  Description of Artificial Sequence: Synthetic oligonucleotide
aauuguggcuauaauugca

SEQ ID NO: 1914843 - RNA, 19 nt, Artificial Sequence
  Description of Artificial Sequence: Synthetic oligonucleotide
auuagaagagggacagccc

SEQ ID NO: 1914844 - RNA, 19 nt, Artificial Sequence
  Description of Artificial Sequence: Synthetic oligonucleotide
ccagcauucaccaauuggc

SEQ ID NO: 1914845 - RNA, 19 nt, Artificial Sequence
  Description of Artificial Sequence: Synthetic oligonucleotide
uguaggcggaauacaaaga

SEQ ID NO: 1914846 - RNA, 19 nt, Artificial Sequence
  Description of Artificial Sequence: Synthetic oligonucleotide
ugauugucaccuugauggg

SEQ ID NO: 1914847 - RNA, 19 nt, Artificial Sequence
  Description of Artificial Sequence: Synthetic oligonucleotide
aaacacaccucuggguggg

SEQ ID NO: 1914848 - RNA, 19 nt, Artificial Sequence
  Description of Artificial Sequence: Synthetic oligonucleotide
uaauugcauagaauauaga

SEQ ID NO: 1914849 - RNA, 19 nt, Artificial Sequence
  Description of Artificial Sequence: Synthetic oligonucleotide
ugcauggcggccauucuug

SEQ ID NO: 1914850 - RNA, 19 nt, Artificial Sequence
  Description of Artificial Sequence: Synthetic oligonucleotide
uaacucuucugaaugucuc

SEQ ID NO: 1914851 - RNA, 19 nt, Artificial Sequence
  Description of Artificial Sequence: Synthetic oligonucleotide
uggaauguaugucuugcua

SEQ ID NO: 1914852 - RNA, 19 nt, Artificial Sequence
  Description of Artificial Sequence: Synthetic oligonucleotide
caugccagauccaugcaug

SEQ ID NO: 1914853 - RNA, 19 nt, Artificial Sequence
  Description of Artificial Sequence: Synthetic oligonucleotide
uccuauucugucucuagaa

SEQ ID NO: 1914854 - RNA, 19 nt, Artificial Sequence
  Description of Artificial Sequence: Synthetic oligonucleotide
uuccuauucugucucuaga

SEQ ID NO: 1914855 - RNA, 19 nt, Artificial Sequence
  Description of Artificial Sequence: Synthetic oligonucleotide
gaaacauccugaaaacaca

SEQ ID NO: 1914856 - RNA, 19 nt, Artificial Sequence
  Description of Artificial Sequence: Synthetic oligonucleotide
augucaugacgguacaugu

SEQ ID NO: 1914857 - RNA, 19 nt, Artificial Sequence
  Description of Artificial Sequence: Synthetic oligonucleotide
ugggguuaaugacaaccug

SEQ ID NO: 1914858 - RNA, 19 nt, Artificial Sequence
  Description of Artificial Sequence: Synthetic oligonucleotide
uuaguaccucuacucggcc

SEQ ID NO: 1914859 - RNA, 19 nt, Artificial Sequence
  Description of Artificial Sequence: Synthetic oligonucleotide
ucuuccucgugguugcagc

SEQ ID NO: 1914860 - RNA, 19 nt, Artificial Sequence
  Description of Artificial Sequence: Synthetic oligonucleotide
uccauucagacgcagcuuu

SEQ ID NO: 1914861 - RNA, 19 nt, Artificial Sequence
  Description of Artificial Sequence: Synthetic oligonucleotide
uaguugggguuaaugacaa

SEQ ID NO: 1914862 - RNA, 19 nt, Artificial Sequence
  Description of Artificial Sequence: Synthetic oligonucleotide
aaaucugauucuggcaccu

SEQ ID NO: 1914863 - RNA, 19 nt, Artificial Sequence
  Description of Artificial Sequence: Synthetic oligonucleotide
uugugauagguaaccuuga

SEQ ID NO: 1914864 - RNA, 19 nt, Artificial Sequence
  Description of Artificial Sequence: Synthetic oligonucleotide
guuaguaccucuacucggc

SEQ ID NO: 1914865 - RNA, 19 nt, Artificial Sequence
  Description of Artificial Sequence: Synthetic oligonucleotide
aagggacccauuucucucu

SEQ ID NO: 1914866 - RNA, 19 nt, Artificial Sequence
  Description of Artificial Sequence: Synthetic oligonucleotide
agauccaugcauggcggcc

SEQ ID NO: 1914867 - RNA, 19 nt, Artificial Sequence
  Description of Artificial Sequence: Synthetic oligonucleotide
cuuccuauucugucucuag

SEQ ID NO: 1914868 - RNA, 19 nt, Artificial Sequence
  Description of Artificial Sequence: Synthetic oligonucleotide
acaagggacccauuucucu

SEQ ID NO: 1914869 - RNA, 19 nt, Artificial Sequence
  Description of Artificial Sequence: Synthetic oligonucleotide
ccagaagagguuuaauuag

SEQ ID NO: 1914870 - RNA, 19 nt, Artificial Sequence
  Description of Artificial Sequence: Synthetic oligonucleotide
ugaugggaauguugcaucu

SEQ ID NO: 1914871 - RNA, 19 nt, Artificial Sequence
  Description of Artificial Sequence: Synthetic oligonucleotide
aggcggaauacaaagagga

SEQ ID NO: 1914872 - RNA, 19 nt, Artificial Sequence
  Description of Artificial Sequence: Synthetic oligonucleotide
ugugauagguaaccuugau

SEQ ID NO: 1914873 - RNA, 19 nt, Artificial Sequence
  Description of Artificial Sequence: Synthetic oligonucleotide
  modified_base (3)..(3): a, c, u, g, unknown or other
uunuuauaacugucucuau

SEQ ID NO: 1914874 - RNA, 19 nt, Artificial Sequence
  Description of Artificial Sequence: Synthetic oligonucleotide
cuucaaccagacucugagg

SEQ ID NO: 1914875 - RNA, 19 nt, Artificial Sequence
  Description of Artificial Sequence: Synthetic oligonucleotide
augacaaccuggaacaggu

SEQ ID NO: 1914876 - RNA, 19 nt, Artificial Sequence
  Description of Artificial Sequence: Synthetic oligonucleotide
uacuuuaaauuguggcuau

SEQ ID NO: 1914877 - RNA, 19 nt, Artificial Sequence
  Description of Artificial Sequence: Synthetic oligonucleotide
cccaugaugggaauguugc

SEQ ID NO: 1914878 - RNA, 19 nt, Artificial Sequence
  Description of Artificial Sequence: Synthetic oligonucleotide
ggucauaguaagugaauac

SEQ ID NO: 1914879 - RNA, 19 nt, Artificial Sequence
  Description of Artificial Sequence: Synthetic oligonucleotide
ugugcucugugucagcauu

SEQ ID NO: 1914880 - RNA, 19 nt, Artificial Sequence
  Description of Artificial Sequence: Synthetic oligonucleotide
gauucuggcaccucguagu

SEQ ID NO: 1914881 - RNA, 19 nt, Artificial Sequence
  Description of Artificial Sequence: Synthetic oligonucleotide
uggaagagguugugauagg

SEQ ID NO: 1914882 - RNA, 19 nt, Artificial Sequence
  Description of Artificial Sequence: Synthetic oligonucleotide
ugucaugacgguacauguc

SEQ ID NO: 1914883 - RNA, 19 nt, Artificial Sequence
  Description of Artificial Sequence: Synthetic oligonucleotide
cuguggauacaaugugacc

SEQ ID NO: 1914884 - RNA, 19 nt, Artificial Sequence
  Description of Artificial Sequence: Synthetic oligonucleotide
uuggaauguaugucuugcu

SEQ ID NO: 1914885 - RNA, 19 nt, Artificial Sequence
  Description of Artificial Sequence: Synthetic oligonucleotide
guagcaccauuccuggggc

SEQ ID NO: 1914886 - RNA, 19 nt, Artificial Sequence
  Description of Artificial Sequence: Synthetic oligonucleotide
agagguugugauagguaac

SEQ ID NO: 1914887 - RNA, 19 nt, Artificial Sequence
  Description of Artificial Sequence: Synthetic oligonucleotide
guaugucuugcuauuguac

SEQ ID NO: 1914888 - RNA, 19 nt, Artificial Sequence
  Description of Artificial Sequence: Synthetic oligonucleotide
uaguaccucuacucggccc

SEQ ID NO: 1914889 - RNA, 19 nt, Artificial Sequence
  Description of Artificial Sequence: Synthetic oligonucleotide
uuagcaccauucacagugu

SEQ ID NO: 1914890 - RNA, 19 nt, Artificial Sequence
  Description of Artificial Sequence: Synthetic oligonucleotide
ugaaugucucccucacacu

SEQ ID NO: 1914891 - RNA, 19 nt, Artificial Sequence
  Description of Artificial Sequence: Synthetic oligonucleotide
ugaauacuuccaugcugug

SEQ ID NO: 1914892 - RNA, 19 nt, Artificial Sequence
  Description of Artificial Sequence: Synthetic oligonucleotide
aauuggcuuccugacugug

SEQ ID NO: 1914893 - RNA, 19 nt, Artificial Sequence
  Description of Artificial Sequence: Synthetic oligonucleotide
cauaacucuucugaauguc

SEQ ID NO: 1914894 - RNA, 19 nt, Artificial Sequence
  Description of Artificial Sequence: Synthetic oligonucleotide
cagaagagguuuaauuaga

SEQ ID NO: 1914895 - RNA, 19 nt, Artificial Sequence
  Description of Artificial Sequence: Synthetic oligonucleotide
gugguugcagcccugcgac

SEQ ID NO: 1914896 - RNA, 19 nt, Artificial Sequence
  Description of Artificial Sequence: Synthetic oligonucleotide
caagggacccauuucucuc

SEQ ID NO: 1914897 - RNA, 19 nt, Artificial Sequence
  Description of Artificial Sequence: Synthetic oligonucleotide
auaacucuucugaaugucu

SEQ ID NO: 1914898 - RNA, 19 nt, Artificial Sequence
  Description of Artificial Sequence: Synthetic oligonucleotide
guacuuuaaauuguggcua

SEQ ID NO: 1914899 - RNA, 19 nt, Artificial Sequence
  Description of Artificial Sequence: Synthetic oligonucleotide
aaugucucccucacacucu

SEQ ID NO: 1914900 - RNA, 19 nt, Artificial Sequence
  Description of Artificial Sequence: Synthetic oligonucleotide
agugccccacacaagggac

SEQ ID NO: 1914901 - RNA, 19 nt, Artificial Sequence
  Description of Artificial Sequence: Synthetic oligonucleotide
cucuagaaucauccaaauc

SEQ ID NO: 1914902 - RNA, 19 nt, Artificial Sequence
  Description of Artificial Sequence: Synthetic oligonucleotide
gaagagggacagcccaccc

SEQ ID NO: 1914903 - RNA, 19 nt, Artificial Sequence
  Description of Artificial Sequence: Synthetic oligonucleotide
ugacgguacaugucccagc

SEQ ID NO: 1914904 - RNA, 19 nt, Artificial Sequence
  Description of Artificial Sequence: Synthetic oligonucleotide
uggaacagguagucuccag

SEQ ID NO: 1914905 - RNA, 19 nt, Artificial Sequence
  Description of Artificial Sequence: Synthetic oligonucleotide
aaucugauucuggcaccuc

SEQ ID NO: 1914906 - RNA, 19 nt, Artificial Sequence
  Description of Artificial Sequence: Synthetic oligonucleotide
accaauuggcuuccugacu

SEQ ID NO: 1914907 - RNA, 19 nt, Artificial Sequence
  Description of Artificial Sequence: Synthetic oligonucleotide
ucucucuguuaguaccucu

SEQ ID NO: 1914908 - RNA, 19 nt, Artificial Sequence
  Description of Artificial Sequence: Synthetic oligonucleotide
gcauucaccaauuggcuuc

SEQ ID NO: 1914909 - RNA, 19 nt, Artificial Sequence
  Description of Artificial Sequence: Synthetic oligonucleotide
cuauaauugcauagaauau

SEQ ID NO: 1914910 - RNA, 19 nt, Artificial Sequence
  Description of Artificial Sequence: Synthetic oligonucleotide
cuucccauguuccccauga

SEQ ID NO: 1914911 - RNA, 19 nt, Artificial Sequence
  Description of Artificial Sequence: Synthetic oligonucleotide
cuuggggcggaagucagac

SEQ ID NO: 1914912 - RNA, 19 nt, Artificial Sequence
  Description of Artificial Sequence: Synthetic oligonucleotide
gucauaguaagugaauacu

SEQ ID NO: 1914913 - RNA, 19 nt, Artificial Sequence
  Description of Artificial Sequence: Synthetic oligonucleotide
auuguggcuauaauugcau

SEQ ID NO: 1914914 - RNA, 19 nt, Artificial Sequence
  Description of Artificial Sequence: Synthetic oligonucleotide
ucccauguuccccaugauu

SEQ ID NO: 1914915 - RNA, 19 nt, Artificial Sequence
  Description of Artificial Sequence: Synthetic oligonucleotide
uauuagcaccauucacagu

SEQ ID NO: 1914916 - RNA, 19 nt, Artificial Sequence
  Description of Artificial Sequence: Synthetic oligonucleotide
guggcuauaauugcauaga

SEQ ID NO: 1914917 - RNA, 19 nt, Artificial Sequence
  Description of Artificial Sequence: Synthetic oligonucleotide
ugaugggauuuagaaacau

SEQ ID NO: 1914918 - RNA, 19 nt, Artificial Sequence
  Description of Artificial Sequence: Synthetic oligonucleotide
ccauuguugugaaucuggg

SEQ ID NO: 1914919 - RNA, 19 nt, Artificial Sequence
  Description of Artificial Sequence: Synthetic oligonucleotide
cacacaagggacccauuuc

SEQ ID NO: 1914920 - RNA, 19 nt, Artificial Sequence
  Description of Artificial Sequence: Synthetic oligonucleotide
uaacacuaguagcaccauu

SEQ ID NO: 1914921 - RNA, 19 nt, Artificial Sequence
  Description of Artificial Sequence: Synthetic oligonucleotide
ucucuauauuagcaccauu

SEQ ID NO: 1914922 - RNA, 19 nt, Artificial Sequence
  Description of Artificial Sequence: Synthetic oligonucleotide
cucccucacacucuguguc

SEQ ID NO: 1914923 - RNA, 19 nt, Artificial Sequence
  Description of Artificial Sequence: Synthetic oligonucleotide
agaagagguuuaauuagaa

SEQ ID NO: 1914924 - RNA, 19 nt, Artificial Sequence
  Description of Artificial Sequence: Synthetic oligonucleotide
agcccugcgacucuguguu

SEQ ID NO: 1914925 - RNA, 19 nt, Artificial Sequence
  Description of Artificial Sequence: Synthetic oligonucleotide
gauagguaaccuugauugu

SEQ ID NO: 1914926 - RNA, 19 nt, Artificial Sequence
  Description of Artificial Sequence: Synthetic oligonucleotide
ugccguugaggcucagcag

SEQ ID NO: 1914927 - RNA, 19 nt, Artificial Sequence
  Description of Artificial Sequence: Synthetic oligonucleotide
uggauacaaugugaccagc

SEQ ID NO: 1914928 - RNA, 19 nt, Artificial Sequence
  Description of Artificial Sequence: Synthetic oligonucleotide
ccgguagccaucauagcgg

SEQ ID NO: 1914929 - RNA, 19 nt, Artificial Sequence
  Description of Artificial Sequence: Synthetic oligonucleotide
augacgguacaugucccag

SEQ ID NO: 1914930 - RNA, 19 nt, Artificial Sequence
  Description of Artificial Sequence: Synthetic oligonucleotide
cucguaguugggguuaaug

SEQ ID NO: 1914931 - RNA, 19 nt, Artificial Sequence
  Description of Artificial Sequence: Synthetic oligonucleotide
ggaaagcaaauggagcacc

SEQ ID NO: 1914932 - RNA, 19 nt, Artificial Sequence
  Description of Artificial Sequence: Synthetic oligonucleotide
gauugucaccuugauggga

SEQ ID NO: 1914933 - RNA, 19 nt, Artificial Sequence
  Description of Artificial Sequence: Synthetic oligonucleotide
ugcggccuccauucagacg

SEQ ID NO: 1914934 - RNA, 19 nt, Artificial Sequence
  Description of Artificial Sequence: Synthetic oligonucleotide
cauggcggccauucuuggg

SEQ ID NO: 1914935 - RNA, 19 nt, Artificial Sequence
  Description of Artificial Sequence: Synthetic oligonucleotide
ucgugguugcagcccugcg

SEQ ID NO: 1914936 - RNA, 19 nt, Artificial Sequence
  Description of Artificial Sequence: Synthetic oligonucleotide
uuccugacuguggauacaa

SEQ ID NO: 1914937 - RNA, 19 nt, Artificial Sequence
  Description of Artificial Sequence: Synthetic oligonucleotide
agggcccuucccauguucc

SEQ ID NO: 1914938 - RNA, 19 nt, Artificial Sequence
  Description of Artificial Sequence: Synthetic oligonucleotide
acaaccuggaacagguagu

SEQ ID NO: 1914939 - RNA, 19 nt, Artificial Sequence
  Description of Artificial Sequence: Synthetic oligonucleotide
caucauagcggcuccugca

SEQ ID NO: 1914940 - RNA, 19 nt, Artificial Sequence
  Description of Artificial Sequence: Synthetic oligonucleotide
ggaauacaaagaggaaagc

SEQ ID NO: 1914941 - RNA, 19 nt, Artificial Sequence
  Description of Artificial Sequence: Synthetic oligonucleotide
ugaccagcugccgguagcc

SEQ ID NO: 1914942 - RNA, 19 nt, Artificial Sequence
  Description of Artificial Sequence: Synthetic oligonucleotide
gaauguaugucuugcuauu

SEQ ID NO: 1914943 - RNA, 19 nt, Artificial Sequence
  Description of Artificial Sequence: Synthetic oligonucleotide
cacaagggacccauuucuc

SEQ ID NO: 1914944 - RNA, 19 nt, Artificial Sequence
  Description of Artificial Sequence: Synthetic oligonucleotide
ccagauccaugcauggcgg

SEQ ID NO: 1914945 - RNA, 19 nt, Artificial Sequence
  Description of Artificial Sequence: Synthetic oligonucleotide
cguaguugggguuaaugac

SEQ ID NO: 1914946 - RNA, 19 nt, Artificial Sequence
  Description of Artificial Sequence: Synthetic oligonucleotide
uggcaccucguaguugggg

SEQ ID NO: 1914947 - RNA, 19 nt, Artificial Sequence
  Description of Artificial Sequence: Synthetic oligonucleotide
cauucuuggggcggaaguc

SEQ ID NO: 1914948 - RNA, 19 nt, Artificial Sequence
  Description of Artificial Sequence: Synthetic oligonucleotide
cagauccaugcauggcggc

SEQ ID NO: 1914949 - RNA, 19 nt, Artificial Sequence
  Description of Artificial Sequence: Synthetic oligonucleotide
gaugggaauguugcaucuc

SEQ ID NO: 1914950 - RNA, 19 nt, Artificial Sequence
  Description of Artificial Sequence: Synthetic oligonucleotide
cauuccuggggccgggcug

SEQ ID NO: 1914951 - RNA, 19 nt, Artificial Sequence
  Description of Artificial Sequence: Synthetic oligonucleotide
cacucauaacucuucugaa

SEQ ID NO: 1914952 - RNA, 19 nt, Artificial Sequence
  Description of Artificial Sequence: Synthetic oligonucleotide
gagaagcggagaaggcgcc

SEQ ID NO: 1914953 - RNA, 19 nt, Artificial Sequence
  Description of Artificial Sequence: Synthetic oligonucleotide
ucuuccuauucugucucua

SEQ ID NO: 1914954 - RNA, 19 nt, Artificial Sequence
  Description of Artificial Sequence: Synthetic oligonucleotide
caugacgguacauguccca

SEQ ID NO: 1914955 - RNA, 19 nt, Artificial Sequence
  Description of Artificial Sequence: Synthetic oligonucleotide
augcauggcggccauucuu

SEQ ID NO: 1914956 - RNA, 19 nt, Artificial Sequence
  Description of Artificial Sequence: Synthetic oligonucleotide
aagcggagaaggcgccggu

SEQ ID NO: 1914957 - RNA, 19 nt, Artificial Sequence
  Description of Artificial Sequence: Synthetic oligonucleotide
uccccaugauuuucucuuc

SEQ ID NO: 1914958 - RNA, 19 nt, Artificial Sequence
  Description of Artificial Sequence: Synthetic oligonucleotide
gugaaucugggaggagaag

SEQ ID NO: 1914959 - RNA, 19 nt, Artificial Sequence
  Description of Artificial Sequence: Synthetic oligonucleotide
uggcggccauucuuggggc

SEQ ID NO: 1914960 - RNA, 19 nt, Artificial Sequence
  Description of Artificial Sequence: Synthetic oligonucleotide
ggguuaaugacaaccugga

SEQ ID NO: 1914961 - RNA, 19 nt, Artificial Sequence
  Description of Artificial Sequence: Synthetic oligonucleotide
gguugcggccuccauucag

SEQ ID NO: 1914962 - RNA, 19 nt, Artificial Sequence
  Description of Artificial Sequence: Synthetic oligonucleotide
auagcggcuccugcacuuc

SEQ ID NO: 1914963 - RNA, 19 nt, Artificial Sequence
  Description of Artificial Sequence: Synthetic oligonucleotide
uguggcagucaugccagau

SEQ ID NO: 1914964 - RNA, 19 nt, Artificial Sequence
  Description of Artificial Sequence: Synthetic oligonucleotide
gcggaauacaaagaggaaa

SEQ ID NO: 1914965 - RNA, 19 nt, Artificial Sequence
  Description of Artificial Sequence: Synthetic oligonucleotide
agguugugauagguaaccu

SEQ ID NO: 1914966 - RNA, 19 nt, Artificial Sequence
  Description of Artificial Sequence: Synthetic oligonucleotide
uugcggccuccauucagac

SEQ ID NO: 1914967 - RNA, 19 nt, Artificial Sequence
  Description of Artificial Sequence: Synthetic oligonucleotide
ggcucagcaggucauagua

SEQ ID NO: 1914968 - RNA, 19 nt, Artificial Sequence
  Description of Artificial Sequence: Synthetic oligonucleotide
uagugccuguggcagucau

SEQ ID NO: 1914969 - RNA, 19 nt, Artificial Sequence
  Description of Artificial Sequence: Synthetic oligonucleotide
ggagaaggcgccgguagcc

SEQ ID NO: 1914970 - RNA, 19 nt, Artificial Sequence
  Description of Artificial Sequence: Synthetic oligonucleotide
guugcggccuccauucaga

SEQ ID NO: 1914971 - RNA, 19 nt, Artificial Sequence
  Description of Artificial Sequence: Synthetic oligonucleotide
ucauagggguugcggccuc

SEQ ID NO: 1914972 - RNA, 19 nt, Artificial Sequence
  Description of Artificial Sequence: Synthetic oligonucleotide
gugauagguaaccuugauu

SEQ ID NO: 1914973 - RNA, 19 nt, Artificial Sequence
  Description of Artificial Sequence: Synthetic oligonucleotide
accucuacucggccccuca

SEQ ID NO: 1914974 - RNA, 19 nt, Artificial Sequence
  Description of Artificial Sequence: Synthetic oligonucleotide
uccugacuguggauacaau

SEQ ID NO: 1914975 - RNA, 19 nt, Artificial Sequence
  Description of Artificial Sequence: Synthetic oligonucleotide
cucgugguugcagcccugc

SEQ ID NO: 1914976 - RNA, 19 nt, Artificial Sequence
  Description of Artificial Sequence: Synthetic oligonucleotide
agggguugcggccuccauu

SEQ ID NO: 1914977 - RNA, 19 nt, Artificial Sequence
  Description of Artificial Sequence: Synthetic oligonucleotide
uucccauguuccccaugau

SEQ ID NO: 1914978 - RNA, 19 nt, Artificial Sequence
  Description of Artificial Sequence: Synthetic oligonucleotide
cuggggccgggcuguaggc

SEQ ID NO: 1914979 - RNA, 19 nt, Artificial Sequence
  Description of Artificial Sequence: Synthetic oligonucleotide
accauuccuggggccgggc

SEQ ID NO: 1914980 - RNA, 19 nt, Artificial Sequence
  Description of Artificial Sequence: Synthetic oligonucleotide
agcccacccuaacacuagu

SEQ ID NO: 1914981 - RNA, 19 nt, Artificial Sequence
  Description of Artificial Sequence: Synthetic oligonucleotide
caccauucacagugugcuc

SEQ ID NO: 1914982 - RNA, 19 nt, Artificial Sequence
  Description of Artificial Sequence: Synthetic oligonucleotide
uuggggcggaagucagacu

SEQ ID NO: 1914983 - RNA, 19 nt, Artificial Sequence
  Description of Artificial Sequence: Synthetic oligonucleotide
cagcauucaccaauuggcu

SEQ ID NO: 1914984 - RNA, 19 nt, Artificial Sequence
  Description of Artificial Sequence: Synthetic oligonucleotide
ccaucauagcggcuccugc

SEQ ID NO: 1914985 - RNA, 19 nt, Artificial Sequence
  Description of Artificial Sequence: Synthetic oligonucleotide
acagcccacccuaacacua

SEQ ID NO: 1914986 - RNA, 19 nt, Artificial Sequence
  Description of Artificial Sequence: Synthetic oligonucleotide
acuuuaaauuguggcuaua

SEQ ID NO: 1914987 - RNA, 19 nt, Artificial Sequence
  Description of Artificial Sequence: Synthetic oligonucleotide
ccuugaugggauuuagaaa

SEQ ID NO: 1914988 - RNA, 19 nt, Artificial Sequence
  Description of Artificial Sequence: Synthetic oligonucleotide
gcauggcggccauucuugg

SEQ ID NO: 1914989 - RNA, 19 nt, Artificial Sequence
  Description of Artificial Sequence: Synthetic oligonucleotide
auacuuccaugcuguggua

SEQ ID NO: 1914990 - RNA, 19 nt, Artificial Sequence
  Description of Artificial Sequence: Synthetic oligonucleotide
caccagcauucaccaauug

SEQ ID NO: 1914991 - RNA, 19 nt, Artificial Sequence
  Description of Artificial Sequence: Synthetic oligonucleotide
gucuugcuauuguacuuua

SEQ ID NO: 1914992 - RNA, 19 nt, Artificial Sequence
  Description of Artificial Sequence: Synthetic oligonucleotide
uccugcacuucaugauguu

SEQ ID NO: 1914993 - RNA, 19 nt, Artificial Sequence
  Description of Artificial Sequence: Synthetic oligonucleotide
gccgguagccugugguggg

SEQ ID NO: 1914994 - RNA, 19 nt, Artificial Sequence
  Description of Artificial Sequence: Synthetic oligonucleotide
cacuaguagcaccauuccu

SEQ ID NO: 1914995 - RNA, 19 nt, Artificial Sequence
  Description of Artificial Sequence: Synthetic oligonucleotide
gcaccauucacagugugcu

SEQ ID NO: 1914996 - RNA, 19 nt, Artificial Sequence
  Description of Artificial Sequence: Synthetic oligonucleotide
gguugcagcccugcgacuc

SEQ ID NO: 1914997 - RNA, 19 nt, Artificial Sequence
  Description of Artificial Sequence: Synthetic oligonucleotide
agcuucaaccagacucuga

SEQ ID NO: 1914998 - RNA, 19 nt, Artificial Sequence
  Description of Artificial Sequence: Synthetic oligonucleotide
ugcagcccugcgacucugu

SEQ ID NO: 1914999 - RNA, 19 nt, Artificial Sequence
  Description of Artificial Sequence: Synthetic oligonucleotide
cuuggagucuuggaaugua

SEQ ID NO: 1915000 - RNA, 19 nt, Artificial Sequence
  Description of Artificial Sequence: Synthetic oligonucleotide
uugucaccuugaugggauu

SEQ ID NO: 1915001 - RNA, 19 nt, Artificial Sequence
  Description of Artificial Sequence: Synthetic oligonucleotide
ugguugcagcccugcgacu

SEQ ID NO: 1915002 - RNA, 19 nt, Artificial Sequence
  Description of Artificial Sequence: Synthetic oligonucleotide
agugccuguggcagucaug

SEQ ID NO: 1915003 - RNA, 19 nt, Artificial Sequence
  Description of Artificial Sequence: Synthetic oligonucleotide
agucauccccuuggagucu

SEQ ID NO: 1915004 - RNA, 19 nt, Artificial Sequence
  Description of Artificial Sequence: Synthetic oligonucleotide
gguugugauagguaaccuu

SEQ ID NO: 1915005 - RNA, 19 nt, Artificial Sequence
  Description of Artificial Sequence: Synthetic oligonucleotide
uugcagcccugcgacucug

SEQ ID NO: 1915006 - RNA, 19 nt, Artificial Sequence
  Description of Artificial Sequence: Synthetic oligonucleotide
auagggguugcggccucca

SEQ ID NO: 1915007 - RNA, 19 nt, Artificial Sequence
  Description of Artificial Sequence: Synthetic oligonucleotide
ggaagagguugugauaggu

SEQ ID NO: 1915008 - RNA, 19 nt, Artificial Sequence
  Description of Artificial Sequence: Synthetic oligonucleotide
ggauacaaugugaccagcu

SEQ ID NO: 1915009 - RNA, 19 nt, Artificial Sequence
  Description of Artificial Sequence: Synthetic oligonucleotide
ggcuguaggcggaauacaa

SEQ ID NO: 1915010 - RNA, 19 nt, Artificial Sequence
  Description of Artificial Sequence: Synthetic oligonucleotide
cugauucuggcaccucgua

SEQ ID NO: 1915011 - RNA, 19 nt, Artificial Sequence
  Description of Artificial Sequence: Synthetic oligonucleotide
gucaccuugaugggauuua

SEQ ID NO: 1915012 - RNA, 19 nt, Artificial Sequence
  Description of Artificial Sequence: Synthetic oligonucleotide
gugcucugugucagcauuc

SEQ ID NO: 1915013 - RNA, 19 nt, Artificial Sequence
  Description of Artificial Sequence: Synthetic oligonucleotide
ggagcccaugaugggaaug

SEQ ID NO: 1915014 - RNA, 19 nt, Artificial Sequence
  Description of Artificial Sequence: Synthetic oligonucleotide
aacacaccucugggugggu

SEQ ID NO: 1915015 - RNA, 19 nt, Artificial Sequence
  Description of Artificial Sequence: Synthetic oligonucleotide
ggggcggaagucagacugg

SEQ ID NO: 1915016 - RNA, 19 nt, Artificial Sequence
  Description of Artificial Sequence: Synthetic oligonucleotide
ccaugcauggcggccauuc

SEQ ID NO: 1915017 - RNA, 19 nt, Artificial Sequence
  Description of Artificial Sequence: Synthetic oligonucleotide
ggcaccucguaguuggggu

SEQ ID NO: 1915018 - RNA, 19 nt, Artificial Sequence
  Description of Artificial Sequence: Synthetic oligonucleotide
ggcccuucccauguucccc

SEQ ID NO: 1915019 - RNA, 19 nt, Artificial Sequence
  Description of Artificial Sequence: Synthetic oligonucleotide
gcggccauucuuggggcgg

SEQ ID NO: 1915020 - RNA, 19 nt, Artificial Sequence
  Description of Artificial Sequence: Synthetic oligonucleotide
cgguagccaucauagcggc

SEQ ID NO: 1915021 - RNA, 19 nt, Artificial Sequence
  Description of Artificial Sequence: Synthetic oligonucleotide
cuuccugacuguggauaca

SEQ ID NO: 1915022 - RNA, 19 nt, Artificial Sequence
  Description of Artificial Sequence: Synthetic oligonucleotide
cucuacucggccccucaua

SEQ ID NO: 1915023 - RNA, 19 nt, Artificial Sequence
  Description of Artificial Sequence: Synthetic oligonucleotide
cuauccacuggcagucaau

SEQ ID NO: 1915024 - RNA, 19 nt, Artificial Sequence
  Description of Artificial Sequence: Synthetic oligonucleotide
ggcuauaauugcauagaau

SEQ ID NO: 1915025 - RNA, 19 nt, Artificial Sequence
  Description of Artificial Sequence: Synthetic oligonucleotide
gucucuauauuagcaccau

SEQ ID NO: 1915026 - RNA, 19 nt, Artificial Sequence
  Description of Artificial Sequence: Synthetic oligonucleotide
gcuguaggcggaauacaaa

SEQ ID NO: 1915027 - RNA, 19 nt, Artificial Sequence
  Description of Artificial Sequence: Synthetic oligonucleotide
ccuccauucagacgcagcu

SEQ ID NO: 1915028 - RNA, 19 nt, Artificial Sequence
  Description of Artificial Sequence: Synthetic oligonucleotide
ccaugaugggaauguugca

SEQ ID NO: 1915029 - RNA, 19 nt, Artificial Sequence
  Description of Artificial Sequence: Synthetic oligonucleotide
guugcagcccugcgacucu

SEQ ID NO: 1915030 - RNA, 19 nt, Artificial Sequence
  Description of Artificial Sequence: Synthetic oligonucleotide
cauagcggcuccugcacuu

SEQ ID NO: 1915031 - RNA, 19 nt, Artificial Sequence
  Description of Artificial Sequence: Synthetic oligonucleotide
ggugaagggcccuucccau

SEQ ID NO: 1915032 - RNA, 19 nt, Artificial Sequence
  Description of Artificial Sequence: Synthetic oligonucleotide
gccuccauucagacgcagc

SEQ ID NO: 1915033 - RNA, 19 nt, Artificial Sequence
  Description of Artificial Sequence: Synthetic oligonucleotide
ggcggaauacaaagaggaa

SEQ ID NO: 1915034 - RNA, 19 nt, Artificial Sequence
  Description of Artificial Sequence: Synthetic oligonucleotide
agccaucauagcggcuccu

SEQ ID NO: 1915035 - RNA, 19 nt, Artificial Sequence
  Description of Artificial Sequence: Synthetic oligonucleotide
uguggccuucagccaccuu

SEQ ID NO: 1915036 - RNA, 19 nt, Artificial Sequence
  Description of Artificial Sequence: Synthetic oligonucleotide
auucaccaauuggcuuccu

SEQ ID NO: 1915037 - RNA, 19 nt, Artificial Sequence
  Description of Artificial Sequence: Synthetic oligonucleotide
gcgccgguagccuguggug

SEQ ID NO: 1915038 - RNA, 19 nt, Artificial Sequence
  Description of Artificial Sequence: Synthetic oligonucleotide
ggcggaagucagacuggcc

SEQ ID NO: 1915039 - RNA, 19 nt, Artificial Sequence
  Description of Artificial Sequence: Synthetic oligonucleotide
ccuauucugucucuagaau

SEQ ID NO: 1915040 - RNA, 19 nt, Artificial Sequence
  Description of Artificial Sequence: Synthetic oligonucleotide
ggacccauuucucucuguu

SEQ ID NO: 1915041 - RNA, 19 nt, Artificial Sequence
  Description of Artificial Sequence: Synthetic oligonucleotide
uaccucuacucggccccuc

SEQ ID NO: 1915042 - RNA, 19 nt, Artificial Sequence
  Description of Artificial Sequence: Synthetic oligonucleotide
caugcauggcggccauucu

SEQ ID NO: 1915043 - RNA, 19 nt, Artificial Sequence
  Description of Artificial Sequence: Synthetic oligonucleotide
augugaccagcugccggua

SEQ ID NO: 1915044 - RNA, 19 nt, Artificial Sequence
  Description of Artificial Sequence: Synthetic oligonucleotide
cuaacacuaguagcaccau

SEQ ID NO: 1915045 - RNA, 19 nt, Artificial Sequence
  Description of Artificial Sequence: Synthetic oligonucleotide
gcucagcaggucauaguaa

SEQ ID NO: 1915046 - RNA, 19 nt, Artificial Sequence
  Description of Artificial Sequence: Synthetic oligonucleotide
cgggcuguaggcggaauac

SEQ ID NO: 1915047 - RNA, 19 nt, Artificial Sequence
  Description of Artificial Sequence: Synthetic oligonucleotide
ggcgccgguagccuguggu

SEQ ID NO: 1915048 - RNA, 19 nt, Artificial Sequence
  Description of Artificial Sequence: Synthetic oligonucleotide
gggcuguaggcggaauaca

SEQ ID NO: 1915049 - RNA, 19 nt, Artificial Sequence
  Description of Artificial Sequence: Synthetic oligonucleotide
cgugguugcagcccugcga

SEQ ID NO: 1915050 - RNA, 19 nt, Artificial Sequence
  Description of Artificial Sequence: Synthetic oligonucleotide
cgccgguagccuguggugg

SEQ ID NO: 1915051 - RNA, 19 nt, Artificial Sequence
  Description of Artificial Sequence: Synthetic oligonucleotide
agcggcuccugcacuucau

SEQ ID NO: 1915052 - RNA, 19 nt, Artificial Sequence
  Description of Artificial Sequence: Synthetic oligonucleotide
ggccuccauucagacgcag

SEQ ID NO: 1915053 - RNA, 19 nt, Artificial Sequence
  Description of Artificial Sequence: Synthetic oligonucleotide
cccaugauuuucucuuccu

SEQ ID NO: 1915054 - RNA, 19 nt, Artificial Sequence
  Description of Artificial Sequence: Synthetic oligonucleotide
gugugcucugugucagcau

SEQ ID NO: 1915055 - RNA, 19 nt, Artificial Sequence
  Description of Artificial Sequence: Synthetic oligonucleotide
caaugucaugacgguacau

SEQ ID NO: 1915056 - RNA, 19 nt, Artificial Sequence
  Description of Artificial Sequence: Synthetic oligonucleotide
uccaugcauggcggccauu

SEQ ID NO: 1915057 - RNA, 19 nt, Artificial Sequence
  Description of Artificial Sequence: Synthetic oligonucleotide
caucuuccucgugguugca

SEQ ID NO: 1915058 - RNA, 19 nt, Artificial Sequence
  Description of Artificial Sequence: Synthetic oligonucleotide
cccugcgacucuguguuga

SEQ ID NO: 1915059 - RNA, 19 nt, Artificial Sequence
  Description of Artificial Sequence: Synthetic oligonucleotide
ggccccucauagggguugc

SEQ ID NO: 1915060 - RNA, 19 nt, Artificial Sequence
  Description of Artificial Sequence: Synthetic oligonucleotide
ccuugauugucaccuugau

SEQ ID NO: 1915061 - RNA, 19 nt, Artificial Sequence
  Description of Artificial Sequence: Synthetic oligonucleotide
ggguugcggccuccauuca

SEQ ID NO: 1915062 - RNA, 19 nt, Artificial Sequence
  Description of Artificial Sequence: Synthetic oligonucleotide
gccccucauagggguugcg

SEQ ID NO: 1915063 - RNA, 19 nt, Artificial Sequence
  Description of Artificial Sequence: Synthetic oligonucleotide
gucauccccuuggagucuu

SEQ ID NO: 1915064 - RNA, 19 nt, Artificial Sequence
  Description of Artificial Sequence: Synthetic oligonucleotide
guaccucuacucggccccu

SEQ ID NO: 1915065 - RNA, 19 nt, Artificial Sequence
  Description of Artificial Sequence: Synthetic oligonucleotide
gcccugcgacucuguguug

SEQ ID NO: 1915066 - RNA, 19 nt, Artificial Sequence
  Description of Artificial Sequence: Synthetic oligonucleotide
caucucacaccagcaucuu

SEQ ID NO: 1915067 - RNA, 19 nt, Artificial Sequence
  Description of Artificial Sequence: Synthetic oligonucleotide
ccguugaggcucagcaggu

SEQ ID NO: 1915068 - RNA, 19 nt, Artificial Sequence
  Description of Artificial Sequence: Synthetic oligonucleotide
gcaccucguaguugggguu

SEQ ID NO: 1915069 - RNA, 19 nt, Artificial Sequence
  Description of Artificial Sequence: Synthetic oligonucleotide
gguagccaucauagcggcu

SEQ ID NO: 1915070 - RNA, 19 nt, Artificial Sequence
  Description of Artificial Sequence: Synthetic oligonucleotide
ccgggcuguaggcggaaua

SEQ ID NO: 1915071 - RNA, 19 nt, Artificial Sequence
  Description of Artificial Sequence: Synthetic oligonucleotide
cggccccucauagggguug

SEQ ID NO: 1915072 - RNA, 19 nt, Artificial Sequence
  Description of Artificial Sequence: Synthetic oligonucleotide
ggccauucuuggggcggaa

SEQ ID NO: 1915073 - RNA, 19 nt, Artificial Sequence
  Description of Artificial Sequence: Synthetic oligonucleotide
ccucuacucggccccucau

SEQ ID NO: 1915074 - RNA, 19 nt, Artificial Sequence
  Description of Artificial Sequence: Synthetic oligonucleotide
cggccauucuuggggcgga

SEQ ID NO: 1915075 - RNA, 19 nt, Artificial Sequence
  Description of Artificial Sequence: Synthetic oligonucleotide
gccgggcuguaggcggaau

SEQ ID NO: 1915076 - RNA, 19 nt, Artificial Sequence
  Description of Artificial Sequence: Synthetic oligonucleotide
ccucguaguugggguuaau

SEQ ID NO: 1915077 - RNA, 19 nt, Artificial Sequence
  Description of Artificial Sequence: Synthetic oligonucleotide
uaaauagagacaaugaacu

SEQ ID NO: 1915078 - RNA, 19 nt, Artificial Sequence
  Description of Artificial Sequence: Synthetic oligonucleotide
aauagagacaaugaacucg

SEQ ID NO: 1915079 - RNA, 19 nt, Artificial Sequence
  Description of Artificial Sequence: Synthetic oligonucleotide
uuuucaauucucauugugg

SEQ ID NO: 1915080 - RNA, 19 nt, Artificial Sequence
  Description of Artificial Sequence: Synthetic oligonucleotide
aauuugguucacuauguac

SEQ ID NO: 1915081 - RNA, 19 nt, Artificial Sequence
  Description of Artificial Sequence: Synthetic oligonucleotide
uuugugaaggcccagcccg

SEQ ID NO: 1915082 - RNA, 19 nt, Artificial Sequence
  Description of Artificial Sequence: Synthetic oligonucleotide
ucuuccaugaacugcaggg

SEQ ID NO: 1915083 - RNA, 19 nt, Artificial Sequence
  Description of Artificial Sequence: Synthetic oligonucleotide
agaaauugcucucauauug

SEQ ID NO: 1915084 - RNA, 19 nt, Artificial Sequence
  Description of Artificial Sequence: Synthetic oligonucleotide
uugguuacuuucaugauug

SEQ ID NO: 1915085 - RNA, 19 nt, Artificial Sequence
  Description of Artificial Sequence: Synthetic oligonucleotide
ucauauuguacuacgaggu

SEQ ID NO: 1915086 - RNA, 19 nt, Artificial Sequence
  Description of Artificial Sequence: Synthetic oligonucleotide
aaauagagacaaugaacuc

SEQ ID NO: 1915087 - RNA, 19 nt, Artificial Sequence
  Description of Artificial Sequence: Synthetic oligonucleotide
uacgaggugacucagggcc

SEQ ID NO: 1915088 - RNA, 19 nt, Artificial Sequence
  Description of Artificial Sequence: Synthetic oligonucleotide
uucacuauguacagcagag

SEQ ID NO: 1915089 - RNA, 19 nt, Artificial Sequence
  Description of Artificial Sequence: Synthetic oligonucleotide
ugcacaucggaccucaggg

SEQ ID NO: 1915090 - RNA, 19 nt, Artificial Sequence
  Description of Artificial Sequence: Synthetic oligonucleotide
ucaugauugaauuuucgca

SEQ ID NO: 1915091 - RNA, 19 nt, Artificial Sequence
  Description of Artificial Sequence: Synthetic oligonucleotide
cucauauuguacuacgagg

SEQ ID NO: 1915092 - RNA, 19 nt, Artificial Sequence
  Description of Artificial Sequence: Synthetic oligonucleotide
acagaauacacagagaugu

SEQ ID NO: 1915093 - RNA, 19 nt, Artificial Sequence
  Description of Artificial Sequence: Synthetic oligonucleotide
ucucauauuguacuacgag

SEQ ID NO: 1915094 - RNA, 19 nt, Artificial Sequence
  Description of Artificial Sequence: Synthetic oligonucleotide
uuucgcaucagauuuguga

SEQ ID NO: 1915095 - RNA, 19 nt, Artificial Sequence
  Description of Artificial Sequence: Synthetic oligonucleotide
uuucaugauugaauuuucg

SEQ ID NO: 1915096 - RNA, 19 nt, Artificial Sequence
  Description of Artificial Sequence: Synthetic oligonucleotide
uucaugauugaauuuucgc

SEQ ID NO: 1915097 - RNA, 19 nt, Artificial Sequence
  Description of Artificial Sequence: Synthetic oligonucleotide
ucucauugugguaaaauaa

SEQ ID NO: 1915098 - RNA, 19 nt, Artificial Sequence
  Description of Artificial Sequence: Synthetic oligonucleotide
agagacaaugaacucgagg

SEQ ID NO: 1915099 - RNA, 19 nt, Artificial Sequence
  Description of Artificial Sequence: Synthetic oligonucleotide
aucagauuugugaaggccc

SEQ ID NO: 1915100 - RNA, 19 nt, Artificial Sequence
  Description of Artificial Sequence: Synthetic oligonucleotide
acuacgaggugacucaggg

SEQ ID NO: 1915101 - RNA, 19 nt, Artificial Sequence
  Description of Artificial Sequence: Synthetic oligonucleotide
aacugguucauggagccac

SEQ ID NO: 1915102 - RNA, 19 nt, Artificial Sequence
  Description of Artificial Sequence: Synthetic oligonucleotide
ugagcaagaugcaagcucu

SEQ ID NO: 1915103 - RNA, 19 nt, Artificial Sequence
  Description of Artificial Sequence: Synthetic oligonucleotide
uugaauuuucgcaucagau

SEQ ID NO: 1915104 - RNA, 19 nt, Artificial Sequence
  Description of Artificial Sequence: Synthetic oligonucleotide
agagucgaaauucugccag

SEQ ID NO: 1915105 - RNA, 19 nt, Artificial Sequence
  Description of Artificial Sequence: Synthetic oligonucleotide
acagggauagagcuggagg

SEQ ID NO: 1915106 - RNA, 19 nt, Artificial Sequence
  Description of Artificial Sequence: Synthetic oligonucleotide
uuugguucacuauguacag

SEQ ID NO: 1915107 - RNA, 19 nt, Artificial Sequence
  Description of Artificial Sequence: Synthetic oligonucleotide
auguaguagucauugcuuc

SEQ ID NO: 1915108 - RNA, 19 nt, Artificial Sequence
  Description of Artificial Sequence: Synthetic oligonucleotide
cagcccgugagcaagaugc

SEQ ID NO: 1915109 - RNA, 19 nt, Artificial Sequence
  Description of Artificial Sequence: Synthetic oligonucleotide
ucaauucucauugugguaa

SEQ ID NO: 1915110 - RNA, 19 nt, Artificial Sequence
  Description of Artificial Sequence: Synthetic oligonucleotide
uguacuacgaggugacuca

SEQ ID NO: 1915111 - RNA, 19 nt, Artificial Sequence
  Description of Artificial Sequence: Synthetic oligonucleotide
uauuguacuacgaggugac

SEQ ID NO: 1915112 - RNA, 19 nt, Artificial Sequence
  Description of Artificial Sequence: Synthetic oligonucleotide
uagucauugcuuccgacug

SEQ ID NO: 1915113 - RNA, 19 nt, Artificial Sequence
  Description of Artificial Sequence: Synthetic oligonucleotide
aagggaggcggccccaacc

SEQ ID NO: 1915114 - RNA, 19 nt, Artificial Sequence
  Description of Artificial Sequence: Synthetic oligonucleotide
ucuugauguggaugcagcg

SEQ ID NO: 1915115 - RNA, 19 nt, Artificial Sequence
  Description of Artificial Sequence: Synthetic oligonucleotide
augauugaauuuucgcauc

SEQ ID NO: 1915116 - RNA, 19 nt, Artificial Sequence
  Description of Artificial Sequence: Synthetic oligonucleotide
agaaggacgugcaagcccc

SEQ ID NO: 1915117 - RNA, 19 nt, Artificial Sequence
  Description of Artificial Sequence: Synthetic oligonucleotide
uguacauuacagugaagac

SEQ ID NO: 1915118 - RNA, 19 nt, Artificial Sequence
  Description of Artificial Sequence: Synthetic oligonucleotide
ugauugaauuuucgcauca

SEQ ID NO: 1915119 - RNA, 19 nt, Artificial Sequence
  Description of Artificial Sequence: Synthetic oligonucleotide
aacacagcugcacaucgga

SEQ ID NO: 1915120 - RNA, 19 nt, Artificial Sequence
  Description of Artificial Sequence: Synthetic oligonucleotide
uccuuaguuggccauggcc

SEQ ID NO: 1915121 - RNA, 19 nt, Artificial Sequence
  Description of Artificial Sequence: Synthetic oligonucleotide
aguuagacagggauagagc

SEQ ID NO: 1915122 - RNA, 19 nt, Artificial Sequence
  Description of Artificial Sequence: Synthetic oligonucleotide
cuauguacagcagagggug

SEQ ID NO: 1915123 - RNA, 19 nt, Artificial Sequence
  Description of Artificial Sequence: Synthetic oligonucleotide
gauuugugaaggcccagcc

SEQ ID NO: 1915124 - RNA, 19 nt, Artificial Sequence
  Description of Artificial Sequence: Synthetic oligonucleotide
ugucucucaccccacacca

SEQ ID NO: 1915125 - RNA, 19 nt, Artificial Sequence
  Description of Artificial Sequence: Synthetic oligonucleotide
ucggauguucccauaggag

SEQ ID NO: 1915126 - RNA, 19 nt, Artificial Sequence
  Description of Artificial Sequence: Synthetic oligonucleotide
uguaguagucauugcuucc

SEQ ID NO: 1915127 - RNA, 19 nt, Artificial Sequence
  Description of Artificial Sequence: Synthetic oligonucleotide
uucgcaucagauuugugaa

SEQ ID NO: 1915128 - RNA, 19 nt, Artificial Sequence
  Description of Artificial Sequence: Synthetic oligonucleotide
gguucauggagccacaggc

SEQ ID NO: 1915129 - RNA, 19 nt, Artificial Sequence
  Description of Artificial Sequence: Synthetic oligonucleotide
auugaauuuucgcaucaga

SEQ ID NO: 1915130 - RNA, 19 nt, Artificial Sequence
  Description of Artificial Sequence: Synthetic oligonucleotide
uucauggagccacaggcga

SEQ ID NO: 1915131 - RNA, 19 nt, Artificial Sequence
  Description of Artificial Sequence: Synthetic oligonucleotide
uggacuuguacauuacagu

SEQ ID NO: 1915132 - RNA, 19 nt, Artificial Sequence
  Description of Artificial Sequence: Synthetic oligonucleotide
caucauggccacauugugg

SEQ ID NO: 1915133 - RNA, 19 nt, Artificial Sequence
  Description of Artificial Sequence: Synthetic oligonucleotide
cacaccaucucgcagaguc

SEQ ID NO: 1915134 - RNA, 19 nt, Artificial Sequence
  Description of Artificial Sequence: Synthetic oligonucleotide
ugagccuugguuacuuuca

SEQ ID NO: 1915135 - RNA, 19 nt, Artificial Sequence
  Description of Artificial Sequence: Synthetic oligonucleotide
cacaaaaggugccaagggc

SEQ ID NO: 1915136 - RNA, 19 nt, Artificial Sequence
  Description of Artificial Sequence: Synthetic oligonucleotide
gaauuuucgcaucagauuu

SEQ ID NO: 1915137 - RNA, 19 nt, Artificial Sequence
  Description of Artificial Sequence: Synthetic oligonucleotide
acuguagacggcugugaac

SEQ ID NO: 1915138 - RNA, 19 nt, Artificial Sequence
  Description of Artificial Sequence: Synthetic oligonucleotide
uucucauugugguaaaaua

SEQ ID NO: 1915139 - RNA, 19 nt, Artificial Sequence
  Description of Artificial Sequence: Synthetic oligonucleotide
ggacuuguacauuacagug

SEQ ID NO: 1915140 - RNA, 19 nt, Artificial Sequence
  Description of Artificial Sequence: Synthetic oligonucleotide
cuaucugacgcgcuucucc

SEQ ID NO: 1915141 - RNA, 19 nt, Artificial Sequence
  Description of Artificial Sequence: Synthetic oligonucleotide
guaguagucauugcuuccg

SEQ ID NO: 1915142 - RNA, 19 nt, Artificial Sequence
  Description of Artificial Sequence: Synthetic oligonucleotide
uucccauaggagcucacug

SEQ ID NO: 1915143 - RNA, 19 nt, Artificial Sequence
  Description of Artificial Sequence: Synthetic oligonucleotide
ugaacucgaggccagcgcu

SEQ ID NO: 1915144 - RNA, 19 nt, Artificial Sequence
  Description of Artificial Sequence: Synthetic oligonucleotide
agauuugugaaggcccagc

SEQ ID NO: 1915145 - RNA, 19 nt, Artificial Sequence
  Description of Artificial Sequence: Synthetic oligonucleotide
uagcuguggugacagcucg

SEQ ID NO: 1915146 - RNA, 19 nt, Artificial Sequence
  Description of Artificial Sequence: Synthetic oligonucleotide
aaaacagaaccaccaguua

SEQ ID NO: 1915147 - RNA, 19 nt, Artificial Sequence
  Description of Artificial Sequence: Synthetic oligonucleotide
agaguuucccacaaaaggu

SEQ ID NO: 1915148 - RNA, 19 nt, Artificial Sequence
  Description of Artificial Sequence: Synthetic oligonucleotide
auauuguacuacgagguga

SEQ ID NO: 1915149 - RNA, 19 nt, Artificial Sequence
  Description of Artificial Sequence: Synthetic oligonucleotide
ucuggacuuguacauuaca

SEQ ID NO: 1915150 - RNA, 19 nt, Artificial Sequence
  Description of Artificial Sequence: Synthetic oligonucleotide
uuccacuagggaagggagg

SEQ ID NO: 1915151 - RNA, 19 nt, Artificial Sequence
  Description of Artificial Sequence: Synthetic oligonucleotide
aguggucuguucucucagc

SEQ ID NO: 1915152 - RNA, 19 nt, Artificial Sequence
  Description of Artificial Sequence: Synthetic oligonucleotide
gguaaaauaaauagagaca

SEQ ID NO: 1915153 - RNA, 19 nt, Artificial Sequence
  Description of Artificial Sequence: Synthetic oligonucleotide
aucagagguuccuagcugu

SEQ ID NO: 1915154 - RNA, 19 nt, Artificial Sequence
  Description of Artificial Sequence: Synthetic oligonucleotide
uggaugcagcgucaaaccc

SEQ ID NO: 1915155 - RNA, 19 nt, Artificial Sequence
  Description of Artificial Sequence: Synthetic oligonucleotide
agggguuaggcucccuccc

SEQ ID NO: 1915156 - RNA, 19 nt, Artificial Sequence
  Description of Artificial Sequence: Synthetic oligonucleotide
acaaaaggugccaagggca

SEQ ID NO: 1915157 - RNA, 19 nt, Artificial Sequence
  Description of Artificial Sequence: Synthetic oligonucleotide
ucguaguauuugaugcugc

SEQ ID NO: 1915158 - RNA, 19 nt, Artificial Sequence
  Description of Artificial Sequence: Synthetic oligonucleotide
auagagacaaugaacucga

SEQ ID NO: 1915159 - RNA, 19 nt, Artificial Sequence
  Description of Artificial Sequence: Synthetic oligonucleotide
ugguucauggagccacagg

SEQ ID NO: 1915160 - RNA, 19 nt, Artificial Sequence
  Description of Artificial Sequence: Synthetic oligonucleotide
gaucagagguuccuagcug

SEQ ID NO: 1915161 - RNA, 19 nt, Artificial Sequence
  Description of Artificial Sequence: Synthetic oligonucleotide
aagggguaguucuuuuccu

SEQ ID NO: 1915162 - RNA, 19 nt, Artificial Sequence
  Description of Artificial Sequence: Synthetic oligonucleotide
agggaggcggccccaaccc

SEQ ID NO: 1915163 - RNA, 19 nt, Artificial Sequence
  Description of Artificial Sequence: Synthetic oligonucleotide
cccaucauugaucagcugg

SEQ ID NO: 1915164 - RNA, 19 nt, Artificial Sequence
  Description of Artificial Sequence: Synthetic oligonucleotide
uuguggucgauggugguag

SEQ ID NO: 1915165 - RNA, 19 nt, Artificial Sequence
  Description of Artificial Sequence: Synthetic oligonucleotide
aggacgugcaagccccucc

SEQ ID NO: 1915166 - RNA, 19 nt, Artificial Sequence
  Description of Artificial Sequence: Synthetic oligonucleotide
guuagacagggauagagcu

SEQ ID NO: 1915167 - RNA, 19 nt, Artificial Sequence
  Description of Artificial Sequence: Synthetic oligonucleotide
aauuuucgcaucagauuug

SEQ ID NO: 1915168 - RNA, 19 nt, Artificial Sequence
  Description of Artificial Sequence: Synthetic oligonucleotide
gacaaugaacucgaggcca

SEQ ID NO: 1915169 - RNA, 19 nt, Artificial Sequence
  Description of Artificial Sequence: Synthetic oligonucleotide
caucagauuugugaaggcc

SEQ ID NO: 1915170 - RNA, 19 nt, Artificial Sequence
  Description of Artificial Sequence: Synthetic oligonucleotide
cauauuguacuacgaggug

SEQ ID NO: 1915171 - RNA, 19 nt, Artificial Sequence
  Description of Artificial Sequence: Synthetic oligonucleotide
uaucugacgcgcuucucca

SEQ ID NO: 1915172 - RNA, 19 nt, Artificial Sequence
  Description of Artificial Sequence: Synthetic oligonucleotide
cucauugugguaaaauaaa

SEQ ID NO: 1915173 - RNA, 19 nt, Artificial Sequence
  Description of Artificial Sequence: Synthetic oligonucleotide
cauugcuuccgacugccag

SEQ ID NO: 1915174 - RNA, 19 nt, Artificial Sequence
  Description of Artificial Sequence: Synthetic oligonucleotide
ucacuauguacagcagagg

SEQ ID NO: 1915175 - RNA, 19 nt, Artificial Sequence
  Description of Artificial Sequence: Synthetic oligonucleotide
gaaguuccacuagggaagg

SEQ ID NO: 1915176 - RNA, 19 nt, Artificial Sequence
  Description of Artificial Sequence: Synthetic oligonucleotide
agcucugaaguuccacuag

SEQ ID NO: 1915177 - RNA, 19 nt, Artificial Sequence
  Description of Artificial Sequence: Synthetic oligonucleotide
gaagccgucguaguauuug

SEQ ID NO: 1915178 - RNA, 19 nt, Artificial Sequence
  Description of Artificial Sequence: Synthetic oligonucleotide
uacuacgaggugacucagg

SEQ ID NO: 1915179 - RNA, 19 nt, Artificial Sequence
  Description of Artificial Sequence: Synthetic oligonucleotide
gaaggcaagggguaguucu

SEQ ID NO: 1915180 - RNA, 19 nt, Artificial Sequence
  Description of Artificial Sequence: Synthetic oligonucleotide
ucucgcagagucgaaauuc

SEQ ID NO: 1915181 - RNA, 19 nt, Artificial Sequence
  Description of Artificial Sequence: Synthetic oligonucleotide
ucugacgcgcuucuccaca

SEQ ID NO: 1915182 - RNA, 19 nt, Artificial Sequence
  Description of Artificial Sequence: Synthetic oligonucleotide
ucucuugagccuugguuac

SEQ ID NO: 1915183 - RNA, 19 nt, Artificial Sequence
  Description of Artificial Sequence: Synthetic oligonucleotide
cauugugguaaaauaaaua

SEQ ID NO: 1915184 - RNA, 19 nt, Artificial Sequence
  Description of Artificial Sequence: Synthetic oligonucleotide
cauggggcucccaucauug

SEQ ID NO: 1915185 - RNA, 19 nt, Artificial Sequence
  Description of Artificial Sequence: Synthetic oligonucleotide
cagaaggacgugcaagccc

SEQ ID NO: 1915186 - RNA, 19 nt, Artificial Sequence
  Description of Artificial Sequence: Synthetic oligonucleotide
gcucucauauuguacuacg

SEQ ID NO: 1915187 - RNA, 19 nt, Artificial Sequence
  Description of Artificial Sequence: Synthetic oligonucleotide
uuguacuacgaggugacuc

SEQ ID NO: 1915188 - RNA, 19 nt, Artificial Sequence
  Description of Artificial Sequence: Synthetic oligonucleotide
acauuguggucgauggugg

SEQ ID NO: 1915189 - RNA, 19 nt, Artificial Sequence
  Description of Artificial Sequence: Synthetic oligonucleotide
gcagagucgaaauucugcc

SEQ ID NO: 1915190 - RNA, 19 nt, Artificial Sequence
  Description of Artificial Sequence: Synthetic oligonucleotide
aagccgucguaguauuuga

SEQ ID NO: 1915191 - RNA, 19 nt, Artificial Sequence
  Description of Artificial Sequence: Synthetic oligonucleotide
cugccaaaacagaaccacc

SEQ ID NO: 1915192 - RNA, 19 nt, Artificial Sequence
  Description of Artificial Sequence: Synthetic oligonucleotide
uguucucucagcagaguuu

SEQ ID NO: 1915193 - RNA, 19 nt, Artificial Sequence
  Description of Artificial Sequence: Synthetic oligonucleotide
gagauguaguagucauugc

SEQ ID NO: 1915194 - RNA, 19 nt, Artificial Sequence
  Description of Artificial Sequence: Synthetic oligonucleotide
guucacuauguacagcaga

SEQ ID NO: 1915195 - RNA, 19 nt, Artificial Sequence
  Description of Artificial Sequence: Synthetic oligonucleotide
ucgauggugguagaguggu

SEQ ID NO: 1915196 - RNA, 19 nt, Artificial Sequence
  Description of Artificial Sequence: Synthetic oligonucleotide
acagggguuaggcucccuc

SEQ ID NO: 1915197 - RNA, 19 nt, Artificial Sequence
  Description of Artificial Sequence: Synthetic oligonucleotide
ugggcgcugucucucaccc

SEQ ID NO: 1915198 - RNA, 19 nt, Artificial Sequence
  Description of Artificial Sequence: Synthetic oligonucleotide
gaguggucuguucucucag

SEQ ID NO: 1915199 - RNA, 19 nt, Artificial Sequence
  Description of Artificial Sequence: Synthetic oligonucleotide
accaacuccuuccggacca

SEQ ID NO: 1915200 - RNA, 19 nt, Artificial Sequence
  Description of Artificial Sequence: Synthetic oligonucleotide
ucgcaucagauuugugaag

SEQ ID NO: 1915201 - RNA, 19 nt, Artificial Sequence
  Description of Artificial Sequence: Synthetic oligonucleotide
aggugccaagggcaaacac

SEQ ID NO: 1915202 - RNA, 19 nt, Artificial Sequence
  Description of Artificial Sequence: Synthetic oligonucleotide
caugauugaauuuucgcau

SEQ ID NO: 1915203 - RNA, 19 nt, Artificial Sequence
  Description of Artificial Sequence: Synthetic oligonucleotide
ggcaccgcaacccaagcag

SEQ ID NO: 1915204 - RNA, 19 nt, Artificial Sequence
  Description of Artificial Sequence: Synthetic oligonucleotide
ugauguggaugcagcguca

SEQ ID NO: 1915205 - RNA, 19 nt, Artificial Sequence
  Description of Artificial Sequence: Synthetic oligonucleotide
uguggcugcgggagaaggc

SEQ ID NO: 1915206 - RNA, 19 nt, Artificial Sequence
  Description of Artificial Sequence: Synthetic oligonucleotide
aacccaagcagugcaauuu

SEQ ID NO: 1915207 - RNA, 19 nt, Artificial Sequence
  Description of Artificial Sequence: Synthetic oligonucleotide
cugaucagcuccccgcugc

SEQ ID NO: 1915208 - RNA, 19 nt, Artificial Sequence
  Description of Artificial Sequence: Synthetic oligonucleotide
ccgucguaguauuugaugc

SEQ ID NO: 1915209 - RNA, 19 nt, Artificial Sequence
  Description of Artificial Sequence: Synthetic oligonucleotide
cuuccgacugccaggugag

SEQ ID NO: 1915210 - RNA, 19 nt, Artificial Sequence
  Description of Artificial Sequence: Synthetic oligonucleotide
agaguggucuguucucuca

SEQ ID NO: 1915211 - RNA, 19 nt, Artificial Sequence
  Description of Artificial Sequence: Synthetic oligonucleotide
agugcagaaauugcucuca

SEQ ID NO: 1915212 - RNA, 19 nt, Artificial Sequence
  Description of Artificial Sequence: Synthetic oligonucleotide
cugggugccgcuaucugac

SEQ ID NO: 1915213 - RNA, 19 nt, Artificial Sequence
  Description of Artificial Sequence: Synthetic oligonucleotide
auuuucgcaucagauuugu

SEQ ID NO: 1915214 - RNA, 19 nt, Artificial Sequence
  Description of Artificial Sequence: Synthetic oligonucleotide
caucggaccucagggaugg

SEQ ID NO: 1915215 - RNA, 19 nt, Artificial Sequence
  Description of Artificial Sequence: Synthetic oligonucleotide
aggguugcaggguggguag

SEQ ID NO: 1915216 - RNA, 19 nt, Artificial Sequence
  Description of Artificial Sequence: Synthetic oligonucleotide
guaguauuugaugcugcug

SEQ ID NO: 1915217 - RNA, 19 nt, Artificial Sequence
  Description of Artificial Sequence: Synthetic oligonucleotide
gucguaguauuugaugcug

SEQ ID NO: 1915218 - RNA, 19 nt, Artificial Sequence
  Description of Artificial Sequence: Synthetic oligonucleotide
ucagacggcccugugcugc

SEQ ID NO: 1915219 - RNA, 19 nt, Artificial Sequence
  Description of Artificial Sequence: Synthetic oligonucleotide
cugucucucaccccacacc

SEQ ID NO: 1915220 - RNA, 19 nt, Artificial Sequence
  Description of Artificial Sequence: Synthetic oligonucleotide
uuuucgcaucagauuugug

SEQ ID NO: 1915221 - RNA, 19 nt, Artificial Sequence
  Description of Artificial Sequence: Synthetic oligonucleotide
gaccauggggcucccauca

SEQ ID NO: 1915222 - RNA, 19 nt, Artificial Sequence
  Description of Artificial Sequence: Synthetic oligonucleotide
ggucgauggugguagagug

SEQ ID NO: 1915223 - RNA, 19 nt, Artificial Sequence
  Description of Artificial Sequence: Synthetic oligonucleotide
gaggccagcgcucucuuga

SEQ ID NO: 1915224 - RNA, 19 nt, Artificial Sequence
  Description of Artificial Sequence: Synthetic oligonucleotide
acccaagcagugcaauuug

SEQ ID NO: 1915225 - RNA, 19 nt, Artificial Sequence
  Description of Artificial Sequence: Synthetic oligonucleotide
acuauguacagcagagggu

SEQ ID NO: 1915226 - RNA, 19 nt, Artificial Sequence
  Description of Artificial Sequence: Synthetic oligonucleotide
cuagcuguggugacagcuc

SEQ ID NO: 1915227 - RNA, 19 nt, Artificial Sequence
  Description of Artificial Sequence: Synthetic oligonucleotide
gacggcugugaacugguuc

SEQ ID NO: 1915228 - RNA, 19 nt, Artificial Sequence
  Description of Artificial Sequence: Synthetic oligonucleotide
uagagacaaugaacucgag

SEQ ID NO: 1915229 - RNA, 19 nt, Artificial Sequence
  Description of Artificial Sequence: Synthetic oligonucleotide
ugcugaucagcuccccgcu

SEQ ID NO: 1915230 - RNA, 19 nt, Artificial Sequence
  Description of Artificial Sequence: Synthetic oligonucleotide
agaugcaagcucugaaguu

SEQ ID NO: 1915231 - RNA, 19 nt, Artificial Sequence
  Description of Artificial Sequence: Synthetic oligonucleotide
agggauagagcuggagguc

SEQ ID NO: 1915232 - RNA, 19 nt, Artificial Sequence
  Description of Artificial Sequence: Synthetic oligonucleotide
gugguaaaauaaauagaga

SEQ ID NO: 1915233 - RNA, 19 nt, Artificial Sequence
  Description of Artificial Sequence: Synthetic oligonucleotide
uggcccaugaagccgucgu

SEQ ID NO: 1915234 - RNA, 19 nt, Artificial Sequence
  Description of Artificial Sequence: Synthetic oligonucleotide
ucgcagagucgaaauucug

SEQ ID NO: 1915235 - RNA, 19 nt, Artificial Sequence
  Description of Artificial Sequence: Synthetic oligonucleotide
ugcaugggcugucucgcac

SEQ ID NO: 1915236 - RNA, 19 nt, Artificial Sequence
  Description of Artificial Sequence: Synthetic oligonucleotide
ugaucagcuccccgcugcc

SEQ ID NO: 1915237 - RNA, 19 nt, Artificial Sequence
  Description of Artificial Sequence: Synthetic oligonucleotide
acacagagauguaguaguc

SEQ ID NO: 1915238 - RNA, 19 nt, Artificial Sequence
  Description of Artificial Sequence: Synthetic oligonucleotide
aucugacgcgcuucuccac

SEQ ID NO: 1915239 - RNA, 19 nt, Artificial Sequence
  Description of Artificial Sequence: Synthetic oligonucleotide
ugcucucauauuguacuac

SEQ ID NO: 1915240 - RNA, 19 nt, Artificial Sequence
  Description of Artificial Sequence: Synthetic oligonucleotide
uccgacugccaggugaggc

SEQ ID NO: 1915241 - RNA, 19 nt, Artificial Sequence
  Description of Artificial Sequence: Synthetic oligonucleotide
cagggguuaggcucccucc

SEQ ID NO: 1915242 - RNA, 19 nt, Artificial Sequence
  Description of Artificial Sequence: Synthetic oligonucleotide
acuagggaagggaggcggc

SEQ ID NO: 1915243 - RNA, 19 nt, Artificial Sequence
  Description of Artificial Sequence: Synthetic oligonucleotide
uucucgugggcgcugucuc

SEQ ID NO: 1915244 - RNA, 19 nt, Artificial Sequence
  Description of Artificial Sequence: Synthetic oligonucleotide
guagucauugcuuccgacu

SEQ ID NO: 1915245 - RNA, 19 nt, Artificial Sequence
  Description of Artificial Sequence: Synthetic oligonucleotide
cuacgaggugacucagggc

SEQ ID NO: 1915246 - RNA, 19 nt, Artificial Sequence
  Description of Artificial Sequence: Synthetic oligonucleotide
agugcggguggaaagccag

SEQ ID NO: 1915247 - RNA, 19 nt, Artificial Sequence
  Description of Artificial Sequence: Synthetic oligonucleotide
cacugagcggagucugggg

SEQ ID NO: 1915248 - RNA, 19 nt, Artificial Sequence
  Description of Artificial Sequence: Synthetic oligonucleotide
cucucauauuguacuacga

SEQ ID NO: 1915249 - RNA, 19 nt, Artificial Sequence
  Description of Artificial Sequence: Synthetic oligonucleotide
agcgucaaacccuccccug

SEQ ID NO: 1915250 - RNA, 19 nt, Artificial Sequence
  Description of Artificial Sequence: Synthetic oligonucleotide
ggugccgcuaucugacgcg

SEQ ID NO: 1915251 - RNA, 19 nt, Artificial Sequence
  Description of Artificial Sequence: Synthetic oligonucleotide
ccuuaguuggccauggcca

SEQ ID NO: 1915252 - RNA, 19 nt, Artificial Sequence
  Description of Artificial Sequence: Synthetic oligonucleotide
gucgauggugguagagugg

SEQ ID NO: 1915253 - RNA, 19 nt, Artificial Sequence
  Description of Artificial Sequence: Synthetic oligonucleotide
uggucgauggugguagagu

SEQ ID NO: 1915254 - RNA, 19 nt, Artificial Sequence
  Description of Artificial Sequence: Synthetic oligonucleotide
ugcaagccccuccuuaguu

SEQ ID NO: 1915255 - RNA, 19 nt, Artificial Sequence
  Description of Artificial Sequence: Synthetic oligonucleotide
ugcggguggaaagccaggc

SEQ ID NO: 1915256 - RNA, 19 nt, Artificial Sequence
  Description of Artificial Sequence: Synthetic oligonucleotide
ugcagaaauugcucucaua

SEQ ID NO: 1915257 - RNA, 19 nt, Artificial Sequence
  Description of Artificial Sequence: Synthetic oligonucleotide
uggggcucccaucauugau

SEQ ID NO: 1915258 - RNA, 19 nt, Artificial Sequence
  Description of Artificial Sequence: Synthetic oligonucleotide
gggugcaugggcugucucg

SEQ ID NO: 1915259 - RNA, 19 nt, Artificial Sequence
  Description of Artificial Sequence: Synthetic oligonucleotide
ggcgaucagagguuccuag

SEQ ID NO: 1915260 - RNA, 19 nt, Artificial Sequence
  Description of Artificial Sequence: Synthetic oligonucleotide
uugcucucauauuguacua

SEQ ID NO: 1915261 - RNA, 19 nt, Artificial Sequence
  Description of Artificial Sequence: Synthetic oligonucleotide
gccagcgcucucuugagcc

SEQ ID NO: 1915262 - RNA, 19 nt, Artificial Sequence
  Description of Artificial Sequence: Synthetic oligonucleotide
gagucgaaauucugccaga

SEQ ID NO: 1915263 - RNA, 19 nt, Artificial Sequence
  Description of Artificial Sequence: Synthetic oligonucleotide
caugggcugucucgcacag

SEQ ID NO: 1915264 - RNA, 19 nt, Artificial Sequence
  Description of Artificial Sequence: Synthetic oligonucleotide
ugguuacuuucaugauuga

SEQ ID NO: 1915265 - RNA, 19 nt, Artificial Sequence
  Description of Artificial Sequence: Synthetic oligonucleotide
cuguagacggcugugaacu

SEQ ID NO: 1915266 - RNA, 19 nt, Artificial Sequence
  Description of Artificial Sequence: Synthetic oligonucleotide
ugggcaccgcaacccaagc

SEQ ID NO: 1915267 - RNA, 19 nt, Artificial Sequence
  Description of Artificial Sequence: Synthetic oligonucleotide
gccgucguaguauuugaug

SEQ ID NO: 1915268 - RNA, 19 nt, Artificial Sequence
  Description of Artificial Sequence: Synthetic oligonucleotide
uuccggaccauggggcucc

SEQ ID NO: 1915269 - RNA, 19 nt, Artificial Sequence
  Description of Artificial Sequence: Synthetic oligonucleotide
caccaacuccuuccggacc

SEQ ID NO: 1915270 - RNA, 19 nt, Artificial Sequence
  Description of Artificial Sequence: Synthetic oligonucleotide
gguagaguggucuguucuc

SEQ ID NO: 1915271 - RNA, 19 nt, Artificial Sequence
  Description of Artificial Sequence: Synthetic oligonucleotide
cuucagacggcccugugcu

SEQ ID NO: 1915272 - RNA, 19 nt, Artificial Sequence
  Description of Artificial Sequence: Synthetic oligonucleotide
cccgugagcaagaugcaag

SEQ ID NO: 1915273 - RNA, 19 nt, Artificial Sequence
  Description of Artificial Sequence: Synthetic oligonucleotide
ugggugccgcuaucugacg

SEQ ID NO: 1915274 - RNA, 19 nt, Artificial Sequence
  Description of Artificial Sequence: Synthetic oligonucleotide
augaagccgucguaguauu

SEQ ID NO: 1915275 - RNA, 19 nt, Artificial Sequence
  Description of Artificial Sequence: Synthetic oligonucleotide
agucgaaauucugccagau

SEQ ID NO: 1915276 - RNA, 19 nt, Artificial Sequence
  Description of Artificial Sequence: Synthetic oligonucleotide
cagggauagagcuggaggu

SEQ ID NO: 1915277 - RNA, 19 nt, Artificial Sequence
  Description of Artificial Sequence: Synthetic oligonucleotide
cugacgcgcuucuccacag

SEQ ID NO: 1915278 - RNA, 19 nt, Artificial Sequence
  Description of Artificial Sequence: Synthetic oligonucleotide
aacccuucagacggcccug

SEQ ID NO: 1915279 - RNA, 19 nt, Artificial Sequence
  Description of Artificial Sequence: Synthetic oligonucleotide
aagccccuccuuaguuggc

SEQ ID NO: 1915280 - RNA, 19 nt, Artificial Sequence
  Description of Artificial Sequence: Synthetic oligonucleotide
caccgcaacccaagcagug

SEQ ID NO: 1915281 - RNA, 19 nt, Artificial Sequence
  Description of Artificial Sequence: Synthetic oligonucleotide
gguagguaggugggcaccg

SEQ ID NO: 1915282 - RNA, 19 nt, Artificial Sequence
  Description of Artificial Sequence: Synthetic oligonucleotide
acaccaucucgcagagucg

SEQ ID NO: 1915283 - RNA, 19 nt, Artificial Sequence
  Description of Artificial Sequence: Synthetic oligonucleotide
uggagguccuuggugccug

SEQ ID NO: 1915284 - RNA, 19 nt, Artificial Sequence
  Description of Artificial Sequence: Synthetic oligonucleotide
ggccccaacccuucagacg

SEQ ID NO: 1915285 - RNA, 19 nt, Artificial Sequence
  Description of Artificial Sequence: Synthetic oligonucleotide
caaacccuccccugcucug

SEQ ID NO: 1915286 - RNA, 19 nt, Artificial Sequence
  Description of Artificial Sequence: Synthetic oligonucleotide
gcuuccgacugccagguga

SEQ ID NO: 1915287 - RNA, 19 nt, Artificial Sequence
  Description of Artificial Sequence: Synthetic oligonucleotide
guacuacgaggugacucag

SEQ ID NO: 1915288 - RNA, 19 nt, Artificial Sequence
  Description of Artificial Sequence: Synthetic oligonucleotide
auggccacgucaggagccg

SEQ ID NO: 1915289 - RNA, 19 nt, Artificial Sequence
  Description of Artificial Sequence: Synthetic oligonucleotide
gcaucagauuugugaaggc

SEQ ID NO: 1915290 - RNA, 19 nt, Artificial Sequence
  Description of Artificial Sequence: Synthetic oligonucleotide
gcagcgucaaacccucccc

SEQ ID NO: 1915291 - RNA, 19 nt, Artificial Sequence
  Description of Artificial Sequence: Synthetic oligonucleotide
ggugcaugggcugucucgc

SEQ ID NO: 1915292 - RNA, 19 nt, Artificial Sequence
  Description of Artificial Sequence: Synthetic oligonucleotide
aucucgcagagucgaaauu

SEQ ID NO: 1915293 - RNA, 19 nt, Artificial Sequence
  Description of Artificial Sequence: Synthetic oligonucleotide
gccacaggcgaucagaggu

SEQ ID NO: 1915294 - RNA, 19 nt, Artificial Sequence
  Description of Artificial Sequence: Synthetic oligonucleotide
uguggucgauggugguaga

SEQ ID NO: 1915295 - RNA, 19 nt, Artificial Sequence
  Description of Artificial Sequence: Synthetic oligonucleotide
gcaagccccuccuuaguug

SEQ ID NO: 1915296 - RNA, 19 nt, Artificial Sequence
  Description of Artificial Sequence: Synthetic oligonucleotide
ucucgugggcgcugucucu

SEQ ID NO: 1915297 - RNA, 19 nt, Artificial Sequence
  Description of Artificial Sequence: Synthetic oligonucleotide
ggcgcugucucucacccca

SEQ ID NO: 1915298 - RNA, 19 nt, Artificial Sequence
  Description of Artificial Sequence: Synthetic oligonucleotide
uggugguagaguggucugu

SEQ ID NO: 1915299 - RNA, 19 nt, Artificial Sequence
  Description of Artificial Sequence: Synthetic oligonucleotide
acgugcaagccccuccuua

SEQ ID NO: 1915300 - RNA, 19 nt, Artificial Sequence
  Description of Artificial Sequence: Synthetic oligonucleotide
ugaagccgucguaguauuu

SEQ ID NO: 1915301 - RNA, 19 nt, Artificial Sequence
  Description of Artificial Sequence: Synthetic oligonucleotide
agcugcacaucggaccuca

SEQ ID NO: 1915302 - RNA, 19 nt, Artificial Sequence
  Description of Artificial Sequence: Synthetic oligonucleotide
gcgaucagagguuccuagc

SEQ ID NO: 1915303 - RNA, 19 nt, Artificial Sequence
  Description of Artificial Sequence: Synthetic oligonucleotide
ugacgcgcuucuccacaga

SEQ ID NO: 1915304 - RNA, 19 nt, Artificial Sequence
  Description of Artificial Sequence: Synthetic oligonucleotide
ccuucagacggcccugugc

SEQ ID NO: 1915305 - RNA, 19 nt, Artificial Sequence
  Description of Artificial Sequence: Synthetic oligonucleotide
acaucggaccucagggaug

SEQ ID NO: 1915306 - RNA, 19 nt, Artificial Sequence
  Description of Artificial Sequence: Synthetic oligonucleotide
cagauuugugaaggcccag

SEQ ID NO: 1915307 - RNA, 19 nt, Artificial Sequence
  Description of Artificial Sequence: Synthetic oligonucleotide
ugucucgcacagggguuag

SEQ ID NO: 1915308 - RNA, 19 nt, Artificial Sequence
  Description of Artificial Sequence: Synthetic oligonucleotide
caaugaacucgaggccagc

SEQ ID NO: 1915309 - RNA, 19 nt, Artificial Sequence
  Description of Artificial Sequence: Synthetic oligonucleotide
gaggguugcagggugggua

SEQ ID NO: 1915310 - RNA, 19 nt, Artificial Sequence
  Description of Artificial Sequence: Synthetic oligonucleotide
gugggcaccgcaacccaag

SEQ ID NO: 1915311 - RNA, 19 nt, Artificial Sequence
  Description of Artificial Sequence: Synthetic oligonucleotide
auuguacuacgaggugacu

SEQ ID NO: 1915312 - RNA, 19 nt, Artificial Sequence
  Description of Artificial Sequence: Synthetic oligonucleotide
gauguggaugcagcgucaa

SEQ ID NO: 1915313 - RNA, 19 nt, Artificial Sequence
  Description of Artificial Sequence: Synthetic oligonucleotide
caauucucauugugguaaa

SEQ ID NO: 1915314 - RNA, 19 nt, Artificial Sequence
  Description of Artificial Sequence: Synthetic oligonucleotide
acgucaggagccgaggguu

SEQ ID NO: 1915315 - RNA, 19 nt, Artificial Sequence
  Description of Artificial Sequence: Synthetic oligonucleotide
gugguagaguggucuguuc

SEQ ID NO: 1915316 - RNA, 19 nt, Artificial Sequence
  Description of Artificial Sequence: Synthetic oligonucleotide
cuccuuaguuggccauggc

SEQ ID NO: 1915317 - RNA, 19 nt, Artificial Sequence
  Description of Artificial Sequence: Synthetic oligonucleotide
cugguucauggagccacag

SEQ ID NO: 1915318 - RNA, 19 nt, Artificial Sequence
  Description of Artificial Sequence: Synthetic oligonucleotide
gugggcgcugucucucacc

SEQ ID NO: 1915319 - RNA, 19 nt, Artificial Sequence
  Description of Artificial Sequence: Synthetic oligonucleotide
gcgucaaacccuccccugc

SEQ ID NO: 1915320 - RNA, 19 nt, Artificial Sequence
  Description of Artificial Sequence: Synthetic oligonucleotide
ggccagugcggguggaaag

SEQ ID NO: 1915321 - RNA, 19 nt, Artificial Sequence
  Description of Artificial Sequence: Synthetic oligonucleotide
gucaaacccuccccugcuc

SEQ ID NO: 1915322 - RNA, 19 nt, Artificial Sequence
  Description of Artificial Sequence: Synthetic oligonucleotide
gcccaugaagccgucguag

SEQ ID NO: 1915323 - RNA, 19 nt, Artificial Sequence
  Description of Artificial Sequence: Synthetic oligonucleotide
cucgcagagucgaaauucu

SEQ ID NO: 1915324 - RNA, 19 nt, Artificial Sequence
  Description of Artificial Sequence: Synthetic oligonucleotide
gaagggaggcggccccaac

SEQ ID NO: 1915325 - RNA, 19 nt, Artificial Sequence
  Description of Artificial Sequence: Synthetic oligonucleotide
gcaagggguaguucuuuuc

SEQ ID NO: 1915326 - RNA, 19 nt, Artificial Sequence
  Description of Artificial Sequence: Synthetic oligonucleotide
caccaucucgcagagucga

SEQ ID NO: 1915327 - RNA, 19 nt, Artificial Sequence
  Description of Artificial Sequence: Synthetic oligonucleotide
gaacucgaggccagcgcuc

SEQ ID NO: 1915328 - RNA, 19 nt, Artificial Sequence
  Description of Artificial Sequence: Synthetic oligonucleotide
gggugccgcuaucugacgc

SEQ ID NO: 1915329 - RNA, 19 nt, Artificial Sequence
  Description of Artificial Sequence: Synthetic oligonucleotide
uuccgacugccaggugagg

SEQ ID NO: 1915330 - RNA, 19 nt, Artificial Sequence
  Description of Artificial Sequence: Synthetic oligonucleotide
ccgacugccaggugaggcc

SEQ ID NO: 1915331 - RNA, 19 nt, Artificial Sequence
  Description of Artificial Sequence: Synthetic oligonucleotide
caccaguuagacagggaua

SEQ ID NO: 1915332 - RNA, 19 nt, Artificial Sequence
  Description of Artificial Sequence: Synthetic oligonucleotide
guagguaggugggcaccgc

SEQ ID NO: 1915333 - RNA, 19 nt, Artificial Sequence
  Description of Artificial Sequence: Synthetic oligonucleotide
gcucuggacuuguacauua

SEQ ID NO: 1915334 - RNA, 19 nt, Artificial Sequence
  Description of Artificial Sequence: Synthetic oligonucleotide
ucgugggcgcugucucuca

SEQ ID NO: 1915335 - RNA, 19 nt, Artificial Sequence
  Description of Artificial Sequence: Synthetic oligonucleotide
cugccacuguagacggcug

SEQ ID NO: 1915336 - RNA, 19 nt, Artificial Sequence
  Description of Artificial Sequence: Synthetic oligonucleotide
cgugcaagccccuccuuag

SEQ ID NO: 1915337 - RNA, 19 nt, Artificial Sequence
  Description of Artificial Sequence: Synthetic oligonucleotide
caugaagccgucguaguau

SEQ ID NO: 1915338 - RNA, 19 nt, Artificial Sequence
  Description of Artificial Sequence: Synthetic oligonucleotide
ccuccuuaguuggccaugg

SEQ ID NO: 1915339 - RNA, 19 nt, Artificial Sequence
  Description of Artificial Sequence: Synthetic oligonucleotide
ugccgcuaucugacgcgcu

SEQ ID NO: 1915340 - RNA, 19 nt, Artificial Sequence
  Description of Artificial Sequence: Synthetic oligonucleotide
ugcugcugaucagcucccc

SEQ ID NO: 1915341 - RNA, 19 nt, Artificial Sequence
  Description of Artificial Sequence: Synthetic oligonucleotide
gugcaauuugguucacuau

SEQ ID NO: 1915342 - RNA, 19 nt, Artificial Sequence
  Description of Artificial Sequence: Synthetic oligonucleotide
ugcagcccggcagggaguc

SEQ ID NO: 1915343 - RNA, 19 nt, Artificial Sequence
  Description of Artificial Sequence: Synthetic oligonucleotide
uccccugcucuggacuugu

SEQ ID NO: 1915344 - RNA, 19 nt, Artificial Sequence
  Description of Artificial Sequence: Synthetic oligonucleotide
gugcggguggaaagccagg

SEQ ID NO: 1915345 - RNA, 19 nt, Artificial Sequence
  Description of Artificial Sequence: Synthetic oligonucleotide
caucucgcagagucgaaau

SEQ ID NO: 1915346 - RNA, 19 nt, Artificial Sequence
  Description of Artificial Sequence: Synthetic oligonucleotide
gugccgcuaucugacgcgc

SEQ ID NO: 1915347 - RNA, 19 nt, Artificial Sequence
  Description of Artificial Sequence: Synthetic oligonucleotide
caacccuucagacggcccu

SEQ ID NO: 1915348 - RNA, 19 nt, Artificial Sequence
  Description of Artificial Sequence: Synthetic oligonucleotide
cucgugggcgcugucucuc

SEQ ID NO: 1915349 - RNA, 19 nt, Artificial Sequence
  Description of Artificial Sequence: Synthetic oligonucleotide
ccacgucaggagccgaggg

SEQ ID NO: 1915350 - RNA, 19 nt, Artificial Sequence
  Description of Artificial Sequence: Synthetic oligonucleotide
ggcugucucgcacaggggu

SEQ ID NO: 1915351 - RNA, 19 nt, Artificial Sequence
  Description of Artificial Sequence: Synthetic oligonucleotide
cagaaauugcucucauauu

SEQ ID NO: 1915352 - RNA, 19 nt, Artificial Sequence
  Description of Artificial Sequence: Synthetic oligonucleotide
ggugacucagggccaccac

SEQ ID NO: 1915353 - RNA, 19 nt, Artificial Sequence
  Description of Artificial Sequence: Synthetic oligonucleotide
gggguaguucuuuuccucu

SEQ ID NO: 1915354 - RNA, 19 nt, Artificial Sequence
  Description of Artificial Sequence: Synthetic oligonucleotide
ugcuuccgacugccaggug

SEQ ID NO: 1915355 - RNA, 19 nt, Artificial Sequence
  Description of Artificial Sequence: Synthetic oligonucleotide
ccgcugccacuguagacgg

SEQ ID NO: 1915356 - RNA, 19 nt, Artificial Sequence
  Description of Artificial Sequence: Synthetic oligonucleotide
ggguagguaggugggcacc

SEQ ID NO: 1915357 - RNA, 19 nt, Artificial Sequence
  Description of Artificial Sequence: Synthetic oligonucleotide
ucgaggccagcgcucucuu

SEQ ID NO: 1915358 - RNA, 19 nt, Artificial Sequence
  Description of Artificial Sequence: Synthetic oligonucleotide
caccccacaccaucucgca

SEQ ID NO: 1915359 - RNA, 19 nt, Artificial Sequence
  Description of Artificial Sequence: Synthetic oligonucleotide
ccaaaacagaaccaccagu

SEQ ID NO: 1915360 - RNA, 19 nt, Artificial Sequence
  Description of Artificial Sequence: Synthetic oligonucleotide
cuguucucucagcagaguu

SEQ ID NO: 1915361 - RNA, 19 nt, Artificial Sequence
  Description of Artificial Sequence: Synthetic oligonucleotide
gcugaucagcuccccgcug

SEQ ID NO: 1915362 - RNA, 19 nt, Artificial Sequence
  Description of Artificial Sequence: Synthetic oligonucleotide
ggcccugugcugccaaaac

SEQ ID NO: 1915363 - RNA, 19 nt, Artificial Sequence
  Description of Artificial Sequence: Synthetic oligonucleotide
ccaacccuucagacggccc

SEQ ID NO: 1915364 - RNA, 19 nt, Artificial Sequence
  Description of Artificial Sequence: Synthetic oligonucleotide
cagugcggguggaaagcca

SEQ ID NO: 1915365 - RNA, 19 nt, Artificial Sequence
  Description of Artificial Sequence: Synthetic oligonucleotide
ggaugcagcgucaaacccu

SEQ ID NO: 1915366 - RNA, 19 nt, Artificial Sequence
  Description of Artificial Sequence: Synthetic oligonucleotide
cucuggcccaugaagccgu

SEQ ID NO: 1915367 - RNA, 19 nt, Artificial Sequence
  Description of Artificial Sequence: Synthetic oligonucleotide
gccacuguagacggcugug

SEQ ID NO: 1915368 - RNA, 19 nt, Artificial Sequence
  Description of Artificial Sequence: Synthetic oligonucleotide
gcaugggcugucucgcaca

SEQ ID NO: 1915369 - RNA, 19 nt, Artificial Sequence
  Description of Artificial Sequence: Synthetic oligonucleotide
ggaccauggggcucccauc

SEQ ID NO: 1915370 - RNA, 19 nt, Artificial Sequence
  Description of Artificial Sequence: Synthetic oligonucleotide
ccagugcggguggaaagcc

SEQ ID NO: 1915371 - RNA, 19 nt, Artificial Sequence
  Description of Artificial Sequence: Synthetic oligonucleotide
aggccagugcggguggaaa

SEQ ID NO: 1915372 - RNA, 19 nt, Artificial Sequence
  Description of Artificial Sequence: Synthetic oligonucleotide
gugcaugggcugucucgca

SEQ ID NO: 1915373 - RNA, 19 nt, Artificial Sequence
  Description of Artificial Sequence: Synthetic oligonucleotide
gacggcccugugcugccaa

SEQ ID NO: 1915374 - RNA, 19 nt, Artificial Sequence
  Description of Artificial Sequence: Synthetic oligonucleotide
agccgucguaguauuugau

SEQ ID NO: 1915375 - RNA, 19 nt, Artificial Sequence
  Description of Artificial Sequence: Synthetic oligonucleotide
ggcggccccaacccuucag

SEQ ID NO: 1915376 - RNA, 19 nt, Artificial Sequence
  Description of Artificial Sequence: Synthetic oligonucleotide
ccaccaguuagacagggau

SEQ ID NO: 1915377 - RNA, 19 nt, Artificial Sequence
  Description of Artificial Sequence: Synthetic oligonucleotide
cacgucaggagccgagggu

SEQ ID NO: 1915378 - RNA, 19 nt, Artificial Sequence
  Description of Artificial Sequence: Synthetic oligonucleotide
guugcaggguggguaggua

SEQ ID NO: 1915379 - RNA, 19 nt, Artificial Sequence
  Description of Artificial Sequence: Synthetic oligonucleotide
gggcaccgcaacccaagca

SEQ ID NO: 1915380 - RNA, 19 nt, Artificial Sequence
  Description of Artificial Sequence: Synthetic oligonucleotide
ccacuagggaagggaggcg

SEQ ID NO: 1915381 - RNA, 19 nt, Artificial Sequence
  Description of Artificial Sequence: Synthetic oligonucleotide
agcccgugagcaagaugca

SEQ ID NO: 1915382 - RNA, 19 nt, Artificial Sequence
  Description of Artificial Sequence: Synthetic oligonucleotide
aggcccagcccgugagcaa

SEQ ID NO: 1915383 - RNA, 19 nt, Artificial Sequence
  Description of Artificial Sequence: Synthetic oligonucleotide
cagcgucaaacccuccccu

SEQ ID NO: 1915384 - RNA, 19 nt, Artificial Sequence
  Description of Artificial Sequence: Synthetic oligonucleotide
ggcucccaucauugaucag

SEQ ID NO: 1915385 - RNA, 19 nt, Artificial Sequence
  Description of Artificial Sequence: Synthetic oligonucleotide
ggccacgucaggagccgag

SEQ ID NO: 1915386 - RNA, 19 nt, Artificial Sequence
  Description of Artificial Sequence: Synthetic oligonucleotide
acgcgcuucuccacagaau

SEQ ID NO: 1915387 - RNA, 19 nt, Artificial Sequence
  Description of Artificial Sequence: Synthetic oligonucleotide
aggcgaucagagguuccua

SEQ ID NO: 1915388 - RNA, 19 nt, Artificial Sequence
  Description of Artificial Sequence: Synthetic oligonucleotide
cuucucgugggcgcugucu

SEQ ID NO: 1915389 - RNA, 19 nt, Artificial Sequence
  Description of Artificial Sequence: Synthetic oligonucleotide
uggccacgucaggagccga

SEQ ID NO: 1915390 - RNA, 19 nt, Artificial Sequence
  Description of Artificial Sequence: Synthetic oligonucleotide
ccgaggguugcaggguggg

SEQ ID NO: 1915391 - RNA, 19 nt, Artificial Sequence
  Description of Artificial Sequence: Synthetic oligonucleotide
caacccaagcagugcaauu

SEQ ID NO: 1915392 - RNA, 19 nt, Artificial Sequence
  Description of Artificial Sequence: Synthetic oligonucleotide
ggacgugcaagccccuccu

SEQ ID NO: 1915393 - RNA, 19 nt, Artificial Sequence
  Description of Artificial Sequence: Synthetic oligonucleotide
gcggccccaacccuucaga

SEQ ID NO: 1915394 - RNA, 19 nt, Artificial Sequence
  Description of Artificial Sequence: Synthetic oligonucleotide
gcgcuucuccacagaauac

SEQ ID NO: 1915395 - RNA, 19 nt, Artificial Sequence
  Description of Artificial Sequence: Synthetic oligonucleotide
accaucucgcagagucgaa

SEQ ID NO: 1915396 - RNA, 19 nt, Artificial Sequence
  Description of Artificial Sequence: Synthetic oligonucleotide
ccgcaacccaagcagugca

SEQ ID NO: 1915397 - RNA, 19 nt, Artificial Sequence
  Description of Artificial Sequence: Synthetic oligonucleotide
gaggccagugcggguggaa

SEQ ID NO: 1915398 - RNA, 19 nt, Artificial Sequence
  Description of Artificial Sequence: Synthetic oligonucleotide
ccaugaagccgucguagua

SEQ ID NO: 1915399 - RNA, 19 nt, Artificial Sequence
  Description of Artificial Sequence: Synthetic oligonucleotide
ccagcccgugagcaagaug

SEQ ID NO: 1915400 - RNA, 19 nt, Artificial Sequence
  Description of Artificial Sequence: Synthetic oligonucleotide
cagcagaguuucccacaaa

SEQ ID NO: 1915401 - RNA, 19 nt, Artificial Sequence
  Description of Artificial Sequence: Synthetic oligonucleotide
cucgaggccagcgcucucu

SEQ ID NO: 1915402 - RNA, 19 nt, Artificial Sequence
  Description of Artificial Sequence: Synthetic oligonucleotide
aggcggccccaacccuuca

SEQ ID NO: 1915403 - RNA, 19 nt, Artificial Sequence
  Description of Artificial Sequence: Synthetic oligonucleotide
gcuaucugacgcgcuucuc

SEQ ID NO: 1915404 - RNA, 19 nt, Artificial Sequence
  Description of Artificial Sequence: Synthetic oligonucleotide
gaaggacgugcaagccccu

SEQ ID NO: 1915405 - RNA, 19 nt, Artificial Sequence
  Description of Artificial Sequence: Synthetic oligonucleotide
ggguaguucuuuuccucuu

SEQ ID NO: 1915406 - RNA, 19 nt, Artificial Sequence
  Description of Artificial Sequence: Synthetic oligonucleotide
gccccuccuuaguuggcca

SEQ ID NO: 1915407 - RNA, 19 nt, Artificial Sequence
  Description of Artificial Sequence: Synthetic oligonucleotide
cccuccuuaguuggccaug

SEQ ID NO: 1915408 - RNA, 19 nt, Artificial Sequence
  Description of Artificial Sequence: Synthetic oligonucleotide
ggggugcaugggcugucuc

SEQ ID NO: 1915409 - RNA, 19 nt, Artificial Sequence
  Description of Artificial Sequence: Synthetic oligonucleotide
gggcgcugucucucacccc

SEQ ID NO: 1915410 - RNA, 19 nt, Artificial Sequence
  Description of Artificial Sequence: Synthetic oligonucleotide
ggugguagaguggucuguu

SEQ ID NO: 1915411 - RNA, 19 nt, Artificial Sequence
  Description of Artificial Sequence: Synthetic oligonucleotide
gguugcaggguggguaggu

SEQ ID NO: 1915412 - RNA, 19 nt, Artificial Sequence
  Description of Artificial Sequence: Synthetic oligonucleotide
ggcccaugaagccgucgua

SEQ ID NO: 1915413 - RNA, 19 nt, Artificial Sequence
  Description of Artificial Sequence: Synthetic oligonucleotide
gacgugcaagccccuccuu

SEQ ID NO: 1915414 - RNA, 19 nt, Artificial Sequence
  Description of Artificial Sequence: Synthetic oligonucleotide
cggccccaacccuucagac

SEQ ID NO: 1915415 - RNA, 19 nt, Artificial Sequence
  Description of Artificial Sequence: Synthetic oligonucleotide
cgucguaguauuugaugcu

SEQ ID NO: 1915416 - RNA, 19 nt, Artificial Sequence
  Description of Artificial Sequence: Synthetic oligonucleotide
ccaucucgcagagucgaaa

SEQ ID NO: 1915417 - RNA, 19 nt, Artificial Sequence
  Description of Artificial Sequence: Synthetic oligonucleotide
agacggcugugaacugguu

SEQ ID NO: 1915418 - RNA, 19 nt, Artificial Sequence
  Description of Artificial Sequence: Synthetic oligonucleotide
cuguggugacagcucggau

SEQ ID NO: 1915419 - RNA, 19 nt, Artificial Sequence
  Description of Artificial Sequence: Synthetic oligonucleotide
cccaugaagccgucguagu

SEQ ID NO: 1915420 - RNA, 19 nt, Artificial Sequence
  Description of Artificial Sequence: Synthetic oligonucleotide
gcugcacaucggaccucag

SEQ ID NO: 1915421 - RNA, 19 nt, Artificial Sequence
  Description of Artificial Sequence: Synthetic oligonucleotide
ccgcuaucugacgcgcuuc

SEQ ID NO: 1915422 - RNA, 19 nt, Artificial Sequence
  Description of Artificial Sequence: Synthetic oligonucleotide
cagcccggcagggaguccu

SEQ ID NO: 1915423 - RNA, 19 nt, Artificial Sequence
  Description of Artificial Sequence: Synthetic oligonucleotide
gcccgugagcaagaugcaa

SEQ ID NO: 1915424 - RNA, 19 nt, Artificial Sequence
  Description of Artificial Sequence: Synthetic oligonucleotide
ccaguuagacagggauaga

SEQ ID NO: 1915425 - RNA, 19 nt, Artificial Sequence
  Description of Artificial Sequence: Synthetic oligonucleotide
ggagcucacugagcggagu

SEQ ID NO: 1915426 - RNA, 19 nt, Artificial Sequence
  Description of Artificial Sequence: Synthetic oligonucleotide
gccgcuaucugacgcgcuu

SEQ ID NO: 1915427 - RNA, 19 nt, Artificial Sequence
  Description of Artificial Sequence: Synthetic oligonucleotide
gcuucucgugggcgcuguc

SEQ ID NO: 1915428 - RNA, 19 nt, Artificial Sequence
  Description of Artificial Sequence: Synthetic oligonucleotide
cggaccucagggauggggu

SEQ ID NO: 1915429 - RNA, 19 nt, Artificial Sequence
  Description of Artificial Sequence: Synthetic oligonucleotide
gcaccgcaacccaagcagu

SEQ ID NO: 1915430 - RNA, 19 nt, Artificial Sequence
  Description of Artificial Sequence: Synthetic oligonucleotide
cccucccucuguggcugcg

SEQ ID NO: 1915431 - RNA, 19 nt, Artificial Sequence
  Description of Artificial Sequence: Synthetic oligonucleotide
ccagcgcucucuugagccu

SEQ ID NO: 1915432 - RNA, 19 nt, Artificial Sequence
  Description of Artificial Sequence: Synthetic oligonucleotide
ccacaggcgaucagagguu

SEQ ID NO: 1915433 - RNA, 19 nt, Artificial Sequence
  Description of Artificial Sequence: Synthetic oligonucleotide
cagcgcucucuugagccuu

SEQ ID NO: 1915434 - RNA, 19 nt, Artificial Sequence
  Description of Artificial Sequence: Synthetic oligonucleotide
gcgcugucucucaccccac

SEQ ID NO: 1915435 - RNA, 19 nt, Artificial Sequence
  Description of Artificial Sequence: Synthetic oligonucleotide
ggaggcggccccaacccuu

SEQ ID NO: 1915436 - RNA, 19 nt, Artificial Sequence
  Description of Artificial Sequence: Synthetic oligonucleotide
gcagcccggcagggagucc

SEQ ID NO: 1915437 - RNA, 19 nt, Artificial Sequence
  Description of Artificial Sequence: Synthetic oligonucleotide
cgugagcaagaugcaagcu

SEQ ID NO: 1915438 - RNA, 19 nt, Artificial Sequence
  Description of Artificial Sequence: Synthetic oligonucleotide
ccauggggcucccaucauu

SEQ ID NO: 1915439 - RNA, 19 nt, Artificial Sequence
  Description of Artificial Sequence: Synthetic oligonucleotide
ccuccccugcucuggacuu

SEQ ID NO: 1915440 - RNA, 19 nt, Artificial Sequence
  Description of Artificial Sequence: Synthetic oligonucleotide
cacagggguuaggcucccu

SEQ ID NO: 1915441 - RNA, 19 nt, Artificial Sequence
  Description of Artificial Sequence: Synthetic oligonucleotide
cggcccugugcugccaaaa

SEQ ID NO: 1915442 - RNA, 19 nt, Artificial Sequence
  Description of Artificial Sequence: Synthetic oligonucleotide
ccccugcucuggacuugua

SEQ ID NO: 1915443 - RNA, 19 nt, Artificial Sequence
  Description of Artificial Sequence: Synthetic oligonucleotide
uaaaguaaaauccagcagg

SEQ ID NO: 1915444 - RNA, 19 nt, Artificial Sequence
  Description of Artificial Sequence: Synthetic oligonucleotide
guuaauucuagccaguugg

SEQ ID NO: 1915445 - RNA, 19 nt, Artificial Sequence
  Description of Artificial Sequence: Synthetic oligonucleotide
uuccuugucacuuucaugg

SEQ ID NO: 1915446 - RNA, 19 nt, Artificial Sequence
  Description of Artificial Sequence: Synthetic oligonucleotide
aauacgaccugcuuuguag

SEQ ID NO: 1915447 - RNA, 19 nt, Artificial Sequence
  Description of Artificial Sequence: Synthetic oligonucleotide
uguaaaguaaaauccagca

SEQ ID NO: 1915448 - RNA, 19 nt, Artificial Sequence
  Description of Artificial Sequence: Synthetic oligonucleotide
ucugguuuagaguagcugg

SEQ ID NO: 1915449 - RNA, 19 nt, Artificial Sequence
  Description of Artificial Sequence: Synthetic oligonucleotide
auaccuuccugauaggucc

SEQ ID NO: 1915450 - RNA, 19 nt, Artificial Sequence
  Description of Artificial Sequence: Synthetic oligonucleotide
uauauaggugacuugcugg

SEQ ID NO: 1915451 - RNA, 19 nt, Artificial Sequence
  Description of Artificial Sequence: Synthetic oligonucleotide
uguaguuaauucuagccag

SEQ ID NO: 1915452 - RNA, 19 nt, Artificial Sequence
  Description of Artificial Sequence: Synthetic oligonucleotide
ugucucguaaguuagagga

SEQ ID NO: 1915453 - RNA, 19 nt, Artificial Sequence
  Description of Artificial Sequence: Synthetic oligonucleotide
uucaccaaaagcauugaag

SEQ ID NO: 1915454 - RNA, 19 nt, Artificial Sequence
  Description of Artificial Sequence: Synthetic oligonucleotide
agcuuguaaaguaaaaucc

SEQ ID NO: 1915455 - RNA, 19 nt, Artificial Sequence
  Description of Artificial Sequence: Synthetic oligonucleotide
ugagaagccauccaaauuc

SEQ ID NO: 1915456 - RNA, 19 nt, Artificial Sequence
  Description of Artificial Sequence: Synthetic oligonucleotide
uucgaugucgcacagguug

SEQ ID NO: 1915457 - RNA, 19 nt, Artificial Sequence
  Description of Artificial Sequence: Synthetic oligonucleotide
aauccagcagggcauauuc

SEQ ID NO: 1915458 - RNA, 19 nt, Artificial Sequence
  Description of Artificial Sequence: Synthetic oligonucleotide
aacaacauagcccuugaga

SEQ ID NO: 1915459 - RNA, 19 nt, Artificial Sequence
  Description of Artificial Sequence: Synthetic oligonucleotide
ucaccaaaagcauugaaga

SEQ ID NO: 1915460 - RNA, 19 nt, Artificial Sequence
  Description of Artificial Sequence: Synthetic oligonucleotide
accaaaagcauugaagacc

SEQ ID NO: 1915461 - RNA, 19 nt, Artificial Sequence
  Description of Artificial Sequence: Synthetic oligonucleotide
uguauaacugggugaaugg

SEQ ID NO: 1915462 - RNA, 19 nt, Artificial Sequence
  Description of Artificial Sequence: Synthetic oligonucleotide
agcauugaagaccauguac

SEQ ID NO: 1915463 - RNA, 19 nt, Artificial Sequence
  Description of Artificial Sequence: Synthetic oligonucleotide
ugagauaauacucuuccac

SEQ ID NO: 1915464 - RNA, 19 nt, Artificial Sequence
  Description of Artificial Sequence: Synthetic oligonucleotide
aauggucuccuuuaggugu

SEQ ID NO: 1915465 - RNA, 19 nt, Artificial Sequence
  Description of Artificial Sequence: Synthetic oligonucleotide
aguaaaauccagcagggca

SEQ ID NO: 1915466 - RNA, 19 nt, Artificial Sequence
  Description of Artificial Sequence: Synthetic oligonucleotide
uuuuaaccgagacagcacc

SEQ ID NO: 1915467 - RNA, 19 nt, Artificial Sequence
  Description of Artificial Sequence: Synthetic oligonucleotide
agaaauacgaccugcuuug

SEQ ID NO: 1915468 - RNA, 19 nt, Artificial Sequence
  Description of Artificial Sequence: Synthetic oligonucleotide
ucaacuaaagacaagccuu

SEQ ID NO: 1915469 - RNA, 19 nt, Artificial Sequence
  Description of Artificial Sequence: Synthetic oligonucleotide
aauucuagccaguuggcgu

SEQ ID NO: 1915470 - RNA, 19 nt, Artificial Sequence
  Description of Artificial Sequence: Synthetic oligonucleotide
ugcuuauaauaaaauguag

SEQ ID NO: 1915471 - RNA, 19 nt, Artificial Sequence
  Description of Artificial Sequence: Synthetic oligonucleotide
ugcuuuguagccaaauugc

SEQ ID NO: 1915472 - RNA, 19 nt, Artificial Sequence
  Description of Artificial Sequence: Synthetic oligonucleotide
uauaacugggugaauggcc

SEQ ID NO: 1915473 - RNA, 19 nt, Artificial Sequence
  Description of Artificial Sequence: Synthetic oligonucleotide
uuuucgaugucgcacaggu

SEQ ID NO: 1915474 - RNA, 19 nt, Artificial Sequence
  Description of Artificial Sequence: Synthetic oligonucleotide
aauccuuccagagauuuag

SEQ ID NO: 1915475 - RNA, 19 nt, Artificial Sequence
  Description of Artificial Sequence: Synthetic oligonucleotide
uuguaaaguaaaauccagc

SEQ ID NO: 1915476 - RNA, 19 nt, Artificial Sequence
  Description of Artificial Sequence: Synthetic oligonucleotide
uaccuuuccugcuagaacc

SEQ ID NO: 1915477 - RNA, 19 nt, Artificial Sequence
  Description of Artificial Sequence: Synthetic oligonucleotide
uccagaacugaauuuaucu

SEQ ID NO: 1915478 - RNA, 19 nt, Artificial Sequence
  Description of Artificial Sequence: Synthetic oligonucleotide
ugucgugucucaaaauggg

SEQ ID NO: 1915479 - RNA, 19 nt, Artificial Sequence
  Description of Artificial Sequence: Synthetic oligonucleotide
auauaggugacuugcuggg

SEQ ID NO: 1915480 - RNA, 19 nt, Artificial Sequence
  Description of Artificial Sequence: Synthetic oligonucleotide
aauuuaucuugaugacuuc

SEQ ID NO: 1915481 - RNA, 19 nt, Artificial Sequence
  Description of Artificial Sequence: Synthetic oligonucleotide
aaaauguaguuaauucuag

SEQ ID NO: 1915482 - RNA, 19 nt, Artificial Sequence
  Description of Artificial Sequence: Synthetic oligonucleotide
guaaaguaaaauccagcag

SEQ ID NO: 1915483 - RNA, 19 nt, Artificial Sequence
  Description of Artificial Sequence: Synthetic oligonucleotide
ucuugcaugccuuugucca

SEQ ID NO: 1915484 - RNA, 19 nt, Artificial Sequence
  Description of Artificial Sequence: Synthetic oligonucleotide
acugucgugucucaaaaug

SEQ ID NO: 1915485 - RNA, 19 nt, Artificial Sequence
  Description of Artificial Sequence: Synthetic oligonucleotide
agcuugugauccuaccucc

SEQ ID NO: 1915486 - RNA, 19 nt, Artificial Sequence
  Description of Artificial Sequence: Synthetic oligonucleotide
auaacugggugaauggccc

SEQ ID NO: 1915487 - RNA, 19 nt, Artificial Sequence
  Description of Artificial Sequence: Synthetic oligonucleotide
caaauugccuucacugucg

SEQ ID NO: 1915488 - RNA, 19 nt, Artificial Sequence
  Description of Artificial Sequence: Synthetic oligonucleotide
cucuauauaggugacuugc

SEQ ID NO: 1915489 - RNA, 19 nt, Artificial Sequence
  Description of Artificial Sequence: Synthetic oligonucleotide
cuguccgucauccaguucc

SEQ ID NO: 1915490 - RNA, 19 nt, Artificial Sequence
  Description of Artificial Sequence: Synthetic oligonucleotide
accacaauggcgucauuac

SEQ ID NO: 1915491 - RNA, 19 nt, Artificial Sequence
  Description of Artificial Sequence: Synthetic oligonucleotide
aauggcgucauuaccuuuc

SEQ ID NO: 1915492 - RNA, 19 nt, Artificial Sequence
  Description of Artificial Sequence: Synthetic oligonucleotide
uuaauucuagccaguuggc

SEQ ID NO: 1915493 - RNA, 19 nt, Artificial Sequence
  Description of Artificial Sequence: Synthetic oligonucleotide
uugaugacagcuccuuucc

SEQ ID NO: 1915494 - RNA, 19 nt, Artificial Sequence
  Description of Artificial Sequence: Synthetic oligonucleotide
ucgugucucaaaaugggug

SEQ ID NO: 1915495 - RNA, 19 nt, Artificial Sequence
  Description of Artificial Sequence: Synthetic oligonucleotide
uuggggcuuacuuuuaacc

SEQ ID NO: 1915496 - RNA, 19 nt, Artificial Sequence
  Description of Artificial Sequence: Synthetic oligonucleotide
uuguauaacugggugaaug

SEQ ID NO: 1915497 - RNA, 19 nt, Artificial Sequence
  Description of Artificial Sequence: Synthetic oligonucleotide
auacgaccugcuuuguagc

SEQ ID NO: 1915498 - RNA, 19 nt, Artificial Sequence
  Description of Artificial Sequence: Synthetic oligonucleotide
auugaagaccauguacagc

SEQ ID NO: 1915499 - RNA, 19 nt, Artificial Sequence
  Description of Artificial Sequence: Synthetic oligonucleotide
aaugcuuggggcuuacuuu

SEQ ID NO: 1915500 - RNA, 19 nt, Artificial Sequence
  Description of Artificial Sequence: Synthetic oligonucleotide
uacugcugaaugcuugggg

SEQ ID NO: 1915501 - RNA, 19 nt, Artificial Sequence
  Description of Artificial Sequence: Synthetic oligonucleotide
ugguccaacauucucugga

SEQ ID NO: 1915502 - RNA, 19 nt, Artificial Sequence
  Description of Artificial Sequence: Synthetic oligonucleotide
uuaggugucucccagcaua

SEQ ID NO: 1915503 - RNA, 19 nt, Artificial Sequence
  Description of Artificial Sequence: Synthetic oligonucleotide
caaacuguccgucauccag

SEQ ID NO: 1915504 - RNA, 19 nt, Artificial Sequence
  Description of Artificial Sequence: Synthetic oligonucleotide
uaauucuagccaguuggcg

SEQ ID NO: 1915505 - RNA, 19 nt, Artificial Sequence
  Description of Artificial Sequence: Synthetic oligonucleotide
uugugauccuaccuccccg

SEQ ID NO: 1915506 - RNA, 19 nt, Artificial Sequence
  Description of Artificial Sequence: Synthetic oligonucleotide
ugaauuuaucuugaugacu

SEQ ID NO: 1915507 - RNA, 19 nt, Artificial Sequence
  Description of Artificial Sequence: Synthetic oligonucleotide
cacuuggcagcucacaugc

SEQ ID NO: 1915508 - RNA, 19 nt, Artificial Sequence
  Description of Artificial Sequence: Synthetic oligonucleotide
uccugcuagaaccuggaac

SEQ ID NO: 1915509 - RNA, 19 nt, Artificial Sequence
  Description of Artificial Sequence: Synthetic oligonucleotide
agucaacuaaagacaagcc

SEQ ID NO: 1915510 - RNA, 19 nt, Artificial Sequence
  Description of Artificial Sequence: Synthetic oligonucleotide
cugucgugucucaaaaugg

SEQ ID NO: 1915511 - RNA, 19 nt, Artificial Sequence
  Description of Artificial Sequence: Synthetic oligonucleotide
uuuggagaaauacgaccug

SEQ ID NO: 1915512 - RNA, 19 nt, Artificial Sequence
  Description of Artificial Sequence: Synthetic oligonucleotide
aaauucagccagagugugc

SEQ ID NO: 1915513 - RNA, 19 nt, Artificial Sequence
  Description of Artificial Sequence: Synthetic oligonucleotide
aggccgaugcuccugcugc

SEQ ID NO: 1915514 - RNA, 19 nt, Artificial Sequence
  Description of Artificial Sequence: Synthetic oligonucleotide
gagauuuaggcaaaugguc

SEQ ID NO: 1915515 - RNA, 19 nt, Artificial Sequence
  Description of Artificial Sequence: Synthetic oligonucleotide
ugugucucguaaguuagag

SEQ ID NO: 1915516 - RNA, 19 nt, Artificial Sequence
  Description of Artificial Sequence: Synthetic oligonucleotide
ucuauauaggugacuugcu

SEQ ID NO: 1915517 - RNA, 19 nt, Artificial Sequence
  Description of Artificial Sequence: Synthetic oligonucleotide
acagcccucaaugacaguc

SEQ ID NO: 1915518 - RNA, 19 nt, Artificial Sequence
  Description of Artificial Sequence: Synthetic oligonucleotide
cauugaagaccauguacag

SEQ ID NO: 1915519 - RNA, 19 nt, Artificial Sequence
  Description of Artificial Sequence: Synthetic oligonucleotide
ucauuaccuuuccugcuag

SEQ ID NO: 1915520 - RNA, 19 nt, Artificial Sequence
  Description of Artificial Sequence: Synthetic oligonucleotide
aguuaauucuagccaguug

SEQ ID NO: 1915521 - RNA, 19 nt, Artificial Sequence
  Description of Artificial Sequence: Synthetic oligonucleotide
cuauauaggugacuugcug

SEQ ID NO: 1915522 - RNA, 19 nt, Artificial Sequence
  Description of Artificial Sequence: Synthetic oligonucleotide
gauuuaggcaaauggucuc

SEQ ID NO: 1915523 - RNA, 19 nt, Artificial Sequence
  Description of Artificial Sequence: Synthetic oligonucleotide
cugguuuagaguagcuggg

SEQ ID NO: 1915524 - RNA, 19 nt, Artificial Sequence
  Description of Artificial Sequence: Synthetic oligonucleotide
uuaccuuuccugcuagaac

SEQ ID NO: 1915525 - RNA, 19 nt, Artificial Sequence
  Description of Artificial Sequence: Synthetic oligonucleotide
ugucuguucuuuugcugcg

SEQ ID NO: 1915526 - RNA, 19 nt, Artificial Sequence
  Description of Artificial Sequence: Synthetic oligonucleotide
uuuaaccgagacagcacca

SEQ ID NO: 1915527 - RNA, 19 nt, Artificial Sequence
  Description of Artificial Sequence: Synthetic oligonucleotide
cuuauaauaaaauguaguu

SEQ ID NO: 1915528 - RNA, 19 nt, Artificial Sequence
  Description of Artificial Sequence: Synthetic oligonucleotide
ucuuuugcugcgucguuug

SEQ ID NO: 1915529 - RNA, 19 nt, Artificial Sequence
  Description of Artificial Sequence: Synthetic oligonucleotide
uugaagcuuguaaaguaaa

SEQ ID NO: 1915530 - RNA, 19 nt, Artificial Sequence
  Description of Artificial Sequence: Synthetic oligonucleotide
uauauccagaacugaauuu

SEQ ID NO: 1915531 - RNA, 19 nt, Artificial Sequence
  Description of Artificial Sequence: Synthetic oligonucleotide
agauuuaggcaaauggucu

SEQ ID NO: 1915532 - RNA, 19 nt, Artificial Sequence
  Description of Artificial Sequence: Synthetic oligonucleotide
uccccgaucugguuuagag

SEQ ID NO: 1915533 - RNA, 19 nt, Artificial Sequence
  Description of Artificial Sequence: Synthetic oligonucleotide
cauguacagcuugugaucc

SEQ ID NO: 1915534 - RNA, 19 nt, Artificial Sequence
  Description of Artificial Sequence: Synthetic oligonucleotide
ugggagguguuuucgaugu

SEQ ID NO: 1915535 - RNA, 19 nt, Artificial Sequence
  Description of Artificial Sequence: Synthetic oligonucleotide
agauaauacucuuccacuu

SEQ ID NO: 1915536 - RNA, 19 nt, Artificial Sequence
  Description of Artificial Sequence: Synthetic oligonucleotide
ucacaagucuugcaugccu

SEQ ID NO: 1915537 - RNA, 19 nt, Artificial Sequence
  Description of Artificial Sequence: Synthetic oligonucleotide
ucacaugcaagugaccugu

SEQ ID NO: 1915538 - RNA, 19 nt, Artificial Sequence
  Description of Artificial Sequence: Synthetic oligonucleotide
aagagucaacuaaagacaa

SEQ ID NO: 1915539 - RNA, 19 nt, Artificial Sequence
  Description of Artificial Sequence: Synthetic oligonucleotide
ugguacugcugaaugcuug

SEQ ID NO: 1915540 - RNA, 19 nt, Artificial Sequence
  Description of Artificial Sequence: Synthetic oligonucleotide
auagcccuugagauaauac

SEQ ID NO: 1915541 - RNA, 19 nt, Artificial Sequence
  Description of Artificial Sequence: Synthetic oligonucleotide
gagauaauacucuuccacu

SEQ ID NO: 1915542 - RNA, 19 nt, Artificial Sequence
  Description of Artificial Sequence: Synthetic oligonucleotide
aaccgagacagcaccacuc

SEQ ID NO: 1915543 - RNA, 19 nt, Artificial Sequence
  Description of Artificial Sequence: Synthetic oligonucleotide
uugagauaauacucuucca

SEQ ID NO: 1915544 - RNA, 19 nt, Artificial Sequence
  Description of Artificial Sequence: Synthetic oligonucleotide
caugcaagugaccuguguc

SEQ ID NO: 1915545 - RNA, 19 nt, Artificial Sequence
  Description of Artificial Sequence: Synthetic oligonucleotide
guaaguuagaggacacucc

SEQ ID NO: 1915546 - RNA, 19 nt, Artificial Sequence
  Description of Artificial Sequence: Synthetic oligonucleotide
uguuuucgaugucgcacag

SEQ ID NO: 1915547 - RNA, 19 nt, Artificial Sequence
  Description of Artificial Sequence: Synthetic oligonucleotide
auuucacagcccucaauga

SEQ ID NO: 1915548 - RNA, 19 nt, Artificial Sequence
  Description of Artificial Sequence: Synthetic oligonucleotide
uuggcgucaaguguguuga

SEQ ID NO: 1915549 - RNA, 19 nt, Artificial Sequence
  Description of Artificial Sequence: Synthetic oligonucleotide
aagccuugcuuauaauaaa

SEQ ID NO: 1915550 - RNA, 19 nt, Artificial Sequence
  Description of Artificial Sequence: Synthetic oligonucleotide
aaauugccuucacugucgu

SEQ ID NO: 1915551 - RNA, 19 nt, Artificial Sequence
  Description of Artificial Sequence: Synthetic oligonucleotide
cacaauuggccuuuggaga

SEQ ID NO: 1915552 - RNA, 19 nt, Artificial Sequence
  Description of Artificial Sequence: Synthetic oligonucleotide
ucggccuugugcagguugg

SEQ ID NO: 1915553 - RNA, 19 nt, Artificial Sequence
  Description of Artificial Sequence: Synthetic oligonucleotide
agguuguauaacuggguga

SEQ ID NO: 1915554 - RNA, 19 nt, Artificial Sequence
  Description of Artificial Sequence: Synthetic oligonucleotide
caagccuugcuuauaauaa

SEQ ID NO: 1915555 - RNA, 19 nt, Artificial Sequence
  Description of Artificial Sequence: Synthetic oligonucleotide
ugguuuagaguagcugggg

SEQ ID NO: 1915556 - RNA, 19 nt, Artificial Sequence
  Description of Artificial Sequence: Synthetic oligonucleotide
agaacugaauuuaucuuga

SEQ ID NO: 1915557 - RNA, 19 nt, Artificial Sequence
  Description of Artificial Sequence: Synthetic oligonucleotide
uguucuuuugcugcgucgu

SEQ ID NO: 1915558 - RNA, 19 nt, Artificial Sequence
  Description of Artificial Sequence: Synthetic oligonucleotide
ugucgcacagguuguauaa

SEQ ID NO: 1915559 - RNA, 19 nt, Artificial Sequence
  Description of Artificial Sequence: Synthetic oligonucleotide
cuugugauccuaccucccc

SEQ ID NO: 1915560 - RNA, 19 nt, Artificial Sequence
  Description of Artificial Sequence: Synthetic oligonucleotide
ucacugucgugucucaaaa

SEQ ID NO: 1915561 - RNA, 19 nt, Artificial Sequence
  Description of Artificial Sequence: Synthetic oligonucleotide
cuuuggagaaauacgaccu

SEQ ID NO: 1915562 - RNA, 19 nt, Artificial Sequence
  Description of Artificial Sequence: Synthetic oligonucleotide
ugggugaauggccccaaca

SEQ ID NO: 1915563 - RNA, 19 nt, Artificial Sequence
  Description of Artificial Sequence: Synthetic oligonucleotide
uguguugaugacagcuccu

SEQ ID NO: 1915564 - RNA, 19 nt, Artificial Sequence
  Description of Artificial Sequence: Synthetic oligonucleotide
guuggcgucaaguguguug

SEQ ID NO: 1915565 - RNA, 19 nt, Artificial Sequence
  Description of Artificial Sequence: Synthetic oligonucleotide
ucgcacagguuguauaacu

SEQ ID NO: 1915566 - RNA, 19 nt, Artificial Sequence
  Description of Artificial Sequence: Synthetic oligonucleotide
aaguuagaggacacuccuc

SEQ ID NO: 1915567 - RNA, 19 nt, Artificial Sequence
  Description of Artificial Sequence: Synthetic oligonucleotide
gauaccuuccugauagguc

SEQ ID NO: 1915568 - RNA, 19 nt, Artificial Sequence
  Description of Artificial Sequence: Synthetic oligonucleotide
uggacaggauaccuuccug

SEQ ID NO: 1915569 - RNA, 19 nt, Artificial Sequence
  Description of Artificial Sequence: Synthetic oligonucleotide
ugugauccuaccuccccga

SEQ ID NO: 1915570 - RNA, 19 nt, Artificial Sequence
  Description of Artificial Sequence: Synthetic oligonucleotide
gugucucguaaguuagagg

SEQ ID NO: 1915571 - RNA, 19 nt, Artificial Sequence
  Description of Artificial Sequence: Synthetic oligonucleotide
uacuuuuaaccgagacagc

SEQ ID NO: 1915572 - RNA, 19 nt, Artificial Sequence
  Description of Artificial Sequence: Synthetic oligonucleotide
gcugguuuccuuucuggcg

SEQ ID NO: 1915573 - RNA, 19 nt, Artificial Sequence
  Description of Artificial Sequence: Synthetic oligonucleotide
guauaacugggugaauggc

SEQ ID NO: 1915574 - RNA, 19 nt, Artificial Sequence
  Description of Artificial Sequence: Synthetic oligonucleotide
ggcgucauuaccuuuccug

SEQ ID NO: 1915575 - RNA, 19 nt, Artificial Sequence
  Description of Artificial Sequence: Synthetic oligonucleotide
guuugugucucguaaguua

SEQ ID NO: 1915576 - RNA, 19 nt, Artificial Sequence
  Description of Artificial Sequence: Synthetic oligonucleotide
cuguucuuuugcugcgucg

SEQ ID NO: 1915577 - RNA, 19 nt, Artificial Sequence
  Description of Artificial Sequence: Synthetic oligonucleotide
gcacagguuguauaacugg

SEQ ID NO: 1915578 - RNA, 19 nt, Artificial Sequence
  Description of Artificial Sequence: Synthetic oligonucleotide
caaauggucuccuuuaggu

SEQ ID NO: 1915579 - RNA, 19 nt, Artificial Sequence
  Description of Artificial Sequence: Synthetic oligonucleotide
aaauacgaccugcuuugua

SEQ ID NO: 1915580 - RNA, 19 nt, Artificial Sequence
  Description of Artificial Sequence: Synthetic oligonucleotide
caagugaccugugucacac

SEQ ID NO: 1915581 - RNA, 19 nt, Artificial Sequence
  Description of Artificial Sequence: Synthetic oligonucleotide
gucaacuaaagacaagccu

SEQ ID NO: 1915582 - RNA, 19 nt, Artificial Sequence
  Description of Artificial Sequence: Synthetic oligonucleotide
agacaagccuugcuuauaa

SEQ ID NO: 1915583 - RNA, 19 nt, Artificial Sequence
  Description of Artificial Sequence: Synthetic oligonucleotide
acucuauauaggugacuug

SEQ ID NO: 1915584 - RNA, 19 nt, Artificial Sequence
  Description of Artificial Sequence: Synthetic oligonucleotide
uacgaccugcuuuguagcc

SEQ ID NO: 1915585 - RNA, 19 nt, Artificial Sequence
  Description of Artificial Sequence: Synthetic oligonucleotide
aaacuguccgucauccagu

SEQ ID NO: 1915586 - RNA, 19 nt, Artificial Sequence
  Description of Artificial Sequence: Synthetic oligonucleotide
gcaacuauauccagaacug

SEQ ID NO: 1915587 - RNA, 19 nt, Artificial Sequence
  Description of Artificial Sequence: Synthetic oligonucleotide
ggagguguuuucgaugucg

SEQ ID NO: 1915588 - RNA, 19 nt, Artificial Sequence
  Description of Artificial Sequence: Synthetic oligonucleotide
ugcuagaaccuggaacucc

SEQ ID NO: 1915589 - RNA, 19 nt, Artificial Sequence
  Description of Artificial Sequence: Synthetic oligonucleotide
agaggacacuccuccauca

SEQ ID NO: 1915590 - RNA, 19 nt, Artificial Sequence
  Description of Artificial Sequence: Synthetic oligonucleotide
ucuguucuuuugcugcguc

SEQ ID NO: 1915591 - RNA, 19 nt, Artificial Sequence
  Description of Artificial Sequence: Synthetic oligonucleotide
uuaaccgagacagcaccac

SEQ ID NO: 1915592 - RNA, 19 nt, Artificial Sequence
  Description of Artificial Sequence: Synthetic oligonucleotide
cuuuaggugucucccagca

SEQ ID NO: 1915593 - RNA, 19 nt, Artificial Sequence
  Description of Artificial Sequence: Synthetic oligonucleotide
uccucaagaggcccucggc

SEQ ID NO: 1915594 - RNA, 19 nt, Artificial Sequence
  Description of Artificial Sequence: Synthetic oligonucleotide
cucguaaguuagaggacac

SEQ ID NO: 1915595 - RNA, 19 nt, Artificial Sequence
  Description of Artificial Sequence: Synthetic oligonucleotide
agccaguuggcgucaagug

SEQ ID NO: 1915596 - RNA, 19 nt, Artificial Sequence
  Description of Artificial Sequence: Synthetic oligonucleotide
aagcauugaagaccaugua

SEQ ID NO: 1915597 - RNA, 19 nt, Artificial Sequence
  Description of Artificial Sequence: Synthetic oligonucleotide
acuauauccagaacugaau

SEQ ID NO: 1915598 - RNA, 19 nt, Artificial Sequence
  Description of Artificial Sequence: Synthetic oligonucleotide
uaaccgagacagcaccacu

SEQ ID NO: 1915599 - RNA, 19 nt, Artificial Sequence
  Description of Artificial Sequence: Synthetic oligonucleotide
uccuccuugguccaacauu

SEQ ID NO: 1915600 - RNA, 19 nt, Artificial Sequence
  Description of Artificial Sequence: Synthetic oligonucleotide
gguuuagaguagcuggggc

SEQ ID NO: 1915601 - RNA, 19 nt, Artificial Sequence
  Description of Artificial Sequence: Synthetic oligonucleotide
guguuuucgaugucgcaca

SEQ ID NO: 1915602 - RNA, 19 nt, Artificial Sequence
  Description of Artificial Sequence: Synthetic oligonucleotide
uaggugucucccagcauac

SEQ ID NO: 1915603 - RNA, 19 nt, Artificial Sequence
  Description of Artificial Sequence: Synthetic oligonucleotide
gucuugcaugccuuugucc

SEQ ID NO: 1915604 - RNA, 19 nt, Artificial Sequence
  Description of Artificial Sequence: Synthetic oligonucleotide
ugcgucguuuguuuguguc

SEQ ID NO: 1915605 - RNA, 19 nt, Artificial Sequence
  Description of Artificial Sequence: Synthetic oligonucleotide
uggccccaacaacauagcc

SEQ ID NO: 1915606 - RNA, 19 nt, Artificial Sequence
  Description of Artificial Sequence: Synthetic oligonucleotide
ucgaugucgcacagguugu

SEQ ID NO: 1915607 - RNA, 19 nt, Artificial Sequence
  Description of Artificial Sequence: Synthetic oligonucleotide
cucacaugcaagugaccug

SEQ ID NO: 1915608 - RNA, 19 nt, Artificial Sequence
  Description of Artificial Sequence: Synthetic oligonucleotide
gagguguuuucgaugucgc

SEQ ID NO: 1915609 - RNA, 19 nt, Artificial Sequence
  Description of Artificial Sequence: Synthetic oligonucleotide
gguguuuucgaugucgcac

SEQ ID NO: 1915610 - RNA, 19 nt, Artificial Sequence
  Description of Artificial Sequence: Synthetic oligonucleotide
cagcuugugauccuaccuc

SEQ ID NO: 1915611 - RNA, 19 nt, Artificial Sequence
  Description of Artificial Sequence: Synthetic oligonucleotide
cacaauggcgucauuaccu

SEQ ID NO: 1915612 - RNA, 19 nt, Artificial Sequence
  Description of Artificial Sequence: Synthetic oligonucleotide
gcuuacuuuuaaccgagac

SEQ ID NO: 1915613 - RNA, 19 nt, Artificial Sequence
  Description of Artificial Sequence: Synthetic oligonucleotide
ugaugacagcuccuuuccu

SEQ ID NO: 1915614 - RNA, 19 nt, Artificial Sequence
  Description of Artificial Sequence: Synthetic oligonucleotide
gguuuguugaagcuuguaa

SEQ ID NO: 1915615 - RNA, 19 nt, Artificial Sequence
  Description of Artificial Sequence: Synthetic oligonucleotide
uguccgucauccaguuccc

SEQ ID NO: 1915616 - RNA, 19 nt, Artificial Sequence
  Description of Artificial Sequence: Synthetic oligonucleotide
ugcaagugaccugugucac

SEQ ID NO: 1915617 - RNA, 19 nt, Artificial Sequence
  Description of Artificial Sequence: Synthetic oligonucleotide
acaugcaagugaccugugu

SEQ ID NO: 1915618 - RNA, 19 nt, Artificial Sequence
  Description of Artificial Sequence: Synthetic oligonucleotide
gccauccaaauucagccag

SEQ ID NO: 1915619 - RNA, 19 nt, Artificial Sequence
  Description of Artificial Sequence: Synthetic oligonucleotide
guuuagaguagcuggggcu

SEQ ID NO: 1915620 - RNA, 19 nt, Artificial Sequence
  Description of Artificial Sequence: Synthetic oligonucleotide
gaggcccucggccuugugc

SEQ ID NO: 1915621 - RNA, 19 nt, Artificial Sequence
  Description of Artificial Sequence: Synthetic oligonucleotide
accacucuauauaggugac

SEQ ID NO: 1915622 - RNA, 19 nt, Artificial Sequence
  Description of Artificial Sequence: Synthetic oligonucleotide
gcaggcugaaucuucacca

SEQ ID NO: 1915623 - RNA, 19 nt, Artificial Sequence
  Description of Artificial Sequence: Synthetic oligonucleotide
ucaaacuguccgucaucca

SEQ ID NO: 1915624 - RNA, 19 nt, Artificial Sequence
  Description of Artificial Sequence: Synthetic oligonucleotide
cugggagguguuuucgaug

SEQ ID NO: 1915625 - RNA, 19 nt, Artificial Sequence
  Description of Artificial Sequence: Synthetic oligonucleotide
uaacugggugaauggcccc

SEQ ID NO: 1915626 - RNA, 19 nt, Artificial Sequence
  Description of Artificial Sequence: Synthetic oligonucleotide
gcgucauuaccuuuccugc

SEQ ID NO: 1915627 - RNA, 19 nt, Artificial Sequence
  Description of Artificial Sequence: Synthetic oligonucleotide
gucguuuguuugugucucg

SEQ ID NO: 1915628 - RNA, 19 nt, Artificial Sequence
  Description of Artificial Sequence: Synthetic oligonucleotide
aacuguccgucauccaguu

SEQ ID NO: 1915629 - RNA, 19 nt, Artificial Sequence
  Description of Artificial Sequence: Synthetic oligonucleotide
ucuggguuuguugaagcuu

SEQ ID NO: 1915630 - RNA, 19 nt, Artificial Sequence
  Description of Artificial Sequence: Synthetic oligonucleotide
gauaauacucuuccacuuu

SEQ ID NO: 1915631 - RNA, 19 nt, Artificial Sequence
  Description of Artificial Sequence: Synthetic oligonucleotide
agccauccaaauucagcca

SEQ ID NO: 1915632 - RNA, 19 nt, Artificial Sequence
  Description of Artificial Sequence: Synthetic oligonucleotide
ugauccuaccuccccgauc

SEQ ID NO: 1915633 - RNA, 19 nt, Artificial Sequence
  Description of Artificial Sequence: Synthetic oligonucleotide
ccaguuggcgucaagugug

SEQ ID NO: 1915634 - RNA, 19 nt, Artificial Sequence
  Description of Artificial Sequence: Synthetic oligonucleotide
gacacuccuccaucacaag

SEQ ID NO: 1915635 - RNA, 19 nt, Artificial Sequence
  Description of Artificial Sequence: Synthetic oligonucleotide
acaauggcgucauuaccuu

SEQ ID NO: 1915636 - RNA, 19 nt, Artificial Sequence
  Description of Artificial Sequence: Synthetic oligonucleotide
ugcugcgucguuuguuugu

SEQ ID NO: 1915637 - RNA, 19 nt, Artificial Sequence
  Description of Artificial Sequence: Synthetic oligonucleotide
caaaaugggugugggcagc

SEQ ID NO: 1915638 - RNA, 19 nt, Artificial Sequence
  Description of Artificial Sequence: Synthetic oligonucleotide
uagccaguuggcgucaagu

SEQ ID NO: 1915639 - RNA, 19 nt, Artificial Sequence
  Description of Artificial Sequence: Synthetic oligonucleotide
gcuuauaauaaaauguagu

SEQ ID NO: 1915640 - RNA, 19 nt, Artificial Sequence
  Description of Artificial Sequence: Synthetic oligonucleotide
uuuaggugucucccagcau

SEQ ID NO: 1915641 - RNA, 19 nt, Artificial Sequence
  Description of Artificial Sequence: Synthetic oligonucleotide
aggauaccuuccugauagg

SEQ ID NO: 1915642 - RNA, 19 nt, Artificial Sequence
  Description of Artificial Sequence: Synthetic oligonucleotide
cugcuccaccacaauggcg

SEQ ID NO: 1915643 - RNA, 19 nt, Artificial Sequence
  Description of Artificial Sequence: Synthetic oligonucleotide
uuagaguagcuggggcugc

SEQ ID NO: 1915644 - RNA, 19 nt, Artificial Sequence
  Description of Artificial Sequence: Synthetic oligonucleotide
agggccguagucuguuuug

SEQ ID NO: 1915645 - RNA, 19 nt, Artificial Sequence
  Description of Artificial Sequence: Synthetic oligonucleotide
cucacccuucagcagccgg

SEQ ID NO: 1915646 - RNA, 19 nt, Artificial Sequence
  Description of Artificial Sequence: Synthetic oligonucleotide
guugggaugcgcugguguc

SEQ ID NO: 1915647 - RNA, 19 nt, Artificial Sequence
  Description of Artificial Sequence: Synthetic oligonucleotide
uguacagcuugugauccua

SEQ ID NO: 1915648 - RNA, 19 nt, Artificial Sequence
  Description of Artificial Sequence: Synthetic oligonucleotide
aacauucucuggagggaca

SEQ ID NO: 1915649 - RNA, 19 nt, Artificial Sequence
  Description of Artificial Sequence: Synthetic oligonucleotide
uaguuaauucuagccaguu

SEQ ID NO: 1915650 - RNA, 19 nt, Artificial Sequence
  Description of Artificial Sequence: Synthetic oligonucleotide
aacugggugaauggcccca

SEQ ID NO: 1915651 - RNA, 19 nt, Artificial Sequence
  Description of Artificial Sequence: Synthetic oligonucleotide
ccuccuugguccaacauuc

SEQ ID NO: 1915652 - RNA, 19 nt, Artificial Sequence
  Description of Artificial Sequence: Synthetic oligonucleotide
gcgucaaguguguugauga

SEQ ID NO: 1915653 - RNA, 19 nt, Artificial Sequence
  Description of Artificial Sequence: Synthetic oligonucleotide
agcacgcuugugagaagcc

SEQ ID NO: 1915654 - RNA, 19 nt, Artificial Sequence
  Description of Artificial Sequence: Synthetic oligonucleotide
cugcugccgaccuuguuuc

SEQ ID NO: 1915655 - RNA, 19 nt, Artificial Sequence
  Description of Artificial Sequence: Synthetic oligonucleotide
caacaacauagcccuugag

SEQ ID NO: 1915656 - RNA, 19 nt, Artificial Sequence
  Description of Artificial Sequence: Synthetic oligonucleotide
uguuugugucucguaaguu

SEQ ID NO: 1915657 - RNA, 19 nt, Artificial Sequence
  Description of Artificial Sequence: Synthetic oligonucleotide
cuccucaagaggcccucgg

SEQ ID NO: 1915658 - RNA, 19 nt, Artificial Sequence
  Description of Artificial Sequence: Synthetic oligonucleotide
auggccccaacaacauagc

SEQ ID NO: 1915659 - RNA, 19 nt, Artificial Sequence
  Description of Artificial Sequence: Synthetic oligonucleotide
guacugcugaaugcuuggg

SEQ ID NO: 1915660 - RNA, 19 nt, Artificial Sequence
  Description of Artificial Sequence: Synthetic oligonucleotide
uaaaauccagcagggcaua

SEQ ID NO: 1915661 - RNA, 19 nt, Artificial Sequence
  Description of Artificial Sequence: Synthetic oligonucleotide
uaccuuccugauaggucca

SEQ ID NO: 1915662 - RNA, 19 nt, Artificial Sequence
  Description of Artificial Sequence: Synthetic oligonucleotide
ccaaauugccuucacuguc

SEQ ID NO: 1915663 - RNA, 19 nt, Artificial Sequence
  Description of Artificial Sequence: Synthetic oligonucleotide
uuuguccaacugguacugc

SEQ ID NO: 1915664 - RNA, 19 nt, Artificial Sequence
  Description of Artificial Sequence: Synthetic oligonucleotide
ugugcagguugggaugcgc

SEQ ID NO: 1915665 - RNA, 19 nt, Artificial Sequence
  Description of Artificial Sequence: Synthetic oligonucleotide
gucauuaccuuuccugcua

SEQ ID NO: 1915666 - RNA, 19 nt, Artificial Sequence
  Description of Artificial Sequence: Synthetic oligonucleotide
guaaaauccagcagggcau

SEQ ID NO: 1915667 - RNA, 19 nt, Artificial Sequence
  Description of Artificial Sequence: Synthetic oligonucleotide
ggacaggauaccuuccuga

SEQ ID NO: 1915668 - RNA, 19 nt, Artificial Sequence
  Description of Artificial Sequence: Synthetic oligonucleotide
aaauccagcagggcauauu

SEQ ID NO: 1915669 - RNA, 19 nt, Artificial Sequence
  Description of Artificial Sequence: Synthetic oligonucleotide
caaguguguugaugacagc

SEQ ID NO: 1915670 - RNA, 19 nt, Artificial Sequence
  Description of Artificial Sequence: Synthetic oligonucleotide
ucguuuguuugugucucgu

SEQ ID NO: 1915671 - RNA, 19 nt, Artificial Sequence
  Description of Artificial Sequence: Synthetic oligonucleotide
cuuggcagcucacaugcaa

SEQ ID NO: 1915672 - RNA, 19 nt, Artificial Sequence
  Description of Artificial Sequence: Synthetic oligonucleotide
acaguccacugcuccacca

SEQ ID NO: 1915673 - RNA, 19 nt, Artificial Sequence
  Description of Artificial Sequence: Synthetic oligonucleotide
gcuuuguagccaaauugcc

SEQ ID NO: 1915674 - RNA, 19 nt, Artificial Sequence
  Description of Artificial Sequence: Synthetic oligonucleotide
gaaugcuuggggcuuacuu

SEQ ID NO: 1915675 - RNA, 19 nt, Artificial Sequence
  Description of Artificial Sequence: Synthetic oligonucleotide
ucguaaguuagaggacacu

SEQ ID NO: 1915676 - RNA, 19 nt, Artificial Sequence
  Description of Artificial Sequence: Synthetic oligonucleotide
gaugcuccugcugccgacc

SEQ ID NO: 1915677 - RNA, 19 nt, Artificial Sequence
  Description of Artificial Sequence: Synthetic oligonucleotide
uggcaacuauauccagaac

SEQ ID NO: 1915678 - RNA, 19 nt, Artificial Sequence
  Description of Artificial Sequence: Synthetic oligonucleotide
cuauauccagaacugaauu

SEQ ID NO: 1915679 - RNA, 19 nt, Artificial Sequence
  Description of Artificial Sequence: Synthetic oligonucleotide
uucuuuugcugcgucguuu

SEQ ID NO: 1915680 - RNA, 19 nt, Artificial Sequence
  Description of Artificial Sequence: Synthetic oligonucleotide
auggucuccuuuagguguc

SEQ ID NO: 1915681 - RNA, 19 nt, Artificial Sequence
  Description of Artificial Sequence: Synthetic oligonucleotide
ggggcuuacuuuuaaccga

SEQ ID NO: 1915682 - RNA, 19 nt, Artificial Sequence
  Description of Artificial Sequence: Synthetic oligonucleotide
uuuugcugcgucguuuguu

SEQ ID NO: 1915683 - RNA, 19 nt, Artificial Sequence
  Description of Artificial Sequence: Synthetic oligonucleotide
agguguuuucgaugucgca

SEQ ID NO: 1915684 - RNA, 19 nt, Artificial Sequence
  Description of Artificial Sequence: Synthetic oligonucleotide
gaccuuguuucuguccuca

SEQ ID NO: 1915685 - RNA, 19 nt, Artificial Sequence
  Description of Artificial Sequence: Synthetic oligonucleotide
ggccuuuggagaaauacga

SEQ ID NO: 1915686 - RNA, 19 nt, Artificial Sequence
  Description of Artificial Sequence: Synthetic oligonucleotide
agcucacaugcaagugacc

SEQ ID NO: 1915687 - RNA, 19 nt, Artificial Sequence
  Description of Artificial Sequence: Synthetic oligonucleotide
agacagcaccacucuauau

SEQ ID NO: 1915688 - RNA, 19 nt, Artificial Sequence
  Description of Artificial Sequence: Synthetic oligonucleotide
acuguccgucauccaguuc

SEQ ID NO: 1915689 - RNA, 19 nt, Artificial Sequence
  Description of Artificial Sequence: Synthetic oligonucleotide
uaccuccccgaucugguuu

SEQ ID NO: 1915690 - RNA, 19 nt, Artificial Sequence
  Description of Artificial Sequence: Synthetic oligonucleotide
aaaauccagcagggcauau

SEQ ID NO: 1915691 - RNA, 19 nt, Artificial Sequence
  Description of Artificial Sequence: Synthetic oligonucleotide
auguacagcuugugauccu

SEQ ID NO: 1915692 - RNA, 19 nt, Artificial Sequence
  Description of Artificial Sequence: Synthetic oligonucleotide
uugcugcgucguuuguuug

SEQ ID NO: 1915693 - RNA, 19 nt, Artificial Sequence
  Description of Artificial Sequence: Synthetic oligonucleotide
aaauccuuccagagauuua

SEQ ID NO: 1915694 - RNA, 19 nt, Artificial Sequence
  Description of Artificial Sequence: Synthetic oligonucleotide
auccuuccagagauuuagg

SEQ ID NO: 1915695 - RNA, 19 nt, Artificial Sequence
  Description of Artificial Sequence: Synthetic oligonucleotide
ugggaugcgcuggugucca

SEQ ID NO: 1915696 - RNA, 19 nt, Artificial Sequence
  Description of Artificial Sequence: Synthetic oligonucleotide
augucgcacagguuguaua

SEQ ID NO: 1915697 - RNA, 19 nt, Artificial Sequence
  Description of Artificial Sequence: Synthetic oligonucleotide
ggccgcuccuccuuggucc

SEQ ID NO: 1915698 - RNA, 19 nt, Artificial Sequence
  Description of Artificial Sequence: Synthetic oligonucleotide
acgcuugugagaagccauc

SEQ ID NO: 1915699 - RNA, 19 nt, Artificial Sequence
  Description of Artificial Sequence: Synthetic oligonucleotide
gacaggauaccuuccugau

SEQ ID NO: 1915700 - RNA, 19 nt, Artificial Sequence
  Description of Artificial Sequence: Synthetic oligonucleotide
guucccggagggcacugug

SEQ ID NO: 1915701 - RNA, 19 nt, Artificial Sequence
  Description of Artificial Sequence: Synthetic oligonucleotide
cugguuuccuuucuggcgu

SEQ ID NO: 1915702 - RNA, 19 nt, Artificial Sequence
  Description of Artificial Sequence: Synthetic oligonucleotide
caacuauauccagaacuga

SEQ ID NO: 1915703 - RNA, 19 nt, Artificial Sequence
  Description of Artificial Sequence: Synthetic oligonucleotide
caguccacugcuccaccac

SEQ ID NO: 1915704 - RNA, 19 nt, Artificial Sequence
  Description of Artificial Sequence: Synthetic oligonucleotide
gggugaauggccccaacaa

SEQ ID NO: 1915705 - RNA, 19 nt, Artificial Sequence
  Description of Artificial Sequence: Synthetic oligonucleotide
uuucgaugucgcacagguu

SEQ ID NO: 1915706 - RNA, 19 nt, Artificial Sequence
  Description of Artificial Sequence: Synthetic oligonucleotide
uuccugcuagaaccuggaa

SEQ ID NO: 1915707 - RNA, 19 nt, Artificial Sequence
  Description of Artificial Sequence: Synthetic oligonucleotide
cguaaguuagaggacacuc

SEQ ID NO: 1915708 - RNA, 19 nt, Artificial Sequence
  Description of Artificial Sequence: Synthetic oligonucleotide
gucucguaaguuagaggac

SEQ ID NO: 1915709 - RNA, 19 nt, Artificial Sequence
  Description of Artificial Sequence: Synthetic oligonucleotide
cagcuccuuuccuugucac

SEQ ID NO: 1915710 - RNA, 19 nt, Artificial Sequence
  Description of Artificial Sequence: Synthetic oligonucleotide
cuggucaaacuguccguca

SEQ ID NO: 1915711 - RNA, 19 nt, Artificial Sequence
  Description of Artificial Sequence: Synthetic oligonucleotide
cugugcuggccgcuccucc

SEQ ID NO: 1915712 - RNA, 19 nt, Artificial Sequence
  Description of Artificial Sequence: Synthetic oligonucleotide
acgaccugcuuuguagcca

SEQ ID NO: 1915713 - RNA, 19 nt, Artificial Sequence
  Description of Artificial Sequence: Synthetic oligonucleotide
cccgaucugguuuagagua

SEQ ID NO: 1915714 - RNA, 19 nt, Artificial Sequence
  Description of Artificial Sequence: Synthetic oligonucleotide
ccuugucacuuucauggac

SEQ ID NO: 1915715 - RNA, 19 nt, Artificial Sequence
  Description of Artificial Sequence: Synthetic oligonucleotide
ggugugggcagcacgcuug

SEQ ID NO: 1915716 - RNA, 19 nt, Artificial Sequence
  Description of Artificial Sequence: Synthetic oligonucleotide
uggcgucauuaccuuuccu

SEQ ID NO: 1915717 - RNA, 19 nt, Artificial Sequence
  Description of Artificial Sequence: Synthetic oligonucleotide
uccagagauuuaggcaaau

SEQ ID NO: 1915718 - RNA, 19 nt, Artificial Sequence
  Description of Artificial Sequence: Synthetic oligonucleotide
ugccuuuguccaacuggua

SEQ ID NO: 1915719 - RNA, 19 nt, Artificial Sequence
  Description of Artificial Sequence: Synthetic oligonucleotide
cuugcaugccuuuguccaa

SEQ ID NO: 1915720 - RNA, 19 nt, Artificial Sequence
  Description of Artificial Sequence: Synthetic oligonucleotide
cuagccaguuggcgucaag

SEQ ID NO: 1915721 - RNA, 19 nt, Artificial Sequence
  Description of Artificial Sequence: Synthetic oligonucleotide
cacuuucauggacaggaua

SEQ ID NO: 1915722 - RNA, 19 nt, Artificial Sequence
  Description of Artificial Sequence: Synthetic oligonucleotide
cacaugcaagugaccugug

SEQ ID NO: 1915723 - RNA, 19 nt, Artificial Sequence
  Description of Artificial Sequence: Synthetic oligonucleotide
gaacugaauuuaucuugau

SEQ ID NO: 1915724 - RNA, 19 nt, Artificial Sequence
  Description of Artificial Sequence: Synthetic oligonucleotide
guaguuaauucuagccagu

SEQ ID NO: 1915725 - RNA, 19 nt, Artificial Sequence
  Description of Artificial Sequence: Synthetic oligonucleotide
acuugcugggagguguuuu

SEQ ID NO: 1915726 - RNA, 19 nt, Artificial Sequence
  Description of Artificial Sequence: Synthetic oligonucleotide
ggcagcacgcuugugagaa

SEQ ID NO: 1915727 - RNA, 19 nt, Artificial Sequence
  Description of Artificial Sequence: Synthetic oligonucleotide
cauuaccuuuccugcuaga

SEQ ID NO: 1915728 - RNA, 19 nt, Artificial Sequence
  Description of Artificial Sequence: Synthetic oligonucleotide
cugucacucugugcuggcc

SEQ ID NO: 1915729 - RNA, 19 nt, Artificial Sequence
  Description of Artificial Sequence: Synthetic oligonucleotide
ggcgucaaguguguugaug

SEQ ID NO: 1915730 - RNA, 19 nt, Artificial Sequence
  Description of Artificial Sequence: Synthetic oligonucleotide
accugcuuuguagccaaau

SEQ ID NO: 1915731 - RNA, 19 nt, Artificial Sequence
  Description of Artificial Sequence: Synthetic oligonucleotide
cacucuauauaggugacuu

SEQ ID NO: 1915732 - RNA, 19 nt, Artificial Sequence
  Description of Artificial Sequence: Synthetic oligonucleotide
caggccgaugcuccugcug

SEQ ID NO: 1915733 - RNA, 19 nt, Artificial Sequence
  Description of Artificial Sequence: Synthetic oligonucleotide
gucgcacagguuguauaac

SEQ ID NO: 1915734 - RNA, 19 nt, Artificial Sequence
  Description of Artificial Sequence: Synthetic oligonucleotide
ugaaugcuuggggcuuacu

SEQ ID NO: 1915735 - RNA, 19 nt, Artificial Sequence
  Description of Artificial Sequence: Synthetic oligonucleotide
accuccccgaucugguuua

SEQ ID NO: 1915736 - RNA, 19 nt, Artificial Sequence
  Description of Artificial Sequence: Synthetic oligonucleotide
gugacuugcugggaggugu

SEQ ID NO: 1915737 - RNA, 19 nt, Artificial Sequence
  Description of Artificial Sequence: Synthetic oligonucleotide
agaguagcuggggcugcug

SEQ ID NO: 1915738 - RNA, 19 nt, Artificial Sequence
  Description of Artificial Sequence: Synthetic oligonucleotide
cccaacaacauagcccuug

SEQ ID NO: 1915739 - RNA, 19 nt, Artificial Sequence
  Description of Artificial Sequence: Synthetic oligonucleotide
ccucaaugacaguccacug

SEQ ID NO: 1915740 - RNA, 19 nt, Artificial Sequence
  Description of Artificial Sequence: Synthetic oligonucleotide
gccgaccuuguuucugucc

SEQ ID NO: 1915741 - RNA, 19 nt, Artificial Sequence
  Description of Artificial Sequence: Synthetic oligonucleotide
ggacacuccuccaucacaa

SEQ ID NO: 1915742 - RNA, 19 nt, Artificial Sequence
  Description of Artificial Sequence: Synthetic oligonucleotide
caggcugaaucuucaccaa

SEQ ID NO: 1915743 - RNA, 19 nt, Artificial Sequence
  Description of Artificial Sequence: Synthetic oligonucleotide
gcucacaugcaagugaccu

SEQ ID NO: 1915744 - RNA, 19 nt, Artificial Sequence
  Description of Artificial Sequence: Synthetic oligonucleotide
cugcuagaaccuggaacuc

SEQ ID NO: 1915745 - RNA, 19 nt, Artificial Sequence
  Description of Artificial Sequence: Synthetic oligonucleotide
ccgaucugguuuagaguag

SEQ ID NO: 1915746 - RNA, 19 nt, Artificial Sequence
  Description of Artificial Sequence: Synthetic oligonucleotide
gccaaauugccuucacugu

SEQ ID NO: 1915747 - RNA, 19 nt, Artificial Sequence
  Description of Artificial Sequence: Synthetic oligonucleotide
gcugcgucguuuguuugug

SEQ ID NO: 1915748 - RNA, 19 nt, Artificial Sequence
  Description of Artificial Sequence: Synthetic oligonucleotide
cugggugaauggccccaac

SEQ ID NO: 1915749 - RNA, 19 nt, Artificial Sequence
  Description of Artificial Sequence: Synthetic oligonucleotide
gcuugugauccuaccuccc

SEQ ID NO: 1915750 - RNA, 19 nt, Artificial Sequence
  Description of Artificial Sequence: Synthetic oligonucleotide
cacgcuugugagaagccau

SEQ ID NO: 1915751 - RNA, 19 nt, Artificial Sequence
  Description of Artificial Sequence: Synthetic oligonucleotide
gaaauacgaccugcuuugu

SEQ ID NO: 1915752 - RNA, 19 nt, Artificial Sequence
  Description of Artificial Sequence: Synthetic oligonucleotide
gguugggaugcgcuggugu

SEQ ID NO: 1915753 - RNA, 19 nt, Artificial Sequence
  Description of Artificial Sequence: Synthetic oligonucleotide
gaugucgcacagguuguau

SEQ ID NO: 1915754 - RNA, 19 nt, Artificial Sequence
  Description of Artificial Sequence: Synthetic oligonucleotide
ucuagccaguuggcgucaa

SEQ ID NO: 1915755 - RNA, 19 nt, Artificial Sequence
  Description of Artificial Sequence: Synthetic oligonucleotide
gcaagugaccugugucaca

SEQ ID NO: 1915756 - RNA, 19 nt, Artificial Sequence
  Description of Artificial Sequence: Synthetic oligonucleotide
cacaagucuugcaugccuu

SEQ ID NO: 1915757 - RNA, 19 nt, Artificial Sequence
  Description of Artificial Sequence: Synthetic oligonucleotide
ccuggucaaacuguccguc

SEQ ID NO: 1915758 - RNA, 19 nt, Artificial Sequence
  Description of Artificial Sequence: Synthetic oligonucleotide
uggucuccuuuaggugucu

SEQ ID NO: 1915759 - RNA, 19 nt, Artificial Sequence
  Description of Artificial Sequence: Synthetic oligonucleotide
gccaguuggcgucaagugu

SEQ ID NO: 1915760 - RNA, 19 nt, Artificial Sequence
  Description of Artificial Sequence: Synthetic oligonucleotide
ggauaccuuccugauaggu

SEQ ID NO: 1915761 - RNA, 19 nt, Artificial Sequence
  Description of Artificial Sequence: Synthetic oligonucleotide
gcugccgaccuuguuucug

SEQ ID NO: 1915762 - RNA, 19 nt, Artificial Sequence
  Description of Artificial Sequence: Synthetic oligonucleotide
ccggagggcacuguggcug

SEQ ID NO: 1915763 - RNA, 19 nt, Artificial Sequence
  Description of Artificial Sequence: Synthetic oligonucleotide
cgucaaguguguugaugac

SEQ ID NO: 1915764 - RNA, 19 nt, Artificial Sequence
  Description of Artificial Sequence: Synthetic oligonucleotide
agagggccguagucuguuu

SEQ ID NO: 1915765 - RNA, 19 nt, Artificial Sequence
  Description of Artificial Sequence: Synthetic oligonucleotide
ccguagucuguuuugauuu

SEQ ID NO: 1915766 - RNA, 19 nt, Artificial Sequence
  Description of Artificial Sequence: Synthetic oligonucleotide
cugccgaccuuguuucugu

SEQ ID NO: 1915767 - RNA, 19 nt, Artificial Sequence
  Description of Artificial Sequence: Synthetic oligonucleotide
agguugggaugcgcuggug

SEQ ID NO: 1915768 - RNA, 19 nt, Artificial Sequence
  Description of Artificial Sequence: Synthetic oligonucleotide
gagggccguagucuguuuu

SEQ ID NO: 1915769 - RNA, 19 nt, Artificial Sequence
  Description of Artificial Sequence: Synthetic oligonucleotide
aguucccggagggcacugu

SEQ ID NO: 1915770 - RNA, 19 nt, Artificial Sequence
  Description of Artificial Sequence: Synthetic oligonucleotide
uggcgucaaguguguugau

SEQ ID NO: 1915771 - RNA, 19 nt, Artificial Sequence
  Description of Artificial Sequence: Synthetic oligonucleotide
cgucguuuguuugugucuc

SEQ ID NO: 1915772 - RNA, 19 nt, Artificial Sequence
  Description of Artificial Sequence: Synthetic oligonucleotide
guguugaugacagcuccuu

SEQ ID NO: 1915773 - RNA, 19 nt, Artificial Sequence
  Description of Artificial Sequence: Synthetic oligonucleotide
gcccuugagauaauacucu

SEQ ID NO: 1915774 - RNA, 19 nt, Artificial Sequence
  Description of Artificial Sequence: Synthetic oligonucleotide
gcagcacgcuugugagaag

SEQ ID NO: 1915775 - RNA, 19 nt, Artificial Sequence
  Description of Artificial Sequence: Synthetic oligonucleotide
cgucugggcagcugaacuc

SEQ ID NO: 1915776 - RNA, 19 nt, Artificial Sequence
  Description of Artificial Sequence: Synthetic oligonucleotide
gcacgcuugugagaagcca

SEQ ID NO: 1915777 - RNA, 19 nt, Artificial Sequence
  Description of Artificial Sequence: Synthetic oligonucleotide
cuucacugucgugucucaa

SEQ ID NO: 1915778 - RNA, 19 nt, Artificial Sequence
  Description of Artificial Sequence: Synthetic oligonucleotide
gcgucguuuguuugugucu

SEQ ID NO: 1915779 - RNA, 19 nt, Artificial Sequence
  Description of Artificial Sequence: Synthetic oligonucleotide
gcgucugggcagcugaacu

SEQ ID NO: 1915780 - RNA, 19 nt, Artificial Sequence
  Description of Artificial Sequence: Synthetic oligonucleotide
ccuuuccugcuagaaccug

SEQ ID NO: 1915781 - RNA, 19 nt, Artificial Sequence
  Description of Artificial Sequence: Synthetic oligonucleotide
cuuuugcugcgucguuugu

SEQ ID NO: 1915782 - RNA, 19 nt, Artificial Sequence
  Description of Artificial Sequence: Synthetic oligonucleotide
aguuggcgucaaguguguu

SEQ ID NO: 1915783 - RNA, 19 nt, Artificial Sequence
  Description of Artificial Sequence: Synthetic oligonucleotide
cccucaaugacaguccacu

SEQ ID NO: 1915784 - RNA, 19 nt, Artificial Sequence
  Description of Artificial Sequence: Synthetic oligonucleotide
gccguagucuguuuugauu

SEQ ID NO: 1915785 - RNA, 19 nt, Artificial Sequence
  Description of Artificial Sequence: Synthetic oligonucleotide
caguuggcgucaagugugu

SEQ ID NO: 1915786 - RNA, 19 nt, Artificial Sequence
  Description of Artificial Sequence: Synthetic oligonucleotide
guagcuggggcugcuguuu

SEQ ID NO: 1915787 - RNA, 19 nt, Artificial Sequence
  Description of Artificial Sequence: Synthetic oligonucleotide
gcuccuuuccuugucacuu

SEQ ID NO: 1915788 - RNA, 19 nt, Artificial Sequence
  Description of Artificial Sequence: Synthetic oligonucleotide
cacugucgugucucaaaau

SEQ ID NO: 1915789 - RNA, 19 nt, Artificial Sequence
  Description of Artificial Sequence: Synthetic oligonucleotide
ccgaccuuguuucuguccu

SEQ ID NO: 1915790 - RNA, 19 nt, Artificial Sequence
  Description of Artificial Sequence: Synthetic oligonucleotide
cuccuugguccaacauucu

SEQ ID NO: 1915791 - RNA, 19 nt, Artificial Sequence
  Description of Artificial Sequence: Synthetic oligonucleotide
cugguacugcugaaugcuu

SEQ ID NO: 1915792 - RNA, 19 nt, Artificial Sequence
  Description of Artificial Sequence: Synthetic oligonucleotide
gugugggcagcacgcuugu

SEQ ID NO: 1915793 - RNA, 19 nt, Artificial Sequence
  Description of Artificial Sequence: Synthetic oligonucleotide
gggccguagucuguuuuga

SEQ ID NO: 1915794 - RNA, 19 nt, Artificial Sequence
  Description of Artificial Sequence: Synthetic oligonucleotide
gggagguguuuucgauguc

SEQ ID NO: 1915795 - RNA, 19 nt, Artificial Sequence
  Description of Artificial Sequence: Synthetic oligonucleotide
ggccuugugcagguuggga

SEQ ID NO: 1915796 - RNA, 19 nt, Artificial Sequence
  Description of Artificial Sequence: Synthetic oligonucleotide
ggcgucugggcagcugaac

SEQ ID NO: 1915797 - RNA, 19 nt, Artificial Sequence
  Description of Artificial Sequence: Synthetic oligonucleotide
caauggcgucauuaccuuu

SEQ ID NO: 1915798 - RNA, 19 nt, Artificial Sequence
  Description of Artificial Sequence: Synthetic oligonucleotide
ggcuuacuuuuaaccgaga

SEQ ID NO: 1915799 - RNA, 19 nt, Artificial Sequence
  Description of Artificial Sequence: Synthetic oligonucleotide
ccuucacugucgugucuca

SEQ ID NO: 1915800 - RNA, 19 nt, Artificial Sequence
  Description of Artificial Sequence: Synthetic oligonucleotide
gugauccuaccuccccgau

SEQ ID NO: 1915801 - RNA, 19 nt, Artificial Sequence
  Description of Artificial Sequence: Synthetic oligonucleotide
ccuccucaagaggcccucg

SEQ ID NO: 1915802 - RNA, 19 nt, Artificial Sequence
  Description of Artificial Sequence: Synthetic oligonucleotide
ggguuuguugaagcuugua

SEQ ID NO: 1915803 - RNA, 19 nt, Artificial Sequence
  Description of Artificial Sequence: Synthetic oligonucleotide
ggucuccuuuaggugucuc

SEQ ID NO: 1915804 - RNA, 19 nt, Artificial Sequence
  Description of Artificial Sequence: Synthetic oligonucleotide
gaccugugucacacccucu

SEQ ID NO: 1915805 - RNA, 19 nt, Artificial Sequence
  Description of Artificial Sequence: Synthetic oligonucleotide
cgaugcuccugcugccgac

SEQ ID NO: 1915806 - RNA, 19 nt, Artificial Sequence
  Description of Artificial Sequence: Synthetic oligonucleotide
cugcgucguuuguuugugu

SEQ ID NO: 1915807 - RNA, 19 nt, Artificial Sequence
  Description of Artificial Sequence: Synthetic oligonucleotide
gcugaaugcuuggggcuua

SEQ ID NO: 1915808 - RNA, 19 nt, Artificial Sequence
  Description of Artificial Sequence: Synthetic oligonucleotide
cgucauuaccuuuccugcu

SEQ ID NO: 1915809 - RNA, 19 nt, Artificial Sequence
  Description of Artificial Sequence: Synthetic oligonucleotide
cuccccgaucugguuuaga

SEQ ID NO: 1915810 - RNA, 19 nt, Artificial Sequence
  Description of Artificial Sequence: Synthetic oligonucleotide
ggccguagucuguuuugau

SEQ ID NO: 1915811 - RNA, 19 nt, Artificial Sequence
  Description of Artificial Sequence: Synthetic oligonucleotide
cguuuguuugugucucgua

SEQ ID NO: 1915812 - RNA, 19 nt, Artificial Sequence
  Description of Artificial Sequence: Synthetic oligonucleotide
ccgaugcuccugcugccga

SEQ ID NO: 1915813 - RNA, 19 nt, Artificial Sequence
  Description of Artificial Sequence: Synthetic oligonucleotide
cuggccgcuccuccuuggu

SEQ ID NO: 1915814 - RNA, 19 nt, Artificial Sequence
  Description of Artificial Sequence: Synthetic oligonucleotide
cagagggccguagucuguu

SEQ ID NO: 1915815 - RNA, 19 nt, Artificial Sequence
  Description of Artificial Sequence: Synthetic oligonucleotide
ccgagacagcaccacucua

SEQ ID NO: 1915816 - RNA, 19 nt, Artificial Sequence
  Description of Artificial Sequence: Synthetic oligonucleotide
gggugugggcagcacgcuu

SEQ ID NO: 1915817 - RNA, 19 nt, Artificial Sequence
  Description of Artificial Sequence: Synthetic oligonucleotide
gcgcugguguccaggccga

SEQ ID NO: 1915818 - RNA, 19 nt, Artificial Sequence
  Description of Artificial Sequence: Synthetic oligonucleotide
cacccucuuccuggucaaa

SEQ ID NO: 1915819 - RNA, 19 nt, Artificial Sequence
  Description of Artificial Sequence: Synthetic oligonucleotide
ccacucuauauaggugacu

SEQ ID NO: 1915820 - RNA, 19 nt, Artificial Sequence
  Description of Artificial Sequence: Synthetic oligonucleotide
cgcuccuccuugguccaac

SEQ ID NO: 1915821 - RNA, 19 nt, Artificial Sequence
  Description of Artificial Sequence: Synthetic oligonucleotide
ggagggcacuguggcugcu

SEQ ID NO: 1915822 - RNA, 19 nt, Artificial Sequence
  Description of Artificial Sequence: Synthetic oligonucleotide
cgaugucgcacagguugua

SEQ ID NO: 1915823 - RNA, 19 nt, Artificial Sequence
  Description of Artificial Sequence: Synthetic oligonucleotide
aauuucuagagacaaaauc

SEQ ID NO: 1915824 - RNA, 19 nt, Artificial Sequence
  Description of Artificial Sequence: Synthetic oligonucleotide
cuauuuaacaacuuuaccc

SEQ ID NO: 1915825 - RNA, 19 nt, Artificial Sequence
  Description of Artificial Sequence: Synthetic oligonucleotide
aaauagucccaccugggcc

SEQ ID NO: 1915826 - RNA, 19 nt, Artificial Sequence
  Description of Artificial Sequence: Synthetic oligonucleotide
aagccuuuaguauaugugg

SEQ ID NO: 1915827 - RNA, 19 nt, Artificial Sequence
  Description of Artificial Sequence: Synthetic oligonucleotide
aaaucgacuacagacacac

SEQ ID NO: 1915828 - RNA, 19 nt, Artificial Sequence
  Description of Artificial Sequence: Synthetic oligonucleotide
ucuacuuuauuacauaacu

SEQ ID NO: 1915829 - RNA, 19 nt, Artificial Sequence
  Description of Artificial Sequence: Synthetic oligonucleotide
aucgacuacagacacaccc

SEQ ID NO: 1915830 - RNA, 19 nt, Artificial Sequence
  Description of Artificial Sequence: Synthetic oligonucleotide
auuaaauagucccaccugg

SEQ ID NO: 1915831 - RNA, 19 nt, Artificial Sequence
  Description of Artificial Sequence: Synthetic oligonucleotide
aaucaagccuucuuuaguc

SEQ ID NO: 1915832 - RNA, 19 nt, Artificial Sequence
  Description of Artificial Sequence: Synthetic oligonucleotide
uauuuaacaacuuuaccca

SEQ ID NO: 1915833 - RNA, 19 nt, Artificial Sequence
  Description of Artificial Sequence: Synthetic oligonucleotide
aaauuaaauagucccaccu

SEQ ID NO: 1915834 - RNA, 19 nt, Artificial Sequence
  Description of Artificial Sequence: Synthetic oligonucleotide
auauguggagaguugaucg

SEQ ID NO: 1915835 - RNA, 19 nt, Artificial Sequence
  Description of Artificial Sequence: Synthetic oligonucleotide
aauuaaauagucccaccug

SEQ ID NO: 1915836 - RNA, 19 nt, Artificial Sequence
  Description of Artificial Sequence: Synthetic oligonucleotide
aagaaucauguucucuccc

SEQ ID NO: 1915837 - RNA, 19 nt, Artificial Sequence
  Description of Artificial Sequence: Synthetic oligonucleotide
uacauaacuauuuaacaac

SEQ ID NO: 1915838 - RNA, 19 nt, Artificial Sequence
  Description of Artificial Sequence: Synthetic oligonucleotide
aacaacuuuacccaccagu

SEQ ID NO: 1915839 - RNA, 19 nt, Artificial Sequence
  Description of Artificial Sequence: Synthetic oligonucleotide
uuuauaaggaaauccagau

SEQ ID NO: 1915840 - RNA, 19 nt, Artificial Sequence
  Description of Artificial Sequence: Synthetic oligonucleotide
cacgaaaucgacuacagac

SEQ ID NO: 1915841 - RNA, 19 nt, Artificial Sequence
  Description of Artificial Sequence: Synthetic oligonucleotide
aaaacucuacuuuauuaca

SEQ ID NO: 1915842 - RNA, 19 nt, Artificial Sequence
  Description of Artificial Sequence: Synthetic oligonucleotide
auaugacuucauuauaaac

SEQ ID NO: 1915843 - RNA, 19 nt, Artificial Sequence
  Description of Artificial Sequence: Synthetic oligonucleotide
auaaggagcuccuugcugg

SEQ ID NO: 1915844 - RNA, 19 nt, Artificial Sequence
  Description of Artificial Sequence: Synthetic oligonucleotide
agcuuagccgcuuugcucc

SEQ ID NO: 1915845 - RNA, 19 nt, Artificial Sequence
  Description of Artificial Sequence: Synthetic oligonucleotide
uucccaaucgcuaaggcca

SEQ ID NO: 1915846 - RNA, 19 nt, Artificial Sequence
  Description of Artificial Sequence: Synthetic oligonucleotide
aaucauguucucucccagc

SEQ ID NO: 1915847 - RNA, 19 nt, Artificial Sequence
  Description of Artificial Sequence: Synthetic oligonucleotide
uuaaauagucccaccuggg

SEQ ID NO: 1915848 - RNA, 19 nt, Artificial Sequence
  Description of Artificial Sequence: Synthetic oligonucleotide
acuaauacuguuguguuuc

SEQ ID NO: 1915849 - RNA, 19 nt, Artificial Sequence
  Description of Artificial Sequence: Synthetic oligonucleotide
ucuacuaauacuguugugu

SEQ ID NO: 1915850 - RNA, 19 nt, Artificial Sequence
  Description of Artificial Sequence: Synthetic oligonucleotide
ugcaaguucggaaagcuca

SEQ ID NO: 1915851 - RNA, 19 nt, Artificial Sequence
  Description of Artificial Sequence: Synthetic oligonucleotide
uuugagaucaccgucacaa

SEQ ID NO: 1915852 - RNA, 19 nt, Artificial Sequence
  Description of Artificial Sequence: Synthetic oligonucleotide
aaaccuauuuggcuuccac

SEQ ID NO: 1915853 - RNA, 19 nt, Artificial Sequence
  Description of Artificial Sequence: Synthetic oligonucleotide
cacaagaccgggaagaagc

SEQ ID NO: 1915854 - RNA, 19 nt, Artificial Sequence
  Description of Artificial Sequence: Synthetic oligonucleotide
aguuuacuucuacuaauac

SEQ ID NO: 1915855 - RNA, 19 nt, Artificial Sequence
  Description of Artificial Sequence: Synthetic oligonucleotide
aagauucaaggguugaaga

SEQ ID NO: 1915856 - RNA, 19 nt, Artificial Sequence
  Description of Artificial Sequence: Synthetic oligonucleotide
ucugguuucagucucuccu

SEQ ID NO: 1915857 - RNA, 19 nt, Artificial Sequence
  Description of Artificial Sequence: Synthetic oligonucleotide
aaaggaguagcccguuuuc

SEQ ID NO: 1915858 - RNA, 19 nt, Artificial Sequence
  Description of Artificial Sequence: Synthetic oligonucleotide
cuaagaaucauguucucuc

SEQ ID NO: 1915859 - RNA, 19 nt, Artificial Sequence
  Description of Artificial Sequence: Synthetic oligonucleotide
uuaacaacuuuacccacca

SEQ ID NO: 1915860 - RNA, 19 nt, Artificial Sequence
  Description of Artificial Sequence: Synthetic oligonucleotide
uaacuauuuaacaacuuua

SEQ ID NO: 1915861 - RNA, 19 nt, Artificial Sequence
  Description of Artificial Sequence: Synthetic oligonucleotide
ugugacagcauucugguuu

SEQ ID NO: 1915862 - RNA, 19 nt, Artificial Sequence
  Description of Artificial Sequence: Synthetic oligonucleotide
aauagucccaccugggcca

SEQ ID NO: 1915863 - RNA, 19 nt, Artificial Sequence
  Description of Artificial Sequence: Synthetic oligonucleotide
gaguugaucguuuaggcuc

SEQ ID NO: 1915864 - RNA, 19 nt, Artificial Sequence
  Description of Artificial Sequence: Synthetic oligonucleotide
auagaacccagauggcacc

SEQ ID NO: 1915865 - RNA, 19 nt, Artificial Sequence
  Description of Artificial Sequence: Synthetic oligonucleotide
acuccgugcacguaagagc

SEQ ID NO: 1915866 - RNA, 19 nt, Artificial Sequence
  Description of Artificial Sequence: Synthetic oligonucleotide
ugagaucaccgucacaagc

SEQ ID NO: 1915867 - RNA, 19 nt, Artificial Sequence
  Description of Artificial Sequence: Synthetic oligonucleotide
auaacuauuuaacaacuuu

SEQ ID NO: 1915868 - RNA, 19 nt, Artificial Sequence
  Description of Artificial Sequence: Synthetic oligonucleotide
ugugccauggcugggacgg

SEQ ID NO: 1915869 - RNA, 19 nt, Artificial Sequence
  Description of Artificial Sequence: Synthetic oligonucleotide
uggaggcagacgaugauag

SEQ ID NO: 1915870 - RNA, 19 nt, Artificial Sequence
  Description of Artificial Sequence: Synthetic oligonucleotide
uuauuacauaacuauuuaa

SEQ ID NO: 1915871 - RNA, 19 nt, Artificial Sequence
  Description of Artificial Sequence: Synthetic oligonucleotide
uaaauagucccaccugggc

SEQ ID NO: 1915872 - RNA, 19 nt, Artificial Sequence
  Description of Artificial Sequence: Synthetic oligonucleotide
gaggcagacgaugauagcg

SEQ ID NO: 1915873 - RNA, 19 nt, Artificial Sequence
  Description of Artificial Sequence: Synthetic oligonucleotide
aagcuuagccgcuuugcuc

SEQ ID NO: 1915874 - RNA, 19 nt, Artificial Sequence
  Description of Artificial Sequence: Synthetic oligonucleotide
ugucucacaguuuacuucu

SEQ ID NO: 1915875 - RNA, 19 nt, Artificial Sequence
  Description of Artificial Sequence: Synthetic oligonucleotide
aacuuuacccaccaguaua

SEQ ID NO: 1915876 - RNA, 19 nt, Artificial Sequence
  Description of Artificial Sequence: Synthetic oligonucleotide
gagaguugaucguuuaggc

SEQ ID NO: 1915877 - RNA, 19 nt, Artificial Sequence
  Description of Artificial Sequence: Synthetic oligonucleotide
cucaaagcgcacgaaaucg

SEQ ID NO: 1915878 - RNA, 19 nt, Artificial Sequence
  Description of Artificial Sequence: Synthetic oligonucleotide
uuauaaggaaauccagauc

SEQ ID NO: 1915879 - RNA, 19 nt, Artificial Sequence
  Description of Artificial Sequence: Synthetic oligonucleotide
cauagaacccagauggcac

SEQ ID NO: 1915880 - RNA, 19 nt, Artificial Sequence
  Description of Artificial Sequence: Synthetic oligonucleotide
acucaaagcgcacgaaauc

SEQ ID NO: 1915881 - RNA, 19 nt, Artificial Sequence
  Description of Artificial Sequence: Synthetic oligonucleotide
ucccuugaagcuuagccgc

SEQ ID NO: 1915882 - RNA, 19 nt, Artificial Sequence
  Description of Artificial Sequence: Synthetic oligonucleotide
cucccuugaagcuuagccg

SEQ ID NO: 1915883 - RNA, 19 nt, Artificial Sequence
  Description of Artificial Sequence: Synthetic oligonucleotide
uucuagagacaaaaucugu

SEQ ID NO: 1915884 - RNA, 19 nt, Artificial Sequence
  Description of Artificial Sequence: Synthetic oligonucleotide
cuugagagagccuucucug

SEQ ID NO: 1915885 - RNA, 19 nt, Artificial Sequence
  Description of Artificial Sequence: Synthetic oligonucleotide
auacuguuguguuucccuc

SEQ ID NO: 1915886 - RNA, 19 nt, Artificial Sequence
  Description of Artificial Sequence: Synthetic oligonucleotide
ucacaggucuggcagacga

SEQ ID NO: 1915887 - RNA, 19 nt, Artificial Sequence
  Description of Artificial Sequence: Synthetic oligonucleotide
cuccgugcacguaagagcc

SEQ ID NO: 1915888 - RNA, 19 nt, Artificial Sequence
  Description of Artificial Sequence: Synthetic oligonucleotide
cacguaagagccgacauag

SEQ ID NO: 1915889 - RNA, 19 nt, Artificial Sequence
  Description of Artificial Sequence: Synthetic oligonucleotide
gaaucauguucucucccag

SEQ ID NO: 1915890 - RNA, 19 nt, Artificial Sequence
  Description of Artificial Sequence: Synthetic oligonucleotide
gagaucaccgucacaagcc

SEQ ID NO: 1915891 - RNA, 19 nt, Artificial Sequence
  Description of Artificial Sequence: Synthetic oligonucleotide
agguuuagaaaacaacuuu

SEQ ID NO: 1915892 - RNA, 19 nt, Artificial Sequence
  Description of Artificial Sequence: Synthetic oligonucleotide
aggaguagcccguuuuccg

SEQ ID NO: 1915893 - RNA, 19 nt, Artificial Sequence
  Description of Artificial Sequence: Synthetic oligonucleotide
ucaggaagccuuuaguaua

SEQ ID NO: 1915894 - RNA, 19 nt, Artificial Sequence
  Description of Artificial Sequence: Synthetic oligonucleotide
cuucccaaucgcuaaggcc

SEQ ID NO: 1915895 - RNA, 19 nt, Artificial Sequence
  Description of Artificial Sequence: Synthetic oligonucleotide
uuaguauauguggagaguu

SEQ ID NO: 1915896 - RNA, 19 nt, Artificial Sequence
  Description of Artificial Sequence: Synthetic oligonucleotide
ugaucguuuaggcucugac

SEQ ID NO: 1915897 - RNA, 19 nt, Artificial Sequence
  Description of Artificial Sequence: Synthetic oligonucleotide
acaguuuacuucuacuaau

SEQ ID NO: 1915898 - RNA, 19 nt, Artificial Sequence
  Description of Artificial Sequence: Synthetic oligonucleotide
cucuguugggcccagcugc

SEQ ID NO: 1915899 - RNA, 19 nt, Artificial Sequence
  Description of Artificial Sequence: Synthetic oligonucleotide
aacucuacuuuauuacaua

SEQ ID NO: 1915900 - RNA, 19 nt, Artificial Sequence
  Description of Artificial Sequence: Synthetic oligonucleotide
agaaucauguucucuccca

SEQ ID NO: 1915901 - RNA, 19 nt, Artificial Sequence
  Description of Artificial Sequence: Synthetic oligonucleotide
uuuaguauauguggagagu

SEQ ID NO: 1915902 - RNA, 19 nt, Artificial Sequence
  Description of Artificial Sequence: Synthetic oligonucleotide
aagcgcacgaaaucgacua

SEQ ID NO: 1915903 - RNA, 19 nt, Artificial Sequence
  Description of Artificial Sequence: Synthetic oligonucleotide
cuggcagacgaccagggcc

SEQ ID NO: 1915904 - RNA, 19 nt, Artificial Sequence
  Description of Artificial Sequence: Synthetic oligonucleotide
ucaaagcgcacgaaaucga

SEQ ID NO: 1915905 - RNA, 19 nt, Artificial Sequence
  Description of Artificial Sequence: Synthetic oligonucleotide
aguucaggaagccuuuagu

SEQ ID NO: 1915906 - RNA, 19 nt, Artificial Sequence
  Description of Artificial Sequence: Synthetic oligonucleotide
acaggucuggcagacgacc

SEQ ID NO: 1915907 - RNA, 19 nt, Artificial Sequence
  Description of Artificial Sequence: Synthetic oligonucleotide
ccuucuuuagucuuccucc

SEQ ID NO: 1915908 - RNA, 19 nt, Artificial Sequence
  Description of Artificial Sequence: Synthetic oligonucleotide
caagauucaaggguugaag

SEQ ID NO: 1915909 - RNA, 19 nt, Artificial Sequence
  Description of Artificial Sequence: Synthetic oligonucleotide
aguauauguggagaguuga

SEQ ID NO: 1915910 - RNA, 19 nt, Artificial Sequence
  Description of Artificial Sequence: Synthetic oligonucleotide
uggagaguugaucguuuag

SEQ ID NO: 1915911 - RNA, 19 nt, Artificial Sequence
  Description of Artificial Sequence: Synthetic oligonucleotide
agaguugaucguuuaggcu

SEQ ID NO: 1915912 - RNA, 19 nt, Artificial Sequence
  Description of Artificial Sequence: Synthetic oligonucleotide
ucgacuacagacacacccu

SEQ ID NO: 1915913 - RNA, 19 nt, Artificial Sequence
  Description of Artificial Sequence: Synthetic oligonucleotide
uauauguggagaguugauc

SEQ ID NO: 1915914 - RNA, 19 nt, Artificial Sequence
  Description of Artificial Sequence: Synthetic oligonucleotide
aaacucuacuuuauuacau

SEQ ID NO: 1915915 - RNA, 19 nt, Artificial Sequence
  Description of Artificial Sequence: Synthetic oligonucleotide
acucuacuuuauuacauaa

SEQ ID NO: 1915916 - RNA, 19 nt, Artificial Sequence
  Description of Artificial Sequence: Synthetic oligonucleotide
uucggaaagcucagaggag

SEQ ID NO: 1915917 - RNA, 19 nt, Artificial Sequence
  Description of Artificial Sequence: Synthetic oligonucleotide
gaugauagcguggggcccg

SEQ ID NO: 1915918 - RNA, 19 nt, Artificial Sequence
  Description of Artificial Sequence: Synthetic oligonucleotide
cagacgaugauagcguggg

SEQ ID NO: 1915919 - RNA, 19 nt, Artificial Sequence
  Description of Artificial Sequence: Synthetic oligonucleotide
uuuagucuuccucccuuga

SEQ ID NO: 1915920 - RNA, 19 nt, Artificial Sequence
  Description of Artificial Sequence: Synthetic oligonucleotide
uggcagacgaccagggccc

SEQ ID NO: 1915921 - RNA, 19 nt, Artificial Sequence
  Description of Artificial Sequence: Synthetic oligonucleotide
uguuugagaucaccgucac

SEQ ID NO: 1915922 - RNA, 19 nt, Artificial Sequence
  Description of Artificial Sequence: Synthetic oligonucleotide
aguugacaaaggaguagcc

SEQ ID NO: 1915923 - RNA, 19 nt, Artificial Sequence
  Description of Artificial Sequence: Synthetic oligonucleotide
ucauaaggagcuccuugcu

SEQ ID NO: 1915924 - RNA, 19 nt, Artificial Sequence
  Description of Artificial Sequence: Synthetic oligonucleotide
caguugacaaaggaguagc

SEQ ID NO: 1915925 - RNA, 19 nt, Artificial Sequence
  Description of Artificial Sequence: Synthetic oligonucleotide
uucgacuuccccacacuca

SEQ ID NO: 1915926 - RNA, 19 nt, Artificial Sequence
  Description of Artificial Sequence: Synthetic oligonucleotide
ggaagaagcgcagcgaccg

SEQ ID NO: 1915927 - RNA, 19 nt, Artificial Sequence
  Description of Artificial Sequence: Synthetic oligonucleotide
aacaagauucaaggguuga

SEQ ID NO: 1915928 - RNA, 19 nt, Artificial Sequence
  Description of Artificial Sequence: Synthetic oligonucleotide
ugaagcuuagccgcuuugc

SEQ ID NO: 1915929 - RNA, 19 nt, Artificial Sequence
  Description of Artificial Sequence: Synthetic oligonucleotide
uacuguuguguuucccucc

SEQ ID NO: 1915930 - RNA, 19 nt, Artificial Sequence
  Description of Artificial Sequence: Synthetic oligonucleotide
gaguucaggaagccuuuag

SEQ ID NO: 1915931 - RNA, 19 nt, Artificial Sequence
  Description of Artificial Sequence: Synthetic oligonucleotide
aagaccgggaagaagcgca

SEQ ID NO: 1915932 - RNA, 19 nt, Artificial Sequence
  Description of Artificial Sequence: Synthetic oligonucleotide
caagcggcggcccacgucc

SEQ ID NO: 1915933 - RNA, 19 nt, Artificial Sequence
  Description of Artificial Sequence: Synthetic oligonucleotide
aaacaagauucaaggguug

SEQ ID NO: 1915934 - RNA, 19 nt, Artificial Sequence
  Description of Artificial Sequence: Synthetic oligonucleotide
cagcauucugguuucaguc

SEQ ID NO: 1915935 - RNA, 19 nt, Artificial Sequence
  Description of Artificial Sequence: Synthetic oligonucleotide
cacauacugucccagggug

SEQ ID NO: 1915936 - RNA, 19 nt, Artificial Sequence
  Description of Artificial Sequence: Synthetic oligonucleotide
ucucacaguuuacuucuac

SEQ ID NO: 1915937 - RNA, 19 nt, Artificial Sequence
  Description of Artificial Sequence: Synthetic oligonucleotide
ucgacuuccccacacucaa

SEQ ID NO: 1915938 - RNA, 19 nt, Artificial Sequence
  Description of Artificial Sequence: Synthetic oligonucleotide
gagacaaaaucugucucac

SEQ ID NO: 1915939 - RNA, 19 nt, Artificial Sequence
  Description of Artificial Sequence: Synthetic oligonucleotide
uaaggaaauccagaucuaa

SEQ ID NO: 1915940 - RNA, 19 nt, Artificial Sequence
  Description of Artificial Sequence: Synthetic oligonucleotide
gaagcgugugccauggcug

SEQ ID NO: 1915941 - RNA, 19 nt, Artificial Sequence
  Description of Artificial Sequence: Synthetic oligonucleotide
ugauccuugagagagccuu

SEQ ID NO: 1915942 - RNA, 19 nt, Artificial Sequence
  Description of Artificial Sequence: Synthetic oligonucleotide
guaagagccgacauagaac

SEQ ID NO: 1915943 - RNA, 19 nt, Artificial Sequence
  Description of Artificial Sequence: Synthetic oligonucleotide
uucuacuaauacuguugug

SEQ ID NO: 1915944 - RNA, 19 nt, Artificial Sequence
  Description of Artificial Sequence: Synthetic oligonucleotide
ucggaaagcucagaggagu

SEQ ID NO: 1915945 - RNA, 19 nt, Artificial Sequence
  Description of Artificial Sequence: Synthetic oligonucleotide
ugcaguugacaaaggagua

SEQ ID NO: 1915946 - RNA, 19 nt, Artificial Sequence
  Description of Artificial Sequence: Synthetic oligonucleotide
ugcagcgaggggcucugcg

SEQ ID NO: 1915947 - RNA, 19 nt, Artificial Sequence
  Description of Artificial Sequence: Synthetic oligonucleotide
ucaaggguugaagagguuu

SEQ ID NO: 1915948 - RNA, 19 nt, Artificial Sequence
  Description of Artificial Sequence: Synthetic oligonucleotide
ugcacguaagagccgacau

SEQ ID NO: 1915949 - RNA, 19 nt, Artificial Sequence
  Description of Artificial Sequence: Synthetic oligonucleotide
ucugucucacaguuuacuu

SEQ ID NO: 1915950 - RNA, 19 nt, Artificial Sequence
  Description of Artificial Sequence: Synthetic oligonucleotide
caaagcgcacgaaaucgac

SEQ ID NO: 1915951 - RNA, 19 nt, Artificial Sequence
  Description of Artificial Sequence: Synthetic oligonucleotide
uuaggcucugacaguggga

SEQ ID NO: 1915952 - RNA, 19 nt, Artificial Sequence
  Description of Artificial Sequence: Synthetic oligonucleotide
aagagccgacauagaaccc

SEQ ID NO: 1915953 - RNA, 19 nt, Artificial Sequence
  Description of Artificial Sequence: Synthetic oligonucleotide
uucuuuagucuuccucccu

SEQ ID NO: 1915954 - RNA, 19 nt, Artificial Sequence
  Description of Artificial Sequence: Synthetic oligonucleotide
acuguuguguuucccuccu

SEQ ID NO: 1915955 - RNA, 19 nt, Artificial Sequence
  Description of Artificial Sequence: Synthetic oligonucleotide
agggcaacuugcuggacca

SEQ ID NO: 1915956 - RNA, 19 nt, Artificial Sequence
  Description of Artificial Sequence: Synthetic oligonucleotide
acgaaaucgacuacagaca

SEQ ID NO: 1915957 - RNA, 19 nt, Artificial Sequence
  Description of Artificial Sequence: Synthetic oligonucleotide
gaguagcccguuuuccgcc

SEQ ID NO: 1915958 - RNA, 19 nt, Artificial Sequence
  Description of Artificial Sequence: Synthetic oligonucleotide
aguagcccguuuuccgccg

SEQ ID NO: 1915959 - RNA, 19 nt, Artificial Sequence
  Description of Artificial Sequence: Synthetic oligonucleotide
aaucgacuacagacacacc

SEQ ID NO: 1915960 - RNA, 19 nt, Artificial Sequence
  Description of Artificial Sequence: Synthetic oligonucleotide
ucuucgacuuccccacacu

SEQ ID NO: 1915961 - RNA, 19 nt, Artificial Sequence
  Description of Artificial Sequence: Synthetic oligonucleotide
agaucaccgucacaagccu

SEQ ID NO: 1915962 - RNA, 19 nt, Artificial Sequence
  Description of Artificial Sequence: Synthetic oligonucleotide
aaagcgcacgaaaucgacu

SEQ ID NO: 1915963 - RNA, 19 nt, Artificial Sequence
  Description of Artificial Sequence: Synthetic oligonucleotide
ugggacggcugcagcaggg

SEQ ID NO: 1915964 - RNA, 19 nt, Artificial Sequence
  Description of Artificial Sequence: Synthetic oligonucleotide
acuugcuggaccaacugcu

SEQ ID NO: 1915965 - RNA, 19 nt, Artificial Sequence
  Description of Artificial Sequence: Synthetic oligonucleotide
aagcgcagcgaccgcagca

SEQ ID NO: 1915966 - RNA, 19 nt, Artificial Sequence
  Description of Artificial Sequence: Synthetic oligonucleotide
uuagccgcuuugcuccagc

SEQ ID NO: 1915967 - RNA, 19 nt, Artificial Sequence
  Description of Artificial Sequence: Synthetic oligonucleotide
uacccaccaguauaugacu

SEQ ID NO: 1915968 - RNA, 19 nt, Artificial Sequence
  Description of Artificial Sequence: Synthetic oligonucleotide
agcgcacgaaaucgacuac

SEQ ID NO: 1915969 - RNA, 19 nt, Artificial Sequence
  Description of Artificial Sequence: Synthetic oligonucleotide
cagggcaacuugcuggacc

SEQ ID NO: 1915970 - RNA, 19 nt, Artificial Sequence
  Description of Artificial Sequence: Synthetic oligonucleotide
uguggagaguugaucguuu

SEQ ID NO: 1915971 - RNA, 19 nt, Artificial Sequence
  Description of Artificial Sequence: Synthetic oligonucleotide
ucuggcagacgaccagggc

SEQ ID NO: 1915972 - RNA, 19 nt, Artificial Sequence
  Description of Artificial Sequence: Synthetic oligonucleotide
acaacuuuacccaccagua

SEQ ID NO: 1915973 - RNA, 19 nt, Artificial Sequence
  Description of Artificial Sequence: Synthetic oligonucleotide
agagccgacauagaaccca

SEQ ID NO: 1915974 - RNA, 19 nt, Artificial Sequence
  Description of Artificial Sequence: Synthetic oligonucleotide
aaagcucagaggaguucag

SEQ ID NO: 1915975 - RNA, 19 nt, Artificial Sequence
  Description of Artificial Sequence: Synthetic oligonucleotide
ccucccuugaagcuuagcc

SEQ ID NO: 1915976 - RNA, 19 nt, Artificial Sequence
  Description of Artificial Sequence: Synthetic oligonucleotide
aggggcucugcgucacucc

SEQ ID NO: 1915977 - RNA, 19 nt, Artificial Sequence
  Description of Artificial Sequence: Synthetic oligonucleotide
acaagaccgggaagaagcg

SEQ ID NO: 1915978 - RNA, 19 nt, Artificial Sequence
  Description of Artificial Sequence: Synthetic oligonucleotide
ggaaggguccagcagguac

SEQ ID NO: 1915979 - RNA, 19 nt, Artificial Sequence
  Description of Artificial Sequence: Synthetic oligonucleotide
aacccagauggcaccauca

SEQ ID NO: 1915980 - RNA, 19 nt, Artificial Sequence
  Description of Artificial Sequence: Synthetic oligonucleotide
agacaaaaucugucucaca

SEQ ID NO: 1915981 - RNA, 19 nt, Artificial Sequence
  Description of Artificial Sequence: Synthetic oligonucleotide
gccuuuaguauauguggag

SEQ ID NO: 1915982 - RNA, 19 nt, Artificial Sequence
  Description of Artificial Sequence: Synthetic oligonucleotide
cuucgacuuccccacacuc

SEQ ID NO: 1915983 - RNA, 19 nt, Artificial Sequence
  Description of Artificial Sequence: Synthetic oligonucleotide
auucugguuucagucucuc

SEQ ID NO: 1915984 - RNA, 19 nt, Artificial Sequence
  Description of Artificial Sequence: Synthetic oligonucleotide
uccgugcacguaagagccg

SEQ ID NO: 1915985 - RNA, 19 nt, Artificial Sequence
  Description of Artificial Sequence: Synthetic oligonucleotide
auagcguggggcccgcgug

SEQ ID NO: 1915986 - RNA, 19 nt, Artificial Sequence
  Description of Artificial Sequence: Synthetic oligonucleotide
agcuucccaaucgcuaagg

SEQ ID NO: 1915987 - RNA, 19 nt, Artificial Sequence
  Description of Artificial Sequence: Synthetic oligonucleotide
uuccgccgcagcuucauaa

SEQ ID NO: 1915988 - RNA, 19 nt, Artificial Sequence
  Description of Artificial Sequence: Synthetic oligonucleotide
uacggcugugacagcauuc

SEQ ID NO: 1915989 - RNA, 19 nt, Artificial Sequence
  Description of Artificial Sequence: Synthetic oligonucleotide
cacuccgugcacguaagag

SEQ ID NO: 1915990 - RNA, 19 nt, Artificial Sequence
  Description of Artificial Sequence: Synthetic oligonucleotide
aaaaccuauuuggcuucca

SEQ ID NO: 1915991 - RNA, 19 nt, Artificial Sequence
  Description of Artificial Sequence: Synthetic oligonucleotide
acuuuacccaccaguauau

SEQ ID NO: 1915992 - RNA, 19 nt, Artificial Sequence
  Description of Artificial Sequence: Synthetic oligonucleotide
acgaccagggccccguacu

SEQ ID NO: 1915993 - RNA, 19 nt, Artificial Sequence
  Description of Artificial Sequence: Synthetic oligonucleotide
ucugcgucacuccgugcac

SEQ ID NO: 1915994 - RNA, 19 nt, Artificial Sequence
  Description of Artificial Sequence: Synthetic oligonucleotide
ucguuuaggcucugacagu

SEQ ID NO: 1915995 - RNA, 19 nt, Artificial Sequence
  Description of Artificial Sequence: Synthetic oligonucleotide
aggucuggcagacgaccag

SEQ ID NO: 1915996 - RNA, 19 nt, Artificial Sequence
  Description of Artificial Sequence: Synthetic oligonucleotide
agccuuuaguauaugugga

SEQ ID NO: 1915997 - RNA, 19 nt, Artificial Sequence
  Description of Artificial Sequence: Synthetic oligonucleotide
ggaguagcccguuuuccgc

SEQ ID NO: 1915998 - RNA, 19 nt, Artificial Sequence
  Description of Artificial Sequence: Synthetic oligonucleotide
gagccaacagagagcgggg

SEQ ID NO: 1915999 - RNA, 19 nt, Artificial Sequence
  Description of Artificial Sequence: Synthetic oligonucleotide
gaagcuuagccgcuuugcu

SEQ ID NO: 1916000 - RNA, 19 nt, Artificial Sequence
  Description of Artificial Sequence: Synthetic oligonucleotide
ccgccuaagaaucauguuc

SEQ ID NO: 1916001 - RNA, 19 nt, Artificial Sequence
  Description of Artificial Sequence: Synthetic oligonucleotide
guuuaggcucugacagugg

SEQ ID NO: 1916002 - RNA, 19 nt, Artificial Sequence
  Description of Artificial Sequence: Synthetic oligonucleotide
gaagaagcgcagcgaccgc

SEQ ID NO: 1916003 - RNA, 19 nt, Artificial Sequence
  Description of Artificial Sequence: Synthetic oligonucleotide
cucuucgacuuccccacac

SEQ ID NO: 1916004 - RNA, 19 nt, Artificial Sequence
  Description of Artificial Sequence: Synthetic oligonucleotide
acaagauucaaggguugaa

SEQ ID NO: 1916005 - RNA, 19 nt, Artificial Sequence
  Description of Artificial Sequence: Synthetic oligonucleotide
gaaaucgacuacagacaca

SEQ ID NO: 1916006 - RNA, 19 nt, Artificial Sequence
  Description of Artificial Sequence: Synthetic oligonucleotide
gagccgacauagaacccag

SEQ ID NO: 1916007 - RNA, 19 nt, Artificial Sequence
  Description of Artificial Sequence: Synthetic oligonucleotide
gaacccagauggcaccauc

SEQ ID NO: 1916008 - RNA, 19 nt, Artificial Sequence
  Description of Artificial Sequence: Synthetic oligonucleotide
cucugcgucacuccgugca

SEQ ID NO: 1916009 - RNA, 19 nt, Artificial Sequence
  Description of Artificial Sequence: Synthetic oligonucleotide
gugcacaagaccgggaaga

SEQ ID NO: 1916010 - RNA, 19 nt, Artificial Sequence
  Description of Artificial Sequence: Synthetic oligonucleotide
agagcggggccaugcccac

SEQ ID NO: 1916011 - RNA, 19 nt, Artificial Sequence
  Description of Artificial Sequence: Synthetic oligonucleotide
gcugauccuugagagagcc

SEQ ID NO: 1916012 - RNA, 19 nt, Artificial Sequence
  Description of Artificial Sequence: Synthetic oligonucleotide
cugcaaguucggaaagcuc

SEQ ID NO: 1916013 - RNA, 19 nt, Artificial Sequence
  Description of Artificial Sequence: Synthetic oligonucleotide
agguacggcugugacagca

SEQ ID NO: 1916014 - RNA, 19 nt, Artificial Sequence
  Description of Artificial Sequence: Synthetic oligonucleotide
cagguugugcagcgagggg

SEQ ID NO: 1916015 - RNA, 19 nt, Artificial Sequence
  Description of Artificial Sequence: Synthetic oligonucleotide
ugcgucacuccgugcacgu

SEQ ID NO: 1916016 - RNA, 19 nt, Artificial Sequence
  Description of Artificial Sequence: Synthetic oligonucleotide
gagguuuagaaaacaacuu

SEQ ID NO: 1916017 - RNA, 19 nt, Artificial Sequence
  Description of Artificial Sequence: Synthetic oligonucleotide
cgaaaucgacuacagacac

SEQ ID NO: 1916018 - RNA, 19 nt, Artificial Sequence
  Description of Artificial Sequence: Synthetic oligonucleotide
caagaccgggaagaagcgc

SEQ ID NO: 1916019 - RNA, 19 nt, Artificial Sequence
  Description of Artificial Sequence: Synthetic oligonucleotide
cccguacuuccccagaacc

SEQ ID NO: 1916020 - RNA, 19 nt, Artificial Sequence
  Description of Artificial Sequence: Synthetic oligonucleotide
acagugggacaugguuccc

SEQ ID NO: 1916021 - RNA, 19 nt, Artificial Sequence
  Description of Artificial Sequence: Synthetic oligonucleotide
caaggguugaagagguuua

SEQ ID NO: 1916022 - RNA, 19 nt, Artificial Sequence
  Description of Artificial Sequence: Synthetic oligonucleotide
ggugcacaagaccgggaag

SEQ ID NO: 1916023 - RNA, 19 nt, Artificial Sequence
  Description of Artificial Sequence: Synthetic oligonucleotide
gccgcagcuucauaaggag

SEQ ID NO: 1916024 - RNA, 19 nt, Artificial Sequence
  Description of Artificial Sequence: Synthetic oligonucleotide
ccaucacccaggcagcccg

SEQ ID NO: 1916025 - RNA, 19 nt, Artificial Sequence
  Description of Artificial Sequence: Synthetic oligonucleotide
caaucgcuaaggccagcug

SEQ ID NO: 1916026 - RNA, 19 nt, Artificial Sequence
  Description of Artificial Sequence: Synthetic oligonucleotide
agcgcagcgaccgcagcag

SEQ ID NO: 1916027 - RNA, 19 nt, Artificial Sequence
  Description of Artificial Sequence: Synthetic oligonucleotide
cagcugcaaguucggaaag

SEQ ID NO: 1916028 - RNA, 19 nt, Artificial Sequence
  Description of Artificial Sequence: Synthetic oligonucleotide
uccuugagagagccuucuc

SEQ ID NO: 1916029 - RNA, 19 nt, Artificial Sequence
  Description of Artificial Sequence: Synthetic oligonucleotide
aggcagacgaugauagcgu

SEQ ID NO: 1916030 - RNA, 19 nt, Artificial Sequence
  Description of Artificial Sequence: Synthetic oligonucleotide
gagagcggggccaugccca

SEQ ID NO: 1916031 - RNA, 19 nt, Artificial Sequence
  Description of Artificial Sequence: Synthetic oligonucleotide
gugugccauggcugggacg

SEQ ID NO: 1916032 - RNA, 19 nt, Artificial Sequence
  Description of Artificial Sequence: Synthetic oligonucleotide
gcauucugguuucagucuc

SEQ ID NO: 1916033 - RNA, 19 nt, Artificial Sequence
  Description of Artificial Sequence: Synthetic oligonucleotide
acaaaggaguagcccguuu

SEQ ID NO: 1916034 - RNA, 19 nt, Artificial Sequence
  Description of Artificial Sequence: Synthetic oligonucleotide
auccuugagagagccuucu

SEQ ID NO: 1916035 - RNA, 19 nt, Artificial Sequence
  Description of Artificial Sequence: Synthetic oligonucleotide
caaucaagccuucuuuagu

SEQ ID NO: 1916036 - RNA, 19 nt, Artificial Sequence
  Description of Artificial Sequence: Synthetic oligonucleotide
guguuucccuccugcagca

SEQ ID NO: 1916037 - RNA, 19 nt, Artificial Sequence
  Description of Artificial Sequence: Synthetic oligonucleotide
ugugcagcgaggggcucug

SEQ ID NO: 1916038 - RNA, 19 nt, Artificial Sequence
  Description of Artificial Sequence: Synthetic oligonucleotide
cuuuacccaccaguauaug

SEQ ID NO: 1916039 - RNA, 19 nt, Artificial Sequence
  Description of Artificial Sequence: Synthetic oligonucleotide
ggcagacgaugauagcgug

SEQ ID NO: 1916040 - RNA, 19 nt, Artificial Sequence
  Description of Artificial Sequence: Synthetic oligonucleotide
uugaucguuuaggcucuga

SEQ ID NO: 1916041 - RNA, 19 nt, Artificial Sequence
  Description of Artificial Sequence: Synthetic oligonucleotide
gauccuugagagagccuuc

SEQ ID NO: 1916042 - RNA, 19 nt, Artificial Sequence
  Description of Artificial Sequence: Synthetic oligonucleotide
acauacugucccaggguga

SEQ ID NO: 1916043 - RNA, 19 nt, Artificial Sequence
  Description of Artificial Sequence: Synthetic oligonucleotide
agccgcuuugcuccagccu

SEQ ID NO: 1916044 - RNA, 19 nt, Artificial Sequence
  Description of Artificial Sequence: Synthetic oligonucleotide
auaaggaaauccagaucua

SEQ ID NO: 1916045 - RNA, 19 nt, Artificial Sequence
  Description of Artificial Sequence: Synthetic oligonucleotide
gcagacgaugauagcgugg

SEQ ID NO: 1916046 - RNA, 19 nt, Artificial Sequence
  Description of Artificial Sequence: Synthetic oligonucleotide
uuuuccgccgcagcuucau

SEQ ID NO: 1916047 - RNA, 19 nt, Artificial Sequence
  Description of Artificial Sequence: Synthetic oligonucleotide
cagcuucccaaucgcuaag

SEQ ID NO: 1916048 - RNA, 19 nt, Artificial Sequence
  Description of Artificial Sequence: Synthetic oligonucleotide
cacaggucuggcagacgac

SEQ ID NO: 1916049 - RNA, 19 nt, Artificial Sequence
  Description of Artificial Sequence: Synthetic oligonucleotide
gucacuccgugcacguaag

SEQ ID NO: 1916050 - RNA, 19 nt, Artificial Sequence
  Description of Artificial Sequence: Synthetic oligonucleotide
aucgcuaaggccagcugau

SEQ ID NO: 1916051 - RNA, 19 nt, Artificial Sequence
  Description of Artificial Sequence: Synthetic oligonucleotide
cugggacggcugcagcagg

SEQ ID NO: 1916052 - RNA, 19 nt, Artificial Sequence
  Description of Artificial Sequence: Synthetic oligonucleotide
gcaaguucggaaagcucag

SEQ ID NO: 1916053 - RNA, 19 nt, Artificial Sequence
  Description of Artificial Sequence: Synthetic oligonucleotide
aggcagcccgccuaagaau

SEQ ID NO: 1916054 - RNA, 19 nt, Artificial Sequence
  Description of Artificial Sequence: Synthetic oligonucleotide
auguggagaguugaucguu

SEQ ID NO: 1916055 - RNA, 19 nt, Artificial Sequence
  Description of Artificial Sequence: Synthetic oligonucleotide
guuugagaucaccgucaca

SEQ ID NO: 1916056 - RNA, 19 nt, Artificial Sequence
  Description of Artificial Sequence: Synthetic oligonucleotide
uucaaggguugaagagguu

SEQ ID NO: 1916057 - RNA, 19 nt, Artificial Sequence
  Description of Artificial Sequence: Synthetic oligonucleotide
cagagcuuucuugcaguug

SEQ ID NO: 1916058 - RNA, 19 nt, Artificial Sequence
  Description of Artificial Sequence: Synthetic oligonucleotide
ccuugcuggaggcagacga

SEQ ID NO: 1916059 - RNA, 19 nt, Artificial Sequence
  Description of Artificial Sequence: Synthetic oligonucleotide
cagcagguacggcugugac

SEQ ID NO: 1916060 - RNA, 19 nt, Artificial Sequence
  Description of Artificial Sequence: Synthetic oligonucleotide
cugcgucacuccgugcacg

SEQ ID NO: 1916061 - RNA, 19 nt, Artificial Sequence
  Description of Artificial Sequence: Synthetic oligonucleotide
cggccggugcacaagaccg

SEQ ID NO: 1916062 - RNA, 19 nt, Artificial Sequence
  Description of Artificial Sequence: Synthetic oligonucleotide
auggaaggguccagcaggu

SEQ ID NO: 1916063 - RNA, 19 nt, Artificial Sequence
  Description of Artificial Sequence: Synthetic oligonucleotide
gaucaccgucacaagccuc

SEQ ID NO: 1916064 - RNA, 19 nt, Artificial Sequence
  Description of Artificial Sequence: Synthetic oligonucleotide
uugugcagcgaggggcucu

SEQ ID NO: 1916065 - RNA, 19 nt, Artificial Sequence
  Description of Artificial Sequence: Synthetic oligonucleotide
cagcgaggggcucugcguc

SEQ ID NO: 1916066 - RNA, 19 nt, Artificial Sequence
  Description of Artificial Sequence: Synthetic oligonucleotide
gacccggccgagcggccgg

SEQ ID NO: 1916067 - RNA, 19 nt, Artificial Sequence
  Description of Artificial Sequence: Synthetic oligonucleotide
caccacaugcugccccaag

SEQ ID NO: 1916068 - RNA, 19 nt, Artificial Sequence
  Description of Artificial Sequence: Synthetic oligonucleotide
uagcccguuuuccgccgca

SEQ ID NO: 1916069 - RNA, 19 nt, Artificial Sequence
  Description of Artificial Sequence: Synthetic oligonucleotide
gauagcguggggcccgcgu

SEQ ID NO: 1916070 - RNA, 19 nt, Artificial Sequence
  Description of Artificial Sequence: Synthetic oligonucleotide
caggcagcccgccuaagaa

SEQ ID NO: 1916071 - RNA, 19 nt, Artificial Sequence
  Description of Artificial Sequence: Synthetic oligonucleotide
cugacagugggacaugguu

SEQ ID NO: 1916072 - RNA, 19 nt, Artificial Sequence
  Description of Artificial Sequence: Synthetic oligonucleotide
cucacaggucuggcagacg

SEQ ID NO: 1916073 - RNA, 19 nt, Artificial Sequence
  Description of Artificial Sequence: Synthetic oligonucleotide
cguuuaggcucugacagug

SEQ ID NO: 1916074 - RNA, 19 nt, Artificial Sequence
  Description of Artificial Sequence: Synthetic oligonucleotide
cgcacgaaaucgacuacag

SEQ ID NO: 1916075 - RNA, 19 nt, Artificial Sequence
  Description of Artificial Sequence: Synthetic oligonucleotide
guggagaguugaucguuua

SEQ ID NO: 1916076 - RNA, 19 nt, Artificial Sequence
  Description of Artificial Sequence: Synthetic oligonucleotide
gagcuuucuugcaguugac

SEQ ID NO: 1916077 - RNA, 19 nt, Artificial Sequence
  Description of Artificial Sequence: Synthetic oligonucleotide
guagcccguuuuccgccgc

SEQ ID NO: 1916078 - RNA, 19 nt, Artificial Sequence
  Description of Artificial Sequence: Synthetic oligonucleotide
ccgucacaagccuccagag

SEQ ID NO: 1916079 - RNA, 19 nt, Artificial Sequence
  Description of Artificial Sequence: Synthetic oligonucleotide
acaagccuccagagcuuuc

SEQ ID NO: 1916080 - RNA, 19 nt, Artificial Sequence
  Description of Artificial Sequence: Synthetic oligonucleotide
cguaagagccgacauagaa

SEQ ID NO: 1916081 - RNA, 19 nt, Artificial Sequence
  Description of Artificial Sequence: Synthetic oligonucleotide
caaaggaguagcccguuuu

SEQ ID NO: 1916082 - RNA, 19 nt, Artificial Sequence
  Description of Artificial Sequence: Synthetic oligonucleotide
ggcagcccgccuaagaauc

SEQ ID NO: 1916083 - RNA, 19 nt, Artificial Sequence
  Description of Artificial Sequence: Synthetic oligonucleotide
ggggcugcacauacugucc

SEQ ID NO: 1916084 - RNA, 19 nt, Artificial Sequence
  Description of Artificial Sequence: Synthetic oligonucleotide
caggaagccuuuaguauau

SEQ ID NO: 1916085 - RNA, 19 nt, Artificial Sequence
  Description of Artificial Sequence: Synthetic oligonucleotide
uccucccuugaagcuuagc

SEQ ID NO: 1916086 - RNA, 19 nt, Artificial Sequence
  Description of Artificial Sequence: Synthetic oligonucleotide
ugauagcguggggcccgcg

SEQ ID NO: 1916087 - RNA, 19 nt, Artificial Sequence
  Description of Artificial Sequence: Synthetic oligonucleotide
uuuccgccgcagcuucaua

SEQ ID NO: 1916088 - RNA, 19 nt, Artificial Sequence
  Description of Artificial Sequence: Synthetic oligonucleotide
gugcacguaagagccgaca

SEQ ID NO: 1916089 - RNA, 19 nt, Artificial Sequence
  Description of Artificial Sequence: Synthetic oligonucleotide
gcacaagaccgggaagaag

SEQ ID NO: 1916090 - RNA, 19 nt, Artificial Sequence
  Description of Artificial Sequence: Synthetic oligonucleotide
ugacagcauucugguuuca

SEQ ID NO: 1916091 - RNA, 19 nt, Artificial Sequence
  Description of Artificial Sequence: Synthetic oligonucleotide
gcggccggugcacaagacc

SEQ ID NO: 1916092 - RNA, 19 nt, Artificial Sequence
  Description of Artificial Sequence: Synthetic oligonucleotide
cccacguccuucagguuug

SEQ ID NO: 1916093 - RNA, 19 nt, Artificial Sequence
  Description of Artificial Sequence: Synthetic oligonucleotide
auacugucccagggugaug

SEQ ID NO: 1916094 - RNA, 19 nt, Artificial Sequence
  Description of Artificial Sequence: Synthetic oligonucleotide
cauucugguuucagucucu

SEQ ID NO: 1916095 - RNA, 19 nt, Artificial Sequence
  Description of Artificial Sequence: Synthetic oligonucleotide
gccggugcacaagaccggg

SEQ ID NO: 1916096 - RNA, 19 nt, Artificial Sequence
  Description of Artificial Sequence: Synthetic oligonucleotide
caaguucggaaagcucaga

SEQ ID NO: 1916097 - RNA, 19 nt, Artificial Sequence
  Description of Artificial Sequence: Synthetic oligonucleotide
agucccaccugggccaaaa

SEQ ID NO: 1916098 - RNA, 19 nt, Artificial Sequence
  Description of Artificial Sequence: Synthetic oligonucleotide
gcacgaaaucgacuacaga

SEQ ID NO: 1916099 - RNA, 19 nt, Artificial Sequence
  Description of Artificial Sequence: Synthetic oligonucleotide
ucgcuaaggccagcugauc

SEQ ID NO: 1916100 - RNA, 19 nt, Artificial Sequence
  Description of Artificial Sequence: Synthetic oligonucleotide
gcuaaggccagcugauccu

SEQ ID NO: 1916101 - RNA, 19 nt, Artificial Sequence
  Description of Artificial Sequence: Synthetic oligonucleotide
cccgcgugaagcgugugcc

SEQ ID NO: 1916102 - RNA, 19 nt, Artificial Sequence
  Description of Artificial Sequence: Synthetic oligonucleotide
uccccagaaccagguugug

SEQ ID NO: 1916103 - RNA, 19 nt, Artificial Sequence
  Description of Artificial Sequence: Synthetic oligonucleotide
caacuuuacccaccaguau

SEQ ID NO: 1916104 - RNA, 19 nt, Artificial Sequence
  Description of Artificial Sequence: Synthetic oligonucleotide
cgucacaagccuccagagc

SEQ ID NO: 1916105 - RNA, 19 nt, Artificial Sequence
  Description of Artificial Sequence: Synthetic oligonucleotide
agaacccagauggcaccau

SEQ ID NO: 1916106 - RNA, 19 nt, Artificial Sequence
  Description of Artificial Sequence: Synthetic oligonucleotide
gaaccagguugugcagcga

SEQ ID NO: 1916107 - RNA, 19 nt, Artificial Sequence
  Description of Artificial Sequence: Synthetic oligonucleotide
agcccgccuaagaaucaug

SEQ ID NO: 1916108 - RNA, 19 nt, Artificial Sequence
  Description of Artificial Sequence: Synthetic oligonucleotide
acguaagagccgacauaga

SEQ ID NO: 1916109 - RNA, 19 nt, Artificial Sequence
  Description of Artificial Sequence: Synthetic oligonucleotide
gccgacauagaacccagau

SEQ ID NO: 1916110 - RNA, 19 nt, Artificial Sequence
  Description of Artificial Sequence: Synthetic oligonucleotide
gccuguuugagaucaccgu

SEQ ID NO: 1916111 - RNA, 19 nt, Artificial Sequence
  Description of Artificial Sequence: Synthetic oligonucleotide
cagugggacaugguuccca

SEQ ID NO: 1916112 - RNA, 19 nt, Artificial Sequence
  Description of Artificial Sequence: Synthetic oligonucleotide
ccguacuuccccagaacca

SEQ ID NO: 1916113 - RNA, 19 nt, Artificial Sequence
  Description of Artificial Sequence: Synthetic oligonucleotide
cagcagcccaaucaagccu

SEQ ID NO: 1916114 - RNA, 19 nt, Artificial Sequence
  Description of Artificial Sequence: Synthetic oligonucleotide
cauacugucccagggugau

SEQ ID NO: 1916115 - RNA, 19 nt, Artificial Sequence
  Description of Artificial Sequence: Synthetic oligonucleotide
ccuugagagagccuucucu

SEQ ID NO: 1916116 - RNA, 19 nt, Artificial Sequence
  Description of Artificial Sequence: Synthetic oligonucleotide
ugcccaccacaugcugccc

SEQ ID NO: 1916117 - RNA, 19 nt, Artificial Sequence
  Description of Artificial Sequence: Synthetic oligonucleotide
gcacauacugucccagggu

SEQ ID NO: 1916118 - RNA, 19 nt, Artificial Sequence
  Description of Artificial Sequence: Synthetic oligonucleotide
cuugcuggaggcagacgau

SEQ ID NO: 1916119 - RNA, 19 nt, Artificial Sequence
  Description of Artificial Sequence: Synthetic oligonucleotide
cgccuaagaaucauguucu

SEQ ID NO: 1916120 - RNA, 19 nt, Artificial Sequence
  Description of Artificial Sequence: Synthetic oligonucleotide
cacacucaaagcgcacgaa

SEQ ID NO: 1916121 - RNA, 19 nt, Artificial Sequence
  Description of Artificial Sequence: Synthetic oligonucleotide
gcgcacgaaaucgacuaca

SEQ ID NO: 1916122 - RNA, 19 nt, Artificial Sequence
  Description of Artificial Sequence: Synthetic oligonucleotide
uggaaggguccagcaggua

SEQ ID NO: 1916123 - RNA, 19 nt, Artificial Sequence
  Description of Artificial Sequence: Synthetic oligonucleotide
cccagcugcaaguucggaa

SEQ ID NO: 1916124 - RNA, 19 nt, Artificial Sequence
  Description of Artificial Sequence: Synthetic oligonucleotide
cguuuuccgccgcagcuuc

SEQ ID NO: 1916125 - RNA, 19 nt, Artificial Sequence
  Description of Artificial Sequence: Synthetic oligonucleotide
gcccgcgugaagcgugugc

SEQ ID NO: 1916126 - RNA, 19 nt, Artificial Sequence
  Description of Artificial Sequence: Synthetic oligonucleotide
cuggaccaacugcugaaau

SEQ ID NO: 1916127 - RNA, 19 nt, Artificial Sequence
  Description of Artificial Sequence: Synthetic oligonucleotide
ccuaagaaucauguucucu

SEQ ID NO: 1916128 - RNA, 19 nt, Artificial Sequence
  Description of Artificial Sequence: Synthetic oligonucleotide
ccccagaaccagguugugc

SEQ ID NO: 1916129 - RNA, 19 nt, Artificial Sequence
  Description of Artificial Sequence: Synthetic oligonucleotide
caugguucccagggcaacu

SEQ ID NO: 1916130 - RNA, 19 nt, Artificial Sequence
  Description of Artificial Sequence: Synthetic oligonucleotide
guuuuccgccgcagcuuca

SEQ ID NO: 1916131 - RNA, 19 nt, Artificial Sequence
  Description of Artificial Sequence: Synthetic oligonucleotide
cgaugauagcguggggccc

SEQ ID NO: 1916132 - RNA, 19 nt, Artificial Sequence
  Description of Artificial Sequence: Synthetic oligonucleotide
gguugugcagcgaggggcu

SEQ ID NO: 1916133 - RNA, 19 nt, Artificial Sequence
  Description of Artificial Sequence: Synthetic oligonucleotide
agccgacauagaacccaga

SEQ ID NO: 1916134 - RNA, 19 nt, Artificial Sequence
  Description of Artificial Sequence: Synthetic oligonucleotide
guacggcugugacagcauu

SEQ ID NO: 1916135 - RNA, 19 nt, Artificial Sequence
  Description of Artificial Sequence: Synthetic oligonucleotide
cccagcuucccaaucgcua

SEQ ID NO: 1916136 - RNA, 19 nt, Artificial Sequence
  Description of Artificial Sequence: Synthetic oligonucleotide
cacccaggcagcccgccua

SEQ ID NO: 1916137 - RNA, 19 nt, Artificial Sequence
  Description of Artificial Sequence: Synthetic oligonucleotide
ccccguacuuccccagaac

SEQ ID NO: 1916138 - RNA, 19 nt, Artificial Sequence
  Description of Artificial Sequence: Synthetic oligonucleotide
gcuuagccgcuuugcucca

SEQ ID NO: 1916139 - RNA, 19 nt, Artificial Sequence
  Description of Artificial Sequence: Synthetic oligonucleotide
gcucugacagugggacaug

SEQ ID NO: 1916140 - RNA, 19 nt, Artificial Sequence
  Description of Artificial Sequence: Synthetic oligonucleotide
gcagcgaggggcucugcgu

SEQ ID NO: 1916141 - RNA, 19 nt, Artificial Sequence
  Description of Artificial Sequence: Synthetic oligonucleotide
gcagacgaccagggccccg

SEQ ID NO: 1916142 - RNA, 19 nt, Artificial Sequence
  Description of Artificial Sequence: Synthetic oligonucleotide
ggggcccgcgugaagcgug

SEQ ID NO: 1916143 - RNA, 19 nt, Artificial Sequence
  Description of Artificial Sequence: Synthetic oligonucleotide
cgccgcagcuucauaagga

SEQ ID NO: 1916144 - RNA, 19 nt, Artificial Sequence
  Description of Artificial Sequence: Synthetic oligonucleotide
cgucacuccgugcacguaa

SEQ ID NO: 1916145 - RNA, 19 nt, Artificial Sequence
  Description of Artificial Sequence: Synthetic oligonucleotide
gccccguacuuccccagaa

SEQ ID NO: 1916146 - RNA, 19 nt, Artificial Sequence
  Description of Artificial Sequence: Synthetic oligonucleotide
gcccgccuaagaaucaugu

SEQ ID NO: 1916147 - RNA, 19 nt, Artificial Sequence
  Description of Artificial Sequence: Synthetic oligonucleotide
cgugugccauggcugggac

SEQ ID NO: 1916148 - RNA, 19 nt, Artificial Sequence
  Description of Artificial Sequence: Synthetic oligonucleotide
ccaagcggcggcccacguc

SEQ ID NO: 1916149 - RNA, 19 nt, Artificial Sequence
  Description of Artificial Sequence: Synthetic oligonucleotide
gugccauggcugggacggc

SEQ ID NO: 1916150 - RNA, 19 nt, Artificial Sequence
  Description of Artificial Sequence: Synthetic oligonucleotide
ggccccguacuuccccaga

SEQ ID NO: 1916151 - RNA, 19 nt, Artificial Sequence
  Description of Artificial Sequence: Synthetic oligonucleotide
gcgcagcgaccgcagcagc

SEQ ID NO: 1916152 - RNA, 19 nt, Artificial Sequence
  Description of Artificial Sequence: Synthetic oligonucleotide
cagacgaccagggccccgu

SEQ ID NO: 1916153 - RNA, 19 nt, Artificial Sequence
  Description of Artificial Sequence: Synthetic oligonucleotide
agcggcggcccacguccuu

SEQ ID NO: 1916154 - RNA, 19 nt, Artificial Sequence
  Description of Artificial Sequence: Synthetic oligonucleotide
gcagcccgccuaagaauca

SEQ ID NO: 1916155 - RNA, 19 nt, Artificial Sequence
  Description of Artificial Sequence: Synthetic oligonucleotide
cggugcacaagaccgggaa

SEQ ID NO: 1916156 - RNA, 19 nt, Artificial Sequence
  Description of Artificial Sequence: Synthetic oligonucleotide
ccggccgagcggccggugc

SEQ ID NO: 1916157 - RNA, 19 nt, Artificial Sequence
  Description of Artificial Sequence: Synthetic oligonucleotide
ccaaucgcuaaggccagcu

SEQ ID NO: 1916158 - RNA, 19 nt, Artificial Sequence
  Description of Artificial Sequence: Synthetic oligonucleotide
cacaagccuccagagcuuu

SEQ ID NO: 1916159 - RNA, 19 nt, Artificial Sequence
  Description of Artificial Sequence: Synthetic oligonucleotide
cuguugggcccagcugcaa

SEQ ID NO: 1916160 - RNA, 19 nt, Artificial Sequence
  Description of Artificial Sequence: Synthetic oligonucleotide
cccaaucgcuaaggccagc

SEQ ID NO: 1916161 - RNA, 19 nt, Artificial Sequence
  Description of Artificial Sequence: Synthetic oligonucleotide
gcgaggggcucugcgucac

SEQ ID NO: 1916162 - RNA, 19 nt, Artificial Sequence
  Description of Artificial Sequence: Synthetic oligonucleotide
gugcagcgaggggcucugc

SEQ ID NO: 1916163 - RNA, 19 nt, Artificial Sequence
  Description of Artificial Sequence: Synthetic oligonucleotide
gguacggcugugacagcau

SEQ ID NO: 1916164 - RNA, 19 nt, Artificial Sequence
  Description of Artificial Sequence: Synthetic oligonucleotide
cgagcggccggugcacaag

SEQ ID NO: 1916165 - RNA, 19 nt, Artificial Sequence
  Description of Artificial Sequence: Synthetic oligonucleotide
ccgcgugaagcgugugcca

SEQ ID NO: 1916166 - RNA, 19 nt, Artificial Sequence
  Description of Artificial Sequence: Synthetic oligonucleotide
ggccgagcggccggugcac

SEQ ID NO: 1916167 - RNA, 19 nt, Artificial Sequence
  Description of Artificial Sequence: Synthetic oligonucleotide
cccuugaagcuuagccgcu

SEQ ID NO: 1916168 - RNA, 19 nt, Artificial Sequence
  Description of Artificial Sequence: Synthetic oligonucleotide
ccucuucgacuuccccaca

SEQ ID NO: 1916169 - RNA, 19 nt, Artificial Sequence
  Description of Artificial Sequence: Synthetic oligonucleotide
acccggccgagcggccggu

SEQ ID NO: 1916170 - RNA, 19 nt, Artificial Sequence
  Description of Artificial Sequence: Synthetic oligonucleotide
cagcccgccuaagaaucau

SEQ ID NO: 1916171 - RNA, 19 nt, Artificial Sequence
  Description of Artificial Sequence: Synthetic oligonucleotide
gggcaacuugcuggaccaa

SEQ ID NO: 1916172 - RNA, 19 nt, Artificial Sequence
  Description of Artificial Sequence: Synthetic oligonucleotide
ggcccgcgugaagcgugug

SEQ ID NO: 1916173 - RNA, 19 nt, Artificial Sequence
  Description of Artificial Sequence: Synthetic oligonucleotide
cccgccuaagaaucauguu

SEQ ID NO: 1916174 - RNA, 19 nt, Artificial Sequence
  Description of Artificial Sequence: Synthetic oligonucleotide
cggaaagcucagaggaguu

SEQ ID NO: 1916175 - RNA, 19 nt, Artificial Sequence
  Description of Artificial Sequence: Synthetic oligonucleotide
ccgagcggccggugcacaa

SEQ ID NO: 1916176 - RNA, 19 nt, Artificial Sequence
  Description of Artificial Sequence: Synthetic oligonucleotide
gggcucugcgucacuccgu

SEQ ID NO: 1916177 - RNA, 19 nt, Artificial Sequence
  Description of Artificial Sequence: Synthetic oligonucleotide
cgacuuccccacacucaaa

SEQ ID NO: 1916178 - RNA, 19 nt, Artificial Sequence
  Description of Artificial Sequence: Synthetic oligonucleotide
gccgagcggccggugcaca

SEQ ID NO: 1916179 - RNA, 19 nt, Artificial Sequence
  Description of Artificial Sequence: Synthetic oligonucleotide
gcgucacuccgugcacgua

SEQ ID NO: 1916180 - RNA, 19 nt, Artificial Sequence
  Description of Artificial Sequence: Synthetic oligonucleotide
ccguuuuccgccgcagcuu

SEQ ID NO: 1916181 - RNA, 19 nt, Artificial Sequence
  Description of Artificial Sequence: Synthetic oligonucleotide
gggcccgcgugaagcgugu

SEQ ID NO: 1916182 - RNA, 19 nt, Artificial Sequence
  Description of Artificial Sequence: Synthetic oligonucleotide
cccggccgagcggccggug

SEQ ID NO: 1916183 - RNA, 19 nt, Artificial Sequence
  Description of Artificial Sequence: Synthetic oligonucleotide
cgaggggcucugcgucacu

SEQ ID NO: 1916184 - RNA, 19 nt, Artificial Sequence
  Description of Artificial Sequence: Synthetic oligonucleotide
aagagaucaacauacuucc

SEQ ID NO: 1916185 - RNA, 19 nt, Artificial Sequence
  Description of Artificial Sequence: Synthetic oligonucleotide
gaagaaaugaguuccaugg

SEQ ID NO: 1916186 - RNA, 19 nt, Artificial Sequence
  Description of Artificial Sequence: Synthetic oligonucleotide
uauauuauuagcuacuuca

SEQ ID NO: 1916187 - RNA, 19 nt, Artificial Sequence
  Description of Artificial Sequence: Synthetic oligonucleotide
ugaaguuucacaaauguca

SEQ ID NO: 1916188 - RNA, 19 nt, Artificial Sequence
  Description of Artificial Sequence: Synthetic oligonucleotide
uuauuggugguccugaagg

SEQ ID NO: 1916189 - RNA, 19 nt, Artificial Sequence
  Description of Artificial Sequence: Synthetic oligonucleotide
gaaaguuacaauucuacag

SEQ ID NO: 1916190 - RNA, 19 nt, Artificial Sequence
  Description of Artificial Sequence: Synthetic oligonucleotide
uaagcuuugaucaaugcug

SEQ ID NO: 1916191 - RNA, 19 nt, Artificial Sequence
  Description of Artificial Sequence: Synthetic oligonucleotide
uuuauuuugucugaaaccc

SEQ ID NO: 1916192 - RNA, 19 nt, Artificial Sequence
  Description of Artificial Sequence: Synthetic oligonucleotide
aucagauagguuuugcucc

SEQ ID NO: 1916193 - RNA, 19 nt, Artificial Sequence
  Description of Artificial Sequence: Synthetic oligonucleotide
uuaucguaagcuuugauca

SEQ ID NO: 1916194 - RNA, 19 nt, Artificial Sequence
  Description of Artificial Sequence: Synthetic oligonucleotide
uccgguauaaaccacaaca

SEQ ID NO: 1916195 - RNA, 19 nt, Artificial Sequence
  Description of Artificial Sequence: Synthetic oligonucleotide
agaaucaucacucuggccu

SEQ ID NO: 1916196 - RNA, 19 nt, Artificial Sequence
  Description of Artificial Sequence: Synthetic oligonucleotide
aauagccuguaugauagcc

SEQ ID NO: 1916197 - RNA, 19 nt, Artificial Sequence
  Description of Artificial Sequence: Synthetic oligonucleotide
uuagcuacuucacagguug

SEQ ID NO: 1916198 - RNA, 19 nt, Artificial Sequence
  Description of Artificial Sequence: Synthetic oligonucleotide
aaucucaacauacuuagaa

SEQ ID NO: 1916199 - RNA, 19 nt, Artificial Sequence
  Description of Artificial Sequence: Synthetic oligonucleotide
ucaauggaaguaaugguag

SEQ ID NO: 1916200 - RNA, 19 nt, Artificial Sequence
  Description of Artificial Sequence: Synthetic oligonucleotide
uaaaccacaacacagguuu

SEQ ID NO: 1916201 - RNA, 19 nt, Artificial Sequence
  Description of Artificial Sequence: Synthetic oligonucleotide
aacauacuuagaaaguuac

SEQ ID NO: 1916202 - RNA, 19 nt, Artificial Sequence
  Description of Artificial Sequence: Synthetic oligonucleotide
uccauauccgguauaaacc

SEQ ID NO: 1916203 - RNA, 19 nt, Artificial Sequence
  Description of Artificial Sequence: Synthetic oligonucleotide
aaacccauguaauagccug

SEQ ID NO: 1916204 - RNA, 19 nt, Artificial Sequence
  Description of Artificial Sequence: Synthetic oligonucleotide
ucaugcucuaaacacaccc

SEQ ID NO: 1916205 - RNA, 19 nt, Artificial Sequence
  Description of Artificial Sequence: Synthetic oligonucleotide
uaccaagagaucaacauac

SEQ ID NO: 1916206 - RNA, 19 nt, Artificial Sequence
  Description of Artificial Sequence: Synthetic oligonucleotide
aagcagaucagauagguuu

SEQ ID NO: 1916207 - RNA, 19 nt, Artificial Sequence
  Description of Artificial Sequence: Synthetic oligonucleotide
uuuaucguaagcuuugauc

SEQ ID NO: 1916208 - RNA, 19 nt, Artificial Sequence
  Description of Artificial Sequence: Synthetic oligonucleotide
augguagcuggguaaaugc

SEQ ID NO: 1916209 - RNA, 19 nt, Artificial Sequence
  Description of Artificial Sequence: Synthetic oligonucleotide
uuuuaaaaucaauggaagu

SEQ ID NO: 1916210 - RNA, 19 nt, Artificial Sequence
  Description of Artificial Sequence: Synthetic oligonucleotide
agaaaugaguuccauggag

SEQ ID NO: 1916211 - RNA, 19 nt, Artificial Sequence
  Description of Artificial Sequence: Synthetic oligonucleotide
uucuguucuauauuauuag

SEQ ID NO: 1916212 - RNA, 19 nt, Artificial Sequence
  Description of Artificial Sequence: Synthetic oligonucleotide
ucuaaacacaccccacugg

SEQ ID NO: 1916213 - RNA, 19 nt, Artificial Sequence
  Description of Artificial Sequence: Synthetic oligonucleotide
aacggcagaacauuuguca

SEQ ID NO: 1916214 - RNA, 19 nt, Artificial Sequence
  Description of Artificial Sequence: Synthetic oligonucleotide
aauccuccuguuccgagac

SEQ ID NO: 1916215 - RNA, 19 nt, Artificial Sequence
  Description of Artificial Sequence: Synthetic oligonucleotide
ugaaacccauguaauagcc

SEQ ID NO: 1916216 - RNA, 19 nt, Artificial Sequence
  Description of Artificial Sequence: Synthetic oligonucleotide
aaaugaguuccauggagca

SEQ ID NO: 1916217 - RNA, 19 nt, Artificial Sequence
  Description of Artificial Sequence: Synthetic oligonucleotide
uguaugauagccacucaug

SEQ ID NO: 1916218 - RNA, 19 nt, Artificial Sequence
  Description of Artificial Sequence: Synthetic oligonucleotide
cauaaguugacggugagac

SEQ ID NO: 1916219 - RNA, 19 nt, Artificial Sequence
  Description of Artificial Sequence: Synthetic oligonucleotide
uugucugaaacccauguaa

SEQ ID NO: 1916220 - RNA, 19 nt, Artificial Sequence
  Description of Artificial Sequence: Synthetic oligonucleotide
uauuauuagcuacuucaca

SEQ ID NO: 1916221 - RNA, 19 nt, Artificial Sequence
  Description of Artificial Sequence: Synthetic oligonucleotide
aaacacaccccacugguga

SEQ ID NO: 1916222 - RNA, 19 nt, Artificial Sequence
  Description of Artificial Sequence: Synthetic oligonucleotide
uuuugucugaaacccaugu

SEQ ID NO: 1916223 - RNA, 19 nt, Artificial Sequence
  Description of Artificial Sequence: Synthetic oligonucleotide
agaguccauaaguugacgg

SEQ ID NO: 1916224 - RNA, 19 nt, Artificial Sequence
  Description of Artificial Sequence: Synthetic oligonucleotide
ucuacagcugugcucagcc

SEQ ID NO: 1916225 - RNA, 19 nt, Artificial Sequence
  Description of Artificial Sequence: Synthetic oligonucleotide
cuuaauuuguaugugagca

SEQ ID NO: 1916226 - RNA, 19 nt, Artificial Sequence
  Description of Artificial Sequence: Synthetic oligonucleotide
uguaucaucccagauguca

SEQ ID NO: 1916227 - RNA, 19 nt, Artificial Sequence
  Description of Artificial Sequence: Synthetic oligonucleotide
uguaccaagagaucaacau

SEQ ID NO: 1916228 - RNA, 19 nt, Artificial Sequence
  Description of Artificial Sequence: Synthetic oligonucleotide
agaucaacauacuuccgag

SEQ ID NO: 1916229 - RNA, 19 nt, Artificial Sequence
  Description of Artificial Sequence: Synthetic oligonucleotide
uuaggcauggaccccagca

SEQ ID NO: 1916230 - RNA, 19 nt, Artificial Sequence
  Description of Artificial Sequence: Synthetic oligonucleotide
aaucugaccugcuuaauuu

SEQ ID NO: 1916231 - RNA, 19 nt, Artificial Sequence
  Description of Artificial Sequence: Synthetic oligonucleotide
uguuucaagggaguugugg

SEQ ID NO: 1916232 - RNA, 19 nt, Artificial Sequence
  Description of Artificial Sequence: Synthetic oligonucleotide
uguucuauauuauuagcua

SEQ ID NO: 1916233 - RNA, 19 nt, Artificial Sequence
  Description of Artificial Sequence: Synthetic oligonucleotide
acuuagaaaguuacaauuc

SEQ ID NO: 1916234 - RNA, 19 nt, Artificial Sequence
  Description of Artificial Sequence: Synthetic oligonucleotide
uaucugaaguuucacaaau

SEQ ID NO: 1916235 - RNA, 19 nt, Artificial Sequence
  Description of Artificial Sequence: Synthetic oligonucleotide
uuuggcagaaugauuucca

SEQ ID NO: 1916236 - RNA, 19 nt, Artificial Sequence
  Description of Artificial Sequence: Synthetic oligonucleotide
ugaucaugcucuaaacaca

SEQ ID NO: 1916237 - RNA, 19 nt, Artificial Sequence
  Description of Artificial Sequence: Synthetic oligonucleotide
caaucuggggauaugggag

SEQ ID NO: 1916238 - RNA, 19 nt, Artificial Sequence
  Description of Artificial Sequence: Synthetic oligonucleotide
uucugagagaucuggagga

SEQ ID NO: 1916239 - RNA, 19 nt, Artificial Sequence
  Description of Artificial Sequence: Synthetic oligonucleotide
acuucuguucauauugacc

SEQ ID NO: 1916240 - RNA, 19 nt, Artificial Sequence
  Description of Artificial Sequence: Synthetic oligonucleotide
aacggaggcauccaacaug

SEQ ID NO: 1916241 - RNA, 19 nt, Artificial Sequence
  Description of Artificial Sequence: Synthetic oligonucleotide
cauuuucaccguuuggucc

SEQ ID NO: 1916242 - RNA, 19 nt, Artificial Sequence
  Description of Artificial Sequence: Synthetic oligonucleotide
agaaaguuacaauucuaca

SEQ ID NO: 1916243 - RNA, 19 nt, Artificial Sequence
  Description of Artificial Sequence: Synthetic oligonucleotide
aaugcuguaucaucccaga

SEQ ID NO: 1916244 - RNA, 19 nt, Artificial Sequence
  Description of Artificial Sequence: Synthetic oligonucleotide
auauuauuagcuacuucac

SEQ ID NO: 1916245 - RNA, 19 nt, Artificial Sequence
  Description of Artificial Sequence: Synthetic oligonucleotide
gaaaugaguuccauggagc

SEQ ID NO: 1916246 - RNA, 19 nt, Artificial Sequence
  Description of Artificial Sequence: Synthetic oligonucleotide
guuucaagggaguuguggc

SEQ ID NO: 1916247 - RNA, 19 nt, Artificial Sequence
  Description of Artificial Sequence: Synthetic oligonucleotide
aaacacugaugaugacccc

SEQ ID NO: 1916248 - RNA, 19 nt, Artificial Sequence
  Description of Artificial Sequence: Synthetic oligonucleotide
acuucugagagaucuggag

SEQ ID NO: 1916249 - RNA, 19 nt, Artificial Sequence
  Description of Artificial Sequence: Synthetic oligonucleotide
uguaauagccuguaugaua

SEQ ID NO: 1916250 - RNA, 19 nt, Artificial Sequence
  Description of Artificial Sequence: Synthetic oligonucleotide
gaucaacauacuuccgagg

SEQ ID NO: 1916251 - RNA, 19 nt, Artificial Sequence
  Description of Artificial Sequence: Synthetic oligonucleotide
uauuuugucugaaacccau

SEQ ID NO: 1916252 - RNA, 19 nt, Artificial Sequence
  Description of Artificial Sequence: Synthetic oligonucleotide
uaauuuguaugugagcacu

SEQ ID NO: 1916253 - RNA, 19 nt, Artificial Sequence
  Description of Artificial Sequence: Synthetic oligonucleotide
ucuucugaccaaacggcag

SEQ ID NO: 1916254 - RNA, 19 nt, Artificial Sequence
  Description of Artificial Sequence: Synthetic oligonucleotide
acuuuccacuguuucaagg

SEQ ID NO: 1916255 - RNA, 19 nt, Artificial Sequence
  Description of Artificial Sequence: Synthetic oligonucleotide
ucuguucauauugaccagg

SEQ ID NO: 1916256 - RNA, 19 nt, Artificial Sequence
  Description of Artificial Sequence: Synthetic oligonucleotide
uuagcagguuuucuucuag

SEQ ID NO: 1916257 - RNA, 19 nt, Artificial Sequence
  Description of Artificial Sequence: Synthetic oligonucleotide
aaugguagcuggguaaaug

SEQ ID NO: 1916258 - RNA, 19 nt, Artificial Sequence
  Description of Artificial Sequence: Synthetic oligonucleotide
ugaugaugaccccacucag

SEQ ID NO: 1916259 - RNA, 19 nt, Artificial Sequence
  Description of Artificial Sequence: Synthetic oligonucleotide
guggaggaauuauuggugg

SEQ ID NO: 1916260 - RNA, 19 nt, Artificial Sequence
  Description of Artificial Sequence: Synthetic oligonucleotide
aaaucugaccugcuuaauu

SEQ ID NO: 1916261 - RNA, 19 nt, Artificial Sequence
  Description of Artificial Sequence: Synthetic oligonucleotide
uugacggugagacuucugu

SEQ ID NO: 1916262 - RNA, 19 nt, Artificial Sequence
  Description of Artificial Sequence: Synthetic oligonucleotide
uuagaaaguuacaauucua

SEQ ID NO: 1916263 - RNA, 19 nt, Artificial Sequence
  Description of Artificial Sequence: Synthetic oligonucleotide
uugaccagggacaccaaca

SEQ ID NO: 1916264 - RNA, 19 nt, Artificial Sequence
  Description of Artificial Sequence: Synthetic oligonucleotide
gagaucaacauacuuccga

SEQ ID NO: 1916265 - RNA, 19 nt, Artificial Sequence
  Description of Artificial Sequence: Synthetic oligonucleotide
ugaucaaugcuguaucauc

SEQ ID NO: 1916266 - RNA, 19 nt, Artificial Sequence
  Description of Artificial Sequence: Synthetic oligonucleotide
aguguucuguucuauauua

SEQ ID NO: 1916267 - RNA, 19 nt, Artificial Sequence
  Description of Artificial Sequence: Synthetic oligonucleotide
ugcuuaaaggaagccacgg

SEQ ID NO: 1916268 - RNA, 19 nt, Artificial Sequence
  Description of Artificial Sequence: Synthetic oligonucleotide
uaaguugacggugagacuu

SEQ ID NO: 1916269 - RNA, 19 nt, Artificial Sequence
  Description of Artificial Sequence: Synthetic oligonucleotide
auuauuggugguccugaag

SEQ ID NO: 1916270 - RNA, 19 nt, Artificial Sequence
  Description of Artificial Sequence: Synthetic oligonucleotide
ucaacauacuuccgagggc

SEQ ID NO: 1916271 - RNA, 19 nt, Artificial Sequence
  Description of Artificial Sequence: Synthetic oligonucleotide
acggcagaacauuugucac

SEQ ID NO: 1916272 - RNA, 19 nt, Artificial Sequence
  Description of Artificial Sequence: Synthetic oligonucleotide
uuuguaugugagcacuuuc

SEQ ID NO: 1916273 - RNA, 19 nt, Artificial Sequence
  Description of Artificial Sequence: Synthetic oligonucleotide
cucucuguuuccauauccg

SEQ ID NO: 1916274 - RNA, 19 nt, Artificial Sequence
  Description of Artificial Sequence: Synthetic oligonucleotide
ugcucagccacaguuuugg

SEQ ID NO: 1916275 - RNA, 19 nt, Artificial Sequence
  Description of Artificial Sequence: Synthetic oligonucleotide
ucauccagacaaucugggg

SEQ ID NO: 1916276 - RNA, 19 nt, Artificial Sequence
  Description of Artificial Sequence: Synthetic oligonucleotide
cuguucauauugaccaggg

SEQ ID NO: 1916277 - RNA, 19 nt, Artificial Sequence
  Description of Artificial Sequence: Synthetic oligonucleotide
auacuuagaaaguuacaau

SEQ ID NO: 1916278 - RNA, 19 nt, Artificial Sequence
  Description of Artificial Sequence: Synthetic oligonucleotide
uuuuggcagaaugauuucc

SEQ ID NO: 1916279 - RNA, 19 nt, Artificial Sequence
  Description of Artificial Sequence: Synthetic oligonucleotide
ugguuuacuucugagagau

SEQ ID NO: 1916280 - RNA, 19 nt, Artificial Sequence
  Description of Artificial Sequence: Synthetic oligonucleotide
guuacaauucuacagcugu

SEQ ID NO: 1916281 - RNA, 19 nt, Artificial Sequence
  Description of Artificial Sequence: Synthetic oligonucleotide
ucaacauacuuagaaaguu

SEQ ID NO: 1916282 - RNA, 19 nt, Artificial Sequence
  Description of Artificial Sequence: Synthetic oligonucleotide
uuaaaggaagccacggcuu

SEQ ID NO: 1916283 - RNA, 19 nt, Artificial Sequence
  Description of Artificial Sequence: Synthetic oligonucleotide
caugcucuaaacacacccc

SEQ ID NO: 1916284 - RNA, 19 nt, Artificial Sequence
  Description of Artificial Sequence: Synthetic oligonucleotide
agguggaggaauuauuggu

SEQ ID NO: 1916285 - RNA, 19 nt, Artificial Sequence
  Description of Artificial Sequence: Synthetic oligonucleotide
aacacugaugaugacccca

SEQ ID NO: 1916286 - RNA, 19 nt, Artificial Sequence
  Description of Artificial Sequence: Synthetic oligonucleotide
accguuuggucccucacag

SEQ ID NO: 1916287 - RNA, 19 nt, Artificial Sequence
  Description of Artificial Sequence: Synthetic oligonucleotide
ucugaccugcuuaauuugu

SEQ ID NO: 1916288 - RNA, 19 nt, Artificial Sequence
  Description of Artificial Sequence: Synthetic oligonucleotide
agaaaucugaccugcuuaa

SEQ ID NO: 1916289 - RNA, 19 nt, Artificial Sequence
  Description of Artificial Sequence: Synthetic oligonucleotide
gaucaugcucuaaacacac

SEQ ID NO: 1916290 - RNA, 19 nt, Artificial Sequence
  Description of Artificial Sequence: Synthetic oligonucleotide
ggaagccacggcuuuaucg

SEQ ID NO: 1916291 - RNA, 19 nt, Artificial Sequence
  Description of Artificial Sequence: Synthetic oligonucleotide
agagcaugcuuaaaggaag

SEQ ID NO: 1916292 - RNA, 19 nt, Artificial Sequence
  Description of Artificial Sequence: Synthetic oligonucleotide
ucguaagcuuugaucaaug

SEQ ID NO: 1916293 - RNA, 19 nt, Artificial Sequence
  Description of Artificial Sequence: Synthetic oligonucleotide
aagaguccauaaguugacg

SEQ ID NO: 1916294 - RNA, 19 nt, Artificial Sequence
  Description of Artificial Sequence: Synthetic oligonucleotide
acacauuuucaccguuugg

SEQ ID NO: 1916295 - RNA, 19 nt, Artificial Sequence
  Description of Artificial Sequence: Synthetic oligonucleotide
ugccgugugguuuacuucu

SEQ ID NO: 1916296 - RNA, 19 nt, Artificial Sequence
  Description of Artificial Sequence: Synthetic oligonucleotide
acgggaaacacugaugaug

SEQ ID NO: 1916297 - RNA, 19 nt, Artificial Sequence
  Description of Artificial Sequence: Synthetic oligonucleotide
uggucccucacagugauca

SEQ ID NO: 1916298 - RNA, 19 nt, Artificial Sequence
  Description of Artificial Sequence: Synthetic oligonucleotide
uggugaguuaggcauggac

SEQ ID NO: 1916299 - RNA, 19 nt, Artificial Sequence
  Description of Artificial Sequence: Synthetic oligonucleotide
gacaaucuggggauauggg

SEQ ID NO: 1916300 - RNA, 19 nt, Artificial Sequence
  Description of Artificial Sequence: Synthetic oligonucleotide
caccgaauccuccuguucc

SEQ ID NO: 1916301 - RNA, 19 nt, Artificial Sequence
  Description of Artificial Sequence: Synthetic oligonucleotide
gacggugagacuucuguuc

SEQ ID NO: 1916302 - RNA, 19 nt, Artificial Sequence
  Description of Artificial Sequence: Synthetic oligonucleotide
uccauaaguugacggugag

SEQ ID NO: 1916303 - RNA, 19 nt, Artificial Sequence
  Description of Artificial Sequence: Synthetic oligonucleotide
aacacaccccacuggugag

SEQ ID NO: 1916304 - RNA, 19 nt, Artificial Sequence
  Description of Artificial Sequence: Synthetic oligonucleotide
uagccacucauguaccaag

SEQ ID NO: 1916305 - RNA, 19 nt, Artificial Sequence
  Description of Artificial Sequence: Synthetic oligonucleotide
aggcauggaccccagcacg

SEQ ID NO: 1916306 - RNA, 19 nt, Artificial Sequence
  Description of Artificial Sequence: Synthetic oligonucleotide
aauuauuggugguccugaa

SEQ ID NO: 1916307 - RNA, 19 nt, Artificial Sequence
  Description of Artificial Sequence: Synthetic oligonucleotide
ugagagaucuggaggaguu

SEQ ID NO: 1916308 - RNA, 19 nt, Artificial Sequence
  Description of Artificial Sequence: Synthetic oligonucleotide
uuuggucccucacagugau

SEQ ID NO: 1916309 - RNA, 19 nt, Artificial Sequence
  Description of Artificial Sequence: Synthetic oligonucleotide
gagaaaucugaccugcuua

SEQ ID NO: 1916310 - RNA, 19 nt, Artificial Sequence
  Description of Artificial Sequence: Synthetic oligonucleotide
cuauauuauuagcuacuuc

SEQ ID NO: 1916311 - RNA, 19 nt, Artificial Sequence
  Description of Artificial Sequence: Synthetic oligonucleotide
gacaccaacacaccaucuc

SEQ ID NO: 1916312 - RNA, 19 nt, Artificial Sequence
  Description of Artificial Sequence: Synthetic oligonucleotide
augcucuaaacacacccca

SEQ ID NO: 1916313 - RNA, 19 nt, Artificial Sequence
  Description of Artificial Sequence: Synthetic oligonucleotide
uaugauagccacucaugua

SEQ ID NO: 1916314 - RNA, 19 nt, Artificial Sequence
  Description of Artificial Sequence: Synthetic oligonucleotide
aaacggcagaacauuuguc

SEQ ID NO: 1916315 - RNA, 19 nt, Artificial Sequence
  Description of Artificial Sequence: Synthetic oligonucleotide
ucuauauuauuagcuacuu

SEQ ID NO: 1916316 - RNA, 19 nt, Artificial Sequence
  Description of Artificial Sequence: Synthetic oligonucleotide
aguccauaaguugacggug

SEQ ID NO: 1916317 - RNA, 19 nt, Artificial Sequence
  Description of Artificial Sequence: Synthetic oligonucleotide
cucuaaacacaccccacug

SEQ ID NO: 1916318 - RNA, 19 nt, Artificial Sequence
  Description of Artificial Sequence: Synthetic oligonucleotide
ggaaacacugaugaugacc

SEQ ID NO: 1916319 - RNA, 19 nt, Artificial Sequence
  Description of Artificial Sequence: Synthetic oligonucleotide
ggugaguuaggcauggacc

SEQ ID NO: 1916320 - RNA, 19 nt, Artificial Sequence
  Description of Artificial Sequence: Synthetic oligonucleotide
ucauauugaccagggacac

SEQ ID NO: 1916321 - RNA, 19 nt, Artificial Sequence
  Description of Artificial Sequence: Synthetic oligonucleotide
ugguagcuggguaaaugca

SEQ ID NO: 1916322 - RNA, 19 nt, Artificial Sequence
  Description of Artificial Sequence: Synthetic oligonucleotide
aucugaccugcuuaauuug

SEQ ID NO: 1916323 - RNA, 19 nt, Artificial Sequence
  Description of Artificial Sequence: Synthetic oligonucleotide
gaggugguggugguggugg

SEQ ID NO: 1916324 - RNA, 19 nt, Artificial Sequence
  Description of Artificial Sequence: Synthetic oligonucleotide
uauccgguauaaaccacaa

SEQ ID NO: 1916325 - RNA, 19 nt, Artificial Sequence
  Description of Artificial Sequence: Synthetic oligonucleotide
cucauguaccaagagauca

SEQ ID NO: 1916326 - RNA, 19 nt, Artificial Sequence
  Description of Artificial Sequence: Synthetic oligonucleotide
acaguuuuggcagaaugau

SEQ ID NO: 1916327 - RNA, 19 nt, Artificial Sequence
  Description of Artificial Sequence: Synthetic oligonucleotide
uccgagaccgcaccgccgc

SEQ ID NO: 1916328 - RNA, 19 nt, Artificial Sequence
  Description of Artificial Sequence: Synthetic oligonucleotide
aaucugagaccuggcuuuc

SEQ ID NO: 1916329 - RNA, 19 nt, Artificial Sequence
  Description of Artificial Sequence: Synthetic oligonucleotide
aaccacaacacagguuucu

SEQ ID NO: 1916330 - RNA, 19 nt, Artificial Sequence
  Description of Artificial Sequence: Synthetic oligonucleotide
ugucaccauucuuuagagc

SEQ ID NO: 1916331 - RNA, 19 nt, Artificial Sequence
  Description of Artificial Sequence: Synthetic oligonucleotide
acuggugaguuaggcaugg

SEQ ID NO: 1916332 - RNA, 19 nt, Artificial Sequence
  Description of Artificial Sequence: Synthetic oligonucleotide
agcuacuucacagguuggg

SEQ ID NO: 1916333 - RNA, 19 nt, Artificial Sequence
  Description of Artificial Sequence: Synthetic oligonucleotide
gaagccacggcuuuaucgu

SEQ ID NO: 1916334 - RNA, 19 nt, Artificial Sequence
  Description of Artificial Sequence: Synthetic oligonucleotide
acggugagacuucuguuca

SEQ ID NO: 1916335 - RNA, 19 nt, Artificial Sequence
  Description of Artificial Sequence: Synthetic oligonucleotide
auccgguauaaaccacaac

SEQ ID NO: 1916336 - RNA, 19 nt, Artificial Sequence
  Description of Artificial Sequence: Synthetic oligonucleotide
uaucaucccagaugucaga

SEQ ID NO: 1916337 - RNA, 19 nt, Artificial Sequence
  Description of Artificial Sequence: Synthetic oligonucleotide
gaaagcagaucagauaggu

SEQ ID NO: 1916338 - RNA, 19 nt, Artificial Sequence
  Description of Artificial Sequence: Synthetic oligonucleotide
uaucguaagcuuugaucaa

SEQ ID NO: 1916339 - RNA, 19 nt, Artificial Sequence
  Description of Artificial Sequence: Synthetic oligonucleotide
auuugucaccaacuuucca

SEQ ID NO: 1916340 - RNA, 19 nt, Artificial Sequence
  Description of Artificial Sequence: Synthetic oligonucleotide
uagcuacuucacagguugg

SEQ ID NO: 1916341 - RNA, 19 nt, Artificial Sequence
  Description of Artificial Sequence: Synthetic oligonucleotide
guaugauagccacucaugu

SEQ ID NO: 1916342 - RNA, 19 nt, Artificial Sequence
  Description of Artificial Sequence: Synthetic oligonucleotide
guagcuggguaaaugcagc

SEQ ID NO: 1916343 - RNA, 19 nt, Artificial Sequence
  Description of Artificial Sequence: Synthetic oligonucleotide
agccugacuuucauucucc

SEQ ID NO: 1916344 - RNA, 19 nt, Artificial Sequence
  Description of Artificial Sequence: Synthetic oligonucleotide
uuuggacuugccguguggu

SEQ ID NO: 1916345 - RNA, 19 nt, Artificial Sequence
  Description of Artificial Sequence: Synthetic oligonucleotide
ucacugucgucuguugaag

SEQ ID NO: 1916346 - RNA, 19 nt, Artificial Sequence
  Description of Artificial Sequence: Synthetic oligonucleotide
aaguugacggugagacuuc

SEQ ID NO: 1916347 - RNA, 19 nt, Artificial Sequence
  Description of Artificial Sequence: Synthetic oligonucleotide
accauucuuuagagcaugc

SEQ ID NO: 1916348 - RNA, 19 nt, Artificial Sequence
  Description of Artificial Sequence: Synthetic oligonucleotide
auaaguugacggugagacu

SEQ ID NO: 1916349 - RNA, 19 nt, Artificial Sequence
  Description of Artificial Sequence: Synthetic oligonucleotide
ugucaccaacuuuccacug

SEQ ID NO: 1916350 - RNA, 19 nt, Artificial Sequence
  Description of Artificial Sequence: Synthetic oligonucleotide
agcuggguaaaugcagccg

SEQ ID NO: 1916351 - RNA, 19 nt, Artificial Sequence
  Description of Artificial Sequence: Synthetic oligonucleotide
ccgucuucugaccaaacgg

SEQ ID NO: 1916352 - RNA, 19 nt, Artificial Sequence
  Description of Artificial Sequence: Synthetic oligonucleotide
cuacuucacagguugggga

SEQ ID NO: 1916353 - RNA, 19 nt, Artificial Sequence
  Description of Artificial Sequence: Synthetic oligonucleotide
uucaagggaguuguggcau

SEQ ID NO: 1916354 - RNA, 19 nt, Artificial Sequence
  Description of Artificial Sequence: Synthetic oligonucleotide
ggaaguaaugguagcuggg

SEQ ID NO: 1916355 - RNA, 19 nt, Artificial Sequence
  Description of Artificial Sequence: Synthetic oligonucleotide
caacauacuuccgagggca

SEQ ID NO: 1916356 - RNA, 19 nt, Artificial Sequence
  Description of Artificial Sequence: Synthetic oligonucleotide
cauguaccaagagaucaac

SEQ ID NO: 1916357 - RNA, 19 nt, Artificial Sequence
  Description of Artificial Sequence: Synthetic oligonucleotide
guucuguucuauauuauua

SEQ ID NO: 1916358 - RNA, 19 nt, Artificial Sequence
  Description of Artificial Sequence: Synthetic oligonucleotide
gguggugggccauugaauc

SEQ ID NO: 1916359 - RNA, 19 nt, Artificial Sequence
  Description of Artificial Sequence: Synthetic oligonucleotide
gagcaugcuuaaaggaagc

SEQ ID NO: 1916360 - RNA, 19 nt, Artificial Sequence
  Description of Artificial Sequence: Synthetic oligonucleotide
ucuccugaguguucuguuc

SEQ ID NO: 1916361 - RNA, 19 nt, Artificial Sequence
  Description of Artificial Sequence: Synthetic oligonucleotide
uggugggccauugaaucug

SEQ ID NO: 1916362 - RNA, 19 nt, Artificial Sequence
  Description of Artificial Sequence: Synthetic oligonucleotide
gguagcuggguaaaugcag

SEQ ID NO: 1916363 - RNA, 19 nt, Artificial Sequence
  Description of Artificial Sequence: Synthetic oligonucleotide
uaauagccuguaugauagc

SEQ ID NO: 1916364 - RNA, 19 nt, Artificial Sequence
  Description of Artificial Sequence: Synthetic oligonucleotide
uuccgagaccgcaccgccg

SEQ ID NO: 1916365 - RNA, 19 nt, Artificial Sequence
  Description of Artificial Sequence: Synthetic oligonucleotide
cugcccaucgccauggcga

SEQ ID NO: 1916366 - RNA, 19 nt, Artificial Sequence
  Description of Artificial Sequence: Synthetic oligonucleotide
ugugccacgccggaacagc

SEQ ID NO: 1916367 - RNA, 19 nt, Artificial Sequence
  Description of Artificial Sequence: Synthetic oligonucleotide
uuggcagaaugauuuccau

SEQ ID NO: 1916368 - RNA, 19 nt, Artificial Sequence
  Description of Artificial Sequence: Synthetic oligonucleotide
augcuuaaaggaagccacg

SEQ ID NO: 1916369 - RNA, 19 nt, Artificial Sequence
  Description of Artificial Sequence: Synthetic oligonucleotide
guaccaagagaucaacaua

SEQ ID NO: 1916370 - RNA, 19 nt, Artificial Sequence
  Description of Artificial Sequence: Synthetic oligonucleotide
agagaucaacauacuuccg

SEQ ID NO: 1916371 - RNA, 19 nt, Artificial Sequence
  Description of Artificial Sequence: Synthetic oligonucleotide
caacauacuuagaaaguua

SEQ ID NO: 1916372 - RNA, 19 nt, Artificial Sequence
  Description of Artificial Sequence: Synthetic oligonucleotide
uuccgagggcaucaguguc

SEQ ID NO: 1916373 - RNA, 19 nt, Artificial Sequence
  Description of Artificial Sequence: Synthetic oligonucleotide
cucaacauacuuagaaagu

SEQ ID NO: 1916374 - RNA, 19 nt, Artificial Sequence
  Description of Artificial Sequence: Synthetic oligonucleotide
caaaugucaccauucuuua

SEQ ID NO: 1916375 - RNA, 19 nt, Artificial Sequence
  Description of Artificial Sequence: Synthetic oligonucleotide
ccaagaguccauaaguuga

SEQ ID NO: 1916376 - RNA, 19 nt, Artificial Sequence
  Description of Artificial Sequence: Synthetic oligonucleotide
gaguccauaaguugacggu

SEQ ID NO: 1916377 - RNA, 19 nt, Artificial Sequence
  Description of Artificial Sequence: Synthetic oligonucleotide
ccgguauaaaccacaacac

SEQ ID NO: 1916378 - RNA, 19 nt, Artificial Sequence
  Description of Artificial Sequence: Synthetic oligonucleotide
auagccuguaugauagcca

SEQ ID NO: 1916379 - RNA, 19 nt, Artificial Sequence
  Description of Artificial Sequence: Synthetic oligonucleotide
cuaaacacaccccacuggu

SEQ ID NO: 1916380 - RNA, 19 nt, Artificial Sequence
  Description of Artificial Sequence: Synthetic oligonucleotide
acauacuuccgagggcauc

SEQ ID NO: 1916381 - RNA, 19 nt, Artificial Sequence
  Description of Artificial Sequence: Synthetic oligonucleotide
uggguaaaugcagccgucu

SEQ ID NO: 1916382 - RNA, 19 nt, Artificial Sequence
  Description of Artificial Sequence: Synthetic oligonucleotide
cuucugaccaaacggcaga

SEQ ID NO: 1916383 - RNA, 19 nt, Artificial Sequence
  Description of Artificial Sequence: Synthetic oligonucleotide
uguuuccauauccgguaua

SEQ ID NO: 1916384 - RNA, 19 nt, Artificial Sequence
  Description of Artificial Sequence: Synthetic oligonucleotide
gcuuaaaggaagccacggc

SEQ ID NO: 1916385 - RNA, 19 nt, Artificial Sequence
  Description of Artificial Sequence: Synthetic oligonucleotide
ugguggugggccauugaau

SEQ ID NO: 1916386 - RNA, 19 nt, Artificial Sequence
  Description of Artificial Sequence: Synthetic oligonucleotide
ucaccguuuggucccucac

SEQ ID NO: 1916387 - RNA, 19 nt, Artificial Sequence
  Description of Artificial Sequence: Synthetic oligonucleotide
uucaccguuuggucccuca

SEQ ID NO: 1916388 - RNA, 19 nt, Artificial Sequence
  Description of Artificial Sequence: Synthetic oligonucleotide
caccccacuggugaguuag

SEQ ID NO: 1916389 - RNA, 19 nt, Artificial Sequence
  Description of Artificial Sequence: Synthetic oligonucleotide
ugcccaucgccauggcgag

SEQ ID NO: 1916390 - RNA, 19 nt, Artificial Sequence
  Description of Artificial Sequence: Synthetic oligonucleotide
aaggaagccacggcuuuau

SEQ ID NO: 1916391 - RNA, 19 nt, Artificial Sequence
  Description of Artificial Sequence: Synthetic oligonucleotide
aacccauguaauagccugu

SEQ ID NO: 1916392 - RNA, 19 nt, Artificial Sequence
  Description of Artificial Sequence: Synthetic oligonucleotide
ucagugucauccagacaau

SEQ ID NO: 1916393 - RNA, 19 nt, Artificial Sequence
  Description of Artificial Sequence: Synthetic oligonucleotide
cccagcacgggaaacacug

SEQ ID NO: 1916394 - RNA, 19 nt, Artificial Sequence
  Description of Artificial Sequence: Synthetic oligonucleotide
gaccccacucagccaagag

SEQ ID NO: 1916395 - RNA, 19 nt, Artificial Sequence
  Description of Artificial Sequence: Synthetic oligonucleotide
aucguaagcuuugaucaau

SEQ ID NO: 1916396 - RNA, 19 nt, Artificial Sequence
  Description of Artificial Sequence: Synthetic oligonucleotide
aaagcagaucagauagguu

SEQ ID NO: 1916397 - RNA, 19 nt, Artificial Sequence
  Description of Artificial Sequence: Synthetic oligonucleotide
uggacuugccgugugguuu

SEQ ID NO: 1916398 - RNA, 19 nt, Artificial Sequence
  Description of Artificial Sequence: Synthetic oligonucleotide
ggaauuauuggugguccug

SEQ ID NO: 1916399 - RNA, 19 nt, Artificial Sequence
  Description of Artificial Sequence: Synthetic oligonucleotide
cuggccugugccacgccgg

SEQ ID NO: 1916400 - RNA, 19 nt, Artificial Sequence
  Description of Artificial Sequence: Synthetic oligonucleotide
gggaggaagaaaugaguuc

SEQ ID NO: 1916401 - RNA, 19 nt, Artificial Sequence
  Description of Artificial Sequence: Synthetic oligonucleotide
gccgucuucugaccaaacg

SEQ ID NO: 1916402 - RNA, 19 nt, Artificial Sequence
  Description of Artificial Sequence: Synthetic oligonucleotide
cauauugaccagggacacc

SEQ ID NO: 1916403 - RNA, 19 nt, Artificial Sequence
  Description of Artificial Sequence: Synthetic oligonucleotide
ccuugggagaaaucugacc

SEQ ID NO: 1916404 - RNA, 19 nt, Artificial Sequence
  Description of Artificial Sequence: Synthetic oligonucleotide
uugccgugugguuuacuuc

SEQ ID NO: 1916405 - RNA, 19 nt, Artificial Sequence
  Description of Artificial Sequence: Synthetic oligonucleotide
ggaaagcagaucagauagg

SEQ ID NO: 1916406 - RNA, 19 nt, Artificial Sequence
  Description of Artificial Sequence: Synthetic oligonucleotide
cgucuucugaccaaacggc

SEQ ID NO: 1916407 - RNA, 19 nt, Artificial Sequence
  Description of Artificial Sequence: Synthetic oligonucleotide
ugacggugagacuucuguu

SEQ ID NO: 1916408 - RNA, 19 nt, Artificial Sequence
  Description of Artificial Sequence: Synthetic oligonucleotide
caaacggcagaacauuugu

SEQ ID NO: 1916409 - RNA, 19 nt, Artificial Sequence
  Description of Artificial Sequence: Synthetic oligonucleotide
uucuccugaguguucuguu

SEQ ID NO: 1916410 - RNA, 19 nt, Artificial Sequence
  Description of Artificial Sequence: Synthetic oligonucleotide
cacuggugaguuaggcaug

SEQ ID NO: 1916411 - RNA, 19 nt, Artificial Sequence
  Description of Artificial Sequence: Synthetic oligonucleotide
agacuucuguucauauuga

SEQ ID NO: 1916412 - RNA, 19 nt, Artificial Sequence
  Description of Artificial Sequence: Synthetic oligonucleotide
aagggaguuguggcauucu

SEQ ID NO: 1916413 - RNA, 19 nt, Artificial Sequence
  Description of Artificial Sequence: Synthetic oligonucleotide
aggaagccacggcuuuauc

SEQ ID NO: 1916414 - RNA, 19 nt, Artificial Sequence
  Description of Artificial Sequence: Synthetic oligonucleotide
gguccugaagggaacggag

SEQ ID NO: 1916415 - RNA, 19 nt, Artificial Sequence
  Description of Artificial Sequence: Synthetic oligonucleotide
cauucuuuagagcaugcuu

SEQ ID NO: 1916416 - RNA, 19 nt, Artificial Sequence
  Description of Artificial Sequence: Synthetic oligonucleotide
cuggguaaaugcagccguc

SEQ ID NO: 1916417 - RNA, 19 nt, Artificial Sequence
  Description of Artificial Sequence: Synthetic oligonucleotide
uucugaccaaacggcagaa

SEQ ID NO: 1916418 - RNA, 19 nt, Artificial Sequence
  Description of Artificial Sequence: Synthetic oligonucleotide
cuguuccgagaccgcaccg

SEQ ID NO: 1916419 - RNA, 19 nt, Artificial Sequence
  Description of Artificial Sequence: Synthetic oligonucleotide
uuguggcauucuucuuuug

SEQ ID NO: 1916420 - RNA, 19 nt, Artificial Sequence
  Description of Artificial Sequence: Synthetic oligonucleotide
ucugaccaaacggcagaac

SEQ ID NO: 1916421 - RNA, 19 nt, Artificial Sequence
  Description of Artificial Sequence: Synthetic oligonucleotide
ccaaacggcagaacauuug

SEQ ID NO: 1916422 - RNA, 19 nt, Artificial Sequence
  Description of Artificial Sequence: Synthetic oligonucleotide
aagccacggcuuuaucgua

SEQ ID NO: 1916423 - RNA, 19 nt, Artificial Sequence
  Description of Artificial Sequence: Synthetic oligonucleotide
gaccagggacaccaacaca

SEQ ID NO: 1916424 - RNA, 19 nt, Artificial Sequence
  Description of Artificial Sequence: Synthetic oligonucleotide
gucuucugaccaaacggca

SEQ ID NO: 1916425 - RNA, 19 nt, Artificial Sequence
  Description of Artificial Sequence: Synthetic oligonucleotide
gccggaacagcaccgaauc

SEQ ID NO: 1916426 - RNA, 19 nt, Artificial Sequence
  Description of Artificial Sequence: Synthetic oligonucleotide
gugguggugggccauugaa

SEQ ID NO: 1916427 - RNA, 19 nt, Artificial Sequence
  Description of Artificial Sequence: Synthetic oligonucleotide
cuuagcagguuuucuucua

SEQ ID NO: 1916428 - RNA, 19 nt, Artificial Sequence
  Description of Artificial Sequence: Synthetic oligonucleotide
auuagcuacuucacagguu

SEQ ID NO: 1916429 - RNA, 19 nt, Artificial Sequence
  Description of Artificial Sequence: Synthetic oligonucleotide
agguggugguggugguggg

SEQ ID NO: 1916430 - RNA, 19 nt, Artificial Sequence
  Description of Artificial Sequence: Synthetic oligonucleotide
ucgucuguugaagccugac

SEQ ID NO: 1916431 - RNA, 19 nt, Artificial Sequence
  Description of Artificial Sequence: Synthetic oligonucleotide
agcagaucagauagguuuu

SEQ ID NO: 1916432 - RNA, 19 nt, Artificial Sequence
  Description of Artificial Sequence: Synthetic oligonucleotide
cacucuggccugugccacg

SEQ ID NO: 1916433 - RNA, 19 nt, Artificial Sequence
  Description of Artificial Sequence: Synthetic oligonucleotide
gccuguaugauagccacuc

SEQ ID NO: 1916434 - RNA, 19 nt, Artificial Sequence
  Description of Artificial Sequence: Synthetic oligonucleotide
cguaagcuuugaucaaugc

SEQ ID NO: 1916435 - RNA, 19 nt, Artificial Sequence
  Description of Artificial Sequence: Synthetic oligonucleotide
gcaugcuuaaaggaagcca

SEQ ID NO: 1916436 - RNA, 19 nt, Artificial Sequence
  Description of Artificial Sequence: Synthetic oligonucleotide
ucaagggaguuguggcauu

SEQ ID NO: 1916437 - RNA, 19 nt, Artificial Sequence
  Description of Artificial Sequence: Synthetic oligonucleotide
guuaggcauggaccccagc

SEQ ID NO: 1916438 - RNA, 19 nt, Artificial Sequence
  Description of Artificial Sequence: Synthetic oligonucleotide
uuggacuugccgugugguu

SEQ ID NO: 1916439 - RNA, 19 nt, Artificial Sequence
  Description of Artificial Sequence: Synthetic oligonucleotide
gaaacccauguaauagccu

SEQ ID NO: 1916440 - RNA, 19 nt, Artificial Sequence
  Description of Artificial Sequence: Synthetic oligonucleotide
uaaugguagcuggguaaau

SEQ ID NO: 1916441 - RNA, 19 nt, Artificial Sequence
  Description of Artificial Sequence: Synthetic oligonucleotide
aacauacuuccgagggcau

SEQ ID NO: 1916442 - RNA, 19 nt, Artificial Sequence
  Description of Artificial Sequence: Synthetic oligonucleotide
cuguaugauagccacucau

SEQ ID NO: 1916443 - RNA, 19 nt, Artificial Sequence
  Description of Artificial Sequence: Synthetic oligonucleotide
agggacaccaacacaccau

SEQ ID NO: 1916444 - RNA, 19 nt, Artificial Sequence
  Description of Artificial Sequence: Synthetic oligonucleotide
guuuggucccucacaguga

SEQ ID NO: 1916445 - RNA, 19 nt, Artificial Sequence
  Description of Artificial Sequence: Synthetic oligonucleotide
aguugacggugagacuucu

SEQ ID NO: 1916446 - RNA, 19 nt, Artificial Sequence
  Description of Artificial Sequence: Synthetic oligonucleotide
gaguguucuguucuauauu

SEQ ID NO: 1916447 - RNA, 19 nt, Artificial Sequence
  Description of Artificial Sequence: Synthetic oligonucleotide
ccugcuuaauuuguaugug

SEQ ID NO: 1916448 - RNA, 19 nt, Artificial Sequence
  Description of Artificial Sequence: Synthetic oligonucleotide
cacggcuuuaucguaagcu

SEQ ID NO: 1916449 - RNA, 19 nt, Artificial Sequence
  Description of Artificial Sequence: Synthetic oligonucleotide
uggccugugccacgccgga

SEQ ID NO: 1916450 - RNA, 19 nt, Artificial Sequence
  Description of Artificial Sequence: Synthetic oligonucleotide
uuuucaccguuuggucccu

SEQ ID NO: 1916451 - RNA, 19 nt, Artificial Sequence
  Description of Artificial Sequence: Synthetic oligonucleotide
gaccccagcacgggaaaca

SEQ ID NO: 1916452 - RNA, 19 nt, Artificial Sequence
  Description of Artificial Sequence: Synthetic oligonucleotide
caagggaguuguggcauuc

SEQ ID NO: 1916453 - RNA, 19 nt, Artificial Sequence
  Description of Artificial Sequence: Synthetic oligonucleotide
guugaagccugacuuucau

SEQ ID NO: 1916454 - RNA, 19 nt, Artificial Sequence
  Description of Artificial Sequence: Synthetic oligonucleotide
auacuuccgagggcaucag

SEQ ID NO: 1916455 - RNA, 19 nt, Artificial Sequence
  Description of Artificial Sequence: Synthetic oligonucleotide
ccuguuccgagaccgcacc

SEQ ID NO: 1916456 - RNA, 19 nt, Artificial Sequence
  Description of Artificial Sequence: Synthetic oligonucleotide
ggaguucucacugucgucu

SEQ ID NO: 1916457 - RNA, 19 nt, Artificial Sequence
  Description of Artificial Sequence: Synthetic oligonucleotide
cgggaaacacugaugauga

SEQ ID NO: 1916458 - RNA, 19 nt, Artificial Sequence
  Description of Artificial Sequence: Synthetic oligonucleotide
ggggaaagcagaucagaua

SEQ ID NO: 1916459 - RNA, 19 nt, Artificial Sequence
  Description of Artificial Sequence: Synthetic oligonucleotide
gaccgcaccgccgcugccc

SEQ ID NO: 1916460 - RNA, 19 nt, Artificial Sequence
  Description of Artificial Sequence: Synthetic oligonucleotide
acacacauuuucaccguuu

SEQ ID NO: 1916461 - RNA, 19 nt, Artificial Sequence
  Description of Artificial Sequence: Synthetic oligonucleotide
guaugugagcacuuuccuu

SEQ ID NO: 1916462 - RNA, 19 nt, Artificial Sequence
  Description of Artificial Sequence: Synthetic oligonucleotide
accaaacggcagaacauuu

SEQ ID NO: 1916463 - RNA, 19 nt, Artificial Sequence
  Description of Artificial Sequence: Synthetic oligonucleotide
cuguaucaucccagauguc

SEQ ID NO: 1916464 - RNA, 19 nt, Artificial Sequence
  Description of Artificial Sequence: Synthetic oligonucleotide
caucgccauggcgagcuac

SEQ ID NO: 1916465 - RNA, 19 nt, Artificial Sequence
  Description of Artificial Sequence: Synthetic oligonucleotide
cuuccgagggcaucagugu

SEQ ID NO: 1916466 - RNA, 19 nt, Artificial Sequence
  Description of Artificial Sequence: Synthetic oligonucleotide
guugacggugagacuucug

SEQ ID NO: 1916467 - RNA, 19 nt, Artificial Sequence
  Description of Artificial Sequence: Synthetic oligonucleotide
cuccugaguguucuguucu

SEQ ID NO: 1916468 - RNA, 19 nt, Artificial Sequence
  Description of Artificial Sequence: Synthetic oligonucleotide
ccauggcgagcuaccacgg

SEQ ID NO: 1916469 - RNA, 19 nt, Artificial Sequence
  Description of Artificial Sequence: Synthetic oligonucleotide
cuugccgugugguuuacuu

SEQ ID NO: 1916470 - RNA, 19 nt, Artificial Sequence
  Description of Artificial Sequence: Synthetic oligonucleotide
caccguuuggucccucaca

SEQ ID NO: 1916471 - RNA, 19 nt, Artificial Sequence
  Description of Artificial Sequence: Synthetic oligonucleotide
gaacggaggcauccaacau

SEQ ID NO: 1916472 - RNA, 19 nt, Artificial Sequence
  Description of Artificial Sequence: Synthetic oligonucleotide
gccacggcuuuaucguaag

SEQ ID NO: 1916473 - RNA, 19 nt, Artificial Sequence
  Description of Artificial Sequence: Synthetic oligonucleotide
acccauguaauagccugua

SEQ ID NO: 1916474 - RNA, 19 nt, Artificial Sequence
  Description of Artificial Sequence: Synthetic oligonucleotide
ggucccaauccugacccug

SEQ ID NO: 1916475 - RNA, 19 nt, Artificial Sequence
  Description of Artificial Sequence: Synthetic oligonucleotide
ucgccauggcgagcuacca

SEQ ID NO: 1916476 - RNA, 19 nt, Artificial Sequence
  Description of Artificial Sequence: Synthetic oligonucleotide
gcucuaaacacaccccacu

SEQ ID NO: 1916477 - RNA, 19 nt, Artificial Sequence
  Description of Artificial Sequence: Synthetic oligonucleotide
gaccaaacggcagaacauu

SEQ ID NO: 1916478 - RNA, 19 nt, Artificial Sequence
  Description of Artificial Sequence: Synthetic oligonucleotide
gggaguuguggcauucuuc

SEQ ID NO: 1916479 - RNA, 19 nt, Artificial Sequence
  Description of Artificial Sequence: Synthetic oligonucleotide
caccaacacaccaucuccu

SEQ ID NO: 1916480 - RNA, 19 nt, Artificial Sequence
  Description of Artificial Sequence: Synthetic oligonucleotide
cauggaccccagcacggga

SEQ ID NO: 1916481 - RNA, 19 nt, Artificial Sequence
  Description of Artificial Sequence: Synthetic oligonucleotide
cuuuaucguaagcuuugau

SEQ ID NO: 1916482 - RNA, 19 nt, Artificial Sequence
  Description of Artificial Sequence: Synthetic oligonucleotide
gccugugccacgccggaac

SEQ ID NO: 1916483 - RNA, 19 nt, Artificial Sequence
  Description of Artificial Sequence: Synthetic oligonucleotide
gacuuucauucuccugagu

SEQ ID NO: 1916484 - RNA, 19 nt, Artificial Sequence
  Description of Artificial Sequence: Synthetic oligonucleotide
guggugggccauugaaucu

SEQ ID NO: 1916485 - RNA, 19 nt, Artificial Sequence
  Description of Artificial Sequence: Synthetic oligonucleotide
uccagacaaucuggggaua

SEQ ID NO: 1916486 - RNA, 19 nt, Artificial Sequence
  Description of Artificial Sequence: Synthetic oligonucleotide
gcuuugaucaaugcuguau

SEQ ID NO: 1916487 - RNA, 19 nt, Artificial Sequence
  Description of Artificial Sequence: Synthetic oligonucleotide
uuggucccucacagugauc

SEQ ID NO: 1916488 - RNA, 19 nt, Artificial Sequence
  Description of Artificial Sequence: Synthetic oligonucleotide
auggaccccagcacgggaa

SEQ ID NO: 1916489 - RNA, 19 nt, Artificial Sequence
  Description of Artificial Sequence: Synthetic oligonucleotide
gaaaucugaccugcuuaau

SEQ ID NO: 1916490 - RNA, 19 nt, Artificial Sequence
  Description of Artificial Sequence: Synthetic oligonucleotide
gggaacggaggcauccaac

SEQ ID NO: 1916491 - RNA, 19 nt, Artificial Sequence
  Description of Artificial Sequence: Synthetic oligonucleotide
cuccucucuguuuccauau

SEQ ID NO: 1916492 - RNA, 19 nt, Artificial Sequence
  Description of Artificial Sequence: Synthetic oligonucleotide
agccacggcuuuaucguaa

SEQ ID NO: 1916493 - RNA, 19 nt, Artificial Sequence
  Description of Artificial Sequence: Synthetic oligonucleotide
ccacgccggaacagcaccg

SEQ ID NO: 1916494 - RNA, 19 nt, Artificial Sequence
  Description of Artificial Sequence: Synthetic oligonucleotide
gcauggaccccagcacggg

SEQ ID NO: 1916495 - RNA, 19 nt, Artificial Sequence
  Description of Artificial Sequence: Synthetic oligonucleotide
ggagaaaucugaccugcuu

SEQ ID NO: 1916496 - RNA, 19 nt, Artificial Sequence
  Description of Artificial Sequence: Synthetic oligonucleotide
gcuuuaucguaagcuuuga

SEQ ID NO: 1916497 - RNA, 19 nt, Artificial Sequence
  Description of Artificial Sequence: Synthetic oligonucleotide
gcaccgaauccuccuguuc

SEQ ID NO: 1916498 - RNA, 19 nt, Artificial Sequence
  Description of Artificial Sequence: Synthetic oligonucleotide
acgccggaacagcaccgaa

SEQ ID NO: 1916499 - RNA, 19 nt, Artificial Sequence
  Description of Artificial Sequence: Synthetic oligonucleotide
agccuguaugauagccacu

SEQ ID NO: 1916500 - RNA, 19 nt, Artificial Sequence
  Description of Artificial Sequence: Synthetic oligonucleotide
ggacuugccgugugguuua

SEQ ID NO: 1916501 - RNA, 19 nt, Artificial Sequence
  Description of Artificial Sequence: Synthetic oligonucleotide
cugucgucuguugaagccu

SEQ ID NO: 1916502 - RNA, 19 nt, Artificial Sequence
  Description of Artificial Sequence: Synthetic oligonucleotide
cccacuggugaguuaggca

SEQ ID NO: 1916503 - RNA, 19 nt, Artificial Sequence
  Description of Artificial Sequence: Synthetic oligonucleotide
ggugguggugguggugggc

SEQ ID NO: 1916504 - RNA, 19 nt, Artificial Sequence
  Description of Artificial Sequence: Synthetic oligonucleotide
gacuugccgugugguuuac

SEQ ID NO: 1916505 - RNA, 19 nt, Artificial Sequence
  Description of Artificial Sequence: Synthetic oligonucleotide
ccaauccugacccuggcau

SEQ ID NO: 1916506 - RNA, 19 nt, Artificial Sequence
  Description of Artificial Sequence: Synthetic oligonucleotide
cuguuuccauauccgguau

SEQ ID NO: 1916507 - RNA, 19 nt, Artificial Sequence
  Description of Artificial Sequence: Synthetic oligonucleotide
uuucaccguuuggucccuc

SEQ ID NO: 1916508 - RNA, 19 nt, Artificial Sequence
  Description of Artificial Sequence: Synthetic oligonucleotide
cagcacgggaaacacugau

SEQ ID NO: 1916509 - RNA, 19 nt, Artificial Sequence
  Description of Artificial Sequence: Synthetic oligonucleotide
ggugggccauugaaucuga

SEQ ID NO: 1916510 - RNA, 19 nt, Artificial Sequence
  Description of Artificial Sequence: Synthetic oligonucleotide
ccuguaugauagccacuca

SEQ ID NO: 1916511 - RNA, 19 nt, Artificial Sequence
  Description of Artificial Sequence: Synthetic oligonucleotide
gucgucuguugaagccuga

SEQ ID NO: 1916512 - RNA, 19 nt, Artificial Sequence
  Description of Artificial Sequence: Synthetic oligonucleotide
gcagccgucuucugaccaa

SEQ ID NO: 1916513 - RNA, 19 nt, Artificial Sequence
  Description of Artificial Sequence: Synthetic oligonucleotide
ccauaaguugacggugaga

SEQ ID NO: 1916514 - RNA, 19 nt, Artificial Sequence
  Description of Artificial Sequence: Synthetic oligonucleotide
cacgccggaacagcaccga

SEQ ID NO: 1916515 - RNA, 19 nt, Artificial Sequence
  Description of Artificial Sequence: Synthetic oligonucleotide
gguuuacuucugagagauc

SEQ ID NO: 1916516 - RNA, 19 nt, Artificial Sequence
  Description of Artificial Sequence: Synthetic oligonucleotide
cacgggaaacacugaugau

SEQ ID NO: 1916517 - RNA, 19 nt, Artificial Sequence
  Description of Artificial Sequence: Synthetic oligonucleotide
gccgugugguuuacuucug

SEQ ID NO: 1916518 - RNA, 19 nt, Artificial Sequence
  Description of Artificial Sequence: Synthetic oligonucleotide
cacugaugaugaccccacu

SEQ ID NO: 1916519 - RNA, 19 nt, Artificial Sequence
  Description of Artificial Sequence: Synthetic oligonucleotide
ggaccccagcacgggaaac

SEQ ID NO: 1916520 - RNA, 19 nt, Artificial Sequence
  Description of Artificial Sequence: Synthetic oligonucleotide
ccgugugguuuacuucuga

SEQ ID NO: 1916521 - RNA, 19 nt, Artificial Sequence
  Description of Artificial Sequence: Synthetic oligonucleotide
caccaacuuuccacuguuu

SEQ ID NO: 1916522 - RNA, 19 nt, Artificial Sequence
  Description of Artificial Sequence: Synthetic oligonucleotide
caccgccgcugcccaucgc

SEQ ID NO: 1916523 - RNA, 19 nt, Artificial Sequence
  Description of Artificial Sequence: Synthetic oligonucleotide
cgccauggcgagcuaccac

SEQ ID NO: 1916524 - RNA, 19 nt, Artificial Sequence
  Description of Artificial Sequence: Synthetic oligonucleotide
cccaucgccauggcgagcu

SEQ ID NO: 1916525 - RNA, 19 nt, Artificial Sequence
  Description of Artificial Sequence: Synthetic oligonucleotide
cacaccccacuggugaguu

SEQ ID NO: 1916526 - RNA, 19 nt, Artificial Sequence
  Description of Artificial Sequence: Synthetic oligonucleotide
ccacaacacagguuucuuu

SEQ ID NO: 1916527 - RNA, 19 nt, Artificial Sequence
  Description of Artificial Sequence: Synthetic oligonucleotide
ccgaauccuccuguuccga

SEQ ID NO: 1916528 - RNA, 19 nt, Artificial Sequence
  Description of Artificial Sequence: Synthetic oligonucleotide
ccagacaaucuggggauau

SEQ ID NO: 1916529 - RNA, 19 nt, Artificial Sequence
  Description of Artificial Sequence: Synthetic oligonucleotide
cgagaccgcaccgccgcug

SEQ ID NO: 1916530 - RNA, 19 nt, Artificial Sequence
  Description of Artificial Sequence: Synthetic oligonucleotide
cggcuuuaucguaagcuuu

SEQ ID NO: 1916531 - RNA, 19 nt, Artificial Sequence
  Description of Artificial Sequence: Synthetic oligonucleotide
ccugaguguucuguucuau

SEQ ID NO: 1916532 - RNA, 19 nt, Artificial Sequence
  Description of Artificial Sequence: Synthetic oligonucleotide
gaguuccauggagcagcuu

SEQ ID NO: 1916533 - RNA, 19 nt, Artificial Sequence
  Description of Artificial Sequence: Synthetic oligonucleotide
gcccaucgccauggcgagc

SEQ ID NO: 1916534 - RNA, 19 nt, Artificial Sequence
  Description of Artificial Sequence: Synthetic oligonucleotide
cccauguaauagccuguau

SEQ ID NO: 1916535 - RNA, 19 nt, Artificial Sequence
  Description of Artificial Sequence: Synthetic oligonucleotide
ccguuuggucccucacagu

SEQ ID NO: 1916536 - RNA, 19 nt, Artificial Sequence
  Description of Artificial Sequence: Synthetic oligonucleotide
cgcaccgccgcugcccauc

SEQ ID NO: 1916537 - RNA, 19 nt, Artificial Sequence
  Description of Artificial Sequence: Synthetic oligonucleotide
ggccugugccacgccggaa

SEQ ID NO: 1916538 - RNA, 19 nt, Artificial Sequence
  Description of Artificial Sequence: Synthetic oligonucleotide
cgccggaacagcaccgaau

SEQ ID NO: 1916539 - RNA, 19 nt, Artificial Sequence
  Description of Artificial Sequence: Synthetic oligonucleotide
cggugagacuucuguucau

SEQ ID NO: 1916540 - RNA, 19 nt, Artificial Sequence
  Description of Artificial Sequence: Synthetic oligonucleotide
ccaucgccauggcgagcua

SEQ ID NO: 1916541 - RNA, 19 nt, Artificial Sequence
  Description of Artificial Sequence: Synthetic oligonucleotide
ccgagaccgcaccgccgcu

SEQ ID NO: 1916542 - RNA, 19 nt, Artificial Sequence
  Description of Artificial Sequence: Synthetic oligonucleotide
ccgcaccgccgcugcccau

SEQ ID NO: 1916543 - RNA, 19 nt, Artificial Sequence
  Description of Artificial Sequence: Synthetic oligonucleotide
aauguacugaguuugguac

SEQ ID NO: 1916544 - RNA, 19 nt, Artificial Sequence
  Description of Artificial Sequence: Synthetic oligonucleotide
gaaauuacccacuacuggg

SEQ ID NO: 1916545 - RNA, 19 nt, Artificial Sequence
  Description of Artificial Sequence: Synthetic oligonucleotide
ugaaguaugaggaacgcag

SEQ ID NO: 1916546 - RNA, 19 nt, Artificial Sequence
  Description of Artificial Sequence: Synthetic oligonucleotide
uauagauguacacacuagg

SEQ ID NO: 1916547 - RNA, 19 nt, Artificial Sequence
  Description of Artificial Sequence: Synthetic oligonucleotide
cuaacagcugguuugaugg

SEQ ID NO: 1916548 - RNA, 19 nt, Artificial Sequence
  Description of Artificial Sequence: Synthetic oligonucleotide
uuuggaaccagaaauuacc

SEQ ID NO: 1916549 - RNA, 19 nt, Artificial Sequence
  Description of Artificial Sequence: Synthetic oligonucleotide
aagaaugccauuguacacc

SEQ ID NO: 1916550 - RNA, 19 nt, Artificial Sequence
  Description of Artificial Sequence: Synthetic oligonucleotide
uuugaauuaaagcaucugu

SEQ ID NO: 1916551 - RNA, 19 nt, Artificial Sequence
  Description of Artificial Sequence: Synthetic oligonucleotide
aacagauuaauauuuggaa

SEQ ID NO: 1916552 - RNA, 19 nt, Artificial Sequence
  Description of Artificial Sequence: Synthetic oligonucleotide
aacuacccuguucugaccc

SEQ ID NO: 1916553 - RNA, 19 nt, Artificial Sequence
  Description of Artificial Sequence: Synthetic oligonucleotide
agaaauuacccacuacugg

SEQ ID NO: 1916554 - RNA, 19 nt, Artificial Sequence
  Description of Artificial Sequence: Synthetic oligonucleotide
uuucaucugaccucuauag

SEQ ID NO: 1916555 - RNA, 19 nt, Artificial Sequence
  Description of Artificial Sequence: Synthetic oligonucleotide
ucauaggagaggcacagag

SEQ ID NO: 1916556 - RNA, 19 nt, Artificial Sequence
  Description of Artificial Sequence: Synthetic oligonucleotide
ugaauuaaagcaucuguac

SEQ ID NO: 1916557 - RNA, 19 nt, Artificial Sequence
  Description of Artificial Sequence: Synthetic oligonucleotide
ugauggauucucaucagag

SEQ ID NO: 1916558 - RNA, 19 nt, Artificial Sequence
  Description of Artificial Sequence: Synthetic oligonucleotide
augauuaggucccugaucu

SEQ ID NO: 1916559 - RNA, 19 nt, Artificial Sequence
  Description of Artificial Sequence: Synthetic oligonucleotide
ugggagaaugauuaggucc

SEQ ID NO: 1916560 - RNA, 19 nt, Artificial Sequence
  Description of Artificial Sequence: Synthetic oligonucleotide
uguacugaguuccaggacu

SEQ ID NO: 1916561 - RNA, 19 nt, Artificial Sequence
  Description of Artificial Sequence: Synthetic oligonucleotide
aguagucuuggcuuccucc

SEQ ID NO: 1916562 - RNA, 19 nt, Artificial Sequence
  Description of Artificial Sequence: Synthetic oligonucleotide
aaccaaguaucccuggcuc

SEQ ID NO: 1916563 - RNA, 19 nt, Artificial Sequence
  Description of Artificial Sequence: Synthetic oligonucleotide
uguucugacccuuucaucu

SEQ ID NO: 1916564 - RNA, 19 nt, Artificial Sequence
  Description of Artificial Sequence: Synthetic oligonucleotide
accucuauagcucccaagg

SEQ ID NO: 1916565 - RNA, 19 nt, Artificial Sequence
  Description of Artificial Sequence: Synthetic oligonucleotide
gaaaacaacagauuaauau

SEQ ID NO: 1916566 - RNA, 19 nt, Artificial Sequence
  Description of Artificial Sequence: Synthetic oligonucleotide
ucuuguuccagucagcauc

SEQ ID NO: 1916567 - RNA, 19 nt, Artificial Sequence
  Description of Artificial Sequence: Synthetic oligonucleotide
ucacauguggguaggaugc

SEQ ID NO: 1916568 - RNA, 19 nt, Artificial Sequence
  Description of Artificial Sequence: Synthetic oligonucleotide
ucuauagcucccaaggcug

SEQ ID NO: 1916569 - RNA, 19 nt, Artificial Sequence
  Description of Artificial Sequence: Synthetic oligonucleotide
uuuugggacguaaaggcug

SEQ ID NO: 1916570 - RNA, 19 nt, Artificial Sequence
  Description of Artificial Sequence: Synthetic oligonucleotide
uuauggaccucauaggaga

SEQ ID NO: 1916571 - RNA, 19 nt, Artificial Sequence
  Description of Artificial Sequence: Synthetic oligonucleotide
uguuaaagcaguagucuug

SEQ ID NO: 1916572 - RNA, 19 nt, Artificial Sequence
  Description of Artificial Sequence: Synthetic oligonucleotide
ucaucugaccucuauagcu

SEQ ID NO: 1916573 - RNA, 19 nt, Artificial Sequence
  Description of Artificial Sequence: Synthetic oligonucleotide
aacgcaguacuauucaggu

SEQ ID NO: 1916574 - RNA, 19 nt, Artificial Sequence
  Description of Artificial Sequence: Synthetic oligonucleotide
aggccaaauuccuucaccc

SEQ ID NO: 1916575 - RNA, 19 nt, Artificial Sequence
  Description of Artificial Sequence: Synthetic oligonucleotide
auuaaagcaucuguacagc

SEQ ID NO: 1916576 - RNA, 19 nt, Artificial Sequence
  Description of Artificial Sequence: Synthetic oligonucleotide
auagauguacacacuaggc

SEQ ID NO: 1916577 - RNA, 19 nt, Artificial Sequence
  Description of Artificial Sequence: Synthetic oligonucleotide
aauuccuucaccccucgcu

SEQ ID NO: 1916578 - RNA, 19 nt, Artificial Sequence
  Description of Artificial Sequence: Synthetic oligonucleotide
ugguaauagagccuggcca

SEQ ID NO: 1916579 - RNA, 19 nt, Artificial Sequence
  Description of Artificial Sequence: Synthetic oligonucleotide
uaaagcaguagucuuggcu

SEQ ID NO: 1916580 - RNA, 19 nt, Artificial Sequence
  Description of Artificial Sequence: Synthetic oligonucleotide
cuaucugcacaucagcugg

SEQ ID NO: 1916581 - RNA, 19 nt, Artificial Sequence
  Description of Artificial Sequence: Synthetic oligonucleotide
guucuauagauguacacac

SEQ ID NO: 1916582 - RNA, 19 nt, Artificial Sequence
  Description of Artificial Sequence: Synthetic oligonucleotide
ucuauagauguacacacua

SEQ ID NO: 1916583 - RNA, 19 nt, Artificial Sequence
  Description of Artificial Sequence: Synthetic oligonucleotide
uacuauucaggucugguaa

SEQ ID NO: 1916584 - RNA, 19 nt, Artificial Sequence
  Description of Artificial Sequence: Synthetic oligonucleotide
gaauuaaagcaucuguaca

SEQ ID NO: 1916585 - RNA, 19 nt, Artificial Sequence
  Description of Artificial Sequence: Synthetic oligonucleotide
uccuuuucgcguaugcagg

SEQ ID NO: 1916586 - RNA, 19 nt, Artificial Sequence
  Description of Artificial Sequence: Synthetic oligonucleotide
uguucuauagauguacaca

SEQ ID NO: 1916587 - RNA, 19 nt, Artificial Sequence
  Description of Artificial Sequence: Synthetic oligonucleotide
uuguacaccagcaagucau

SEQ ID NO: 1916588 - RNA, 19 nt, Artificial Sequence
  Description of Artificial Sequence: Synthetic oligonucleotide
agcaucagaauguacugag

SEQ ID NO: 1916589 - RNA, 19 nt, Artificial Sequence
  Description of Artificial Sequence: Synthetic oligonucleotide
  modified_base (7)..(7): a, c, u, g, unknown or other
auggugnuguuucuccugg

SEQ ID NO: 1916590 - RNA, 19 nt, Artificial Sequence
  Description of Artificial Sequence: Synthetic oligonucleotide
aucucuguugcccuuagug

SEQ ID NO: 1916591 - RNA, 19 nt, Artificial Sequence
  Description of Artificial Sequence: Synthetic oligonucleotide
uaaagcaucuguacagcug

SEQ ID NO: 1916592 - RNA, 19 nt, Artificial Sequence
  Description of Artificial Sequence: Synthetic oligonucleotide
  modified_base (13)..(13): a, c, u, g, unknown or other
uuacugauggugnuguuuc

SEQ ID NO: 1916593 - RNA, 19 nt, Artificial Sequence
  Description of Artificial Sequence: Synthetic oligonucleotide
ugguuuugaauuaaagcau

SEQ ID NO: 1916594 - RNA, 19 nt, Artificial Sequence
  Description of Artificial Sequence: Synthetic oligonucleotide
auccuaucugcacaucagc

SEQ ID NO: 1916595 - RNA, 19 nt, Artificial Sequence
  Description of Artificial Sequence: Synthetic oligonucleotide
gguuuugggacguaaaggc

SEQ ID NO: 1916596 - RNA, 19 nt, Artificial Sequence
  Description of Artificial Sequence: Synthetic oligonucleotide
aguaugaggaacgcaguac

SEQ ID NO: 1916597 - RNA, 19 nt, Artificial Sequence
  Description of Artificial Sequence: Synthetic oligonucleotide
ugagcuuguucuauagaug

SEQ ID NO: 1916598 - RNA, 19 nt, Artificial Sequence
  Description of Artificial Sequence: Synthetic oligonucleotide
  modified_base (19)..(19): a, c, u, g, unknown or other
ucuggcuuacugauggugn

SEQ ID NO: 1916599 - RNA, 19 nt, Artificial Sequence
  Description of Artificial Sequence: Synthetic oligonucleotide
cuuguuccagucagcaucg

SEQ ID NO: 1916600 - RNA, 19 nt, Artificial Sequence
  Description of Artificial Sequence: Synthetic oligonucleotide
guacacacuaggcaugggg

SEQ ID NO: 1916601 - RNA, 19 nt, Artificial Sequence
  Description of Artificial Sequence: Synthetic oligonucleotide
cuuauggaccucauaggag

SEQ ID NO: 1916602 - RNA, 19 nt, Artificial Sequence
  Description of Artificial Sequence: Synthetic oligonucleotide
uuuugaauuaaagcaucug

SEQ ID NO: 1916603 - RNA, 19 nt, Artificial Sequence
  Description of Artificial Sequence: Synthetic oligonucleotide
cugaguuugguaccaaggc

SEQ ID NO: 1916604 - RNA, 19 nt, Artificial Sequence
  Description of Artificial Sequence: Synthetic oligonucleotide
ucaggucugguaauagagc

SEQ ID NO: 1916605 - RNA, 19 nt, Artificial Sequence
  Description of Artificial Sequence: Synthetic oligonucleotide
cagaaauuacccacuacug

SEQ ID NO: 1916606 - RNA, 19 nt, Artificial Sequence
  Description of Artificial Sequence: Synthetic oligonucleotide
aagcaguagucuuggcuuc

SEQ ID NO: 1916607 - RNA, 19 nt, Artificial Sequence
  Description of Artificial Sequence: Synthetic oligonucleotide
aaauuccuucaccccucgc

SEQ ID NO: 1916608 - RNA, 19 nt, Artificial Sequence
  Description of Artificial Sequence: Synthetic oligonucleotide
gaacgcaguacuauucagg

SEQ ID NO: 1916609 - RNA, 19 nt, Artificial Sequence
  Description of Artificial Sequence: Synthetic oligonucleotide
  modified_base (3)..(3): a, c, u, g, unknown or other
ugnuguuucuccuggugac

SEQ ID NO: 1916610 - RNA, 19 nt, Artificial Sequence
  Description of Artificial Sequence: Synthetic oligonucleotide
uuugguaccaaggcaccgg

SEQ ID NO: 1916611 - RNA, 19 nt, Artificial Sequence
  Description of Artificial Sequence: Synthetic oligonucleotide
aaucccuugucccuccaca

SEQ ID NO: 1916612 - RNA, 19 nt, Artificial Sequence
  Description of Artificial Sequence: Synthetic oligonucleotide
cucuguugcccuuagugag

SEQ ID NO: 1916613 - RNA, 19 nt, Artificial Sequence
  Description of Artificial Sequence: Synthetic oligonucleotide
agaaugauuaggucccuga

SEQ ID NO: 1916614 - RNA, 19 nt, Artificial Sequence
  Description of Artificial Sequence: Synthetic oligonucleotide
uucaucugaccucuauagc

SEQ ID NO: 1916615 - RNA, 19 nt, Artificial Sequence
  Description of Artificial Sequence: Synthetic oligonucleotide
auuaauauuuggaaccaga

SEQ ID NO: 1916616 - RNA, 19 nt, Artificial Sequence
  Description of Artificial Sequence: Synthetic oligonucleotide
cuccuuuucgcguaugcag

SEQ ID NO: 1916617 - RNA, 19 nt, Artificial Sequence
  Description of Artificial Sequence: Synthetic oligonucleotide
gaugauggauucucaucag

SEQ ID NO: 1916618 - RNA, 19 nt, Artificial Sequence
  Description of Artificial Sequence: Synthetic oligonucleotide
gguaauagagccuggccag

SEQ ID NO: 1916619 - RNA, 19 nt, Artificial Sequence
  Description of Artificial Sequence: Synthetic oligonucleotide
uccuaucugcacaucagcu

SEQ ID NO: 1916620 - RNA, 19 nt, Artificial Sequence
  Description of Artificial Sequence: Synthetic oligonucleotide
agguuuugggacguaaagg

SEQ ID NO: 1916621 - RNA, 19 nt, Artificial Sequence
  Description of Artificial Sequence: Synthetic oligonucleotide
guaugcagguuuugggacg

SEQ ID NO: 1916622 - RNA, 19 nt, Artificial Sequence
  Description of Artificial Sequence: Synthetic oligonucleotide
uauggaccucauaggagag

SEQ ID NO: 1916623 - RNA, 19 nt, Artificial Sequence
  Description of Artificial Sequence: Synthetic oligonucleotide
uccccggcaaagaggaugg

SEQ ID NO: 1916624 - RNA, 19 nt, Artificial Sequence
  Description of Artificial Sequence: Synthetic oligonucleotide
uuguucuauagauguacac

SEQ ID NO: 1916625 - RNA, 19 nt, Artificial Sequence
  Description of Artificial Sequence: Synthetic oligonucleotide
acugaguuugguaccaagg

SEQ ID NO: 1916626 - RNA, 19 nt, Artificial Sequence
  Description of Artificial Sequence: Synthetic oligonucleotide
gauuaauauuuggaaccag

SEQ ID NO: 1916627 - RNA, 19 nt, Artificial Sequence
  Description of Artificial Sequence: Synthetic oligonucleotide
accagaaauuacccacuac

SEQ ID NO: 1916628 - RNA, 19 nt, Artificial Sequence
  Description of Artificial Sequence: Synthetic oligonucleotide
  modified_base (8)..(8): a, c, u, g, unknown or other
gauggugnuguuucuccug

SEQ ID NO: 1916629 - RNA, 19 nt, Artificial Sequence
  Description of Artificial Sequence: Synthetic oligonucleotide
uugcccuuagugagcaggg

SEQ ID NO: 1916630 - RNA, 19 nt, Artificial Sequence
  Description of Artificial Sequence: Synthetic oligonucleotide
acgguaggcucacaugugg

SEQ ID NO: 1916631 - RNA, 19 nt, Artificial Sequence
  Description of Artificial Sequence: Synthetic oligonucleotide
caacccugaaguaugagga

SEQ ID NO: 1916632 - RNA, 19 nt, Artificial Sequence
  Description of Artificial Sequence: Synthetic oligonucleotide
uucuauagauguacacacu

SEQ ID NO: 1916633 - RNA, 19 nt, Artificial Sequence
  Description of Artificial Sequence: Synthetic oligonucleotide
gagaugauggauucucauc

SEQ ID NO: 1916634 - RNA, 19 nt, Artificial Sequence
  Description of Artificial Sequence: Synthetic oligonucleotide
cuaggcauggggcuuuggg

SEQ ID NO: 1916635 - RNA, 19 nt, Artificial Sequence
  Description of Artificial Sequence: Synthetic oligonucleotide
uuugauggcccuccuggga

SEQ ID NO: 1916636 - RNA, 19 nt, Artificial Sequence
  Description of Artificial Sequence: Synthetic oligonucleotide
cauggcaagaaugccauug

SEQ ID NO: 1916637 - RNA, 19 nt, Artificial Sequence
  Description of Artificial Sequence: Synthetic oligonucleotide
gauggauucucaucagaga

SEQ ID NO: 1916638 - RNA, 19 nt, Artificial Sequence
  Description of Artificial Sequence: Synthetic oligonucleotide
ucuguugcccuuagugagc

SEQ ID NO: 1916639 - RNA, 19 nt, Artificial Sequence
  Description of Artificial Sequence: Synthetic oligonucleotide
uauucaggucugguaauag

SEQ ID NO: 1916640 - RNA, 19 nt, Artificial Sequence
  Description of Artificial Sequence: Synthetic oligonucleotide
aggcccugcgcuuauggac

SEQ ID NO: 1916641 - RNA, 19 nt, Artificial Sequence
  Description of Artificial Sequence: Synthetic oligonucleotide
uaggcauggggcuuugggc

SEQ ID NO: 1916642 - RNA, 19 nt, Artificial Sequence
  Description of Artificial Sequence: Synthetic oligonucleotide
aaguaugaggaacgcagua

SEQ ID NO: 1916643 - RNA, 19 nt, Artificial Sequence
  Description of Artificial Sequence: Synthetic oligonucleotide
uguuccagucagcaucgcc

SEQ ID NO: 1916644 - RNA, 19 nt, Artificial Sequence
  Description of Artificial Sequence: Synthetic oligonucleotide
uggaccucauaggagaggc

SEQ ID NO: 1916645 - RNA, 19 nt, Artificial Sequence
  Description of Artificial Sequence: Synthetic oligonucleotide
uguacugaguuugguacca

SEQ ID NO: 1916646 - RNA, 19 nt, Artificial Sequence
  Description of Artificial Sequence: Synthetic oligonucleotide
guugcccuuagugagcagg

SEQ ID NO: 1916647 - RNA, 19 nt, Artificial Sequence
  Description of Artificial Sequence: Synthetic oligonucleotide
gagcuuguucuauagaugu

SEQ ID NO: 1916648 - RNA, 19 nt, Artificial Sequence
  Description of Artificial Sequence: Synthetic oligonucleotide
uacugaguuugguaccaag

SEQ ID NO: 1916649 - RNA, 19 nt, Artificial Sequence
  Description of Artificial Sequence: Synthetic oligonucleotide
aaggcaccggccccgcugg

SEQ ID NO: 1916650 - RNA, 19 nt, Artificial Sequence
  Description of Artificial Sequence: Synthetic oligonucleotide
cagaauguacugaguuugg

SEQ ID NO: 1916651 - RNA, 19 nt, Artificial Sequence
  Description of Artificial Sequence: Synthetic oligonucleotide
gcgcuuauggaccucauag

SEQ ID NO: 1916652 - RNA, 19 nt, Artificial Sequence
  Description of Artificial Sequence: Synthetic oligonucleotide
aguuugguaccaaggcacc

SEQ ID NO: 1916653 - RNA, 19 nt, Artificial Sequence
  Description of Artificial Sequence: Synthetic oligonucleotide
cauguggguaggaugcccc

SEQ ID NO: 1916654 - RNA, 19 nt, Artificial Sequence
  Description of Artificial Sequence: Synthetic oligonucleotide
ucugguaauagagccuggc

SEQ ID NO: 1916655 - RNA, 19 nt, Artificial Sequence
  Description of Artificial Sequence: Synthetic oligonucleotide
cuacagagaugauggauuc

SEQ ID NO: 1916656 - RNA, 19 nt, Artificial Sequence
  Description of Artificial Sequence: Synthetic oligonucleotide
aauagagccuggccagccu

SEQ ID NO: 1916657 - RNA, 19 nt, Artificial Sequence
  Description of Artificial Sequence: Synthetic oligonucleotide
uggccaacccugaaguaug

SEQ ID NO: 1916658 - RNA, 19 nt, Artificial Sequence
  Description of Artificial Sequence: Synthetic oligonucleotide
gaauguacugaguuuggua

SEQ ID NO: 1916659 - RNA, 19 nt, Artificial Sequence
  Description of Artificial Sequence: Synthetic oligonucleotide
ucaucuguauguccugguc

SEQ ID NO: 1916660 - RNA, 19 nt, Artificial Sequence
  Description of Artificial Sequence: Synthetic oligonucleotide
gaggcaauccuaucugcac

SEQ ID NO: 1916661 - RNA, 19 nt, Artificial Sequence
  Description of Artificial Sequence: Synthetic oligonucleotide
uuacccacuacugggagaa

SEQ ID NO: 1916662 - RNA, 19 nt, Artificial Sequence
  Description of Artificial Sequence: Synthetic oligonucleotide
acccugaaguaugaggaac

SEQ ID NO: 1916663 - RNA, 19 nt, Artificial Sequence
  Description of Artificial Sequence: Synthetic oligonucleotide
aucccuugucccuccacac

SEQ ID NO: 1916664 - RNA, 19 nt, Artificial Sequence
  Description of Artificial Sequence: Synthetic oligonucleotide
uaucccuggcucccaacag

SEQ ID NO: 1916665 - RNA, 19 nt, Artificial Sequence
  Description of Artificial Sequence: Synthetic oligonucleotide
aggaacgcaguacuauuca

SEQ ID NO: 1916666 - RNA, 19 nt, Artificial Sequence
  Description of Artificial Sequence: Synthetic oligonucleotide
agagaugauggauucucau

SEQ ID NO: 1916667 - RNA, 19 nt, Artificial Sequence
  Description of Artificial Sequence: Synthetic oligonucleotide
gauuaggucccugaucuga

SEQ ID NO: 1916668 - RNA, 19 nt, Artificial Sequence
  Description of Artificial Sequence: Synthetic oligonucleotide
uggguguugccgcuugaag

SEQ ID NO: 1916669 - RNA, 19 nt, Artificial Sequence
  Description of Artificial Sequence: Synthetic oligonucleotide
acugggagaaugauuaggu

SEQ ID NO: 1916670 - RNA, 19 nt, Artificial Sequence
  Description of Artificial Sequence: Synthetic oligonucleotide
  modified_base (4)..(4): a, c, u, g, unknown or other
gugnuguuucuccugguga

SEQ ID NO: 1916671 - RNA, 19 nt, Artificial Sequence
  Description of Artificial Sequence: Synthetic oligonucleotide
aagcaguggccuuccagca

SEQ ID NO: 1916672 - RNA, 19 nt, Artificial Sequence
  Description of Artificial Sequence: Synthetic oligonucleotide
caucugaccucuauagcuc

SEQ ID NO: 1916673 - RNA, 19 nt, Artificial Sequence
  Description of Artificial Sequence: Synthetic oligonucleotide
cuggaaaaggcucucccuc

SEQ ID NO: 1916674 - RNA, 19 nt, Artificial Sequence
  Description of Artificial Sequence: Synthetic oligonucleotide
ugaggucuccuuuucgcgu

SEQ ID NO: 1916675 - RNA, 19 nt, Artificial Sequence
  Description of Artificial Sequence: Synthetic oligonucleotide
agcuggccaacccugaagu

SEQ ID NO: 1916676 - RNA, 19 nt, Artificial Sequence
  Description of Artificial Sequence: Synthetic oligonucleotide
acauguggguaggaugccc

SEQ ID NO: 1916677 - RNA, 19 nt, Artificial Sequence
  Description of Artificial Sequence: Synthetic oligonucleotide
uggaaaaggcucucccucu

SEQ ID NO: 1916678 - RNA, 19 nt, Artificial Sequence
  Description of Artificial Sequence: Synthetic oligonucleotide
gacguaaaggcugggucag

SEQ ID NO: 1916679 - RNA, 19 nt, Artificial Sequence
  Description of Artificial Sequence: Synthetic oligonucleotide
uuagugagcagggcugugc

SEQ ID NO: 1916680 - RNA, 19 nt, Artificial Sequence
  Description of Artificial Sequence: Synthetic oligonucleotide
gccauuguacaccagcaag

SEQ ID NO: 1916681 - RNA, 19 nt, Artificial Sequence
  Description of Artificial Sequence: Synthetic oligonucleotide
  modified_base (9)..(9): a, c, u, g, unknown or other
ugauggugnuguuucuccu

SEQ ID NO: 1916682 - RNA, 19 nt, Artificial Sequence
  Description of Artificial Sequence: Synthetic oligonucleotide
gaccucauaggagaggcac

SEQ ID NO: 1916683 - RNA, 19 nt, Artificial Sequence
  Description of Artificial Sequence: Synthetic oligonucleotide
uuuucgcguaugcagguuu

SEQ ID NO: 1916684 - RNA, 19 nt, Artificial Sequence
  Description of Artificial Sequence: Synthetic oligonucleotide
gguaccaaggcaccggccc

SEQ ID NO: 1916685 - RNA, 19 nt, Artificial Sequence
  Description of Artificial Sequence: Synthetic oligonucleotide
aaccagaaauuacccacua

SEQ ID NO: 1916686 - RNA, 19 nt, Artificial Sequence
  Description of Artificial Sequence: Synthetic oligonucleotide
aguacuauucaggucuggu

SEQ ID NO: 1916687 - RNA, 19 nt, Artificial Sequence
  Description of Artificial Sequence: Synthetic oligonucleotide
aggcaauccuaucugcaca

SEQ ID NO: 1916688 - RNA, 19 nt, Artificial Sequence
  Description of Artificial Sequence: Synthetic oligonucleotide
uaugaggaacgcaguacua

SEQ ID NO: 1916689 - RNA, 19 nt, Artificial Sequence
  Description of Artificial Sequence: Synthetic oligonucleotide
gggagaaugauuagguccc

SEQ ID NO: 1916690 - RNA, 19 nt, Artificial Sequence
  Description of Artificial Sequence: Synthetic oligonucleotide
caggccaaauuccuucacc

SEQ ID NO: 1916691 - RNA, 19 nt, Artificial Sequence
  Description of Artificial Sequence: Synthetic oligonucleotide
gaccucuauagcucccaag

SEQ ID NO: 1916692 - RNA, 19 nt, Artificial Sequence
  Description of Artificial Sequence: Synthetic oligonucleotide
aguaucccuggcucccaac

SEQ ID NO: 1916693 - RNA, 19 nt, Artificial Sequence
  Description of Artificial Sequence: Synthetic oligonucleotide
ugauucuugggagcaucag

SEQ ID NO: 1916694 - RNA, 19 nt, Artificial Sequence
  Description of Artificial Sequence: Synthetic oligonucleotide
ucgcguaugcagguuuugg

SEQ ID NO: 1916695 - RNA, 19 nt, Artificial Sequence
  Description of Artificial Sequence: Synthetic oligonucleotide
acuauucaggucugguaau

SEQ ID NO: 1916696 - RNA, 19 nt, Artificial Sequence
  Description of Artificial Sequence: Synthetic oligonucleotide
ugaggaacgcaguacuauu

SEQ ID NO: 1916697 - RNA, 19 nt, Artificial Sequence
  Description of Artificial Sequence: Synthetic oligonucleotide
cccaggaucauguacugag

SEQ ID NO: 1916698 - RNA, 19 nt, Artificial Sequence
  Description of Artificial Sequence: Synthetic oligonucleotide
agcaguagucuuggcuucc

SEQ ID NO: 1916699 - RNA, 19 nt, Artificial Sequence
  Description of Artificial Sequence: Synthetic oligonucleotide
agcugguuuugaauuaaag

SEQ ID NO: 1916700 - RNA, 19 nt, Artificial Sequence
  Description of Artificial Sequence: Synthetic oligonucleotide
auauuuggaaccagaaauu

SEQ ID NO: 1916701 - RNA, 19 nt, Artificial Sequence
  Description of Artificial Sequence: Synthetic oligonucleotide
ugugauucuugggagcauc

SEQ ID NO: 1916702 - RNA, 19 nt, Artificial Sequence
  Description of Artificial Sequence: Synthetic oligonucleotide
aucuguauguccuggucuu

SEQ ID NO: 1916703 - RNA, 19 nt, Artificial Sequence
  Description of Artificial Sequence: Synthetic oligonucleotide
uccaccagcaggccaaauu

SEQ ID NO: 1916704 - RNA, 19 nt, Artificial Sequence
  Description of Artificial Sequence: Synthetic oligonucleotide
aguguccccggcaaagagg

SEQ ID NO: 1916705 - RNA, 19 nt, Artificial Sequence
  Description of Artificial Sequence: Synthetic oligonucleotide
acgcaguacuauucagguc

SEQ ID NO: 1916706 - RNA, 19 nt, Artificial Sequence
  Description of Artificial Sequence: Synthetic oligonucleotide
aaaaucccuugucccucca

SEQ ID NO: 1916707 - RNA, 19 nt, Artificial Sequence
  Description of Artificial Sequence: Synthetic oligonucleotide
auuaggucccugaucugag

SEQ ID NO: 1916708 - RNA, 19 nt, Artificial Sequence
  Description of Artificial Sequence: Synthetic oligonucleotide
augaccugguuuucauuca

SEQ ID NO: 1916709 - RNA, 19 nt, Artificial Sequence
  Description of Artificial Sequence: Synthetic oligonucleotide
aacgccuugaggucuccuu

SEQ ID NO: 1916710 - RNA, 19 nt, Artificial Sequence
  Description of Artificial Sequence: Synthetic oligonucleotide
  modified_base (5)..(5): a, c, u, g, unknown or other
ggugnuguuucuccuggug

SEQ ID NO: 1916711 - RNA, 19 nt, Artificial Sequence
  Description of Artificial Sequence: Synthetic oligonucleotide
ucaccauggcaagaaugcc

SEQ ID NO: 1916712 - RNA, 19 nt, Artificial Sequence
  Description of Artificial Sequence: Synthetic oligonucleotide
guaugaggaacgcaguacu

SEQ ID NO: 1916713 - RNA, 19 nt, Artificial Sequence
  Description of Artificial Sequence: Synthetic oligonucleotide
uaugcagguuuugggacgu

SEQ ID NO: 1916714 - RNA, 19 nt, Artificial Sequence
  Description of Artificial Sequence: Synthetic oligonucleotide
gcuuguucuauagauguac

SEQ ID NO: 1916715 - RNA, 19 nt, Artificial Sequence
  Description of Artificial Sequence: Synthetic oligonucleotide
ccaacagcagcccaguaug

SEQ ID NO: 1916716 - RNA, 19 nt, Artificial Sequence
  Description of Artificial Sequence: Synthetic oligonucleotide
ugaucugagcuuguucuau

SEQ ID NO: 1916717 - RNA, 19 nt, Artificial Sequence
  Description of Artificial Sequence: Synthetic oligonucleotide
ugauuaggucccugaucug

SEQ ID NO: 1916718 - RNA, 19 nt, Artificial Sequence
  Description of Artificial Sequence: Synthetic oligonucleotide
cccugaaguaugaggaacg

SEQ ID NO: 1916719 - RNA, 19 nt, Artificial Sequence
  Description of Artificial Sequence: Synthetic oligonucleotide
ggaacgcaguacuauucag

SEQ ID NO: 1916720 - RNA, 19 nt, Artificial Sequence
  Description of Artificial Sequence: Synthetic oligonucleotide
cugggagaaugauuagguc

SEQ ID NO: 1916721 - RNA, 19 nt, Artificial Sequence
  Description of Artificial Sequence: Synthetic oligonucleotide
uaucugcacaucagcuggu

SEQ ID NO: 1916722 - RNA, 19 nt, Artificial Sequence
  Description of Artificial Sequence: Synthetic oligonucleotide
gcaacuacccuguucugac

SEQ ID NO: 1916723 - RNA, 19 nt, Artificial Sequence
  Description of Artificial Sequence: Synthetic oligonucleotide
gaggauggugugguggggc

SEQ ID NO: 1916724 - RNA, 19 nt, Artificial Sequence
  Description of Artificial Sequence: Synthetic oligonucleotide
uccuccuaacagcugguuu

SEQ ID NO: 1916725 - RNA, 19 nt, Artificial Sequence
  Description of Artificial Sequence: Synthetic oligonucleotide
  modified_base (12)..(12): a, c, u, g, unknown or other
uacugauggugnuguuucu

SEQ ID NO: 1916726 - RNA, 19 nt, Artificial Sequence
  Description of Artificial Sequence: Synthetic oligonucleotide
gagaaugauuaggucccug

SEQ ID NO: 1916727 - RNA, 19 nt, Artificial Sequence
  Description of Artificial Sequence: Synthetic oligonucleotide
augaggaacgcaguacuau

SEQ ID NO: 1916728 - RNA, 19 nt, Artificial Sequence
  Description of Artificial Sequence: Synthetic oligonucleotide
ccuuccagcaucucuguug

SEQ ID NO: 1916729 - RNA, 19 nt, Artificial Sequence
  Description of Artificial Sequence: Synthetic oligonucleotide
guacuauucaggucuggua

SEQ ID NO: 1916730 - RNA, 19 nt, Artificial Sequence
  Description of Artificial Sequence: Synthetic oligonucleotide
  modified_base (2)..(2): a, c, u, g, unknown or other
gnuguuucuccuggugaca

SEQ ID NO: 1916731 - RNA, 19 nt, Artificial Sequence
  Description of Artificial Sequence: Synthetic oligonucleotide
ggaggcuacagagaugaug

SEQ ID NO: 1916732 - RNA, 19 nt, Artificial Sequence
  Description of Artificial Sequence: Synthetic oligonucleotide
ggacguaaaggcuggguca

SEQ ID NO: 1916733 - RNA, 19 nt, Artificial Sequence
  Description of Artificial Sequence: Synthetic oligonucleotide
uguuucuccuggugacaga

SEQ ID NO: 1916734 - RNA, 19 nt, Artificial Sequence
  Description of Artificial Sequence: Synthetic oligonucleotide
ucccuugucccuccacacu

SEQ ID NO: 1916735 - RNA, 19 nt, Artificial Sequence
  Description of Artificial Sequence: Synthetic oligonucleotide
caacuacccuguucugacc

SEQ ID NO: 1916736 - RNA, 19 nt, Artificial Sequence
  Description of Artificial Sequence: Synthetic oligonucleotide
uuucgcguaugcagguuuu

SEQ ID NO: 1916737 - RNA, 19 nt, Artificial Sequence
  Description of Artificial Sequence: Synthetic oligonucleotide
aucagagaggcaauccuau

SEQ ID NO: 1916738 - RNA, 19 nt, Artificial Sequence
  Description of Artificial Sequence: Synthetic oligonucleotide
guaccaaggcaccggcccc

SEQ ID NO: 1916739 - RNA, 19 nt, Artificial Sequence
  Description of Artificial Sequence: Synthetic oligonucleotide
gauggcccuccugggaggg

SEQ ID NO: 1916740 - RNA, 19 nt, Artificial Sequence
  Description of Artificial Sequence: Synthetic oligonucleotide
acccuguucugacccuuuc

SEQ ID NO: 1916741 - RNA, 19 nt, Artificial Sequence
  Description of Artificial Sequence: Synthetic oligonucleotide
guacaccagcaagucaucc

SEQ ID NO: 1916742 - RNA, 19 nt, Artificial Sequence
  Description of Artificial Sequence: Synthetic oligonucleotide
gagcaucagaauguacuga

SEQ ID NO: 1916743 - RNA, 19 nt, Artificial Sequence
  Description of Artificial Sequence: Synthetic oligonucleotide
gaaugauuaggucccugau

SEQ ID NO: 1916744 - RNA, 19 nt, Artificial Sequence
  Description of Artificial Sequence: Synthetic oligonucleotide
guaauagagccuggccagc

SEQ ID NO: 1916745 - RNA, 19 nt, Artificial Sequence
  Description of Artificial Sequence: Synthetic oligonucleotide
gggacguaaaggcuggguc

SEQ ID NO: 1916746 - RNA, 19 nt, Artificial Sequence
  Description of Artificial Sequence: Synthetic oligonucleotide
caguguccccggcaaagag

SEQ ID NO: 1916747 - RNA, 19 nt, Artificial Sequence
  Description of Artificial Sequence: Synthetic oligonucleotide
ccuaacagcugguuugaug

SEQ ID NO: 1916748 - RNA, 19 nt, Artificial Sequence
  Description of Artificial Sequence: Synthetic oligonucleotide
ugaccucuauagcucccaa

SEQ ID NO: 1916749 - RNA, 19 nt, Artificial Sequence
  Description of Artificial Sequence: Synthetic oligonucleotide
caucagaauguacugaguu

SEQ ID NO: 1916750 - RNA, 19 nt, Artificial Sequence
  Description of Artificial Sequence: Synthetic oligonucleotide
cacgguaggcucacaugug

SEQ ID NO: 1916751 - RNA, 19 nt, Artificial Sequence
  Description of Artificial Sequence: Synthetic oligonucleotide
guccccggcaaagaggaug

SEQ ID NO: 1916752 - RNA, 19 nt, Artificial Sequence
  Description of Artificial Sequence: Synthetic oligonucleotide
caucagagaggcaauccua

SEQ ID NO: 1916753 - RNA, 19 nt, Artificial Sequence
  Description of Artificial Sequence: Synthetic oligonucleotide
gaucugagcuuguucuaua

SEQ ID NO: 1916754 - RNA, 19 nt, Artificial Sequence
  Description of Artificial Sequence: Synthetic oligonucleotide
gccgcuugaagccuuugug

SEQ ID NO: 1916755 - RNA, 19 nt, Artificial Sequence
  Description of Artificial Sequence: Synthetic oligonucleotide
ggccaaauuccuucacccc

SEQ ID NO: 1916756 - RNA, 19 nt, Artificial Sequence
  Description of Artificial Sequence: Synthetic oligonucleotide
ugcagguuuugggacguaa

SEQ ID NO: 1916757 - RNA, 19 nt, Artificial Sequence
  Description of Artificial Sequence: Synthetic oligonucleotide
caaggcaccggccccgcug

SEQ ID NO: 1916758 - RNA, 19 nt, Artificial Sequence
  Description of Artificial Sequence: Synthetic oligonucleotide
ugcgcuuauggaccucaua

SEQ ID NO: 1916759 - RNA, 19 nt, Artificial Sequence
  Description of Artificial Sequence: Synthetic oligonucleotide
  modified_base (6)..(6): a, c, u, g, unknown or other
uggugnuguuucuccuggu

SEQ ID NO: 1916760 - RNA, 19 nt, Artificial Sequence
  Description of Artificial Sequence: Synthetic oligonucleotide
ccagaaauuacccacuacu

SEQ ID NO: 1916761 - RNA, 19 nt, Artificial Sequence
  Description of Artificial Sequence: Synthetic oligonucleotide
cagagaugauggauucuca

SEQ ID NO: 1916762 - RNA, 19 nt, Artificial Sequence
  Description of Artificial Sequence: Synthetic oligonucleotide
ggggcaacuacccuguucu

SEQ ID NO: 1916763 - RNA, 19 nt, Artificial Sequence
  Description of Artificial Sequence: Synthetic oligonucleotide
uucgcguaugcagguuuug

SEQ ID NO: 1916764 - RNA, 19 nt, Artificial Sequence
  Description of Artificial Sequence: Synthetic oligonucleotide
guauggcaggggcaacuac

SEQ ID NO: 1916765 - RNA, 19 nt, Artificial Sequence
  Description of Artificial Sequence: Synthetic oligonucleotide
uggcucaccauggcaagaa

SEQ ID NO: 1916766 - RNA, 19 nt, Artificial Sequence
  Description of Artificial Sequence: Synthetic oligonucleotide
uagucuuggcuuccuccua

SEQ ID NO: 1916767 - RNA, 19 nt, Artificial Sequence
  Description of Artificial Sequence: Synthetic oligonucleotide
acguaaaggcugggucagc

SEQ ID NO: 1916768 - RNA, 19 nt, Artificial Sequence
  Description of Artificial Sequence: Synthetic oligonucleotide
gcguaugcagguuuuggga

SEQ ID NO: 1916769 - RNA, 19 nt, Artificial Sequence
  Description of Artificial Sequence: Synthetic oligonucleotide
gaaguaugaggaacgcagu

SEQ ID NO: 1916770 - RNA, 19 nt, Artificial Sequence
  Description of Artificial Sequence: Synthetic oligonucleotide
agcaucgccaacgccuuga

SEQ ID NO: 1916771 - RNA, 19 nt, Artificial Sequence
  Description of Artificial Sequence: Synthetic oligonucleotide
ucgccaacgccuugagguc

SEQ ID NO: 1916772 - RNA, 19 nt, Artificial Sequence
  Description of Artificial Sequence: Synthetic oligonucleotide
cguaugcagguuuugggac

SEQ ID NO: 1916773 - RNA, 19 nt, Artificial Sequence
  Description of Artificial Sequence: Synthetic oligonucleotide
uggucuuccucuggcuuac

SEQ ID NO: 1916774 - RNA, 19 nt, Artificial Sequence
  Description of Artificial Sequence: Synthetic oligonucleotide
caucagcugguuuugaauu

SEQ ID NO: 1916775 - RNA, 19 nt, Artificial Sequence
  Description of Artificial Sequence: Synthetic oligonucleotide
cacagagaagaaccaagua

SEQ ID NO: 1916776 - RNA, 19 nt, Artificial Sequence
  Description of Artificial Sequence: Synthetic oligonucleotide
gaggucuccuuuucgcgua

SEQ ID NO: 1916777 - RNA, 19 nt, Artificial Sequence
  Description of Artificial Sequence: Synthetic oligonucleotide
caguacuauucaggucugg

SEQ ID NO: 1916778 - RNA, 19 nt, Artificial Sequence
  Description of Artificial Sequence: Synthetic oligonucleotide
  modified_base (14)..(14): a, c, u, g, unknown or other
cuuacugauggugnuguuu

SEQ ID NO: 1916779 - RNA, 19 nt, Artificial Sequence
  Description of Artificial Sequence: Synthetic oligonucleotide
uguugccgcuugaagccuu

SEQ ID NO: 1916780 - RNA, 19 nt, Artificial Sequence
  Description of Artificial Sequence: Synthetic oligonucleotide
uugggacguaaaggcuggg

SEQ ID NO: 1916781 - RNA, 19 nt, Artificial Sequence
  Description of Artificial Sequence: Synthetic oligonucleotide
cugaaguaugaggaacgca

SEQ ID NO: 1916782 - RNA, 19 nt, Artificial Sequence
  Description of Artificial Sequence: Synthetic oligonucleotide
ccucauaggagaggcacag

SEQ ID NO: 1916783 - RNA, 19 nt, Artificial Sequence
  Description of Artificial Sequence: Synthetic oligonucleotide
acgccuugaggucuccuuu

SEQ ID NO: 1916784 - RNA, 19 nt, Artificial Sequence
  Description of Artificial Sequence: Synthetic oligonucleotide
ggcacgguaggcucacaug

SEQ ID NO: 1916785 - RNA, 19 nt, Artificial Sequence
  Description of Artificial Sequence: Synthetic oligonucleotide
ccugaucugagcuuguucu

SEQ ID NO: 1916786 - RNA, 19 nt, Artificial Sequence
  Description of Artificial Sequence: Synthetic oligonucleotide
agcaguggccuuccagcau

SEQ ID NO: 1916787 - RNA, 19 nt, Artificial Sequence
  Description of Artificial Sequence: Synthetic oligonucleotide
cgcguaugcagguuuuggg

SEQ ID NO: 1916788 - RNA, 19 nt, Artificial Sequence
  Description of Artificial Sequence: Synthetic oligonucleotide
gucugguaauagagccugg

SEQ ID NO: 1916789 - RNA, 19 nt, Artificial Sequence
  Description of Artificial Sequence: Synthetic oligonucleotide
uccuugagguggugaugac

SEQ ID NO: 1916790 - RNA, 19 nt, Artificial Sequence
  Description of Artificial Sequence: Synthetic oligonucleotide
ugcccuuagugagcagggc

SEQ ID NO: 1916791 - RNA, 19 nt, Artificial Sequence
  Description of Artificial Sequence: Synthetic oligonucleotide
cuguuaaagcaguagucuu

SEQ ID NO: 1916792 - RNA, 19 nt, Artificial Sequence
  Description of Artificial Sequence: Synthetic oligonucleotide
guuuugggacguaaaggcu

SEQ ID NO: 1916793 - RNA, 19 nt, Artificial Sequence
  Description of Artificial Sequence: Synthetic oligonucleotide
cugcagggagaagcagugg

SEQ ID NO: 1916794 - RNA, 19 nt, Artificial Sequence
  Description of Artificial Sequence: Synthetic oligonucleotide
aguauggcaggggcaacua

SEQ ID NO: 1916795 - RNA, 19 nt, Artificial Sequence
  Description of Artificial Sequence: Synthetic oligonucleotide
cugggagggugugaggcuc

SEQ ID NO: 1916796 - RNA, 19 nt, Artificial Sequence
  Description of Artificial Sequence: Synthetic oligonucleotide
guaggcucacaugugggua

SEQ ID NO: 1916797 - RNA, 19 nt, Artificial Sequence
  Description of Artificial Sequence: Synthetic oligonucleotide
cgcaguacuauucaggucu

SEQ ID NO: 1916798 - RNA, 19 nt, Artificial Sequence
  Description of Artificial Sequence: Synthetic oligonucleotide
accaaggcaccggccccgc

SEQ ID NO: 1916799 - RNA, 19 nt, Artificial Sequence
  Description of Artificial Sequence: Synthetic oligonucleotide
gugaggcucaucugggagu

SEQ ID NO: 1916800 - RNA, 19 nt, Artificial Sequence
  Description of Artificial Sequence: Synthetic oligonucleotide
ggcccugcgcuuauggacc

SEQ ID NO: 1916801 - RNA, 19 nt, Artificial Sequence
  Description of Artificial Sequence: Synthetic oligonucleotide
accucauaggagaggcaca

SEQ ID NO: 1916802 - RNA, 19 nt, Artificial Sequence
  Description of Artificial Sequence: Synthetic oligonucleotide
acuaggcauggggcuuugg

SEQ ID NO: 1916803 - RNA, 19 nt, Artificial Sequence
  Description of Artificial Sequence: Synthetic oligonucleotide
ccuugagguggugaugacc

SEQ ID NO: 1916804 - RNA, 19 nt, Artificial Sequence
  Description of Artificial Sequence: Synthetic oligonucleotide
ggugaugaccugguuuuca

SEQ ID NO: 1916805 - RNA, 19 nt, Artificial Sequence
  Description of Artificial Sequence: Synthetic oligonucleotide
agucaguguccccggcaaa

SEQ ID NO: 1916806 - RNA, 19 nt, Artificial Sequence
  Description of Artificial Sequence: Synthetic oligonucleotide
  modified_base (16)..(16): a, c, u, g, unknown or other
ggcuuacugauggugnugu

SEQ ID NO: 1916807 - RNA, 19 nt, Artificial Sequence
  Description of Artificial Sequence: Synthetic oligonucleotide
cuauucaggucugguaaua

SEQ ID NO: 1916808 - RNA, 19 nt, Artificial Sequence
  Description of Artificial Sequence: Synthetic oligonucleotide
cugcacaucagcugguuuu

SEQ ID NO: 1916809 - RNA, 19 nt, Artificial Sequence
  Description of Artificial Sequence: Synthetic oligonucleotide
cuguugcccuuagugagca

SEQ ID NO: 1916810 - RNA, 19 nt, Artificial Sequence
  Description of Artificial Sequence: Synthetic oligonucleotide
agggagaagcaguggccuu

SEQ ID NO: 1916811 - RNA, 19 nt, Artificial Sequence
  Description of Artificial Sequence: Synthetic oligonucleotide
uacccuguucugacccuuu

SEQ ID NO: 1916812 - RNA, 19 nt, Artificial Sequence
  Description of Artificial Sequence: Synthetic oligonucleotide
caguagucuuggcuuccuc

SEQ ID NO: 1916813 - RNA, 19 nt, Artificial Sequence
  Description of Artificial Sequence: Synthetic oligonucleotide
ggagaagcaguggccuucc

SEQ ID NO: 1916814 - RNA, 19 nt, Artificial Sequence
  Description of Artificial Sequence: Synthetic oligonucleotide
ggcaacuacccuguucuga

SEQ ID NO: 1916815 - RNA, 19 nt, Artificial Sequence
  Description of Artificial Sequence: Synthetic oligonucleotide
cccuugucccuccacacuc

SEQ ID NO: 1916816 - RNA, 19 nt, Artificial Sequence
  Description of Artificial Sequence: Synthetic oligonucleotide
cccacuacugggagaauga

SEQ ID NO: 1916817 - RNA, 19 nt, Artificial Sequence
  Description of Artificial Sequence: Synthetic oligonucleotide
uggggacuggggugccaca

SEQ ID NO: 1916818 - RNA, 19 nt, Artificial Sequence
  Description of Artificial Sequence: Synthetic oligonucleotide
cuauagcucccaaggcugu

SEQ ID NO: 1916819 - RNA, 19 nt, Artificial Sequence
  Description of Artificial Sequence: Synthetic oligonucleotide
caggaucauguacugaguu

SEQ ID NO: 1916820 - RNA, 19 nt, Artificial Sequence
  Description of Artificial Sequence: Synthetic oligonucleotide
ccgcuugaagccuuuguga

SEQ ID NO: 1916821 - RNA, 19 nt, Artificial Sequence
  Description of Artificial Sequence: Synthetic oligonucleotide
gguaggcucacaugugggu

SEQ ID NO: 1916822 - RNA, 19 nt, Artificial Sequence
  Description of Artificial Sequence: Synthetic oligonucleotide
uuccuccuaacagcugguu

SEQ ID NO: 1916823 - RNA, 19 nt, Artificial Sequence
  Description of Artificial Sequence: Synthetic oligonucleotide
ccggcaaagaggauggugu

SEQ ID NO: 1916824 - RNA, 19 nt, Artificial Sequence
  Description of Artificial Sequence: Synthetic oligonucleotide
agcaucucuguugcccuua

SEQ ID NO: 1916825 - RNA, 19 nt, Artificial Sequence
  Description of Artificial Sequence: Synthetic oligonucleotide
ccgagccaggaaaacaaca

SEQ ID NO: 1916826 - RNA, 19 nt, Artificial Sequence
  Description of Artificial Sequence: Synthetic oligonucleotide
cuucaccccucgcugaggu

SEQ ID NO: 1916827 - RNA, 19 nt, Artificial Sequence
  Description of Artificial Sequence: Synthetic oligonucleotide
uggggcacgguaggcucac

SEQ ID NO: 1916828 - RNA, 19 nt, Artificial Sequence
  Description of Artificial Sequence: Synthetic oligonucleotide
agcuuguucuauagaugua

SEQ ID NO: 1916829 - RNA, 19 nt, Artificial Sequence
  Description of Artificial Sequence: Synthetic oligonucleotide
gcaucgccaacgccuugag

SEQ ID NO: 1916830 - RNA, 19 nt, Artificial Sequence
  Description of Artificial Sequence: Synthetic oligonucleotide
gggccccaggaucauguac

SEQ ID NO: 1916831 - RNA, 19 nt, Artificial Sequence
  Description of Artificial Sequence: Synthetic oligonucleotide
uggaggcuacagagaugau

SEQ ID NO: 1916832 - RNA, 19 nt, Artificial Sequence
  Description of Artificial Sequence: Synthetic oligonucleotide
aucugcacaucagcugguu

SEQ ID NO: 1916833 - RNA, 19 nt, Artificial Sequence
  Description of Artificial Sequence: Synthetic oligonucleotide
cucuuccagcccuuggggu

SEQ ID NO: 1916834 - RNA, 19 nt, Artificial Sequence
  Description of Artificial Sequence: Synthetic oligonucleotide
uccuaacagcugguuugau

SEQ ID NO: 1916835 - RNA, 19 nt, Artificial Sequence
  Description of Artificial Sequence: Synthetic oligonucleotide
acacuaggcauggggcuuu

SEQ ID NO: 1916836 - RNA, 19 nt, Artificial Sequence
  Description of Artificial Sequence: Synthetic oligonucleotide
caggcccugcgcuuaugga

SEQ ID NO: 1916837 - RNA, 19 nt, Artificial Sequence
  Description of Artificial Sequence: Synthetic oligonucleotide
cccugaucugagcuuguuc

SEQ ID NO: 1916838 - RNA, 19 nt, Artificial Sequence
  Description of Artificial Sequence: Synthetic oligonucleotide
cuggccaacccugaaguau

SEQ ID NO: 1916839 - RNA, 19 nt, Artificial Sequence
  Description of Artificial Sequence: Synthetic oligonucleotide
caaguaucccuggcuccca

SEQ ID NO: 1916840 - RNA, 19 nt, Artificial Sequence
  Description of Artificial Sequence: Synthetic oligonucleotide
cccgagccaggaaaacaac

SEQ ID NO: 1916841 - RNA, 19 nt, Artificial Sequence
  Description of Artificial Sequence: Synthetic oligonucleotide
ggagugaguggaggagcug

SEQ ID NO: 1916842 - RNA, 19 nt, Artificial Sequence
  Description of Artificial Sequence: Synthetic oligonucleotide
ugggccccaggaucaugua

SEQ ID NO: 1916843 - RNA, 19 nt, Artificial Sequence
  Description of Artificial Sequence: Synthetic oligonucleotide
gcccuuagugagcagggcu

SEQ ID NO: 1916844 - RNA, 19 nt, Artificial Sequence
  Description of Artificial Sequence: Synthetic oligonucleotide
guggcucaccauggcaaga

SEQ ID NO: 1916845 - RNA, 19 nt, Artificial Sequence
  Description of Artificial Sequence: Synthetic oligonucleotide
gccaacccugaaguaugag

SEQ ID NO: 1916846 - RNA, 19 nt, Artificial Sequence
  Description of Artificial Sequence: Synthetic oligonucleotide
gggcaacuacccuguucug

SEQ ID NO: 1916847 - RNA, 19 nt, Artificial Sequence
  Description of Artificial Sequence: Synthetic oligonucleotide
ggcuacagagaugauggau

SEQ ID NO: 1916848 - RNA, 19 nt, Artificial Sequence
  Description of Artificial Sequence: Synthetic oligonucleotide
gcagguuuugggacguaaa

SEQ ID NO: 1916849 - RNA, 19 nt, Artificial Sequence
  Description of Artificial Sequence: Synthetic oligonucleotide
aggcaccggccccgcuggg

SEQ ID NO: 1916850 - RNA, 19 nt, Artificial Sequence
  Description of Artificial Sequence: Synthetic oligonucleotide
cagcaucgccaacgccuug

SEQ ID NO: 1916851 - RNA, 19 nt, Artificial Sequence
  Description of Artificial Sequence: Synthetic oligonucleotide
cuggguguugccgcuugaa

SEQ ID NO: 1916852 - RNA, 19 nt, Artificial Sequence
  Description of Artificial Sequence: Synthetic oligonucleotide
caguauggcaggggcaacu

SEQ ID NO: 1916853 - RNA, 19 nt, Artificial Sequence
  Description of Artificial Sequence: Synthetic oligonucleotide
cacuaggcauggggcuuug

SEQ ID NO: 1916854 - RNA, 19 nt, Artificial Sequence
  Description of Artificial Sequence: Synthetic oligonucleotide
ccuggaaaaggcucucccu

SEQ ID NO: 1916855 - RNA, 19 nt, Artificial Sequence
  Description of Artificial Sequence: Synthetic oligonucleotide
gcaauccuaucugcacauc

SEQ ID NO: 1916856 - RNA, 19 nt, Artificial Sequence
  Description of Artificial Sequence: Synthetic oligonucleotide
gaggcucaucugggaguga

SEQ ID NO: 1916857 - RNA, 19 nt, Artificial Sequence
  Description of Artificial Sequence: Synthetic oligonucleotide
gcaucagaauguacugagu

SEQ ID NO: 1916858 - RNA, 19 nt, Artificial Sequence
  Description of Artificial Sequence: Synthetic oligonucleotide
ccugcgcuuauggaccuca

SEQ ID NO: 1916859 - RNA, 19 nt, Artificial Sequence
  Description of Artificial Sequence: Synthetic oligonucleotide
ccuuuucgcguaugcaggu

SEQ ID NO: 1916860 - RNA, 19 nt, Artificial Sequence
  Description of Artificial Sequence: Synthetic oligonucleotide
guguugccgcuugaagccu

SEQ ID NO: 1916861 - RNA, 19 nt, Artificial Sequence
  Description of Artificial Sequence: Synthetic oligonucleotide
gcuggccaacccugaagua

SEQ ID NO: 1916862 - RNA, 19 nt, Artificial Sequence
  Description of Artificial Sequence: Synthetic oligonucleotide
ggccaacccugaaguauga

SEQ ID NO: 1916863 - RNA, 19 nt, Artificial Sequence
  Description of Artificial Sequence: Synthetic oligonucleotide
cuugucccuccacacucuu

SEQ ID NO: 1916864 - RNA, 19 nt, Artificial Sequence
  Description of Artificial Sequence: Synthetic oligonucleotide
ggcaccggccccgcugggc

SEQ ID NO: 1916865 - RNA, 19 nt, Artificial Sequence
  Description of Artificial Sequence: Synthetic oligonucleotide
cagcugguuugauggcccu

SEQ ID NO: 1916866 - RNA, 19 nt, Artificial Sequence
  Description of Artificial Sequence: Synthetic oligonucleotide
gcuggguguugccgcuuga

SEQ ID NO: 1916867 - RNA, 19 nt, Artificial Sequence
  Description of Artificial Sequence: Synthetic oligonucleotide
ggagaaugauuaggucccu

SEQ ID NO: 1916868 - RNA, 19 nt, Artificial Sequence
  Description of Artificial Sequence: Synthetic oligonucleotide
ccuuucaucugaccucuau

SEQ ID NO: 1916869 - RNA, 19 nt, Artificial Sequence
  Description of Artificial Sequence: Synthetic oligonucleotide
cuuuucgcguaugcagguu

SEQ ID NO: 1916870 - RNA, 19 nt, Artificial Sequence
  Description of Artificial Sequence: Synthetic oligonucleotide
cgcuugaagccuuugugau

SEQ ID NO: 1916871 - RNA, 19 nt, Artificial Sequence
  Description of Artificial Sequence: Synthetic oligonucleotide
gggcacgguaggcucacau

SEQ ID NO: 1916872 - RNA, 19 nt, Artificial Sequence
  Description of Artificial Sequence: Synthetic oligonucleotide
gccaacgccuugaggucuc

SEQ ID NO: 1916873 - RNA, 19 nt, Artificial Sequence
  Description of Artificial Sequence: Synthetic oligonucleotide
ggcucacauguggguagga

SEQ ID NO: 1916874 - RNA, 19 nt, Artificial Sequence
  Description of Artificial Sequence: Synthetic oligonucleotide
gcucacauguggguaggau

SEQ ID NO: 1916875 - RNA, 19 nt, Artificial Sequence
  Description of Artificial Sequence: Synthetic oligonucleotide
augcagguuuugggacgua

SEQ ID NO: 1916876 - RNA, 19 nt, Artificial Sequence
  Description of Artificial Sequence: Synthetic oligonucleotide
ccaacgccuugaggucucc

SEQ ID NO: 1916877 - RNA, 19 nt, Artificial Sequence
  Description of Artificial Sequence: Synthetic oligonucleotide
ccagcccuuggggucccag

SEQ ID NO: 1916878 - RNA, 19 nt, Artificial Sequence
  Description of Artificial Sequence: Synthetic oligonucleotide
cccaaccagguggcucacc

SEQ ID NO: 1916879 - RNA, 19 nt, Artificial Sequence
  Description of Artificial Sequence: Synthetic oligonucleotide
gggucaggggcguggccgu

SEQ ID NO: 1916880 - RNA, 19 nt, Artificial Sequence
  Description of Artificial Sequence: Synthetic oligonucleotide
guugccgcuugaagccuuu

SEQ ID NO: 1916881 - RNA, 19 nt, Artificial Sequence
  Description of Artificial Sequence: Synthetic oligonucleotide
gucccugaucugagcuugu

SEQ ID NO: 1916882 - RNA, 19 nt, Artificial Sequence
  Description of Artificial Sequence: Synthetic oligonucleotide
cugcgcuuauggaccucau

SEQ ID NO: 1916883 - RNA, 19 nt, Artificial Sequence
  Description of Artificial Sequence: Synthetic oligonucleotide
ggacugggucaggggcgug

SEQ ID NO: 1916884 - RNA, 19 nt, Artificial Sequence
  Description of Artificial Sequence: Synthetic oligonucleotide
caacgccuugaggucuccu

SEQ ID NO: 1916885 - RNA, 19 nt, Artificial Sequence
  Description of Artificial Sequence: Synthetic oligonucleotide
ccagcaggccaaauuccuu

SEQ ID NO: 1916886 - RNA, 19 nt, Artificial Sequence
  Description of Artificial Sequence: Synthetic oligonucleotide
gggccccgagccaggaaaa

SEQ ID NO: 1916887 - RNA, 19 nt, Artificial Sequence
  Description of Artificial Sequence: Synthetic oligonucleotide
gcccuccugggagggugug

SEQ ID NO: 1916888 - RNA, 19 nt, Artificial Sequence
  Description of Artificial Sequence: Synthetic oligonucleotide
gcccugcgcuuauggaccu

SEQ ID NO: 1916889 - RNA, 19 nt, Artificial Sequence
  Description of Artificial Sequence: Synthetic oligonucleotide
caccccucgcugagguguu

SEQ ID NO: 1916890 - RNA, 19 nt, Artificial Sequence
  Description of Artificial Sequence: Synthetic oligonucleotide
ccccaaccagguggcucac

SEQ ID NO: 1916891 - RNA, 19 nt, Artificial Sequence
  Description of Artificial Sequence: Synthetic oligonucleotide
cccugcgcuuauggaccuc

SEQ ID NO: 1916892 - RNA, 19 nt, Artificial Sequence
  Description of Artificial Sequence: Synthetic oligonucleotide
cccuuucaucugaccucua

SEQ ID NO: 1916893 - RNA, 19 nt, Artificial Sequence
  Description of Artificial Sequence: Synthetic oligonucleotide
caggggcaacuacccuguu

SEQ ID NO: 1916894 - RNA, 19 nt, Artificial Sequence
  Description of Artificial Sequence: Synthetic oligonucleotide
gggagggugugaggcucau

SEQ ID NO: 1916895 - RNA, 19 nt, Artificial Sequence
  Description of Artificial Sequence: Synthetic oligonucleotide
cugcuggguguugccgcuu

SEQ ID NO: 1916896 - RNA, 19 nt, Artificial Sequence
  Description of Artificial Sequence: Synthetic oligonucleotide
cgccaacgccuugaggucu

SEQ ID NO: 1916897 - RNA, 19 nt, Artificial Sequence
  Description of Artificial Sequence: Synthetic oligonucleotide
aaauuaguaaaauacagga

SEQ ID NO: 1916898 - RNA, 19 nt, Artificial Sequence
  Description of Artificial Sequence: Synthetic oligonucleotide
auuaguaaaauacaggaca

SEQ ID NO: 1916899 - RNA, 19 nt, Artificial Sequence
  Description of Artificial Sequence: Synthetic oligonucleotide
acaauugaaacagugaggc

SEQ ID NO: 1916900 - RNA, 19 nt, Artificial Sequence
  Description of Artificial Sequence: Synthetic oligonucleotide
aauacaggacacuuccuac

SEQ ID NO: 1916901 - RNA, 19 nt, Artificial Sequence
  Description of Artificial Sequence: Synthetic oligonucleotide
ucuagagaaacaauguggc

SEQ ID NO: 1916902 - RNA, 19 nt, Artificial Sequence
  Description of Artificial Sequence: Synthetic oligonucleotide
cuuccuacaacacugaaag

SEQ ID NO: 1916903 - RNA, 19 nt, Artificial Sequence
  Description of Artificial Sequence: Synthetic oligonucleotide
aaacagugaggcuuuggcc

SEQ ID NO: 1916904 - RNA, 19 nt, Artificial Sequence
  Description of Artificial Sequence: Synthetic oligonucleotide
agguaacuggccuugagcc

SEQ ID NO: 1916905 - RNA, 19 nt, Artificial Sequence
  Description of Artificial Sequence: Synthetic oligonucleotide
agaugaaggagcuucuggc

SEQ ID NO: 1916906 - RNA, 19 nt, Artificial Sequence
  Description of Artificial Sequence: Synthetic oligonucleotide
ucucuuuucacuuauucga

SEQ ID NO: 1916907 - RNA, 19 nt, Artificial Sequence
  Description of Artificial Sequence: Synthetic oligonucleotide
ugaauucccaguuaaaggu

SEQ ID NO: 1916908 - RNA, 19 nt, Artificial Sequence
  Description of Artificial Sequence: Synthetic oligonucleotide
uuaaaggugugucuacagg

SEQ ID NO: 1916909 - RNA, 19 nt, Artificial Sequence
  Description of Artificial Sequence: Synthetic oligonucleotide
aaauucauuuggauaaggg

SEQ ID NO: 1916910 - RNA, 19 nt, Artificial Sequence
  Description of Artificial Sequence: Synthetic oligonucleotide
aaacaauguggcugaagac

SEQ ID NO: 1916911 - RNA, 19 nt, Artificial Sequence
  Description of Artificial Sequence: Synthetic oligonucleotide
auuagggcuggacugagac

SEQ ID NO: 1916912 - RNA, 19 nt, Artificial Sequence
  Description of Artificial Sequence: Synthetic oligonucleotide
aagacuugcugguacuugg

SEQ ID NO: 1916913 - RNA, 19 nt, Artificial Sequence
  Description of Artificial Sequence: Synthetic oligonucleotide
gaggagugaagacaggugg

SEQ ID NO: 1916914 - RNA, 19 nt, Artificial Sequence
  Description of Artificial Sequence: Synthetic oligonucleotide
uucauuuggauaaggggag

SEQ ID NO: 1916915 - RNA, 19 nt, Artificial Sequence
  Description of Artificial Sequence: Synthetic oligonucleotide
gaaacaauguggcugaaga

SEQ ID NO: 1916916 - RNA, 19 nt, Artificial Sequence
  Description of Artificial Sequence: Synthetic oligonucleotide
auuuaguagcgguugcccc

SEQ ID NO: 1916917 - RNA, 19 nt, Artificial Sequence
  Description of Artificial Sequence: Synthetic oligonucleotide
acuaucauugucaagaaga

SEQ ID NO: 1916918 - RNA, 19 nt, Artificial Sequence
  Description of Artificial Sequence: Synthetic oligonucleotide
aagagcaucuucagggucc

SEQ ID NO: 1916919 - RNA, 19 nt, Artificial Sequence
  Description of Artificial Sequence: Synthetic oligonucleotide
acuuggguauuucccaucc

SEQ ID NO: 1916920 - RNA, 19 nt, Artificial Sequence
  Description of Artificial Sequence: Synthetic oligonucleotide
aguacuggcuuuuccaggg

SEQ ID NO: 1916921 - RNA, 19 nt, Artificial Sequence
  Description of Artificial Sequence: Synthetic oligonucleotide
cuuuacuugcauuucuugc

SEQ ID NO: 1916922 - RNA, 19 nt, Artificial Sequence
  Description of Artificial Sequence: Synthetic oligonucleotide
gucaaauucauuuggauaa

SEQ ID NO: 1916923 - RNA, 19 nt, Artificial Sequence
  Description of Artificial Sequence: Synthetic oligonucleotide
gaaacagugaggcuuuggc

SEQ ID NO: 1916924 - RNA, 19 nt, Artificial Sequence
  Description of Artificial Sequence: Synthetic oligonucleotide
uccuacaacacugaaagcu

SEQ ID NO: 1916925 - RNA, 19 nt, Artificial Sequence
  Description of Artificial Sequence: Synthetic oligonucleotide
aaaagcuugcugcucugag

SEQ ID NO: 1916926 - RNA, 19 nt, Artificial Sequence
  Description of Artificial Sequence: Synthetic oligonucleotide
uggauauuagaagugaggu

SEQ ID NO: 1916927 - RNA, 19 nt, Artificial Sequence
  Description of Artificial Sequence: Synthetic oligonucleotide
uuggauaaggggaggaggc

SEQ ID NO: 1916928 - RNA, 19 nt, Artificial Sequence
  Description of Artificial Sequence: Synthetic oligonucleotide
cuggauauuagaagugagg

SEQ ID NO: 1916929 - RNA, 19 nt, Artificial Sequence
  Description of Artificial Sequence: Synthetic oligonucleotide
ucuuuggacuauuagggcu

SEQ ID NO: 1916930 - RNA, 19 nt, Artificial Sequence
  Description of Artificial Sequence: Synthetic oligonucleotide
aaauacaggacacuuccua

SEQ ID NO: 1916931 - RNA, 19 nt, Artificial Sequence
  Description of Artificial Sequence: Synthetic oligonucleotide
gacuauuagggcuggacug

SEQ ID NO: 1916932 - RNA, 19 nt, Artificial Sequence
  Description of Artificial Sequence: Synthetic oligonucleotide
cacaauugaaacagugagg

SEQ ID NO: 1916933 - RNA, 19 nt, Artificial Sequence
  Description of Artificial Sequence: Synthetic oligonucleotide
cuuguuguuuuaauggcac

SEQ ID NO: 1916934 - RNA, 19 nt, Artificial Sequence
  Description of Artificial Sequence: Synthetic oligonucleotide
uauucgagcagcauuccgu

SEQ ID NO: 1916935 - RNA, 19 nt, Artificial Sequence
  Description of Artificial Sequence: Synthetic oligonucleotide
gcuucuuuggacuauuagg

SEQ ID NO: 1916936 - RNA, 19 nt, Artificial Sequence
  Description of Artificial Sequence: Synthetic oligonucleotide
uuauucgagcagcauuccg

SEQ ID NO: 1916937 - RNA, 19 nt, Artificial Sequence
  Description of Artificial Sequence: Synthetic oligonucleotide
acuuauucgagcagcauuc

SEQ ID NO: 1916938 - RNA, 19 nt, Artificial Sequence
  Description of Artificial Sequence: Synthetic oligonucleotide
agacccacaauugaaacag

SEQ ID NO: 1916939 - RNA, 19 nt, Artificial Sequence
  Description of Artificial Sequence: Synthetic oligonucleotide
uacaggaacaucagaguca

SEQ ID NO: 1916940 - RNA, 19 nt, Artificial Sequence
  Description of Artificial Sequence: Synthetic oligonucleotide
acugaauucccaguuaaag

SEQ ID NO: 1916941 - RNA, 19 nt, Artificial Sequence
  Description of Artificial Sequence: Synthetic oligonucleotide
acucuuguccgucacaucu

SEQ ID NO: 1916942 - RNA, 19 nt, Artificial Sequence
  Description of Artificial Sequence: Synthetic oligonucleotide
uuuucacuuauucgagcag

SEQ ID NO: 1916943 - RNA, 19 nt, Artificial Sequence
  Description of Artificial Sequence: Synthetic oligonucleotide
uuucauuuaguagcgguug

SEQ ID NO: 1916944 - RNA, 19 nt, Artificial Sequence
  Description of Artificial Sequence: Synthetic oligonucleotide
acgaagaccgcuugcugcc

SEQ ID NO: 1916945 - RNA, 19 nt, Artificial Sequence
  Description of Artificial Sequence: Synthetic oligonucleotide
uuucccauccuuccguaag

SEQ ID NO: 1916946 - RNA, 19 nt, Artificial Sequence
  Description of Artificial Sequence: Synthetic oligonucleotide
gucuacaggaacaucagag

SEQ ID NO: 1916947 - RNA, 19 nt, Artificial Sequence
  Description of Artificial Sequence: Synthetic oligonucleotide
agaaccagguggaagcucc

SEQ ID NO: 1916948 - RNA, 19 nt, Artificial Sequence
  Description of Artificial Sequence: Synthetic oligonucleotide
ugguugaaacugaaaagcu

SEQ ID NO: 1916949 - RNA, 19 nt, Artificial Sequence
  Description of Artificial Sequence: Synthetic oligonucleotide
ucuacaggaacaucagagu

SEQ ID NO: 1916950 - RNA, 19 nt, Artificial Sequence
  Description of Artificial Sequence: Synthetic oligonucleotide
cacacuaucauugucaaga

SEQ ID NO: 1916951 - RNA, 19 nt, Artificial Sequence
  Description of Artificial Sequence: Synthetic oligonucleotide
uuuaguagcgguugcccca

SEQ ID NO: 1916952 - RNA, 19 nt, Artificial Sequence
  Description of Artificial Sequence: Synthetic oligonucleotide
ucuuuucacuuauucgagc

SEQ ID NO: 1916953 - RNA, 19 nt, Artificial Sequence
  Description of Artificial Sequence: Synthetic oligonucleotide
gacgaagaccgcuugcugc

SEQ ID NO: 1916954 - RNA, 19 nt, Artificial Sequence
  Description of Artificial Sequence: Synthetic oligonucleotide
ucaagcuccaugucagcag

SEQ ID NO: 1916955 - RNA, 19 nt, Artificial Sequence
  Description of Artificial Sequence: Synthetic oligonucleotide
agaagugagguaacuggcc

SEQ ID NO: 1916956 - RNA, 19 nt, Artificial Sequence
  Description of Artificial Sequence: Synthetic oligonucleotide
cuuuggacuauuagggcug

SEQ ID NO: 1916957 - RNA, 19 nt, Artificial Sequence
  Description of Artificial Sequence: Synthetic oligonucleotide
gucacuguugccucccucg

SEQ ID NO: 1916958 - RNA, 19 nt, Artificial Sequence
  Description of Artificial Sequence: Synthetic oligonucleotide
uucuuuggacuauuagggc

SEQ ID NO: 1916959 - RNA, 19 nt, Artificial Sequence
  Description of Artificial Sequence: Synthetic oligonucleotide
ucgagcagcauuccguggc

SEQ ID NO: 1916960 - RNA, 19 nt, Artificial Sequence
  Description of Artificial Sequence: Synthetic oligonucleotide
auuagaagugagguaacug

SEQ ID NO: 1916961 - RNA, 19 nt, Artificial Sequence
  Description of Artificial Sequence: Synthetic oligonucleotide
gagguaacuggccuugagc

SEQ ID NO: 1916962 - RNA, 19 nt, Artificial Sequence
  Description of Artificial Sequence: Synthetic oligonucleotide
cucuuuucacuuauucgag

SEQ ID NO: 1916963 - RNA, 19 nt, Artificial Sequence
  Description of Artificial Sequence: Synthetic oligonucleotide
ggugguugaaacugaaaag

SEQ ID NO: 1916964 - RNA, 19 nt, Artificial Sequence
  Description of Artificial Sequence: Synthetic oligonucleotide
ucagacccacaauugaaac

SEQ ID NO: 1916965 - RNA, 19 nt, Artificial Sequence
  Description of Artificial Sequence: Synthetic oligonucleotide
agagcauugcugccccugc

SEQ ID NO: 1916966 - RNA, 19 nt, Artificial Sequence
  Description of Artificial Sequence: Synthetic oligonucleotide
uguuuuaauggcacaugau

SEQ ID NO: 1916967 - RNA, 19 nt, Artificial Sequence
  Description of Artificial Sequence: Synthetic oligonucleotide
ugaaggagcuucuggcugc

SEQ ID NO: 1916968 - RNA, 19 nt, Artificial Sequence
  Description of Artificial Sequence: Synthetic oligonucleotide
cauucgguagaugaacggg

SEQ ID NO: 1916969 - RNA, 19 nt, Artificial Sequence
  Description of Artificial Sequence: Synthetic oligonucleotide
ugaggguuuucauuuagua

SEQ ID NO: 1916970 - RNA, 19 nt, Artificial Sequence
  Description of Artificial Sequence: Synthetic oligonucleotide
uugccccaauuuaucaagg

SEQ ID NO: 1916971 - RNA, 19 nt, Artificial Sequence
  Description of Artificial Sequence: Synthetic oligonucleotide
cauuccucaugucacaguc

SEQ ID NO: 1916972 - RNA, 19 nt, Artificial Sequence
  Description of Artificial Sequence: Synthetic oligonucleotide
agacagguggagguguucc

SEQ ID NO: 1916973 - RNA, 19 nt, Artificial Sequence
  Description of Artificial Sequence: Synthetic oligonucleotide
agguggaagcuccacaucu

SEQ ID NO: 1916974 - RNA, 19 nt, Artificial Sequence
  Description of Artificial Sequence: Synthetic oligonucleotide
uucugggacagagagguca

SEQ ID NO: 1916975 - RNA, 19 nt, Artificial Sequence
  Description of Artificial Sequence: Synthetic oligonucleotide
gucacagucagacacacua

SEQ ID NO: 1916976 - RNA, 19 nt, Artificial Sequence
  Description of Artificial Sequence: Synthetic oligonucleotide
uccgucacaucuuuucucu

SEQ ID NO: 1916977 - RNA, 19 nt, Artificial Sequence
  Description of Artificial Sequence: Synthetic oligonucleotide
gagucaagcuccaugucag

SEQ ID NO: 1916978 - RNA, 19 nt, Artificial Sequence
  Description of Artificial Sequence: Synthetic oligonucleotide
auucgguagaugaacgggg

SEQ ID NO: 1916979 - RNA, 19 nt, Artificial Sequence
  Description of Artificial Sequence: Synthetic oligonucleotide
aucugagucaagcuccaug

SEQ ID NO: 1916980 - RNA, 19 nt, Artificial Sequence
  Description of Artificial Sequence: Synthetic oligonucleotide
uggcgcauucgguagauga

SEQ ID NO: 1916981 - RNA, 19 nt, Artificial Sequence
  Description of Artificial Sequence: Synthetic oligonucleotide
uuggcgacuggauauuaga

SEQ ID NO: 1916982 - RNA, 19 nt, Artificial Sequence
  Description of Artificial Sequence: Synthetic oligonucleotide
cauuccguggcauugggca

SEQ ID NO: 1916983 - RNA, 19 nt, Artificial Sequence
  Description of Artificial Sequence: Synthetic oligonucleotide
gaggcgacugaauucccag

SEQ ID NO: 1916984 - RNA, 19 nt, Artificial Sequence
  Description of Artificial Sequence: Synthetic oligonucleotide
auucgagcagcauuccgug

SEQ ID NO: 1916985 - RNA, 19 nt, Artificial Sequence
  Description of Artificial Sequence: Synthetic oligonucleotide
cauuuaguagcgguugccc

SEQ ID NO: 1916986 - RNA, 19 nt, Artificial Sequence
  Description of Artificial Sequence: Synthetic oligonucleotide
auacaggacacuuccuaca

SEQ ID NO: 1916987 - RNA, 19 nt, Artificial Sequence
  Description of Artificial Sequence: Synthetic oligonucleotide
uacaggacacuuccuacaa

SEQ ID NO: 1916988 - RNA, 19 nt, Artificial Sequence
  Description of Artificial Sequence: Synthetic oligonucleotide
ugaaacagugaggcuuugg

SEQ ID NO: 1916989 - RNA, 19 nt, Artificial Sequence
  Description of Artificial Sequence: Synthetic oligonucleotide
ugagacgaagaccgcuugc

SEQ ID NO: 1916990 - RNA, 19 nt, Artificial Sequence
  Description of Artificial Sequence: Synthetic oligonucleotide
ucagacacacuaucauugu

SEQ ID NO: 1916991 - RNA, 19 nt, Artificial Sequence
  Description of Artificial Sequence: Synthetic oligonucleotide
ucacuguugccucccucgg

SEQ ID NO: 1916992 - RNA, 19 nt, Artificial Sequence
  Description of Artificial Sequence: Synthetic oligonucleotide
cuuucugacagagcauugc

SEQ ID NO: 1916993 - RNA, 19 nt, Artificial Sequence
  Description of Artificial Sequence: Synthetic oligonucleotide
gaauucccaguuaaaggug

SEQ ID NO: 1916994 - RNA, 19 nt, Artificial Sequence
  Description of Artificial Sequence: Synthetic oligonucleotide
ucauuuaguagcgguugcc

SEQ ID NO: 1916995 - RNA, 19 nt, Artificial Sequence
  Description of Artificial Sequence: Synthetic oligonucleotide
uauuagaagugagguaacu

SEQ ID NO: 1916996 - RNA, 19 nt, Artificial Sequence
  Description of Artificial Sequence: Synthetic oligonucleotide
agucaagcuccaugucagc

SEQ ID NO: 1916997 - RNA, 19 nt, Artificial Sequence
  Description of Artificial Sequence: Synthetic oligonucleotide
ucauuuggauaaggggagg

SEQ ID NO: 1916998 - RNA, 19 nt, Artificial Sequence
  Description of Artificial Sequence: Synthetic oligonucleotide
auuccguggcauugggcac

SEQ ID NO: 1916999 - RNA, 19 nt, Artificial Sequence
  Description of Artificial Sequence: Synthetic oligonucleotide
uuguccgucacaucuuuuc

SEQ ID NO: 1917000 - RNA, 19 nt, Artificial Sequence
  Description of Artificial Sequence: Synthetic oligonucleotide
gagguguucccuguggcag

SEQ ID NO: 1917001 - RNA, 19 nt, Artificial Sequence
  Description of Artificial Sequence: Synthetic oligonucleotide
ugaaacugaaaagcuugcu

SEQ ID NO: 1917002 - RNA, 19 nt, Artificial Sequence
  Description of Artificial Sequence: Synthetic oligonucleotide
caggacacuuccuacaaca

SEQ ID NO: 1917003 - RNA, 19 nt, Artificial Sequence
  Description of Artificial Sequence: Synthetic oligonucleotide
guuuuaauggcacaugauu

SEQ ID NO: 1917004 - RNA, 19 nt, Artificial Sequence
  Description of Artificial Sequence: Synthetic oligonucleotide
acacugaaagcuuccuugu

SEQ ID NO: 1917005 - RNA, 19 nt, Artificial Sequence
  Description of Artificial Sequence: Synthetic oligonucleotide
uucaucugaugcucuucag

SEQ ID NO: 1917006 - RNA, 19 nt, Artificial Sequence
  Description of Artificial Sequence: Synthetic oligonucleotide
acaggacacuuccuacaac

SEQ ID NO: 1917007 - RNA, 19 nt, Artificial Sequence
  Description of Artificial Sequence: Synthetic oligonucleotide
uuuggacuauuagggcugg

SEQ ID NO: 1917008 - RNA, 19 nt, Artificial Sequence
  Description of Artificial Sequence: Synthetic oligonucleotide
aggucaaauucauuuggau

SEQ ID NO: 1917009 - RNA, 19 nt, Artificial Sequence
  Description of Artificial Sequence: Synthetic oligonucleotide
uuguuguuuuaauggcaca

SEQ ID NO: 1917010 - RNA, 19 nt, Artificial Sequence
  Description of Artificial Sequence: Synthetic oligonucleotide
acuggauauuagaagugag

SEQ ID NO: 1917011 - RNA, 19 nt, Artificial Sequence
  Description of Artificial Sequence: Synthetic oligonucleotide
uggagguguucccuguggc

SEQ ID NO: 1917012 - RNA, 19 nt, Artificial Sequence
  Description of Artificial Sequence: Synthetic oligonucleotide
ugaaaagcuugcugcucug

SEQ ID NO: 1917013 - RNA, 19 nt, Artificial Sequence
  Description of Artificial Sequence: Synthetic oligonucleotide
cacacuucaugcuuggcga

SEQ ID NO: 1917014 - RNA, 19 nt, Artificial Sequence
  Description of Artificial Sequence: Synthetic oligonucleotide
cuacaacacugaaagcuuc

SEQ ID NO: 1917015 - RNA, 19 nt, Artificial Sequence
  Description of Artificial Sequence: Synthetic oligonucleotide
ugacagagcauugcugccc

SEQ ID NO: 1917016 - RNA, 19 nt, Artificial Sequence
  Description of Artificial Sequence: Synthetic oligonucleotide
uggauaaggggaggaggcg

SEQ ID NO: 1917017 - RNA, 19 nt, Artificial Sequence
  Description of Artificial Sequence: Synthetic oligonucleotide
gacacacuaucauugucaa

SEQ ID NO: 1917018 - RNA, 19 nt, Artificial Sequence
  Description of Artificial Sequence: Synthetic oligonucleotide
ugccccaauuuaucaaggc

SEQ ID NO: 1917019 - RNA, 19 nt, Artificial Sequence
  Description of Artificial Sequence: Synthetic oligonucleotide
guuuucauuuaguagcggu

SEQ ID NO: 1917020 - RNA, 19 nt, Artificial Sequence
  Description of Artificial Sequence: Synthetic oligonucleotide
cuuagggaguggaggagug

SEQ ID NO: 1917021 - RNA, 19 nt, Artificial Sequence
  Description of Artificial Sequence: Synthetic oligonucleotide
ggcgacuggauauuagaag

SEQ ID NO: 1917022 - RNA, 19 nt, Artificial Sequence
  Description of Artificial Sequence: Synthetic oligonucleotide
ugcccuucuagagaaacaa

SEQ ID NO: 1917023 - RNA, 19 nt, Artificial Sequence
  Description of Artificial Sequence: Synthetic oligonucleotide
uucgagcagcauuccgugg

SEQ ID NO: 1917024 - RNA, 19 nt, Artificial Sequence
  Description of Artificial Sequence: Synthetic oligonucleotide
aaaggugugucuacaggaa

SEQ ID NO: 1917025 - RNA, 19 nt, Artificial Sequence
  Description of Artificial Sequence: Synthetic oligonucleotide
agcauuccguggcauuggg

SEQ ID NO: 1917026 - RNA, 19 nt, Artificial Sequence
  Description of Artificial Sequence: Synthetic oligonucleotide
uggccuugagccagccugg

SEQ ID NO: 1917027 - RNA, 19 nt, Artificial Sequence
  Description of Artificial Sequence: Synthetic oligonucleotide
gaagacuugcugguacuug

SEQ ID NO: 1917028 - RNA, 19 nt, Artificial Sequence
  Description of Artificial Sequence: Synthetic oligonucleotide
uggcgacuggauauuagaa

SEQ ID NO: 1917029 - RNA, 19 nt, Artificial Sequence
  Description of Artificial Sequence: Synthetic oligonucleotide
aguuaaaggugugucuaca

SEQ ID NO: 1917030 - RNA, 19 nt, Artificial Sequence
  Description of Artificial Sequence: Synthetic oligonucleotide
agucagacacacuaucauu

SEQ ID NO: 1917031 - RNA, 19 nt, Artificial Sequence
  Description of Artificial Sequence: Synthetic oligonucleotide
uggacuauuagggcuggac

SEQ ID NO: 1917032 - RNA, 19 nt, Artificial Sequence
  Description of Artificial Sequence: Synthetic oligonucleotide
cuuggcgacuggauauuag

SEQ ID NO: 1917033 - RNA, 19 nt, Artificial Sequence
  Description of Artificial Sequence: Synthetic oligonucleotide
agaaacaauguggcugaag

SEQ ID NO: 1917034 - RNA, 19 nt, Artificial Sequence
  Description of Artificial Sequence: Synthetic oligonucleotide
agucacugggagucagcgg

SEQ ID NO: 1917035 - RNA, 19 nt, Artificial Sequence
  Description of Artificial Sequence: Synthetic oligonucleotide
cacagucagacacacuauc

SEQ ID NO: 1917036 - RNA, 19 nt, Artificial Sequence
  Description of Artificial Sequence: Synthetic oligonucleotide
cccuucuagagaaacaaug

SEQ ID NO: 1917037 - RNA, 19 nt, Artificial Sequence
  Description of Artificial Sequence: Synthetic oligonucleotide
cacuaucauugucaagaag

SEQ ID NO: 1917038 - RNA, 19 nt, Artificial Sequence
  Description of Artificial Sequence: Synthetic oligonucleotide
cuugcccuucuagagaaac

SEQ ID NO: 1917039 - RNA, 19 nt, Artificial Sequence
  Description of Artificial Sequence: Synthetic oligonucleotide
augcuuggcgacuggauau

SEQ ID NO: 1917040 - RNA, 19 nt, Artificial Sequence
  Description of Artificial Sequence: Synthetic oligonucleotide
gaugaaggagcuucuggcu

SEQ ID NO: 1917041 - RNA, 19 nt, Artificial Sequence
  Description of Artificial Sequence: Synthetic oligonucleotide
ugcugagccgccuuccuuc

SEQ ID NO: 1917042 - RNA, 19 nt, Artificial Sequence
  Description of Artificial Sequence: Synthetic oligonucleotide
uggcauugggcacuccuuc

SEQ ID NO: 1917043 - RNA, 19 nt, Artificial Sequence
  Description of Artificial Sequence: Synthetic oligonucleotide
augcucuucagacccacaa

SEQ ID NO: 1917044 - RNA, 19 nt, Artificial Sequence
  Description of Artificial Sequence: Synthetic oligonucleotide
aagugagguaacuggccuu

SEQ ID NO: 1917045 - RNA, 19 nt, Artificial Sequence
  Description of Artificial Sequence: Synthetic oligonucleotide
cuuauucgagcagcauucc

SEQ ID NO: 1917046 - RNA, 19 nt, Artificial Sequence
  Description of Artificial Sequence: Synthetic oligonucleotide
aggccggguguccagauga

SEQ ID NO: 1917047 - RNA, 19 nt, Artificial Sequence
  Description of Artificial Sequence: Synthetic oligonucleotide
ggguuuucauuuaguagcg

SEQ ID NO: 1917048 - RNA, 19 nt, Artificial Sequence
  Description of Artificial Sequence: Synthetic oligonucleotide
cugcugcuaggcuggaggg

SEQ ID NO: 1917049 - RNA, 19 nt, Artificial Sequence
  Description of Artificial Sequence: Synthetic oligonucleotide
ggucaaauucauuuggaua

SEQ ID NO: 1917050 - RNA, 19 nt, Artificial Sequence
  Description of Artificial Sequence: Synthetic oligonucleotide
ggguauuucccauccuucc

SEQ ID NO: 1917051 - RNA, 19 nt, Artificial Sequence
  Description of Artificial Sequence: Synthetic oligonucleotide
agacgaagaccgcuugcug

SEQ ID NO: 1917052 - RNA, 19 nt, Artificial Sequence
  Description of Artificial Sequence: Synthetic oligonucleotide
uauuagggcuggacugaga

SEQ ID NO: 1917053 - RNA, 19 nt, Artificial Sequence
  Description of Artificial Sequence: Synthetic oligonucleotide
ucuuguccgucacaucuuu

SEQ ID NO: 1917054 - RNA, 19 nt, Artificial Sequence
  Description of Artificial Sequence: Synthetic oligonucleotide
uuuugccuuuacuugcauu

SEQ ID NO: 1917055 - RNA, 19 nt, Artificial Sequence
  Description of Artificial Sequence: Synthetic oligonucleotide
gauaaggggaggaggcgac

SEQ ID NO: 1917056 - RNA, 19 nt, Artificial Sequence
  Description of Artificial Sequence: Synthetic oligonucleotide
aggacacuuccuacaacac

SEQ ID NO: 1917057 - RNA, 19 nt, Artificial Sequence
  Description of Artificial Sequence: Synthetic oligonucleotide
gcauucgguagaugaacgg

SEQ ID NO: 1917058 - RNA, 19 nt, Artificial Sequence
  Description of Artificial Sequence: Synthetic oligonucleotide
ccucaugucacagucagac

SEQ ID NO: 1917059 - RNA, 19 nt, Artificial Sequence
  Description of Artificial Sequence: Synthetic oligonucleotide
cuucagacccacaauugaa

SEQ ID NO: 1917060 - RNA, 19 nt, Artificial Sequence
  Description of Artificial Sequence: Synthetic oligonucleotide
gucacugggagucagcggu

SEQ ID NO: 1917061 - RNA, 19 nt, Artificial Sequence
  Description of Artificial Sequence: Synthetic oligonucleotide
ugcucuucagacccacaau

SEQ ID NO: 1917062 - RNA, 19 nt, Artificial Sequence
  Description of Artificial Sequence: Synthetic oligonucleotide
ucccaguuaaagguguguc

SEQ ID NO: 1917063 - RNA, 19 nt, Artificial Sequence
  Description of Artificial Sequence: Synthetic oligonucleotide
uugaaggccggguguccag

SEQ ID NO: 1917064 - RNA, 19 nt, Artificial Sequence
  Description of Artificial Sequence: Synthetic oligonucleotide
uacuugcauuucuugcccu

SEQ ID NO: 1917065 - RNA, 19 nt, Artificial Sequence
  Description of Artificial Sequence: Synthetic oligonucleotide
ggcgaauggugguugaaac

SEQ ID NO: 1917066 - RNA, 19 nt, Artificial Sequence
  Description of Artificial Sequence: Synthetic oligonucleotide
aacuggccuugagccagcc

SEQ ID NO: 1917067 - RNA, 19 nt, Artificial Sequence
  Description of Artificial Sequence: Synthetic oligonucleotide
ccugcugcuaggcuggagg

SEQ ID NO: 1917068 - RNA, 19 nt, Artificial Sequence
  Description of Artificial Sequence: Synthetic oligonucleotide
uauuucccauccuuccgua

SEQ ID NO: 1917069 - RNA, 19 nt, Artificial Sequence
  Description of Artificial Sequence: Synthetic oligonucleotide
uagcgguugccccaauuua

SEQ ID NO: 1917070 - RNA, 19 nt, Artificial Sequence
  Description of Artificial Sequence: Synthetic oligonucleotide
ugagccgccuuccuuccuc

SEQ ID NO: 1917071 - RNA, 19 nt, Artificial Sequence
  Description of Artificial Sequence: Synthetic oligonucleotide
uagggaguggaggagugaa

SEQ ID NO: 1917072 - RNA, 19 nt, Artificial Sequence
  Description of Artificial Sequence: Synthetic oligonucleotide
cagacccacaauugaaaca

SEQ ID NO: 1917073 - RNA, 19 nt, Artificial Sequence
  Description of Artificial Sequence: Synthetic oligonucleotide
agagcugcccagaucuguc

SEQ ID NO: 1917074 - RNA, 19 nt, Artificial Sequence
  Description of Artificial Sequence: Synthetic oligonucleotide
agcuugcugcucugagaac

SEQ ID NO: 1917075 - RNA, 19 nt, Artificial Sequence
  Description of Artificial Sequence: Synthetic oligonucleotide
guacuggcuuuuccagggg

SEQ ID NO: 1917076 - RNA, 19 nt, Artificial Sequence
  Description of Artificial Sequence: Synthetic oligonucleotide
ugagaaccagguggaagcu

SEQ ID NO: 1917077 - RNA, 19 nt, Artificial Sequence
  Description of Artificial Sequence: Synthetic oligonucleotide
aagaccgcuugcugccaca

SEQ ID NO: 1917078 - RNA, 19 nt, Artificial Sequence
  Description of Artificial Sequence: Synthetic oligonucleotide
cagacacacuaucauuguc

SEQ ID NO: 1917079 - RNA, 19 nt, Artificial Sequence
  Description of Artificial Sequence: Synthetic oligonucleotide
uguugccucccucggccug

SEQ ID NO: 1917080 - RNA, 19 nt, Artificial Sequence
  Description of Artificial Sequence: Synthetic oligonucleotide
acuuccuacaacacugaaa

SEQ ID NO: 1917081 - RNA, 19 nt, Artificial Sequence
  Description of Artificial Sequence: Synthetic oligonucleotide
uggggugcccuuagggagu

SEQ ID NO: 1917082 - RNA, 19 nt, Artificial Sequence
  Description of Artificial Sequence: Synthetic oligonucleotide
acugggagucagcgguggg

SEQ ID NO: 1917083 - RNA, 19 nt, Artificial Sequence
  Description of Artificial Sequence: Synthetic oligonucleotide
uguugaaggccgggugucc

SEQ ID NO: 1917084 - RNA, 19 nt, Artificial Sequence
  Description of Artificial Sequence: Synthetic oligonucleotide
aaggccggguguccagaug

SEQ ID NO: 1917085 - RNA, 19 nt, Artificial Sequence
  Description of Artificial Sequence: Synthetic oligonucleotide
ggagugaagacagguggag

SEQ ID NO: 1917086 - RNA, 19 nt, Artificial Sequence
  Description of Artificial Sequence: Synthetic oligonucleotide
cugagacgaagaccgcuug

SEQ ID NO: 1917087 - RNA, 19 nt, Artificial Sequence
  Description of Artificial Sequence: Synthetic oligonucleotide
gcacuccuucaucugaugc

SEQ ID NO: 1917088 - RNA, 19 nt, Artificial Sequence
  Description of Artificial Sequence: Synthetic oligonucleotide
cuucaugcuuggcgacugg

SEQ ID NO: 1917089 - RNA, 19 nt, Artificial Sequence
  Description of Artificial Sequence: Synthetic oligonucleotide
uuccguaagcugaggguuu

SEQ ID NO: 1917090 - RNA, 19 nt, Artificial Sequence
  Description of Artificial Sequence: Synthetic oligonucleotide
uuaguagcgguugccccaa

SEQ ID NO: 1917091 - RNA, 19 nt, Artificial Sequence
  Description of Artificial Sequence: Synthetic oligonucleotide
gugaagacagguggaggug

SEQ ID NO: 1917092 - RNA, 19 nt, Artificial Sequence
  Description of Artificial Sequence: Synthetic oligonucleotide
caggggcuuuccuucuggg

SEQ ID NO: 1917093 - RNA, 19 nt, Artificial Sequence
  Description of Artificial Sequence: Synthetic oligonucleotide
gaagaccgcuugcugccac

SEQ ID NO: 1917094 - RNA, 19 nt, Artificial Sequence
  Description of Artificial Sequence: Synthetic oligonucleotide
gcgacuggauauuagaagu

SEQ ID NO: 1917095 - RNA, 19 nt, Artificial Sequence
  Description of Artificial Sequence: Synthetic oligonucleotide
cagcuggcgcauucgguag

SEQ ID NO: 1917096 - RNA, 19 nt, Artificial Sequence
  Description of Artificial Sequence: Synthetic oligonucleotide
cauugggcacuccuucauc

SEQ ID NO: 1917097 - RNA, 19 nt, Artificial Sequence
  Description of Artificial Sequence: Synthetic oligonucleotide
gguuuucauuuaguagcgg

SEQ ID NO: 1917098 - RNA, 19 nt, Artificial Sequence
  Description of Artificial Sequence: Synthetic oligonucleotide
gucaagcuccaugucagca

SEQ ID NO: 1917099 - RNA, 19 nt, Artificial Sequence
  Description of Artificial Sequence: Synthetic oligonucleotide
ggauauuagaagugaggua

SEQ ID NO: 1917100 - RNA, 19 nt, Artificial Sequence
  Description of Artificial Sequence: Synthetic oligonucleotide
cauuuggauaaggggagga

SEQ ID NO: 1917101 - RNA, 19 nt, Artificial Sequence
  Description of Artificial Sequence: Synthetic oligonucleotide
ugaagacuugcugguacuu

SEQ ID NO: 1917102 - RNA, 19 nt, Artificial Sequence
  Description of Artificial Sequence: Synthetic oligonucleotide
aggggcuuuccuucuggga

SEQ ID NO: 1917103 - RNA, 19 nt, Artificial Sequence
  Description of Artificial Sequence: Synthetic oligonucleotide
auuucccauccuuccguaa

SEQ ID NO: 1917104 - RNA, 19 nt, Artificial Sequence
  Description of Artificial Sequence: Synthetic oligonucleotide
cucugcagaagugguuggc

SEQ ID NO: 1917105 - RNA, 19 nt, Artificial Sequence
  Description of Artificial Sequence: Synthetic oligonucleotide
uugccuuuacuugcauuuc

SEQ ID NO: 1917106 - RNA, 19 nt, Artificial Sequence
  Description of Artificial Sequence: Synthetic oligonucleotide
acagguggagguguucccu

SEQ ID NO: 1917107 - RNA, 19 nt, Artificial Sequence
  Description of Artificial Sequence: Synthetic oligonucleotide
gcugccuccauuccucaug

SEQ ID NO: 1917108 - RNA, 19 nt, Artificial Sequence
  Description of Artificial Sequence: Synthetic oligonucleotide
gaaggagcuucuggcugcc

SEQ ID NO: 1917109 - RNA, 19 nt, Artificial Sequence
  Description of Artificial Sequence: Synthetic oligonucleotide
cuagagaaacaauguggcu

SEQ ID NO: 1917110 - RNA, 19 nt, Artificial Sequence
  Description of Artificial Sequence: Synthetic oligonucleotide
ccccaauuuaucaaggcaa

SEQ ID NO: 1917111 - RNA, 19 nt, Artificial Sequence
  Description of Artificial Sequence: Synthetic oligonucleotide
uuccguggcauugggcacu

SEQ ID NO: 1917112 - RNA, 19 nt, Artificial Sequence
  Description of Artificial Sequence: Synthetic oligonucleotide
aggcgacugaauucccagu

SEQ ID NO: 1917113 - RNA, 19 nt, Artificial Sequence
  Description of Artificial Sequence: Synthetic oligonucleotide
cugagucaagcuccauguc

SEQ ID NO: 1917114 - RNA, 19 nt, Artificial Sequence
  Description of Artificial Sequence: Synthetic oligonucleotide
cacuguugccucccucggc

SEQ ID NO: 1917115 - RNA, 19 nt, Artificial Sequence
  Description of Artificial Sequence: Synthetic oligonucleotide
cgcauucgguagaugaacg

SEQ ID NO: 1917116 - RNA, 19 nt, Artificial Sequence
  Description of Artificial Sequence: Synthetic oligonucleotide
agcgguggggugcccuuag

SEQ ID NO: 1917117 - RNA, 19 nt, Artificial Sequence
  Description of Artificial Sequence: Synthetic oligonucleotide
gccccaauuuaucaaggca

SEQ ID NO: 1917118 - RNA, 19 nt, Artificial Sequence
  Description of Artificial Sequence: Synthetic oligonucleotide
uugaaacagugaggcuuug

SEQ ID NO: 1917119 - RNA, 19 nt, Artificial Sequence
  Description of Artificial Sequence: Synthetic oligonucleotide
ugaaggccggguguccaga

SEQ ID NO: 1917120 - RNA, 19 nt, Artificial Sequence
  Description of Artificial Sequence: Synthetic oligonucleotide
gagacgaagaccgcuugcu

SEQ ID NO: 1917121 - RNA, 19 nt, Artificial Sequence
  Description of Artificial Sequence: Synthetic oligonucleotide
ggcuguugaaggccgggug

SEQ ID NO: 1917122 - RNA, 19 nt, Artificial Sequence
  Description of Artificial Sequence: Synthetic oligonucleotide
gguaacuggccuugagcca

SEQ ID NO: 1917123 - RNA, 19 nt, Artificial Sequence
  Description of Artificial Sequence: Synthetic oligonucleotide
gggugagucacugggaguc

SEQ ID NO: 1917124 - RNA, 19 nt, Artificial Sequence
  Description of Artificial Sequence: Synthetic oligonucleotide
cucaugucacagucagaca

SEQ ID NO: 1917125 - RNA, 19 nt, Artificial Sequence
  Description of Artificial Sequence: Synthetic oligonucleotide
aguagcgguugccccaauu

SEQ ID NO: 1917126 - RNA, 19 nt, Artificial Sequence
  Description of Artificial Sequence: Synthetic oligonucleotide
gacucuuguccgucacauc

SEQ ID NO: 1917127 - RNA, 19 nt, Artificial Sequence
  Description of Artificial Sequence: Synthetic oligonucleotide
agcgguugccccaauuuau

SEQ ID NO: 1917128 - RNA, 19 nt, Artificial Sequence
  Description of Artificial Sequence: Synthetic oligonucleotide
acugagacgaagaccgcuu

SEQ ID NO: 1917129 - RNA, 19 nt, Artificial Sequence
  Description of Artificial Sequence: Synthetic oligonucleotide
cagagcauugcugccccug

SEQ ID NO: 1917130 - RNA, 19 nt, Artificial Sequence
  Description of Artificial Sequence: Synthetic oligonucleotide
ugcccagaucugucucugc

SEQ ID NO: 1917131 - RNA, 19 nt, Artificial Sequence
  Description of Artificial Sequence: Synthetic oligonucleotide
agcagcauuccguggcauu

SEQ ID NO: 1917132 - RNA, 19 nt, Artificial Sequence
  Description of Artificial Sequence: Synthetic oligonucleotide
gagaaccagguggaagcuc

SEQ ID NO: 1917133 - RNA, 19 nt, Artificial Sequence
  Description of Artificial Sequence: Synthetic oligonucleotide
ggacuauuagggcuggacu

SEQ ID NO: 1917134 - RNA, 19 nt, Artificial Sequence
  Description of Artificial Sequence: Synthetic oligonucleotide
gacugaauucccaguuaaa

SEQ ID NO: 1917135 - RNA, 19 nt, Artificial Sequence
  Description of Artificial Sequence: Synthetic oligonucleotide
gggaguggaggagugaaga

SEQ ID NO: 1917136 - RNA, 19 nt, Artificial Sequence
  Description of Artificial Sequence: Synthetic oligonucleotide
cuccauuccucaugucaca

SEQ ID NO: 1917137 - RNA, 19 nt, Artificial Sequence
  Description of Artificial Sequence: Synthetic oligonucleotide
cuguugaaggccggguguc

SEQ ID NO: 1917138 - RNA, 19 nt, Artificial Sequence
  Description of Artificial Sequence: Synthetic oligonucleotide
gcagcauuccguggcauug

SEQ ID NO: 1917139 - RNA, 19 nt, Artificial Sequence
  Description of Artificial Sequence: Synthetic oligonucleotide
ggagucagcgguggggugc

SEQ ID NO: 1917140 - RNA, 19 nt, Artificial Sequence
  Description of Artificial Sequence: Synthetic oligonucleotide
gagucagcgguggggugcc

SEQ ID NO: 1917141 - RNA, 19 nt, Artificial Sequence
  Description of Artificial Sequence: Synthetic oligonucleotide
gguugccccaauuuaucaa

SEQ ID NO: 1917142 - RNA, 19 nt, Artificial Sequence
  Description of Artificial Sequence: Synthetic oligonucleotide
ggauaaggggaggaggcga

SEQ ID NO: 1917143 - RNA, 19 nt, Artificial Sequence
  Description of Artificial Sequence: Synthetic oligonucleotide
cagccuggaggguagccca

SEQ ID NO: 1917144 - RNA, 19 nt, Artificial Sequence
  Description of Artificial Sequence: Synthetic oligonucleotide
cagguggaagcuccacauc

SEQ ID NO: 1917145 - RNA, 19 nt, Artificial Sequence
  Description of Artificial Sequence: Synthetic oligonucleotide
aggcgaauggugguugaaa

SEQ ID NO: 1917146 - RNA, 19 nt, Artificial Sequence
  Description of Artificial Sequence: Synthetic oligonucleotide
cacuuauucgagcagcauu

SEQ ID NO: 1917147 - RNA, 19 nt, Artificial Sequence
  Description of Artificial Sequence: Synthetic oligonucleotide
guagcgguugccccaauuu

SEQ ID NO: 1917148 - RNA, 19 nt, Artificial Sequence
  Description of Artificial Sequence: Synthetic oligonucleotide
guaagcugaggguuuucau

SEQ ID NO: 1917149 - RNA, 19 nt, Artificial Sequence
  Description of Artificial Sequence: Synthetic oligonucleotide
ggaacaucagagucacugu

SEQ ID NO: 1917150 - RNA, 19 nt, Artificial Sequence
  Description of Artificial Sequence: Synthetic oligonucleotide
cuucaaguuccuccagugu

SEQ ID NO: 1917151 - RNA, 19 nt, Artificial Sequence
  Description of Artificial Sequence: Synthetic oligonucleotide
caauugaaacagugaggcu

SEQ ID NO: 1917152 - RNA, 19 nt, Artificial Sequence
  Description of Artificial Sequence: Synthetic oligonucleotide
agcccagcuggcgcauucg

SEQ ID NO: 1917153 - RNA, 19 nt, Artificial Sequence
  Description of Artificial Sequence: Synthetic oligonucleotide
guucccuguggcagcggag

SEQ ID NO: 1917154 - RNA, 19 nt, Artificial Sequence
  Description of Artificial Sequence: Synthetic oligonucleotide
cagucagacacacuaucau

SEQ ID NO: 1917155 - RNA, 19 nt, Artificial Sequence
  Description of Artificial Sequence: Synthetic oligonucleotide
guacuuggguauuucccau

SEQ ID NO: 1917156 - RNA, 19 nt, Artificial Sequence
  Description of Artificial Sequence: Synthetic oligonucleotide
uccguaagcugaggguuuu

SEQ ID NO: 1917157 - RNA, 19 nt, Artificial Sequence
  Description of Artificial Sequence: Synthetic oligonucleotide
ggcauugggcacuccuuca

SEQ ID NO: 1917158 - RNA, 19 nt, Artificial Sequence
  Description of Artificial Sequence: Synthetic oligonucleotide
uggcagcggaggaggugug

SEQ ID NO: 1917159 - RNA, 19 nt, Artificial Sequence
  Description of Artificial Sequence: Synthetic oligonucleotide
gcccuuagggaguggagga

SEQ ID NO: 1917160 - RNA, 19 nt, Artificial Sequence
  Description of Artificial Sequence: Synthetic oligonucleotide
cagacaguacuggcuuuuc

SEQ ID NO: 1917161 - RNA, 19 nt, Artificial Sequence
  Description of Artificial Sequence: Synthetic oligonucleotide
auggugguugaaacugaaa

SEQ ID NO: 1917162 - RNA, 19 nt, Artificial Sequence
  Description of Artificial Sequence: Synthetic oligonucleotide
cccaauuuaucaaggcaaa

SEQ ID NO: 1917163 - RNA, 19 nt, Artificial Sequence
  Description of Artificial Sequence: Synthetic oligonucleotide
ucggggcuggggugaguca

SEQ ID NO: 1917164 - RNA, 19 nt, Artificial Sequence
  Description of Artificial Sequence: Synthetic oligonucleotide
ucagcgguggggugcccuu

SEQ ID NO: 1917165 - RNA, 19 nt, Artificial Sequence
  Description of Artificial Sequence: Synthetic oligonucleotide
gcgcauucgguagaugaac

SEQ ID NO: 1917166 - RNA, 19 nt, Artificial Sequence
  Description of Artificial Sequence: Synthetic oligonucleotide
ugcuuggcgacuggauauu

SEQ ID NO: 1917167 - RNA, 19 nt, Artificial Sequence
  Description of Artificial Sequence: Synthetic oligonucleotide
aggcuguugaaggccgggu

SEQ ID NO: 1917168 - RNA, 19 nt, Artificial Sequence
  Description of Artificial Sequence: Synthetic oligonucleotide
uuggacuauuagggcugga

SEQ ID NO: 1917169 - RNA, 19 nt, Artificial Sequence
  Description of Artificial Sequence: Synthetic oligonucleotide
gcucuucagacccacaauu

SEQ ID NO: 1917170 - RNA, 19 nt, Artificial Sequence
  Description of Artificial Sequence: Synthetic oligonucleotide
cuuccguaagcugaggguu

SEQ ID NO: 1917171 - RNA, 19 nt, Artificial Sequence
  Description of Artificial Sequence: Synthetic oligonucleotide
cacuuccuacaacacugaa

SEQ ID NO: 1917172 - RNA, 19 nt, Artificial Sequence
  Description of Artificial Sequence: Synthetic oligonucleotide
gucggggcuggggugaguc

SEQ ID NO: 1917173 - RNA, 19 nt, Artificial Sequence
  Description of Artificial Sequence: Synthetic oligonucleotide
ugcugguacuuggguauuu

SEQ ID NO: 1917174 - RNA, 19 nt, Artificial Sequence
  Description of Artificial Sequence: Synthetic oligonucleotide
gcuguugaaggccgggugu

SEQ ID NO: 1917175 - RNA, 19 nt, Artificial Sequence
  Description of Artificial Sequence: Synthetic oligonucleotide
ccaguuaaaggugugucua

SEQ ID NO: 1917176 - RNA, 19 nt, Artificial Sequence
  Description of Artificial Sequence: Synthetic oligonucleotide
gguugaaacugaaaagcuu

SEQ ID NO: 1917177 - RNA, 19 nt, Artificial Sequence
  Description of Artificial Sequence: Synthetic oligonucleotide
ggugcccuuagggagugga

SEQ ID NO: 1917178 - RNA, 19 nt, Artificial Sequence
  Description of Artificial Sequence: Synthetic oligonucleotide
gugugccaggaggcgaaug

SEQ ID NO: 1917179 - RNA, 19 nt, Artificial Sequence
  Description of Artificial Sequence: Synthetic oligonucleotide
gcgaauggugguugaaacu

SEQ ID NO: 1917180 - RNA, 19 nt, Artificial Sequence
  Description of Artificial Sequence: Synthetic oligonucleotide
gccccugcugcuaggcugg

SEQ ID NO: 1917181 - RNA, 19 nt, Artificial Sequence
  Description of Artificial Sequence: Synthetic oligonucleotide
gaggcgaauggugguugaa

SEQ ID NO: 1917182 - RNA, 19 nt, Artificial Sequence
  Description of Artificial Sequence: Synthetic oligonucleotide
uugcugguacuuggguauu

SEQ ID NO: 1917183 - RNA, 19 nt, Artificial Sequence
  Description of Artificial Sequence: Synthetic oligonucleotide
gagaaacaauguggcugaa

SEQ ID NO: 1917184 - RNA, 19 nt, Artificial Sequence
  Description of Artificial Sequence: Synthetic oligonucleotide
gggacagagaggucaaauu

SEQ ID NO: 1917185 - RNA, 19 nt, Artificial Sequence
  Description of Artificial Sequence: Synthetic oligonucleotide
ggaggcgaauggugguuga

SEQ ID NO: 1917186 - RNA, 19 nt, Artificial Sequence
  Description of Artificial Sequence: Synthetic oligonucleotide
ccagaugaaggagcuucug

SEQ ID NO: 1917187 - RNA, 19 nt, Artificial Sequence
  Description of Artificial Sequence: Synthetic oligonucleotide
gccuugagccagccuggag

SEQ ID NO: 1917188 - RNA, 19 nt, Artificial Sequence
  Description of Artificial Sequence: Synthetic oligonucleotide
cagcggaggaggugugcca

SEQ ID NO: 1917189 - RNA, 19 nt, Artificial Sequence
  Description of Artificial Sequence: Synthetic oligonucleotide
ugccuccauuccucauguc

SEQ ID NO: 1917190 - RNA, 19 nt, Artificial Sequence
  Description of Artificial Sequence: Synthetic oligonucleotide
gcauuccguggcauugggc

SEQ ID NO: 1917191 - RNA, 19 nt, Artificial Sequence
  Description of Artificial Sequence: Synthetic oligonucleotide
ggaggcgacugaauuccca

SEQ ID NO: 1917192 - RNA, 19 nt, Artificial Sequence
  Description of Artificial Sequence: Synthetic oligonucleotide
ggcgacugaauucccaguu

SEQ ID NO: 1917193 - RNA, 19 nt, Artificial Sequence
  Description of Artificial Sequence: Synthetic oligonucleotide
gcgacugaauucccaguua

SEQ ID NO: 1917194 - RNA, 19 nt, Artificial Sequence
  Description of Artificial Sequence: Synthetic oligonucleotide
cagaagugguuggccccug

SEQ ID NO: 1917195 - RNA, 19 nt, Artificial Sequence
  Description of Artificial Sequence: Synthetic oligonucleotide
ggcucagacaguacuggcu

SEQ ID NO: 1917196 - RNA, 19 nt, Artificial Sequence
  Description of Artificial Sequence: Synthetic oligonucleotide
uaguagcgguugccccaau

SEQ ID NO: 1917197 - RNA, 19 nt, Artificial Sequence
  Description of Artificial Sequence: Synthetic oligonucleotide
gcgguugccccaauuuauc

SEQ ID NO: 1917198 - RNA, 19 nt, Artificial Sequence
  Description of Artificial Sequence: Synthetic oligonucleotide
ggcgcauucgguagaugaa

SEQ ID NO: 1917199 - RNA, 19 nt, Artificial Sequence
  Description of Artificial Sequence: Synthetic oligonucleotide
cccaguuaaaggugugucu

SEQ ID NO: 1917200 - RNA, 19 nt, Artificial Sequence
  Description of Artificial Sequence: Synthetic oligonucleotide
ccccgcugcagugucuucc

SEQ ID NO: 1917201 - RNA, 19 nt, Artificial Sequence
  Description of Artificial Sequence: Synthetic oligonucleotide
ggggagacucuuguccguc

SEQ ID NO: 1917202 - RNA, 19 nt, Artificial Sequence
  Description of Artificial Sequence: Synthetic oligonucleotide
gccggguguccagaugaag

SEQ ID NO: 1917203 - RNA, 19 nt, Artificial Sequence
  Description of Artificial Sequence: Synthetic oligonucleotide
ccuuccguaagcugagggu

SEQ ID NO: 1917204 - RNA, 19 nt, Artificial Sequence
  Description of Artificial Sequence: Synthetic oligonucleotide
cuggcgcauucgguagaug

SEQ ID NO: 1917205 - RNA, 19 nt, Artificial Sequence
  Description of Artificial Sequence: Synthetic oligonucleotide
gagucacuguugccucccu

SEQ ID NO: 1917206 - RNA, 19 nt, Artificial Sequence
  Description of Artificial Sequence: Synthetic oligonucleotide
gacccacaauugaaacagu

SEQ ID NO: 1917207 - RNA, 19 nt, Artificial Sequence
  Description of Artificial Sequence: Synthetic oligonucleotide
agugaggcuuuggccuuuu

SEQ ID NO: 1917208 - RNA, 19 nt, Artificial Sequence
  Description of Artificial Sequence: Synthetic oligonucleotide
gcgguggggugcccuuagg

SEQ ID NO: 1917209 - RNA, 19 nt, Artificial Sequence
  Description of Artificial Sequence: Synthetic oligonucleotide
cacuucaugcuuggcgacu

SEQ ID NO: 1917210 - RNA, 19 nt, Artificial Sequence
  Description of Artificial Sequence: Synthetic oligonucleotide
cucccucggccugcuggag

SEQ ID NO: 1917211 - RNA, 19 nt, Artificial Sequence
  Description of Artificial Sequence: Synthetic oligonucleotide
cucggccugcuggagagcu

SEQ ID NO: 1917212 - RNA, 19 nt, Artificial Sequence
  Description of Artificial Sequence: Synthetic oligonucleotide
gcauugggcacuccuucau

SEQ ID NO: 1917213 - RNA, 19 nt, Artificial Sequence
  Description of Artificial Sequence: Synthetic oligonucleotide
cgguugccccaauuuauca

SEQ ID NO: 1917214 - RNA, 19 nt, Artificial Sequence
  Description of Artificial Sequence: Synthetic oligonucleotide
ggggugcccuuagggagug

SEQ ID NO: 1917215 - RNA, 19 nt, Artificial Sequence
  Description of Artificial Sequence: Synthetic oligonucleotide
ggggugagucacugggagu

SEQ ID NO: 1917216 - RNA, 19 nt, Artificial Sequence
  Description of Artificial Sequence: Synthetic oligonucleotide
gcagaagugguuggccccu

SEQ ID NO: 1917217 - RNA, 19 nt, Artificial Sequence
  Description of Artificial Sequence: Synthetic oligonucleotide
agggcuggacugagacgaa

SEQ ID NO: 1917218 - RNA, 19 nt, Artificial Sequence
  Description of Artificial Sequence: Synthetic oligonucleotide
gagcagcauuccguggcau

SEQ ID NO: 1917219 - RNA, 19 nt, Artificial Sequence
  Description of Artificial Sequence: Synthetic oligonucleotide
gucagcgguggggugcccu

SEQ ID NO: 1917220 - RNA, 19 nt, Artificial Sequence
  Description of Artificial Sequence: Synthetic oligonucleotide
gcuuggcgacuggauauua

SEQ ID NO: 1917221 - RNA, 19 nt, Artificial Sequence
  Description of Artificial Sequence: Synthetic oligonucleotide
cguggcauugggcacuccu

SEQ ID NO: 1917222 - RNA, 19 nt, Artificial Sequence
  Description of Artificial Sequence: Synthetic oligonucleotide
ggccuugagccagccugga

SEQ ID NO: 1917223 - RNA, 19 nt, Artificial Sequence
  Description of Artificial Sequence: Synthetic oligonucleotide
ggggagcugcugagccgcc

SEQ ID NO: 1917224 - RNA, 19 nt, Artificial Sequence
  Description of Artificial Sequence: Synthetic oligonucleotide
gggugcccuuagggagugg

SEQ ID NO: 1917225 - RNA, 19 nt, Artificial Sequence
  Description of Artificial Sequence: Synthetic oligonucleotide
ccguaagcugaggguuuuc

SEQ ID NO: 1917226 - RNA, 19 nt, Artificial Sequence
  Description of Artificial Sequence: Synthetic oligonucleotide
gggucggggcuggggugag

SEQ ID NO: 1917227 - RNA, 19 nt, Artificial Sequence
  Description of Artificial Sequence: Synthetic oligonucleotide
gggcacuccuucaucugau

SEQ ID NO: 1917228 - RNA, 19 nt, Artificial Sequence
  Description of Artificial Sequence: Synthetic oligonucleotide
cugagccgccuuccuuccu

SEQ ID NO: 1917229 - RNA, 19 nt, Artificial Sequence
  Description of Artificial Sequence: Synthetic oligonucleotide
cccagcuggcgcauucggu

SEQ ID NO: 1917230 - RNA, 19 nt, Artificial Sequence
  Description of Artificial Sequence: Synthetic oligonucleotide
gcuggcgcauucgguagau

SEQ ID NO: 1917231 - RNA, 19 nt, Artificial Sequence
  Description of Artificial Sequence: Synthetic oligonucleotide
ccucggccugcuggagagc

SEQ ID NO: 1917232 - RNA, 19 nt, Artificial Sequence
  Description of Artificial Sequence: Synthetic oligonucleotide
ggccggguguccagaugaa

SEQ ID NO: 1917233 - RNA, 19 nt, Artificial Sequence
  Description of Artificial Sequence: Synthetic oligonucleotide
ggggaggaggcgacugaau

SEQ ID NO: 1917234 - RNA, 19 nt, Artificial Sequence
  Description of Artificial Sequence: Synthetic oligonucleotide
cagcgguggggugcccuua

SEQ ID NO: 1917235 - RNA, 19 nt, Artificial Sequence
  Description of Artificial Sequence: Synthetic oligonucleotide
guaccgggcuguggauuuu

SEQ ID NO: 1917236 - RNA, 19 nt, Artificial Sequence
  Description of Artificial Sequence: Synthetic oligonucleotide
cgaagaccgcuugcugcca

SEQ ID NO: 1917237 - RNA, 19 nt, Artificial Sequence
  Description of Artificial Sequence: Synthetic oligonucleotide
cagugaggcuuuggccuuu

SEQ ID NO: 1917238 - RNA, 19 nt, Artificial Sequence
  Description of Artificial Sequence: Synthetic oligonucleotide
guagcccagcuggcgcauu

SEQ ID NO: 1917239 - RNA, 19 nt, Artificial Sequence
  Description of Artificial Sequence: Synthetic oligonucleotide
ggugugccaggaggcgaau

SEQ ID NO: 1917240 - RNA, 19 nt, Artificial Sequence
  Description of Artificial Sequence: Synthetic oligonucleotide
ccguggcauugggcacucc

SEQ ID NO: 1917241 - RNA, 19 nt, Artificial Sequence
  Description of Artificial Sequence: Synthetic oligonucleotide
ggucggggcuggggugagu

SEQ ID NO: 1917242 - RNA, 19 nt, Artificial Sequence
  Description of Artificial Sequence: Synthetic oligonucleotide
aaagguaacaaacagacag

SEQ ID NO: 1917243 - RNA, 19 nt, Artificial Sequence
  Description of Artificial Sequence: Synthetic oligonucleotide
aauaaaucccauuagcucg

SEQ ID NO: 1917244 - RNA, 19 nt, Artificial Sequence
  Description of Artificial Sequence: Synthetic oligonucleotide
aauauaucaaaguaagagg

SEQ ID NO: 1917245 - RNA, 19 nt, Artificial Sequence
  Description of Artificial Sequence: Synthetic oligonucleotide
aaauauaucaaaguaagag

SEQ ID NO: 1917246 - RNA, 19 nt, Artificial Sequence
  Description of Artificial Sequence: Synthetic oligonucleotide
aaaacugaccaucagaaag

SEQ ID NO: 1917247 - RNA, 19 nt, Artificial Sequence
  Description of Artificial Sequence: Synthetic oligonucleotide
uaauguuacaaauaagagg

SEQ ID NO: 1917248 - RNA, 19 nt, Artificial Sequence
  Description of Artificial Sequence: Synthetic oligonucleotide
aguaucagcacuuuaaauc

SEQ ID NO: 1917249 - RNA, 19 nt, Artificial Sequence
  Description of Artificial Sequence: Synthetic oligonucleotide
ugaguuaucguuaucaggc

SEQ ID NO: 1917250 - RNA, 19 nt, Artificial Sequence
  Description of Artificial Sequence: Synthetic oligonucleotide
uuuaaaucgaaacacugcc

SEQ ID NO: 1917251 - RNA, 19 nt, Artificial Sequence
  Description of Artificial Sequence: Synthetic oligonucleotide
aaagaaauauaucaaagua

SEQ ID NO: 1917252 - RNA, 19 nt, Artificial Sequence
  Description of Artificial Sequence: Synthetic oligonucleotide
acaaauaagaggucaaagg

SEQ ID NO: 1917253 - RNA, 19 nt, Artificial Sequence
  Description of Artificial Sequence: Synthetic oligonucleotide
augugcaugaguuuaaaac

SEQ ID NO: 1917254 - RNA, 19 nt, Artificial Sequence
  Description of Artificial Sequence: Synthetic oligonucleotide
aaauguaacuuuugauucg

SEQ ID NO: 1917255 - RNA, 19 nt, Artificial Sequence
  Description of Artificial Sequence: Synthetic oligonucleotide
aacucuauuauccauagua

SEQ ID NO: 1917256 - RNA, 19 nt, Artificial Sequence
  Description of Artificial Sequence: Synthetic oligonucleotide
auaggauucaauccuggcc

SEQ ID NO: 1917257 - RNA, 19 nt, Artificial Sequence
  Description of Artificial Sequence: Synthetic oligonucleotide
ugagguaucaccauaaaua

SEQ ID NO: 1917258 - RNA, 19 nt, Artificial Sequence
  Description of Artificial Sequence: Synthetic oligonucleotide
aucaccauaaauaaauccc

SEQ ID NO: 1917259 - RNA, 19 nt, Artificial Sequence
  Description of Artificial Sequence: Synthetic oligonucleotide
ugaguuuaaaacacaagug

SEQ ID NO: 1917260 - RNA, 19 nt, Artificial Sequence
  Description of Artificial Sequence: Synthetic oligonucleotide
augaguuuaaaacacaagu

SEQ ID NO: 1917261 - RNA, 19 nt, Artificial Sequence
  Description of Artificial Sequence: Synthetic oligonucleotide
uugaaauccaggaaccacg

SEQ ID NO: 1917262 - RNA, 19 nt, Artificial Sequence
  Description of Artificial Sequence: Synthetic oligonucleotide
guaucagcacuuuaaaucg

SEQ ID NO: 1917263 - RNA, 19 nt, Artificial Sequence
  Description of Artificial Sequence: Synthetic oligonucleotide
agcauauccaaguaucagc

SEQ ID NO: 1917264 - RNA, 19 nt, Artificial Sequence
  Description of Artificial Sequence: Synthetic oligonucleotide
gaacucauaguucuaaaag

SEQ ID NO: 1917265 - RNA, 19 nt, Artificial Sequence
  Description of Artificial Sequence: Synthetic oligonucleotide
gaagcaaccuccucuaugg

SEQ ID NO: 1917266 - RNA, 19 nt, Artificial Sequence
  Description of Artificial Sequence: Synthetic oligonucleotide
ugugcaugaguuuaaaaca

SEQ ID NO: 1917267 - RNA, 19 nt, Artificial Sequence
  Description of Artificial Sequence: Synthetic oligonucleotide
auguccaugagguaucacc

SEQ ID NO: 1917268 - RNA, 19 nt, Artificial Sequence
  Description of Artificial Sequence: Synthetic oligonucleotide
aguaauguuacaaauaaga

SEQ ID NO: 1917269 - RNA, 19 nt, Artificial Sequence
  Description of Artificial Sequence: Synthetic oligonucleotide
uguauaaagagcacaugug

SEQ ID NO: 1917270 - RNA, 19 nt, Artificial Sequence
  Description of Artificial Sequence: Synthetic oligonucleotide
aaucccauuagcucgucag

SEQ ID NO: 1917271 - RNA, 19 nt, Artificial Sequence
  Description of Artificial Sequence: Synthetic oligonucleotide
aauggcgcagucugcauac

SEQ ID NO: 1917272 - RNA, 19 nt, Artificial Sequence
  Description of Artificial Sequence: Synthetic oligonucleotide
ucuaaaagcgguuucucgc

SEQ ID NO: 1917273 - RNA, 19 nt, Artificial Sequence
  Description of Artificial Sequence: Synthetic oligonucleotide
uaaugaaucacuucccucu

SEQ ID NO: 1917274 - RNA, 19 nt, Artificial Sequence
  Description of Artificial Sequence: Synthetic oligonucleotide
auggaugucacguagagaa

SEQ ID NO: 1917275 - RNA, 19 nt, Artificial Sequence
  Description of Artificial Sequence: Synthetic oligonucleotide
uuaacucuauuauccauag

SEQ ID NO: 1917276 - RNA, 19 nt, Artificial Sequence
  Description of Artificial Sequence: Synthetic oligonucleotide
aggaguaguagucauaaug

SEQ ID NO: 1917277 - RNA, 19 nt, Artificial Sequence
  Description of Artificial Sequence: Synthetic oligonucleotide
aaggagcacagcaugaccc

SEQ ID NO: 1917278 - RNA, 19 nt, Artificial Sequence
  Description of Artificial Sequence: Synthetic oligonucleotide
ucacauuuaacucuauuau

SEQ ID NO: 1917279 - RNA, 19 nt, Artificial Sequence
  Description of Artificial Sequence: Synthetic oligonucleotide
cuagugagaagcaaccucc

SEQ ID NO: 1917280 - RNA, 19 nt, Artificial Sequence
  Description of Artificial Sequence: Synthetic oligonucleotide
ucguuaucaggccagacug

SEQ ID NO: 1917281 - RNA, 19 nt, Artificial Sequence
  Description of Artificial Sequence: Synthetic oligonucleotide
accagcgaugagcagaucc

SEQ ID NO: 1917282 - RNA, 19 nt, Artificial Sequence
  Description of Artificial Sequence: Synthetic oligonucleotide
uaaaucgaaacacugccaa

SEQ ID NO: 1917283 - RNA, 19 nt, Artificial Sequence
  Description of Artificial Sequence: Synthetic oligonucleotide
uaucaggccagacugagac

SEQ ID NO: 1917284 - RNA, 19 nt, Artificial Sequence
  Description of Artificial Sequence: Synthetic oligonucleotide
uuugagaggaucacuuuug

SEQ ID NO: 1917285 - RNA, 19 nt, Artificial Sequence
  Description of Artificial Sequence: Synthetic oligonucleotide
guaacuuuugauucggaug

SEQ ID NO: 1917286 - RNA, 19 nt, Artificial Sequence
  Description of Artificial Sequence: Synthetic oligonucleotide
auauaucaaaguaagagga

SEQ ID NO: 1917287 - RNA, 19 nt, Artificial Sequence
  Description of Artificial Sequence: Synthetic oligonucleotide
ucauaguucuaaaagcggu

SEQ ID NO: 1917288 - RNA, 19 nt, Artificial Sequence
  Description of Artificial Sequence: Synthetic oligonucleotide
aauaagaggucaaagguaa

SEQ ID NO: 1917289 - RNA, 19 nt, Artificial Sequence
  Description of Artificial Sequence: Synthetic oligonucleotide
uucuaaaagcgguuucucg

SEQ ID NO: 1917290 - RNA, 19 nt, Artificial Sequence
  Description of Artificial Sequence: Synthetic oligonucleotide
uucacauuuaacucuauua

SEQ ID NO: 1917291 - RNA, 19 nt, Artificial Sequence
  Description of Artificial Sequence: Synthetic oligonucleotide
auaaugaaucacuucccuc

SEQ ID NO: 1917292 - RNA, 19 nt, Artificial Sequence
  Description of Artificial Sequence: Synthetic oligonucleotide
uuuugauucggaugcagca

SEQ ID NO: 1917293 - RNA, 19 nt, Artificial Sequence
  Description of Artificial Sequence: Synthetic oligonucleotide
aaguaagaggaguaguagu

SEQ ID NO: 1917294 - RNA, 19 nt, Artificial Sequence
  Description of Artificial Sequence: Synthetic oligonucleotide
aggaaccacgucucgaucc

SEQ ID NO: 1917295 - RNA, 19 nt, Artificial Sequence
  Description of Artificial Sequence: Synthetic oligonucleotide
uuggauuacuugcagugag

SEQ ID NO: 1917296 - RNA, 19 nt, Artificial Sequence
  Description of Artificial Sequence: Synthetic oligonucleotide
aaagcuuugagaggaucac

SEQ ID NO: 1917297 - RNA, 19 nt, Artificial Sequence
  Description of Artificial Sequence: Synthetic oligonucleotide
ucauaaugaaucacuuccc

SEQ ID NO: 1917298 - RNA, 19 nt, Artificial Sequence
  Description of Artificial Sequence: Synthetic oligonucleotide
guaguagucauaaugaauc

SEQ ID NO: 1917299 - RNA, 19 nt, Artificial Sequence
  Description of Artificial Sequence: Synthetic oligonucleotide
gaugaaggaaaugaugggc

SEQ ID NO: 1917300 - RNA, 19 nt, Artificial Sequence
  Description of Artificial Sequence: Synthetic oligonucleotide
uacagcauauccaaguauc

SEQ ID NO: 1917301 - RNA, 19 nt, Artificial Sequence
  Description of Artificial Sequence: Synthetic oligonucleotide
uccauucacauuuaacucu

SEQ ID NO: 1917302 - RNA, 19 nt, Artificial Sequence
  Description of Artificial Sequence: Synthetic oligonucleotide
cuauugcccaccaauggcg

SEQ ID NO: 1917303 - RNA, 19 nt, Artificial Sequence
  Description of Artificial Sequence: Synthetic oligonucleotide
ucauaggauucaauccugg

SEQ ID NO: 1917304 - RNA, 19 nt, Artificial Sequence
  Description of Artificial Sequence: Synthetic oligonucleotide
aacgcuauugcccaccaau

SEQ ID NO: 1917305 - RNA, 19 nt, Artificial Sequence
  Description of Artificial Sequence: Synthetic oligonucleotide
cucauaguucuaaaagcgg

SEQ ID NO: 1917306 - RNA, 19 nt, Artificial Sequence
  Description of Artificial Sequence: Synthetic oligonucleotide
aauuguauaaagagcacau

SEQ ID NO: 1917307 - RNA, 19 nt, Artificial Sequence
  Description of Artificial Sequence: Synthetic oligonucleotide
auauccaaguaucagcacu

SEQ ID NO: 1917308 - RNA, 19 nt, Artificial Sequence
  Description of Artificial Sequence: Synthetic oligonucleotide
uuaaaucgaaacacugcca

SEQ ID NO: 1917309 - RNA, 19 nt, Artificial Sequence
  Description of Artificial Sequence: Synthetic oligonucleotide
aagcaugugaacucuggcu

SEQ ID NO: 1917310 - RNA, 19 nt, Artificial Sequence
  Description of Artificial Sequence: Synthetic oligonucleotide
aguaagaggaguaguaguc

SEQ ID NO: 1917311 - RNA, 19 nt, Artificial Sequence
  Description of Artificial Sequence: Synthetic oligonucleotide
uccuucauaggauucaauc

SEQ ID NO: 1917312 - RNA, 19 nt, Artificial Sequence
  Description of Artificial Sequence: Synthetic oligonucleotide
ugucacguagagaagcaug

SEQ ID NO: 1917313 - RNA, 19 nt, Artificial Sequence
  Description of Artificial Sequence: Synthetic oligonucleotide
agcacuaagacugaguuau

SEQ ID NO: 1917314 - RNA, 19 nt, Artificial Sequence
  Description of Artificial Sequence: Synthetic oligonucleotide
cauucauagaguagaacuc

SEQ ID NO: 1917315 - RNA, 19 nt, Artificial Sequence
  Description of Artificial Sequence: Synthetic oligonucleotide
aaaagcuuugagaggauca

SEQ ID NO: 1917316 - RNA, 19 nt, Artificial Sequence
  Description of Artificial Sequence: Synthetic oligonucleotide
cugaguuaucguuaucagg

SEQ ID NO: 1917317 - RNA, 19 nt, Artificial Sequence
  Description of Artificial Sequence: Synthetic oligonucleotide
uucauaggauucaauccug

SEQ ID NO: 1917318 - RNA, 19 nt, Artificial Sequence
  Description of Artificial Sequence: Synthetic oligonucleotide
ucagugaccagcgaugagc

SEQ ID NO: 1917319 - RNA, 19 nt, Artificial Sequence
  Description of Artificial Sequence: Synthetic oligonucleotide
aaucgaaacacugccaaaa

SEQ ID NO: 1917320 - RNA, 19 nt, Artificial Sequence
  Description of Artificial Sequence: Synthetic oligonucleotide
caugaguuuaaaacacaag

SEQ ID NO: 1917321 - RNA, 19 nt, Artificial Sequence
  Description of Artificial Sequence: Synthetic oligonucleotide
uggauuacuugcagugagg

SEQ ID NO: 1917322 - RNA, 19 nt, Artificial Sequence
  Description of Artificial Sequence: Synthetic oligonucleotide
uaucaaaguaagaggagua

SEQ ID NO: 1917323 - RNA, 19 nt, Artificial Sequence
  Description of Artificial Sequence: Synthetic oligonucleotide
aaggaaaugaugggcaaca

SEQ ID NO: 1917324 - RNA, 19 nt, Artificial Sequence
  Description of Artificial Sequence: Synthetic oligonucleotide
agucagaguauuuuccaug

SEQ ID NO: 1917325 - RNA, 19 nt, Artificial Sequence
  Description of Artificial Sequence: Synthetic oligonucleotide
uuccaugucuucuggcugg

SEQ ID NO: 1917326 - RNA, 19 nt, Artificial Sequence
  Description of Artificial Sequence: Synthetic oligonucleotide
gagacucacaggaacagag

SEQ ID NO: 1917327 - RNA, 19 nt, Artificial Sequence
  Description of Artificial Sequence: Synthetic oligonucleotide
ugggauggaugucacguag

SEQ ID NO: 1917328 - RNA, 19 nt, Artificial Sequence
  Description of Artificial Sequence: Synthetic oligonucleotide
acacauagccaaaugcccc

SEQ ID NO: 1917329 - RNA, 19 nt, Artificial Sequence
  Description of Artificial Sequence: Synthetic oligonucleotide
gagaggaucacuuuugcua

SEQ ID NO: 1917330 - RNA, 19 nt, Artificial Sequence
  Description of Artificial Sequence: Synthetic oligonucleotide
ugugaguggagguggagca

SEQ ID NO: 1917331 - RNA, 19 nt, Artificial Sequence
  Description of Artificial Sequence: Synthetic oligonucleotide
acaagugaaauguaacuuu

SEQ ID NO: 1917332 - RNA, 19 nt, Artificial Sequence
  Description of Artificial Sequence: Synthetic oligonucleotide
uucggaugcagcacuaaga

SEQ ID NO: 1917333 - RNA, 19 nt, Artificial Sequence
  Description of Artificial Sequence: Synthetic oligonucleotide
uaagacugaguuaucguua

SEQ ID NO: 1917334 - RNA, 19 nt, Artificial Sequence
  Description of Artificial Sequence: Synthetic oligonucleotide
agauccaccauuucacugu

SEQ ID NO: 1917335 - RNA, 19 nt, Artificial Sequence
  Description of Artificial Sequence: Synthetic oligonucleotide
ucgaaacacugccaaaaga

SEQ ID NO: 1917336 - RNA, 19 nt, Artificial Sequence
  Description of Artificial Sequence: Synthetic oligonucleotide
acuuuaaaucgaaacacug

SEQ ID NO: 1917337 - RNA, 19 nt, Artificial Sequence
  Description of Artificial Sequence: Synthetic oligonucleotide
uccucuauggcgcgagccg

SEQ ID NO: 1917338 - RNA, 19 nt, Artificial Sequence
  Description of Artificial Sequence: Synthetic oligonucleotide
uccugcagggaugagaacc

SEQ ID NO: 1917339 - RNA, 19 nt, Artificial Sequence
  Description of Artificial Sequence: Synthetic oligonucleotide
aagacugaguuaucguuau

SEQ ID NO: 1917340 - RNA, 19 nt, Artificial Sequence
  Description of Artificial Sequence: Synthetic oligonucleotide
gaaaguccuccugacaucc

SEQ ID NO: 1917341 - RNA, 19 nt, Artificial Sequence
  Description of Artificial Sequence: Synthetic oligonucleotide
cagcacuuuaaaucgaaac

SEQ ID NO: 1917342 - RNA, 19 nt, Artificial Sequence
  Description of Artificial Sequence: Synthetic oligonucleotide
uugauucggaugcagcacu

SEQ ID NO: 1917343 - RNA, 19 nt, Artificial Sequence
  Description of Artificial Sequence: Synthetic oligonucleotide
uugcuaauaaaaggcacug

SEQ ID NO: 1917344 - RNA, 19 nt, Artificial Sequence
  Description of Artificial Sequence: Synthetic oligonucleotide
augagaaccgcccucucug

SEQ ID NO: 1917345 - RNA, 19 nt, Artificial Sequence
  Description of Artificial Sequence: Synthetic oligonucleotide
acuaagacugaguuaucgu

SEQ ID NO: 1917346 - RNA, 19 nt, Artificial Sequence
  Description of Artificial Sequence: Synthetic oligonucleotide
acagcaugacccgauggcc

SEQ ID NO: 1917347 - RNA, 19 nt, Artificial Sequence
  Description of Artificial Sequence: Synthetic oligonucleotide
aaagcgguuucucgcuguc

SEQ ID NO: 1917348 - RNA, 19 nt, Artificial Sequence
  Description of Artificial Sequence: Synthetic oligonucleotide
ucaaaguaagaggaguagu

SEQ ID NO: 1917349 - RNA, 19 nt, Artificial Sequence
  Description of Artificial Sequence: Synthetic oligonucleotide
ugguucauccuggaggagg

SEQ ID NO: 1917350 - RNA, 19 nt, Artificial Sequence
  Description of Artificial Sequence: Synthetic oligonucleotide
ugacccgauggccacaggc

SEQ ID NO: 1917351 - RNA, 19 nt, Artificial Sequence
  Description of Artificial Sequence: Synthetic oligonucleotide
aucgaaacacugccaaaag

SEQ ID NO: 1917352 - RNA, 19 nt, Artificial Sequence
  Description of Artificial Sequence: Synthetic oligonucleotide
aucguuaucaggccagacu

SEQ ID NO: 1917353 - RNA, 19 nt, Artificial Sequence
  Description of Artificial Sequence: Synthetic oligonucleotide
uccgauaugccuuucuuuu

SEQ ID NO: 1917354 - RNA, 19 nt, Artificial Sequence
  Description of Artificial Sequence: Synthetic oligonucleotide
agaaaguccuccugacauc

SEQ ID NO: 1917355 - RNA, 19 nt, Artificial Sequence
  Description of Artificial Sequence: Synthetic oligonucleotide
aucaaaguaagaggaguag

SEQ ID NO: 1917356 - RNA, 19 nt, Artificial Sequence
  Description of Artificial Sequence: Synthetic oligonucleotide
auuagcucgucagugacca

SEQ ID NO: 1917357 - RNA, 19 nt, Artificial Sequence
  Description of Artificial Sequence: Synthetic oligonucleotide
cacuaagacugaguuaucg

SEQ ID NO: 1917358 - RNA, 19 nt, Artificial Sequence
  Description of Artificial Sequence: Synthetic oligonucleotide
gacugagacucacaggaac

SEQ ID NO: 1917359 - RNA, 19 nt, Artificial Sequence
  Description of Artificial Sequence: Synthetic oligonucleotide
ugcuaauaaaaggcacugg

SEQ ID NO: 1917360 - RNA, 19 nt, Artificial Sequence
  Description of Artificial Sequence: Synthetic oligonucleotide
cauaggauucaauccuggc

SEQ ID NO: 1917361 - RNA, 19 nt, Artificial Sequence
  Description of Artificial Sequence: Synthetic oligonucleotide
gacucacaggaacagagga

SEQ ID NO: 1917362 - RNA, 19 nt, Artificial Sequence
  Description of Artificial Sequence: Synthetic oligonucleotide
aaaagcgguuucucgcugu

SEQ ID NO: 1917363 - RNA, 19 nt, Artificial Sequence
  Description of Artificial Sequence: Synthetic oligonucleotide
gaaaugaugggcaacacau

SEQ ID NO: 1917364 - RNA, 19 nt, Artificial Sequence
  Description of Artificial Sequence: Synthetic oligonucleotide
ucgucaacgcuauugccca

SEQ ID NO: 1917365 - RNA, 19 nt, Artificial Sequence
  Description of Artificial Sequence: Synthetic oligonucleotide
aggcaacacuuugaaaucc

SEQ ID NO: 1917366 - RNA, 19 nt, Artificial Sequence
  Description of Artificial Sequence: Synthetic oligonucleotide
gcaacacauagccaaaugc

SEQ ID NO: 1917367 - RNA, 19 nt, Artificial Sequence
  Description of Artificial Sequence: Synthetic oligonucleotide
accacgucucgauccaggc

SEQ ID NO: 1917368 - RNA, 19 nt, Artificial Sequence
  Description of Artificial Sequence: Synthetic oligonucleotide
guuaucguuaucaggccag

SEQ ID NO: 1917369 - RNA, 19 nt, Artificial Sequence
  Description of Artificial Sequence: Synthetic oligonucleotide
gccaaaugccccuugagag

SEQ ID NO: 1917370 - RNA, 19 nt, Artificial Sequence
  Description of Artificial Sequence: Synthetic oligonucleotide
agacagaaaguccuccuga

SEQ ID NO: 1917371 - RNA, 19 nt, Artificial Sequence
  Description of Artificial Sequence: Synthetic oligonucleotide
aguuaucguuaucaggcca

SEQ ID NO: 1917372 - RNA, 19 nt, Artificial Sequence
  Description of Artificial Sequence: Synthetic oligonucleotide
agaguagaacucauaguuc

SEQ ID NO: 1917373 - RNA, 19 nt, Artificial Sequence
  Description of Artificial Sequence: Synthetic oligonucleotide
gauaugccuuucuuuuccc

SEQ ID NO: 1917374 - RNA, 19 nt, Artificial Sequence
  Description of Artificial Sequence: Synthetic oligonucleotide
auucggaugcagcacuaag

SEQ ID NO: 1917375 - RNA, 19 nt, Artificial Sequence
  Description of Artificial Sequence: Synthetic oligonucleotide
uauccaaguaucagcacuu

SEQ ID NO: 1917376 - RNA, 19 nt, Artificial Sequence
  Description of Artificial Sequence: Synthetic oligonucleotide
uauugcccaccaauggcgc

SEQ ID NO: 1917377 - RNA, 19 nt, Artificial Sequence
  Description of Artificial Sequence: Synthetic oligonucleotide
aaaucgaaacacugccaaa

SEQ ID NO: 1917378 - RNA, 19 nt, Artificial Sequence
  Description of Artificial Sequence: Synthetic oligonucleotide
uaugugcuggauuuauuau

SEQ ID NO: 1917379 - RNA, 19 nt, Artificial Sequence
  Description of Artificial Sequence: Synthetic oligonucleotide
gaguuaucguuaucaggcc

SEQ ID NO: 1917380 - RNA, 19 nt, Artificial Sequence
  Description of Artificial Sequence: Synthetic oligonucleotide
ugaggguucuucacauuca

SEQ ID NO: 1917381 - RNA, 19 nt, Artificial Sequence
  Description of Artificial Sequence: Synthetic oligonucleotide
uuugauucggaugcagcac

SEQ ID NO: 1917382 - RNA, 19 nt, Artificial Sequence
  Description of Artificial Sequence: Synthetic oligonucleotide
aaugaaucacuucccucuu

SEQ ID NO: 1917383 - RNA, 19 nt, Artificial Sequence
  Description of Artificial Sequence: Synthetic oligonucleotide
uaagaggaguaguagucau

SEQ ID NO: 1917384 - RNA, 19 nt, Artificial Sequence
  Description of Artificial Sequence: Synthetic oligonucleotide
gaaccgcccucucugaagc

SEQ ID NO: 1917385 - RNA, 19 nt, Artificial Sequence
  Description of Artificial Sequence: Synthetic oligonucleotide
uucauagaguagaacucau

SEQ ID NO: 1917386 - RNA, 19 nt, Artificial Sequence
  Description of Artificial Sequence: Synthetic oligonucleotide
cacagcaugacccgauggc

SEQ ID NO: 1917387 - RNA, 19 nt, Artificial Sequence
  Description of Artificial Sequence: Synthetic oligonucleotide
gaggcaacacuuugaaauc

SEQ ID NO: 1917388 - RNA, 19 nt, Artificial Sequence
  Description of Artificial Sequence: Synthetic oligonucleotide
guuaucaggccagacugag

SEQ ID NO: 1917389 - RNA, 19 nt, Artificial Sequence
  Description of Artificial Sequence: Synthetic oligonucleotide
ggauuacuugcagugaggg

SEQ ID NO: 1917390 - RNA, 19 nt, Artificial Sequence
  Description of Artificial Sequence: Synthetic oligonucleotide
augagguaucaccauaaau

SEQ ID NO: 1917391 - RNA, 19 nt, Artificial Sequence
  Description of Artificial Sequence: Synthetic oligonucleotide
cuccugacauccgauaugc

SEQ ID NO: 1917392 - RNA, 19 nt, Artificial Sequence
  Description of Artificial Sequence: Synthetic oligonucleotide
ugagaagcaaccuccucua

SEQ ID NO: 1917393 - RNA, 19 nt, Artificial Sequence
  Description of Artificial Sequence: Synthetic oligonucleotide
ugaaggagucuccauccaa

SEQ ID NO: 1917394 - RNA, 19 nt, Artificial Sequence
  Description of Artificial Sequence: Synthetic oligonucleotide
uagccaaaugccccuugag

SEQ ID NO: 1917395 - RNA, 19 nt, Artificial Sequence
  Description of Artificial Sequence: Synthetic oligonucleotide
agccaaaugccccuugaga

SEQ ID NO: 1917396 - RNA, 19 nt, Artificial Sequence
  Description of Artificial Sequence: Synthetic oligonucleotide
gucgucaacgcuauugccc

SEQ ID NO: 1917397 - RNA, 19 nt, Artificial Sequence
  Description of Artificial Sequence: Synthetic oligonucleotide
ugagaggaucacuuuugcu

SEQ ID NO: 1917398 - RNA, 19 nt, Artificial Sequence
  Description of Artificial Sequence: Synthetic oligonucleotide
gauucaauccuggccauga

SEQ ID NO: 1917399 - RNA, 19 nt, Artificial Sequence
  Description of Artificial Sequence: Synthetic oligonucleotide
agaggaguaguagucauaa

SEQ ID NO: 1917400 - RNA, 19 nt, Artificial Sequence
  Description of Artificial Sequence: Synthetic oligonucleotide
ucugaagcauccugaacua

SEQ ID NO: 1917401 - RNA, 19 nt, Artificial Sequence
  Description of Artificial Sequence: Synthetic oligonucleotide
aucccuagugagaagcaac

SEQ ID NO: 1917402 - RNA, 19 nt, Artificial Sequence
  Description of Artificial Sequence: Synthetic oligonucleotide
guaugugcuggauuuauua

SEQ ID NO: 1917403 - RNA, 19 nt, Artificial Sequence
  Description of Artificial Sequence: Synthetic oligonucleotide
caaaguaagaggaguagua

SEQ ID NO: 1917404 - RNA, 19 nt, Artificial Sequence
  Description of Artificial Sequence: Synthetic oligonucleotide
ugcagggaugagaaccgcc

SEQ ID NO: 1917405 - RNA, 19 nt, Artificial Sequence
  Description of Artificial Sequence: Synthetic oligonucleotide
agggaugagaaccgcccuc

SEQ ID NO: 1917406 - RNA, 19 nt, Artificial Sequence
  Description of Artificial Sequence: Synthetic oligonucleotide
aaaucccauuagcucguca

SEQ ID NO: 1917407 - RNA, 19 nt, Artificial Sequence
  Description of Artificial Sequence: Synthetic oligonucleotide
ugucgucaacgcuauugcc

SEQ ID NO: 1917408 - RNA, 19 nt, Artificial Sequence
  Description of Artificial Sequence: Synthetic oligonucleotide
uggaugucacguagagaag

SEQ ID NO: 1917409 - RNA, 19 nt, Artificial Sequence
  Description of Artificial Sequence: Synthetic oligonucleotide
gaaggagucuccauccaac

SEQ ID NO: 1917410 - RNA, 19 nt, Artificial Sequence
  Description of Artificial Sequence: Synthetic oligonucleotide
auacagcauauccaaguau

SEQ ID NO: 1917411 - RNA, 19 nt, Artificial Sequence
  Description of Artificial Sequence: Synthetic oligonucleotide
ugcagcacuaagacugagu

SEQ ID NO: 1917412 - RNA, 19 nt, Artificial Sequence
  Description of Artificial Sequence: Synthetic oligonucleotide
cauuagcucgucagugacc

SEQ ID NO: 1917413 - RNA, 19 nt, Artificial Sequence
  Description of Artificial Sequence: Synthetic oligonucleotide
cuauuauccauaguaaugu

SEQ ID NO: 1917414 - RNA, 19 nt, Artificial Sequence
  Description of Artificial Sequence: Synthetic oligonucleotide
uugaaggagucuccaucca

SEQ ID NO: 1917415 - RNA, 19 nt, Artificial Sequence
  Description of Artificial Sequence: Synthetic oligonucleotide
ugaccaucagaaaguccug

SEQ ID NO: 1917416 - RNA, 19 nt, Artificial Sequence
  Description of Artificial Sequence: Synthetic oligonucleotide
ucucgaugccuccauucac

SEQ ID NO: 1917417 - RNA, 19 nt, Artificial Sequence
  Description of Artificial Sequence: Synthetic oligonucleotide
gaguaguagucauaaugaa

SEQ ID NO: 1917418 - RNA, 19 nt, Artificial Sequence
  Description of Artificial Sequence: Synthetic oligonucleotide
uucccuuccuucauaggau

SEQ ID NO: 1917419 - RNA, 19 nt, Artificial Sequence
  Description of Artificial Sequence: Synthetic oligonucleotide
uauuauccauaguaauguu

SEQ ID NO: 1917420 - RNA, 19 nt, Artificial Sequence
  Description of Artificial Sequence: Synthetic oligonucleotide
ucagcacuuuaaaucgaaa

SEQ ID NO: 1917421 - RNA, 19 nt, Artificial Sequence
  Description of Artificial Sequence: Synthetic oligonucleotide
ccuuggauuacuugcagug

SEQ ID NO: 1917422 - RNA, 19 nt, Artificial Sequence
  Description of Artificial Sequence: Synthetic oligonucleotide
aagcgguuucucgcugucc

SEQ ID NO: 1917423 - RNA, 19 nt, Artificial Sequence
  Description of Artificial Sequence: Synthetic oligonucleotide
agcgguuucucgcuguccu

SEQ ID NO: 1917424 - RNA, 19 nt, Artificial Sequence
  Description of Artificial Sequence: Synthetic oligonucleotide
ucaacgcuauugcccacca

SEQ ID NO: 1917425 - RNA, 19 nt, Artificial Sequence
  Description of Artificial Sequence: Synthetic oligonucleotide
ggauggaugucacguagag

SEQ ID NO: 1917426 - RNA, 19 nt, Artificial Sequence
  Description of Artificial Sequence: Synthetic oligonucleotide
gaaggaaaugaugggcaac

SEQ ID NO: 1917427 - RNA, 19 nt, Artificial Sequence
  Description of Artificial Sequence: Synthetic oligonucleotide
uugaugggauggaugucac

SEQ ID NO: 1917428 - RNA, 19 nt, Artificial Sequence
  Description of Artificial Sequence: Synthetic oligonucleotide
gaaaagcuuugagaggauc

SEQ ID NO: 1917429 - RNA, 19 nt, Artificial Sequence
  Description of Artificial Sequence: Synthetic oligonucleotide
aaccacgucucgauccagg

SEQ ID NO: 1917430 - RNA, 19 nt, Artificial Sequence
  Description of Artificial Sequence: Synthetic oligonucleotide
auuauccauaguaauguua

SEQ ID NO: 1917431 - RNA, 19 nt, Artificial Sequence
  Description of Artificial Sequence: Synthetic oligonucleotide
guagucauaaugaaucacu

SEQ ID NO: 1917432 - RNA, 19 nt, Artificial Sequence
  Description of Artificial Sequence: Synthetic oligonucleotide
ugcagugaggguucuucac

SEQ ID NO: 1917433 - RNA, 19 nt, Artificial Sequence
  Description of Artificial Sequence: Synthetic oligonucleotide
agguaacaaacagacagaa

SEQ ID NO: 1917434 - RNA, 19 nt, Artificial Sequence
  Description of Artificial Sequence: Synthetic oligonucleotide
uccuccugacauccgauau

SEQ ID NO: 1917435 - RNA, 19 nt, Artificial Sequence
  Description of Artificial Sequence: Synthetic oligonucleotide
uuaucaggccagacugaga

SEQ ID NO: 1917436 - RNA, 19 nt, Artificial Sequence
  Description of Artificial Sequence: Synthetic oligonucleotide
ucgauccaggcgaggauga

SEQ ID NO: 1917437 - RNA, 19 nt, Artificial Sequence
  Description of Artificial Sequence: Synthetic oligonucleotide
uggcgcagucugcauacag

SEQ ID NO: 1917438 - RNA, 19 nt, Artificial Sequence
  Description of Artificial Sequence: Synthetic oligonucleotide
cuuccuuggauuacuugca

SEQ ID NO: 1917439 - RNA, 19 nt, Artificial Sequence
  Description of Artificial Sequence: Synthetic oligonucleotide
cacgucucgauccaggcga

SEQ ID NO: 1917440 - RNA, 19 nt, Artificial Sequence
  Description of Artificial Sequence: Synthetic oligonucleotide
ggaugucacguagagaagc

SEQ ID NO: 1917441 - RNA, 19 nt, Artificial Sequence
  Description of Artificial Sequence: Synthetic oligonucleotide
ugaccagcgaugagcagau

SEQ ID NO: 1917442 - RNA, 19 nt, Artificial Sequence
  Description of Artificial Sequence: Synthetic oligonucleotide
cacguagagaagcauguga

SEQ ID NO: 1917443 - RNA, 19 nt, Artificial Sequence
  Description of Artificial Sequence: Synthetic oligonucleotide
uuacugcugucgucaacgc

SEQ ID NO: 1917444 - RNA, 19 nt, Artificial Sequence
  Description of Artificial Sequence: Synthetic oligonucleotide
ccauccaacuccaccaucc

SEQ ID NO: 1917445 - RNA, 19 nt, Artificial Sequence
  Description of Artificial Sequence: Synthetic oligonucleotide
cucaggaggggaguaaaac

SEQ ID NO: 1917446 - RNA, 19 nt, Artificial Sequence
  Description of Artificial Sequence: Synthetic oligonucleotide
uccaaguaucagcacuuua

SEQ ID NO: 1917447 - RNA, 19 nt, Artificial Sequence
  Description of Artificial Sequence: Synthetic oligonucleotide
ucccagucagaguauuuuc

SEQ ID NO: 1917448 - RNA, 19 nt, Artificial Sequence
  Description of Artificial Sequence: Synthetic oligonucleotide
uauggcgcgagccgcccgc

SEQ ID NO: 1917449 - RNA, 19 nt, Artificial Sequence
  Description of Artificial Sequence: Synthetic oligonucleotide
gccagacugagacucacag

SEQ ID NO: 1917450 - RNA, 19 nt, Artificial Sequence
  Description of Artificial Sequence: Synthetic oligonucleotide
uaacucuauuauccauagu

SEQ ID NO: 1917451 - RNA, 19 nt, Artificial Sequence
  Description of Artificial Sequence: Synthetic oligonucleotide
auaaaucccauuagcucgu

SEQ ID NO: 1917452 - RNA, 19 nt, Artificial Sequence
  Description of Artificial Sequence: Synthetic oligonucleotide
acugagacucacaggaaca

SEQ ID NO: 1917453 - RNA, 19 nt, Artificial Sequence
  Description of Artificial Sequence: Synthetic oligonucleotide
uguaugugcuggauuuauu

SEQ ID NO: 1917454 - RNA, 19 nt, Artificial Sequence
  Description of Artificial Sequence: Synthetic oligonucleotide
cagcauauccaaguaucag

SEQ ID NO: 1917455 - RNA, 19 nt, Artificial Sequence
  Description of Artificial Sequence: Synthetic oligonucleotide
guaagaggaguaguaguca

SEQ ID NO: 1917456 - RNA, 19 nt, Artificial Sequence
  Description of Artificial Sequence: Synthetic oligonucleotide
agacucacaggaacagagg

SEQ ID NO: 1917457 - RNA, 19 nt, Artificial Sequence
  Description of Artificial Sequence: Synthetic oligonucleotide
gaggggaguaaaacugacc

SEQ ID NO: 1917458 - RNA, 19 nt, Artificial Sequence
  Description of Artificial Sequence: Synthetic oligonucleotide
gggaguaaaacugaccauc

SEQ ID NO: 1917459 - RNA, 19 nt, Artificial Sequence
  Description of Artificial Sequence: Synthetic oligonucleotide
gaugucacguagagaagca

SEQ ID NO: 1917460 - RNA, 19 nt, Artificial Sequence
  Description of Artificial Sequence: Synthetic oligonucleotide
agagcacaugugcaugagu

SEQ ID NO: 1917461 - RNA, 19 nt, Artificial Sequence
  Description of Artificial Sequence: Synthetic oligonucleotide
agaguauuuuccaugucuu

SEQ ID NO: 1917462 - RNA, 19 nt, Artificial Sequence
  Description of Artificial Sequence: Synthetic oligonucleotide
aaaguccuccugacauccg

SEQ ID NO: 1917463 - RNA, 19 nt, Artificial Sequence
  Description of Artificial Sequence: Synthetic oligonucleotide
acauccgauaugccuuucu

SEQ ID NO: 1917464 - RNA, 19 nt, Artificial Sequence
  Description of Artificial Sequence: Synthetic oligonucleotide
ugagcagauccaccauuuc

SEQ ID NO: 1917465 - RNA, 19 nt, Artificial Sequence
  Description of Artificial Sequence: Synthetic oligonucleotide
ugagacucacaggaacaga

SEQ ID NO: 1917466 - RNA, 19 nt, Artificial Sequence
  Description of Artificial Sequence: Synthetic oligonucleotide
auguuacaaauaagagguc

SEQ ID NO: 1917467 - RNA, 19 nt, Artificial Sequence
  Description of Artificial Sequence: Synthetic oligonucleotide
cauccaacuccaccauccc

SEQ ID NO: 1917468 - RNA, 19 nt, Artificial Sequence
  Description of Artificial Sequence: Synthetic oligonucleotide
acagcauauccaaguauca

SEQ ID NO: 1917469 - RNA, 19 nt, Artificial Sequence
  Description of Artificial Sequence: Synthetic oligonucleotide
gaugugaguggagguggag

SEQ ID NO: 1917470 - RNA, 19 nt, Artificial Sequence
  Description of Artificial Sequence: Synthetic oligonucleotide
acguagagaagcaugugaa

SEQ ID NO: 1917471 - RNA, 19 nt, Artificial Sequence
  Description of Artificial Sequence: Synthetic oligonucleotide
guagaacucauaguucuaa

SEQ ID NO: 1917472 - RNA, 19 nt, Artificial Sequence
  Description of Artificial Sequence: Synthetic oligonucleotide
cucgaugccuccauucaca

SEQ ID NO: 1917473 - RNA, 19 nt, Artificial Sequence
  Description of Artificial Sequence: Synthetic oligonucleotide
uuaucguuaucaggccaga

SEQ ID NO: 1917474 - RNA, 19 nt, Artificial Sequence
  Description of Artificial Sequence: Synthetic oligonucleotide
caggcgaggaugaaggaaa

SEQ ID NO: 1917475 - RNA, 19 nt, Artificial Sequence
  Description of Artificial Sequence: Synthetic oligonucleotide
ggcaggguggaugugagug

SEQ ID NO: 1917476 - RNA, 19 nt, Artificial Sequence
  Description of Artificial Sequence: Synthetic oligonucleotide
aacuuuugauucggaugca

SEQ ID NO: 1917477 - RNA, 19 nt, Artificial Sequence
  Description of Artificial Sequence: Synthetic oligonucleotide
uguguucucgaugccucca

SEQ ID NO: 1917478 - RNA, 19 nt, Artificial Sequence
  Description of Artificial Sequence: Synthetic oligonucleotide
uugcccaccaauggcgcag

SEQ ID NO: 1917479 - RNA, 19 nt, Artificial Sequence
  Description of Artificial Sequence: Synthetic oligonucleotide
acacugccaaaagaaauau

SEQ ID NO: 1917480 - RNA, 19 nt, Artificial Sequence
  Description of Artificial Sequence: Synthetic oligonucleotide
agcucgucagugaccagcg

SEQ ID NO: 1917481 - RNA, 19 nt, Artificial Sequence
  Description of Artificial Sequence: Synthetic oligonucleotide
auccgauaugccuuucuuu

SEQ ID NO: 1917482 - RNA, 19 nt, Artificial Sequence
  Description of Artificial Sequence: Synthetic oligonucleotide
cccagucagaguauuuucc

SEQ ID NO: 1917483 - RNA, 19 nt, Artificial Sequence
  Description of Artificial Sequence: Synthetic oligonucleotide
gugaccagcgaugagcaga

SEQ ID NO: 1917484 - RNA, 19 nt, Artificial Sequence
  Description of Artificial Sequence: Synthetic oligonucleotide
gcaaccuccucuauggcgc

SEQ ID NO: 1917485 - RNA, 19 nt, Artificial Sequence
  Description of Artificial Sequence: Synthetic oligonucleotide
gcugucgucaacgcuauug

SEQ ID NO: 1917486 - RNA, 19 nt, Artificial Sequence
  Description of Artificial Sequence: Synthetic oligonucleotide
agcacagcaugacccgaug

SEQ ID NO: 1917487 - RNA, 19 nt, Artificial Sequence
  Description of Artificial Sequence: Synthetic oligonucleotide
guucuaaaagcgguuucuc

SEQ ID NO: 1917488 - RNA, 19 nt, Artificial Sequence
  Description of Artificial Sequence: Synthetic oligonucleotide
cucgauccaggcgaggaug

SEQ ID NO: 1917489 - RNA, 19 nt, Artificial Sequence
  Description of Artificial Sequence: Synthetic oligonucleotide
ugauucggaugcagcacua

SEQ ID NO: 1917490 - RNA, 19 nt, Artificial Sequence
  Description of Artificial Sequence: Synthetic oligonucleotide
uccaggaaccacgucucga

SEQ ID NO: 1917491 - RNA, 19 nt, Artificial Sequence
  Description of Artificial Sequence: Synthetic oligonucleotide
agcuuugagaggaucacuu

SEQ ID NO: 1917492 - RNA, 19 nt, Artificial Sequence
  Description of Artificial Sequence: Synthetic oligonucleotide
cuaaaagcgguuucucgcu

SEQ ID NO: 1917493 - RNA, 19 nt, Artificial Sequence
  Description of Artificial Sequence: Synthetic oligonucleotide
ccaaguaucagcacuuuaa

SEQ ID NO: 1917494 - RNA, 19 nt, Artificial Sequence
  Description of Artificial Sequence: Synthetic oligonucleotide
cagaaaguccuccugacau

SEQ ID NO: 1917495 - RNA, 19 nt, Artificial Sequence
  Description of Artificial Sequence: Synthetic oligonucleotide
cacuuuaaaucgaaacacu

SEQ ID NO: 1917496 - RNA, 19 nt, Artificial Sequence
  Description of Artificial Sequence: Synthetic oligonucleotide
ugaguggagguggagcaau

SEQ ID NO: 1917497 - RNA, 19 nt, Artificial Sequence
  Description of Artificial Sequence: Synthetic oligonucleotide
cuaagacugaguuaucguu

SEQ ID NO: 1917498 - RNA, 19 nt, Artificial Sequence
  Description of Artificial Sequence: Synthetic oligonucleotide
ucucgauccaggcgaggau

SEQ ID NO: 1917499 - RNA, 19 nt, Artificial Sequence
  Description of Artificial Sequence: Synthetic oligonucleotide
cucuauuauccauaguaau

SEQ ID NO: 1917500 - RNA, 19 nt, Artificial Sequence
  Description of Artificial Sequence: Synthetic oligonucleotide
cucuauggcgcgagccgcc

SEQ ID NO: 1917501 - RNA, 19 nt, Artificial Sequence
  Description of Artificial Sequence: Synthetic oligonucleotide
ucgaugccuccauucacau

SEQ ID NO: 1917502 - RNA, 19 nt, Artificial Sequence
  Description of Artificial Sequence: Synthetic oligonucleotide
uccugacauccgauaugcc

SEQ ID NO: 1917503 - RNA, 19 nt, Artificial Sequence
  Description of Artificial Sequence: Synthetic oligonucleotide
agcacaugugcaugaguuu

SEQ ID NO: 1917504 - RNA, 19 nt, Artificial Sequence
  Description of Artificial Sequence: Synthetic oligonucleotide
aacuagcaggagucuguuu

SEQ ID NO: 1917505 - RNA, 19 nt, Artificial Sequence
  Description of Artificial Sequence: Synthetic oligonucleotide
gcaugugaacucuggcucc

SEQ ID NO: 1917506 - RNA, 19 nt, Artificial Sequence
  Description of Artificial Sequence: Synthetic oligonucleotide
gauuacuugcagugagggu

SEQ ID NO: 1917507 - RNA, 19 nt, Artificial Sequence
  Description of Artificial Sequence: Synthetic oligonucleotide
cgauaugccuuucuuuucc

SEQ ID NO: 1917508 - RNA, 19 nt, Artificial Sequence
  Description of Artificial Sequence: Synthetic oligonucleotide
cgaaacacugccaaaagaa

SEQ ID NO: 1917509 - RNA, 19 nt, Artificial Sequence
  Description of Artificial Sequence: Synthetic oligonucleotide
gucaacgcuauugcccacc

SEQ ID NO: 1917510 - RNA, 19 nt, Artificial Sequence
  Description of Artificial Sequence: Synthetic oligonucleotide
ugacauccgauaugccuuu

SEQ ID NO: 1917511 - RNA, 19 nt, Artificial Sequence
  Description of Artificial Sequence: Synthetic oligonucleotide
cuccucuauggcgcgagcc

SEQ ID NO: 1917512 - RNA, 19 nt, Artificial Sequence
  Description of Artificial Sequence: Synthetic oligonucleotide
caaccuccucuauggcgcg

SEQ ID NO: 1917513 - RNA, 19 nt, Artificial Sequence
  Description of Artificial Sequence: Synthetic oligonucleotide
aucagcacuuuaaaucgaa

SEQ ID NO: 1917514 - RNA, 19 nt, Artificial Sequence
  Description of Artificial Sequence: Synthetic oligonucleotide
uucauccuggaggaggauu

SEQ ID NO: 1917515 - RNA, 19 nt, Artificial Sequence
  Description of Artificial Sequence: Synthetic oligonucleotide
auugcccaccaauggcgca

SEQ ID NO: 1917516 - RNA, 19 nt, Artificial Sequence
  Description of Artificial Sequence: Synthetic oligonucleotide
cugaagcauccugaacuag

SEQ ID NO: 1917517 - RNA, 19 nt, Artificial Sequence
  Description of Artificial Sequence: Synthetic oligonucleotide
caaaugccccuugagagaa

SEQ ID NO: 1917518 - RNA, 19 nt, Artificial Sequence
  Description of Artificial Sequence: Synthetic oligonucleotide
uguucucgaugccuccauu

SEQ ID NO: 1917519 - RNA, 19 nt, Artificial Sequence
  Description of Artificial Sequence: Synthetic oligonucleotide
ucccuuccuucauaggauu

SEQ ID NO: 1917520 - RNA, 19 nt, Artificial Sequence
  Description of Artificial Sequence: Synthetic oligonucleotide
ucuauggcgcgagccgccc

SEQ ID NO: 1917521 - RNA, 19 nt, Artificial Sequence
  Description of Artificial Sequence: Synthetic oligonucleotide
aagaggaguaguagucaua

SEQ ID NO: 1917522 - RNA, 19 nt, Artificial Sequence
  Description of Artificial Sequence: Synthetic oligonucleotide
acgcuauugcccaccaaug

SEQ ID NO: 1917523 - RNA, 19 nt, Artificial Sequence
  Description of Artificial Sequence: Synthetic oligonucleotide
gaugagcagauccaccauu

SEQ ID NO: 1917524 - RNA, 19 nt, Artificial Sequence
  Description of Artificial Sequence: Synthetic oligonucleotide
ccuugagagaaaagcuuug

SEQ ID NO: 1917525 - RNA, 19 nt, Artificial Sequence
  Description of Artificial Sequence: Synthetic oligonucleotide
caugacccgauggccacag

SEQ ID NO: 1917526 - RNA, 19 nt, Artificial Sequence
  Description of Artificial Sequence: Synthetic oligonucleotide
cugcagacccggcuccgcg

SEQ ID NO: 1917527 - RNA, 19 nt, Artificial Sequence
  Description of Artificial Sequence: Synthetic oligonucleotide
aggaggggaguaaaacuga

SEQ ID NO: 1917528 - RNA, 19 nt, Artificial Sequence
  Description of Artificial Sequence: Synthetic oligonucleotide
uuagcucgucagugaccag

SEQ ID NO: 1917529 - RNA, 19 nt, Artificial Sequence
  Description of Artificial Sequence: Synthetic oligonucleotide
gaggaggauugaaggaguc

SEQ ID NO: 1917530 - RNA, 19 nt, Artificial Sequence
  Description of Artificial Sequence: Synthetic oligonucleotide
gacccgauggccacaggca

SEQ ID NO: 1917531 - RNA, 19 nt, Artificial Sequence
  Description of Artificial Sequence: Synthetic oligonucleotide
gagcacaugugcaugaguu

SEQ ID NO: 1917532 - RNA, 19 nt, Artificial Sequence
  Description of Artificial Sequence: Synthetic oligonucleotide
ccauuagcucgucagugac

SEQ ID NO: 1917533 - RNA, 19 nt, Artificial Sequence
  Description of Artificial Sequence: Synthetic oligonucleotide
cugacauccgauaugccuu

SEQ ID NO: 1917534 - RNA, 19 nt, Artificial Sequence
  Description of Artificial Sequence: Synthetic oligonucleotide
gucacguagagaagcaugu

SEQ ID NO: 1917535 - RNA, 19 nt, Artificial Sequence
  Description of Artificial Sequence: Synthetic oligonucleotide
cuuugagaggaucacuuuu

SEQ ID NO: 1917536 - RNA, 19 nt, Artificial Sequence
  Description of Artificial Sequence: Synthetic oligonucleotide
augagcagauccaccauuu

SEQ ID NO: 1917537 - RNA, 19 nt, Artificial Sequence
  Description of Artificial Sequence: Synthetic oligonucleotide
aaccgcccucucugaagca

SEQ ID NO: 1917538 - RNA, 19 nt, Artificial Sequence
  Description of Artificial Sequence: Synthetic oligonucleotide
cauaguucuaaaagcgguu

SEQ ID NO: 1917539 - RNA, 19 nt, Artificial Sequence
  Description of Artificial Sequence: Synthetic oligonucleotide
agucugcauacagcauauc

SEQ ID NO: 1917540 - RNA, 19 nt, Artificial Sequence
  Description of Artificial Sequence: Synthetic oligonucleotide
gcgcagucugcauacagca

SEQ ID NO: 1917541 - RNA, 19 nt, Artificial Sequence
  Description of Artificial Sequence: Synthetic oligonucleotide
gcaugaguuuaaaacacaa

SEQ ID NO: 1917542 - RNA, 19 nt, Artificial Sequence
  Description of Artificial Sequence: Synthetic oligonucleotide
ggagguggagcaaugucca

SEQ ID NO: 1917543 - RNA, 19 nt, Artificial Sequence
  Description of Artificial Sequence: Synthetic oligonucleotide
aggaucacuuuugcuaaua

SEQ ID NO: 1917544 - RNA, 19 nt, Artificial Sequence
  Description of Artificial Sequence: Synthetic oligonucleotide
gaaccacgucucgauccag

SEQ ID NO: 1917545 - RNA, 19 nt, Artificial Sequence
  Description of Artificial Sequence: Synthetic oligonucleotide
uucugccucuugaggcaac

SEQ ID NO: 1917546 - RNA, 19 nt, Artificial Sequence
  Description of Artificial Sequence: Synthetic oligonucleotide
agugaggguucuucacauu

SEQ ID NO: 1917547 - RNA, 19 nt, Artificial Sequence
  Description of Artificial Sequence: Synthetic oligonucleotide
cgcuauugcccaccaaugg

SEQ ID NO: 1917548 - RNA, 19 nt, Artificial Sequence
  Description of Artificial Sequence: Synthetic oligonucleotide
gaggguucuucacauucau

SEQ ID NO: 1917549 - RNA, 19 nt, Artificial Sequence
  Description of Artificial Sequence: Synthetic oligonucleotide
ggaaccacgucucgaucca

SEQ ID NO: 1917550 - RNA, 19 nt, Artificial Sequence
  Description of Artificial Sequence: Synthetic oligonucleotide
cacauagccaaaugccccu

SEQ ID NO: 1917551 - RNA, 19 nt, Artificial Sequence
  Description of Artificial Sequence: Synthetic oligonucleotide
gauucggaugcagcacuaa

SEQ ID NO: 1917552 - RNA, 19 nt, Artificial Sequence
  Description of Artificial Sequence: Synthetic oligonucleotide
gagaaccgcccucucugaa

SEQ ID NO: 1917553 - RNA, 19 nt, Artificial Sequence
  Description of Artificial Sequence: Synthetic oligonucleotide
augcagcacuaagacugag

SEQ ID NO: 1917554 - RNA, 19 nt, Artificial Sequence
  Description of Artificial Sequence: Synthetic oligonucleotide
gcagcacuaagacugaguu

SEQ ID NO: 1917555 - RNA, 19 nt, Artificial Sequence
  Description of Artificial Sequence: Synthetic oligonucleotide
ggcgcagucugcauacagc

SEQ ID NO: 1917556 - RNA, 19 nt, Artificial Sequence
  Description of Artificial Sequence: Synthetic oligonucleotide
auguaacuuuugauucgga

SEQ ID NO: 1917557 - RNA, 19 nt, Artificial Sequence
  Description of Artificial Sequence: Synthetic oligonucleotide
augucacguagagaagcau

SEQ ID NO: 1917558 - RNA, 19 nt, Artificial Sequence
  Description of Artificial Sequence: Synthetic oligonucleotide
augacccgauggccacagg

SEQ ID NO: 1917559 - RNA, 19 nt, Artificial Sequence
  Description of Artificial Sequence: Synthetic oligonucleotide
ggaggggaguaaaacugac

SEQ ID NO: 1917560 - RNA, 19 nt, Artificial Sequence
  Description of Artificial Sequence: Synthetic oligonucleotide
gcaauguccaugagguauc

SEQ ID NO: 1917561 - RNA, 19 nt, Artificial Sequence
  Description of Artificial Sequence: Synthetic oligonucleotide
ggcgcgagccgcccgcugg

SEQ ID NO: 1917562 - RNA, 19 nt, Artificial Sequence
  Description of Artificial Sequence: Synthetic oligonucleotide
ccaaaugccccuugagaga

SEQ ID NO: 1917563 - RNA, 19 nt, Artificial Sequence
  Description of Artificial Sequence: Synthetic oligonucleotide
gguuacugcugucgucaac

SEQ ID NO: 1917564 - RNA, 19 nt, Artificial Sequence
  Description of Artificial Sequence: Synthetic oligonucleotide
caauggcgcagucugcaua

SEQ ID NO: 1917565 - RNA, 19 nt, Artificial Sequence
  Description of Artificial Sequence: Synthetic oligonucleotide
cugcagggaugagaaccgc

SEQ ID NO: 1917566 - RNA, 19 nt, Artificial Sequence
  Description of Artificial Sequence: Synthetic oligonucleotide
ccacgucucgauccaggcg

SEQ ID NO: 1917567 - RNA, 19 nt, Artificial Sequence
  Description of Artificial Sequence: Synthetic oligonucleotide
cucgucagugaccagcgau

SEQ ID NO: 1917568 - RNA, 19 nt, Artificial Sequence
  Description of Artificial Sequence: Synthetic oligonucleotide
gugcaggguugaugggaug

SEQ ID NO: 1917569 - RNA, 19 nt, Artificial Sequence
  Description of Artificial Sequence: Synthetic oligonucleotide
caggguggaugugagugga

SEQ ID NO: 1917570 - RNA, 19 nt, Artificial Sequence
  Description of Artificial Sequence: Synthetic oligonucleotide
agacucaggaggggaguaa

SEQ ID NO: 1917571 - RNA, 19 nt, Artificial Sequence
  Description of Artificial Sequence: Synthetic oligonucleotide
gccuccauucacauuuaac

SEQ ID NO: 1917572 - RNA, 19 nt, Artificial Sequence
  Description of Artificial Sequence: Synthetic oligonucleotide
agacugagacucacaggaa

SEQ ID NO: 1917573 - RNA, 19 nt, Artificial Sequence
  Description of Artificial Sequence: Synthetic oligonucleotide
uucuggcuggugguucauc

SEQ ID NO: 1917574 - RNA, 19 nt, Artificial Sequence
  Description of Artificial Sequence: Synthetic oligonucleotide
uggcucccagucagaguau

SEQ ID NO: 1917575 - RNA, 19 nt, Artificial Sequence
  Description of Artificial Sequence: Synthetic oligonucleotide
aguccuccugacauccgau

SEQ ID NO: 1917576 - RNA, 19 nt, Artificial Sequence
  Description of Artificial Sequence: Synthetic oligonucleotide
aaccuccucuauggcgcga

SEQ ID NO: 1917577 - RNA, 19 nt, Artificial Sequence
  Description of Artificial Sequence: Synthetic oligonucleotide
caucccuagugagaagcaa

SEQ ID NO: 1917578 - RNA, 19 nt, Artificial Sequence
  Description of Artificial Sequence: Synthetic oligonucleotide
auccuggaggaggauugaa

SEQ ID NO: 1917579 - RNA, 19 nt, Artificial Sequence
  Description of Artificial Sequence: Synthetic oligonucleotide
augccccuugagagaaaag

SEQ ID NO: 1917580 - RNA, 19 nt, Artificial Sequence
  Description of Artificial Sequence: Synthetic oligonucleotide
aggguggaugugaguggag

SEQ ID NO: 1917581 - RNA, 19 nt, Artificial Sequence
  Description of Artificial Sequence: Synthetic oligonucleotide
aaaugccccuugagagaaa

SEQ ID NO: 1917582 - RNA, 19 nt, Artificial Sequence
  Description of Artificial Sequence: Synthetic oligonucleotide
guccuccugacauccgaua

SEQ ID NO: 1917583 - RNA, 19 nt, Artificial Sequence
  Description of Artificial Sequence: Synthetic oligonucleotide
accgcccucucugaagcau

SEQ ID NO: 1917584 - RNA, 19 nt, Artificial Sequence
  Description of Artificial Sequence: Synthetic oligonucleotide
gacauccgauaugccuuuc

SEQ ID NO: 1917585 - RNA, 19 nt, Artificial Sequence
  Description of Artificial Sequence: Synthetic oligonucleotide
acgucucgauccaggcgag

SEQ ID NO: 1917586 - RNA, 19 nt, Artificial Sequence
  Description of Artificial Sequence: Synthetic oligonucleotide
ccucuauggcgcgagccgc

SEQ ID NO: 1917587 - RNA, 19 nt, Artificial Sequence
  Description of Artificial Sequence: Synthetic oligonucleotide
gaggaguaguagucauaau

SEQ ID NO: 1917588 - RNA, 19 nt, Artificial Sequence
  Description of Artificial Sequence: Synthetic oligonucleotide
gaggaucacuuuugcuaau

SEQ ID NO: 1917589 - RNA, 19 nt, Artificial Sequence
  Description of Artificial Sequence: Synthetic oligonucleotide
cauccgauaugccuuucuu

SEQ ID NO: 1917590 - RNA, 19 nt, Artificial Sequence
  Description of Artificial Sequence: Synthetic oligonucleotide
gagaagcaaccuccucuau

SEQ ID NO: 1917591 - RNA, 19 nt, Artificial Sequence
  Description of Artificial Sequence: Synthetic oligonucleotide
gaacuagcaggagucuguu

SEQ ID NO: 1917592 - RNA, 19 nt, Artificial Sequence
  Description of Artificial Sequence: Synthetic oligonucleotide
uccuggccaugagcugugc

SEQ ID NO: 1917593 - RNA, 19 nt, Artificial Sequence
  Description of Artificial Sequence: Synthetic oligonucleotide
caggccagacugagacuca

SEQ ID NO: 1917594 - RNA, 19 nt, Artificial Sequence
  Description of Artificial Sequence: Synthetic oligonucleotide
gggauggaugucacguaga

SEQ ID NO: 1917595 - RNA, 19 nt, Artificial Sequence
  Description of Artificial Sequence: Synthetic oligonucleotide
aggcgaggaugaaggaaau

SEQ ID NO: 1917596 - RNA, 19 nt, Artificial Sequence
  Description of Artificial Sequence: Synthetic oligonucleotide
ggaugagaaccgcccucuc

SEQ ID NO: 1917597 - RNA, 19 nt, Artificial Sequence
  Description of Artificial Sequence: Synthetic oligonucleotide
cuucugccucuugaggcaa

SEQ ID NO: 1917598 - RNA, 19 nt, Artificial Sequence
  Description of Artificial Sequence: Synthetic oligonucleotide
ccaccaucccuagugagaa

SEQ ID NO: 1917599 - RNA, 19 nt, Artificial Sequence
  Description of Artificial Sequence: Synthetic oligonucleotide
ccaucccuagugagaagca

SEQ ID NO: 1917600 - RNA, 19 nt, Artificial Sequence
  Description of Artificial Sequence: Synthetic oligonucleotide
guuucucgcuguccuguuu

SEQ ID NO: 1917601 - RNA, 19 nt, Artificial Sequence
  Description of Artificial Sequence: Synthetic oligonucleotide
auggcgcagucugcauaca

SEQ ID NO: 1917602 - RNA, 19 nt, Artificial Sequence
  Description of Artificial Sequence: Synthetic oligonucleotide
gagguggagcaauguccau

SEQ ID NO: 1917603 - RNA, 19 nt, Artificial Sequence
  Description of Artificial Sequence: Synthetic oligonucleotide
ugcugucgucaacgcuauu

SEQ ID NO: 1917604 - RNA, 19 nt, Artificial Sequence
  Description of Artificial Sequence: Synthetic oligonucleotide
gagccgcccgcuggccugc

SEQ ID NO: 1917605 - RNA, 19 nt, Artificial Sequence
  Description of Artificial Sequence: Synthetic oligonucleotide
cugcugucgucaacgcuau

SEQ ID NO: 1917606 - RNA, 19 nt, Artificial Sequence
  Description of Artificial Sequence: Synthetic oligonucleotide
caacgcuauugcccaccaa

SEQ ID NO: 1917607 - RNA, 19 nt, Artificial Sequence
  Description of Artificial Sequence: Synthetic oligonucleotide
cuccauccaacuccaccau

SEQ ID NO: 1917608 - RNA, 19 nt, Artificial Sequence
  Description of Artificial Sequence: Synthetic oligonucleotide
ccaggaaccacgucucgau

SEQ ID NO: 1917609 - RNA, 19 nt, Artificial Sequence
  Description of Artificial Sequence: Synthetic oligonucleotide
ccaggcgaggaugaaggaa

SEQ ID NO: 1917610 - RNA, 19 nt, Artificial Sequence
  Description of Artificial Sequence: Synthetic oligonucleotide
ccgcccucucugaagcauc

SEQ ID NO: 1917611 - RNA, 19 nt, Artificial Sequence
  Description of Artificial Sequence: Synthetic oligonucleotide
cuucccucuucaguguguu

SEQ ID NO: 1917612 - RNA, 19 nt, Artificial Sequence
  Description of Artificial Sequence: Synthetic oligonucleotide
auggcgcgagccgcccgcu

SEQ ID NO: 1917613 - RNA, 19 nt, Artificial Sequence
  Description of Artificial Sequence: Synthetic oligonucleotide
gaccagcgaugagcagauc

SEQ ID NO: 1917614 - RNA, 19 nt, Artificial Sequence
  Description of Artificial Sequence: Synthetic oligonucleotide
ggccagacugagacucaca

SEQ ID NO: 1917615 - RNA, 19 nt, Artificial Sequence
  Description of Artificial Sequence: Synthetic oligonucleotide
gcgcgagccgcccgcuggc

SEQ ID NO: 1917616 - RNA, 19 nt, Artificial Sequence
  Description of Artificial Sequence: Synthetic oligonucleotide
gcucgucagugaccagcga

SEQ ID NO: 1917617 - RNA, 19 nt, Artificial Sequence
  Description of Artificial Sequence: Synthetic oligonucleotide
ccgcuggccugcagacccg

SEQ ID NO: 1917618 - RNA, 19 nt, Artificial Sequence
  Description of Artificial Sequence: Synthetic oligonucleotide
caggguugaugggauggau

SEQ ID NO: 1917619 - RNA, 19 nt, Artificial Sequence
  Description of Artificial Sequence: Synthetic oligonucleotide
gguuucucgcuguccuguu

SEQ ID NO: 1917620 - RNA, 19 nt, Artificial Sequence
  Description of Artificial Sequence: Synthetic oligonucleotide
cgagccgcccgcuggccug

SEQ ID NO: 1917621 - RNA, 19 nt, Artificial Sequence
  Description of Artificial Sequence: Synthetic oligonucleotide
ccaugagcugugcaggguu

SEQ ID NO: 1917622 - RNA, 19 nt, Artificial Sequence
  Description of Artificial Sequence: Synthetic oligonucleotide
guucauccuggaggaggau

SEQ ID NO: 1917623 - RNA, 19 nt, Artificial Sequence
  Description of Artificial Sequence: Synthetic oligonucleotide
ccucuugaggcaacacuuu

SEQ ID NO: 1917624 - RNA, 19 nt, Artificial Sequence
  Description of Artificial Sequence: Synthetic oligonucleotide
cccuagugagaagcaaccu

SEQ ID NO: 1917625 - RNA, 19 nt, Artificial Sequence
  Description of Artificial Sequence: Synthetic oligonucleotide
cccaccaauggcgcagucu

SEQ ID NO: 1917626 - RNA, 19 nt, Artificial Sequence
  Description of Artificial Sequence: Synthetic oligonucleotide
ccaauggcgcagucugcau

SEQ ID NO: 1917627 - RNA, 19 nt, Artificial Sequence
  Description of Artificial Sequence: Synthetic oligonucleotide
gcgagccgcccgcuggccu

SEQ ID NO: 1917628 - RNA, 19 nt, Artificial Sequence
  Description of Artificial Sequence: Synthetic oligonucleotide
cgauccaggcgaggaugaa

SEQ ID NO: 1917629 - RNA, 19 nt, Artificial Sequence
  Description of Artificial Sequence: Synthetic oligonucleotide
cgaugccuccauucacauu

SEQ ID NO: 1917630 - RNA, 19 nt, Artificial Sequence
  Description of Artificial Sequence: Synthetic oligonucleotide
uuuaguuaaguaaagaaac

SEQ ID NO: 1917631 - RNA, 19 nt, Artificial Sequence
  Description of Artificial Sequence: Synthetic oligonucleotide
aaguuauugucuuuaaaac

SEQ ID NO: 1917632 - RNA, 19 nt, Artificial Sequence
  Description of Artificial Sequence: Synthetic oligonucleotide
agacaaaagaauuauguac

SEQ ID NO: 1917633 - RNA, 19 nt, Artificial Sequence
  Description of Artificial Sequence: Synthetic oligonucleotide
auaaauagaacguaaagcu

SEQ ID NO: 1917634 - RNA, 19 nt, Artificial Sequence
  Description of Artificial Sequence: Synthetic oligonucleotide
uguauugaaaugaaacugg

SEQ ID NO: 1917635 - RNA, 19 nt, Artificial Sequence
  Description of Artificial Sequence: Synthetic oligonucleotide
ucugagaaaauauacuggg

SEQ ID NO: 1917636 - RNA, 19 nt, Artificial Sequence
  Description of Artificial Sequence: Synthetic oligonucleotide
auaacuuugacacugguca

SEQ ID NO: 1917637 - RNA, 19 nt, Artificial Sequence
  Description of Artificial Sequence: Synthetic oligonucleotide
uaugauucagacuuuauug

SEQ ID NO: 1917638 - RNA, 19 nt, Artificial Sequence
  Description of Artificial Sequence: Synthetic oligonucleotide
acgacaucaacccaguucc

SEQ ID NO: 1917639 - RNA, 19 nt, Artificial Sequence
  Description of Artificial Sequence: Synthetic oligonucleotide
ucauagauaugacaggagg

SEQ ID NO: 1917640 - RNA, 19 nt, Artificial Sequence
  Description of Artificial Sequence: Synthetic oligonucleotide
uauacugggagcauuauca

SEQ ID NO: 1917641 - RNA, 19 nt, Artificial Sequence
  Description of Artificial Sequence: Synthetic oligonucleotide
uaagacauuucuuuaaaag

SEQ ID NO: 1917642 - RNA, 19 nt, Artificial Sequence
  Description of Artificial Sequence: Synthetic oligonucleotide
uuugcuuaaaugcuucacg

SEQ ID NO: 1917643 - RNA, 19 nt, Artificial Sequence
  Description of Artificial Sequence: Synthetic oligonucleotide
uguuuuaucugccagcuug

SEQ ID NO: 1917644 - RNA, 19 nt, Artificial Sequence
  Description of Artificial Sequence: Synthetic oligonucleotide
ugaaacuggacuuaauucc

SEQ ID NO: 1917645 - RNA, 19 nt, Artificial Sequence
  Description of Artificial Sequence: Synthetic oligonucleotide
aucaagaugacaauaaaac

SEQ ID NO: 1917646 - RNA, 19 nt, Artificial Sequence
  Description of Artificial Sequence: Synthetic oligonucleotide
uucauuggcauuuaacuag

SEQ ID NO: 1917647 - RNA, 19 nt, Artificial Sequence
  Description of Artificial Sequence: Synthetic oligonucleotide
uucaaguguucacagaggg

SEQ ID NO: 1917648 - RNA, 19 nt, Artificial Sequence
  Description of Artificial Sequence: Synthetic oligonucleotide
aaguaaagaaaccacuaug

SEQ ID NO: 1917649 - RNA, 19 nt, Artificial Sequence
  Description of Artificial Sequence: Synthetic oligonucleotide
aaugcuucacgacaucaac

SEQ ID NO: 1917650 - RNA, 19 nt, Artificial Sequence
  Description of Artificial Sequence: Synthetic oligonucleotide
acguaaagcuucuaguucc

SEQ ID NO: 1917651 - RNA, 19 nt, Artificial Sequence
  Description of Artificial Sequence: Synthetic oligonucleotide
agauuuguacaauucauag

SEQ ID NO: 1917652 - RNA, 19 nt, Artificial Sequence
  Description of Artificial Sequence: Synthetic oligonucleotide
uugcuuaucagucauguca

SEQ ID NO: 1917653 - RNA, 19 nt, Artificial Sequence
  Description of Artificial Sequence: Synthetic oligonucleotide
uuugcgaccgcgaagaaca

SEQ ID NO: 1917654 - RNA, 19 nt, Artificial Sequence
  Description of Artificial Sequence: Synthetic oligonucleotide
uaaguaaauagacucugag

SEQ ID NO: 1917655 - RNA, 19 nt, Artificial Sequence
  Description of Artificial Sequence: Synthetic oligonucleotide
aaagcguucauagauauga

SEQ ID NO: 1917656 - RNA, 19 nt, Artificial Sequence
  Description of Artificial Sequence: Synthetic oligonucleotide
aacguaaagcuucuaguuc

SEQ ID NO: 1917657 - RNA, 19 nt, Artificial Sequence
  Description of Artificial Sequence: Synthetic oligonucleotide
uuccauauaauuuuaagua

SEQ ID NO: 1917658 - RNA, 19 nt, Artificial Sequence
  Description of Artificial Sequence: Synthetic oligonucleotide
ucaagaugacaauaaaacc

SEQ ID NO: 1917659 - RNA, 19 nt, Artificial Sequence
  Description of Artificial Sequence: Synthetic oligonucleotide
uuuucaaagauacucucac

SEQ ID NO: 1917660 - RNA, 19 nt, Artificial Sequence
  Description of Artificial Sequence: Synthetic oligonucleotide
uuaguuaaguaaagaaacc

SEQ ID NO: 1917661 - RNA, 19 nt, Artificial Sequence
  Description of Artificial Sequence: Synthetic oligonucleotide
aaaguguucaaguguucac

SEQ ID NO: 1917662 - RNA, 19 nt, Artificial Sequence
  Description of Artificial Sequence: Synthetic oligonucleotide
aguucauuggcauuuaacu

SEQ ID NO: 1917663 - RNA, 19 nt, Artificial Sequence
  Description of Artificial Sequence: Synthetic oligonucleotide
agcauuaucagacguuggc

SEQ ID NO: 1917664 - RNA, 19 nt, Artificial Sequence
  Description of Artificial Sequence: Synthetic oligonucleotide
aacaauguguaggucaugg

SEQ ID NO: 1917665 - RNA, 19 nt, Artificial Sequence
  Description of Artificial Sequence: Synthetic oligonucleotide
aagauacucuguuucacag

SEQ ID NO: 1917666 - RNA, 19 nt, Artificial Sequence
  Description of Artificial Sequence: Synthetic oligonucleotide
uuagcauacucgaacaaug

SEQ ID NO: 1917667 - RNA, 19 nt, Artificial Sequence
  Description of Artificial Sequence: Synthetic oligonucleotide
uuuuaaguaaauagacucu

SEQ ID NO: 1917668 - RNA, 19 nt, Artificial Sequence
  Description of Artificial Sequence: Synthetic oligonucleotide
cauuuaacuagcauuaguc

SEQ ID NO: 1917669 - RNA, 19 nt, Artificial Sequence
  Description of Artificial Sequence: Synthetic oligonucleotide
ucuuugcaaucuaagaacc

SEQ ID NO: 1917670 - RNA, 19 nt, Artificial Sequence
  Description of Artificial Sequence: Synthetic oligonucleotide
aauguguaggucauggcgg

SEQ ID NO: 1917671 - RNA, 19 nt, Artificial Sequence
  Description of Artificial Sequence: Synthetic oligonucleotide
auaauuuuaaguaaauaga

SEQ ID NO: 1917672 - RNA, 19 nt, Artificial Sequence
  Description of Artificial Sequence: Synthetic oligonucleotide
aaguaaauagacucugaga

SEQ ID NO: 1917673 - RNA, 19 nt, Artificial Sequence
  Description of Artificial Sequence: Synthetic oligonucleotide
uuuaaguaaauagacucug

SEQ ID NO: 1917674 - RNA, 19 nt, Artificial Sequence
  Description of Artificial Sequence: Synthetic oligonucleotide
aguuauugucuuuaaaaca

SEQ ID NO: 1917675 - RNA, 19 nt, Artificial Sequence
  Description of Artificial Sequence: Synthetic oligonucleotide
cuccuucauaaauagaacg

SEQ ID NO: 1917676 - RNA, 19 nt, Artificial Sequence
  Description of Artificial Sequence: Synthetic oligonucleotide
gaugauguuggcuaccggc

SEQ ID NO: 1917677 - RNA, 19 nt, Artificial Sequence
  Description of Artificial Sequence: Synthetic oligonucleotide
uagaacguaaagcuucuag

SEQ ID NO: 1917678 - RNA, 19 nt, Artificial Sequence
  Description of Artificial Sequence: Synthetic oligonucleotide
uuaaguaaagaaaccacua

SEQ ID NO: 1917679 - RNA, 19 nt, Artificial Sequence
  Description of Artificial Sequence: Synthetic oligonucleotide
auagauaugacaggaggcg

SEQ ID NO: 1917680 - RNA, 19 nt, Artificial Sequence
  Description of Artificial Sequence: Synthetic oligonucleotide
uucuaguuccaucuccugg

SEQ ID NO: 1917681 - RNA, 19 nt, Artificial Sequence
  Description of Artificial Sequence: Synthetic oligonucleotide
caauguguaggucauggcg

SEQ ID NO: 1917682 - RNA, 19 nt, Artificial Sequence
  Description of Artificial Sequence: Synthetic oligonucleotide
cauagauaugacaggaggc

SEQ ID NO: 1917683 - RNA, 19 nt, Artificial Sequence
  Description of Artificial Sequence: Synthetic oligonucleotide
aauaacuuugacacugguc

SEQ ID NO: 1917684 - RNA, 19 nt, Artificial Sequence
  Description of Artificial Sequence: Synthetic oligonucleotide
aguuaaguaaagaaaccac

SEQ ID NO: 1917685 - RNA, 19 nt, Artificial Sequence
  Description of Artificial Sequence: Synthetic oligonucleotide
uacucgaacaauguguagg

SEQ ID NO: 1917686 - RNA, 19 nt, Artificial Sequence
  Description of Artificial Sequence: Synthetic oligonucleotide
guaacagaggcacagcugc

SEQ ID NO: 1917687 - RNA, 19 nt, Artificial Sequence
  Description of Artificial Sequence: Synthetic oligonucleotide
uuaucagucaugucauucc

SEQ ID NO: 1917688 - RNA, 19 nt, Artificial Sequence
  Description of Artificial Sequence: Synthetic oligonucleotide
uucaaagauacucucacuu

SEQ ID NO: 1917689 - RNA, 19 nt, Artificial Sequence
  Description of Artificial Sequence: Synthetic oligonucleotide
aaaacaaaucaagaugaca

SEQ ID NO: 1917690 - RNA, 19 nt, Artificial Sequence
  Description of Artificial Sequence: Synthetic oligonucleotide
uuuauugcuuaucagucau

SEQ ID NO: 1917691 - RNA, 19 nt, Artificial Sequence
  Description of Artificial Sequence: Synthetic oligonucleotide
ucgaacaauguguagguca

SEQ ID NO: 1917692 - RNA, 19 nt, Artificial Sequence
  Description of Artificial Sequence: Synthetic oligonucleotide
ugugaucuguuuuaucugc

SEQ ID NO: 1917693 - RNA, 19 nt, Artificial Sequence
  Description of Artificial Sequence: Synthetic oligonucleotide
uccuucauaaauagaacgu

SEQ ID NO: 1917694 - RNA, 19 nt, Artificial Sequence
  Description of Artificial Sequence: Synthetic oligonucleotide
uugaugaaaguguucaagu

SEQ ID NO: 1917695 - RNA, 19 nt, Artificial Sequence
  Description of Artificial Sequence: Synthetic oligonucleotide
uacacaaacagaaccuuga

SEQ ID NO: 1917696 - RNA, 19 nt, Artificial Sequence
  Description of Artificial Sequence: Synthetic oligonucleotide
aaaucucuauuaggaaggc

SEQ ID NO: 1917697 - RNA, 19 nt, Artificial Sequence
  Description of Artificial Sequence: Synthetic oligonucleotide
acuagcauuagucuuugca

SEQ ID NO: 1917698 - RNA, 19 nt, Artificial Sequence
  Description of Artificial Sequence: Synthetic oligonucleotide
gaagcuuucaucuccuuca

SEQ ID NO: 1917699 - RNA, 19 nt, Artificial Sequence
  Description of Artificial Sequence: Synthetic oligonucleotide
acaucaacccaguuccagc

SEQ ID NO: 1917700 - RNA, 19 nt, Artificial Sequence
  Description of Artificial Sequence: Synthetic oligonucleotide
ugaugaaaguguucaagug

SEQ ID NO: 1917701 - RNA, 19 nt, Artificial Sequence
  Description of Artificial Sequence: Synthetic oligonucleotide
uccucguuggcacccaucg

SEQ ID NO: 1917702 - RNA, 19 nt, Artificial Sequence
  Description of Artificial Sequence: Synthetic oligonucleotide
aagaccacccaguaaccag

SEQ ID NO: 1917703 - RNA, 19 nt, Artificial Sequence
  Description of Artificial Sequence: Synthetic oligonucleotide
gacauguugaucugggcug

SEQ ID NO: 1917704 - RNA, 19 nt, Artificial Sequence
  Description of Artificial Sequence: Synthetic oligonucleotide
acguuggcaaucuugauga

SEQ ID NO: 1917705 - RNA, 19 nt, Artificial Sequence
  Description of Artificial Sequence: Synthetic oligonucleotide
agaaaauauacugggagca

SEQ ID NO: 1917706 - RNA, 19 nt, Artificial Sequence
  Description of Artificial Sequence: Synthetic oligonucleotide
uuaacuagcauuagucuuu

SEQ ID NO: 1917707 - RNA, 19 nt, Artificial Sequence
  Description of Artificial Sequence: Synthetic oligonucleotide
uuaaguaaauagacucuga

SEQ ID NO: 1917708 - RNA, 19 nt, Artificial Sequence
  Description of Artificial Sequence: Synthetic oligonucleotide
agaacguaaagcuucuagu

SEQ ID NO: 1917709 - RNA, 19 nt, Artificial Sequence
  Description of Artificial Sequence: Synthetic oligonucleotide
ucagacguuggcaaucuug

SEQ ID NO: 1917710 - RNA, 19 nt, Artificial Sequence
  Description of Artificial Sequence: Synthetic oligonucleotide
uauuaggaaggcuuuggga

SEQ ID NO: 1917711 - RNA, 19 nt, Artificial Sequence
  Description of Artificial Sequence: Synthetic oligonucleotide
gccaguuuugcuuaaaugc

SEQ ID NO: 1917712 - RNA, 19 nt, Artificial Sequence
  Description of Artificial Sequence: Synthetic oligonucleotide
uucauagauaugacaggag

SEQ ID NO: 1917713 - RNA, 19 nt, Artificial Sequence
  Description of Artificial Sequence: Synthetic oligonucleotide
cacaauaacuuugacacug

SEQ ID NO: 1917714 - RNA, 19 nt, Artificial Sequence
  Description of Artificial Sequence: Synthetic oligonucleotide
uuggcauuuaacuagcauu

SEQ ID NO: 1917715 - RNA, 19 nt, Artificial Sequence
  Description of Artificial Sequence: Synthetic oligonucleotide
ucuaguuccaucuccuggu

SEQ ID NO: 1917716 - RNA, 19 nt, Artificial Sequence
  Description of Artificial Sequence: Synthetic oligonucleotide
agauacucucacuucaucu

SEQ ID NO: 1917717 - RNA, 19 nt, Artificial Sequence
  Description of Artificial Sequence: Synthetic oligonucleotide
uuauugucuuuaaaacaca

SEQ ID NO: 1917718 - RNA, 19 nt, Artificial Sequence
  Description of Artificial Sequence: Synthetic oligonucleotide
caagaugacaauaaaaccu

SEQ ID NO: 1917719 - RNA, 19 nt, Artificial Sequence
  Description of Artificial Sequence: Synthetic oligonucleotide
uggacuuaauucccggaag

SEQ ID NO: 1917720 - RNA, 19 nt, Artificial Sequence
  Description of Artificial Sequence: Synthetic oligonucleotide
agcauuagucuuugcaauc

SEQ ID NO: 1917721 - RNA, 19 nt, Artificial Sequence
  Description of Artificial Sequence: Synthetic oligonucleotide
uuaucugccagcuugcguu

SEQ ID NO: 1917722 - RNA, 19 nt, Artificial Sequence
  Description of Artificial Sequence: Synthetic oligonucleotide
uaagauacucuguuucaca

SEQ ID NO: 1917723 - RNA, 19 nt, Artificial Sequence
  Description of Artificial Sequence: Synthetic oligonucleotide
aagaaccacaauaacuuug

SEQ ID NO: 1917724 - RNA, 19 nt, Artificial Sequence
  Description of Artificial Sequence: Synthetic oligonucleotide
auauacugggagcauuauc

SEQ ID NO: 1917725 - RNA, 19 nt, Artificial Sequence
  Description of Artificial Sequence: Synthetic oligonucleotide
cuucacgacaucaacccag

SEQ ID NO: 1917726 - RNA, 19 nt, Artificial Sequence
  Description of Artificial Sequence: Synthetic oligonucleotide
uggcauuuaacuagcauua

SEQ ID NO: 1917727 - RNA, 19 nt, Artificial Sequence
  Description of Artificial Sequence: Synthetic oligonucleotide
aaguaagaagacauguuga

SEQ ID NO: 1917728 - RNA, 19 nt, Artificial Sequence
  Description of Artificial Sequence: Synthetic oligonucleotide
acaauguguaggucauggc

SEQ ID NO: 1917729 - RNA, 19 nt, Artificial Sequence
  Description of Artificial Sequence: Synthetic oligonucleotide
gaaacuggacuuaauuccc

SEQ ID NO: 1917730 - RNA, 19 nt, Artificial Sequence
  Description of Artificial Sequence: Synthetic oligonucleotide
gauuuguacaauucauaga

SEQ ID NO: 1917731 - RNA, 19 nt, Artificial Sequence
  Description of Artificial Sequence: Synthetic oligonucleotide
caggaaaucucuauuagga

SEQ ID NO: 1917732 - RNA, 19 nt, Artificial Sequence
  Description of Artificial Sequence: Synthetic oligonucleotide
uauugcuuaucagucaugu

SEQ ID NO: 1917733 - RNA, 19 nt, Artificial Sequence
  Description of Artificial Sequence: Synthetic oligonucleotide
cucguuggcacccaucgcg

SEQ ID NO: 1917734 - RNA, 19 nt, Artificial Sequence
  Description of Artificial Sequence: Synthetic oligonucleotide
uuggcguagaauucccggg

SEQ ID NO: 1917735 - RNA, 19 nt, Artificial Sequence
  Description of Artificial Sequence: Synthetic oligonucleotide
guuggcguagaauucccgg

SEQ ID NO: 1917736 - RNA, 19 nt, Artificial Sequence
  Description of Artificial Sequence: Synthetic oligonucleotide
cuauuaggaaggcuuuggg

SEQ ID NO: 1917737 - RNA, 19 nt, Artificial Sequence
  Description of Artificial Sequence: Synthetic oligonucleotide
ucaaagauacucucacuuc

SEQ ID NO: 1917738 - RNA, 19 nt, Artificial Sequence
  Description of Artificial Sequence: Synthetic oligonucleotide
ggaguuucaacagagauga

SEQ ID NO: 1917739 - RNA, 19 nt, Artificial Sequence
  Description of Artificial Sequence: Synthetic oligonucleotide
uuggcuaccggcguuggcg

SEQ ID NO: 1917740 - RNA, 19 nt, Artificial Sequence
  Description of Artificial Sequence: Synthetic oligonucleotide
uuggcuaagauacucuguu

SEQ ID NO: 1917741 - RNA, 19 nt, Artificial Sequence
  Description of Artificial Sequence: Synthetic oligonucleotide
ucuguuuuaucugccagcu

SEQ ID NO: 1917742 - RNA, 19 nt, Artificial Sequence
  Description of Artificial Sequence: Synthetic oligonucleotide
aacguuugcgaccgcgaag

SEQ ID NO: 1917743 - RNA, 19 nt, Artificial Sequence
  Description of Artificial Sequence: Synthetic oligonucleotide
aagaugacaauaaaaccua

SEQ ID NO: 1917744 - RNA, 19 nt, Artificial Sequence
  Description of Artificial Sequence: Synthetic oligonucleotide
uaaaugcuucacgacauca

SEQ ID NO: 1917745 - RNA, 19 nt, Artificial Sequence
  Description of Artificial Sequence: Synthetic oligonucleotide
uuuggcuaagauacucugu

SEQ ID NO: 1917746 - RNA, 19 nt, Artificial Sequence
  Description of Artificial Sequence: Synthetic oligonucleotide
aaguguucaaguguucaca

SEQ ID NO: 1917747 - RNA, 19 nt, Artificial Sequence
  Description of Artificial Sequence: Synthetic oligonucleotide
aguuuugcuuaaaugcuuc

SEQ ID NO: 1917748 - RNA, 19 nt, Artificial Sequence
  Description of Artificial Sequence: Synthetic oligonucleotide
aucuccuucauaaauagaa

SEQ ID NO: 1917749 - RNA, 19 nt, Artificial Sequence
  Description of Artificial Sequence: Synthetic oligonucleotide
agcuauucaucaucuuuag

SEQ ID NO: 1917750 - RNA, 19 nt, Artificial Sequence
  Description of Artificial Sequence: Synthetic oligonucleotide
aauagaacguaaagcuucu

SEQ ID NO: 1917751 - RNA, 19 nt, Artificial Sequence
  Description of Artificial Sequence: Synthetic oligonucleotide
ugcuuaucagucaugucau

SEQ ID NO: 1917752 - RNA, 19 nt, Artificial Sequence
  Description of Artificial Sequence: Synthetic oligonucleotide
ucaccuauccuguauugaa

SEQ ID NO: 1917753 - RNA, 19 nt, Artificial Sequence
  Description of Artificial Sequence: Synthetic oligonucleotide
gaccgcgaagaacaggcgg

SEQ ID NO: 1917754 - RNA, 19 nt, Artificial Sequence
  Description of Artificial Sequence: Synthetic oligonucleotide
acucgaacaauguguaggu

SEQ ID NO: 1917755 - RNA, 19 nt, Artificial Sequence
  Description of Artificial Sequence: Synthetic oligonucleotide
aauagacucugagaaaaua

SEQ ID NO: 1917756 - RNA, 19 nt, Artificial Sequence
  Description of Artificial Sequence: Synthetic oligonucleotide
guuuggcuaagauacucug

SEQ ID NO: 1917757 - RNA, 19 nt, Artificial Sequence
  Description of Artificial Sequence: Synthetic oligonucleotide
aacuagcauuagucuuugc

SEQ ID NO: 1917758 - RNA, 19 nt, Artificial Sequence
  Description of Artificial Sequence: Synthetic oligonucleotide
ucgcgcagggcgcacaacg

SEQ ID NO: 1917759 - RNA, 19 nt, Artificial Sequence
  Description of Artificial Sequence: Synthetic oligonucleotide
uuuaucugccagcuugcgu

SEQ ID NO: 1917760 - RNA, 19 nt, Artificial Sequence
  Description of Artificial Sequence: Synthetic oligonucleotide
uuucaaagauacucucacu

SEQ ID NO: 1917761 - RNA, 19 nt, Artificial Sequence
  Description of Artificial Sequence: Synthetic oligonucleotide
ugaucuguuuuaucugcca

SEQ ID NO: 1917762 - RNA, 19 nt, Artificial Sequence
  Description of Artificial Sequence: Synthetic oligonucleotide
auugcuuaucagucauguc

SEQ ID NO: 1917763 - RNA, 19 nt, Artificial Sequence
  Description of Artificial Sequence: Synthetic oligonucleotide
agaauucccgggauggugg

SEQ ID NO: 1917764 - RNA, 19 nt, Artificial Sequence
  Description of Artificial Sequence: Synthetic oligonucleotide
agggaguucuccuuuguga

SEQ ID NO: 1917765 - RNA, 19 nt, Artificial Sequence
  Description of Artificial Sequence: Synthetic oligonucleotide
cuuaucagucaugucauuc

SEQ ID NO: 1917766 - RNA, 19 nt, Artificial Sequence
  Description of Artificial Sequence: Synthetic oligonucleotide
cuacacaaacagaaccuug

SEQ ID NO: 1917767 - RNA, 19 nt, Artificial Sequence
  Description of Artificial Sequence: Synthetic oligonucleotide
guucauagauaugacagga

SEQ ID NO: 1917768 - RNA, 19 nt, Artificial Sequence
  Description of Artificial Sequence: Synthetic oligonucleotide
ugacacuggucaaaguuau

SEQ ID NO: 1917769 - RNA, 19 nt, Artificial Sequence
  Description of Artificial Sequence: Synthetic oligonucleotide
uagcauuagucuuugcaau

SEQ ID NO: 1917770 - RNA, 19 nt, Artificial Sequence
  Description of Artificial Sequence: Synthetic oligonucleotide
ugcuuaaaugcuucacgac

SEQ ID NO: 1917771 - RNA, 19 nt, Artificial Sequence
  Description of Artificial Sequence: Synthetic oligonucleotide
ucaaaguuauugucuuuaa

SEQ ID NO: 1917772 - RNA, 19 nt, Artificial Sequence
  Description of Artificial Sequence: Synthetic oligonucleotide
gaaaguugcucuuucuugu

SEQ ID NO: 1917773 - RNA, 19 nt, Artificial Sequence
  Description of Artificial Sequence: Synthetic oligonucleotide
agcguucauagauaugaca

SEQ ID NO: 1917774 - RNA, 19 nt, Artificial Sequence
  Description of Artificial Sequence: Synthetic oligonucleotide
gcguucauagauaugacag

SEQ ID NO: 1917775 - RNA, 19 nt, Artificial Sequence
  Description of Artificial Sequence: Synthetic oligonucleotide
guuucaacagagaugaugu

SEQ ID NO: 1917776 - RNA, 19 nt, Artificial Sequence
  Description of Artificial Sequence: Synthetic oligonucleotide
augauguuggcuaccggcg

SEQ ID NO: 1917777 - RNA, 19 nt, Artificial Sequence
  Description of Artificial Sequence: Synthetic oligonucleotide
ugggcugcuuuucaaagau

SEQ ID NO: 1917778 - RNA, 19 nt, Artificial Sequence
  Description of Artificial Sequence: Synthetic oligonucleotide
aaauauacugggagcauua

SEQ ID NO: 1917779 - RNA, 19 nt, Artificial Sequence
  Description of Artificial Sequence: Synthetic oligonucleotide
auuggcauuuaacuagcau

SEQ ID NO: 1917780 - RNA, 19 nt, Artificial Sequence
  Description of Artificial Sequence: Synthetic oligonucleotide
cuauccuguauugaaauga

SEQ ID NO: 1917781 - RNA, 19 nt, Artificial Sequence
  Description of Artificial Sequence: Synthetic oligonucleotide
ucaaguguucacagagggu

SEQ ID NO: 1917782 - RNA, 19 nt, Artificial Sequence
  Description of Artificial Sequence: Synthetic oligonucleotide
aguuccagccucgagggag

SEQ ID NO: 1917783 - RNA, 19 nt, Artificial Sequence
  Description of Artificial Sequence: Synthetic oligonucleotide
cacgacaucaacccaguuc

SEQ ID NO: 1917784 - RNA, 19 nt, Artificial Sequence
  Description of Artificial Sequence: Synthetic oligonucleotide
ucaucuuuagagccaguuu

SEQ ID NO: 1917785 - RNA, 19 nt, Artificial Sequence
  Description of Artificial Sequence: Synthetic oligonucleotide
acuuugacacuggucaaag

SEQ ID NO: 1917786 - RNA, 19 nt, Artificial Sequence
  Description of Artificial Sequence: Synthetic oligonucleotide
ugggagcauuaucagacgu

SEQ ID NO: 1917787 - RNA, 19 nt, Artificial Sequence
  Description of Artificial Sequence: Synthetic oligonucleotide
uuaaaugcuucacgacauc

SEQ ID NO: 1917788 - RNA, 19 nt, Artificial Sequence
  Description of Artificial Sequence: Synthetic oligonucleotide
uggggauaugucucugucc

SEQ ID NO: 1917789 - RNA, 19 nt, Artificial Sequence
  Description of Artificial Sequence: Synthetic oligonucleotide
cuuuauugcuuaucaguca

SEQ ID NO: 1917790 - RNA, 19 nt, Artificial Sequence
  Description of Artificial Sequence: Synthetic oligonucleotide
cuaagauacucuguuucac

SEQ ID NO: 1917791 - RNA, 19 nt, Artificial Sequence
  Description of Artificial Sequence: Synthetic oligonucleotide
aaagaccacccaguaacca

SEQ ID NO: 1917792 - RNA, 19 nt, Artificial Sequence
  Description of Artificial Sequence: Synthetic oligonucleotide
gcuuaaaugcuucacgaca

SEQ ID NO: 1917793 - RNA, 19 nt, Artificial Sequence
  Description of Artificial Sequence: Synthetic oligonucleotide
aagaaaccacuaugauuca

SEQ ID NO: 1917794 - RNA, 19 nt, Artificial Sequence
  Description of Artificial Sequence: Synthetic oligonucleotide
gacaucaacccaguuccag

SEQ ID NO: 1917795 - RNA, 19 nt, Artificial Sequence
  Description of Artificial Sequence: Synthetic oligonucleotide
acaaaucaagaugacaaua

SEQ ID NO: 1917796 - RNA, 19 nt, Artificial Sequence
  Description of Artificial Sequence: Synthetic oligonucleotide
aucucuauuaggaaggcuu

SEQ ID NO: 1917797 - RNA, 19 nt, Artificial Sequence
  Description of Artificial Sequence: Synthetic oligonucleotide
agauaugacaggaggcguc

SEQ ID NO: 1917798 - RNA, 19 nt, Artificial Sequence
  Description of Artificial Sequence: Synthetic oligonucleotide
auagacucugagaaaauau

SEQ ID NO: 1917799 - RNA, 19 nt, Artificial Sequence
  Description of Artificial Sequence: Synthetic oligonucleotide
aagcguucauagauaugac

SEQ ID NO: 1917800 - RNA, 19 nt, Artificial Sequence
  Description of Artificial Sequence: Synthetic oligonucleotide
auuaucagacguuggcaau

SEQ ID NO: 1917801 - RNA, 19 nt, Artificial Sequence
  Description of Artificial Sequence: Synthetic oligonucleotide
agaugacaauaaaaccuac

SEQ ID NO: 1917802 - RNA, 19 nt, Artificial Sequence
  Description of Artificial Sequence: Synthetic oligonucleotide
ucuucaccuauccuguauu

SEQ ID NO: 1917803 - RNA, 19 nt, Artificial Sequence
  Description of Artificial Sequence: Synthetic oligonucleotide
uagaauucccgggauggug

SEQ ID NO: 1917804 - RNA, 19 nt, Artificial Sequence
  Description of Artificial Sequence: Synthetic oligonucleotide
cauggcggugccaagguuc

SEQ ID NO: 1917805 - RNA, 19 nt, Artificial Sequence
  Description of Artificial Sequence: Synthetic oligonucleotide
ucucuauuaggaaggcuuu

SEQ ID NO: 1917806 - RNA, 19 nt, Artificial Sequence
  Description of Artificial Sequence: Synthetic oligonucleotide
ugcguuucugagcuuugga

SEQ ID NO: 1917807 - RNA, 19 nt, Artificial Sequence
  Description of Artificial Sequence: Synthetic oligonucleotide
guuaaguaaagaaaccacu

SEQ ID NO: 1917808 - RNA, 19 nt, Artificial Sequence
  Description of Artificial Sequence: Synthetic oligonucleotide
uuucccauuauaagacauu

SEQ ID NO: 1917809 - RNA, 19 nt, Artificial Sequence
  Description of Artificial Sequence: Synthetic oligonucleotide
uucacgacaucaacccagu

SEQ ID NO: 1917810 - RNA, 19 nt, Artificial Sequence
  Description of Artificial Sequence: Synthetic oligonucleotide
agucaugucauuccauaua

SEQ ID NO: 1917811 - RNA, 19 nt, Artificial Sequence
  Description of Artificial Sequence: Synthetic oligonucleotide
uggcguagaauucccggga

SEQ ID NO: 1917812 - RNA, 19 nt, Artificial Sequence
  Description of Artificial Sequence: Synthetic oligonucleotide
uguuguccuuagcauacuc

SEQ ID NO: 1917813 - RNA, 19 nt, Artificial Sequence
  Description of Artificial Sequence: Synthetic oligonucleotide
guucaaguguucacagagg

SEQ ID NO: 1917814 - RNA, 19 nt, Artificial Sequence
  Description of Artificial Sequence: Synthetic oligonucleotide
aaagaauuauguacuugua

SEQ ID NO: 1917815 - RNA, 19 nt, Artificial Sequence
  Description of Artificial Sequence: Synthetic oligonucleotide
uacugggagcauuaucaga

SEQ ID NO: 1917816 - RNA, 19 nt, Artificial Sequence
  Description of Artificial Sequence: Synthetic oligonucleotide
uucccauuauaagacauuu

SEQ ID NO: 1917817 - RNA, 19 nt, Artificial Sequence
  Description of Artificial Sequence: Synthetic oligonucleotide
guucauuggcauuuaacua

SEQ ID NO: 1917818 - RNA, 19 nt, Artificial Sequence
  Description of Artificial Sequence: Synthetic oligonucleotide
auacucgaacaauguguag

SEQ ID NO: 1917819 - RNA, 19 nt, Artificial Sequence
  Description of Artificial Sequence: Synthetic oligonucleotide
ggacuuaauucccggaagc

SEQ ID NO: 1917820 - RNA, 19 nt, Artificial Sequence
  Description of Artificial Sequence: Synthetic oligonucleotide
ucaacccaguuccagccuc

SEQ ID NO: 1917821 - RNA, 19 nt, Artificial Sequence
  Description of Artificial Sequence: Synthetic oligonucleotide
auucccgggauggugguuc

SEQ ID NO: 1917822 - RNA, 19 nt, Artificial Sequence
  Description of Artificial Sequence: Synthetic oligonucleotide
augucauuccauauaauuu

SEQ ID NO: 1917823 - RNA, 19 nt, Artificial Sequence
  Description of Artificial Sequence: Synthetic oligonucleotide
cuucaccuauccuguauug

SEQ ID NO: 1917824 - RNA, 19 nt, Artificial Sequence
  Description of Artificial Sequence: Synthetic oligonucleotide
uaguuuggcuaagauacuc

SEQ ID NO: 1917825 - RNA, 19 nt, Artificial Sequence
  Description of Artificial Sequence: Synthetic oligonucleotide
aaagauacucucacuucau

SEQ ID NO: 1917826 - RNA, 19 nt, Artificial Sequence
  Description of Artificial Sequence: Synthetic oligonucleotide
ccaggaaaucucuauuagg

SEQ ID NO: 1917827 - RNA, 19 nt, Artificial Sequence
  Description of Artificial Sequence: Synthetic oligonucleotide
aauucccggaagcuuucau

SEQ ID NO: 1917828 - RNA, 19 nt, Artificial Sequence
  Description of Artificial Sequence: Synthetic oligonucleotide
uaacuagcauuagucuuug

SEQ ID NO: 1917829 - RNA, 19 nt, Artificial Sequence
  Description of Artificial Sequence: Synthetic oligonucleotide
cauacucgaacaaugugua

SEQ ID NO: 1917830 - RNA, 19 nt, Artificial Sequence
  Description of Artificial Sequence: Synthetic oligonucleotide
aauauacugggagcauuau

SEQ ID NO: 1917831 - RNA, 19 nt, Artificial Sequence
  Description of Artificial Sequence: Synthetic oligonucleotide
gaaggcuuugggaucacca

SEQ ID NO: 1917832 - RNA, 19 nt, Artificial Sequence
  Description of Artificial Sequence: Synthetic oligonucleotide
agaacaggcgggcggcggg

SEQ ID NO: 1917833 - RNA, 19 nt, Artificial Sequence
  Description of Artificial Sequence: Synthetic oligonucleotide
aucaccaucuucaccuauc

SEQ ID NO: 1917834 - RNA, 19 nt, Artificial Sequence
  Description of Artificial Sequence: Synthetic oligonucleotide
aagaacaggcgggcggcgg

SEQ ID NO: 1917835 - RNA, 19 nt, Artificial Sequence
  Description of Artificial Sequence: Synthetic oligonucleotide
accuacacaaacagaaccu

SEQ ID NO: 1917836 - RNA, 19 nt, Artificial Sequence
  Description of Artificial Sequence: Synthetic oligonucleotide
ucccauuauaagacauuuc

SEQ ID NO: 1917837 - RNA, 19 nt, Artificial Sequence
  Description of Artificial Sequence: Synthetic oligonucleotide
cagacguuggcaaucuuga

SEQ ID NO: 1917838 - RNA, 19 nt, Artificial Sequence
  Description of Artificial Sequence: Synthetic oligonucleotide
gaacguaaagcuucuaguu

SEQ ID NO: 1917839 - RNA, 19 nt, Artificial Sequence
  Description of Artificial Sequence: Synthetic oligonucleotide
uucaccuauccuguauuga

SEQ ID NO: 1917840 - RNA, 19 nt, Artificial Sequence
  Description of Artificial Sequence: Synthetic oligonucleotide
ucguuggcacccaucgcgc

SEQ ID NO: 1917841 - RNA, 19 nt, Artificial Sequence
  Description of Artificial Sequence: Synthetic oligonucleotide
guaagaagacauguugauc

SEQ ID NO: 1917842 - RNA, 19 nt, Artificial Sequence
  Description of Artificial Sequence: Synthetic oligonucleotide
ggggauaugucucugucca

SEQ ID NO: 1917843 - RNA, 19 nt, Artificial Sequence
  Description of Artificial Sequence: Synthetic oligonucleotide
cugggagcauuaucagacg

SEQ ID NO: 1917844 - RNA, 19 nt, Artificial Sequence
  Description of Artificial Sequence: Synthetic oligonucleotide
acuggacuuaauucccgga

SEQ ID NO: 1917845 - RNA, 19 nt, Artificial Sequence
  Description of Artificial Sequence: Synthetic oligonucleotide
uguccuuagcauacucgaa

SEQ ID NO: 1917846 - RNA, 19 nt, Artificial Sequence
  Description of Artificial Sequence: Synthetic oligonucleotide
cuuugugaucuguuuuauc

SEQ ID NO: 1917847 - RNA, 19 nt, Artificial Sequence
  Description of Artificial Sequence: Synthetic oligonucleotide
caaguguucacagagggua

SEQ ID NO: 1917848 - RNA, 19 nt, Artificial Sequence
  Description of Artificial Sequence: Synthetic oligonucleotide
gagggaguucuccuuugug

SEQ ID NO: 1917849 - RNA, 19 nt, Artificial Sequence
  Description of Artificial Sequence: Synthetic oligonucleotide
ggagcauuaucagacguug

SEQ ID NO: 1917850 - RNA, 19 nt, Artificial Sequence
  Description of Artificial Sequence: Synthetic oligonucleotide
gagcauuaucagacguugg

SEQ ID NO: 1917851 - RNA, 19 nt, Artificial Sequence
  Description of Artificial Sequence: Synthetic oligonucleotide
acguuugcgaccgcgaaga

SEQ ID NO: 1917852 - RNA, 19 nt, Artificial Sequence
  Description of Artificial Sequence: Synthetic oligonucleotide
uaucagacguuggcaaucu

SEQ ID NO: 1917853 - RNA, 19 nt, Artificial Sequence
  Description of Artificial Sequence: Synthetic oligonucleotide
accgcgaagaacaggcggg

SEQ ID NO: 1917854 - RNA, 19 nt, Artificial Sequence
  Description of Artificial Sequence: Synthetic oligonucleotide
gagcuauucaucaucuuua

SEQ ID NO: 1917855 - RNA, 19 nt, Artificial Sequence
  Description of Artificial Sequence: Synthetic oligonucleotide
cacaacguuugcgaccgcg

SEQ ID NO: 1917856 - RNA, 19 nt, Artificial Sequence
  Description of Artificial Sequence: Synthetic oligonucleotide
cuuugcaaucuaagaacca

SEQ ID NO: 1917857 - RNA, 19 nt, Artificial Sequence
  Description of Artificial Sequence: Synthetic oligonucleotide
aggcacagcugccaccauc

SEQ ID NO: 1917858 - RNA, 19 nt, Artificial Sequence
  Description of Artificial Sequence: Synthetic oligonucleotide
uugcguuucugagcuuugg

SEQ ID NO: 1917859 - RNA, 19 nt, Artificial Sequence
  Description of Artificial Sequence: Synthetic oligonucleotide
gaacugcucuuuguugucc

SEQ ID NO: 1917860 - RNA, 19 nt, Artificial Sequence
  Description of Artificial Sequence: Synthetic oligonucleotide
caugucauuccauauaauu

SEQ ID NO: 1917861 - RNA, 19 nt, Artificial Sequence
  Description of Artificial Sequence: Synthetic oligonucleotide
cuuccuguaguuuggcuaa

SEQ ID NO: 1917862 - RNA, 19 nt, Artificial Sequence
  Description of Artificial Sequence: Synthetic oligonucleotide
cccaguuccagccucgagg

SEQ ID NO: 1917863 - RNA, 19 nt, Artificial Sequence
  Description of Artificial Sequence: Synthetic oligonucleotide
gucaaaguuauugucuuua

SEQ ID NO: 1917864 - RNA, 19 nt, Artificial Sequence
  Description of Artificial Sequence: Synthetic oligonucleotide
cuggucaaaguuauugucu

SEQ ID NO: 1917865 - RNA, 19 nt, Artificial Sequence
  Description of Artificial Sequence: Synthetic oligonucleotide
guuggcacccaucgcgcag

SEQ ID NO: 1917866 - RNA, 19 nt, Artificial Sequence
  Description of Artificial Sequence: Synthetic oligonucleotide
aaaugaaacuggacuuaau

SEQ ID NO: 1917867 - RNA, 19 nt, Artificial Sequence
  Description of Artificial Sequence: Synthetic oligonucleotide
guaaagaaaccacuaugau

SEQ ID NO: 1917868 - RNA, 19 nt, Artificial Sequence
  Description of Artificial Sequence: Synthetic oligonucleotide
uugggaucaccaucuucac

SEQ ID NO: 1917869 - RNA, 19 nt, Artificial Sequence
  Description of Artificial Sequence: Synthetic oligonucleotide
guguaggucauggcggugc

SEQ ID NO: 1917870 - RNA, 19 nt, Artificial Sequence
  Description of Artificial Sequence: Synthetic oligonucleotide
caacccaguuccagccucg

SEQ ID NO: 1917871 - RNA, 19 nt, Artificial Sequence
  Description of Artificial Sequence: Synthetic oligonucleotide
ugccaagguucacuucuac

SEQ ID NO: 1917872 - RNA, 19 nt, Artificial Sequence
  Description of Artificial Sequence: Synthetic oligonucleotide
gcgaagaacaggcgggcgg

SEQ ID NO: 1917873 - RNA, 19 nt, Artificial Sequence
  Description of Artificial Sequence: Synthetic oligonucleotide
caucuuuagagccaguuuu

SEQ ID NO: 1917874 - RNA, 19 nt, Artificial Sequence
  Description of Artificial Sequence: Synthetic oligonucleotide
cuguaguuuggcuaagaua

SEQ ID NO: 1917875 - RNA, 19 nt, Artificial Sequence
  Description of Artificial Sequence: Synthetic oligonucleotide
cuggggauaugucucuguc

SEQ ID NO: 1917876 - RNA, 19 nt, Artificial Sequence
  Description of Artificial Sequence: Synthetic oligonucleotide
ugaggagaugguguuguua

SEQ ID NO: 1917877 - RNA, 19 nt, Artificial Sequence
  Description of Artificial Sequence: Synthetic oligonucleotide
cuugcguuucugagcuuug

SEQ ID NO: 1917878 - RNA, 19 nt, Artificial Sequence
  Description of Artificial Sequence: Synthetic oligonucleotide
auaugucucuguccaggaa

SEQ ID NO: 1917879 - RNA, 19 nt, Artificial Sequence
  Description of Artificial Sequence: Synthetic oligonucleotide
aucaacccaguuccagccu

SEQ ID NO: 1917880 - RNA, 19 nt, Artificial Sequence
  Description of Artificial Sequence: Synthetic oligonucleotide
cucuauuaggaaggcuuug

SEQ ID NO: 1917881 - RNA, 19 nt, Artificial Sequence
  Description of Artificial Sequence: Synthetic oligonucleotide
gaagaacaggcgggcggcg

SEQ ID NO: 1917882 - RNA, 19 nt, Artificial Sequence
  Description of Artificial Sequence: Synthetic oligonucleotide
cuggacuuaauucccggaa

SEQ ID NO: 1917883 - RNA, 19 nt, Artificial Sequence
  Description of Artificial Sequence: Synthetic oligonucleotide
ugcgaccgcgaagaacagg

SEQ ID NO: 1917884 - RNA, 19 nt, Artificial Sequence
  Description of Artificial Sequence: Synthetic oligonucleotide
agaguucauuggcauuuaa

SEQ ID NO: 1917885 - RNA, 19 nt, Artificial Sequence
  Description of Artificial Sequence: Synthetic oligonucleotide
cccauuauaagacauuucu

SEQ ID NO: 1917886 - RNA, 19 nt, Artificial Sequence
  Description of Artificial Sequence: Synthetic oligonucleotide
uuucacagcugaggagaug

SEQ ID NO: 1917887 - RNA, 19 nt, Artificial Sequence
  Description of Artificial Sequence: Synthetic oligonucleotide
gguaacagaggcacagcug

SEQ ID NO: 1917888 - RNA, 19 nt, Artificial Sequence
  Description of Artificial Sequence: Synthetic oligonucleotide
gauaugacaggaggcgucu

SEQ ID NO: 1917889 - RNA, 19 nt, Artificial Sequence
  Description of Artificial Sequence: Synthetic oligonucleotide
uggcuaagauacucuguuu

SEQ ID NO: 1917890 - RNA, 19 nt, Artificial Sequence
  Description of Artificial Sequence: Synthetic oligonucleotide
gcgaccgcgaagaacaggc

SEQ ID NO: 1917891 - RNA, 19 nt, Artificial Sequence
  Description of Artificial Sequence: Synthetic oligonucleotide
ggucauggcggugccaagg

SEQ ID NO: 1917892 - RNA, 19 nt, Artificial Sequence
  Description of Artificial Sequence: Synthetic oligonucleotide
agaccacccaguaaccaga

SEQ ID NO: 1917893 - RNA, 19 nt, Artificial Sequence
  Description of Artificial Sequence: Synthetic oligonucleotide
guuugcgaccgcgaagaac

SEQ ID NO: 1917894 - RNA, 19 nt, Artificial Sequence
  Description of Artificial Sequence: Synthetic oligonucleotide
uugcgaccgcgaagaacag

SEQ ID NO: 1917895 - RNA, 19 nt, Artificial Sequence
  Description of Artificial Sequence: Synthetic oligonucleotide
uaauucccggaagcuuuca

SEQ ID NO: 1917896 - RNA, 19 nt, Artificial Sequence
  Description of Artificial Sequence: Synthetic oligonucleotide
cuuuagagccaguuuugcu

SEQ ID NO: 1917897 - RNA, 19 nt, Artificial Sequence
  Description of Artificial Sequence: Synthetic oligonucleotide
aacaggcgggcggcgggcg

SEQ ID NO: 1917898 - RNA, 19 nt, Artificial Sequence
  Description of Artificial Sequence: Synthetic oligonucleotide
uggcuaccggcguuggcgu

SEQ ID NO: 1917899 - RNA, 19 nt, Artificial Sequence
  Description of Artificial Sequence: Synthetic oligonucleotide
gauggugguucuccaugaa

SEQ ID NO: 1917900 - RNA, 19 nt, Artificial Sequence
  Description of Artificial Sequence: Synthetic oligonucleotide
caaucuugaugaaaguguu

SEQ ID NO: 1917901 - RNA, 19 nt, Artificial Sequence
  Description of Artificial Sequence: Synthetic oligonucleotide
ggcauuuaacuagcauuag

SEQ ID NO: 1917902 - RNA, 19 nt, Artificial Sequence
  Description of Artificial Sequence: Synthetic oligonucleotide
ccuauccuguauugaaaug

SEQ ID NO: 1917903 - RNA, 19 nt, Artificial Sequence
  Description of Artificial Sequence: Synthetic oligonucleotide
caucuccuucauaaauaga

SEQ ID NO: 1917904 - RNA, 19 nt, Artificial Sequence
  Description of Artificial Sequence: Synthetic oligonucleotide
acaacguuugcgaccgcga

SEQ ID NO: 1917905 - RNA, 19 nt, Artificial Sequence
  Description of Artificial Sequence: Synthetic oligonucleotide
ggcguuggcguagaauucc

SEQ ID NO: 1917906 - RNA, 19 nt, Artificial Sequence
  Description of Artificial Sequence: Synthetic oligonucleotide
gcauacucgaacaaugugu

SEQ ID NO: 1917907 - RNA, 19 nt, Artificial Sequence
  Description of Artificial Sequence: Synthetic oligonucleotide
cccgagauuuguacaauuc

SEQ ID NO: 1917908 - RNA, 19 nt, Artificial Sequence
  Description of Artificial Sequence: Synthetic oligonucleotide
agacguuggcaaucuugau

SEQ ID NO: 1917909 - RNA, 19 nt, Artificial Sequence
  Description of Artificial Sequence: Synthetic oligonucleotide
cacccaucgcgcagggcgc

SEQ ID NO: 1917910 - RNA, 19 nt, Artificial Sequence
  Description of Artificial Sequence: Synthetic oligonucleotide
uggcacccaucgcgcaggg

SEQ ID NO: 1917911 - RNA, 19 nt, Artificial Sequence
  Description of Artificial Sequence: Synthetic oligonucleotide
ccacccaguaaccagaaaa

SEQ ID NO: 1917912 - RNA, 19 nt, Artificial Sequence
  Description of Artificial Sequence: Synthetic oligonucleotide
acagaggguaacagaggca

SEQ ID NO: 1917913 - RNA, 19 nt, Artificial Sequence
  Description of Artificial Sequence: Synthetic oligonucleotide
ggagaugguguuguuaaaa

SEQ ID NO: 1917914 - RNA, 19 nt, Artificial Sequence
  Description of Artificial Sequence: Synthetic oligonucleotide
gcauuaucagacguuggca

SEQ ID NO: 1917915 - RNA, 19 nt, Artificial Sequence
  Description of Artificial Sequence: Synthetic oligonucleotide
caccuauccuguauugaaa

SEQ ID NO: 1917916 - RNA, 19 nt, Artificial Sequence
  Description of Artificial Sequence: Synthetic oligonucleotide
cauuggcauuuaacuagca

SEQ ID NO: 1917917 - RNA, 19 nt, Artificial Sequence
  Description of Artificial Sequence: Synthetic oligonucleotide
uuccuguaguuuggcuaag

SEQ ID NO: 1917918 - RNA, 19 nt, Artificial Sequence
  Description of Artificial Sequence: Synthetic oligonucleotide
cagcuugcguuucugagcu

SEQ ID NO: 1917919 - RNA, 19 nt, Artificial Sequence
  Description of Artificial Sequence: Synthetic oligonucleotide
gcauuuaacuagcauuagu

SEQ ID NO: 1917920 - RNA, 19 nt, Artificial Sequence
  Description of Artificial Sequence: Synthetic oligonucleotide
cugguccucguuggcaccc

SEQ ID NO: 1917921 - RNA, 19 nt, Artificial Sequence
  Description of Artificial Sequence: Synthetic oligonucleotide
cgcacaacguuugcgaccg

SEQ ID NO: 1917922 - RNA, 19 nt, Artificial Sequence
  Description of Artificial Sequence: Synthetic oligonucleotide
cuuagcauacucgaacaau

SEQ ID NO: 1917923 - RNA, 19 nt, Artificial Sequence
  Description of Artificial Sequence: Synthetic oligonucleotide
ccgagauuuguacaauuca

SEQ ID NO: 1917924 - RNA, 19 nt, Artificial Sequence
  Description of Artificial Sequence: Synthetic oligonucleotide
uagagccaguuuugcuuaa

SEQ ID NO: 1917925 - RNA, 19 nt, Artificial Sequence
  Description of Artificial Sequence: Synthetic oligonucleotide
ucauggcggugccaagguu

SEQ ID NO: 1917926 - RNA, 19 nt, Artificial Sequence
  Description of Artificial Sequence: Synthetic oligonucleotide
auaugacaggaggcgucug

SEQ ID NO: 1917927 - RNA, 19 nt, Artificial Sequence
  Description of Artificial Sequence: Synthetic oligonucleotide
ucccggaagcuuucaucuc

SEQ ID NO: 1917928 - RNA, 19 nt, Artificial Sequence
  Description of Artificial Sequence: Synthetic oligonucleotide
gggauaugucucuguccag

SEQ ID NO: 1917929 - RNA, 19 nt, Artificial Sequence
  Description of Artificial Sequence: Synthetic oligonucleotide
cauuagucuuugcaaucua

SEQ ID NO: 1917930 - RNA, 19 nt, Artificial Sequence
  Description of Artificial Sequence: Synthetic oligonucleotide
guuggcuaccggcguuggc

SEQ ID NO: 1917931 - RNA, 19 nt, Artificial Sequence
  Description of Artificial Sequence: Synthetic oligonucleotide
cucgaacaauguguagguc

SEQ ID NO: 1917932 - RNA, 19 nt, Artificial Sequence
  Description of Artificial Sequence: Synthetic oligonucleotide
ccaguuuugcuuaaaugcu

SEQ ID NO: 1917933 - RNA, 19 nt, Artificial Sequence
  Description of Artificial Sequence: Synthetic oligonucleotide
gcgcacaacguuugcgacc

SEQ ID NO: 1917934 - RNA, 19 nt, Artificial Sequence
  Description of Artificial Sequence: Synthetic oligonucleotide
ucacgacaucaacccaguu

SEQ ID NO: 1917935 - RNA, 19 nt, Artificial Sequence
  Description of Artificial Sequence: Synthetic oligonucleotide
caauaacuuugacacuggu

SEQ ID NO: 1917936 - RNA, 19 nt, Artificial Sequence
  Description of Artificial Sequence: Synthetic oligonucleotide
gggcgcacaacguuugcga

SEQ ID NO: 1917937 - RNA, 19 nt, Artificial Sequence
  Description of Artificial Sequence: Synthetic oligonucleotide
gcguagaauucccgggaug

SEQ ID NO: 1917938 - RNA, 19 nt, Artificial Sequence
  Description of Artificial Sequence: Synthetic oligonucleotide
gaggcgucuggggauaugu

SEQ ID NO: 1917939 - RNA, 19 nt, Artificial Sequence
  Description of Artificial Sequence: Synthetic oligonucleotide
auggcggugccaagguuca

SEQ ID NO: 1917940 - RNA, 19 nt, Artificial Sequence
  Description of Artificial Sequence: Synthetic oligonucleotide
ggcgcacaacguuugcgac

SEQ ID NO: 1917941 - RNA, 19 nt, Artificial Sequence
  Description of Artificial Sequence: Synthetic oligonucleotide
ggguaacagaggcacagcu

SEQ ID NO: 1917942 - RNA, 19 nt, Artificial Sequence
  Description of Artificial Sequence: Synthetic oligonucleotide
gaauucccgggaugguggu

SEQ ID NO: 1917943 - RNA, 19 nt, Artificial Sequence
  Description of Artificial Sequence: Synthetic oligonucleotide
caacguuugcgaccgcgaa

SEQ ID NO: 1917944 - RNA, 19 nt, Artificial Sequence
  Description of Artificial Sequence: Synthetic oligonucleotide
caguuuugcuuaaaugcuu

SEQ ID NO: 1917945 - RNA, 19 nt, Artificial Sequence
  Description of Artificial Sequence: Synthetic oligonucleotide
cguuucugagcuuuggaaa

SEQ ID NO: 1917946 - RNA, 19 nt, Artificial Sequence
  Description of Artificial Sequence: Synthetic oligonucleotide
aggcgucuggggauauguc

SEQ ID NO: 1917947 - RNA, 19 nt, Artificial Sequence
  Description of Artificial Sequence: Synthetic oligonucleotide
auagaacguaaagcuucua

SEQ ID NO: 1917948 - RNA, 19 nt, Artificial Sequence
  Description of Artificial Sequence: Synthetic oligonucleotide
gggaguucuccuuugugau

SEQ ID NO: 1917949 - RNA, 19 nt, Artificial Sequence
  Description of Artificial Sequence: Synthetic oligonucleotide
ggcgucuggggauaugucu

SEQ ID NO: 1917950 - RNA, 19 nt, Artificial Sequence
  Description of Artificial Sequence: Synthetic oligonucleotide
gucauggcggugccaaggu

SEQ ID NO: 1917951 - RNA, 19 nt, Artificial Sequence
  Description of Artificial Sequence: Synthetic oligonucleotide
ccuucauaaauagaacgua

SEQ ID NO: 1917952 - RNA, 19 nt, Artificial Sequence
  Description of Artificial Sequence: Synthetic oligonucleotide
caucugcagagcuauucau

SEQ ID NO: 1917953 - RNA, 19 nt, Artificial Sequence
  Description of Artificial Sequence: Synthetic oligonucleotide
guugaucugggcugcuuuu

SEQ ID NO: 1917954 - RNA, 19 nt, Artificial Sequence
  Description of Artificial Sequence: Synthetic oligonucleotide
aucgcgcagggcgcacaac

SEQ ID NO: 1917955 - RNA, 19 nt, Artificial Sequence
  Description of Artificial Sequence: Synthetic oligonucleotide
gcuaccggcguuggcguag

SEQ ID NO: 1917956 - RNA, 19 nt, Artificial Sequence
  Description of Artificial Sequence: Synthetic oligonucleotide
aucagacguuggcaaucuu

SEQ ID NO: 1917957 - RNA, 19 nt, Artificial Sequence
  Description of Artificial Sequence: Synthetic oligonucleotide
gaccacccaguaaccagaa

SEQ ID NO: 1917958 - RNA, 19 nt, Artificial Sequence
  Description of Artificial Sequence: Synthetic oligonucleotide
accggcguuggcguagaau

SEQ ID NO: 1917959 - RNA, 19 nt, Artificial Sequence
  Description of Artificial Sequence: Synthetic oligonucleotide
gcagagcuauucaucaucu

SEQ ID NO: 1917960 - RNA, 19 nt, Artificial Sequence
  Description of Artificial Sequence: Synthetic oligonucleotide
ggaaggcuuugggaucacc

SEQ ID NO: 1917961 - RNA, 19 nt, Artificial Sequence
  Description of Artificial Sequence: Synthetic oligonucleotide
cugccagcuugcguuucug

SEQ ID NO: 1917962 - RNA, 19 nt, Artificial Sequence
  Description of Artificial Sequence: Synthetic oligonucleotide
guagaauucccgggauggu

SEQ ID NO: 1917963 - RNA, 19 nt, Artificial Sequence
  Description of Artificial Sequence: Synthetic oligonucleotide
ugguccucguuggcaccca

SEQ ID NO: 1917964 - RNA, 19 nt, Artificial Sequence
  Description of Artificial Sequence: Synthetic oligonucleotide
cugcucuuuguuguccuua

SEQ ID NO: 1917965 - RNA, 19 nt, Artificial Sequence
  Description of Artificial Sequence: Synthetic oligonucleotide
gcguuggcguagaauuccc

SEQ ID NO: 1917966 - RNA, 19 nt, Artificial Sequence
  Description of Artificial Sequence: Synthetic oligonucleotide
ccuuagcauacucgaacaa

SEQ ID NO: 1917967 - RNA, 19 nt, Artificial Sequence
  Description of Artificial Sequence: Synthetic oligonucleotide
cguaaagcuucuaguucca

SEQ ID NO: 1917968 - RNA, 19 nt, Artificial Sequence
  Description of Artificial Sequence: Synthetic oligonucleotide
guaggucauggcggugcca

SEQ ID NO: 1917969 - RNA, 19 nt, Artificial Sequence
  Description of Artificial Sequence: Synthetic oligonucleotide
guuucacagcugaggagau

SEQ ID NO: 1917970 - RNA, 19 nt, Artificial Sequence
  Description of Artificial Sequence: Synthetic oligonucleotide
ccucguuggcacccaucgc

SEQ ID NO: 1917971 - RNA, 19 nt, Artificial Sequence
  Description of Artificial Sequence: Synthetic oligonucleotide
cucgagggaguucuccuuu

SEQ ID NO: 1917972 - RNA, 19 nt, Artificial Sequence
  Description of Artificial Sequence: Synthetic oligonucleotide
ggaucaccaucuucaccua

SEQ ID NO: 1917973 - RNA, 19 nt, Artificial Sequence
  Description of Artificial Sequence: Synthetic oligonucleotide
caucgcgcagggcgcacaa

SEQ ID NO: 1917974 - RNA, 19 nt, Artificial Sequence
  Description of Artificial Sequence: Synthetic oligonucleotide
ccggcguuggcguagaauu

SEQ ID NO: 1917975 - RNA, 19 nt, Artificial Sequence
  Description of Artificial Sequence: Synthetic oligonucleotide
acccaucgcgcagggcgca

SEQ ID NO: 1917976 - RNA, 19 nt, Artificial Sequence
  Description of Artificial Sequence: Synthetic oligonucleotide
ccgcgaagaacaggcgggc

SEQ ID NO: 1917977 - RNA, 19 nt, Artificial Sequence
  Description of Artificial Sequence: Synthetic oligonucleotide
ggcguagaauucccgggau

SEQ ID NO: 1917978 - RNA, 19 nt, Artificial Sequence
  Description of Artificial Sequence: Synthetic oligonucleotide
caguuccagccucgaggga

SEQ ID NO: 1917979 - RNA, 19 nt, Artificial Sequence
  Description of Artificial Sequence: Synthetic oligonucleotide
uaccggcguuggcguagaa

SEQ ID NO: 1917980 - RNA, 19 nt, Artificial Sequence
  Description of Artificial Sequence: Synthetic oligonucleotide
gugccaagguucacuucua

SEQ ID NO: 1917981 - RNA, 19 nt, Artificial Sequence
  Description of Artificial Sequence: Synthetic oligonucleotide
gacacuggucaaaguuauu

SEQ ID NO: 1917982 - RNA, 19 nt, Artificial Sequence
  Description of Artificial Sequence: Synthetic oligonucleotide
gcuugcguuucugagcuuu

SEQ ID NO: 1917983 - RNA, 19 nt, Artificial Sequence
  Description of Artificial Sequence: Synthetic oligonucleotide
cagccucgagggaguucuc

SEQ ID NO: 1917984 - RNA, 19 nt, Artificial Sequence
  Description of Artificial Sequence: Synthetic oligonucleotide
ccagccucgagggaguucu

SEQ ID NO: 1917985 - RNA, 19 nt, Artificial Sequence
  Description of Artificial Sequence: Synthetic oligonucleotide
cuaccggcguuggcguaga

SEQ ID NO: 1917986 - RNA, 19 nt, Artificial Sequence
  Description of Artificial Sequence: Synthetic oligonucleotide
uggcggugccaagguucac

SEQ ID NO: 1917987 - RNA, 19 nt, Artificial Sequence
  Description of Artificial Sequence: Synthetic oligonucleotide
ccacaauaacuuugacacu

SEQ ID NO: 1917988 - RNA, 19 nt, Artificial Sequence
  Description of Artificial Sequence: Synthetic oligonucleotide
ggaggcgucuggggauaug

SEQ ID NO: 1917989 - RNA, 19 nt, Artificial Sequence
  Description of Artificial Sequence: Synthetic oligonucleotide
gggagcauuaucagacguu

SEQ ID NO: 1917990 - RNA, 19 nt, Artificial Sequence
  Description of Artificial Sequence: Synthetic oligonucleotide
aggaggcgucuggggauau

SEQ ID NO: 1917991 - RNA, 19 nt, Artificial Sequence
  Description of Artificial Sequence: Synthetic oligonucleotide
cuguuuuaucugccagcuu

SEQ ID NO: 1917992 - RNA, 19 nt, Artificial Sequence
  Description of Artificial Sequence: Synthetic oligonucleotide
cggcguuggcguagaauuc

SEQ ID NO: 1917993 - RNA, 19 nt, Artificial Sequence
  Description of Artificial Sequence: Synthetic oligonucleotide
ccuacacaaacagaaccuu

SEQ ID NO: 1917994 - RNA, 19 nt, Artificial Sequence
  Description of Artificial Sequence: Synthetic oligonucleotide
ccgggauggugguucucca

SEQ ID NO: 1917995 - RNA, 19 nt, Artificial Sequence
  Description of Artificial Sequence: Synthetic oligonucleotide
ccggaagcuuucaucuccu

SEQ ID NO: 1917996 - RNA, 19 nt, Artificial Sequence
  Description of Artificial Sequence: Synthetic oligonucleotide
gcggugccaagguucacuu

SEQ ID NO: 1917997 - RNA, 19 nt, Artificial Sequence
  Description of Artificial Sequence: Synthetic oligonucleotide
gcacaacguuugcgaccgc

SEQ ID NO: 1917998 - RNA, 19 nt, Artificial Sequence
  Description of Artificial Sequence: Synthetic oligonucleotide
gggcugcuuuucaaagaua

SEQ ID NO: 1917999 - RNA, 19 nt, Artificial Sequence
  Description of Artificial Sequence: Synthetic oligonucleotide
ggcacccaucgcgcagggc

SEQ ID NO: 1918000 - RNA, 19 nt, Artificial Sequence
  Description of Artificial Sequence: Synthetic oligonucleotide
cguuggcacccaucgcgca

SEQ ID NO: 1918001 - RNA, 19 nt, Artificial Sequence
  Description of Artificial Sequence: Synthetic oligonucleotide
cgacaucaacccaguucca

SEQ ID NO: 1918002 - RNA, 19 nt, Artificial Sequence
  Description of Artificial Sequence: Synthetic oligonucleotide
ggcuaccggcguuggcgua

SEQ ID NO: 1918003 - RNA, 19 nt, Artificial Sequence
  Description of Artificial Sequence: Synthetic oligonucleotide
cgucuggggauaugucucu

SEQ ID NO: 1918004 - RNA, 19 nt, Artificial Sequence
  Description of Artificial Sequence: Synthetic oligonucleotide
ccccgagauuuguacaauu

SEQ ID NO: 1918005 - RNA, 19 nt, Artificial Sequence
  Description of Artificial Sequence: Synthetic oligonucleotide
gcgcagggcgcacaacguu

SEQ ID NO: 1918006 - RNA, 19 nt, Artificial Sequence
  Description of Artificial Sequence: Synthetic oligonucleotide
gguccucguuggcacccau

SEQ ID NO: 1918007 - RNA, 19 nt, Artificial Sequence
  Description of Artificial Sequence: Synthetic oligonucleotide
ccucgagggaguucuccuu

SEQ ID NO: 1918008 - RNA, 19 nt, Artificial Sequence
  Description of Artificial Sequence: Synthetic oligonucleotide
cccaucgcgcagggcgcac

SEQ ID NO: 1918009 - RNA, 19 nt, Artificial Sequence
  Description of Artificial Sequence: Synthetic oligonucleotide
cgagggaguucuccuuugu

SEQ ID NO: 1918010 - RNA, 19 nt, Artificial Sequence
  Description of Artificial Sequence: Synthetic oligonucleotide
cgcagggcgcacaacguuu

SEQ ID NO: 1918011 - RNA, 19 nt, Artificial Sequence
  Description of Artificial Sequence: Synthetic oligonucleotide
cguuugcgaccgcgaagaa

SEQ ID NO: 1918012 - RNA, 19 nt, Artificial Sequence
  Description of Artificial Sequence: Synthetic oligonucleotide
cgcgcagggcgcacaacgu

SEQ ID NO: 1918013 - RNA, 19 nt, Artificial Sequence
  Description of Artificial Sequence: Synthetic oligonucleotide
uagauaacaaaggugaugg

SEQ ID NO: 1918014 - RNA, 19 nt, Artificial Sequence
  Description of Artificial Sequence: Synthetic oligonucleotide
caggaaacaacccauaggg

SEQ ID NO: 1918015 - RNA, 19 nt, Artificial Sequence
  Description of Artificial Sequence: Synthetic oligonucleotide
guaacggugucucagaggg

SEQ ID NO: 1918016 - RNA, 19 nt, Artificial Sequence
  Description of Artificial Sequence: Synthetic oligonucleotide
aaugaagccacuggcaugg

SEQ ID NO: 1918017 - RNA, 19 nt, Artificial Sequence
  Description of Artificial Sequence: Synthetic oligonucleotide
cuggcauggacaaagaugc

SEQ ID NO: 1918018 - RNA, 19 nt, Artificial Sequence
  Description of Artificial Sequence: Synthetic oligonucleotide
uucuguaaaaguccucugg

SEQ ID NO: 1918019 - RNA, 19 nt, Artificial Sequence
  Description of Artificial Sequence: Synthetic oligonucleotide
cuaucuuuccacuugaguc

SEQ ID NO: 1918020 - RNA, 19 nt, Artificial Sequence
  Description of Artificial Sequence: Synthetic oligonucleotide
uuugacuacagcauuugca

SEQ ID NO: 1918021 - RNA, 19 nt, Artificial Sequence
  Description of Artificial Sequence: Synthetic oligonucleotide
aaugagugaggcuccuugg

SEQ ID NO: 1918022 - RNA, 19 nt, Artificial Sequence
  Description of Artificial Sequence: Synthetic oligonucleotide
uaucacgcaggaaacaacc

SEQ ID NO: 1918023 - RNA, 19 nt, Artificial Sequence
  Description of Artificial Sequence: Synthetic oligonucleotide
gauuaagucgagaaacccg

SEQ ID NO: 1918024 - RNA, 19 nt, Artificial Sequence
  Description of Artificial Sequence: Synthetic oligonucleotide
ucuggugaugaucguaacg

SEQ ID NO: 1918025 - RNA, 19 nt, Artificial Sequence
  Description of Artificial Sequence: Synthetic oligonucleotide
uucacuagugcccagcaac

SEQ ID NO: 1918026 - RNA, 19 nt, Artificial Sequence
  Description of Artificial Sequence: Synthetic oligonucleotide
aacccauaggguucccucc

SEQ ID NO: 1918027 - RNA, 19 nt, Artificial Sequence
  Description of Artificial Sequence: Synthetic oligonucleotide
agauagacaagucccgcac

SEQ ID NO: 1918028 - RNA, 19 nt, Artificial Sequence
  Description of Artificial Sequence: Synthetic oligonucleotide
auuaagucgagaaacccgg

SEQ ID NO: 1918029 - RNA, 19 nt, Artificial Sequence
  Description of Artificial Sequence: Synthetic oligonucleotide
gucaguguagauaacaaag

SEQ ID NO: 1918030 - RNA, 19 nt, Artificial Sequence
  Description of Artificial Sequence: Synthetic oligonucleotide
uaggugguaaagaugcucc

SEQ ID NO: 1918031 - RNA, 19 nt, Artificial Sequence
  Description of Artificial Sequence: Synthetic oligonucleotide
cacgaugucacaagaagcc

SEQ ID NO: 1918032 - RNA, 19 nt, Artificial Sequence
  Description of Artificial Sequence: Synthetic oligonucleotide
agaaauuuagucucuguaa

SEQ ID NO: 1918033 - RNA, 19 nt, Artificial Sequence
  Description of Artificial Sequence: Synthetic oligonucleotide
acacuguuaggauaucacg

SEQ ID NO: 1918034 - RNA, 19 nt, Artificial Sequence
  Description of Artificial Sequence: Synthetic oligonucleotide
gaaucgcugggccagagcc

SEQ ID NO: 1918035 - RNA, 19 nt, Artificial Sequence
  Description of Artificial Sequence: Synthetic oligonucleotide
cacuguuaggauaucacgc

SEQ ID NO: 1918036 - RNA, 19 nt, Artificial Sequence
  Description of Artificial Sequence: Synthetic oligonucleotide
ugcagauagacaagucccg

SEQ ID NO: 1918037 - RNA, 19 nt, Artificial Sequence
  Description of Artificial Sequence: Synthetic oligonucleotide
guacucgccacccacaucc

SEQ ID NO: 1918038 - RNA, 19 nt, Artificial Sequence
  Description of Artificial Sequence: Synthetic oligonucleotide
cuugaguccaccuggaauc

SEQ ID NO: 1918039 - RNA, 19 nt, Artificial Sequence
  Description of Artificial Sequence: Synthetic oligonucleotide
uagaaauuuagucucugua

SEQ ID NO: 1918040 - RNA, 19 nt, Artificial Sequence
  Description of Artificial Sequence: Synthetic oligonucleotide
accacgaugucacaagaag

SEQ ID NO: 1918041 - RNA, 19 nt, Artificial Sequence
  Description of Artificial Sequence: Synthetic oligonucleotide
uggagaagugaccgcagcg

SEQ ID NO: 1918042 - RNA, 19 nt, Artificial Sequence
  Description of Artificial Sequence: Synthetic oligonucleotide
aagucgagaaacccgggca

SEQ ID NO: 1918043 - RNA, 19 nt, Artificial Sequence
  Description of Artificial Sequence: Synthetic oligonucleotide
gaaugagugaggcuccuug

SEQ ID NO: 1918044 - RNA, 19 nt, Artificial Sequence
  Description of Artificial Sequence: Synthetic oligonucleotide
acuagugcccagcaacugg

SEQ ID NO: 1918045 - RNA, 19 nt, Artificial Sequence
  Description of Artificial Sequence: Synthetic oligonucleotide
uccaucgcacgccugaacc

SEQ ID NO: 1918046 - RNA, 19 nt, Artificial Sequence
  Description of Artificial Sequence: Synthetic oligonucleotide
ugccucaguaucuugguug

SEQ ID NO: 1918047 - RNA, 19 nt, Artificial Sequence
  Description of Artificial Sequence: Synthetic oligonucleotide
ucugaaccgagcaugcgac

SEQ ID NO: 1918048 - RNA, 19 nt, Artificial Sequence
  Description of Artificial Sequence: Synthetic oligonucleotide
acuguuaggauaucacgca

SEQ ID NO: 1918049 - RNA, 19 nt, Artificial Sequence
  Description of Artificial Sequence: Synthetic oligonucleotide
aguaucuugguuggguugg

SEQ ID NO: 1918050 - RNA, 19 nt, Artificial Sequence
  Description of Artificial Sequence: Synthetic oligonucleotide
uacacauuggacucgccac

SEQ ID NO: 1918051 - RNA, 19 nt, Artificial Sequence
  Description of Artificial Sequence: Synthetic oligonucleotide
uaagucgagaaacccgggc

SEQ ID NO: 1918052 - RNA, 19 nt, Artificial Sequence
  Description of Artificial Sequence: Synthetic oligonucleotide
agucgagaaacccgggcac

SEQ ID NO: 1918053 - RNA, 19 nt, Artificial Sequence
  Description of Artificial Sequence: Synthetic oligonucleotide
uucucguacaucuugucau

SEQ ID NO: 1918054 - RNA, 19 nt, Artificial Sequence
  Description of Artificial Sequence: Synthetic oligonucleotide
cagcucagauucuaggugg

SEQ ID NO: 1918055 - RNA, 19 nt, Artificial Sequence
  Description of Artificial Sequence: Synthetic oligonucleotide
uuaagucgagaaacccggg

SEQ ID NO: 1918056 - RNA, 19 nt, Artificial Sequence
  Description of Artificial Sequence: Synthetic oligonucleotide
uaguuucuguaaaaguccu

SEQ ID NO: 1918057 - RNA, 19 nt, Artificial Sequence
  Description of Artificial Sequence: Synthetic oligonucleotide
ugugcgucccgauucgcgg

SEQ ID NO: 1918058 - RNA, 19 nt, Artificial Sequence
  Description of Artificial Sequence: Synthetic oligonucleotide
aguccucuggugaugaucg

SEQ ID NO: 1918059 - RNA, 19 nt, Artificial Sequence
  Description of Artificial Sequence: Synthetic oligonucleotide
auagacaagucccgcacug

SEQ ID NO: 1918060 - RNA, 19 nt, Artificial Sequence
  Description of Artificial Sequence: Synthetic oligonucleotide
agaggguuguacucgccac

SEQ ID NO: 1918061 - RNA, 19 nt, Artificial Sequence
  Description of Artificial Sequence: Synthetic oligonucleotide
cuggguuuggagaagugac

SEQ ID NO: 1918062 - RNA, 19 nt, Artificial Sequence
  Description of Artificial Sequence: Synthetic oligonucleotide
acuaucuuuccacuugagu

SEQ ID NO: 1918063 - RNA, 19 nt, Artificial Sequence
  Description of Artificial Sequence: Synthetic oligonucleotide
cauggacaaagaugcagcc

SEQ ID NO: 1918064 - RNA, 19 nt, Artificial Sequence
  Description of Artificial Sequence: Synthetic oligonucleotide
augaucguaacggugucuc

SEQ ID NO: 1918065 - RNA, 19 nt, Artificial Sequence
  Description of Artificial Sequence: Synthetic oligonucleotide
guagauaacaaaggugaug

SEQ ID NO: 1918066 - RNA, 19 nt, Artificial Sequence
  Description of Artificial Sequence: Synthetic oligonucleotide
aaguccucuggugaugauc

SEQ ID NO: 1918067 - RNA, 19 nt, Artificial Sequence
  Description of Artificial Sequence: Synthetic oligonucleotide
ugcauaucgaggcuccccu

SEQ ID NO: 1918068 - RNA, 19 nt, Artificial Sequence
  Description of Artificial Sequence: Synthetic oligonucleotide
gaaacccgggcacucagug

SEQ ID NO: 1918069 - RNA, 19 nt, Artificial Sequence
  Description of Artificial Sequence: Synthetic oligonucleotide
caacgcgcaggccagagcc

SEQ ID NO: 1918070 - RNA, 19 nt, Artificial Sequence
  Description of Artificial Sequence: Synthetic oligonucleotide
aaguccaucgcacgccuga

SEQ ID NO: 1918071 - RNA, 19 nt, Artificial Sequence
  Description of Artificial Sequence: Synthetic oligonucleotide
gaacucauaguuucuguaa

SEQ ID NO: 1918072 - RNA, 19 nt, Artificial Sequence
  Description of Artificial Sequence: Synthetic oligonucleotide
ugacuacagcauuugcaag

SEQ ID NO: 1918073 - RNA, 19 nt, Artificial Sequence
  Description of Artificial Sequence: Synthetic oligonucleotide
cuucccacugagaaauccc

SEQ ID NO: 1918074 - RNA, 19 nt, Artificial Sequence
  Description of Artificial Sequence: Synthetic oligonucleotide
ugaacccugccucaguauc

SEQ ID NO: 1918075 - RNA, 19 nt, Artificial Sequence
  Description of Artificial Sequence: Synthetic oligonucleotide
aagaugcuccuuccaagga

SEQ ID NO: 1918076 - RNA, 19 nt, Artificial Sequence
  Description of Artificial Sequence: Synthetic oligonucleotide
guuaggauaucacgcagga

SEQ ID NO: 1918077 - RNA, 19 nt, Artificial Sequence
  Description of Artificial Sequence: Synthetic oligonucleotide
uugugcgucccgauucgcg

SEQ ID NO: 1918078 - RNA, 19 nt, Artificial Sequence
  Description of Artificial Sequence: Synthetic oligonucleotide
accuucucgagugcggugc

SEQ ID NO: 1918079 - RNA, 19 nt, Artificial Sequence
  Description of Artificial Sequence: Synthetic oligonucleotide
aguucucguacaucuuguc

SEQ ID NO: 1918080 - RNA, 19 nt, Artificial Sequence
  Description of Artificial Sequence: Synthetic oligonucleotide
gcugcgaggccuuuuaggg

SEQ ID NO: 1918081 - RNA, 19 nt, Artificial Sequence
  Description of Artificial Sequence: Synthetic oligonucleotide
aggauaucacgcaggaaac

SEQ ID NO: 1918082 - RNA, 19 nt, Artificial Sequence
  Description of Artificial Sequence: Synthetic oligonucleotide
ggucagugcauaucgaggc

SEQ ID NO: 1918083 - RNA, 19 nt, Artificial Sequence
  Description of Artificial Sequence: Synthetic oligonucleotide
ucaucgcaguggaaggugc

SEQ ID NO: 1918084 - RNA, 19 nt, Artificial Sequence
  Description of Artificial Sequence: Synthetic oligonucleotide
uccuuggguacacauugga

SEQ ID NO: 1918085 - RNA, 19 nt, Artificial Sequence
  Description of Artificial Sequence: Synthetic oligonucleotide
ucguaacggugucucagag

SEQ ID NO: 1918086 - RNA, 19 nt, Artificial Sequence
  Description of Artificial Sequence: Synthetic oligonucleotide
aguagcuuaugcccaaaau

SEQ ID NO: 1918087 - RNA, 19 nt, Artificial Sequence
  Description of Artificial Sequence: Synthetic oligonucleotide
aggguuguacucgccaccc

SEQ ID NO: 1918088 - RNA, 19 nt, Artificial Sequence
  Description of Artificial Sequence: Synthetic oligonucleotide
ugaaccgagcaugcgacgc

SEQ ID NO: 1918089 - RNA, 19 nt, Artificial Sequence
  Description of Artificial Sequence: Synthetic oligonucleotide
aggguauccacaaugcugu

SEQ ID NO: 1918090 - RNA, 19 nt, Artificial Sequence
  Description of Artificial Sequence: Synthetic oligonucleotide
gauaucacgcaggaaacaa

SEQ ID NO: 1918091 - RNA, 19 nt, Artificial Sequence
  Description of Artificial Sequence: Synthetic oligonucleotide
cgaaacgggacucugaacc

SEQ ID NO: 1918092 - RNA, 19 nt, Artificial Sequence
  Description of Artificial Sequence: Synthetic oligonucleotide
aacccgggcacucagugua

SEQ ID NO: 1918093 - RNA, 19 nt, Artificial Sequence
  Description of Artificial Sequence: Synthetic oligonucleotide
gcaggaaacaacccauagg

SEQ ID NO: 1918094 - RNA, 19 nt, Artificial Sequence
  Description of Artificial Sequence: Synthetic oligonucleotide
cuuggguacacauuggacu

SEQ ID NO: 1918095 - RNA, 19 nt, Artificial Sequence
  Description of Artificial Sequence: Synthetic oligonucleotide
cuguuaggauaucacgcag

SEQ ID NO: 1918096 - RNA, 19 nt, Artificial Sequence
  Description of Artificial Sequence: Synthetic oligonucleotide
uugaguccaccuggaaucg

SEQ ID NO: 1918097 - RNA, 19 nt, Artificial Sequence
  Description of Artificial Sequence: Synthetic oligonucleotide
cucaguguaguggucagug

SEQ ID NO: 1918098 - RNA, 19 nt, Artificial Sequence
  Description of Artificial Sequence: Synthetic oligonucleotide
ugcauccuuguacucuggc

SEQ ID NO: 1918099 - RNA, 19 nt, Artificial Sequence
  Description of Artificial Sequence: Synthetic oligonucleotide
aacggugucucagaggguu

SEQ ID NO: 1918100 - RNA, 19 nt, Artificial Sequence
  Description of Artificial Sequence: Synthetic oligonucleotide
agagccucaucgcagugga

SEQ ID NO: 1918101 - RNA, 19 nt, Artificial Sequence
  Description of Artificial Sequence: Synthetic oligonucleotide
aucacgcaggaaacaaccc

SEQ ID NO: 1918102 - RNA, 19 nt, Artificial Sequence
  Description of Artificial Sequence: Synthetic oligonucleotide
cucaacuuggucugccaug

SEQ ID NO: 1918103 - RNA, 19 nt, Artificial Sequence
  Description of Artificial Sequence: Synthetic oligonucleotide
acucauaguuucuguaaaa

SEQ ID NO: 1918104 - RNA, 19 nt, Artificial Sequence
  Description of Artificial Sequence: Synthetic oligonucleotide
gagaaacccgggcacucag

SEQ ID NO: 1918105 - RNA, 19 nt, Artificial Sequence
  Description of Artificial Sequence: Synthetic oligonucleotide
ggguuuggagaagugaccg

SEQ ID NO: 1918106 - RNA, 19 nt, Artificial Sequence
  Description of Artificial Sequence: Synthetic oligonucleotide
agaggguauccacaaugcu

SEQ ID NO: 1918107 - RNA, 19 nt, Artificial Sequence
  Description of Artificial Sequence: Synthetic oligonucleotide
cagggcaccuucucgagug

SEQ ID NO: 1918108 - RNA, 19 nt, Artificial Sequence
  Description of Artificial Sequence: Synthetic oligonucleotide
aacucuucuugcaccaagu

SEQ ID NO: 1918109 - RNA, 19 nt, Artificial Sequence
  Description of Artificial Sequence: Synthetic oligonucleotide
caaguuccacuaucuuucc

SEQ ID NO: 1918110 - RNA, 19 nt, Artificial Sequence
  Description of Artificial Sequence: Synthetic oligonucleotide
guucucguacaucuuguca

SEQ ID NO: 1918111 - RNA, 19 nt, Artificial Sequence
  Description of Artificial Sequence: Synthetic oligonucleotide
uucagggcaccuucucgag

SEQ ID NO: 1918112 - RNA, 19 nt, Artificial Sequence
  Description of Artificial Sequence: Synthetic oligonucleotide
aaguucucguacaucuugu

SEQ ID NO: 1918113 - RNA, 19 nt, Artificial Sequence
  Description of Artificial Sequence: Synthetic oligonucleotide
gaugcuccuuccaaggaca

SEQ ID NO: 1918114 - RNA, 19 nt, Artificial Sequence
  Description of Artificial Sequence: Synthetic oligonucleotide
gaggguuguacucgccacc

SEQ ID NO: 1918115 - RNA, 19 nt, Artificial Sequence
  Description of Artificial Sequence: Synthetic oligonucleotide
ugaugaucguaacgguguc

SEQ ID NO: 1918116 - RNA, 19 nt, Artificial Sequence
  Description of Artificial Sequence: Synthetic oligonucleotide
ucgagugcggugcccacca

SEQ ID NO: 1918117 - RNA, 19 nt, Artificial Sequence
  Description of Artificial Sequence: Synthetic oligonucleotide
cagugcauaucgaggcucc

SEQ ID NO: 1918118 - RNA, 19 nt, Artificial Sequence
  Description of Artificial Sequence: Synthetic oligonucleotide
ggauuaagucgagaaaccc

SEQ ID NO: 1918119 - RNA, 19 nt, Artificial Sequence
  Description of Artificial Sequence: Synthetic oligonucleotide
cuaggugguaaagaugcuc

SEQ ID NO: 1918120 - RNA, 19 nt, Artificial Sequence
  Description of Artificial Sequence: Synthetic oligonucleotide
gcaggccagagccucaucg

SEQ ID NO: 1918121 - RNA, 19 nt, Artificial Sequence
  Description of Artificial Sequence: Synthetic oligonucleotide
ggugggauuaagucgagaa

SEQ ID NO: 1918122 - RNA, 19 nt, Artificial Sequence
  Description of Artificial Sequence: Synthetic oligonucleotide
aaacccgggcacucagugu

SEQ ID NO: 1918123 - RNA, 19 nt, Artificial Sequence
  Description of Artificial Sequence: Synthetic oligonucleotide
uuucggggucccgaguccg

SEQ ID NO: 1918124 - RNA, 19 nt, Artificial Sequence
  Description of Artificial Sequence: Synthetic oligonucleotide
ugcccaccaaugaagccac

SEQ ID NO: 1918125 - RNA, 19 nt, Artificial Sequence
  Description of Artificial Sequence: Synthetic oligonucleotide
aucguaacggugucucaga

SEQ ID NO: 1918126 - RNA, 19 nt, Artificial Sequence
  Description of Artificial Sequence: Synthetic oligonucleotide
ucagugcauaucgaggcuc

SEQ ID NO: 1918127 - RNA, 19 nt, Artificial Sequence
  Description of Artificial Sequence: Synthetic oligonucleotide
uggguacacauuggacucg

SEQ ID NO: 1918128 - RNA, 19 nt, Artificial Sequence
  Description of Artificial Sequence: Synthetic oligonucleotide
auaucgaggcuccccuucu

SEQ ID NO: 1918129 - RNA, 19 nt, Artificial Sequence
  Description of Artificial Sequence: Synthetic oligonucleotide
uuguacucgccacccacau

SEQ ID NO: 1918130 - RNA, 19 nt, Artificial Sequence
  Description of Artificial Sequence: Synthetic oligonucleotide
caacccauaggguucccuc

SEQ ID NO: 1918131 - RNA, 19 nt, Artificial Sequence
  Description of Artificial Sequence: Synthetic oligonucleotide
cugcgaggccuuuuagggg

SEQ ID NO: 1918132 - RNA, 19 nt, Artificial Sequence
  Description of Artificial Sequence: Synthetic oligonucleotide
gcacgggccauguucaggg

SEQ ID NO: 1918133 - RNA, 19 nt, Artificial Sequence
  Description of Artificial Sequence: Synthetic oligonucleotide
aacgggacucugaaccgag

SEQ ID NO: 1918134 - RNA, 19 nt, Artificial Sequence
  Description of Artificial Sequence: Synthetic oligonucleotide
ugcggugcccaccaaugaa

SEQ ID NO: 1918135 - RNA, 19 nt, Artificial Sequence
  Description of Artificial Sequence: Synthetic oligonucleotide
aaacgggacucugaaccga

SEQ ID NO: 1918136 - RNA, 19 nt, Artificial Sequence
  Description of Artificial Sequence: Synthetic oligonucleotide
gccucaguaucuugguugg

SEQ ID NO: 1918137 - RNA, 19 nt, Artificial Sequence
  Description of Artificial Sequence: Synthetic oligonucleotide
ccacgaugucacaagaagc

SEQ ID NO: 1918138 - RNA, 19 nt, Artificial Sequence
  Description of Artificial Sequence: Synthetic oligonucleotide
caccaaguccaucgcacgc

SEQ ID NO: 1918139 - RNA, 19 nt, Artificial Sequence
  Description of Artificial Sequence: Synthetic oligonucleotide
ucaucccgaaguccccgcc

SEQ ID NO: 1918140 - RNA, 19 nt, Artificial Sequence
  Description of Artificial Sequence: Synthetic oligonucleotide
aaggcgcgggcuggcagcc

SEQ ID NO: 1918141 - RNA, 19 nt, Artificial Sequence
  Description of Artificial Sequence: Synthetic oligonucleotide
cacgccugaacccugccuc

SEQ ID NO: 1918142 - RNA, 19 nt, Artificial Sequence
  Description of Artificial Sequence: Synthetic oligonucleotide
agugcauaucgaggcuccc

SEQ ID NO: 1918143 - RNA, 19 nt, Artificial Sequence
  Description of Artificial Sequence: Synthetic oligonucleotide
ucucguacaucuugucaua

SEQ ID NO: 1918144 - RNA, 19 nt, Artificial Sequence
  Description of Artificial Sequence: Synthetic oligonucleotide
aagucccgcacugcucaac

SEQ ID NO: 1918145 - RNA, 19 nt, Artificial Sequence
  Description of Artificial Sequence: Synthetic oligonucleotide
cuccuuggguacacauugg

SEQ ID NO: 1918146 - RNA, 19 nt, Artificial Sequence
  Description of Artificial Sequence: Synthetic oligonucleotide
cauuggacucgccacuguc

SEQ ID NO: 1918147 - RNA, 19 nt, Artificial Sequence
  Description of Artificial Sequence: Synthetic oligonucleotide
cugaaccgagcaugcgacg

SEQ ID NO: 1918148 - RNA, 19 nt, Artificial Sequence
  Description of Artificial Sequence: Synthetic oligonucleotide
agcauuugcaaggggugug

SEQ ID NO: 1918149 - RNA, 19 nt, Artificial Sequence
  Description of Artificial Sequence: Synthetic oligonucleotide
caucgcaguggaaggugcc

SEQ ID NO: 1918150 - RNA, 19 nt, Artificial Sequence
  Description of Artificial Sequence: Synthetic oligonucleotide
gcauggacaaagaugcagc

SEQ ID NO: 1918151 - RNA, 19 nt, Artificial Sequence
  Description of Artificial Sequence: Synthetic oligonucleotide
cuuggucugccauggcuuc

SEQ ID NO: 1918152 - RNA, 19 nt, Artificial Sequence
  Description of Artificial Sequence: Synthetic oligonucleotide
agucccgcacugcucaacu

SEQ ID NO: 1918153 - RNA, 19 nt, Artificial Sequence
  Description of Artificial Sequence: Synthetic oligonucleotide
cucugaaccgagcaugcga

SEQ ID NO: 1918154 - RNA, 19 nt, Artificial Sequence
  Description of Artificial Sequence: Synthetic oligonucleotide
cucguacaucuugucauag

SEQ ID NO: 1918155 - RNA, 19 nt, Artificial Sequence
  Description of Artificial Sequence: Synthetic oligonucleotide
uagacaagucccgcacugc

SEQ ID NO: 1918156 - RNA, 19 nt, Artificial Sequence
  Description of Artificial Sequence: Synthetic oligonucleotide
gggauuaagucgagaaacc

SEQ ID NO: 1918157 - RNA, 19 nt, Artificial Sequence
  Description of Artificial Sequence: Synthetic oligonucleotide
aggugguaaagaugcuccu

SEQ ID NO: 1918158 - RNA, 19 nt, Artificial Sequence
  Description of Artificial Sequence: Synthetic oligonucleotide
ugguuggguugguuccagg

SEQ ID NO: 1918159 - RNA, 19 nt, Artificial Sequence
  Description of Artificial Sequence: Synthetic oligonucleotide
aaccgagcaugcgacgcug

SEQ ID NO: 1918160 - RNA, 19 nt, Artificial Sequence
  Description of Artificial Sequence: Synthetic oligonucleotide
gccgacuuuggaaugagug

SEQ ID NO: 1918161 - RNA, 19 nt, Artificial Sequence
  Description of Artificial Sequence: Synthetic oligonucleotide
guagaaauuuagucucugu

SEQ ID NO: 1918162 - RNA, 19 nt, Artificial Sequence
  Description of Artificial Sequence: Synthetic oligonucleotide
guacucuggcaggaggcgg

SEQ ID NO: 1918163 - RNA, 19 nt, Artificial Sequence
  Description of Artificial Sequence: Synthetic oligonucleotide
ucagggcaccuucucgagu

SEQ ID NO: 1918164 - RNA, 19 nt, Artificial Sequence
  Description of Artificial Sequence: Synthetic oligonucleotide
agugcggugcccaccaaug

SEQ ID NO: 1918165 - RNA, 19 nt, Artificial Sequence
  Description of Artificial Sequence: Synthetic oligonucleotide
gguuguacucgccacccac

SEQ ID NO: 1918166 - RNA, 19 nt, Artificial Sequence
  Description of Artificial Sequence: Synthetic oligonucleotide
gguaaagaugcuccuucca

SEQ ID NO: 1918167 - RNA, 19 nt, Artificial Sequence
  Description of Artificial Sequence: Synthetic oligonucleotide
uucucgagugcggugccca

SEQ ID NO: 1918168 - RNA, 19 nt, Artificial Sequence
  Description of Artificial Sequence: Synthetic oligonucleotide
cagguaucccacugacuug

SEQ ID NO: 1918169 - RNA, 19 nt, Artificial Sequence
  Description of Artificial Sequence: Synthetic oligonucleotide
gauagacaagucccgcacu

SEQ ID NO: 1918170 - RNA, 19 nt, Artificial Sequence
  Description of Artificial Sequence: Synthetic oligonucleotide
gugggauuaagucgagaaa

SEQ ID NO: 1918171 - RNA, 19 nt, Artificial Sequence
  Description of Artificial Sequence: Synthetic oligonucleotide
acgaugucacaagaagcca

SEQ ID NO: 1918172 - RNA, 19 nt, Artificial Sequence
  Description of Artificial Sequence: Synthetic oligonucleotide
cucaucgcaguggaaggug

SEQ ID NO: 1918173 - RNA, 19 nt, Artificial Sequence
  Description of Artificial Sequence: Synthetic oligonucleotide
uucgcggcggugccaugag

SEQ ID NO: 1918174 - RNA, 19 nt, Artificial Sequence
  Description of Artificial Sequence: Synthetic oligonucleotide
gguauccacaaugcugucc

SEQ ID NO: 1918175 - RNA, 19 nt, Artificial Sequence
  Description of Artificial Sequence: Synthetic oligonucleotide
acucugaaccgagcaugcg

SEQ ID NO: 1918176 - RNA, 19 nt, Artificial Sequence
  Description of Artificial Sequence: Synthetic oligonucleotide
cacaaaguucucguacauc

SEQ ID NO: 1918177 - RNA, 19 nt, Artificial Sequence
  Description of Artificial Sequence: Synthetic oligonucleotide
gguuuggagaagugaccgc

SEQ ID NO: 1918178 - RNA, 19 nt, Artificial Sequence
  Description of Artificial Sequence: Synthetic oligonucleotide
aggaaacaacccauagggu

SEQ ID NO: 1918179 - RNA, 19 nt, Artificial Sequence
  Description of Artificial Sequence: Synthetic oligonucleotide
aguguaguggucagugcau

SEQ ID NO: 1918180 - RNA, 19 nt, Artificial Sequence
  Description of Artificial Sequence: Synthetic oligonucleotide
gccuggucaguguagauaa

SEQ ID NO: 1918181 - RNA, 19 nt, Artificial Sequence
  Description of Artificial Sequence: Synthetic oligonucleotide
cuucuaccaaggcgcgggc

SEQ ID NO: 1918182 - RNA, 19 nt, Artificial Sequence
  Description of Artificial Sequence: Synthetic oligonucleotide
cgaugucacaagaagccag

SEQ ID NO: 1918183 - RNA, 19 nt, Artificial Sequence
  Description of Artificial Sequence: Synthetic oligonucleotide
gacaaagaugcagccaggu

SEQ ID NO: 1918184 - RNA, 19 nt, Artificial Sequence
  Description of Artificial Sequence: Synthetic oligonucleotide
gugcauaucgaggcucccc

SEQ ID NO: 1918185 - RNA, 19 nt, Artificial Sequence
  Description of Artificial Sequence: Synthetic oligonucleotide
ccuuggguacacauuggac

SEQ ID NO: 1918186 - RNA, 19 nt, Artificial Sequence
  Description of Artificial Sequence: Synthetic oligonucleotide
cagaggguuguacucgcca

SEQ ID NO: 1918187 - RNA, 19 nt, Artificial Sequence
  Description of Artificial Sequence: Synthetic oligonucleotide
uaacggugucucagagggu

SEQ ID NO: 1918188 - RNA, 19 nt, Artificial Sequence
  Description of Artificial Sequence: Synthetic oligonucleotide
guaucccacugacuugguc

SEQ ID NO: 1918189 - RNA, 19 nt, Artificial Sequence
  Description of Artificial Sequence: Synthetic oligonucleotide
ucgagaaacccgggcacuc

SEQ ID NO: 1918190 - RNA, 19 nt, Artificial Sequence
  Description of Artificial Sequence: Synthetic oligonucleotide
gacgcuggguuuggagaag

SEQ ID NO: 1918191 - RNA, 19 nt, Artificial Sequence
  Description of Artificial Sequence: Synthetic oligonucleotide
gcagauagacaagucccgc

SEQ ID NO: 1918192 - RNA, 19 nt, Artificial Sequence
  Description of Artificial Sequence: Synthetic oligonucleotide
caugcgacgcuggguuugg

SEQ ID NO: 1918193 - RNA, 19 nt, Artificial Sequence
  Description of Artificial Sequence: Synthetic oligonucleotide
uucggggucccgaguccgc

SEQ ID NO: 1918194 - RNA, 19 nt, Artificial Sequence
  Description of Artificial Sequence: Synthetic oligonucleotide
ugaguccaccuggaaucgc

SEQ ID NO: 1918195 - RNA, 19 nt, Artificial Sequence
  Description of Artificial Sequence: Synthetic oligonucleotide
gcaagaguggcacgggcca

SEQ ID NO: 1918196 - RNA, 19 nt, Artificial Sequence
  Description of Artificial Sequence: Synthetic oligonucleotide
aggggcagccgacuuugga

SEQ ID NO: 1918197 - RNA, 19 nt, Artificial Sequence
  Description of Artificial Sequence: Synthetic oligonucleotide
gugucucagaggguuguac

SEQ ID NO: 1918198 - RNA, 19 nt, Artificial Sequence
  Description of Artificial Sequence: Synthetic oligonucleotide
gaggcggagcaacgcgcag

SEQ ID NO: 1918199 - RNA, 19 nt, Artificial Sequence
  Description of Artificial Sequence: Synthetic oligonucleotide
ucccauuguccacggcauc

SEQ ID NO: 1918200 - RNA, 19 nt, Artificial Sequence
  Description of Artificial Sequence: Synthetic oligonucleotide
ggcaagaguggcacgggcc

SEQ ID NO: 1918201 - RNA, 19 nt, Artificial Sequence
  Description of Artificial Sequence: Synthetic oligonucleotide
ggugcccaccaaugaagcc

SEQ ID NO: 1918202 - RNA, 19 nt, Artificial Sequence
  Description of Artificial Sequence: Synthetic oligonucleotide
gagcaugcgacgcuggguu

SEQ ID NO: 1918203 - RNA, 19 nt, Artificial Sequence
  Description of Artificial Sequence: Synthetic oligonucleotide
agcaacgcgcaggccagag

SEQ ID NO: 1918204 - RNA, 19 nt, Artificial Sequence
  Description of Artificial Sequence: Synthetic oligonucleotide
ggccucaucccgaaguccc

SEQ ID NO: 1918205 - RNA, 19 nt, Artificial Sequence
  Description of Artificial Sequence: Synthetic oligonucleotide
ugaggcuccuuggguacac

SEQ ID NO: 1918206 - RNA, 19 nt, Artificial Sequence
  Description of Artificial Sequence: Synthetic oligonucleotide
uacucgccacccacaucca

SEQ ID NO: 1918207 - RNA, 19 nt, Artificial Sequence
  Description of Artificial Sequence: Synthetic oligonucleotide
cccgcacugcucaacuugg

SEQ ID NO: 1918208 - RNA, 19 nt, Artificial Sequence
  Description of Artificial Sequence: Synthetic oligonucleotide
gugcgucccgauucgcggc

SEQ ID NO: 1918209 - RNA, 19 nt, Artificial Sequence
  Description of Artificial Sequence: Synthetic oligonucleotide
ggacaaagaugcagccagg

SEQ ID NO: 1918210 - RNA, 19 nt, Artificial Sequence
  Description of Artificial Sequence: Synthetic oligonucleotide
aucccgaaguccccgccau

SEQ ID NO: 1918211 - RNA, 19 nt, Artificial Sequence
  Description of Artificial Sequence: Synthetic oligonucleotide
auucgcggcggugccauga

SEQ ID NO: 1918212 - RNA, 19 nt, Artificial Sequence
  Description of Artificial Sequence: Synthetic oligonucleotide
cguaacggugucucagagg

SEQ ID NO: 1918213 - RNA, 19 nt, Artificial Sequence
  Description of Artificial Sequence: Synthetic oligonucleotide
ccuggaaucgcugggccag

SEQ ID NO: 1918214 - RNA, 19 nt, Artificial Sequence
  Description of Artificial Sequence: Synthetic oligonucleotide
uaucgaggcuccccuucuu

SEQ ID NO: 1918215 - RNA, 19 nt, Artificial Sequence
  Description of Artificial Sequence: Synthetic oligonucleotide
acgccugaacccugccuca

SEQ ID NO: 1918216 - RNA, 19 nt, Artificial Sequence
  Description of Artificial Sequence: Synthetic oligonucleotide
aucccauuguccacggcau

SEQ ID NO: 1918217 - RNA, 19 nt, Artificial Sequence
  Description of Artificial Sequence: Synthetic oligonucleotide
ggcgaaacgggacucugaa

SEQ ID NO: 1918218 - RNA, 19 nt, Artificial Sequence
  Description of Artificial Sequence: Synthetic oligonucleotide
ggagcaacgcgcaggccag

SEQ ID NO: 1918219 - RNA, 19 nt, Artificial Sequence
  Description of Artificial Sequence: Synthetic oligonucleotide
ggugccguugugcgucccg

SEQ ID NO: 1918220 - RNA, 19 nt, Artificial Sequence
  Description of Artificial Sequence: Synthetic oligonucleotide
ucccgaaguccccgccaug

SEQ ID NO: 1918221 - RNA, 19 nt, Artificial Sequence
  Description of Artificial Sequence: Synthetic oligonucleotide
gaugaucguaacggugucu

SEQ ID NO: 1918222 - RNA, 19 nt, Artificial Sequence
  Description of Artificial Sequence: Synthetic oligonucleotide
caaguccaucgcacgccug

SEQ ID NO: 1918223 - RNA, 19 nt, Artificial Sequence
  Description of Artificial Sequence: Synthetic oligonucleotide
ucucgagugcggugcccac

SEQ ID NO: 1918224 - RNA, 19 nt, Artificial Sequence
  Description of Artificial Sequence: Synthetic oligonucleotide
ccgcacaaucucugcaucc

SEQ ID NO: 1918225 - RNA, 19 nt, Artificial Sequence
  Description of Artificial Sequence: Synthetic oligonucleotide
ccgacuuuggaaugaguga

SEQ ID NO: 1918226 - RNA, 19 nt, Artificial Sequence
  Description of Artificial Sequence: Synthetic oligonucleotide
cacgcaggaaacaacccau

SEQ ID NO: 1918227 - RNA, 19 nt, Artificial Sequence
  Description of Artificial Sequence: Synthetic oligonucleotide
guggcacgggccauguuca

SEQ ID NO: 1918228 - RNA, 19 nt, Artificial Sequence
  Description of Artificial Sequence: Synthetic oligonucleotide
cucgagugcggugcccacc

SEQ ID NO: 1918229 - RNA, 19 nt, Artificial Sequence
  Description of Artificial Sequence: Synthetic oligonucleotide
cccgaaguccccgccaugg

SEQ ID NO: 1918230 - RNA, 19 nt, Artificial Sequence
  Description of Artificial Sequence: Synthetic oligonucleotide
gaaccgagcaugcgacgcu

SEQ ID NO: 1918231 - RNA, 19 nt, Artificial Sequence
  Description of Artificial Sequence: Synthetic oligonucleotide
gcgacgcuggguuuggaga

SEQ ID NO: 1918232 - RNA, 19 nt, Artificial Sequence
  Description of Artificial Sequence: Synthetic oligonucleotide
guugugcgucccgauucgc

SEQ ID NO: 1918233 - RNA, 19 nt, Artificial Sequence
  Description of Artificial Sequence: Synthetic oligonucleotide
ggguacacauuggacucgc

SEQ ID NO: 1918234 - RNA, 19 nt, Artificial Sequence
  Description of Artificial Sequence: Synthetic oligonucleotide
acucaguguaguggucagu

SEQ ID NO: 1918235 - RNA, 19 nt, Artificial Sequence
  Description of Artificial Sequence: Synthetic oligonucleotide
ggggcagccgacuuuggaa

SEQ ID NO: 1918236 - RNA, 19 nt, Artificial Sequence
  Description of Artificial Sequence: Synthetic oligonucleotide
ggcagccgacuuuggaaug

SEQ ID NO: 1918237 - RNA, 19 nt, Artificial Sequence
  Description of Artificial Sequence: Synthetic oligonucleotide
cacgggccauguucagggc

SEQ ID NO: 1918238 - RNA, 19 nt, Artificial Sequence
  Description of Artificial Sequence: Synthetic oligonucleotide
aacgcgcaggccagagccu

SEQ ID NO: 1918239 - RNA, 19 nt, Artificial Sequence
  Description of Artificial Sequence: Synthetic oligonucleotide
gucagugcauaucgaggcu

SEQ ID NO: 1918240 - RNA, 19 nt, Artificial Sequence
  Description of Artificial Sequence: Synthetic oligonucleotide
cagccgacuuuggaaugag

SEQ ID NO: 1918241 - RNA, 19 nt, Artificial Sequence
  Description of Artificial Sequence: Synthetic oligonucleotide
agaaacccgggcacucagu

SEQ ID NO: 1918242 - RNA, 19 nt, Artificial Sequence
  Description of Artificial Sequence: Synthetic oligonucleotide
gaacccugccucaguaucu

SEQ ID NO: 1918243 - RNA, 19 nt, Artificial Sequence
  Description of Artificial Sequence: Synthetic oligonucleotide
accgagcaugcgacgcugg

SEQ ID NO: 1918244 - RNA, 19 nt, Artificial Sequence
  Description of Artificial Sequence: Synthetic oligonucleotide
caucccgaaguccccgcca

SEQ ID NO: 1918245 - RNA, 19 nt, Artificial Sequence
  Description of Artificial Sequence: Synthetic oligonucleotide
cuucacuagugcccagcaa

SEQ ID NO: 1918246 - RNA, 19 nt, Artificial Sequence
  Description of Artificial Sequence: Synthetic oligonucleotide
acgcuggguuuggagaagu

SEQ ID NO: 1918247 - RNA, 19 nt, Artificial Sequence
  Description of Artificial Sequence: Synthetic oligonucleotide
augucacaagaagccaguu

SEQ ID NO: 1918248 - RNA, 19 nt, Artificial Sequence
  Description of Artificial Sequence: Synthetic oligonucleotide
ccguugugcgucccgauuc

SEQ ID NO: 1918249 - RNA, 19 nt, Artificial Sequence
  Description of Artificial Sequence: Synthetic oligonucleotide
aggugggauuaagucgaga

SEQ ID NO: 1918250 - RNA, 19 nt, Artificial Sequence
  Description of Artificial Sequence: Synthetic oligonucleotide
gugcggugcccaccaauga

SEQ ID NO: 1918251 - RNA, 19 nt, Artificial Sequence
  Description of Artificial Sequence: Synthetic oligonucleotide
ccagguaucccacugacuu

SEQ ID NO: 1918252 - RNA, 19 nt, Artificial Sequence
  Description of Artificial Sequence: Synthetic oligonucleotide
gauucgcggcggugccaug

SEQ ID NO: 1918253 - RNA, 19 nt, Artificial Sequence
  Description of Artificial Sequence: Synthetic oligonucleotide
cguugugcgucccgauucg

SEQ ID NO: 1918254 - RNA, 19 nt, Artificial Sequence
  Description of Artificial Sequence: Synthetic oligonucleotide
agcaugcgacgcuggguuu

SEQ ID NO: 1918255 - RNA, 19 nt, Artificial Sequence
  Description of Artificial Sequence: Synthetic oligonucleotide
ugccguugugcgucccgau

SEQ ID NO: 1918256 - RNA, 19 nt, Artificial Sequence
  Description of Artificial Sequence: Synthetic oligonucleotide
acucgccacuguccagccu

SEQ ID NO: 1918257 - RNA, 19 nt, Artificial Sequence
  Description of Artificial Sequence: Synthetic oligonucleotide
cgggcacucaguguagugg

SEQ ID NO: 1918258 - RNA, 19 nt, Artificial Sequence
  Description of Artificial Sequence: Synthetic oligonucleotide
gcgaaacgggacucugaac

SEQ ID NO: 1918259 - RNA, 19 nt, Artificial Sequence
  Description of Artificial Sequence: Synthetic oligonucleotide
gcaugcgacgcuggguuug

SEQ ID NO: 1918260 - RNA, 19 nt, Artificial Sequence
  Description of Artificial Sequence: Synthetic oligonucleotide
acugggccaguagcuuaug

SEQ ID NO: 1918261 - RNA, 19 nt, Artificial Sequence
  Description of Artificial Sequence: Synthetic oligonucleotide
gugcugguagaaauuuagu

SEQ ID NO: 1918262 - RNA, 19 nt, Artificial Sequence
  Description of Artificial Sequence: Synthetic oligonucleotide
cagggaacucauaguuucu

SEQ ID NO: 1918263 - RNA, 19 nt, Artificial Sequence
  Description of Artificial Sequence: Synthetic oligonucleotide
aucgcacgccugaacccug

SEQ ID NO: 1918264 - RNA, 19 nt, Artificial Sequence
  Description of Artificial Sequence: Synthetic oligonucleotide
ccgagcaugcgacgcuggg

SEQ ID NO: 1918265 - RNA, 19 nt, Artificial Sequence
  Description of Artificial Sequence: Synthetic oligonucleotide
gagugcggugcccaccaau

SEQ ID NO: 1918266 - RNA, 19 nt, Artificial Sequence
  Description of Artificial Sequence: Synthetic oligonucleotide
gcaacgcgcaggccagagc

SEQ ID NO: 1918267 - RNA, 19 nt, Artificial Sequence
  Description of Artificial Sequence: Synthetic oligonucleotide
cgaguccgcacaaucucug

SEQ ID NO: 1918268 - RNA, 19 nt, Artificial Sequence
  Description of Artificial Sequence: Synthetic oligonucleotide
cacuugaguccaccuggaa

SEQ ID NO: 1918269 - RNA, 19 nt, Artificial Sequence
  Description of Artificial Sequence: Synthetic oligonucleotide
gguacacauuggacucgcc

SEQ ID NO: 1918270 - RNA, 19 nt, Artificial Sequence
  Description of Artificial Sequence: Synthetic oligonucleotide
cauagaggguauccacaau

SEQ ID NO: 1918271 - RNA, 19 nt, Artificial Sequence
  Description of Artificial Sequence: Synthetic oligonucleotide
agccgacuuuggaaugagu

SEQ ID NO: 1918272 - RNA, 19 nt, Artificial Sequence
  Description of Artificial Sequence: Synthetic oligonucleotide
gcagccgacuuuggaauga

SEQ ID NO: 1918273 - RNA, 19 nt, Artificial Sequence
  Description of Artificial Sequence: Synthetic oligonucleotide
cggagcaacgcgcaggcca

SEQ ID NO: 1918274 - RNA, 19 nt, Artificial Sequence
  Description of Artificial Sequence: Synthetic oligonucleotide
acgcaggaaacaacccaua

SEQ ID NO: 1918275 - RNA, 19 nt, Artificial Sequence
  Description of Artificial Sequence: Synthetic oligonucleotide
ggggcgaaacgggacucug

SEQ ID NO: 1918276 - RNA, 19 nt, Artificial Sequence
  Description of Artificial Sequence: Synthetic oligonucleotide
caucgcacgccugaacccu

SEQ ID NO: 1918277 - RNA, 19 nt, Artificial Sequence
  Description of Artificial Sequence: Synthetic oligonucleotide
gucccgauucgcggcggug

SEQ ID NO: 1918278 - RNA, 19 nt, Artificial Sequence
  Description of Artificial Sequence: Synthetic oligonucleotide
acccgggcacucaguguag

SEQ ID NO: 1918279 - RNA, 19 nt, Artificial Sequence
  Description of Artificial Sequence: Synthetic oligonucleotide
gucgagaaacccgggcacu

SEQ ID NO: 1918280 - RNA, 19 nt, Artificial Sequence
  Description of Artificial Sequence: Synthetic oligonucleotide
gugccguugugcgucccga

SEQ ID NO: 1918281 - RNA, 19 nt, Artificial Sequence
  Description of Artificial Sequence: Synthetic oligonucleotide
cccgauucgcggcggugcc

SEQ ID NO: 1918282 - RNA, 19 nt, Artificial Sequence
  Description of Artificial Sequence: Synthetic oligonucleotide
cagcauuugcaaggggugu

SEQ ID NO: 1918283 - RNA, 19 nt, Artificial Sequence
  Description of Artificial Sequence: Synthetic oligonucleotide
ggaggcggagcaacgcgca

SEQ ID NO: 1918284 - RNA, 19 nt, Artificial Sequence
  Description of Artificial Sequence: Synthetic oligonucleotide
ccaccacgaugucacaaga

SEQ ID NO: 1918285 - RNA, 19 nt, Artificial Sequence
  Description of Artificial Sequence: Synthetic oligonucleotide
ccgggcacucaguguagug

SEQ ID NO: 1918286 - RNA, 19 nt, Artificial Sequence
  Description of Artificial Sequence: Synthetic oligonucleotide
ccagagccucaucgcagug

SEQ ID NO: 1918287 - RNA, 19 nt, Artificial Sequence
  Description of Artificial Sequence: Synthetic oligonucleotide
ggguuguacucgccaccca

SEQ ID NO: 1918288 - RNA, 19 nt, Artificial Sequence
  Description of Artificial Sequence: Synthetic oligonucleotide
gcucaacuuggucugccau

SEQ ID NO: 1918289 - RNA, 19 nt, Artificial Sequence
  Description of Artificial Sequence: Synthetic oligonucleotide
guaucuugguuggguuggu

SEQ ID NO: 1918290 - RNA, 19 nt, Artificial Sequence
  Description of Artificial Sequence: Synthetic oligonucleotide
ggugguaaagaugcuccuu

SEQ ID NO: 1918291 - RNA, 19 nt, Artificial Sequence
  Description of Artificial Sequence: Synthetic oligonucleotide
gggcgaaacgggacucuga

SEQ ID NO: 1918292 - RNA, 19 nt, Artificial Sequence
  Description of Artificial Sequence: Synthetic oligonucleotide
gagcaacgcgcaggccaga

SEQ ID NO: 1918293 - RNA, 19 nt, Artificial Sequence
  Description of Artificial Sequence: Synthetic oligonucleotide
cugccucaguaucuugguu

SEQ ID NO: 1918294 - RNA, 19 nt, Artificial Sequence
  Description of Artificial Sequence: Synthetic oligonucleotide
ccaaguccaucgcacgccu

SEQ ID NO: 1918295 - RNA, 19 nt, Artificial Sequence
  Description of Artificial Sequence: Synthetic oligonucleotide
ggugucucagaggguugua

SEQ ID NO: 1918296 - RNA, 19 nt, Artificial Sequence
  Description of Artificial Sequence: Synthetic oligonucleotide
gcgucccgauucgcggcgg

SEQ ID NO: 1918297 - RNA, 19 nt, Artificial Sequence
  Description of Artificial Sequence: Synthetic oligonucleotide
gcacgccugaacccugccu

SEQ ID NO: 1918298 - RNA, 19 nt, Artificial Sequence
  Description of Artificial Sequence: Synthetic oligonucleotide
gcagcggcagcaacacugu

SEQ ID NO: 1918299 - RNA, 19 nt, Artificial Sequence
  Description of Artificial Sequence: Synthetic oligonucleotide
cggcggugccaugagguug

SEQ ID NO: 1918300 - RNA, 19 nt, Artificial Sequence
  Description of Artificial Sequence: Synthetic oligonucleotide
cagccuggucaguguagau

SEQ ID NO: 1918301 - RNA, 19 nt, Artificial Sequence
  Description of Artificial Sequence: Synthetic oligonucleotide
caagaguggcacgggccau

SEQ ID NO: 1918302 - RNA, 19 nt, Artificial Sequence
  Description of Artificial Sequence: Synthetic oligonucleotide
gucccgcacugcucaacuu

SEQ ID NO: 1918303 - RNA, 19 nt, Artificial Sequence
  Description of Artificial Sequence: Synthetic oligonucleotide
gcauaucgaggcuccccuu

SEQ ID NO: 1918304 - RNA, 19 nt, Artificial Sequence
  Description of Artificial Sequence: Synthetic oligonucleotide
cgcggcggugccaugaggu

SEQ ID NO: 1918305 - RNA, 19 nt, Artificial Sequence
  Description of Artificial Sequence: Synthetic oligonucleotide
gccguugugcgucccgauu

SEQ ID NO: 1918306 - RNA, 19 nt, Artificial Sequence
  Description of Artificial Sequence: Synthetic oligonucleotide
gcggagcaacgcgcaggcc

SEQ ID NO: 1918307 - RNA, 19 nt, Artificial Sequence
  Description of Artificial Sequence: Synthetic oligonucleotide
ggaaugagugaggcuccuu

SEQ ID NO: 1918308 - RNA, 19 nt, Artificial Sequence
  Description of Artificial Sequence: Synthetic oligonucleotide
gguugcugcgaggccuuuu

SEQ ID NO: 1918309 - RNA, 19 nt, Artificial Sequence
  Description of Artificial Sequence: Synthetic oligonucleotide
cagcggcagcaacacuguu

SEQ ID NO: 1918310 - RNA, 19 nt, Artificial Sequence
  Description of Artificial Sequence: Synthetic oligonucleotide
gcggcggugccaugagguu

SEQ ID NO: 1918311 - RNA, 19 nt, Artificial Sequence
  Description of Artificial Sequence: Synthetic oligonucleotide
gcgcgggcuggcagccagc

SEQ ID NO: 1918312 - RNA, 19 nt, Artificial Sequence
  Description of Artificial Sequence: Synthetic oligonucleotide
ccgauucgcggcggugcca

SEQ ID NO: 1918313 - RNA, 19 nt, Artificial Sequence
  Description of Artificial Sequence: Synthetic oligonucleotide
ccgcacugcucaacuuggu

SEQ ID NO: 1918314 - RNA, 19 nt, Artificial Sequence
  Description of Artificial Sequence: Synthetic oligonucleotide
cgcgcaggccagagccuca

SEQ ID NO: 1918315 - RNA, 19 nt, Artificial Sequence
  Description of Artificial Sequence: Synthetic oligonucleotide
cgauucgcggcggugccau

SEQ ID NO: 1918316 - RNA, 19 nt, Artificial Sequence
  Description of Artificial Sequence: Synthetic oligonucleotide
gcgcaggccagagccucau

SEQ ID NO: 1918317 - RNA, 19 nt, Artificial Sequence
  Description of Artificial Sequence: Synthetic oligonucleotide
cccgggcacucaguguagu

SEQ ID NO: 1918318 - RNA, 19 nt, Artificial Sequence
  Description of Artificial Sequence: Synthetic oligonucleotide
cgagugcggugcccaccaa

SEQ ID NO: 1918319 - RNA, 19 nt, Artificial Sequence
  Description of Artificial Sequence: Synthetic oligonucleotide
cgucccgauucgcggcggu

SEQ ID NO: 1918320 - RNA, 19 nt, Artificial Sequence
  Description of Artificial Sequence: Synthetic oligonucleotide
agauuaauagguuaucucc

SEQ ID NO: 1918321 - RNA, 19 nt, Artificial Sequence
  Description of Artificial Sequence: Synthetic oligonucleotide
uuuaacuuccagaaggugg

SEQ ID NO: 1918322 - RNA, 19 nt, Artificial Sequence
  Description of Artificial Sequence: Synthetic oligonucleotide
aagaccuucauccuuuaac

SEQ ID NO: 1918323 - RNA, 19 nt, Artificial Sequence
  Description of Artificial Sequence: Synthetic oligonucleotide
uauuuaaacaaugauaagu

SEQ ID NO: 1918324 - RNA, 19 nt, Artificial Sequence
  Description of Artificial Sequence: Synthetic oligonucleotide
aagguugagaauuugacaa

SEQ ID NO: 1918325 - RNA, 19 nt, Artificial Sequence
  Description of Artificial Sequence: Synthetic oligonucleotide
uuaauaagcugacugacac

SEQ ID NO: 1918326 - RNA, 19 nt, Artificial Sequence
  Description of Artificial Sequence: Synthetic oligonucleotide
aauuguguauucauguuac

SEQ ID NO: 1918327 - RNA, 19 nt, Artificial Sequence
  Description of Artificial Sequence: Synthetic oligonucleotide
uucuggaugugcaauaagg

SEQ ID NO: 1918328 - RNA, 19 nt, Artificial Sequence
  Description of Artificial Sequence: Synthetic oligonucleotide
cacacauucaguuaucagg

SEQ ID NO: 1918329 - RNA, 19 nt, Artificial Sequence
  Description of Artificial Sequence: Synthetic oligonucleotide
uccaugaugggucugaaca

SEQ ID NO: 1918330 - RNA, 19 nt, Artificial Sequence
  Description of Artificial Sequence: Synthetic oligonucleotide
aagugagauuuauuuaaac

SEQ ID NO: 1918331 - RNA, 19 nt, Artificial Sequence
  Description of Artificial Sequence: Synthetic oligonucleotide
aauaagcugacugacacca

SEQ ID NO: 1918332 - RNA, 19 nt, Artificial Sequence
  Description of Artificial Sequence: Synthetic oligonucleotide
auucuguucaccucugccc

SEQ ID NO: 1918333 - RNA, 19 nt, Artificial Sequence
  Description of Artificial Sequence: Synthetic oligonucleotide
aacucgagggauucuauuc

SEQ ID NO: 1918334 - RNA, 19 nt, Artificial Sequence
  Description of Artificial Sequence: Synthetic oligonucleotide
accucuugcaaagagaagc

SEQ ID NO: 1918335 - RNA, 19 nt, Artificial Sequence
  Description of Artificial Sequence: Synthetic oligonucleotide
aucaugaucugcccaaacc

SEQ ID NO: 1918336 - RNA, 19 nt, Artificial Sequence
  Description of Artificial Sequence: Synthetic oligonucleotide
aaagcuuuaauaagcugac

SEQ ID NO: 1918337 - RNA, 19 nt, Artificial Sequence
  Description of Artificial Sequence: Synthetic oligonucleotide
uagguuaucuccuucaaac

SEQ ID NO: 1918338 - RNA, 19 nt, Artificial Sequence
  Description of Artificial Sequence: Synthetic oligonucleotide
aacauggcugucucaaaac

SEQ ID NO: 1918339 - RNA, 19 nt, Artificial Sequence
  Description of Artificial Sequence: Synthetic oligonucleotide
agugagauuuauuuaaaca

SEQ ID NO: 1918340 - RNA, 19 nt, Artificial Sequence
  Description of Artificial Sequence: Synthetic oligonucleotide
gaauuugacaaugacauuc

SEQ ID NO: 1918341 - RNA, 19 nt, Artificial Sequence
  Description of Artificial Sequence: Synthetic oligonucleotide
ucgacuucaaaauauuuac

SEQ ID NO: 1918342 - RNA, 19 nt, Artificial Sequence
  Description of Artificial Sequence: Synthetic oligonucleotide
uccucuguuaauuucagga

SEQ ID NO: 1918343 - RNA, 19 nt, Artificial Sequence
  Description of Artificial Sequence: Synthetic oligonucleotide
uugacaaugacauucuguc

SEQ ID NO: 1918344 - RNA, 19 nt, Artificial Sequence
  Description of Artificial Sequence: Synthetic oligonucleotide
aauaaggccaacaguagag

SEQ ID NO: 1918345 - RNA, 19 nt, Artificial Sequence
  Description of Artificial Sequence: Synthetic oligonucleotide
agucauguaaaccagcaca

SEQ ID NO: 1918346 - RNA, 19 nt, Artificial Sequence
  Description of Artificial Sequence: Synthetic oligonucleotide
uggaugugcaauaaggcca

SEQ ID NO: 1918347 - RNA, 19 nt, Artificial Sequence
  Description of Artificial Sequence: Synthetic oligonucleotide
gaugggucugaacagaagc

SEQ ID NO: 1918348 - RNA, 19 nt, Artificial Sequence
  Description of Artificial Sequence: Synthetic oligonucleotide
gacucuagugacuugcagg

SEQ ID NO: 1918349 - RNA, 19 nt, Artificial Sequence
  Description of Artificial Sequence: Synthetic oligonucleotide
uguaaaccagcacacauuc

SEQ ID NO: 1918350 - RNA, 19 nt, Artificial Sequence
  Description of Artificial Sequence: Synthetic oligonucleotide
uguaacuccaugauggguc

SEQ ID NO: 1918351 - RNA, 19 nt, Artificial Sequence
  Description of Artificial Sequence: Synthetic oligonucleotide
aaacaaugauaagugacag

SEQ ID NO: 1918352 - RNA, 19 nt, Artificial Sequence
  Description of Artificial Sequence: Synthetic oligonucleotide
uuuaaacaaugauaaguga

SEQ ID NO: 1918353 - RNA, 19 nt, Artificial Sequence
  Description of Artificial Sequence: Synthetic oligonucleotide
uuuaauaagcugacugaca

SEQ ID NO: 1918354 - RNA, 19 nt, Artificial Sequence
  Description of Artificial Sequence: Synthetic oligonucleotide
uucuguucaccucugcccg

SEQ ID NO: 1918355 - RNA, 19 nt, Artificial Sequence
  Description of Artificial Sequence: Synthetic oligonucleotide
cucaauguacggaucaugc

SEQ ID NO: 1918356 - RNA, 19 nt, Artificial Sequence
  Description of Artificial Sequence: Synthetic oligonucleotide
aguuuauaaacauggcugu

SEQ ID NO: 1918357 - RNA, 19 nt, Artificial Sequence
  Description of Artificial Sequence: Synthetic oligonucleotide
uucuauucuguucaccucu

SEQ ID NO: 1918358 - RNA, 19 nt, Artificial Sequence
  Description of Artificial Sequence: Synthetic oligonucleotide
agguuaucuccuucaaacc

SEQ ID NO: 1918359 - RNA, 19 nt, Artificial Sequence
  Description of Artificial Sequence: Synthetic oligonucleotide
aaugcuuaccgcaaaccuc

SEQ ID NO: 1918360 - RNA, 19 nt, Artificial Sequence
  Description of Artificial Sequence: Synthetic oligonucleotide
ucucgugacuaucauuggg

SEQ ID NO: 1918361 - RNA, 19 nt, Artificial Sequence
  Description of Artificial Sequence: Synthetic oligonucleotide
ugauaagugacaggaacag

SEQ ID NO: 1918362 - RNA, 19 nt, Artificial Sequence
  Description of Artificial Sequence: Synthetic oligonucleotide
uuuauaaacauggcugucu

SEQ ID NO: 1918363 - RNA, 19 nt, Artificial Sequence
  Description of Artificial Sequence: Synthetic oligonucleotide
cuuaccgcaaaccucuugc

SEQ ID NO: 1918364 - RNA, 19 nt, Artificial Sequence
  Description of Artificial Sequence: Synthetic oligonucleotide
aaaauauccucuguuaauu

SEQ ID NO: 1918365 - RNA, 19 nt, Artificial Sequence
  Description of Artificial Sequence: Synthetic oligonucleotide
acucgagcaaaauauccuc

SEQ ID NO: 1918366 - RNA, 19 nt, Artificial Sequence
  Description of Artificial Sequence: Synthetic oligonucleotide
aagucagaguucgaagcgc

SEQ ID NO: 1918367 - RNA, 19 nt, Artificial Sequence
  Description of Artificial Sequence: Synthetic oligonucleotide
ugcgaggucacacugucgc

SEQ ID NO: 1918368 - RNA, 19 nt, Artificial Sequence
  Description of Artificial Sequence: Synthetic oligonucleotide
aacagauuaauagguuauc

SEQ ID NO: 1918369 - RNA, 19 nt, Artificial Sequence
  Description of Artificial Sequence: Synthetic oligonucleotide
uucagaaaggucucggaga

SEQ ID NO: 1918370 - RNA, 19 nt, Artificial Sequence
  Description of Artificial Sequence: Synthetic oligonucleotide
gaagcaucuucgcaggugc

SEQ ID NO: 1918371 - RNA, 19 nt, Artificial Sequence
  Description of Artificial Sequence: Synthetic oligonucleotide
gguuaucuccuucaaaccg

SEQ ID NO: 1918372 - RNA, 19 nt, Artificial Sequence
  Description of Artificial Sequence: Synthetic oligonucleotide
ucaacagauuaauagguua

SEQ ID NO: 1918373 - RNA, 19 nt, Artificial Sequence
  Description of Artificial Sequence: Synthetic oligonucleotide
ucagcacgaaccuucaaca

SEQ ID NO: 1918374 - RNA, 19 nt, Artificial Sequence
  Description of Artificial Sequence: Synthetic oligonucleotide
cucuguuaauuucaggagc

SEQ ID NO: 1918375 - RNA, 19 nt, Artificial Sequence
  Description of Artificial Sequence: Synthetic oligonucleotide
aaugauggcauaucucuuu

SEQ ID NO: 1918376 - RNA, 19 nt, Artificial Sequence
  Description of Artificial Sequence: Synthetic oligonucleotide
cuggaugugcaauaaggcc

SEQ ID NO: 1918377 - RNA, 19 nt, Artificial Sequence
  Description of Artificial Sequence: Synthetic oligonucleotide
uuauaaacauggcugucuc

SEQ ID NO: 1918378 - RNA, 19 nt, Artificial Sequence
  Description of Artificial Sequence: Synthetic oligonucleotide
uagacugccucacaagaug

SEQ ID NO: 1918379 - RNA, 19 nt, Artificial Sequence
  Description of Artificial Sequence: Synthetic oligonucleotide
auaagugacaggaacagga

SEQ ID NO: 1918380 - RNA, 19 nt, Artificial Sequence
  Description of Artificial Sequence: Synthetic oligonucleotide
gagaauuugacaaugacau

SEQ ID NO: 1918381 - RNA, 19 nt, Artificial Sequence
  Description of Artificial Sequence: Synthetic oligonucleotide
aauguacggaucaugccag

SEQ ID NO: 1918382 - RNA, 19 nt, Artificial Sequence
  Description of Artificial Sequence: Synthetic oligonucleotide
ugggaagucgacuucaaaa

SEQ ID NO: 1918383 - RNA, 19 nt, Artificial Sequence
  Description of Artificial Sequence: Synthetic oligonucleotide
uucaaucaugaucugccca

SEQ ID NO: 1918384 - RNA, 19 nt, Artificial Sequence
  Description of Artificial Sequence: Synthetic oligonucleotide
ucucccacccauucaauag

SEQ ID NO: 1918385 - RNA, 19 nt, Artificial Sequence
  Description of Artificial Sequence: Synthetic oligonucleotide
ugcucguaguuuauaaaca

SEQ ID NO: 1918386 - RNA, 19 nt, Artificial Sequence
  Description of Artificial Sequence: Synthetic oligonucleotide
uaagcugacugacaccaug

SEQ ID NO: 1918387 - RNA, 19 nt, Artificial Sequence
  Description of Artificial Sequence: Synthetic oligonucleotide
ggagaaaagcuuuaauaag

SEQ ID NO: 1918388 - RNA, 19 nt, Artificial Sequence
  Description of Artificial Sequence: Synthetic oligonucleotide
ucuuuagacugccucacaa

SEQ ID NO: 1918389 - RNA, 19 nt, Artificial Sequence
  Description of Artificial Sequence: Synthetic oligonucleotide
caugaucugcccaaaccgg

SEQ ID NO: 1918390 - RNA, 19 nt, Artificial Sequence
  Description of Artificial Sequence: Synthetic oligonucleotide
uguguauucauguuacauu

SEQ ID NO: 1918391 - RNA, 19 nt, Artificial Sequence
  Description of Artificial Sequence: Synthetic oligonucleotide
cuuuaauaagcugacugac

SEQ ID NO: 1918392 - RNA, 19 nt, Artificial Sequence
  Description of Artificial Sequence: Synthetic oligonucleotide
ucccucgucauccaaguca

SEQ ID NO: 1918393 - RNA, 19 nt, Artificial Sequence
  Description of Artificial Sequence: Synthetic oligonucleotide
uacggaucaugccaguagc

SEQ ID NO: 1918394 - RNA, 19 nt, Artificial Sequence
  Description of Artificial Sequence: Synthetic oligonucleotide
aacaguagagaugaggcua

SEQ ID NO: 1918395 - RNA, 19 nt, Artificial Sequence
  Description of Artificial Sequence: Synthetic oligonucleotide
auauuuacuugggagaaga

SEQ ID NO: 1918396 - RNA, 19 nt, Artificial Sequence
  Description of Artificial Sequence: Synthetic oligonucleotide
cugcucguaguuuauaaac

SEQ ID NO: 1918397 - RNA, 19 nt, Artificial Sequence
  Description of Artificial Sequence: Synthetic oligonucleotide
ucaauguacggaucaugcc

SEQ ID NO: 1918398 - RNA, 19 nt, Artificial Sequence
  Description of Artificial Sequence: Synthetic oligonucleotide
uuaggaggcuggcugacug

SEQ ID NO: 1918399 - RNA, 19 nt, Artificial Sequence
  Description of Artificial Sequence: Synthetic oligonucleotide
auucuauucuguucaccuc

SEQ ID NO: 1918400 - RNA, 19 nt, Artificial Sequence
  Description of Artificial Sequence: Synthetic oligonucleotide
gauucuauucuguucaccu

SEQ ID NO: 1918401 - RNA, 19 nt, Artificial Sequence
  Description of Artificial Sequence: Synthetic oligonucleotide
uuaauagguuaucuccuuc

SEQ ID NO: 1918402 - RNA, 19 nt, Artificial Sequence
  Description of Artificial Sequence: Synthetic oligonucleotide
aaauauccucuguuaauuu

SEQ ID NO: 1918403 - RNA, 19 nt, Artificial Sequence
  Description of Artificial Sequence: Synthetic oligonucleotide
acaagaugcucaauguacg

SEQ ID NO: 1918404 - RNA, 19 nt, Artificial Sequence
  Description of Artificial Sequence: Synthetic oligonucleotide
acauucaguuaucaggagu

SEQ ID NO: 1918405 - RNA, 19 nt, Artificial Sequence
  Description of Artificial Sequence: Synthetic oligonucleotide
uggcaagugagauuuauuu

SEQ ID NO: 1918406 - RNA, 19 nt, Artificial Sequence
  Description of Artificial Sequence: Synthetic oligonucleotide
caagaugcucaauguacgg

SEQ ID NO: 1918407 - RNA, 19 nt, Artificial Sequence
  Description of Artificial Sequence: Synthetic oligonucleotide
aaaccgagcuccuggccuc

SEQ ID NO: 1918408 - RNA, 19 nt, Artificial Sequence
  Description of Artificial Sequence: Synthetic oligonucleotide
aguagccaaugcuuaccgc

SEQ ID NO: 1918409 - RNA, 19 nt, Artificial Sequence
  Description of Artificial Sequence: Synthetic oligonucleotide
augaacucgagcaaaauau

SEQ ID NO: 1918410 - RNA, 19 nt, Artificial Sequence
  Description of Artificial Sequence: Synthetic oligonucleotide
aguaauggcgcaugagcug

SEQ ID NO: 1918411 - RNA, 19 nt, Artificial Sequence
  Description of Artificial Sequence: Synthetic oligonucleotide
aguuaucaggaguguuggc

SEQ ID NO: 1918412 - RNA, 19 nt, Artificial Sequence
  Description of Artificial Sequence: Synthetic oligonucleotide
uuaucaggaguguuggcaa

SEQ ID NO: 1918413 - RNA, 19 nt, Artificial Sequence
  Description of Artificial Sequence: Synthetic oligonucleotide
cuuuagacugccucacaag

SEQ ID NO: 1918414 - RNA, 19 nt, Artificial Sequence
  Description of Artificial Sequence: Synthetic oligonucleotide
aguagagaugaggcuaccc

SEQ ID NO: 1918415 - RNA, 19 nt, Artificial Sequence
  Description of Artificial Sequence: Synthetic oligonucleotide
ucgagcaaaauauccucug

SEQ ID NO: 1918416 - RNA, 19 nt, Artificial Sequence
  Description of Artificial Sequence: Synthetic oligonucleotide
uuugauggugugcagcuuu

SEQ ID NO: 1918417 - RNA, 19 nt, Artificial Sequence
  Description of Artificial Sequence: Synthetic oligonucleotide
ucggagaucugcuccaaug

SEQ ID NO: 1918418 - RNA, 19 nt, Artificial Sequence
  Description of Artificial Sequence: Synthetic oligonucleotide
guaguuuauaaacauggcu

SEQ ID NO: 1918419 - RNA, 19 nt, Artificial Sequence
  Description of Artificial Sequence: Synthetic oligonucleotide
caauguacggaucaugcca

SEQ ID NO: 1918420 - RNA, 19 nt, Artificial Sequence
  Description of Artificial Sequence: Synthetic oligonucleotide
agcaaaauauccucuguua

SEQ ID NO: 1918421 - RNA, 19 nt, Artificial Sequence
  Description of Artificial Sequence: Synthetic oligonucleotide
guagccaaugcuuaccgca

SEQ ID NO: 1918422 - RNA, 19 nt, Artificial Sequence
  Description of Artificial Sequence: Synthetic oligonucleotide
agaugcucaauguacggau

SEQ ID NO: 1918423 - RNA, 19 nt, Artificial Sequence
  Description of Artificial Sequence: Synthetic oligonucleotide
aaccagcacacauucaguu

SEQ ID NO: 1918424 - RNA, 19 nt, Artificial Sequence
  Description of Artificial Sequence: Synthetic oligonucleotide
uguaaccaagaguucuucu

SEQ ID NO: 1918425 - RNA, 19 nt, Artificial Sequence
  Description of Artificial Sequence: Synthetic oligonucleotide
uucaacagauuaauagguu

SEQ ID NO: 1918426 - RNA, 19 nt, Artificial Sequence
  Description of Artificial Sequence: Synthetic oligonucleotide
ugaauccagcaucugucca

SEQ ID NO: 1918427 - RNA, 19 nt, Artificial Sequence
  Description of Artificial Sequence: Synthetic oligonucleotide
cucagcacgaaccuucaac

SEQ ID NO: 1918428 - RNA, 19 nt, Artificial Sequence
  Description of Artificial Sequence: Synthetic oligonucleotide
uuuguaaccaagaguucuu

SEQ ID NO: 1918429 - RNA, 19 nt, Artificial Sequence
  Description of Artificial Sequence: Synthetic oligonucleotide
cacuuuaggaggcuggcug

SEQ ID NO: 1918430 - RNA, 19 nt, Artificial Sequence
  Description of Artificial Sequence: Synthetic oligonucleotide
cucguaguuuauaaacaug

SEQ ID NO: 1918431 - RNA, 19 nt, Artificial Sequence
  Description of Artificial Sequence: Synthetic oligonucleotide
uccaaugauggcauaucuc

SEQ ID NO: 1918432 - RNA, 19 nt, Artificial Sequence
  Description of Artificial Sequence: Synthetic oligonucleotide
ucugaacagaagcggcuug

SEQ ID NO: 1918433 - RNA, 19 nt, Artificial Sequence
  Description of Artificial Sequence: Synthetic oligonucleotide
cacacugucgccuccggag

SEQ ID NO: 1918434 - RNA, 19 nt, Artificial Sequence
  Description of Artificial Sequence: Synthetic oligonucleotide
aucauugggaagucgacuu

SEQ ID NO: 1918435 - RNA, 19 nt, Artificial Sequence
  Description of Artificial Sequence: Synthetic oligonucleotide
agacugccucacaagaugc

SEQ ID NO: 1918436 - RNA, 19 nt, Artificial Sequence
  Description of Artificial Sequence: Synthetic oligonucleotide
auuaauagguuaucuccuu

SEQ ID NO: 1918437 - RNA, 19 nt, Artificial Sequence
  Description of Artificial Sequence: Synthetic oligonucleotide
guacggaucaugccaguag

SEQ ID NO: 1918438 - RNA, 19 nt, Artificial Sequence
  Description of Artificial Sequence: Synthetic oligonucleotide
uggagucauguaaaccagc

SEQ ID NO: 1918439 - RNA, 19 nt, Artificial Sequence
  Description of Artificial Sequence: Synthetic oligonucleotide
uuguguauucauguuacau

SEQ ID NO: 1918440 - RNA, 19 nt, Artificial Sequence
  Description of Artificial Sequence: Synthetic oligonucleotide
uucaaaccgagcuccuggc

SEQ ID NO: 1918441 - RNA, 19 nt, Artificial Sequence
  Description of Artificial Sequence: Synthetic oligonucleotide
uauuuacuugggagaagac

SEQ ID NO: 1918442 - RNA, 19 nt, Artificial Sequence
  Description of Artificial Sequence: Synthetic oligonucleotide
ucggcuaaacucagcuucc

SEQ ID NO: 1918443 - RNA, 19 nt, Artificial Sequence
  Description of Artificial Sequence: Synthetic oligonucleotide
caguuaucaggaguguugg

SEQ ID NO: 1918444 - RNA, 19 nt, Artificial Sequence
  Description of Artificial Sequence: Synthetic oligonucleotide
guuaucaggaguguuggca

SEQ ID NO: 1918445 - RNA, 19 nt, Artificial Sequence
  Description of Artificial Sequence: Synthetic oligonucleotide
aagaugcucaauguacgga

SEQ ID NO: 1918446 - RNA, 19 nt, Artificial Sequence
  Description of Artificial Sequence: Synthetic oligonucleotide
agcacgaaccuucaacaga

SEQ ID NO: 1918447 - RNA, 19 nt, Artificial Sequence
  Description of Artificial Sequence: Synthetic oligonucleotide
uucucgugacuaucauugg

SEQ ID NO: 1918448 - RNA, 19 nt, Artificial Sequence
  Description of Artificial Sequence: Synthetic oligonucleotide
gcaguaauggcgcaugagc

SEQ ID NO: 1918449 - RNA, 19 nt, Artificial Sequence
  Description of Artificial Sequence: Synthetic oligonucleotide
caguagccaaugcuuaccg

SEQ ID NO: 1918450 - RNA, 19 nt, Artificial Sequence
  Description of Artificial Sequence: Synthetic oligonucleotide
ugugaccaccuuuguaacc

SEQ ID NO: 1918451 - RNA, 19 nt, Artificial Sequence
  Description of Artificial Sequence: Synthetic oligonucleotide
cuaucauugggaagucgac

SEQ ID NO: 1918452 - RNA, 19 nt, Artificial Sequence
  Description of Artificial Sequence: Synthetic oligonucleotide
acaguagagaugaggcuac

SEQ ID NO: 1918453 - RNA, 19 nt, Artificial Sequence
  Description of Artificial Sequence: Synthetic oligonucleotide
acucgagggauucuauucu

SEQ ID NO: 1918454 - RNA, 19 nt, Artificial Sequence
  Description of Artificial Sequence: Synthetic oligonucleotide
ucuaucugcaggguguccu

SEQ ID NO: 1918455 - RNA, 19 nt, Artificial Sequence
  Description of Artificial Sequence: Synthetic oligonucleotide
guaauggcgcaugagcugc

SEQ ID NO: 1918456 - RNA, 19 nt, Artificial Sequence
  Description of Artificial Sequence: Synthetic oligonucleotide
uaucauugggaagucgacu

SEQ ID NO: 1918457 - RNA, 19 nt, Artificial Sequence
  Description of Artificial Sequence: Synthetic oligonucleotide
caagguugagaauuugaca

SEQ ID NO: 1918458 - RNA, 19 nt, Artificial Sequence
  Description of Artificial Sequence: Synthetic oligonucleotide
auguucaccgcggaugccg

SEQ ID NO: 1918459 - RNA, 19 nt, Artificial Sequence
  Description of Artificial Sequence: Synthetic oligonucleotide
augcucaauguacggauca

SEQ ID NO: 1918460 - RNA, 19 nt, Artificial Sequence
  Description of Artificial Sequence: Synthetic oligonucleotide
ugucucaaaacugcuggcu

SEQ ID NO: 1918461 - RNA, 19 nt, Artificial Sequence
  Description of Artificial Sequence: Synthetic oligonucleotide
gcaagugagauuuauuuaa

SEQ ID NO: 1918462 - RNA, 19 nt, Artificial Sequence
  Description of Artificial Sequence: Synthetic oligonucleotide
cauucugucuucuggagaa

SEQ ID NO: 1918463 - RNA, 19 nt, Artificial Sequence
  Description of Artificial Sequence: Synthetic oligonucleotide
ggugugaccaccuuuguaa

SEQ ID NO: 1918464 - RNA, 19 nt, Artificial Sequence
  Description of Artificial Sequence: Synthetic oligonucleotide
augggucugaacagaagcg

SEQ ID NO: 1918465 - RNA, 19 nt, Artificial Sequence
  Description of Artificial Sequence: Synthetic oligonucleotide
uauucauguuacauuucuu

SEQ ID NO: 1918466 - RNA, 19 nt, Artificial Sequence
  Description of Artificial Sequence: Synthetic oligonucleotide
uucaccugcucguaguuua

SEQ ID NO: 1918467 - RNA, 19 nt, Artificial Sequence
  Description of Artificial Sequence: Synthetic oligonucleotide
ccaagucagaguucgaagc

SEQ ID NO: 1918468 - RNA, 19 nt, Artificial Sequence
  Description of Artificial Sequence: Synthetic oligonucleotide
aguucagaaaggucucgga

SEQ ID NO: 1918469 - RNA, 19 nt, Artificial Sequence
  Description of Artificial Sequence: Synthetic oligonucleotide
guauucauguuacauuucu

SEQ ID NO: 1918470 - RNA, 19 nt, Artificial Sequence
  Description of Artificial Sequence: Synthetic oligonucleotide
agacucuagugacuugcag

SEQ ID NO: 1918471 - RNA, 19 nt, Artificial Sequence
  Description of Artificial Sequence: Synthetic oligonucleotide
cuccuucaaaccgagcucc

SEQ ID NO: 1918472 - RNA, 19 nt, Artificial Sequence
  Description of Artificial Sequence: Synthetic oligonucleotide
acauucugucuucuggaga

SEQ ID NO: 1918473 - RNA, 19 nt, Artificial Sequence
  Description of Artificial Sequence: Synthetic oligonucleotide
uggugugcagcuuucucgu

SEQ ID NO: 1918474 - RNA, 19 nt, Artificial Sequence
  Description of Artificial Sequence: Synthetic oligonucleotide
auagcagccguuccuucug

SEQ ID NO: 1918475 - RNA, 19 nt, Artificial Sequence
  Description of Artificial Sequence: Synthetic oligonucleotide
cucgugacuaucauuggga

SEQ ID NO: 1918476 - RNA, 19 nt, Artificial Sequence
  Description of Artificial Sequence: Synthetic oligonucleotide
ccuuucucucuuuagacug

SEQ ID NO: 1918477 - RNA, 19 nt, Artificial Sequence
  Description of Artificial Sequence: Synthetic oligonucleotide
gugacuaucauugggaagu

SEQ ID NO: 1918478 - RNA, 19 nt, Artificial Sequence
  Description of Artificial Sequence: Synthetic oligonucleotide
accgcaaaccucuugcaaa

SEQ ID NO: 1918479 - RNA, 19 nt, Artificial Sequence
  Description of Artificial Sequence: Synthetic oligonucleotide
gaggcuacccaucccucag

SEQ ID NO: 1918480 - RNA, 19 nt, Artificial Sequence
  Description of Artificial Sequence: Synthetic oligonucleotide
acuuuaggaggcuggcuga

SEQ ID NO: 1918481 - RNA, 19 nt, Artificial Sequence
  Description of Artificial Sequence: Synthetic oligonucleotide
uggcugcccacuuuaggag

SEQ ID NO: 1918482 - RNA, 19 nt, Artificial Sequence
  Description of Artificial Sequence: Synthetic oligonucleotide
acacugucgccuccggagg

SEQ ID NO: 1918483 - RNA, 19 nt, Artificial Sequence
  Description of Artificial Sequence: Synthetic oligonucleotide
ggcauaucucuuugaaucc

SEQ ID NO: 1918484 - RNA, 19 nt, Artificial Sequence
  Description of Artificial Sequence: Synthetic oligonucleotide
ugugcagcuuucucgugac

SEQ ID NO: 1918485 - RNA, 19 nt, Artificial Sequence
  Description of Artificial Sequence: Synthetic oligonucleotide
augcuuaccgcaaaccucu

SEQ ID NO: 1918486 - RNA, 19 nt, Artificial Sequence
  Description of Artificial Sequence: Synthetic oligonucleotide
gagucauguaaaccagcac

SEQ ID NO: 1918487 - RNA, 19 nt, Artificial Sequence
  Description of Artificial Sequence: Synthetic oligonucleotide
acgaaccuucaacagauua

SEQ ID NO: 1918488 - RNA, 19 nt, Artificial Sequence
  Description of Artificial Sequence: Synthetic oligonucleotide
ucgagggauucuauucugu

SEQ ID NO: 1918489 - RNA, 19 nt, Artificial Sequence
  Description of Artificial Sequence: Synthetic oligonucleotide
gauggugugcagcuuucuc

SEQ ID NO: 1918490 - RNA, 19 nt, Artificial Sequence
  Description of Artificial Sequence: Synthetic oligonucleotide
gacugacaccaugaacucg

SEQ ID NO: 1918491 - RNA, 19 nt, Artificial Sequence
  Description of Artificial Sequence: Synthetic oligonucleotide
ugacugacaccaugaacuc

SEQ ID NO: 1918492 - RNA, 19 nt, Artificial Sequence
  Description of Artificial Sequence: Synthetic oligonucleotide
ugacaccaugaacucgagc

SEQ ID NO: 1918493 - RNA, 19 nt, Artificial Sequence
  Description of Artificial Sequence: Synthetic oligonucleotide
gagcuccuggccuccacgg

SEQ ID NO: 1918494 - RNA, 19 nt, Artificial Sequence
  Description of Artificial Sequence: Synthetic oligonucleotide
aggaccuggugugaccacc

SEQ ID NO: 1918495 - RNA, 19 nt, Artificial Sequence
  Description of Artificial Sequence: Synthetic oligonucleotide
ucgugacuaucauugggaa

SEQ ID NO: 1918496 - RNA, 19 nt, Artificial Sequence
  Description of Artificial Sequence: Synthetic oligonucleotide
ccaagguugagaauuugac

SEQ ID NO: 1918497 - RNA, 19 nt, Artificial Sequence
  Description of Artificial Sequence: Synthetic oligonucleotide
gguugagaauuugacaaug

SEQ ID NO: 1918498 - RNA, 19 nt, Artificial Sequence
  Description of Artificial Sequence: Synthetic oligonucleotide
guuaucuccuucaaaccga

SEQ ID NO: 1918499 - RNA, 19 nt, Artificial Sequence
  Description of Artificial Sequence: Synthetic oligonucleotide
uuaccgcaaaccucuugca

SEQ ID NO: 1918500 - RNA, 19 nt, Artificial Sequence
  Description of Artificial Sequence: Synthetic oligonucleotide
gguguaacuccaugauggg

SEQ ID NO: 1918501 - RNA, 19 nt, Artificial Sequence
  Description of Artificial Sequence: Synthetic oligonucleotide
cucccacccauucaauagc

SEQ ID NO: 1918502 - RNA, 19 nt, Artificial Sequence
  Description of Artificial Sequence: Synthetic oligonucleotide
ucauugggaagucgacuuc

SEQ ID NO: 1918503 - RNA, 19 nt, Artificial Sequence
  Description of Artificial Sequence: Synthetic oligonucleotide
cacucccucggcuaaacuc

SEQ ID NO: 1918504 - RNA, 19 nt, Artificial Sequence
  Description of Artificial Sequence: Synthetic oligonucleotide
uguuaauuucaggagccuu

SEQ ID NO: 1918505 - RNA, 19 nt, Artificial Sequence
  Description of Artificial Sequence: Synthetic oligonucleotide
ucaggaguguuggcaauug

SEQ ID NO: 1918506 - RNA, 19 nt, Artificial Sequence
  Description of Artificial Sequence: Synthetic oligonucleotide
aaaccagcacacauucagu

SEQ ID NO: 1918507 - RNA, 19 nt, Artificial Sequence
  Description of Artificial Sequence: Synthetic oligonucleotide
ugaggcuacccaucccuca

SEQ ID NO: 1918508 - RNA, 19 nt, Artificial Sequence
  Description of Artificial Sequence: Synthetic oligonucleotide
uagccaaugcuuaccgcaa

SEQ ID NO: 1918509 - RNA, 19 nt, Artificial Sequence
  Description of Artificial Sequence: Synthetic oligonucleotide
cucucuuuagacugccuca

SEQ ID NO: 1918510 - RNA, 19 nt, Artificial Sequence
  Description of Artificial Sequence: Synthetic oligonucleotide
cacauucaguuaucaggag

SEQ ID NO: 1918511 - RNA, 19 nt, Artificial Sequence
  Description of Artificial Sequence: Synthetic oligonucleotide
cucgagggauucuauucug

SEQ ID NO: 1918512 - RNA, 19 nt, Artificial Sequence
  Description of Artificial Sequence: Synthetic oligonucleotide
caguucagaaaggucucgg

SEQ ID NO: 1918513 - RNA, 19 nt, Artificial Sequence
  Description of Artificial Sequence: Synthetic oligonucleotide
gccaacaguagagaugagg

SEQ ID NO: 1918514 - RNA, 19 nt, Artificial Sequence
  Description of Artificial Sequence: Synthetic oligonucleotide
gaagucgacuucaaaauau

SEQ ID NO: 1918515 - RNA, 19 nt, Artificial Sequence
  Description of Artificial Sequence: Synthetic oligonucleotide
acucccucgucauccaagu

SEQ ID NO: 1918516 - RNA, 19 nt, Artificial Sequence
  Description of Artificial Sequence: Synthetic oligonucleotide
aggucucggagaucugcuc

SEQ ID NO: 1918517 - RNA, 19 nt, Artificial Sequence
  Description of Artificial Sequence: Synthetic oligonucleotide
ccucacaagaugcucaaug

SEQ ID NO: 1918518 - RNA, 19 nt, Artificial Sequence
  Description of Artificial Sequence: Synthetic oligonucleotide
agguugagaauuugacaau

SEQ ID NO: 1918519 - RNA, 19 nt, Artificial Sequence
  Description of Artificial Sequence: Synthetic oligonucleotide
gcaaaauauccucuguuaa

SEQ ID NO: 1918520 - RNA, 19 nt, Artificial Sequence
  Description of Artificial Sequence: Synthetic oligonucleotide
accugcucguaguuuauaa

SEQ ID NO: 1918521 - RNA, 19 nt, Artificial Sequence
  Description of Artificial Sequence: Synthetic oligonucleotide
cagcacgaaccuucaacag

SEQ ID NO: 1918522 - RNA, 19 nt, Artificial Sequence
  Description of Artificial Sequence: Synthetic oligonucleotide
cuuuguaaccaagaguucu

SEQ ID NO: 1918523 - RNA, 19 nt, Artificial Sequence
  Description of Artificial Sequence: Synthetic oligonucleotide
uugauggugugcagcuuuc

SEQ ID NO: 1918524 - RNA, 19 nt, Artificial Sequence
  Description of Artificial Sequence: Synthetic oligonucleotide
aagcuuuaauaagcugacu

SEQ ID NO: 1918525 - RNA, 19 nt, Artificial Sequence
  Description of Artificial Sequence: Synthetic oligonucleotide
caaauggcaagugagauuu

SEQ ID NO: 1918526 - RNA, 19 nt, Artificial Sequence
  Description of Artificial Sequence: Synthetic oligonucleotide
uuguaaccaagaguucuuc

SEQ ID NO: 1918527 - RNA, 19 nt, Artificial Sequence
  Description of Artificial Sequence: Synthetic oligonucleotide
gucgacuucaaaauauuua

SEQ ID NO: 1918528 - RNA, 19 nt, Artificial Sequence
  Description of Artificial Sequence: Synthetic oligonucleotide
uguucaccucugcccgagg

SEQ ID NO: 1918529 - RNA, 19 nt, Artificial Sequence
  Description of Artificial Sequence: Synthetic oligonucleotide
guacagcuccaucauguuc

SEQ ID NO: 1918530 - RNA, 19 nt, Artificial Sequence
  Description of Artificial Sequence: Synthetic oligonucleotide
guuuauaaacauggcuguc

SEQ ID NO: 1918531 - RNA, 19 nt, Artificial Sequence
  Description of Artificial Sequence: Synthetic oligonucleotide
aaccucuugcaaagagaag

SEQ ID NO: 1918532 - RNA, 19 nt, Artificial Sequence
  Description of Artificial Sequence: Synthetic oligonucleotide
acucccucggcuaaacuca

SEQ ID NO: 1918533 - RNA, 19 nt, Artificial Sequence
  Description of Artificial Sequence: Synthetic oligonucleotide
aucuaucugcagggugucc

SEQ ID NO: 1918534 - RNA, 19 nt, Artificial Sequence
  Description of Artificial Sequence: Synthetic oligonucleotide
aagucgacuucaaaauauu

SEQ ID NO: 1918535 - RNA, 19 nt, Artificial Sequence
  Description of Artificial Sequence: Synthetic oligonucleotide
uguucaccgcggaugccgu

SEQ ID NO: 1918536 - RNA, 19 nt, Artificial Sequence
  Description of Artificial Sequence: Synthetic oligonucleotide
aaccgagcuccuggccucc

SEQ ID NO: 1918537 - RNA, 19 nt, Artificial Sequence
  Description of Artificial Sequence: Synthetic oligonucleotide
uggugugaccaccuuugua

SEQ ID NO: 1918538 - RNA, 19 nt, Artificial Sequence
  Description of Artificial Sequence: Synthetic oligonucleotide
cagguuuccacuccugcga

SEQ ID NO: 1918539 - RNA, 19 nt, Artificial Sequence
  Description of Artificial Sequence: Synthetic oligonucleotide
gaugcucaauguacggauc

SEQ ID NO: 1918540 - RNA, 19 nt, Artificial Sequence
  Description of Artificial Sequence: Synthetic oligonucleotide
ggagccuuucucucuuuag

SEQ ID NO: 1918541 - RNA, 19 nt, Artificial Sequence
  Description of Artificial Sequence: Synthetic oligonucleotide
ccuggugugaccaccuuug

SEQ ID NO: 1918542 - RNA, 19 nt, Artificial Sequence
  Description of Artificial Sequence: Synthetic oligonucleotide
cagaguucgaagcgcagga

SEQ ID NO: 1918543 - RNA, 19 nt, Artificial Sequence
  Description of Artificial Sequence: Synthetic oligonucleotide
gugugaccaccuuuguaac

SEQ ID NO: 1918544 - RNA, 19 nt, Artificial Sequence
  Description of Artificial Sequence: Synthetic oligonucleotide
aggcuacccaucccucagg

SEQ ID NO: 1918545 - RNA, 19 nt, Artificial Sequence
  Description of Artificial Sequence: Synthetic oligonucleotide
cguaguuuauaaacauggc

SEQ ID NO: 1918546 - RNA, 19 nt, Artificial Sequence
  Description of Artificial Sequence: Synthetic oligonucleotide
auucaguuaucaggagugu

SEQ ID NO: 1918547 - RNA, 19 nt, Artificial Sequence
  Description of Artificial Sequence: Synthetic oligonucleotide
accgcggaugccgucuccc

SEQ ID NO: 1918548 - RNA, 19 nt, Artificial Sequence
  Description of Artificial Sequence: Synthetic oligonucleotide
ggcuacccaucccucaggg

SEQ ID NO: 1918549 - RNA, 19 nt, Artificial Sequence
  Description of Artificial Sequence: Synthetic oligonucleotide
caucuucgcaggugccgcg

SEQ ID NO: 1918550 - RNA, 19 nt, Artificial Sequence
  Description of Artificial Sequence: Synthetic oligonucleotide
ucuguucaccucugcccga

SEQ ID NO: 1918551 - RNA, 19 nt, Artificial Sequence
  Description of Artificial Sequence: Synthetic oligonucleotide
uccugcgaggucacacugu

SEQ ID NO: 1918552 - RNA, 19 nt, Artificial Sequence
  Description of Artificial Sequence: Synthetic oligonucleotide
ugcuggcugcccacuuuag

SEQ ID NO: 1918553 - RNA, 19 nt, Artificial Sequence
  Description of Artificial Sequence: Synthetic oligonucleotide
gcacacauucaguuaucag

SEQ ID NO: 1918554 - RNA, 19 nt, Artificial Sequence
  Description of Artificial Sequence: Synthetic oligonucleotide
caaugcuuaccgcaaaccu

SEQ ID NO: 1918555 - RNA, 19 nt, Artificial Sequence
  Description of Artificial Sequence: Synthetic oligonucleotide
uccggagguuuucaaucau

SEQ ID NO: 1918556 - RNA, 19 nt, Artificial Sequence
  Description of Artificial Sequence: Synthetic oligonucleotide
uucaccgcggaugccgucu

SEQ ID NO: 1918557 - RNA, 19 nt, Artificial Sequence
  Description of Artificial Sequence: Synthetic oligonucleotide
cuaucugcaggguguccuc

SEQ ID NO: 1918558 - RNA, 19 nt, Artificial Sequence
  Description of Artificial Sequence: Synthetic oligonucleotide
uguacggaucaugccagua

SEQ ID NO: 1918559 - RNA, 19 nt, Artificial Sequence
  Description of Artificial Sequence: Synthetic oligonucleotide
caugccaguagccaaugcu

SEQ ID NO: 1918560 - RNA, 19 nt, Artificial Sequence
  Description of Artificial Sequence: Synthetic oligonucleotide
agcuuucucgugacuauca

SEQ ID NO: 1918561 - RNA, 19 nt, Artificial Sequence
  Description of Artificial Sequence: Synthetic oligonucleotide
uaauggcgcaugagcugcu

SEQ ID NO: 1918562 - RNA, 19 nt, Artificial Sequence
  Description of Artificial Sequence: Synthetic oligonucleotide
cuuuaggaggcuggcugac

SEQ ID NO: 1918563 - RNA, 19 nt, Artificial Sequence
  Description of Artificial Sequence: Synthetic oligonucleotide
gaugccgucucccacccau

SEQ ID NO: 1918564 - RNA, 19 nt, Artificial Sequence
  Description of Artificial Sequence: Synthetic oligonucleotide
cugcgaggucacacugucg

SEQ ID NO: 1918565 - RNA, 19 nt, Artificial Sequence
  Description of Artificial Sequence: Synthetic oligonucleotide
ugccgucucccacccauuc

SEQ ID NO: 1918566 - RNA, 19 nt, Artificial Sequence
  Description of Artificial Sequence: Synthetic oligonucleotide
ugcccaaaccggucaucca

SEQ ID NO: 1918567 - RNA, 19 nt, Artificial Sequence
  Description of Artificial Sequence: Synthetic oligonucleotide
agucgacuucaaaauauuu

SEQ ID NO: 1918568 - RNA, 19 nt, Artificial Sequence
  Description of Artificial Sequence: Synthetic oligonucleotide
ugacuaucauugggaaguc

SEQ ID NO: 1918569 - RNA, 19 nt, Artificial Sequence
  Description of Artificial Sequence: Synthetic oligonucleotide
ggcaagugagauuuauuua

SEQ ID NO: 1918570 - RNA, 19 nt, Artificial Sequence
  Description of Artificial Sequence: Synthetic oligonucleotide
augccaguagccaaugcuu

SEQ ID NO: 1918571 - RNA, 19 nt, Artificial Sequence
  Description of Artificial Sequence: Synthetic oligonucleotide
cacggguggcccagcacag

SEQ ID NO: 1918572 - RNA, 19 nt, Artificial Sequence
  Description of Artificial Sequence: Synthetic oligonucleotide
ccaaugcuuaccgcaaacc

SEQ ID NO: 1918573 - RNA, 19 nt, Artificial Sequence
  Description of Artificial Sequence: Synthetic oligonucleotide
uggcgcaugagcugcucua

SEQ ID NO: 1918574 - RNA, 19 nt, Artificial Sequence
  Description of Artificial Sequence: Synthetic oligonucleotide
cucgagcaaaauauccucu

SEQ ID NO: 1918575 - RNA, 19 nt, Artificial Sequence
  Description of Artificial Sequence: Synthetic oligonucleotide
gggaagucgacuucaaaau

SEQ ID NO: 1918576 - RNA, 19 nt, Artificial Sequence
  Description of Artificial Sequence: Synthetic oligonucleotide
uagugacuugcagguuucc

SEQ ID NO: 1918577 - RNA, 19 nt, Artificial Sequence
  Description of Artificial Sequence: Synthetic oligonucleotide
auguacggaucaugccagu

SEQ ID NO: 1918578 - RNA, 19 nt, Artificial Sequence
  Description of Artificial Sequence: Synthetic oligonucleotide
gagacucuagugacuugca

SEQ ID NO: 1918579 - RNA, 19 nt, Artificial Sequence
  Description of Artificial Sequence: Synthetic oligonucleotide
ccacuguacagcuccauca

SEQ ID NO: 1918580 - RNA, 19 nt, Artificial Sequence
  Description of Artificial Sequence: Synthetic oligonucleotide
caaaccgagcuccuggccu

SEQ ID NO: 1918581 - RNA, 19 nt, Artificial Sequence
  Description of Artificial Sequence: Synthetic oligonucleotide
uuuugauggugugcagcuu

SEQ ID NO: 1918582 - RNA, 19 nt, Artificial Sequence
  Description of Artificial Sequence: Synthetic oligonucleotide
ucccucggcuaaacucagc

SEQ ID NO: 1918583 - RNA, 19 nt, Artificial Sequence
  Description of Artificial Sequence: Synthetic oligonucleotide
caucuaucugcaggguguc

SEQ ID NO: 1918584 - RNA, 19 nt, Artificial Sequence
  Description of Artificial Sequence: Synthetic oligonucleotide
cuccaaugauggcauaucu

SEQ ID NO: 1918585 - RNA, 19 nt, Artificial Sequence
  Description of Artificial Sequence: Synthetic oligonucleotide
agccaaugcuuaccgcaaa

SEQ ID NO: 1918586 - RNA, 19 nt, Artificial Sequence
  Description of Artificial Sequence: Synthetic oligonucleotide
ugcccacuuuaggaggcug

SEQ ID NO: 1918587 - RNA, 19 nt, Artificial Sequence
  Description of Artificial Sequence: Synthetic oligonucleotide
aggugccgcgcacucccuc

SEQ ID NO: 1918588 - RNA, 19 nt, Artificial Sequence
  Description of Artificial Sequence: Synthetic oligonucleotide
cagcacacauucaguuauc

SEQ ID NO: 1918589 - RNA, 19 nt, Artificial Sequence
  Description of Artificial Sequence: Synthetic oligonucleotide
gcucaauguacggaucaug

SEQ ID NO: 1918590 - RNA, 19 nt, Artificial Sequence
  Description of Artificial Sequence: Synthetic oligonucleotide
caacaguagagaugaggcu

SEQ ID NO: 1918591 - RNA, 19 nt, Artificial Sequence
  Description of Artificial Sequence: Synthetic oligonucleotide
uucgcaggugccgcgcacu

SEQ ID NO: 1918592 - RNA, 19 nt, Artificial Sequence
  Description of Artificial Sequence: Synthetic oligonucleotide
gccaaugcuuaccgcaaac

SEQ ID NO: 1918593 - RNA, 19 nt, Artificial Sequence
  Description of Artificial Sequence: Synthetic oligonucleotide
gcaggguguccucugggug

SEQ ID NO: 1918594 - RNA, 19 nt, Artificial Sequence
  Description of Artificial Sequence: Synthetic oligonucleotide
gcuacccaucccucagggg

SEQ ID NO: 1918595 - RNA, 19 nt, Artificial Sequence
  Description of Artificial Sequence: Synthetic oligonucleotide
guaaaccagcacacauuca

SEQ ID NO: 1918596 - RNA, 19 nt, Artificial Sequence
  Description of Artificial Sequence: Synthetic oligonucleotide
ggaguguuggcaauugugu

SEQ ID NO: 1918597 - RNA, 19 nt, Artificial Sequence
  Description of Artificial Sequence: Synthetic oligonucleotide
cucugcccgaggaagccca

SEQ ID NO: 1918598 - RNA, 19 nt, Artificial Sequence
  Description of Artificial Sequence: Synthetic oligonucleotide
aucaggaguguuggcaauu

SEQ ID NO: 1918599 - RNA, 19 nt, Artificial Sequence
  Description of Artificial Sequence: Synthetic oligonucleotide
ggucacacugucgccuccg

SEQ ID NO: 1918600 - RNA, 19 nt, Artificial Sequence
  Description of Artificial Sequence: Synthetic oligonucleotide
cgugacuaucauugggaag

SEQ ID NO: 1918601 - RNA, 19 nt, Artificial Sequence
  Description of Artificial Sequence: Synthetic oligonucleotide
cucuuuagacugccucaca

SEQ ID NO: 1918602 - RNA, 19 nt, Artificial Sequence
  Description of Artificial Sequence: Synthetic oligonucleotide
ccucuugcaaagagaagca

SEQ ID NO: 1918603 - RNA, 19 nt, Artificial Sequence
  Description of Artificial Sequence: Synthetic oligonucleotide
gaacucgagggauucuauu

SEQ ID NO: 1918604 - RNA, 19 nt, Artificial Sequence
  Description of Artificial Sequence: Synthetic oligonucleotide
ucugcccaaaccggucauc

SEQ ID NO: 1918605 - RNA, 19 nt, Artificial Sequence
  Description of Artificial Sequence: Synthetic oligonucleotide
gcucguaguuuauaaacau

SEQ ID NO: 1918606 - RNA, 19 nt, Artificial Sequence
  Description of Artificial Sequence: Synthetic oligonucleotide
ucugcccgaggaagcccac

SEQ ID NO: 1918607 - RNA, 19 nt, Artificial Sequence
  Description of Artificial Sequence: Synthetic oligonucleotide
gaccuucauccuuuaacuu

SEQ ID NO: 1918608 - RNA, 19 nt, Artificial Sequence
  Description of Artificial Sequence: Synthetic oligonucleotide
cuugcagguuuccacuccu

SEQ ID NO: 1918609 - RNA, 19 nt, Artificial Sequence
  Description of Artificial Sequence: Synthetic oligonucleotide
auugggaagucgacuucaa

SEQ ID NO: 1918610 - RNA, 19 nt, Artificial Sequence
  Description of Artificial Sequence: Synthetic oligonucleotide
cagcuuucucgugacuauc

SEQ ID NO: 1918611 - RNA, 19 nt, Artificial Sequence
  Description of Artificial Sequence: Synthetic oligonucleotide
gcaucuucgcaggugccgc

SEQ ID NO: 1918612 - RNA, 19 nt, Artificial Sequence
  Description of Artificial Sequence: Synthetic oligonucleotide
ucgcaggugccgcgcacuc

SEQ ID NO: 1918613 - RNA, 19 nt, Artificial Sequence
  Description of Artificial Sequence: Synthetic oligonucleotide
cuucgcaggugccgcgcac

SEQ ID NO: 1918614 - RNA, 19 nt, Artificial Sequence
  Description of Artificial Sequence: Synthetic oligonucleotide
ggaugugcaauaaggccaa

SEQ ID NO: 1918615 - RNA, 19 nt, Artificial Sequence
  Description of Artificial Sequence: Synthetic oligonucleotide
ccugcgaggucacacuguc

SEQ ID NO: 1918616 - RNA, 19 nt, Artificial Sequence
  Description of Artificial Sequence: Synthetic oligonucleotide
gaugugcaauaaggccaac

SEQ ID NO: 1918617 - RNA, 19 nt, Artificial Sequence
  Description of Artificial Sequence: Synthetic oligonucleotide
ccgaggaagcccacuguac

SEQ ID NO: 1918618 - RNA, 19 nt, Artificial Sequence
  Description of Artificial Sequence: Synthetic oligonucleotide
ggcgcaugagcugcucuag

SEQ ID NO: 1918619 - RNA, 19 nt, Artificial Sequence
  Description of Artificial Sequence: Synthetic oligonucleotide
ccaucuaucugcagggugu

SEQ ID NO: 1918620 - RNA, 19 nt, Artificial Sequence
  Description of Artificial Sequence: Synthetic oligonucleotide
cgaaccuucaacagauuaa

SEQ ID NO: 1918621 - RNA, 19 nt, Artificial Sequence
  Description of Artificial Sequence: Synthetic oligonucleotide
guguaacuccaugaugggu

SEQ ID NO: 1918622 - RNA, 19 nt, Artificial Sequence
  Description of Artificial Sequence: Synthetic oligonucleotide
caggaccuggugugaccac

SEQ ID NO: 1918623 - RNA, 19 nt, Artificial Sequence
  Description of Artificial Sequence: Synthetic oligonucleotide
cauccaagucagaguucga

SEQ ID NO: 1918624 - RNA, 19 nt, Artificial Sequence
  Description of Artificial Sequence: Synthetic oligonucleotide
ugcuuaccgcaaaccucuu

SEQ ID NO: 1918625 - RNA, 19 nt, Artificial Sequence
  Description of Artificial Sequence: Synthetic oligonucleotide
caaugauggcauaucucuu

SEQ ID NO: 1918626 - RNA, 19 nt, Artificial Sequence
  Description of Artificial Sequence: Synthetic oligonucleotide
ggcccagggcacucccucg

SEQ ID NO: 1918627 - RNA, 19 nt, Artificial Sequence
  Description of Artificial Sequence: Synthetic oligonucleotide
cucccucgucauccaaguc

SEQ ID NO: 1918628 - RNA, 19 nt, Artificial Sequence
  Description of Artificial Sequence: Synthetic oligonucleotide
gccuuucucucuuuagacu

SEQ ID NO: 1918629 - RNA, 19 nt, Artificial Sequence
  Description of Artificial Sequence: Synthetic oligonucleotide
gcaauuguguauucauguu

SEQ ID NO: 1918630 - RNA, 19 nt, Artificial Sequence
  Description of Artificial Sequence: Synthetic oligonucleotide
aucccagcuccaagguuga

SEQ ID NO: 1918631 - RNA, 19 nt, Artificial Sequence
  Description of Artificial Sequence: Synthetic oligonucleotide
gcgaggucacacugucgcc

SEQ ID NO: 1918632 - RNA, 19 nt, Artificial Sequence
  Description of Artificial Sequence: Synthetic oligonucleotide
cugaacagaagcggcuugu

SEQ ID NO: 1918633 - RNA, 19 nt, Artificial Sequence
  Description of Artificial Sequence: Synthetic oligonucleotide
gcacgaaccuucaacagau

SEQ ID NO: 1918634 - RNA, 19 nt, Artificial Sequence
  Description of Artificial Sequence: Synthetic oligonucleotide
ugucgccuccggagguuuu

SEQ ID NO: 1918635 - RNA, 19 nt, Artificial Sequence
  Description of Artificial Sequence: Synthetic oligonucleotide
gacugccucacaagaugcu

SEQ ID NO: 1918636 - RNA, 19 nt, Artificial Sequence
  Description of Artificial Sequence: Synthetic oligonucleotide
ggagguuuucaaucaugau

SEQ ID NO: 1918637 - RNA, 19 nt, Artificial Sequence
  Description of Artificial Sequence: Synthetic oligonucleotide
ccacggguggcccagcaca

SEQ ID NO: 1918638 - RNA, 19 nt, Artificial Sequence
  Description of Artificial Sequence: Synthetic oligonucleotide
cuguuaauuucaggagccu

SEQ ID NO: 1918639 - RNA, 19 nt, Artificial Sequence
  Description of Artificial Sequence: Synthetic oligonucleotide
gguguccucuggguguaac

SEQ ID NO: 1918640 - RNA, 19 nt, Artificial Sequence
  Description of Artificial Sequence: Synthetic oligonucleotide
guucaccgcggaugccguc

SEQ ID NO: 1918641 - RNA, 19 nt, Artificial Sequence
  Description of Artificial Sequence: Synthetic oligonucleotide
ugccgcgcacucccucguc

SEQ ID NO: 1918642 - RNA, 19 nt, Artificial Sequence
  Description of Artificial Sequence: Synthetic oligonucleotide
ccuucaaaccgagcuccug

SEQ ID NO: 1918643 - RNA, 19 nt, Artificial Sequence
  Description of Artificial Sequence: Synthetic oligonucleotide
gucgccuccggagguuuuc

SEQ ID NO: 1918644 - RNA, 19 nt, Artificial Sequence
  Description of Artificial Sequence: Synthetic oligonucleotide
gucugaacagaagcggcuu

SEQ ID NO: 1918645 - RNA, 19 nt, Artificial Sequence
  Description of Artificial Sequence: Synthetic oligonucleotide
gcugacugcucuggaguca

SEQ ID NO: 1918646 - RNA, 19 nt, Artificial Sequence
  Description of Artificial Sequence: Synthetic oligonucleotide
caggaguguuggcaauugu

SEQ ID NO: 1918647 - RNA, 19 nt, Artificial Sequence
  Description of Artificial Sequence: Synthetic oligonucleotide
cucuugcaaagagaagcau

SEQ ID NO: 1918648 - RNA, 19 nt, Artificial Sequence
  Description of Artificial Sequence: Synthetic oligonucleotide
cgucauccaagucagaguu

SEQ ID NO: 1918649 - RNA, 19 nt, Artificial Sequence
  Description of Artificial Sequence: Synthetic oligonucleotide
gccgucucccacccauuca

SEQ ID NO: 1918650 - RNA, 19 nt, Artificial Sequence
  Description of Artificial Sequence: Synthetic oligonucleotide
ccgucucccacccauucaa

SEQ ID NO: 1918651 - RNA, 19 nt, Artificial Sequence
  Description of Artificial Sequence: Synthetic oligonucleotide
gcuuucucgugacuaucau

SEQ ID NO: 1918652 - RNA, 19 nt, Artificial Sequence
  Description of Artificial Sequence: Synthetic oligonucleotide
cccucggcuaaacucagcu

SEQ ID NO: 1918653 - RNA, 19 nt, Artificial Sequence
  Description of Artificial Sequence: Synthetic oligonucleotide
cuggugugaccaccuuugu

SEQ ID NO: 1918654 - RNA, 19 nt, Artificial Sequence
  Description of Artificial Sequence: Synthetic oligonucleotide
gcgcaugagcugcucuaga

SEQ ID NO: 1918655 - RNA, 19 nt, Artificial Sequence
  Description of Artificial Sequence: Synthetic oligonucleotide
cgcaugagcugcucuagaa

SEQ ID NO: 1918656 - RNA, 19 nt, Artificial Sequence
  Description of Artificial Sequence: Synthetic oligonucleotide
gccgcgcacucccucguca

SEQ ID NO: 1918657 - RNA, 19 nt, Artificial Sequence
  Description of Artificial Sequence: Synthetic oligonucleotide
cggaugccgucucccaccc

SEQ ID NO: 1918658 - RNA, 19 nt, Artificial Sequence
  Description of Artificial Sequence: Synthetic oligonucleotide
cacugucgccuccggaggu

SEQ ID NO: 1918659 - RNA, 19 nt, Artificial Sequence
  Description of Artificial Sequence: Synthetic oligonucleotide
cccgaggaagcccacugua

SEQ ID NO: 1918660 - RNA, 19 nt, Artificial Sequence
  Description of Artificial Sequence: Synthetic oligonucleotide
cgagcaaaauauccucugu

SEQ ID NO: 1918661 - RNA, 19 nt, Artificial Sequence
  Description of Artificial Sequence: Synthetic oligonucleotide
caaaccggucauccauguu

SEQ ID NO: 1918662 - RNA, 19 nt, Artificial Sequence
  Description of Artificial Sequence: Synthetic oligonucleotide
gaccuggugugaccaccuu

SEQ ID NO: 1918663 - RNA, 19 nt, Artificial Sequence
  Description of Artificial Sequence: Synthetic oligonucleotide
caccugcucguaguuuaua

SEQ ID NO: 1918664 - RNA, 19 nt, Artificial Sequence
  Description of Artificial Sequence: Synthetic oligonucleotide
cucggagaucugcuccaau

SEQ ID NO: 1918665 - RNA, 19 nt, Artificial Sequence
  Description of Artificial Sequence: Synthetic oligonucleotide
cccauucaauagcagccgu

SEQ ID NO: 1918666 - RNA, 19 nt, Artificial Sequence
  Description of Artificial Sequence: Synthetic oligonucleotide
cgcggaugccgucucccac

SEQ ID NO: 1918667 - RNA, 19 nt, Artificial Sequence
  Description of Artificial Sequence: Synthetic oligonucleotide
ccuggccuccacggguggc

SEQ ID NO: 1918668 - RNA, 19 nt, Artificial Sequence
  Description of Artificial Sequence: Synthetic oligonucleotide
augccgucucccacccauu

SEQ ID NO: 1918669 - RNA, 19 nt, Artificial Sequence
  Description of Artificial Sequence: Synthetic oligonucleotide
cacgaaccuucaacagauu

SEQ ID NO: 1918670 - RNA, 19 nt, Artificial Sequence
  Description of Artificial Sequence: Synthetic oligonucleotide
gugccgcgcacucccucgu

SEQ ID NO: 1918671 - RNA, 19 nt, Artificial Sequence
  Description of Artificial Sequence: Synthetic oligonucleotide
cucuagugacuugcagguu

SEQ ID NO: 1918672 - RNA, 19 nt, Artificial Sequence
  Description of Artificial Sequence: Synthetic oligonucleotide
gcccgaggaagcccacugu

SEQ ID NO: 1918673 - RNA, 19 nt, Artificial Sequence
  Description of Artificial Sequence: Synthetic oligonucleotide
gcacucccucggcuaaacu

SEQ ID NO: 1918674 - RNA, 19 nt, Artificial Sequence
  Description of Artificial Sequence: Synthetic oligonucleotide
ccaugaacucgagcaaaau

SEQ ID NO: 1918675 - RNA, 19 nt, Artificial Sequence
  Description of Artificial Sequence: Synthetic oligonucleotide
ccgcggaugccgucuccca

SEQ ID NO: 1918676 - RNA, 19 nt, Artificial Sequence
  Description of Artificial Sequence: Synthetic oligonucleotide
ccucagcacgaaccuucaa

SEQ ID NO: 1918677 - RNA, 19 nt, Artificial Sequence
  Description of Artificial Sequence: Synthetic oligonucleotide
caggugccgcgcacucccu

SEQ ID NO: 1918678 - RNA, 19 nt, Artificial Sequence
  Description of Artificial Sequence: Synthetic oligonucleotide
ccucggcuaaacucagcuu

SEQ ID NO: 1918679 - RNA, 19 nt, Artificial Sequence
  Description of Artificial Sequence: Synthetic oligonucleotide
cugucgccuccggagguuu

SEQ ID NO: 1918680 - RNA, 19 nt, Artificial Sequence
  Description of Artificial Sequence: Synthetic oligonucleotide
cggcuaaacucagcuucca

SEQ ID NO: 1918681 - RNA, 19 nt, Artificial Sequence
  Description of Artificial Sequence: Synthetic oligonucleotide
cgccuccggagguuuucaa

SEQ ID NO: 1918682 - RNA, 19 nt, Artificial Sequence
  Description of Artificial Sequence: Synthetic oligonucleotide
aaaauauccgacgucaugg

SEQ ID NO: 1918683 - RNA, 19 nt, Artificial Sequence
  Description of Artificial Sequence: Synthetic oligonucleotide
gauaagagcacuuggaggc

SEQ ID NO: 1918684 - RNA, 19 nt, Artificial Sequence
  Description of Artificial Sequence: Synthetic oligonucleotide
ugcaucuuuaaaauauccg

SEQ ID NO: 1918685 - RNA, 19 nt, Artificial Sequence
  Description of Artificial Sequence: Synthetic oligonucleotide
ugagugaucucaaagacaa

SEQ ID NO: 1918686 - RNA, 19 nt, Artificial Sequence
  Description of Artificial Sequence: Synthetic oligonucleotide
ugucaaggcgauaagagca

SEQ ID NO: 1918687 - RNA, 19 nt, Artificial Sequence
  Description of Artificial Sequence: Synthetic oligonucleotide
aguguuagccggcuaagcc

SEQ ID NO: 1918688 - RNA, 19 nt, Artificial Sequence
  Description of Artificial Sequence: Synthetic oligonucleotide
uccuuauccaaaaucacca

SEQ ID NO: 1918689 - RNA, 19 nt, Artificial Sequence
  Description of Artificial Sequence: Synthetic oligonucleotide
uuuuagggguaucagccgg

SEQ ID NO: 1918690 - RNA, 19 nt, Artificial Sequence
  Description of Artificial Sequence: Synthetic oligonucleotide
cugauggacagcaagggcg

SEQ ID NO: 1918691 - RNA, 19 nt, Artificial Sequence
  Description of Artificial Sequence: Synthetic oligonucleotide
ugcacaaggacugugaaug

SEQ ID NO: 1918692 - RNA, 19 nt, Artificial Sequence
  Description of Artificial Sequence: Synthetic oligonucleotide
aaacuucuccacuggacgg

SEQ ID NO: 1918693 - RNA, 19 nt, Artificial Sequence
  Description of Artificial Sequence: Synthetic oligonucleotide
ugcuccuuauccaaaauca

SEQ ID NO: 1918694 - RNA, 19 nt, Artificial Sequence
  Description of Artificial Sequence: Synthetic oligonucleotide
agggagucggaacugaugg

SEQ ID NO: 1918695 - RNA, 19 nt, Artificial Sequence
  Description of Artificial Sequence: Synthetic oligonucleotide
ucuugugugcacaaggacu

SEQ ID NO: 1918696 - RNA, 19 nt, Artificial Sequence
  Description of Artificial Sequence: Synthetic oligonucleotide
agcguggucauccuuggcc

SEQ ID NO: 1918697 - RNA, 19 nt, Artificial Sequence
  Description of Artificial Sequence: Synthetic oligonucleotide
uagaggaucaggugcacgg

SEQ ID NO: 1918698 - RNA, 19 nt, Artificial Sequence
  Description of Artificial Sequence: Synthetic oligonucleotide
cacauagaggaucaggugc

SEQ ID NO: 1918699 - RNA, 19 nt, Artificial Sequence
  Description of Artificial Sequence: Synthetic oligonucleotide
caugucaaggcgauaagag

SEQ ID NO: 1918700 - RNA, 19 nt, Artificial Sequence
  Description of Artificial Sequence: Synthetic oligonucleotide
caaacuucuccacuggacg

SEQ ID NO: 1918701 - RNA, 19 nt, Artificial Sequence
  Description of Artificial Sequence: Synthetic oligonucleotide
ucaggaaccaccgcgaugc

SEQ ID NO: 1918702 - RNA, 19 nt, Artificial Sequence
  Description of Artificial Sequence: Synthetic oligonucleotide
uccuugaugaccuguaucu

SEQ ID NO: 1918703 - RNA, 19 nt, Artificial Sequence
  Description of Artificial Sequence: Synthetic oligonucleotide
caucuuuaaaauauccgac

SEQ ID NO: 1918704 - RNA, 19 nt, Artificial Sequence
  Description of Artificial Sequence: Synthetic oligonucleotide
aggguugugauccaggaca

SEQ ID NO: 1918705 - RNA, 19 nt, Artificial Sequence
  Description of Artificial Sequence: Synthetic oligonucleotide
uaaucuugaggaugaaggc

SEQ ID NO: 1918706 - RNA, 19 nt, Artificial Sequence
  Description of Artificial Sequence: Synthetic oligonucleotide
uuugacgcagugaagcgug

SEQ ID NO: 1918707 - RNA, 19 nt, Artificial Sequence
  Description of Artificial Sequence: Synthetic oligonucleotide
uccaggagugguuugacgc

SEQ ID NO: 1918708 - RNA, 19 nt, Artificial Sequence
  Description of Artificial Sequence: Synthetic oligonucleotide
agugguuugacgcagugaa

SEQ ID NO: 1918709 - RNA, 19 nt, Artificial Sequence
  Description of Artificial Sequence: Synthetic oligonucleotide
gaaacuuugcucuggugac

SEQ ID NO: 1918710 - RNA, 19 nt, Artificial Sequence
  Description of Artificial Sequence: Synthetic oligonucleotide
uggacggugcuccuuaucc

SEQ ID NO: 1918711 - RNA, 19 nt, Artificial Sequence
  Description of Artificial Sequence: Synthetic oligonucleotide
cauuaccuucuccacaucg

SEQ ID NO: 1918712 - RNA, 19 nt, Artificial Sequence
  Description of Artificial Sequence: Synthetic oligonucleotide
ugagacagcagggagucgg

SEQ ID NO: 1918713 - RNA, 19 nt, Artificial Sequence
  Description of Artificial Sequence: Synthetic oligonucleotide
acaaggacugugaaugugc

SEQ ID NO: 1918714 - RNA, 19 nt, Artificial Sequence
  Description of Artificial Sequence: Synthetic oligonucleotide
gaaauggugucuguccugg

SEQ ID NO: 1918715 - RNA, 19 nt, Artificial Sequence
  Description of Artificial Sequence: Synthetic oligonucleotide
aaguugagguccuggcgcg

SEQ ID NO: 1918716 - RNA, 19 nt, Artificial Sequence
  Description of Artificial Sequence: Synthetic oligonucleotide
cuugugugcacaaggacug

SEQ ID NO: 1918717 - RNA, 19 nt, Artificial Sequence
  Description of Artificial Sequence: Synthetic oligonucleotide
ugaggaugaaggcucgcag

SEQ ID NO: 1918718 - RNA, 19 nt, Artificial Sequence
  Description of Artificial Sequence: Synthetic oligonucleotide
ugguuugacgcagugaagc

SEQ ID NO: 1918719 - RNA, 19 nt, Artificial Sequence
  Description of Artificial Sequence: Synthetic oligonucleotide
aaggcugccucacgaaguc

SEQ ID NO: 1918720 - RNA, 19 nt, Artificial Sequence
  Description of Artificial Sequence: Synthetic oligonucleotide
aaauauccgacgucauggu

SEQ ID NO: 1918721 - RNA, 19 nt, Artificial Sequence
  Description of Artificial Sequence: Synthetic oligonucleotide
guagaccucgcgcacauag

SEQ ID NO: 1918722 - RNA, 19 nt, Artificial Sequence
  Description of Artificial Sequence: Synthetic oligonucleotide
gaacucggagagcacgucg

SEQ ID NO: 1918723 - RNA, 19 nt, Artificial Sequence
  Description of Artificial Sequence: Synthetic oligonucleotide
aacuuugcucuggugacag

SEQ ID NO: 1918724 - RNA, 19 nt, Artificial Sequence
  Description of Artificial Sequence: Synthetic oligonucleotide
acugugaaugugcagccug

SEQ ID NO: 1918725 - RNA, 19 nt, Artificial Sequence
  Description of Artificial Sequence: Synthetic oligonucleotide
cucagcuguguuuaugagc

SEQ ID NO: 1918726 - RNA, 19 nt, Artificial Sequence
  Description of Artificial Sequence: Synthetic oligonucleotide
cagauggacaguguuagcc

SEQ ID NO: 1918727 - RNA, 19 nt, Artificial Sequence
  Description of Artificial Sequence: Synthetic oligonucleotide
ucggguucgaaacuuugcu

SEQ ID NO: 1918728 - RNA, 19 nt, Artificial Sequence
  Description of Artificial Sequence: Synthetic oligonucleotide
aagcguguccugaauguac

SEQ ID NO: 1918729 - RNA, 19 nt, Artificial Sequence
  Description of Artificial Sequence: Synthetic oligonucleotide
uguguuuaugagcucgcuc

SEQ ID NO: 1918730 - RNA, 19 nt, Artificial Sequence
  Description of Artificial Sequence: Synthetic oligonucleotide
uaugagcucgcucuuccac

SEQ ID NO: 1918731 - RNA, 19 nt, Artificial Sequence
  Description of Artificial Sequence: Synthetic oligonucleotide
agaccucgcgcacauagag

SEQ ID NO: 1918732 - RNA, 19 nt, Artificial Sequence
  Description of Artificial Sequence: Synthetic oligonucleotide
agucggaacugauggacag

SEQ ID NO: 1918733 - RNA, 19 nt, Artificial Sequence
  Description of Artificial Sequence: Synthetic oligonucleotide
ucgucugccaagauccaug

SEQ ID NO: 1918734 - RNA, 19 nt, Artificial Sequence
  Description of Artificial Sequence: Synthetic oligonucleotide
uccacaucguucuucucca

SEQ ID NO: 1918735 - RNA, 19 nt, Artificial Sequence
  Description of Artificial Sequence: Synthetic oligonucleotide
cacacuaaucuugaggaug

SEQ ID NO: 1918736 - RNA, 19 nt, Artificial Sequence
  Description of Artificial Sequence: Synthetic oligonucleotide
cugagaagcccaaccagag

SEQ ID NO: 1918737 - RNA, 19 nt, Artificial Sequence
  Description of Artificial Sequence: Synthetic oligonucleotide
guguuagccggcuaagccc

SEQ ID NO: 1918738 - RNA, 19 nt, Artificial Sequence
  Description of Artificial Sequence: Synthetic oligonucleotide
aaggcgauaagagcacuug

SEQ ID NO: 1918739 - RNA, 19 nt, Artificial Sequence
  Description of Artificial Sequence: Synthetic oligonucleotide
uaucagccggggaucaugc

SEQ ID NO: 1918740 - RNA, 19 nt, Artificial Sequence
  Description of Artificial Sequence: Synthetic oligonucleotide
aacucggagagcacgucgg

SEQ ID NO: 1918741 - RNA, 19 nt, Artificial Sequence
  Description of Artificial Sequence: Synthetic oligonucleotide
acuaaucuugaggaugaag

SEQ ID NO: 1918742 - RNA, 19 nt, Artificial Sequence
  Description of Artificial Sequence: Synthetic oligonucleotide
augcccacgggguagaccu

SEQ ID NO: 1918743 - RNA, 19 nt, Artificial Sequence
  Description of Artificial Sequence: Synthetic oligonucleotide
aggcgauaagagcacuugg

SEQ ID NO: 1918744 - RNA, 19 nt, Artificial Sequence
  Description of Artificial Sequence: Synthetic oligonucleotide
ugggaaguccuugaugacc

SEQ ID NO: 1918745 - RNA, 19 nt, Artificial Sequence
  Description of Artificial Sequence: Synthetic oligonucleotide
gacgcagugaagcgugucc

SEQ ID NO: 1918746 - RNA, 19 nt, Artificial Sequence
  Description of Artificial Sequence: Synthetic oligonucleotide
uccucuacgacugcgggcu

SEQ ID NO: 1918747 - RNA, 19 nt, Artificial Sequence
  Description of Artificial Sequence: Synthetic oligonucleotide
ugccucacgaagucaagca

SEQ ID NO: 1918748 - RNA, 19 nt, Artificial Sequence
  Description of Artificial Sequence: Synthetic oligonucleotide
uucgaaacuuugcucuggu

SEQ ID NO: 1918749 - RNA, 19 nt, Artificial Sequence
  Description of Artificial Sequence: Synthetic oligonucleotide
cucgcucuuccacauagag

SEQ ID NO: 1918750 - RNA, 19 nt, Artificial Sequence
  Description of Artificial Sequence: Synthetic oligonucleotide
ucggaacugauggacagca

SEQ ID NO: 1918751 - RNA, 19 nt, Artificial Sequence
  Description of Artificial Sequence: Synthetic oligonucleotide
aauauccgacgucaugguu

SEQ ID NO: 1918752 - RNA, 19 nt, Artificial Sequence
  Description of Artificial Sequence: Synthetic oligonucleotide
ugcucuggugacagcagcc

SEQ ID NO: 1918753 - RNA, 19 nt, Artificial Sequence
  Description of Artificial Sequence: Synthetic oligonucleotide
ugugcacaaggacugugaa

SEQ ID NO: 1918754 - RNA, 19 nt, Artificial Sequence
  Description of Artificial Sequence: Synthetic oligonucleotide
agcaucacacacacuaauc

SEQ ID NO: 1918755 - RNA, 19 nt, Artificial Sequence
  Description of Artificial Sequence: Synthetic oligonucleotide
ugggaaggcugccucacga

SEQ ID NO: 1918756 - RNA, 19 nt, Artificial Sequence
  Description of Artificial Sequence: Synthetic oligonucleotide
gaugcugccgcggaaccag

SEQ ID NO: 1918757 - RNA, 19 nt, Artificial Sequence
  Description of Artificial Sequence: Synthetic oligonucleotide
ucggagagcacgucggcca

SEQ ID NO: 1918758 - RNA, 19 nt, Artificial Sequence
  Description of Artificial Sequence: Synthetic oligonucleotide
uguacugguucagcucugg

SEQ ID NO: 1918759 - RNA, 19 nt, Artificial Sequence
  Description of Artificial Sequence: Synthetic oligonucleotide
acgaagucaagcaggacug

SEQ ID NO: 1918760 - RNA, 19 nt, Artificial Sequence
  Description of Artificial Sequence: Synthetic oligonucleotide
acguuguacuucuugcgcu

SEQ ID NO: 1918761 - RNA, 19 nt, Artificial Sequence
  Description of Artificial Sequence: Synthetic oligonucleotide
agggguaucagccggggau

SEQ ID NO: 1918762 - RNA, 19 nt, Artificial Sequence
  Description of Artificial Sequence: Synthetic oligonucleotide
ucggccucggguucgaaac

SEQ ID NO: 1918763 - RNA, 19 nt, Artificial Sequence
  Description of Artificial Sequence: Synthetic oligonucleotide
gguuugacgcagugaagcg

SEQ ID NO: 1918764 - RNA, 19 nt, Artificial Sequence
  Description of Artificial Sequence: Synthetic oligonucleotide
cucggguucgaaacuuugc

SEQ ID NO: 1918765 - RNA, 19 nt, Artificial Sequence
  Description of Artificial Sequence: Synthetic oligonucleotide
acgcgggaaacgcagcccg

SEQ ID NO: 1918766 - RNA, 19 nt, Artificial Sequence
  Description of Artificial Sequence: Synthetic oligonucleotide
cacuuggccaaaguugagg

SEQ ID NO: 1918767 - RNA, 19 nt, Artificial Sequence
  Description of Artificial Sequence: Synthetic oligonucleotide
gacaguguuagccggcuaa

SEQ ID NO: 1918768 - RNA, 19 nt, Artificial Sequence
  Description of Artificial Sequence: Synthetic oligonucleotide
uuagggguaucagccgggg

SEQ ID NO: 1918769 - RNA, 19 nt, Artificial Sequence
  Description of Artificial Sequence: Synthetic oligonucleotide
gcgauaagagcacuuggag

SEQ ID NO: 1918770 - RNA, 19 nt, Artificial Sequence
  Description of Artificial Sequence: Synthetic oligonucleotide
acacuaaucuugaggauga

SEQ ID NO: 1918771 - RNA, 19 nt, Artificial Sequence
  Description of Artificial Sequence: Synthetic oligonucleotide
uaagagcacuuggaggcag

SEQ ID NO: 1918772 - RNA, 19 nt, Artificial Sequence
  Description of Artificial Sequence: Synthetic oligonucleotide
auagaggaucaggugcacg

SEQ ID NO: 1918773 - RNA, 19 nt, Artificial Sequence
  Description of Artificial Sequence: Synthetic oligonucleotide
ggugacaggacaucugaac

SEQ ID NO: 1918774 - RNA, 19 nt, Artificial Sequence
  Description of Artificial Sequence: Synthetic oligonucleotide
cacgugagacagcagggag

SEQ ID NO: 1918775 - RNA, 19 nt, Artificial Sequence
  Description of Artificial Sequence: Synthetic oligonucleotide
aagucaagcaggacugaga

SEQ ID NO: 1918776 - RNA, 19 nt, Artificial Sequence
  Description of Artificial Sequence: Synthetic oligonucleotide
gauccaugggaaguccuug

SEQ ID NO: 1918777 - RNA, 19 nt, Artificial Sequence
  Description of Artificial Sequence: Synthetic oligonucleotide
gugaaugugcagccuggag

SEQ ID NO: 1918778 - RNA, 19 nt, Artificial Sequence
  Description of Artificial Sequence: Synthetic oligonucleotide
ucggccaccacuuggccaa

SEQ ID NO: 1918779 - RNA, 19 nt, Artificial Sequence
  Description of Artificial Sequence: Synthetic oligonucleotide
caggaacucggagagcacg

SEQ ID NO: 1918780 - RNA, 19 nt, Artificial Sequence
  Description of Artificial Sequence: Synthetic oligonucleotide
acaugucaaggcgauaaga

SEQ ID NO: 1918781 - RNA, 19 nt, Artificial Sequence
  Description of Artificial Sequence: Synthetic oligonucleotide
caucugaaccggcacguug

SEQ ID NO: 1918782 - RNA, 19 nt, Artificial Sequence
  Description of Artificial Sequence: Synthetic oligonucleotide
ggacaucugaaccggcacg

SEQ ID NO: 1918783 - RNA, 19 nt, Artificial Sequence
  Description of Artificial Sequence: Synthetic oligonucleotide
cugaauguacugguucagc

SEQ ID NO: 1918784 - RNA, 19 nt, Artificial Sequence
  Description of Artificial Sequence: Synthetic oligonucleotide
ccucacgaagucaagcagg

SEQ ID NO: 1918785 - RNA, 19 nt, Artificial Sequence
  Description of Artificial Sequence: Synthetic oligonucleotide
ucaugcauguggacauccu

SEQ ID NO: 1918786 - RNA, 19 nt, Artificial Sequence
  Description of Artificial Sequence: Synthetic oligonucleotide
cugagugaucucaaagaca

SEQ ID NO: 1918787 - RNA, 19 nt, Artificial Sequence
  Description of Artificial Sequence: Synthetic oligonucleotide
ggaaccaccgcgaugcugc

SEQ ID NO: 1918788 - RNA, 19 nt, Artificial Sequence
  Description of Artificial Sequence: Synthetic oligonucleotide
acugagaagcccaaccaga

SEQ ID NO: 1918789 - RNA, 19 nt, Artificial Sequence
  Description of Artificial Sequence: Synthetic oligonucleotide
uccauguuucggguggcag

SEQ ID NO: 1918790 - RNA, 19 nt, Artificial Sequence
  Description of Artificial Sequence: Synthetic oligonucleotide
augagcucgcucuuccaca

SEQ ID NO: 1918791 - RNA, 19 nt, Artificial Sequence
  Description of Artificial Sequence: Synthetic oligonucleotide
aacuucuccacuggacggu

SEQ ID NO: 1918792 - RNA, 19 nt, Artificial Sequence
  Description of Artificial Sequence: Synthetic oligonucleotide
ucgcgcacauagaggauca

SEQ ID NO: 1918793 - RNA, 19 nt, Artificial Sequence
  Description of Artificial Sequence: Synthetic oligonucleotide
ucuacgacugcgggcuccg

SEQ ID NO: 1918794 - RNA, 19 nt, Artificial Sequence
  Description of Artificial Sequence: Synthetic oligonucleotide
uuaugagcucgcucuucca

SEQ ID NO: 1918795 - RNA, 19 nt, Artificial Sequence
  Description of Artificial Sequence: Synthetic oligonucleotide
ucgaaacuuugcucuggug

SEQ ID NO: 1918796 - RNA, 19 nt, Artificial Sequence
  Description of Artificial Sequence: Synthetic oligonucleotide
ggccucaggaaccaccgcg

SEQ ID NO: 1918797 - RNA, 19 nt, Artificial Sequence
  Description of Artificial Sequence: Synthetic oligonucleotide
ugugugcacaaggacugug

SEQ ID NO: 1918798 - RNA, 19 nt, Artificial Sequence
  Description of Artificial Sequence: Synthetic oligonucleotide
gaagcccaaccagaggggc

SEQ ID NO: 1918799 - RNA, 19 nt, Artificial Sequence
  Description of Artificial Sequence: Synthetic oligonucleotide
auauccgacgucaugguuu

SEQ ID NO: 1918800 - RNA, 19 nt, Artificial Sequence
  Description of Artificial Sequence: Synthetic oligonucleotide
acgggguagaccucgcgca

SEQ ID NO: 1918801 - RNA, 19 nt, Artificial Sequence
  Description of Artificial Sequence: Synthetic oligonucleotide
ccggggaucaugcaugugg

SEQ ID NO: 1918802 - RNA, 19 nt, Artificial Sequence
  Description of Artificial Sequence: Synthetic oligonucleotide
guacugguucagcucuggg

SEQ ID NO: 1918803 - RNA, 19 nt, Artificial Sequence
  Description of Artificial Sequence: Synthetic oligonucleotide
cacgaagucaagcaggacu

SEQ ID NO: 1918804 - RNA, 19 nt, Artificial Sequence
  Description of Artificial Sequence: Synthetic oligonucleotide
cacgggguagaccucgcgc

SEQ ID NO: 1918805 - RNA, 19 nt, Artificial Sequence
  Description of Artificial Sequence: Synthetic oligonucleotide
auggacaguguuagccggc

SEQ ID NO: 1918806 - RNA, 19 nt, Artificial Sequence
  Description of Artificial Sequence: Synthetic oligonucleotide
auagagcugcaucuuuaaa

SEQ ID NO: 1918807 - RNA, 19 nt, Artificial Sequence
  Description of Artificial Sequence: Synthetic oligonucleotide
ccggcuaagccccaggagg

SEQ ID NO: 1918808 - RNA, 19 nt, Artificial Sequence
  Description of Artificial Sequence: Synthetic oligonucleotide
cuguucgucugccaagauc

SEQ ID NO: 1918809 - RNA, 19 nt, Artificial Sequence
  Description of Artificial Sequence: Synthetic oligonucleotide
cacgucggccaccacuugg

SEQ ID NO: 1918810 - RNA, 19 nt, Artificial Sequence
  Description of Artificial Sequence: Synthetic oligonucleotide
uauccgacgucaugguuuu

SEQ ID NO: 1918811 - RNA, 19 nt, Artificial Sequence
  Description of Artificial Sequence: Synthetic oligonucleotide
auccaugggaaguccuuga

SEQ ID NO: 1918812 - RNA, 19 nt, Artificial Sequence
  Description of Artificial Sequence: Synthetic oligonucleotide
uggcgcgugagcgugguca

SEQ ID NO: 1918813 - RNA, 19 nt, Artificial Sequence
  Description of Artificial Sequence: Synthetic oligonucleotide
cugggcaccgaguggcagg

SEQ ID NO: 1918814 - RNA, 19 nt, Artificial Sequence
  Description of Artificial Sequence: Synthetic oligonucleotide
uagaccucgcgcacauaga

SEQ ID NO: 1918815 - RNA, 19 nt, Artificial Sequence
  Description of Artificial Sequence: Synthetic oligonucleotide
uccuguucgucugccaaga

SEQ ID NO: 1918816 - RNA, 19 nt, Artificial Sequence
  Description of Artificial Sequence: Synthetic oligonucleotide
gaggguugugauccaggac

SEQ ID NO: 1918817 - RNA, 19 nt, Artificial Sequence
  Description of Artificial Sequence: Synthetic oligonucleotide
uacgacugcgggcuccgga

SEQ ID NO: 1918818 - RNA, 19 nt, Artificial Sequence
  Description of Artificial Sequence: Synthetic oligonucleotide
cacaugucaaggcgauaag

SEQ ID NO: 1918819 - RNA, 19 nt, Artificial Sequence
  Description of Artificial Sequence: Synthetic oligonucleotide
gaccucgcgcacauagagg

SEQ ID NO: 1918820 - RNA, 19 nt, Artificial Sequence
  Description of Artificial Sequence: Synthetic oligonucleotide
ggaaggcugccucacgaag

SEQ ID NO: 1918821 - RNA, 19 nt, Artificial Sequence
  Description of Artificial Sequence: Synthetic oligonucleotide
agugaagcguguccugaau

SEQ ID NO: 1918822 - RNA, 19 nt, Artificial Sequence
  Description of Artificial Sequence: Synthetic oligonucleotide
gcguggucauccuuggccg

SEQ ID NO: 1918823 - RNA, 19 nt, Artificial Sequence
  Description of Artificial Sequence: Synthetic oligonucleotide
aucugaaccggcacguugu

SEQ ID NO: 1918824 - RNA, 19 nt, Artificial Sequence
  Description of Artificial Sequence: Synthetic oligonucleotide
uguccugaauguacugguu

SEQ ID NO: 1918825 - RNA, 19 nt, Artificial Sequence
  Description of Artificial Sequence: Synthetic oligonucleotide
gcggccacaugucaaggcg

SEQ ID NO: 1918826 - RNA, 19 nt, Artificial Sequence
  Description of Artificial Sequence: Synthetic oligonucleotide
gacggugcuccuuauccaa

SEQ ID NO: 1918827 - RNA, 19 nt, Artificial Sequence
  Description of Artificial Sequence: Synthetic oligonucleotide
uccgcgcuccucuacgacu

SEQ ID NO: 1918828 - RNA, 19 nt, Artificial Sequence
  Description of Artificial Sequence: Synthetic oligonucleotide
cuccucuacgacugcgggc

SEQ ID NO: 1918829 - RNA, 19 nt, Artificial Sequence
  Description of Artificial Sequence: Synthetic oligonucleotide
cagccggggaucaugcaug

SEQ ID NO: 1918830 - RNA, 19 nt, Artificial Sequence
  Description of Artificial Sequence: Synthetic oligonucleotide
agucuccugggaaggcugc

SEQ ID NO: 1918831 - RNA, 19 nt, Artificial Sequence
  Description of Artificial Sequence: Synthetic oligonucleotide
cacaaggacugugaaugug

SEQ ID NO: 1918832 - RNA, 19 nt, Artificial Sequence
  Description of Artificial Sequence: Synthetic oligonucleotide
cuggcaucguucccuaguc

SEQ ID NO: 1918833 - RNA, 19 nt, Artificial Sequence
  Description of Artificial Sequence: Synthetic oligonucleotide
acacacuaaucuugaggau

SEQ ID NO: 1918834 - RNA, 19 nt, Artificial Sequence
  Description of Artificial Sequence: Synthetic oligonucleotide
guucagcucugggugacag

SEQ ID NO: 1918835 - RNA, 19 nt, Artificial Sequence
  Description of Artificial Sequence: Synthetic oligonucleotide
cauagagcugcaucuuuaa

SEQ ID NO: 1918836 - RNA, 19 nt, Artificial Sequence
  Description of Artificial Sequence: Synthetic oligonucleotide
guaucagccggggaucaug

SEQ ID NO: 1918837 - RNA, 19 nt, Artificial Sequence
  Description of Artificial Sequence: Synthetic oligonucleotide
ucaaggcgauaagagcacu

SEQ ID NO: 1918838 - RNA, 19 nt, Artificial Sequence
  Description of Artificial Sequence: Synthetic oligonucleotide
acaggacaucugaaccggc

SEQ ID NO: 1918839 - RNA, 19 nt, Artificial Sequence
  Description of Artificial Sequence: Synthetic oligonucleotide
ggcaucguucccuagucuc

SEQ ID NO: 1918840 - RNA, 19 nt, Artificial Sequence
  Description of Artificial Sequence: Synthetic oligonucleotide
gguucgaaacuuugcucug

SEQ ID NO: 1918841 - RNA, 19 nt, Artificial Sequence
  Description of Artificial Sequence: Synthetic oligonucleotide
auaagagcacuuggaggca

SEQ ID NO: 1918842 - RNA, 19 nt, Artificial Sequence
  Description of Artificial Sequence: Synthetic oligonucleotide
ggagucggaacugauggac

SEQ ID NO: 1918843 - RNA, 19 nt, Artificial Sequence
  Description of Artificial Sequence: Synthetic oligonucleotide
uggcaucguucccuagucu

SEQ ID NO: 1918844 - RNA, 19 nt, Artificial Sequence
  Description of Artificial Sequence: Synthetic oligonucleotide
ggguucgaaacuuugcucu

SEQ ID NO: 1918845 - RNA, 19 nt, Artificial Sequence
  Description of Artificial Sequence: Synthetic oligonucleotide
cucaggaaccaccgcgaug

SEQ ID NO: 1918846 - RNA, 19 nt, Artificial Sequence
  Description of Artificial Sequence: Synthetic oligonucleotide
ugaaggcucgcagcagcug

SEQ ID NO: 1918847 - RNA, 19 nt, Artificial Sequence
  Description of Artificial Sequence: Synthetic oligonucleotide
gcaucacacacacuaaucu

SEQ ID NO: 1918848 - RNA, 19 nt, Artificial Sequence
  Description of Artificial Sequence: Synthetic oligonucleotide
cucccggcggaaaucccgc

SEQ ID NO: 1918849 - RNA, 19 nt, Artificial Sequence
  Description of Artificial Sequence: Synthetic oligonucleotide
cucgcgcacauagaggauc

SEQ ID NO: 1918850 - RNA, 19 nt, Artificial Sequence
  Description of Artificial Sequence: Synthetic oligonucleotide
cgaaacuuugcucugguga

SEQ ID NO: 1918851 - RNA, 19 nt, Artificial Sequence
  Description of Artificial Sequence: Synthetic oligonucleotide
gucugccaagauccauggg

SEQ ID NO: 1918852 - RNA, 19 nt, Artificial Sequence
  Description of Artificial Sequence: Synthetic oligonucleotide
cagcaagggcggcugagug

SEQ ID NO: 1918853 - RNA, 19 nt, Artificial Sequence
  Description of Artificial Sequence: Synthetic oligonucleotide
gccaaaguugagguccugg

SEQ ID NO: 1918854 - RNA, 19 nt, Artificial Sequence
  Description of Artificial Sequence: Synthetic oligonucleotide
acgacugcgggcuccggau

SEQ ID NO: 1918855 - RNA, 19 nt, Artificial Sequence
  Description of Artificial Sequence: Synthetic oligonucleotide
gaugcccacgggguagacc

SEQ ID NO: 1918856 - RNA, 19 nt, Artificial Sequence
  Description of Artificial Sequence: Synthetic oligonucleotide
ucugaaccggcacguugua

SEQ ID NO: 1918857 - RNA, 19 nt, Artificial Sequence
  Description of Artificial Sequence: Synthetic oligonucleotide
caccauuaccuucuccaca

SEQ ID NO: 1918858 - RNA, 19 nt, Artificial Sequence
  Description of Artificial Sequence: Synthetic oligonucleotide
gacugcgggcuccggauuc

SEQ ID NO: 1918859 - RNA, 19 nt, Artificial Sequence
  Description of Artificial Sequence: Synthetic oligonucleotide
gccucacgaagucaagcag

SEQ ID NO: 1918860 - RNA, 19 nt, Artificial Sequence
  Description of Artificial Sequence: Synthetic oligonucleotide
gagucggaacugauggaca

SEQ ID NO: 1918861 - RNA, 19 nt, Artificial Sequence
  Description of Artificial Sequence: Synthetic oligonucleotide
ucccucccggcggaaaucc

SEQ ID NO: 1918862 - RNA, 19 nt, Artificial Sequence
  Description of Artificial Sequence: Synthetic oligonucleotide
uugacgcagugaagcgugu

SEQ ID NO: 1918863 - RNA, 19 nt, Artificial Sequence
  Description of Artificial Sequence: Synthetic oligonucleotide
aaccaccgcgaugcugccg

SEQ ID NO: 1918864 - RNA, 19 nt, Artificial Sequence
  Description of Artificial Sequence: Synthetic oligonucleotide
uucggccucggguucgaaa

SEQ ID NO: 1918865 - RNA, 19 nt, Artificial Sequence
  Description of Artificial Sequence: Synthetic oligonucleotide
aaugugcagccuggagggu

SEQ ID NO: 1918866 - RNA, 19 nt, Artificial Sequence
  Description of Artificial Sequence: Synthetic oligonucleotide
gacaucugaaccggcacgu

SEQ ID NO: 1918867 - RNA, 19 nt, Artificial Sequence
  Description of Artificial Sequence: Synthetic oligonucleotide
acgcagugaagcguguccu

SEQ ID NO: 1918868 - RNA, 19 nt, Artificial Sequence
  Description of Artificial Sequence: Synthetic oligonucleotide
ggagugguuugacgcagug

SEQ ID NO: 1918869 - RNA, 19 nt, Artificial Sequence
  Description of Artificial Sequence: Synthetic oligonucleotide
acgugagacagcagggagu

SEQ ID NO: 1918870 - RNA, 19 nt, Artificial Sequence
  Description of Artificial Sequence: Synthetic oligonucleotide
cauagaggaucaggugcac

SEQ ID NO: 1918871 - RNA, 19 nt, Artificial Sequence
  Description of Artificial Sequence: Synthetic oligonucleotide
agaggggcggccacauguc

SEQ ID NO: 1918872 - RNA, 19 nt, Artificial Sequence
  Description of Artificial Sequence: Synthetic oligonucleotide
gugguuugacgcagugaag

SEQ ID NO: 1918873 - RNA, 19 nt, Artificial Sequence
  Description of Artificial Sequence: Synthetic oligonucleotide
ggcgauaagagcacuugga

SEQ ID NO: 1918874 - RNA, 19 nt, Artificial Sequence
  Description of Artificial Sequence: Synthetic oligonucleotide
agccggcuaagccccagga

SEQ ID NO: 1918875 - RNA, 19 nt, Artificial Sequence
  Description of Artificial Sequence: Synthetic oligonucleotide
gaaccaccgcgaugcugcc

SEQ ID NO: 1918876 - RNA, 19 nt, Artificial Sequence
  Description of Artificial Sequence: Synthetic oligonucleotide
aggaacucggagagcacgu

SEQ ID NO: 1918877 - RNA, 19 nt, Artificial Sequence
  Description of Artificial Sequence: Synthetic oligonucleotide
uucgucugccaagauccau

SEQ ID NO: 1918878 - RNA, 19 nt, Artificial Sequence
  Description of Artificial Sequence: Synthetic oligonucleotide
gagugguuugacgcaguga

SEQ ID NO: 1918879 - RNA, 19 nt, Artificial Sequence
  Description of Artificial Sequence: Synthetic oligonucleotide
accgcgaugcugccgcgga

SEQ ID NO: 1918880 - RNA, 19 nt, Artificial Sequence
  Description of Artificial Sequence: Synthetic oligonucleotide
uccuggcgcgugagcgugg

SEQ ID NO: 1918881 - RNA, 19 nt, Artificial Sequence
  Description of Artificial Sequence: Synthetic oligonucleotide
gcgcacauagaggaucagg

SEQ ID NO: 1918882 - RNA, 19 nt, Artificial Sequence
  Description of Artificial Sequence: Synthetic oligonucleotide
gucggaacugauggacagc

SEQ ID NO: 1918883 - RNA, 19 nt, Artificial Sequence
  Description of Artificial Sequence: Synthetic oligonucleotide
gagcacgucggccaccacu

SEQ ID NO: 1918884 - RNA, 19 nt, Artificial Sequence
  Description of Artificial Sequence: Synthetic oligonucleotide
ucacgaagucaagcaggac

SEQ ID NO: 1918885 - RNA, 19 nt, Artificial Sequence
  Description of Artificial Sequence: Synthetic oligonucleotide
aggaaccaccgcgaugcug

SEQ ID NO: 1918886 - RNA, 19 nt, Artificial Sequence
  Description of Artificial Sequence: Synthetic oligonucleotide
agggcggcugagugaucuc

SEQ ID NO: 1918887 - RNA, 19 nt, Artificial Sequence
  Description of Artificial Sequence: Synthetic oligonucleotide
cacgcgggaaacgcagccc

SEQ ID NO: 1918888 - RNA, 19 nt, Artificial Sequence
  Description of Artificial Sequence: Synthetic oligonucleotide
uccuggcaucguucccuag

SEQ ID NO: 1918889 - RNA, 19 nt, Artificial Sequence
  Description of Artificial Sequence: Synthetic oligonucleotide
uugugugcacaaggacugu

SEQ ID NO: 1918890 - RNA, 19 nt, Artificial Sequence
  Description of Artificial Sequence: Synthetic oligonucleotide
ggccggaucccucccggcg

SEQ ID NO: 1918891 - RNA, 19 nt, Artificial Sequence
  Description of Artificial Sequence: Synthetic oligonucleotide
cgucugccaagauccaugg

SEQ ID NO: 1918892 - RNA, 19 nt, Artificial Sequence
  Description of Artificial Sequence: Synthetic oligonucleotide
gucggccaccacuuggcca

SEQ ID NO: 1918893 - RNA, 19 nt, Artificial Sequence
  Description of Artificial Sequence: Synthetic oligonucleotide
ggagggugucagcagggac

SEQ ID NO: 1918894 - RNA, 19 nt, Artificial Sequence
  Description of Artificial Sequence: Synthetic oligonucleotide
ccucccggcggaaaucccg

SEQ ID NO: 1918895 - RNA, 19 nt, Artificial Sequence
  Description of Artificial Sequence: Synthetic oligonucleotide
ggggcggccacaugucaag

SEQ ID NO: 1918896 - RNA, 19 nt, Artificial Sequence
  Description of Artificial Sequence: Synthetic oligonucleotide
gaggggcggccacauguca

SEQ ID NO: 1918897 - RNA, 19 nt, Artificial Sequence
  Description of Artificial Sequence: Synthetic oligonucleotide
gcaucguucccuagucucc

SEQ ID NO: 1918898 - RNA, 19 nt, Artificial Sequence
  Description of Artificial Sequence: Synthetic oligonucleotide
aucagccggggaucaugca

SEQ ID NO: 1918899 - RNA, 19 nt, Artificial Sequence
  Description of Artificial Sequence: Synthetic oligonucleotide
agauccaugggaaguccuu

SEQ ID NO: 1918900 - RNA, 19 nt, Artificial Sequence
  Description of Artificial Sequence: Synthetic oligonucleotide
caaccagaggggcggccac

SEQ ID NO: 1918901 - RNA, 19 nt, Artificial Sequence
  Description of Artificial Sequence: Synthetic oligonucleotide
agcacgucggccaccacuu

SEQ ID NO: 1918902 - RNA, 19 nt, Artificial Sequence
  Description of Artificial Sequence: Synthetic oligonucleotide
ggcggccacaugucaaggc

SEQ ID NO: 1918903 - RNA, 19 nt, Artificial Sequence
  Description of Artificial Sequence: Synthetic oligonucleotide
cagaggggcggccacaugu

SEQ ID NO: 1918904 - RNA, 19 nt, Artificial Sequence
  Description of Artificial Sequence: Synthetic oligonucleotide
cugaaccggcacguuguac

SEQ ID NO: 1918905 - RNA, 19 nt, Artificial Sequence
  Description of Artificial Sequence: Synthetic oligonucleotide
acccucagcuguguuuaug

SEQ ID NO: 1918906 - RNA, 19 nt, Artificial Sequence
  Description of Artificial Sequence: Synthetic oligonucleotide
guuugacgcagugaagcgu

SEQ ID NO: 1918907 - RNA, 19 nt, Artificial Sequence
  Description of Artificial Sequence: Synthetic oligonucleotide
cauguuucggguggcagcu

SEQ ID NO: 1918908 - RNA, 19 nt, Artificial Sequence
  Description of Artificial Sequence: Synthetic oligonucleotide
gcuguguuuaugagcucgc

SEQ ID NO: 1918909 - RNA, 19 nt, Artificial Sequence
  Description of Artificial Sequence: Synthetic oligonucleotide
gccggaucccucccggcgg

SEQ ID NO: 1918910 - RNA, 19 nt, Artificial Sequence
  Description of Artificial Sequence: Synthetic oligonucleotide
ccucagcuguguuuaugag

SEQ ID NO: 1918911 - RNA, 19 nt, Artificial Sequence
  Description of Artificial Sequence: Synthetic oligonucleotide
ggauucggccucggguucg

SEQ ID NO: 1918912 - RNA, 19 nt, Artificial Sequence
  Description of Artificial Sequence: Synthetic oligonucleotide
gcacgcgggaaacgcagcc

SEQ ID NO: 1918913 - RNA, 19 nt, Artificial Sequence
  Description of Artificial Sequence: Synthetic oligonucleotide
cuccggauucggccucggg

SEQ ID NO: 1918914 - RNA, 19 nt, Artificial Sequence
  Description of Artificial Sequence: Synthetic oligonucleotide
cuggacggugcuccuuauc

SEQ ID NO: 1918915 - RNA, 19 nt, Artificial Sequence
  Description of Artificial Sequence: Synthetic oligonucleotide
ggaucaggugcacggccac

SEQ ID NO: 1918916 - RNA, 19 nt, Artificial Sequence
  Description of Artificial Sequence: Synthetic oligonucleotide
ucccggcggaaaucccgcc

SEQ ID NO: 1918917 - RNA, 19 nt, Artificial Sequence
  Description of Artificial Sequence: Synthetic oligonucleotide
cagcucugggugacaggac

SEQ ID NO: 1918918 - RNA, 19 nt, Artificial Sequence
  Description of Artificial Sequence: Synthetic oligonucleotide
ggauccccuggccucagga

SEQ ID NO: 1918919 - RNA, 19 nt, Artificial Sequence
  Description of Artificial Sequence: Synthetic oligonucleotide
ccucggguucgaaacuuug

SEQ ID NO: 1918920 - RNA, 19 nt, Artificial Sequence
  Description of Artificial Sequence: Synthetic oligonucleotide
ggacggugcuccuuaucca

SEQ ID NO: 1918921 - RNA, 19 nt, Artificial Sequence
  Description of Artificial Sequence: Synthetic oligonucleotide
gcauguggacauccuguuc

SEQ ID NO: 1918922 - RNA, 19 nt, Artificial Sequence
  Description of Artificial Sequence: Synthetic oligonucleotide
gccggcuaagccccaggag

SEQ ID NO: 1918923 - RNA, 19 nt, Artificial Sequence
  Description of Artificial Sequence: Synthetic oligonucleotide
cuccgcgcuccucuacgac

SEQ ID NO: 1918924 - RNA, 19 nt, Artificial Sequence
  Description of Artificial Sequence: Synthetic oligonucleotide
augcugccgcggaaccagc

SEQ ID NO: 1918925 - RNA, 19 nt, Artificial Sequence
  Description of Artificial Sequence: Synthetic oligonucleotide
gccccagacagcugggcac

SEQ ID NO: 1918926 - RNA, 19 nt, Artificial Sequence
  Description of Artificial Sequence: Synthetic oligonucleotide
cagugaagcguguccugaa

SEQ ID NO: 1918927 - RNA, 19 nt, Artificial Sequence
  Description of Artificial Sequence: Synthetic oligonucleotide
ccgaguggcaggcgcaccc

SEQ ID NO: 1918928 - RNA, 19 nt, Artificial Sequence
  Description of Artificial Sequence: Synthetic oligonucleotide
gucuccugggaaggcugcc

SEQ ID NO: 1918929 - RNA, 19 nt, Artificial Sequence
  Description of Artificial Sequence: Synthetic oligonucleotide
ggaagaugcccacggggua

SEQ ID NO: 1918930 - RNA, 19 nt, Artificial Sequence
  Description of Artificial Sequence: Synthetic oligonucleotide
aguugagguccuggcgcgu

SEQ ID NO: 1918931 - RNA, 19 nt, Artificial Sequence
  Description of Artificial Sequence: Synthetic oligonucleotide
gcgggaaacgcagcccggg

SEQ ID NO: 1918932 - RNA, 19 nt, Artificial Sequence
  Description of Artificial Sequence: Synthetic oligonucleotide
gcagugaagcguguccuga

SEQ ID NO: 1918933 - RNA, 19 nt, Artificial Sequence
  Description of Artificial Sequence: Synthetic oligonucleotide
cagcaucacacacacuaau

SEQ ID NO: 1918934 - RNA, 19 nt, Artificial Sequence
  Description of Artificial Sequence: Synthetic oligonucleotide
ccgcacgcgggaaacgcag

SEQ ID NO: 1918935 - RNA, 19 nt, Artificial Sequence
  Description of Artificial Sequence: Synthetic oligonucleotide
aucccgcccucuccgcgcu

SEQ ID NO: 1918936 - RNA, 19 nt, Artificial Sequence
  Description of Artificial Sequence: Synthetic oligonucleotide
gugcacaaggacugugaau

SEQ ID NO: 1918937 - RNA, 19 nt, Artificial Sequence
  Description of Artificial Sequence: Synthetic oligonucleotide
agccaccggccggggaccc

SEQ ID NO: 1918938 - RNA, 19 nt, Artificial Sequence
  Description of Artificial Sequence: Synthetic oligonucleotide
gccaagauccaugggaagu

SEQ ID NO: 1918939 - RNA, 19 nt, Artificial Sequence
  Description of Artificial Sequence: Synthetic oligonucleotide
gcccacgggguagaccucg

SEQ ID NO: 1918940 - RNA, 19 nt, Artificial Sequence
  Description of Artificial Sequence: Synthetic oligonucleotide
gcagggacccacggcaccc

SEQ ID NO: 1918941 - RNA, 19 nt, Artificial Sequence
  Description of Artificial Sequence: Synthetic oligonucleotide
ggcgcggagggugucagca

SEQ ID NO: 1918942 - RNA, 19 nt, Artificial Sequence
  Description of Artificial Sequence: Synthetic oligonucleotide
caccgcgaugcugccgcgg

SEQ ID NO: 1918943 - RNA, 19 nt, Artificial Sequence
  Description of Artificial Sequence: Synthetic oligonucleotide
ccacuuggccaaaguugag

SEQ ID NO: 1918944 - RNA, 19 nt, Artificial Sequence
  Description of Artificial Sequence: Synthetic oligonucleotide
gcggccggaucccucccgg

SEQ ID NO: 1918945 - RNA, 19 nt, Artificial Sequence
  Description of Artificial Sequence: Synthetic oligonucleotide
cggguucgaaacuuugcuc

SEQ ID NO: 1918946 - RNA, 19 nt, Artificial Sequence
  Description of Artificial Sequence: Synthetic oligonucleotide
cgcuccucuacgacugcgg

SEQ ID NO: 1918947 - RNA, 19 nt, Artificial Sequence
  Description of Artificial Sequence: Synthetic oligonucleotide
ccgcgcuccucuacgacug

SEQ ID NO: 1918948 - RNA, 19 nt, Artificial Sequence
  Description of Artificial Sequence: Synthetic oligonucleotide
caccgaguggcaggcgcac

SEQ ID NO: 1918949 - RNA, 19 nt, Artificial Sequence
  Description of Artificial Sequence: Synthetic oligonucleotide
gggguaucagccggggauc

SEQ ID NO: 1918950 - RNA, 19 nt, Artificial Sequence
  Description of Artificial Sequence: Synthetic oligonucleotide
caaggcgauaagagcacuu

SEQ ID NO: 1918951 - RNA, 19 nt, Artificial Sequence
  Description of Artificial Sequence: Synthetic oligonucleotide
ggcugccucacgaagucaa

SEQ ID NO: 1918952 - RNA, 19 nt, Artificial Sequence
  Description of Artificial Sequence: Synthetic oligonucleotide
gcggaaaucccgcccucuc

SEQ ID NO: 1918953 - RNA, 19 nt, Artificial Sequence
  Description of Artificial Sequence: Synthetic oligonucleotide
gggaaggcugccucacgaa

SEQ ID NO: 1918954 - RNA, 19 nt, Artificial Sequence
  Description of Artificial Sequence: Synthetic oligonucleotide
aggcugccucacgaaguca

SEQ ID NO: 1918955 - RNA, 19 nt, Artificial Sequence
  Description of Artificial Sequence: Synthetic oligonucleotide
cccggcggaaaucccgccc

SEQ ID NO: 1918956 - RNA, 19 nt, Artificial Sequence
  Description of Artificial Sequence: Synthetic oligonucleotide
cuacgacugcgggcuccgg

SEQ ID NO: 1918957 - RNA, 19 nt, Artificial Sequence
  Description of Artificial Sequence: Synthetic oligonucleotide
cagccaccggccggggacc

SEQ ID NO: 1918958 - RNA, 19 nt, Artificial Sequence
  Description of Artificial Sequence: Synthetic oligonucleotide
gggcggccacaugucaagg

SEQ ID NO: 1918959 - RNA, 19 nt, Artificial Sequence
  Description of Artificial Sequence: Synthetic oligonucleotide
ccacaucguucuucuccag

SEQ ID NO: 1918960 - RNA, 19 nt, Artificial Sequence
  Description of Artificial Sequence: Synthetic oligonucleotide
gcugagaaauggugucugu

SEQ ID NO: 1918961 - RNA, 19 nt, Artificial Sequence
  Description of Artificial Sequence: Synthetic oligonucleotide
gcacccucagcuguguuua

SEQ ID NO: 1918962 - RNA, 19 nt, Artificial Sequence
  Description of Artificial Sequence: Synthetic oligonucleotide
gcgcuccucuacgacugcg

SEQ ID NO: 1918963 - RNA, 19 nt, Artificial Sequence
  Description of Artificial Sequence: Synthetic oligonucleotide
guccuggcaucguucccua

SEQ ID NO: 1918964 - RNA, 19 nt, Artificial Sequence
  Description of Artificial Sequence: Synthetic oligonucleotide
ggcaccccgccccgcacgc

SEQ ID NO: 1918965 - RNA, 19 nt, Artificial Sequence
  Description of Artificial Sequence: Synthetic oligonucleotide
cguggucauccuuggccgc

SEQ ID NO: 1918966 - RNA, 19 nt, Artificial Sequence
  Description of Artificial Sequence: Synthetic oligonucleotide
ggguaucagccggggauca

SEQ ID NO: 1918967 - RNA, 19 nt, Artificial Sequence
  Description of Artificial Sequence: Synthetic oligonucleotide
ggagagcacgucggccacc

SEQ ID NO: 1918968 - RNA, 19 nt, Artificial Sequence
  Description of Artificial Sequence: Synthetic oligonucleotide
cagcaccgcccugggcugg

SEQ ID NO: 1918969 - RNA, 19 nt, Artificial Sequence
  Description of Artificial Sequence: Synthetic oligonucleotide
ggcuccggauucggccucg

SEQ ID NO: 1918970 - RNA, 19 nt, Artificial Sequence
  Description of Artificial Sequence: Synthetic oligonucleotide
gcaagggcggcugagugau

SEQ ID NO: 1918971 - RNA, 19 nt, Artificial Sequence
  Description of Artificial Sequence: Synthetic oligonucleotide
guuucggguggcagcuucu

SEQ ID NO: 1918972 - RNA, 19 nt, Artificial Sequence
  Description of Artificial Sequence: Synthetic oligonucleotide
cggcacguuguacuucuug

SEQ ID NO: 1918973 - RNA, 19 nt, Artificial Sequence
  Description of Artificial Sequence: Synthetic oligonucleotide
gggcggcugagugaucuca

SEQ ID NO: 1918974 - RNA, 19 nt, Artificial Sequence
  Description of Artificial Sequence: Synthetic oligonucleotide
cacuaaucuugaggaugaa

SEQ ID NO: 1918975 - RNA, 19 nt, Artificial Sequence
  Description of Artificial Sequence: Synthetic oligonucleotide
gggguagaccucgcgcaca

SEQ ID NO: 1918976 - RNA, 19 nt, Artificial Sequence
  Description of Artificial Sequence: Synthetic oligonucleotide
cgggaaacgcagcccgggc

SEQ ID NO: 1918977 - RNA, 19 nt, Artificial Sequence
  Description of Artificial Sequence: Synthetic oligonucleotide
ccccgcacgcgggaaacgc

SEQ ID NO: 1918978 - RNA, 19 nt, Artificial Sequence
  Description of Artificial Sequence: Synthetic oligonucleotide
ccuggcaucguucccuagu

SEQ ID NO: 1918979 - RNA, 19 nt, Artificial Sequence
  Description of Artificial Sequence: Synthetic oligonucleotide
gcggcugagugaucucaaa

SEQ ID NO: 1918980 - RNA, 19 nt, Artificial Sequence
  Description of Artificial Sequence: Synthetic oligonucleotide
auguuucggguggcagcuu

SEQ ID NO: 1918981 - RNA, 19 nt, Artificial Sequence
  Description of Artificial Sequence: Synthetic oligonucleotide
ccacgugagacagcaggga

SEQ ID NO: 1918982 - RNA, 19 nt, Artificial Sequence
  Description of Artificial Sequence: Synthetic oligonucleotide
cgcgggaaacgcagcccgg

SEQ ID NO: 1918983 - RNA, 19 nt, Artificial Sequence
  Description of Artificial Sequence: Synthetic oligonucleotide
gcacgucggccaccacuug

SEQ ID NO: 1918984 - RNA, 19 nt, Artificial Sequence
  Description of Artificial Sequence: Synthetic oligonucleotide
ccaaccagaggggcggcca

SEQ ID NO: 1918985 - RNA, 19 nt, Artificial Sequence
  Description of Artificial Sequence: Synthetic oligonucleotide
ggguagaccucgcgcacau

SEQ ID NO: 1918986 - RNA, 19 nt, Artificial Sequence
  Description of Artificial Sequence: Synthetic oligonucleotide
cgcacgcgggaaacgcagc

SEQ ID NO: 1918987 - RNA, 19 nt, Artificial Sequence
  Description of Artificial Sequence: Synthetic oligonucleotide
gggacccacggcaccccgc

SEQ ID NO: 1918988 - RNA, 19 nt, Artificial Sequence
  Description of Artificial Sequence: Synthetic oligonucleotide
ggacaguguuagccggcua

SEQ ID NO: 1918989 - RNA, 19 nt, Artificial Sequence
  Description of Artificial Sequence: Synthetic oligonucleotide
gguccuggcgcgugagcgu

SEQ ID NO: 1918990 - RNA, 19 nt, Artificial Sequence
  Description of Artificial Sequence: Synthetic oligonucleotide
gcaccgaguggcaggcgca

SEQ ID NO: 1918991 - RNA, 19 nt, Artificial Sequence
  Description of Artificial Sequence: Synthetic oligonucleotide
cgggguagaccucgcgcac

SEQ ID NO: 1918992 - RNA, 19 nt, Artificial Sequence
  Description of Artificial Sequence: Synthetic oligonucleotide
cuggcgcgugagcgugguc

SEQ ID NO: 1918993 - RNA, 19 nt, Artificial Sequence
  Description of Artificial Sequence: Synthetic oligonucleotide
ggcggcugagugaucucaa

SEQ ID NO: 1918994 - RNA, 19 nt, Artificial Sequence
  Description of Artificial Sequence: Synthetic oligonucleotide
gcuccggauucggccucgg

SEQ ID NO: 1918995 - RNA, 19 nt, Artificial Sequence
  Description of Artificial Sequence: Synthetic oligonucleotide
cggccacaugucaaggcga

SEQ ID NO: 1918996 - RNA, 19 nt, Artificial Sequence
  Description of Artificial Sequence: Synthetic oligonucleotide
auucggccucggguucgaa

SEQ ID NO: 1918997 - RNA, 19 nt, Artificial Sequence
  Description of Artificial Sequence: Synthetic oligonucleotide
gcucgcucuuccacauaga

SEQ ID NO: 1918998 - RNA, 19 nt, Artificial Sequence
  Description of Artificial Sequence: Synthetic oligonucleotide
caccggccggggacccuuc

SEQ ID NO: 1918999 - RNA, 19 nt, Artificial Sequence
  Description of Artificial Sequence: Synthetic oligonucleotide
cggauucggccucggguuc

SEQ ID NO: 1919000 - RNA, 19 nt, Artificial Sequence
  Description of Artificial Sequence: Synthetic oligonucleotide
gccccgcacgcgggaaacg

SEQ ID NO: 1919001 - RNA, 19 nt, Artificial Sequence
  Description of Artificial Sequence: Synthetic oligonucleotide
cccgcacgcgggaaacgca

SEQ ID NO: 1919002 - RNA, 19 nt, Artificial Sequence
  Description of Artificial Sequence: Synthetic oligonucleotide
ggaucccucccggcggaaa

SEQ ID NO: 1919003 - RNA, 19 nt, Artificial Sequence
  Description of Artificial Sequence: Synthetic oligonucleotide
ggcggaaaucccgcccucu

SEQ ID NO: 1919004 - RNA, 19 nt, Artificial Sequence
  Description of Artificial Sequence: Synthetic oligonucleotide
gccggggaucaugcaugug

SEQ ID NO: 1919005 - RNA, 19 nt, Artificial Sequence
  Description of Artificial Sequence: Synthetic oligonucleotide
ggcuaagccccaggaggcu

SEQ ID NO: 1919006 - RNA, 19 nt, Artificial Sequence
  Description of Artificial Sequence: Synthetic oligonucleotide
ggcgcgugagcguggucau

SEQ ID NO: 1919007 - RNA, 19 nt, Artificial Sequence
  Description of Artificial Sequence: Synthetic oligonucleotide
cgggccgggaagccccacc

SEQ ID NO: 1919008 - RNA, 19 nt, Artificial Sequence
  Description of Artificial Sequence: Synthetic oligonucleotide
cggcaccccgccccgcacg

SEQ ID NO: 1919009 - RNA, 19 nt, Artificial Sequence
  Description of Artificial Sequence: Synthetic oligonucleotide
ccucuacgacugcgggcuc

SEQ ID NO: 1919010 - RNA, 19 nt, Artificial Sequence
  Description of Artificial Sequence: Synthetic oligonucleotide
ccggcggaaaucccgcccu

SEQ ID NO: 1919011 - RNA, 19 nt, Artificial Sequence
  Description of Artificial Sequence: Synthetic oligonucleotide
caggaaccaccgcgaugcu

SEQ ID NO: 1919012 - RNA, 19 nt, Artificial Sequence
  Description of Artificial Sequence: Synthetic oligonucleotide
cguuguacuucuugcgcuu

SEQ ID NO: 1919013 - RNA, 19 nt, Artificial Sequence
  Description of Artificial Sequence: Synthetic oligonucleotide
gcccaaccagaggggcggc

SEQ ID NO: 1919014 - RNA, 19 nt, Artificial Sequence
  Description of Artificial Sequence: Synthetic oligonucleotide
ccggaucccucccggcgga

SEQ ID NO: 1919015 - RNA, 19 nt, Artificial Sequence
  Description of Artificial Sequence: Synthetic oligonucleotide
ggagggcgcggaggguguc

SEQ ID NO: 1919016 - RNA, 19 nt, Artificial Sequence
  Description of Artificial Sequence: Synthetic oligonucleotide
gguaucagccggggaucau

SEQ ID NO: 1919017 - RNA, 19 nt, Artificial Sequence
  Description of Artificial Sequence: Synthetic oligonucleotide
gguagaccucgcgcacaua

SEQ ID NO: 1919018 - RNA, 19 nt, Artificial Sequence
  Description of Artificial Sequence: Synthetic oligonucleotide
cacccucagcuguguuuau

SEQ ID NO: 1919019 - RNA, 19 nt, Artificial Sequence
  Description of Artificial Sequence: Synthetic oligonucleotide
cggaacugauggacagcaa

SEQ ID NO: 1919020 - RNA, 19 nt, Artificial Sequence
  Description of Artificial Sequence: Synthetic oligonucleotide
ccggggacccuucgcaggu

SEQ ID NO: 1919021 - RNA, 19 nt, Artificial Sequence
  Description of Artificial Sequence: Synthetic oligonucleotide
ccuugaugaccuguaucuu

SEQ ID NO: 1919022 - RNA, 19 nt, Artificial Sequence
  Description of Artificial Sequence: Synthetic oligonucleotide
ccucaggaaccaccgcgau

SEQ ID NO: 1919023 - RNA, 19 nt, Artificial Sequence
  Description of Artificial Sequence: Synthetic oligonucleotide
gcgcgugagcguggucauc

SEQ ID NO: 1919024 - RNA, 19 nt, Artificial Sequence
  Description of Artificial Sequence: Synthetic oligonucleotide
ccuguucgucugccaagau

SEQ ID NO: 1919025 - RNA, 19 nt, Artificial Sequence
  Description of Artificial Sequence: Synthetic oligonucleotide
gccucggguucgaaacuuu

SEQ ID NO: 1919026 - RNA, 19 nt, Artificial Sequence
  Description of Artificial Sequence: Synthetic oligonucleotide
ccacggcaccccgccccgc

SEQ ID NO: 1919027 - RNA, 19 nt, Artificial Sequence
  Description of Artificial Sequence: Synthetic oligonucleotide
cccucuccgcgcuccucua

SEQ ID NO: 1919028 - RNA, 19 nt, Artificial Sequence
  Description of Artificial Sequence: Synthetic oligonucleotide
ccgcgaugcugccgcggaa

SEQ ID NO: 1919029 - RNA, 19 nt, Artificial Sequence
  Description of Artificial Sequence: Synthetic oligonucleotide
cccgggccgggaagcccca

SEQ ID NO: 1919030 - RNA, 19 nt, Artificial Sequence
  Description of Artificial Sequence: Synthetic oligonucleotide
ccuggcgcgugagcguggu

SEQ ID NO: 1919031 - RNA, 19 nt, Artificial Sequence
  Description of Artificial Sequence: Synthetic oligonucleotide
cggggacccuucgcagguc

SEQ ID NO: 1919032 - RNA, 19 nt, Artificial Sequence
  Description of Artificial Sequence: Synthetic oligonucleotide
ccgccccgcacgcgggaaa

SEQ ID NO: 1919033 - RNA, 19 nt, Artificial Sequence
  Description of Artificial Sequence: Synthetic oligonucleotide
gcgcacccucagcuguguu

SEQ ID NO: 1919034 - RNA, 19 nt, Artificial Sequence
  Description of Artificial Sequence: Synthetic oligonucleotide
cccgccccgcacgcgggaa

SEQ ID NO: 1919035 - RNA, 19 nt, Artificial Sequence
  Description of Artificial Sequence: Synthetic oligonucleotide
gccaccggccggggacccu

SEQ ID NO: 1919036 - RNA, 19 nt, Artificial Sequence
  Description of Artificial Sequence: Synthetic oligonucleotide
ccgcccucuccgcgcuccu

SEQ ID NO: 1919037 - RNA, 19 nt, Artificial Sequence
  Description of Artificial Sequence: Synthetic oligonucleotide
ucuuguagaagucaaaagu

SEQ ID NO: 1919038 - RNA, 19 nt, Artificial Sequence
  Description of Artificial Sequence: Synthetic oligonucleotide
uguagaagucaaaagugcg

SEQ ID NO: 1919039 - RNA, 19 nt, Artificial Sequence
  Description of Artificial Sequence: Synthetic oligonucleotide
aaugacccuagauggaggc

SEQ ID NO: 1919040 - RNA, 19 nt, Artificial Sequence
  Description of Artificial Sequence: Synthetic oligonucleotide
uccaaugucaauuuugucu

SEQ ID NO: 1919041 - RNA, 19 nt, Artificial Sequence
  Description of Artificial Sequence: Synthetic oligonucleotide
acugaaucaucccagcggc

SEQ ID NO: 1919042 - RNA, 19 nt, Artificial Sequence
  Description of Artificial Sequence: Synthetic oligonucleotide
aagucaaaagugcggaagg

SEQ ID NO: 1919043 - RNA, 19 nt, Artificial Sequence
  Description of Artificial Sequence: Synthetic oligonucleotide
ucaaaagugcggaaggucc

SEQ ID NO: 1919044 - RNA, 19 nt, Artificial Sequence
  Description of Artificial Sequence: Synthetic oligonucleotide
aaggacaugucuccuggcc

SEQ ID NO: 1919045 - RNA, 19 nt, Artificial Sequence
  Description of Artificial Sequence: Synthetic oligonucleotide
caugucuaaaagcucaugg

SEQ ID NO: 1919046 - RNA, 19 nt, Artificial Sequence
  Description of Artificial Sequence: Synthetic oligonucleotide
auaauacuccgcgagacgc

SEQ ID NO: 1919047 - RNA, 19 nt, Artificial Sequence
  Description of Artificial Sequence: Synthetic oligonucleotide
uuaguaaguaguagugucc

SEQ ID NO: 1919048 - RNA, 19 nt, Artificial Sequence
  Description of Artificial Sequence: Synthetic oligonucleotide
caguagauuccauaggugg

SEQ ID NO: 1919049 - RNA, 19 nt, Artificial Sequence
  Description of Artificial Sequence: Synthetic oligonucleotide
gaggccauaauacuccgcg

SEQ ID NO: 1919050 - RNA, 19 nt, Artificial Sequence
  Description of Artificial Sequence: Synthetic oligonucleotide
uguaucuguccagauaucg

SEQ ID NO: 1919051 - RNA, 19 nt, Artificial Sequence
  Description of Artificial Sequence: Synthetic oligonucleotide
uugguagaggccauaauac

SEQ ID NO: 1919052 - RNA, 19 nt, Artificial Sequence
  Description of Artificial Sequence: Synthetic oligonucleotide
aguuggagucacuucauuc

SEQ ID NO: 1919053 - RNA, 19 nt, Artificial Sequence
  Description of Artificial Sequence: Synthetic oligonucleotide
aagucgauuggcuuguccu

SEQ ID NO: 1919054 - RNA, 19 nt, Artificial Sequence
  Description of Artificial Sequence: Synthetic oligonucleotide
ucucaguagauuccauagg

SEQ ID NO: 1919055 - RNA, 19 nt, Artificial Sequence
  Description of Artificial Sequence: Synthetic oligonucleotide
guuaguaaguaguaguguc

SEQ ID NO: 1919056 - RNA, 19 nt, Artificial Sequence
  Description of Artificial Sequence: Synthetic oligonucleotide
gauaaacuguuuccgcucc

SEQ ID NO: 1919057 - RNA, 19 nt, Artificial Sequence
  Description of Artificial Sequence: Synthetic oligonucleotide
aaguuaguaaguaguagug

SEQ ID NO: 1919058 - RNA, 19 nt, Artificial Sequence
  Description of Artificial Sequence: Synthetic oligonucleotide
uuccacauuggcucgaagc

SEQ ID NO: 1919059 - RNA, 19 nt, Artificial Sequence
  Description of Artificial Sequence: Synthetic oligonucleotide
guaaggacaugucuccugg

SEQ ID NO: 1919060 - RNA, 19 nt, Artificial Sequence
  Description of Artificial Sequence: Synthetic oligonucleotide
gaacauacucagcauccgg

SEQ ID NO: 1919061 - RNA, 19 nt, Artificial Sequence
  Description of Artificial Sequence: Synthetic oligonucleotide
agccaaugaacauacucag

SEQ ID NO: 1919062 - RNA, 19 nt, Artificial Sequence
  Description of Artificial Sequence: Synthetic oligonucleotide
agugcggaagguccgacgg

SEQ ID NO: 1919063 - RNA, 19 nt, Artificial Sequence
  Description of Artificial Sequence: Synthetic oligonucleotide
ucaguagauuccauaggug

SEQ ID NO: 1919064 - RNA, 19 nt, Artificial Sequence
  Description of Artificial Sequence: Synthetic oligonucleotide
acuguuuccgcuccuuuag

SEQ ID NO: 1919065 - RNA, 19 nt, Artificial Sequence
  Description of Artificial Sequence: Synthetic oligonucleotide
gagguaaggacaugucucc

SEQ ID NO: 1919066 - RNA, 19 nt, Artificial Sequence
  Description of Artificial Sequence: Synthetic oligonucleotide
ucccaugauacacugggac

SEQ ID NO: 1919067 - RNA, 19 nt, Artificial Sequence
  Description of Artificial Sequence: Synthetic oligonucleotide
ucuguccagauaucgcagg

SEQ ID NO: 1919068 - RNA, 19 nt, Artificial Sequence
  Description of Artificial Sequence: Synthetic oligonucleotide
auuggcucgaagcucccgg

SEQ ID NO: 1919069 - RNA, 19 nt, Artificial Sequence
  Description of Artificial Sequence: Synthetic oligonucleotide
uaaaagcucauggaaggug

SEQ ID NO: 1919070 - RNA, 19 nt, Artificial Sequence
  Description of Artificial Sequence: Synthetic oligonucleotide
aaaguggcaccguggaaca

SEQ ID NO: 1919071 - RNA, 19 nt, Artificial Sequence
  Description of Artificial Sequence: Synthetic oligonucleotide
auaggucaccucuggggcc

SEQ ID NO: 1919072 - RNA, 19 nt, Artificial Sequence
  Description of Artificial Sequence: Synthetic oligonucleotide
uaaguaguaguguccacaa

SEQ ID NO: 1919073 - RNA, 19 nt, Artificial Sequence
  Description of Artificial Sequence: Synthetic oligonucleotide
ucuguuuggggugguaagg

SEQ ID NO: 1919074 - RNA, 19 nt, Artificial Sequence
  Description of Artificial Sequence: Synthetic oligonucleotide
cacaaaaguggcaccgugg

SEQ ID NO: 1919075 - RNA, 19 nt, Artificial Sequence
  Description of Artificial Sequence: Synthetic oligonucleotide
acgucgauguccucguugg

SEQ ID NO: 1919076 - RNA, 19 nt, Artificial Sequence
  Description of Artificial Sequence: Synthetic oligonucleotide
uccucggagaagucgauug

SEQ ID NO: 1919077 - RNA, 19 nt, Artificial Sequence
  Description of Artificial Sequence: Synthetic oligonucleotide
aacaacgcggcgcgccacc

SEQ ID NO: 1919078 - RNA, 19 nt, Artificial Sequence
  Description of Artificial Sequence: Synthetic oligonucleotide
uugucuuugggaucugucu

SEQ ID NO: 1919079 - RNA, 19 nt, Artificial Sequence
  Description of Artificial Sequence: Synthetic oligonucleotide
aagcgcuucuguuuggggu

SEQ ID NO: 1919080 - RNA, 19 nt, Artificial Sequence
  Description of Artificial Sequence: Synthetic oligonucleotide
uucaaacacagguucccgc

SEQ ID NO: 1919081 - RNA, 19 nt, Artificial Sequence
  Description of Artificial Sequence: Synthetic oligonucleotide
aacccuguugccugggaug

SEQ ID NO: 1919082 - RNA, 19 nt, Artificial Sequence
  Description of Artificial Sequence: Synthetic oligonucleotide
caaaagugcggaagguccg

SEQ ID NO: 1919083 - RNA, 19 nt, Artificial Sequence
  Description of Artificial Sequence: Synthetic oligonucleotide
uuggucagcagccaaugaa

SEQ ID NO: 1919084 - RNA, 19 nt, Artificial Sequence
  Description of Artificial Sequence: Synthetic oligonucleotide
cauaauacuccgcgagacg

SEQ ID NO: 1919085 - RNA, 19 nt, Artificial Sequence
  Description of Artificial Sequence: Synthetic oligonucleotide
gaugcuggcugugcgaagg

SEQ ID NO: 1919086 - RNA, 19 nt, Artificial Sequence
  Description of Artificial Sequence: Synthetic oligonucleotide
cuucauucccaugauacac

SEQ ID NO: 1919087 - RNA, 19 nt, Artificial Sequence
  Description of Artificial Sequence: Synthetic oligonucleotide
cauccaaguuaguaaguag

SEQ ID NO: 1919088 - RNA, 19 nt, Artificial Sequence
  Description of Artificial Sequence: Synthetic oligonucleotide
aguaaguaguaguguccac

SEQ ID NO: 1919089 - RNA, 19 nt, Artificial Sequence
  Description of Artificial Sequence: Synthetic oligonucleotide
uaguaguguccacaaggag

SEQ ID NO: 1919090 - RNA, 19 nt, Artificial Sequence
  Description of Artificial Sequence: Synthetic oligonucleotide
ugaacauacucagcauccg

SEQ ID NO: 1919091 - RNA, 19 nt, Artificial Sequence
  Description of Artificial Sequence: Synthetic oligonucleotide
ucauucccaugauacacug

SEQ ID NO: 1919092 - RNA, 19 nt, Artificial Sequence
  Description of Artificial Sequence: Synthetic oligonucleotide
aaacacagguucccgcaug

SEQ ID NO: 1919093 - RNA, 19 nt, Artificial Sequence
  Description of Artificial Sequence: Synthetic oligonucleotide
gacgaagugcucccgguag

SEQ ID NO: 1919094 - RNA, 19 nt, Artificial Sequence
  Description of Artificial Sequence: Synthetic oligonucleotide
uaguaaguaguagugucca

SEQ ID NO: 1919095 - RNA, 19 nt, Artificial Sequence
  Description of Artificial Sequence: Synthetic oligonucleotide
uucuguuuggggugguaag

SEQ ID NO: 1919096 - RNA, 19 nt, Artificial Sequence
  Description of Artificial Sequence: Synthetic oligonucleotide
cccgaaugacccuagaugg

SEQ ID NO: 1919097 - RNA, 19 nt, Artificial Sequence
  Description of Artificial Sequence: Synthetic oligonucleotide
aaguaguaguguccacaag

SEQ ID NO: 1919098 - RNA, 19 nt, Artificial Sequence
  Description of Artificial Sequence: Synthetic oligonucleotide
aagugcggaagguccgacg

SEQ ID NO: 1919099 - RNA, 19 nt, Artificial Sequence
  Description of Artificial Sequence: Synthetic oligonucleotide
uagcuguugggcccgaaug

SEQ ID NO: 1919100 - RNA, 19 nt, Artificial Sequence
  Description of Artificial Sequence: Synthetic oligonucleotide
ugacccuagauggaggcag

SEQ ID NO: 1919101 - RNA, 19 nt, Artificial Sequence
  Description of Artificial Sequence: Synthetic oligonucleotide
uccuuuagcuguugggccc

SEQ ID NO: 1919102 - RNA, 19 nt, Artificial Sequence
  Description of Artificial Sequence: Synthetic oligonucleotide
aagcgcuggaagccagagc

SEQ ID NO: 1919103 - RNA, 19 nt, Artificial Sequence
  Description of Artificial Sequence: Synthetic oligonucleotide
uuugucuuugggaucuguc

SEQ ID NO: 1919104 - RNA, 19 nt, Artificial Sequence
  Description of Artificial Sequence: Synthetic oligonucleotide
caguccaaugucaauuuug

SEQ ID NO: 1919105 - RNA, 19 nt, Artificial Sequence
  Description of Artificial Sequence: Synthetic oligonucleotide
aacacagguucccgcaugu

SEQ ID NO: 1919106 - RNA, 19 nt, Artificial Sequence
  Description of Artificial Sequence: Synthetic oligonucleotide
uggcgaacaacgcggcgcg

SEQ ID NO: 1919107 - RNA, 19 nt, Artificial Sequence
  Description of Artificial Sequence: Synthetic oligonucleotide
uguuuccgcuccuuuagcu

SEQ ID NO: 1919108 - RNA, 19 nt, Artificial Sequence
  Description of Artificial Sequence: Synthetic oligonucleotide
aacgcggcgcgccaccagg

SEQ ID NO: 1919109 - RNA, 19 nt, Artificial Sequence
  Description of Artificial Sequence: Synthetic oligonucleotide
aauacuccgcgagacgcug

SEQ ID NO: 1919110 - RNA, 19 nt, Artificial Sequence
  Description of Artificial Sequence: Synthetic oligonucleotide
agcguaggccacaugaagg

SEQ ID NO: 1919111 - RNA, 19 nt, Artificial Sequence
  Description of Artificial Sequence: Synthetic oligonucleotide
aguuaguaaguaguagugu

SEQ ID NO: 1919112 - RNA, 19 nt, Artificial Sequence
  Description of Artificial Sequence: Synthetic oligonucleotide
auaucgcaggggcugcugg

SEQ ID NO: 1919113 - RNA, 19 nt, Artificial Sequence
  Description of Artificial Sequence: Synthetic oligonucleotide
ugaaucaucccagcggcac

SEQ ID NO: 1919114 - RNA, 19 nt, Artificial Sequence
  Description of Artificial Sequence: Synthetic oligonucleotide
ugguagaggccauaauacu

SEQ ID NO: 1919115 - RNA, 19 nt, Artificial Sequence
  Description of Artificial Sequence: Synthetic oligonucleotide
gcugguagcagggugaggg

SEQ ID NO: 1919116 - RNA, 19 nt, Artificial Sequence
  Description of Artificial Sequence: Synthetic oligonucleotide
cuugguagaggccauaaua

SEQ ID NO: 1919117 - RNA, 19 nt, Artificial Sequence
  Description of Artificial Sequence: Synthetic oligonucleotide
agggaagcgcuucuguuug

SEQ ID NO: 1919118 - RNA, 19 nt, Artificial Sequence
  Description of Artificial Sequence: Synthetic oligonucleotide
gaagucgauuggcuugucc

SEQ ID NO: 1919119 - RNA, 19 nt, Artificial Sequence
  Description of Artificial Sequence: Synthetic oligonucleotide
gaaugacccuagauggagg

SEQ ID NO: 1919120 - RNA, 19 nt, Artificial Sequence
  Description of Artificial Sequence: Synthetic oligonucleotide
gaagcgcuucuguuugggg

SEQ ID NO: 1919121 - RNA, 19 nt, Artificial Sequence
  Description of Artificial Sequence: Synthetic oligonucleotide
aaagcgcuggaagccagag

SEQ ID NO: 1919122 - RNA, 19 nt, Artificial Sequence
  Description of Artificial Sequence: Synthetic oligonucleotide
acuucauucccaugauaca

SEQ ID NO: 1919123 - RNA, 19 nt, Artificial Sequence
  Description of Artificial Sequence: Synthetic oligonucleotide
guagauuccauaggugggc

SEQ ID NO: 1919124 - RNA, 19 nt, Artificial Sequence
  Description of Artificial Sequence: Synthetic oligonucleotide
uguccagauaucgcagggg

SEQ ID NO: 1919125 - RNA, 19 nt, Artificial Sequence
  Description of Artificial Sequence: Synthetic oligonucleotide
aagaaggcaaagcgcugga

SEQ ID NO: 1919126 - RNA, 19 nt, Artificial Sequence
  Description of Artificial Sequence: Synthetic oligonucleotide
ggagaagucgauuggcuug

SEQ ID NO: 1919127 - RNA, 19 nt, Artificial Sequence
  Description of Artificial Sequence: Synthetic oligonucleotide
aaagugcggaagguccgac

SEQ ID NO: 1919128 - RNA, 19 nt, Artificial Sequence
  Description of Artificial Sequence: Synthetic oligonucleotide
ucggagaagucgauuggcu

SEQ ID NO: 1919129 - RNA, 19 nt, Artificial Sequence
  Description of Artificial Sequence: Synthetic oligonucleotide
cuugugguagggaccacug

SEQ ID NO: 1919130 - RNA, 19 nt, Artificial Sequence
  Description of Artificial Sequence: Synthetic oligonucleotide
guaaguaguaguguccaca

SEQ ID NO: 1919131 - RNA, 19 nt, Artificial Sequence
  Description of Artificial Sequence: Synthetic oligonucleotide
gguccgacgggccagcugg

SEQ ID NO: 1919132 - RNA, 19 nt, Artificial Sequence
  Description of Artificial Sequence: Synthetic oligonucleotide
agucgauuggcuuguccug

SEQ ID NO: 1919133 - RNA, 19 nt, Artificial Sequence
  Description of Artificial Sequence: Synthetic oligonucleotide
agcgcuucuguuuggggug

SEQ ID NO: 1919134 - RNA, 19 nt, Artificial Sequence
  Description of Artificial Sequence: Synthetic oligonucleotide
guuuccgcuccuuuagcug

SEQ ID NO: 1919135 - RNA, 19 nt, Artificial Sequence
  Description of Artificial Sequence: Synthetic oligonucleotide
gaacaggucuugguagagg

SEQ ID NO: 1919136 - RNA, 19 nt, Artificial Sequence
  Description of Artificial Sequence: Synthetic oligonucleotide
cacagcguaggccacauga

SEQ ID NO: 1919137 - RNA, 19 nt, Artificial Sequence
  Description of Artificial Sequence: Synthetic oligonucleotide
gugggugacugaaucaucc

SEQ ID NO: 1919138 - RNA, 19 nt, Artificial Sequence
  Description of Artificial Sequence: Synthetic oligonucleotide
uucagcaacccuguugccu

SEQ ID NO: 1919139 - RNA, 19 nt, Artificial Sequence
  Description of Artificial Sequence: Synthetic oligonucleotide
cucccgcuggcgaacaacg

SEQ ID NO: 1919140 - RNA, 19 nt, Artificial Sequence
  Description of Artificial Sequence: Synthetic oligonucleotide
ggccauaauacuccgcgag

SEQ ID NO: 1919141 - RNA, 19 nt, Artificial Sequence
  Description of Artificial Sequence: Synthetic oligonucleotide
cuguuuggggugguaaggg

SEQ ID NO: 1919142 - RNA, 19 nt, Artificial Sequence
  Description of Artificial Sequence: Synthetic oligonucleotide
uggagucacuucauuccca

SEQ ID NO: 1919143 - RNA, 19 nt, Artificial Sequence
  Description of Artificial Sequence: Synthetic oligonucleotide
guaucuguccagauaucgc

SEQ ID NO: 1919144 - RNA, 19 nt, Artificial Sequence
  Description of Artificial Sequence: Synthetic oligonucleotide
gacccugggcacaaaagug

SEQ ID NO: 1919145 - RNA, 19 nt, Artificial Sequence
  Description of Artificial Sequence: Synthetic oligonucleotide
aaaagugcggaagguccga

SEQ ID NO: 1919146 - RNA, 19 nt, Artificial Sequence
  Description of Artificial Sequence: Synthetic oligonucleotide
agcuccgguacuucugcag

SEQ ID NO: 1919147 - RNA, 19 nt, Artificial Sequence
  Description of Artificial Sequence: Synthetic oligonucleotide
ucaguuggagucacuucau

SEQ ID NO: 1919148 - RNA, 19 nt, Artificial Sequence
  Description of Artificial Sequence: Synthetic oligonucleotide
cucaguagauuccauaggu

SEQ ID NO: 1919149 - RNA, 19 nt, Artificial Sequence
  Description of Artificial Sequence: Synthetic oligonucleotide
ugggaagccucaguuggag

SEQ ID NO: 1919150 - RNA, 19 nt, Artificial Sequence
  Description of Artificial Sequence: Synthetic oligonucleotide
ggugacugaaucaucccag

SEQ ID NO: 1919151 - RNA, 19 nt, Artificial Sequence
  Description of Artificial Sequence: Synthetic oligonucleotide
ucuuugggaucugucuccc

SEQ ID NO: 1919152 - RNA, 19 nt, Artificial Sequence
  Description of Artificial Sequence: Synthetic oligonucleotide
ucauggcugucccuguauc

SEQ ID NO: 1919153 - RNA, 19 nt, Artificial Sequence
  Description of Artificial Sequence: Synthetic oligonucleotide
agagccucgagcagggaag

SEQ ID NO: 1919154 - RNA, 19 nt, Artificial Sequence
  Description of Artificial Sequence: Synthetic oligonucleotide
uuagcuguugggcccgaau

SEQ ID NO: 1919155 - RNA, 19 nt, Artificial Sequence
  Description of Artificial Sequence: Synthetic oligonucleotide
gcagccaaugaacauacuc

SEQ ID NO: 1919156 - RNA, 19 nt, Artificial Sequence
  Description of Artificial Sequence: Synthetic oligonucleotide
cuggcgaacaacgcggcgc

SEQ ID NO: 1919157 - RNA, 19 nt, Artificial Sequence
  Description of Artificial Sequence: Synthetic oligonucleotide
cucccugacgaagugcucc

SEQ ID NO: 1919158 - RNA, 19 nt, Artificial Sequence
  Description of Artificial Sequence: Synthetic oligonucleotide
ugugggugacugaaucauc

SEQ ID NO: 1919159 - RNA, 19 nt, Artificial Sequence
  Description of Artificial Sequence: Synthetic oligonucleotide
augcuggcugugcgaaggc

SEQ ID NO: 1919160 - RNA, 19 nt, Artificial Sequence
  Description of Artificial Sequence: Synthetic oligonucleotide
cucggagaagucgauuggc

SEQ ID NO: 1919161 - RNA, 19 nt, Artificial Sequence
  Description of Artificial Sequence: Synthetic oligonucleotide
ugcggaagguccgacgggc

SEQ ID NO: 1919162 - RNA, 19 nt, Artificial Sequence
  Description of Artificial Sequence: Synthetic oligonucleotide
gguaaggacaugucuccug

SEQ ID NO: 1919163 - RNA, 19 nt, Artificial Sequence
  Description of Artificial Sequence: Synthetic oligonucleotide
auaaacuguuuccgcuccu

SEQ ID NO: 1919164 - RNA, 19 nt, Artificial Sequence
  Description of Artificial Sequence: Synthetic oligonucleotide
cuguugggcccgaaugacc

SEQ ID NO: 1919165 - RNA, 19 nt, Artificial Sequence
  Description of Artificial Sequence: Synthetic oligonucleotide
aggucgcccacgucgaugu

SEQ ID NO: 1919166 - RNA, 19 nt, Artificial Sequence
  Description of Artificial Sequence: Synthetic oligonucleotide
gcccgaaugacccuagaug

SEQ ID NO: 1919167 - RNA, 19 nt, Artificial Sequence
  Description of Artificial Sequence: Synthetic oligonucleotide
ggagguaaggacaugucuc

SEQ ID NO: 1919168 - RNA, 19 nt, Artificial Sequence
  Description of Artificial Sequence: Synthetic oligonucleotide
agucaaaagugcggaaggu

SEQ ID NO: 1919169 - RNA, 19 nt, Artificial Sequence
  Description of Artificial Sequence: Synthetic oligonucleotide
agguguccauccaaguuag

SEQ ID NO: 1919170 - RNA, 19 nt, Artificial Sequence
  Description of Artificial Sequence: Synthetic oligonucleotide
gccgcacaaauucaaacac

SEQ ID NO: 1919171 - RNA, 19 nt, Artificial Sequence
  Description of Artificial Sequence: Synthetic oligonucleotide
cucagggcgcccgaggugc

SEQ ID NO: 1919172 - RNA, 19 nt, Artificial Sequence
  Description of Artificial Sequence: Synthetic oligonucleotide
aucccagcggcacuggaaa

SEQ ID NO: 1919173 - RNA, 19 nt, Artificial Sequence
  Description of Artificial Sequence: Synthetic oligonucleotide
agaggccauaauacuccgc

SEQ ID NO: 1919174 - RNA, 19 nt, Artificial Sequence
  Description of Artificial Sequence: Synthetic oligonucleotide
cuccgguacuucugcagcc

SEQ ID NO: 1919175 - RNA, 19 nt, Artificial Sequence
  Description of Artificial Sequence: Synthetic oligonucleotide
uuuugucuuugggaucugu

SEQ ID NO: 1919176 - RNA, 19 nt, Artificial Sequence
  Description of Artificial Sequence: Synthetic oligonucleotide
cagcagguguccauccaag

SEQ ID NO: 1919177 - RNA, 19 nt, Artificial Sequence
  Description of Artificial Sequence: Synthetic oligonucleotide
ucgaagcucccggauaaac

SEQ ID NO: 1919178 - RNA, 19 nt, Artificial Sequence
  Description of Artificial Sequence: Synthetic oligonucleotide
gguguccucggagaagucg

SEQ ID NO: 1919179 - RNA, 19 nt, Artificial Sequence
  Description of Artificial Sequence: Synthetic oligonucleotide
cacgucgauguccucguug

SEQ ID NO: 1919180 - RNA, 19 nt, Artificial Sequence
  Description of Artificial Sequence: Synthetic oligonucleotide
uaccgcucgaagcuccggu

SEQ ID NO: 1919181 - RNA, 19 nt, Artificial Sequence
  Description of Artificial Sequence: Synthetic oligonucleotide
ccguucuucuuccacauug

SEQ ID NO: 1919182 - RNA, 19 nt, Artificial Sequence
  Description of Artificial Sequence: Synthetic oligonucleotide
ugguccucucccacucugc

SEQ ID NO: 1919183 - RNA, 19 nt, Artificial Sequence
  Description of Artificial Sequence: Synthetic oligonucleotide
ugggaugcuggcugugcga

SEQ ID NO: 1919184 - RNA, 19 nt, Artificial Sequence
  Description of Artificial Sequence: Synthetic oligonucleotide
ugacgaagugcucccggua

SEQ ID NO: 1919185 - RNA, 19 nt, Artificial Sequence
  Description of Artificial Sequence: Synthetic oligonucleotide
agugcucccgguagguccg

SEQ ID NO: 1919186 - RNA, 19 nt, Artificial Sequence
  Description of Artificial Sequence: Synthetic oligonucleotide
ugggaucugucucccugac

SEQ ID NO: 1919187 - RNA, 19 nt, Artificial Sequence
  Description of Artificial Sequence: Synthetic oligonucleotide
ugcuggcugugcgaaggcg

SEQ ID NO: 1919188 - RNA, 19 nt, Artificial Sequence
  Description of Artificial Sequence: Synthetic oligonucleotide
uacuccgcgagacgcugcu

SEQ ID NO: 1919189 - RNA, 19 nt, Artificial Sequence
  Description of Artificial Sequence: Synthetic oligonucleotide
augauacacugggaccagg

SEQ ID NO: 1919190 - RNA, 19 nt, Artificial Sequence
  Description of Artificial Sequence: Synthetic oligonucleotide
cuguuuccgcuccuuuagc

SEQ ID NO: 1919191 - RNA, 19 nt, Artificial Sequence
  Description of Artificial Sequence: Synthetic oligonucleotide
ccaaguuaguaaguaguag

SEQ ID NO: 1919192 - RNA, 19 nt, Artificial Sequence
  Description of Artificial Sequence: Synthetic oligonucleotide
gguagguccgccaccagug

SEQ ID NO: 1919193 - RNA, 19 nt, Artificial Sequence
  Description of Artificial Sequence: Synthetic oligonucleotide
gauguccucguugggcaug

SEQ ID NO: 1919194 - RNA, 19 nt, Artificial Sequence
  Description of Artificial Sequence: Synthetic oligonucleotide
gguagcagggugagggacg

SEQ ID NO: 1919195 - RNA, 19 nt, Artificial Sequence
  Description of Artificial Sequence: Synthetic oligonucleotide
gauaucgcaggggcugcug

SEQ ID NO: 1919196 - RNA, 19 nt, Artificial Sequence
  Description of Artificial Sequence: Synthetic oligonucleotide
ggccgcacaaauucaaaca

SEQ ID NO: 1919197 - RNA, 19 nt, Artificial Sequence
  Description of Artificial Sequence: Synthetic oligonucleotide
cauaggugggcucauggcu

SEQ ID NO: 1919198 - RNA, 19 nt, Artificial Sequence
  Description of Artificial Sequence: Synthetic oligonucleotide
ucgauuggcuuguccugcu

SEQ ID NO: 1919199 - RNA, 19 nt, Artificial Sequence
  Description of Artificial Sequence: Synthetic oligonucleotide
caugauacacugggaccag

SEQ ID NO: 1919200 - RNA, 19 nt, Artificial Sequence
  Description of Artificial Sequence: Synthetic oligonucleotide
gggguggccgcacaaauuc

SEQ ID NO: 1919201 - RNA, 19 nt, Artificial Sequence
  Description of Artificial Sequence: Synthetic oligonucleotide
aagcuccgguacuucugca

SEQ ID NO: 1919202 - RNA, 19 nt, Artificial Sequence
  Description of Artificial Sequence: Synthetic oligonucleotide
gagccucgagcagggaagg

SEQ ID NO: 1919203 - RNA, 19 nt, Artificial Sequence
  Description of Artificial Sequence: Synthetic oligonucleotide
ugugcgaaggcgggcugcc

SEQ ID NO: 1919204 - RNA, 19 nt, Artificial Sequence
  Description of Artificial Sequence: Synthetic oligonucleotide
cuucagcaacccuguugcc

SEQ ID NO: 1919205 - RNA, 19 nt, Artificial Sequence
  Description of Artificial Sequence: Synthetic oligonucleotide
guugccugggauguugguc

SEQ ID NO: 1919206 - RNA, 19 nt, Artificial Sequence
  Description of Artificial Sequence: Synthetic oligonucleotide
aggccauaauacuccgcga

SEQ ID NO: 1919207 - RNA, 19 nt, Artificial Sequence
  Description of Artificial Sequence: Synthetic oligonucleotide
cccggauaaacuguuuccg

SEQ ID NO: 1919208 - RNA, 19 nt, Artificial Sequence
  Description of Artificial Sequence: Synthetic oligonucleotide
ccggauaaacuguuuccgc

SEQ ID NO: 1919209 - RNA, 19 nt, Artificial Sequence
  Description of Artificial Sequence: Synthetic oligonucleotide
ccauaauacuccgcgagac

SEQ ID NO: 1919210 - RNA, 19 nt, Artificial Sequence
  Description of Artificial Sequence: Synthetic oligonucleotide
guagguccgccaccagugc

SEQ ID NO: 1919211 - RNA, 19 nt, Artificial Sequence
  Description of Artificial Sequence: Synthetic oligonucleotide
agguccgccaccagugcgg

SEQ ID NO: 1919212 - RNA, 19 nt, Artificial Sequence
  Description of Artificial Sequence: Synthetic oligonucleotide
gcacaaaaguggcaccgug

SEQ ID NO: 1919213 - RNA, 19 nt, Artificial Sequence
  Description of Artificial Sequence: Synthetic oligonucleotide
cuguaucuguccagauauc

SEQ ID NO: 1919214 - RNA, 19 nt, Artificial Sequence
  Description of Artificial Sequence: Synthetic oligonucleotide
ggaagcgcuucuguuuggg

SEQ ID NO: 1919215 - RNA, 19 nt, Artificial Sequence
  Description of Artificial Sequence: Synthetic oligonucleotide
ucccgcuggcgaacaacgc

SEQ ID NO: 1919216 - RNA, 19 nt, Artificial Sequence
  Description of Artificial Sequence: Synthetic oligonucleotide
auacuccgcgagacgcugc

SEQ ID NO: 1919217 - RNA, 19 nt, Artificial Sequence
  Description of Artificial Sequence: Synthetic oligonucleotide
gugcggaagguccgacggg

SEQ ID NO: 1919218 - RNA, 19 nt, Artificial Sequence
  Description of Artificial Sequence: Synthetic oligonucleotide
ggcaccguggaacaggucu

SEQ ID NO: 1919219 - RNA, 19 nt, Artificial Sequence
  Description of Artificial Sequence: Synthetic oligonucleotide
gcuccgguacuucugcagc

SEQ ID NO: 1919220 - RNA, 19 nt, Artificial Sequence
  Description of Artificial Sequence: Synthetic oligonucleotide
ccagauaucgcaggggcug

SEQ ID NO: 1919221 - RNA, 19 nt, Artificial Sequence
  Description of Artificial Sequence: Synthetic oligonucleotide
ccucauaggucaccucugg

SEQ ID NO: 1919222 - RNA, 19 nt, Artificial Sequence
  Description of Artificial Sequence: Synthetic oligonucleotide
acauuggcucgaagcuccc

SEQ ID NO: 1919223 - RNA, 19 nt, Artificial Sequence
  Description of Artificial Sequence: Synthetic oligonucleotide
gggugacugaaucauccca

SEQ ID NO: 1919224 - RNA, 19 nt, Artificial Sequence
  Description of Artificial Sequence: Synthetic oligonucleotide
ggugugggugacugaauca

SEQ ID NO: 1919225 - RNA, 19 nt, Artificial Sequence
  Description of Artificial Sequence: Synthetic oligonucleotide
ccauaggugggcucauggc

SEQ ID NO: 1919226 - RNA, 19 nt, Artificial Sequence
  Description of Artificial Sequence: Synthetic oligonucleotide
aaguggcaccguggaacag

SEQ ID NO: 1919227 - RNA, 19 nt, Artificial Sequence
  Description of Artificial Sequence: Synthetic oligonucleotide
cagauaucgcaggggcugc

SEQ ID NO: 1919228 - RNA, 19 nt, Artificial Sequence
  Description of Artificial Sequence: Synthetic oligonucleotide
acccuguugccugggaugu

SEQ ID NO: 1919229 - RNA, 19 nt, Artificial Sequence
  Description of Artificial Sequence: Synthetic oligonucleotide
guagggaccacugguccuc

SEQ ID NO: 1919230 - RNA, 19 nt, Artificial Sequence
  Description of Artificial Sequence: Synthetic oligonucleotide
ccgcuggcgaacaacgcgg

SEQ ID NO: 1919231 - RNA, 19 nt, Artificial Sequence
  Description of Artificial Sequence: Synthetic oligonucleotide
ggaacaggucuugguagag

SEQ ID NO: 1919232 - RNA, 19 nt, Artificial Sequence
  Description of Artificial Sequence: Synthetic oligonucleotide
uccgcgagacgcugcuugu

SEQ ID NO: 1919233 - RNA, 19 nt, Artificial Sequence
  Description of Artificial Sequence: Synthetic oligonucleotide
ucccgguagguccgccacc

SEQ ID NO: 1919234 - RNA, 19 nt, Artificial Sequence
  Description of Artificial Sequence: Synthetic oligonucleotide
agguaaggacaugucuccu

SEQ ID NO: 1919235 - RNA, 19 nt, Artificial Sequence
  Description of Artificial Sequence: Synthetic oligonucleotide
gggaucugucucccugacg

SEQ ID NO: 1919236 - RNA, 19 nt, Artificial Sequence
  Description of Artificial Sequence: Synthetic oligonucleotide
acccuagauggaggcaguc

SEQ ID NO: 1919237 - RNA, 19 nt, Artificial Sequence
  Description of Artificial Sequence: Synthetic oligonucleotide
gccucgagcagggaagggg

SEQ ID NO: 1919238 - RNA, 19 nt, Artificial Sequence
  Description of Artificial Sequence: Synthetic oligonucleotide
gagggaagcgcuucuguuu

SEQ ID NO: 1919239 - RNA, 19 nt, Artificial Sequence
  Description of Artificial Sequence: Synthetic oligonucleotide
ccugacgaagugcucccgg

SEQ ID NO: 1919240 - RNA, 19 nt, Artificial Sequence
  Description of Artificial Sequence: Synthetic oligonucleotide
gacggguguccucggagaa

SEQ ID NO: 1919241 - RNA, 19 nt, Artificial Sequence
  Description of Artificial Sequence: Synthetic oligonucleotide
uggcucgaagcucccggau

SEQ ID NO: 1919242 - RNA, 19 nt, Artificial Sequence
  Description of Artificial Sequence: Synthetic oligonucleotide
cugcuugugguagggacca

SEQ ID NO: 1919243 - RNA, 19 nt, Artificial Sequence
  Description of Artificial Sequence: Synthetic oligonucleotide
cugggauguuggucagcag

SEQ ID NO: 1919244 - RNA, 19 nt, Artificial Sequence
  Description of Artificial Sequence: Synthetic oligonucleotide
ucuuccacauuggcucgaa

SEQ ID NO: 1919245 - RNA, 19 nt, Artificial Sequence
  Description of Artificial Sequence: Synthetic oligonucleotide
cucccgguagguccgccac

SEQ ID NO: 1919246 - RNA, 19 nt, Artificial Sequence
  Description of Artificial Sequence: Synthetic oligonucleotide
gggacggguguccucggag

SEQ ID NO: 1919247 - RNA, 19 nt, Artificial Sequence
  Description of Artificial Sequence: Synthetic oligonucleotide
caaugaacauacucagcau

SEQ ID NO: 1919248 - RNA, 19 nt, Artificial Sequence
  Description of Artificial Sequence: Synthetic oligonucleotide
gaagguccgacgggccagc

SEQ ID NO: 1919249 - RNA, 19 nt, Artificial Sequence
  Description of Artificial Sequence: Synthetic oligonucleotide
uuccauaggugggcucaug

SEQ ID NO: 1919250 - RNA, 19 nt, Artificial Sequence
  Description of Artificial Sequence: Synthetic oligonucleotide
uaguguccacaaggagucc

SEQ ID NO: 1919251 - RNA, 19 nt, Artificial Sequence
  Description of Artificial Sequence: Synthetic oligonucleotide
aucgcaggggcugcuggug

SEQ ID NO: 1919252 - RNA, 19 nt, Artificial Sequence
  Description of Artificial Sequence: Synthetic oligonucleotide
cgaaugacccuagauggag

SEQ ID NO: 1919253 - RNA, 19 nt, Artificial Sequence
  Description of Artificial Sequence: Synthetic oligonucleotide
ucccuguaucuguccagau

SEQ ID NO: 1919254 - RNA, 19 nt, Artificial Sequence
  Description of Artificial Sequence: Synthetic oligonucleotide
cguccggcggcucagggcg

SEQ ID NO: 1919255 - RNA, 19 nt, Artificial Sequence
  Description of Artificial Sequence: Synthetic oligonucleotide
agaagucgauuggcuuguc

SEQ ID NO: 1919256 - RNA, 19 nt, Artificial Sequence
  Description of Artificial Sequence: Synthetic oligonucleotide
cuggugcuucuuguagaag

SEQ ID NO: 1919257 - RNA, 19 nt, Artificial Sequence
  Description of Artificial Sequence: Synthetic oligonucleotide
gccaaugaacauacucagc

SEQ ID NO: 1919258 - RNA, 19 nt, Artificial Sequence
  Description of Artificial Sequence: Synthetic oligonucleotide
auuuugucuuugggaucug

SEQ ID NO: 1919259 - RNA, 19 nt, Artificial Sequence
  Description of Artificial Sequence: Synthetic oligonucleotide
cugaaucaucccagcggca

SEQ ID NO: 1919260 - RNA, 19 nt, Artificial Sequence
  Description of Artificial Sequence: Synthetic oligonucleotide
augacccuagauggaggca

SEQ ID NO: 1919261 - RNA, 19 nt, Artificial Sequence
  Description of Artificial Sequence: Synthetic oligonucleotide
cucguugggcaugggcccc

SEQ ID NO: 1919262 - RNA, 19 nt, Artificial Sequence
  Description of Artificial Sequence: Synthetic oligonucleotide
agccggagucauggcuucc

SEQ ID NO: 1919263 - RNA, 19 nt, Artificial Sequence
  Description of Artificial Sequence: Synthetic oligonucleotide
ggaagguccgacgggccag

SEQ ID NO: 1919264 - RNA, 19 nt, Artificial Sequence
  Description of Artificial Sequence: Synthetic oligonucleotide
acggguguccucggagaag

SEQ ID NO: 1919265 - RNA, 19 nt, Artificial Sequence
  Description of Artificial Sequence: Synthetic oligonucleotide
acagcguaggccacaugaa

SEQ ID NO: 1919266 - RNA, 19 nt, Artificial Sequence
  Description of Artificial Sequence: Synthetic oligonucleotide
agguccgacgggccagcug

SEQ ID NO: 1919267 - RNA, 19 nt, Artificial Sequence
  Description of Artificial Sequence: Synthetic oligonucleotide
gggaagcgcuucuguuugg

SEQ ID NO: 1919268 - RNA, 19 nt, Artificial Sequence
  Description of Artificial Sequence: Synthetic oligonucleotide
caucccagcggcacuggaa

SEQ ID NO: 1919269 - RNA, 19 nt, Artificial Sequence
  Description of Artificial Sequence: Synthetic oligonucleotide
gacaugucuccuggccuuc

SEQ ID NO: 1919270 - RNA, 19 nt, Artificial Sequence
  Description of Artificial Sequence: Synthetic oligonucleotide
gcuggcgaacaacgcggcg

SEQ ID NO: 1919271 - RNA, 19 nt, Artificial Sequence
  Description of Artificial Sequence: Synthetic oligonucleotide
gucuugguagaggccauaa

SEQ ID NO: 1919272 - RNA, 19 nt, Artificial Sequence
  Description of Artificial Sequence: Synthetic oligonucleotide
guugggcaugggccccagg

SEQ ID NO: 1919273 - RNA, 19 nt, Artificial Sequence
  Description of Artificial Sequence: Synthetic oligonucleotide
caaagcgcuggaagccaga

SEQ ID NO: 1919274 - RNA, 19 nt, Artificial Sequence
  Description of Artificial Sequence: Synthetic oligonucleotide
guaccgcucgaagcuccgg

SEQ ID NO: 1919275 - RNA, 19 nt, Artificial Sequence
  Description of Artificial Sequence: Synthetic oligonucleotide
ccuuuagcuguugggcccg

SEQ ID NO: 1919276 - RNA, 19 nt, Artificial Sequence
  Description of Artificial Sequence: Synthetic oligonucleotide
cugggaagccucaguugga

SEQ ID NO: 1919277 - RNA, 19 nt, Artificial Sequence
  Description of Artificial Sequence: Synthetic oligonucleotide
ucccagcggcacuggaaaa

SEQ ID NO: 1919278 - RNA, 19 nt, Artificial Sequence
  Description of Artificial Sequence: Synthetic oligonucleotide
accgcucgaagcuccggua

SEQ ID NO: 1919279 - RNA, 19 nt, Artificial Sequence
  Description of Artificial Sequence: Synthetic oligonucleotide
agauaucgcaggggcugcu

SEQ ID NO: 1919280 - RNA, 19 nt, Artificial Sequence
  Description of Artificial Sequence: Synthetic oligonucleotide
gaaggcgggcugcccguuc

SEQ ID NO: 1919281 - RNA, 19 nt, Artificial Sequence
  Description of Artificial Sequence: Synthetic oligonucleotide
cucgaagcuccgguacuuc

SEQ ID NO: 1919282 - RNA, 19 nt, Artificial Sequence
  Description of Artificial Sequence: Synthetic oligonucleotide
ggcgguaccgcucgaagcu

SEQ ID NO: 1919283 - RNA, 19 nt, Artificial Sequence
  Description of Artificial Sequence: Synthetic oligonucleotide
uccgcuccuuuagcuguug

SEQ ID NO: 1919284 - RNA, 19 nt, Artificial Sequence
  Description of Artificial Sequence: Synthetic oligonucleotide
gucacuucauucccaugau

SEQ ID NO: 1919285 - RNA, 19 nt, Artificial Sequence
  Description of Artificial Sequence: Synthetic oligonucleotide
uuccgcuccuuuagcuguu

SEQ ID NO: 1919286 - RNA, 19 nt, Artificial Sequence
  Description of Artificial Sequence: Synthetic oligonucleotide
gaacaacgcggcgcgccac

SEQ ID NO: 1919287 - RNA, 19 nt, Artificial Sequence
  Description of Artificial Sequence: Synthetic oligonucleotide
agcugguagcagggugagg

SEQ ID NO: 1919288 - RNA, 19 nt, Artificial Sequence
  Description of Artificial Sequence: Synthetic oligonucleotide
uuuagcuguugggcccgaa

SEQ ID NO: 1919289 - RNA, 19 nt, Artificial Sequence
  Description of Artificial Sequence: Synthetic oligonucleotide
caccguggaacaggucuug

SEQ ID NO: 1919290 - RNA, 19 nt, Artificial Sequence
  Description of Artificial Sequence: Synthetic oligonucleotide
gguucccgcaugucuaaaa

SEQ ID NO: 1919291 - RNA, 19 nt, Artificial Sequence
  Description of Artificial Sequence: Synthetic oligonucleotide
agccucgagcagggaaggg

SEQ ID NO: 1919292 - RNA, 19 nt, Artificial Sequence
  Description of Artificial Sequence: Synthetic oligonucleotide
ggacggguguccucggaga

SEQ ID NO: 1919293 - RNA, 19 nt, Artificial Sequence
  Description of Artificial Sequence: Synthetic oligonucleotide
ccucaguuggagucacuuc

SEQ ID NO: 1919294 - RNA, 19 nt, Artificial Sequence
  Description of Artificial Sequence: Synthetic oligonucleotide
cccuagauggaggcagucc

SEQ ID NO: 1919295 - RNA, 19 nt, Artificial Sequence
  Description of Artificial Sequence: Synthetic oligonucleotide
gcgaacaacgcggcgcgcc

SEQ ID NO: 1919296 - RNA, 19 nt, Artificial Sequence
  Description of Artificial Sequence: Synthetic oligonucleotide
auuccauaggugggcucau

SEQ ID NO: 1919297 - RNA, 19 nt, Artificial Sequence
  Description of Artificial Sequence: Synthetic oligonucleotide
caccucuggggccugggaa

SEQ ID NO: 1919298 - RNA, 19 nt, Artificial Sequence
  Description of Artificial Sequence: Synthetic oligonucleotide
acaugucuccuggccuuca

SEQ ID NO: 1919299 - RNA, 19 nt, Artificial Sequence
  Description of Artificial Sequence: Synthetic oligonucleotide
cgcgagacgcugcuugugg

SEQ ID NO: 1919300 - RNA, 19 nt, Artificial Sequence
  Description of Artificial Sequence: Synthetic oligonucleotide
gcggcgguaccgcucgaag

SEQ ID NO: 1919301 - RNA, 19 nt, Artificial Sequence
  Description of Artificial Sequence: Synthetic oligonucleotide
gacgggccagcugguagca

SEQ ID NO: 1919302 - RNA, 19 nt, Artificial Sequence
  Description of Artificial Sequence: Synthetic oligonucleotide
ggcaaagcgcuggaagcca

SEQ ID NO: 1919303 - RNA, 19 nt, Artificial Sequence
  Description of Artificial Sequence: Synthetic oligonucleotide
ucguugggcaugggcccca

SEQ ID NO: 1919304 - RNA, 19 nt, Artificial Sequence
  Description of Artificial Sequence: Synthetic oligonucleotide
caacgcggcgcgccaccag

SEQ ID NO: 1919305 - RNA, 19 nt, Artificial Sequence
  Description of Artificial Sequence: Synthetic oligonucleotide
gugccgaagccccggccuc

SEQ ID NO: 1919306 - RNA, 19 nt, Artificial Sequence
  Description of Artificial Sequence: Synthetic oligonucleotide
ugcucggcgcggcggcggu

SEQ ID NO: 1919307 - RNA, 19 nt, Artificial Sequence
  Description of Artificial Sequence: Synthetic oligonucleotide
ccgacgggccagcugguag

SEQ ID NO: 1919308 - RNA, 19 nt, Artificial Sequence
  Description of Artificial Sequence: Synthetic oligonucleotide
gguccgccaccagugcggg

SEQ ID NO: 1919309 - RNA, 19 nt, Artificial Sequence
  Description of Artificial Sequence: Synthetic oligonucleotide
cucggcgcggcggcgguac

SEQ ID NO: 1919310 - RNA, 19 nt, Artificial Sequence
  Description of Artificial Sequence: Synthetic oligonucleotide
ccuggugcuucuuguagaa

SEQ ID NO: 1919311 - RNA, 19 nt, Artificial Sequence
  Description of Artificial Sequence: Synthetic oligonucleotide
ggugccgaagccccggccu

SEQ ID NO: 1919312 - RNA, 19 nt, Artificial Sequence
  Description of Artificial Sequence: Synthetic oligonucleotide
gguggccgcacaaauucaa

SEQ ID NO: 1919313 - RNA, 19 nt, Artificial Sequence
  Description of Artificial Sequence: Synthetic oligonucleotide
cugcucggcgcggcggcgg

SEQ ID NO: 1919314 - RNA, 19 nt, Artificial Sequence
  Description of Artificial Sequence: Synthetic oligonucleotide
gcgcuucuguuuggggugg

SEQ ID NO: 1919315 - RNA, 19 nt, Artificial Sequence
  Description of Artificial Sequence: Synthetic oligonucleotide
gcgcccgaggugccgaagc

SEQ ID NO: 1919316 - RNA, 19 nt, Artificial Sequence
  Description of Artificial Sequence: Synthetic oligonucleotide
ccgaaugacccuagaugga

SEQ ID NO: 1919317 - RNA, 19 nt, Artificial Sequence
  Description of Artificial Sequence: Synthetic oligonucleotide
ccauccaaguuaguaagua

SEQ ID NO: 1919318 - RNA, 19 nt, Artificial Sequence
  Description of Artificial Sequence: Synthetic oligonucleotide
ccgcucgaagcuccgguac

SEQ ID NO: 1919319 - RNA, 19 nt, Artificial Sequence
  Description of Artificial Sequence: Synthetic oligonucleotide
ggggagguaaggacauguc

SEQ ID NO: 1919320 - RNA, 19 nt, Artificial Sequence
  Description of Artificial Sequence: Synthetic oligonucleotide
gcugugcgaaggcgggcug

SEQ ID NO: 1919321 - RNA, 19 nt, Artificial Sequence
  Description of Artificial Sequence: Synthetic oligonucleotide
cgacgggccagcugguagc

SEQ ID NO: 1919322 - RNA, 19 nt, Artificial Sequence
  Description of Artificial Sequence: Synthetic oligonucleotide
ggcucgaagcucccggaua

SEQ ID NO: 1919323 - RNA, 19 nt, Artificial Sequence
  Description of Artificial Sequence: Synthetic oligonucleotide
agcagccaaugaacauacu

SEQ ID NO: 1919324 - RNA, 19 nt, Artificial Sequence
  Description of Artificial Sequence: Synthetic oligonucleotide
cguggaacaggucuuggua

SEQ ID NO: 1919325 - RNA, 19 nt, Artificial Sequence
  Description of Artificial Sequence: Synthetic oligonucleotide
cucauggcugucccuguau

SEQ ID NO: 1919326 - RNA, 19 nt, Artificial Sequence
  Description of Artificial Sequence: Synthetic oligonucleotide
gcagguguccauccaaguu

SEQ ID NO: 1919327 - RNA, 19 nt, Artificial Sequence
  Description of Artificial Sequence: Synthetic oligonucleotide
caccagugcggggcccgcg

SEQ ID NO: 1919328 - RNA, 19 nt, Artificial Sequence
  Description of Artificial Sequence: Synthetic oligonucleotide
gccaccagugcggggcccg

SEQ ID NO: 1919329 - RNA, 19 nt, Artificial Sequence
  Description of Artificial Sequence: Synthetic oligonucleotide
ggacaugucuccuggccuu

SEQ ID NO: 1919330 - RNA, 19 nt, Artificial Sequence
  Description of Artificial Sequence: Synthetic oligonucleotide
cggauaaacuguuuccgcu

SEQ ID NO: 1919331 - RNA, 19 nt, Artificial Sequence
  Description of Artificial Sequence: Synthetic oligonucleotide
cggcgguaccgcucgaagc

SEQ ID NO: 1919332 - RNA, 19 nt, Artificial Sequence
  Description of Artificial Sequence: Synthetic oligonucleotide
ucggcgcggcggcgguacc

SEQ ID NO: 1919333 - RNA, 19 nt, Artificial Sequence
  Description of Artificial Sequence: Synthetic oligonucleotide
cacucugcccgcacuuccu

SEQ ID NO: 1919334 - RNA, 19 nt, Artificial Sequence
  Description of Artificial Sequence: Synthetic oligonucleotide
guugggcccgaaugacccu

SEQ ID NO: 1919335 - RNA, 19 nt, Artificial Sequence
  Description of Artificial Sequence: Synthetic oligonucleotide
agguucccgcaugucuaaa

SEQ ID NO: 1919336 - RNA, 19 nt, Artificial Sequence
  Description of Artificial Sequence: Synthetic oligonucleotide
uccgacgggccagcuggua

SEQ ID NO: 1919337 - RNA, 19 nt, Artificial Sequence
  Description of Artificial Sequence: Synthetic oligonucleotide
cgaagccccggccucuccc

SEQ ID NO: 1919338 - RNA, 19 nt, Artificial Sequence
  Description of Artificial Sequence: Synthetic oligonucleotide
gcccgaggugccgaagccc

SEQ ID NO: 1919339 - RNA, 19 nt, Artificial Sequence
  Description of Artificial Sequence: Synthetic oligonucleotide
gcaacccuguugccuggga

SEQ ID NO: 1919340 - RNA, 19 nt, Artificial Sequence
  Description of Artificial Sequence: Synthetic oligonucleotide
ccggagucauggcuuccug

SEQ ID NO: 1919341 - RNA, 19 nt, Artificial Sequence
  Description of Artificial Sequence: Synthetic oligonucleotide
ggcccgaaugacccuagau

SEQ ID NO: 1919342 - RNA, 19 nt, Artificial Sequence
  Description of Artificial Sequence: Synthetic oligonucleotide
cgcuggcgaacaacgcggc

SEQ ID NO: 1919343 - RNA, 19 nt, Artificial Sequence
  Description of Artificial Sequence: Synthetic oligonucleotide
caguuggagucacuucauu

SEQ ID NO: 1919344 - RNA, 19 nt, Artificial Sequence
  Description of Artificial Sequence: Synthetic oligonucleotide
cgaagcucccggauaaacu

SEQ ID NO: 1919345 - RNA, 19 nt, Artificial Sequence
  Description of Artificial Sequence: Synthetic oligonucleotide
gcucccgguagguccgcca

SEQ ID NO: 1919346 - RNA, 19 nt, Artificial Sequence
  Description of Artificial Sequence: Synthetic oligonucleotide
ggguggccgcacaaauuca

SEQ ID NO: 1919347 - RNA, 19 nt, Artificial Sequence
  Description of Artificial Sequence: Synthetic oligonucleotide
cgaggugccgaagccccgg

SEQ ID NO: 1919348 - RNA, 19 nt, Artificial Sequence
  Description of Artificial Sequence: Synthetic oligonucleotide
ggcacaaaaguggcaccgu

SEQ ID NO: 1919349 - RNA, 19 nt, Artificial Sequence
  Description of Artificial Sequence: Synthetic oligonucleotide
ccuccugcucggcgcggcg

SEQ ID NO: 1919350 - RNA, 19 nt, Artificial Sequence
  Description of Artificial Sequence: Synthetic oligonucleotide
cccugacgaagugcucccg

SEQ ID NO: 1919351 - RNA, 19 nt, Artificial Sequence
  Description of Artificial Sequence: Synthetic oligonucleotide
cucgaagcucccggauaaa

SEQ ID NO: 1919352 - RNA, 19 nt, Artificial Sequence
  Description of Artificial Sequence: Synthetic oligonucleotide
ggcgcggcggcgguaccgc

SEQ ID NO: 1919353 - RNA, 19 nt, Artificial Sequence
  Description of Artificial Sequence: Synthetic oligonucleotide
cggcgcgccaccagggcgc

SEQ ID NO: 1919354 - RNA, 19 nt, Artificial Sequence
  Description of Artificial Sequence: Synthetic oligonucleotide
gcucauggcugucccugua

SEQ ID NO: 1919355 - RNA, 19 nt, Artificial Sequence
  Description of Artificial Sequence: Synthetic oligonucleotide
ggcugugcgaaggcgggcu

SEQ ID NO: 1919356 - RNA, 19 nt, Artificial Sequence
  Description of Artificial Sequence: Synthetic oligonucleotide
aggcgggcugcccguucuu

SEQ ID NO: 1919357 - RNA, 19 nt, Artificial Sequence
  Description of Artificial Sequence: Synthetic oligonucleotide
ccucucccacucugcccgc

SEQ ID NO: 1919358 - RNA, 19 nt, Artificial Sequence
  Description of Artificial Sequence: Synthetic oligonucleotide
cucccacucugcccgcacu

SEQ ID NO: 1919359 - RNA, 19 nt, Artificial Sequence
  Description of Artificial Sequence: Synthetic oligonucleotide
cccgguagguccgccacca

SEQ ID NO: 1919360 - RNA, 19 nt, Artificial Sequence
  Description of Artificial Sequence: Synthetic oligonucleotide
ggcgaacaacgcggcgcgc

SEQ ID NO: 1919361 - RNA, 19 nt, Artificial Sequence
  Description of Artificial Sequence: Synthetic oligonucleotide
gcgguaccgcucgaagcuc

SEQ ID NO: 1919362 - RNA, 19 nt, Artificial Sequence
  Description of Artificial Sequence: Synthetic oligonucleotide
acuccgcgagacgcugcuu

SEQ ID NO: 1919363 - RNA, 19 nt, Artificial Sequence
  Description of Artificial Sequence: Synthetic oligonucleotide
cgaacaacgcggcgcgcca

SEQ ID NO: 1919364 - RNA, 19 nt, Artificial Sequence
  Description of Artificial Sequence: Synthetic oligonucleotide
guccggcggcucagggcgc

SEQ ID NO: 1919365 - RNA, 19 nt, Artificial Sequence
  Description of Artificial Sequence: Synthetic oligonucleotide
gccucucccgcuggcgaac

SEQ ID NO: 1919366 - RNA, 19 nt, Artificial Sequence
  Description of Artificial Sequence: Synthetic oligonucleotide
gggcccgaaugacccuaga

SEQ ID NO: 1919367 - RNA, 19 nt, Artificial Sequence
  Description of Artificial Sequence: Synthetic oligonucleotide
cucucccgcuggcgaacaa

SEQ ID NO: 1919368 - RNA, 19 nt, Artificial Sequence
  Description of Artificial Sequence: Synthetic oligonucleotide
ggcgcccgaggugccgaag

SEQ ID NO: 1919369 - RNA, 19 nt, Artificial Sequence
  Description of Artificial Sequence: Synthetic oligonucleotide
ccguggaacaggucuuggu

SEQ ID NO: 1919370 - RNA, 19 nt, Artificial Sequence
  Description of Artificial Sequence: Synthetic oligonucleotide
ccgaagccccggccucucc

SEQ ID NO: 1919371 - RNA, 19 nt, Artificial Sequence
  Description of Artificial Sequence: Synthetic oligonucleotide
cccacgucgauguccucgu

SEQ ID NO: 1919372 - RNA, 19 nt, Artificial Sequence
  Description of Artificial Sequence: Synthetic oligonucleotide
ccgccaccagugcggggcc

SEQ ID NO: 1919373 - RNA, 19 nt, Artificial Sequence
  Description of Artificial Sequence: Synthetic oligonucleotide
gcggcucagggcgcccgag

SEQ ID NO: 1919374 - RNA, 19 nt, Artificial Sequence
  Description of Artificial Sequence: Synthetic oligonucleotide
gcuucuguuugggguggua

SEQ ID NO: 1919375 - RNA, 19 nt, Artificial Sequence
  Description of Artificial Sequence: Synthetic oligonucleotide
ccgcgagacgcugcuugug

SEQ ID NO: 1919376 - RNA, 19 nt, Artificial Sequence
  Description of Artificial Sequence: Synthetic oligonucleotide
ccgguagguccgccaccag

SEQ ID NO: 1919377 - RNA, 19 nt, Artificial Sequence
  Description of Artificial Sequence: Synthetic oligonucleotide
ccacagcguaggccacaug

SEQ ID NO: 1919378 - RNA, 19 nt, Artificial Sequence
  Description of Artificial Sequence: Synthetic oligonucleotide
ggcggcucagggcgcccga

SEQ ID NO: 1919379 - RNA, 19 nt, Artificial Sequence
  Description of Artificial Sequence: Synthetic oligonucleotide
gccggagucauggcuuccu

SEQ ID NO: 1919380 - RNA, 19 nt, Artificial Sequence
  Description of Artificial Sequence: Synthetic oligonucleotide
cggagaagucgauuggcuu

SEQ ID NO: 1919381 - RNA, 19 nt, Artificial Sequence
  Description of Artificial Sequence: Synthetic oligonucleotide
ggcggcgguaccgcucgaa

SEQ ID NO: 1919382 - RNA, 19 nt, Artificial Sequence
  Description of Artificial Sequence: Synthetic oligonucleotide
gcaccguggaacaggucuu

SEQ ID NO: 1919383 - RNA, 19 nt, Artificial Sequence
  Description of Artificial Sequence: Synthetic oligonucleotide
cgguagguccgccaccagu

SEQ ID NO: 1919384 - RNA, 19 nt, Artificial Sequence
  Description of Artificial Sequence: Synthetic oligonucleotide
ccucucccgcuggcgaaca

SEQ ID NO: 1919385 - RNA, 19 nt, Artificial Sequence
  Description of Artificial Sequence: Synthetic oligonucleotide
guccgacgggccagcuggu

SEQ ID NO: 1919386 - RNA, 19 nt, Artificial Sequence
  Description of Artificial Sequence: Synthetic oligonucleotide
gcgcuggaagccagagccu

SEQ ID NO: 1919387 - RNA, 19 nt, Artificial Sequence
  Description of Artificial Sequence: Synthetic oligonucleotide
cggcgcggcggcgguaccg

SEQ ID NO: 1919388 - RNA, 19 nt, Artificial Sequence
  Description of Artificial Sequence: Synthetic oligonucleotide
cgcucgaagcuccgguacu

SEQ ID NO: 1919389 - RNA, 19 nt, Artificial Sequence
  Description of Artificial Sequence: Synthetic oligonucleotide
ggccagcugguagcagggu

SEQ ID NO: 1919390 - RNA, 19 nt, Artificial Sequence
  Description of Artificial Sequence: Synthetic oligonucleotide
gcgcgccaccagggcgccg

SEQ ID NO: 1919391 - RNA, 19 nt, Artificial Sequence
  Description of Artificial Sequence: Synthetic oligonucleotide
gcgcggcggcgguaccgcu

SEQ ID NO: 1919392 - RNA, 19 nt, Artificial Sequence
  Description of Artificial Sequence: Synthetic oligonucleotide
ccacgucgauguccucguu

SEQ ID NO: 1919393 - RNA, 19 nt, Artificial Sequence
  Description of Artificial Sequence: Synthetic oligonucleotide
cgcuucuguuugggguggu

SEQ ID NO: 1919394 - RNA, 19 nt, Artificial Sequence
  Description of Artificial Sequence: Synthetic oligonucleotide
ucaaguaccaauuacauga

SEQ ID NO: 1919395 - RNA, 19 nt, Artificial Sequence
  Description of Artificial Sequence: Synthetic oligonucleotide
aauaaagggcuccugagac

SEQ ID NO: 1919396 - RNA, 19 nt, Artificial Sequence
  Description of Artificial Sequence: Synthetic oligonucleotide
aucaacauugcacugagcc

SEQ ID NO: 1919397 - RNA, 19 nt, Artificial Sequence
  Description of Artificial Sequence: Synthetic oligonucleotide
aaugacuucacagacagug

SEQ ID NO: 1919398 - RNA, 19 nt, Artificial Sequence
  Description of Artificial Sequence: Synthetic oligonucleotide
uguugugcaauacugaggc

SEQ ID NO: 1919399 - RNA, 19 nt, Artificial Sequence
  Description of Artificial Sequence: Synthetic oligonucleotide
uauaucuccaucaauuuca

SEQ ID NO: 1919400 - RNA, 19 nt, Artificial Sequence
  Description of Artificial Sequence: Synthetic oligonucleotide
aauuacaugauauugcaua

SEQ ID NO: 1919401 - RNA, 19 nt, Artificial Sequence
  Description of Artificial Sequence: Synthetic oligonucleotide
agucauugaacucaguaac

SEQ ID NO: 1919402 - RNA, 19 nt, Artificial Sequence
  Description of Artificial Sequence: Synthetic oligonucleotide
auuacaugauauugcauac

SEQ ID NO: 1919403 - RNA, 19 nt, Artificial Sequence
  Description of Artificial Sequence: Synthetic oligonucleotide
aaugaugcugaggaggagc

SEQ ID NO: 1919404 - RNA, 19 nt, Artificial Sequence
  Description of Artificial Sequence: Synthetic oligonucleotide
auagcuguagcguugggac

SEQ ID NO: 1919405 - RNA, 19 nt, Artificial Sequence
  Description of Artificial Sequence: Synthetic oligonucleotide
ucuuauaucuccaucaauu

SEQ ID NO: 1919406 - RNA, 19 nt, Artificial Sequence
  Description of Artificial Sequence: Synthetic oligonucleotide
cuggaaagaagccaaacgg

SEQ ID NO: 1919407 - RNA, 19 nt, Artificial Sequence
  Description of Artificial Sequence: Synthetic oligonucleotide
uacuucaugacucuuuccc

SEQ ID NO: 1919408 - RNA, 19 nt, Artificial Sequence
  Description of Artificial Sequence: Synthetic oligonucleotide
gauauugcauacuucauga

SEQ ID NO: 1919409 - RNA, 19 nt, Artificial Sequence
  Description of Artificial Sequence: Synthetic oligonucleotide
ugauuguugugcaauacug

SEQ ID NO: 1919410 - RNA, 19 nt, Artificial Sequence
  Description of Artificial Sequence: Synthetic oligonucleotide
uacaucucgagccacaaga

SEQ ID NO: 1919411 - RNA, 19 nt, Artificial Sequence
  Description of Artificial Sequence: Synthetic oligonucleotide
ugauauugcauacuucaug

SEQ ID NO: 1919412 - RNA, 19 nt, Artificial Sequence
  Description of Artificial Sequence: Synthetic oligonucleotide
auucugaauagcuguagcg

SEQ ID NO: 1919413 - RNA, 19 nt, Artificial Sequence
  Description of Artificial Sequence: Synthetic oligonucleotide
agaagcugcaugcagcucg

SEQ ID NO: 1919414 - RNA, 19 nt, Artificial Sequence
  Description of Artificial Sequence: Synthetic oligonucleotide
uuuucauucugaauagcug

SEQ ID NO: 1919415 - RNA, 19 nt, Artificial Sequence
  Description of Artificial Sequence: Synthetic oligonucleotide
uuucauugagaaacguggg

SEQ ID NO: 1919416 - RNA, 19 nt, Artificial Sequence
  Description of Artificial Sequence: Synthetic oligonucleotide
uucuauuugccuuaguuuc

SEQ ID NO: 1919417 - RNA, 19 nt, Artificial Sequence
  Description of Artificial Sequence: Synthetic oligonucleotide
cucaaaaugaccugagaag

SEQ ID NO: 1919418 - RNA, 19 nt, Artificial Sequence
  Description of Artificial Sequence: Synthetic oligonucleotide
uaugagauuugccuuuucc

SEQ ID NO: 1919419 - RNA, 19 nt, Artificial Sequence
  Description of Artificial Sequence: Synthetic oligonucleotide
auuguugugcaauacugag

SEQ ID NO: 1919420 - RNA, 19 nt, Artificial Sequence
  Description of Artificial Sequence: Synthetic oligonucleotide
uauugcauacuucaugacu

SEQ ID NO: 1919421 - RNA, 19 nt, Artificial Sequence
  Description of Artificial Sequence: Synthetic oligonucleotide
uucucaaguaccaauuaca

SEQ ID NO: 1919422 - RNA, 19 nt, Artificial Sequence
  Description of Artificial Sequence: Synthetic oligonucleotide
cucucuugcagcucgaacg

SEQ ID NO: 1919423 - RNA, 19 nt, Artificial Sequence
  Description of Artificial Sequence: Synthetic oligonucleotide
aggucuuuacaucucgagc

SEQ ID NO: 1919424 - RNA, 19 nt, Artificial Sequence
  Description of Artificial Sequence: Synthetic oligonucleotide
accaauuacaugauauugc

SEQ ID NO: 1919425 - RNA, 19 nt, Artificial Sequence
  Description of Artificial Sequence: Synthetic oligonucleotide
aaagaugccagucuccaaa

SEQ ID NO: 1919426 - RNA, 19 nt, Artificial Sequence
  Description of Artificial Sequence: Synthetic oligonucleotide
ucaaaaugaccugagaagu

SEQ ID NO: 1919427 - RNA, 19 nt, Artificial Sequence
  Description of Artificial Sequence: Synthetic oligonucleotide
caugauauugcauacuuca

SEQ ID NO: 1919428 - RNA, 19 nt, Artificial Sequence
  Description of Artificial Sequence: Synthetic oligonucleotide
agcucuaugagauuugccu

SEQ ID NO: 1919429 - RNA, 19 nt, Artificial Sequence
  Description of Artificial Sequence: Synthetic oligonucleotide
agaaacgugggucuucggg

SEQ ID NO: 1919430 - RNA, 19 nt, Artificial Sequence
  Description of Artificial Sequence: Synthetic oligonucleotide
auugaacucaguaacagug

SEQ ID NO: 1919431 - RNA, 19 nt, Artificial Sequence
  Description of Artificial Sequence: Synthetic oligonucleotide
aaggucuuuacaucucgag

SEQ ID NO: 1919432 - RNA, 19 nt, Artificial Sequence
  Description of Artificial Sequence: Synthetic oligonucleotide
aaugcucucucucucuucu

SEQ ID NO: 1919433 - RNA, 19 nt, Artificial Sequence
  Description of Artificial Sequence: Synthetic oligonucleotide
uuguugugcaauacugagg

SEQ ID NO: 1919434 - RNA, 19 nt, Artificial Sequence
  Description of Artificial Sequence: Synthetic oligonucleotide
uugcacugagccaauaccc

SEQ ID NO: 1919435 - RNA, 19 nt, Artificial Sequence
  Description of Artificial Sequence: Synthetic oligonucleotide
uugugcaauacugaggcag

SEQ ID NO: 1919436 - RNA, 19 nt, Artificial Sequence
  Description of Artificial Sequence: Synthetic oligonucleotide
aaugaccugagaaguuucc

SEQ ID NO: 1919437 - RNA, 19 nt, Artificial Sequence
  Description of Artificial Sequence: Synthetic oligonucleotide
gacucuuucccuuacagaa

SEQ ID NO: 1919438 - RNA, 19 nt, Artificial Sequence
  Description of Artificial Sequence: Synthetic oligonucleotide
uuauaucuccaucaauuuc

SEQ ID NO: 1919439 - RNA, 19 nt, Artificial Sequence
  Description of Artificial Sequence: Synthetic oligonucleotide
gacuguacccagaaggugg

SEQ ID NO: 1919440 - RNA, 19 nt, Artificial Sequence
  Description of Artificial Sequence: Synthetic oligonucleotide
uuauuguuccuugucuacg

SEQ ID NO: 1919441 - RNA, 19 nt, Artificial Sequence
  Description of Artificial Sequence: Synthetic oligonucleotide
uaccaauuacaugauauug

SEQ ID NO: 1919442 - RNA, 19 nt, Artificial Sequence
  Description of Artificial Sequence: Synthetic oligonucleotide
uaugcaaggccuccuaugu

SEQ ID NO: 1919443 - RNA, 19 nt, Artificial Sequence
  Description of Artificial Sequence: Synthetic oligonucleotide
ggucuuuacaucucgagcc

SEQ ID NO: 1919444 - RNA, 19 nt, Artificial Sequence
  Description of Artificial Sequence: Synthetic oligonucleotide
uuuauuguuccuugucuac

SEQ ID NO: 1919445 - RNA, 19 nt, Artificial Sequence
  Description of Artificial Sequence: Synthetic oligonucleotide
caucucaucacuguguggc

SEQ ID NO: 1919446 - RNA, 19 nt, Artificial Sequence
  Description of Artificial Sequence: Synthetic oligonucleotide
uugauuguugugcaauacu

SEQ ID NO: 1919447 - RNA, 19 nt, Artificial Sequence
  Description of Artificial Sequence: Synthetic oligonucleotide
aagaugccagucuccaaag

SEQ ID NO: 1919448 - RNA, 19 nt, Artificial Sequence
  Description of Artificial Sequence: Synthetic oligonucleotide
gagauuugccuuuuccagc

SEQ ID NO: 1919449 - RNA, 19 nt, Artificial Sequence
  Description of Artificial Sequence: Synthetic oligonucleotide
uucauugagaaacgugggu

SEQ ID NO: 1919450 - RNA, 19 nt, Artificial Sequence
  Description of Artificial Sequence: Synthetic oligonucleotide
auauugcauacuucaugac

SEQ ID NO: 1919451 - RNA, 19 nt, Artificial Sequence
  Description of Artificial Sequence: Synthetic oligonucleotide
aaauuucuuauaucuccau

SEQ ID NO: 1919452 - RNA, 19 nt, Artificial Sequence
  Description of Artificial Sequence: Synthetic oligonucleotide
augacucuuucccuuacag

SEQ ID NO: 1919453 - RNA, 19 nt, Artificial Sequence
  Description of Artificial Sequence: Synthetic oligonucleotide
auacuucaugacucuuucc

SEQ ID NO: 1919454 - RNA, 19 nt, Artificial Sequence
  Description of Artificial Sequence: Synthetic oligonucleotide
uuugccuuaguuucucaga

SEQ ID NO: 1919455 - RNA, 19 nt, Artificial Sequence
  Description of Artificial Sequence: Synthetic oligonucleotide
augagauuugccuuuucca

SEQ ID NO: 1919456 - RNA, 19 nt, Artificial Sequence
  Description of Artificial Sequence: Synthetic oligonucleotide
uuucuuauaucuccaucaa

SEQ ID NO: 1919457 - RNA, 19 nt, Artificial Sequence
  Description of Artificial Sequence: Synthetic oligonucleotide
ugugcaauacugaggcagc

SEQ ID NO: 1919458 - RNA, 19 nt, Artificial Sequence
  Description of Artificial Sequence: Synthetic oligonucleotide
ugagacggggagcuuagcc

SEQ ID NO: 1919459 - RNA, 19 nt, Artificial Sequence
  Description of Artificial Sequence: Synthetic oligonucleotide
uccaucucaucacugugug

SEQ ID NO: 1919460 - RNA, 19 nt, Artificial Sequence
  Description of Artificial Sequence: Synthetic oligonucleotide
auaaagggcuccugagacg

SEQ ID NO: 1919461 - RNA, 19 nt, Artificial Sequence
  Description of Artificial Sequence: Synthetic oligonucleotide
agguuuacuguacauggca

SEQ ID NO: 1919462 - RNA, 19 nt, Artificial Sequence
  Description of Artificial Sequence: Synthetic oligonucleotide
acuguguggcaucccacgc

SEQ ID NO: 1919463 - RNA, 19 nt, Artificial Sequence
  Description of Artificial Sequence: Synthetic oligonucleotide
aguaccaauuacaugauau

SEQ ID NO: 1919464 - RNA, 19 nt, Artificial Sequence
  Description of Artificial Sequence: Synthetic oligonucleotide
ugagaaacgugggucuucg

SEQ ID NO: 1919465 - RNA, 19 nt, Artificial Sequence
  Description of Artificial Sequence: Synthetic oligonucleotide
ucaguauuuucauucugaa

SEQ ID NO: 1919466 - RNA, 19 nt, Artificial Sequence
  Description of Artificial Sequence: Synthetic oligonucleotide
uuagccacucaccuggaaa

SEQ ID NO: 1919467 - RNA, 19 nt, Artificial Sequence
  Description of Artificial Sequence: Synthetic oligonucleotide
uuugggagagccuugugua

SEQ ID NO: 1919468 - RNA, 19 nt, Artificial Sequence
  Description of Artificial Sequence: Synthetic oligonucleotide
uugaacucaguaacagugu

SEQ ID NO: 1919469 - RNA, 19 nt, Artificial Sequence
  Description of Artificial Sequence: Synthetic oligonucleotide
uguacccagaagguggccg

SEQ ID NO: 1919470 - RNA, 19 nt, Artificial Sequence
  Description of Artificial Sequence: Synthetic oligonucleotide
aauacccggccauuuuaug

SEQ ID NO: 1919471 - RNA, 19 nt, Artificial Sequence
  Description of Artificial Sequence: Synthetic oligonucleotide
uauuguuccuugucuacgu

SEQ ID NO: 1919472 - RNA, 19 nt, Artificial Sequence
  Description of Artificial Sequence: Synthetic oligonucleotide
ucuugcagcucgaacgucu

SEQ ID NO: 1919473 - RNA, 19 nt, Artificial Sequence
  Description of Artificial Sequence: Synthetic oligonucleotide
ccagguuuacuguacaugg

SEQ ID NO: 1919474 - RNA, 19 nt, Artificial Sequence
  Description of Artificial Sequence: Synthetic oligonucleotide
uuacagaaugcucucucuc

SEQ ID NO: 1919475 - RNA, 19 nt, Artificial Sequence
  Description of Artificial Sequence: Synthetic oligonucleotide
uucugaauagcuguagcgu

SEQ ID NO: 1919476 - RNA, 19 nt, Artificial Sequence
  Description of Artificial Sequence: Synthetic oligonucleotide
caguguugugccuauggcc

SEQ ID NO: 1919477 - RNA, 19 nt, Artificial Sequence
  Description of Artificial Sequence: Synthetic oligonucleotide
cuucaaaauuucuuauauc

SEQ ID NO: 1919478 - RNA, 19 nt, Artificial Sequence
  Description of Artificial Sequence: Synthetic oligonucleotide
ucgagccacaagaacuggg

SEQ ID NO: 1919479 - RNA, 19 nt, Artificial Sequence
  Description of Artificial Sequence: Synthetic oligonucleotide
uugaagacagaaacacuuc

SEQ ID NO: 1919480 - RNA, 19 nt, Artificial Sequence
  Description of Artificial Sequence: Synthetic oligonucleotide
cacucaccuggaaagaagc

SEQ ID NO: 1919481 - RNA, 19 nt, Artificial Sequence
  Description of Artificial Sequence: Synthetic oligonucleotide
ucauuucuaagaccaugcu

SEQ ID NO: 1919482 - RNA, 19 nt, Artificial Sequence
  Description of Artificial Sequence: Synthetic oligonucleotide
cuucucaaguaccaauuac

SEQ ID NO: 1919483 - RNA, 19 nt, Artificial Sequence
  Description of Artificial Sequence: Synthetic oligonucleotide
ugcucucucucucuucucc

SEQ ID NO: 1919484 - RNA, 19 nt, Artificial Sequence
  Description of Artificial Sequence: Synthetic oligonucleotide
aguguguagggagucuggc

SEQ ID NO: 1919485 - RNA, 19 nt, Artificial Sequence
  Description of Artificial Sequence: Synthetic oligonucleotide
gaguuuucauugagaaacg

SEQ ID NO: 1919486 - RNA, 19 nt, Artificial Sequence
  Description of Artificial Sequence: Synthetic oligonucleotide
ucgaacgucugcaaugauc

SEQ ID NO: 1919487 - RNA, 19 nt, Artificial Sequence
  Description of Artificial Sequence: Synthetic oligonucleotide
ucucuugcagcucgaacgu

SEQ ID NO: 1919488 - RNA, 19 nt, Artificial Sequence
  Description of Artificial Sequence: Synthetic oligonucleotide
cacugugagaagcucggcg

SEQ ID NO: 1919489 - RNA, 19 nt, Artificial Sequence
  Description of Artificial Sequence: Synthetic oligonucleotide
uuugauuguugugcaauac

SEQ ID NO: 1919490 - RNA, 19 nt, Artificial Sequence
  Description of Artificial Sequence: Synthetic oligonucleotide
aagcucuaugagauuugcc

SEQ ID NO: 1919491 - RNA, 19 nt, Artificial Sequence
  Description of Artificial Sequence: Synthetic oligonucleotide
ucugaauagcuguagcguu

SEQ ID NO: 1919492 - RNA, 19 nt, Artificial Sequence
  Description of Artificial Sequence: Synthetic oligonucleotide
uuucccuuacagaaugcuc

SEQ ID NO: 1919493 - RNA, 19 nt, Artificial Sequence
  Description of Artificial Sequence: Synthetic oligonucleotide
augaccugagaaguuuccc

SEQ ID NO: 1919494 - RNA, 19 nt, Artificial Sequence
  Description of Artificial Sequence: Synthetic oligonucleotide
caaacggcuucucaaguac

SEQ ID NO: 1919495 - RNA, 19 nt, Artificial Sequence
  Description of Artificial Sequence: Synthetic oligonucleotide
auacugaggcagcaugguc

SEQ ID NO: 1919496 - RNA, 19 nt, Artificial Sequence
  Description of Artificial Sequence: Synthetic oligonucleotide
ugucuacgugugcacgugg

SEQ ID NO: 1919497 - RNA, 19 nt, Artificial Sequence
  Description of Artificial Sequence: Synthetic oligonucleotide
ugaacucaguaacaguguu

SEQ ID NO: 1919498 - RNA, 19 nt, Artificial Sequence
  Description of Artificial Sequence: Synthetic oligonucleotide
auacccggccauuuuaugu

SEQ ID NO: 1919499 - RNA, 19 nt, Artificial Sequence
  Description of Artificial Sequence: Synthetic oligonucleotide
agcucgaacgucugcaaug

SEQ ID NO: 1919500 - RNA, 19 nt, Artificial Sequence
  Description of Artificial Sequence: Synthetic oligonucleotide
uuguguaacuggaccguug

SEQ ID NO: 1919501 - RNA, 19 nt, Artificial Sequence
  Description of Artificial Sequence: Synthetic oligonucleotide
cugaauagcuguagcguug

SEQ ID NO: 1919502 - RNA, 19 nt, Artificial Sequence
  Description of Artificial Sequence: Synthetic oligonucleotide
uucuuauaucuccaucaau

SEQ ID NO: 1919503 - RNA, 19 nt, Artificial Sequence
  Description of Artificial Sequence: Synthetic oligonucleotide
acgucugcaaugaucuccc

SEQ ID NO: 1919504 - RNA, 19 nt, Artificial Sequence
  Description of Artificial Sequence: Synthetic oligonucleotide
aacuggaccguuggcuucg

SEQ ID NO: 1919505 - RNA, 19 nt, Artificial Sequence
  Description of Artificial Sequence: Synthetic oligonucleotide
agggagucuggcuggaaag

SEQ ID NO: 1919506 - RNA, 19 nt, Artificial Sequence
  Description of Artificial Sequence: Synthetic oligonucleotide
gugaauaaagggcuccuga

SEQ ID NO: 1919507 - RNA, 19 nt, Artificial Sequence
  Description of Artificial Sequence: Synthetic oligonucleotide
ugugccuauggcccguuga

SEQ ID NO: 1919508 - RNA, 19 nt, Artificial Sequence
  Description of Artificial Sequence: Synthetic oligonucleotide
caaaguucauauucaucuc

SEQ ID NO: 1919509 - RNA, 19 nt, Artificial Sequence
  Description of Artificial Sequence: Synthetic oligonucleotide
agccaaacggcuucucaag

SEQ ID NO: 1919510 - RNA, 19 nt, Artificial Sequence
  Description of Artificial Sequence: Synthetic oligonucleotide
aucucgagccacaagaacu

SEQ ID NO: 1919511 - RNA, 19 nt, Artificial Sequence
  Description of Artificial Sequence: Synthetic oligonucleotide
ugacucuuucccuuacaga

SEQ ID NO: 1919512 - RNA, 19 nt, Artificial Sequence
  Description of Artificial Sequence: Synthetic oligonucleotide
cacuguguggcaucccacg

SEQ ID NO: 1919513 - RNA, 19 nt, Artificial Sequence
  Description of Artificial Sequence: Synthetic oligonucleotide
ugagccaauacccggccau

SEQ ID NO: 1919514 - RNA, 19 nt, Artificial Sequence
  Description of Artificial Sequence: Synthetic oligonucleotide
gauuguugugcaauacuga

SEQ ID NO: 1919515 - RNA, 19 nt, Artificial Sequence
  Description of Artificial Sequence: Synthetic oligonucleotide
aggcaguucacugugagaa

SEQ ID NO: 1919516 - RNA, 19 nt, Artificial Sequence
  Description of Artificial Sequence: Synthetic oligonucleotide
uuacaucucgagccacaag

SEQ ID NO: 1919517 - RNA, 19 nt, Artificial Sequence
  Description of Artificial Sequence: Synthetic oligonucleotide
uguagcguugggacugggc

SEQ ID NO: 1919518 - RNA, 19 nt, Artificial Sequence
  Description of Artificial Sequence: Synthetic oligonucleotide
ucuuucccuuacagaaugc

SEQ ID NO: 1919519 - RNA, 19 nt, Artificial Sequence
  Description of Artificial Sequence: Synthetic oligonucleotide
uccaguccuucuauuugcc

SEQ ID NO: 1919520 - RNA, 19 nt, Artificial Sequence
  Description of Artificial Sequence: Synthetic oligonucleotide
aggccuccuauguugaucu

SEQ ID NO: 1919521 - RNA, 19 nt, Artificial Sequence
  Description of Artificial Sequence: Synthetic oligonucleotide
gcugcaugcagcucggccg

SEQ ID NO: 1919522 - RNA, 19 nt, Artificial Sequence
  Description of Artificial Sequence: Synthetic oligonucleotide
guaugcaaggccuccuaug

SEQ ID NO: 1919523 - RNA, 19 nt, Artificial Sequence
  Description of Artificial Sequence: Synthetic oligonucleotide
aaaagaugccagucuccaa

SEQ ID NO: 1919524 - RNA, 19 nt, Artificial Sequence
  Description of Artificial Sequence: Synthetic oligonucleotide
aguuucccugacuucccuc

SEQ ID NO: 1919525 - RNA, 19 nt, Artificial Sequence
  Description of Artificial Sequence: Synthetic oligonucleotide
ucuacgugugcacguggca

SEQ ID NO: 1919526 - RNA, 19 nt, Artificial Sequence
  Description of Artificial Sequence: Synthetic oligonucleotide
uuggcuucgcuugugcgcc

SEQ ID NO: 1919527 - RNA, 19 nt, Artificial Sequence
  Description of Artificial Sequence: Synthetic oligonucleotide
uuacaugauauugcauacu

SEQ ID NO: 1919528 - RNA, 19 nt, Artificial Sequence
  Description of Artificial Sequence: Synthetic oligonucleotide
cuggaaagcucugugugag

SEQ ID NO: 1919529 - RNA, 19 nt, Artificial Sequence
  Description of Artificial Sequence: Synthetic oligonucleotide
ugugaauaaagggcuccug

SEQ ID NO: 1919530 - RNA, 19 nt, Artificial Sequence
  Description of Artificial Sequence: Synthetic oligonucleotide
acaugauauugcauacuuc

SEQ ID NO: 1919531 - RNA, 19 nt, Artificial Sequence
  Description of Artificial Sequence: Synthetic oligonucleotide
uccguguucaguucuucaa

SEQ ID NO: 1919532 - RNA, 19 nt, Artificial Sequence
  Description of Artificial Sequence: Synthetic oligonucleotide
ggcacucgaguuuucauug

SEQ ID NO: 1919533 - RNA, 19 nt, Artificial Sequence
  Description of Artificial Sequence: Synthetic oligonucleotide
auuguuccuugucuacgug

SEQ ID NO: 1919534 - RNA, 19 nt, Artificial Sequence
  Description of Artificial Sequence: Synthetic oligonucleotide
aguaaugacuucacagaca

SEQ ID NO: 1919535 - RNA, 19 nt, Artificial Sequence
  Description of Artificial Sequence: Synthetic oligonucleotide
aagaacugggguccuugaa

SEQ ID NO: 1919536 - RNA, 19 nt, Artificial Sequence
  Description of Artificial Sequence: Synthetic oligonucleotide
agcucggccgcauucuuug

SEQ ID NO: 1919537 - RNA, 19 nt, Artificial Sequence
  Description of Artificial Sequence: Synthetic oligonucleotide
cuuuauuguuccuugucua

SEQ ID NO: 1919538 - RNA, 19 nt, Artificial Sequence
  Description of Artificial Sequence: Synthetic oligonucleotide
gccuuguguaacuggaccg

SEQ ID NO: 1919539 - RNA, 19 nt, Artificial Sequence
  Description of Artificial Sequence: Synthetic oligonucleotide
uugcauacuucaugacucu

SEQ ID NO: 1919540 - RNA, 19 nt, Artificial Sequence
  Description of Artificial Sequence: Synthetic oligonucleotide
acuccaguaaugacuucac

SEQ ID NO: 1919541 - RNA, 19 nt, Artificial Sequence
  Description of Artificial Sequence: Synthetic oligonucleotide
ucugguccaguccuucuau

SEQ ID NO: 1919542 - RNA, 19 nt, Artificial Sequence
  Description of Artificial Sequence: Synthetic oligonucleotide
gagaagcucggcgagcagc

SEQ ID NO: 1919543 - RNA, 19 nt, Artificial Sequence
  Description of Artificial Sequence: Synthetic oligonucleotide
uuuacaucucgagccacaa

SEQ ID NO: 1919544 - RNA, 19 nt, Artificial Sequence
  Description of Artificial Sequence: Synthetic oligonucleotide
cacucgaguuuucauugag

SEQ ID NO: 1919545 - RNA, 19 nt, Artificial Sequence
  Description of Artificial Sequence: Synthetic oligonucleotide
ugggucuucgggaccaccu

SEQ ID NO: 1919546 - RNA, 19 nt, Artificial Sequence
  Description of Artificial Sequence: Synthetic oligonucleotide
ucucccguaguuugggguc

SEQ ID NO: 1919547 - RNA, 19 nt, Artificial Sequence
  Description of Artificial Sequence: Synthetic oligonucleotide
ugacuguacccagaaggug

SEQ ID NO: 1919548 - RNA, 19 nt, Artificial Sequence
  Description of Artificial Sequence: Synthetic oligonucleotide
aaguaccaauuacaugaua

SEQ ID NO: 1919549 - RNA, 19 nt, Artificial Sequence
  Description of Artificial Sequence: Synthetic oligonucleotide
uauuugccuuaguuucuca

SEQ ID NO: 1919550 - RNA, 19 nt, Artificial Sequence
  Description of Artificial Sequence: Synthetic oligonucleotide
aacggcuucucaaguacca

SEQ ID NO: 1919551 - RNA, 19 nt, Artificial Sequence
  Description of Artificial Sequence: Synthetic oligonucleotide
ucccacgcuucccagugug

SEQ ID NO: 1919552 - RNA, 19 nt, Artificial Sequence
  Description of Artificial Sequence: Synthetic oligonucleotide
uagcguugggacugggccc

SEQ ID NO: 1919553 - RNA, 19 nt, Artificial Sequence
  Description of Artificial Sequence: Synthetic oligonucleotide
aguuuucauugagaaacgu

SEQ ID NO: 1919554 - RNA, 19 nt, Artificial Sequence
  Description of Artificial Sequence: Synthetic oligonucleotide
auggcccguugaaugaugc

SEQ ID NO: 1919555 - RNA, 19 nt, Artificial Sequence
  Description of Artificial Sequence: Synthetic oligonucleotide
ugcgccacgucccuucagu

SEQ ID NO: 1919556 - RNA, 19 nt, Artificial Sequence
  Description of Artificial Sequence: Synthetic oligonucleotide
aguccuucuauuugccuua

SEQ ID NO: 1919557 - RNA, 19 nt, Artificial Sequence
  Description of Artificial Sequence: Synthetic oligonucleotide
ccaauuacaugauauugca

SEQ ID NO: 1919558 - RNA, 19 nt, Artificial Sequence
  Description of Artificial Sequence: Synthetic oligonucleotide
uacgugugcacguggcacu

SEQ ID NO: 1919559 - RNA, 19 nt, Artificial Sequence
  Description of Artificial Sequence: Synthetic oligonucleotide
uucaugacucuuucccuua

SEQ ID NO: 1919560 - RNA, 19 nt, Artificial Sequence
  Description of Artificial Sequence: Synthetic oligonucleotide
ggcuggaaagcucugugug

SEQ ID NO: 1919561 - RNA, 19 nt, Artificial Sequence
  Description of Artificial Sequence: Synthetic oligonucleotide
caucucgagccacaagaac

SEQ ID NO: 1919562 - RNA, 19 nt, Artificial Sequence
  Description of Artificial Sequence: Synthetic oligonucleotide
caacauugcacugagccaa

SEQ ID NO: 1919563 - RNA, 19 nt, Artificial Sequence
  Description of Artificial Sequence: Synthetic oligonucleotide
ucuuuacaucucgagccac

SEQ ID NO: 1919564 - RNA, 19 nt, Artificial Sequence
  Description of Artificial Sequence: Synthetic oligonucleotide
caucccacgcuucccagug

SEQ ID NO: 1919565 - RNA, 19 nt, Artificial Sequence
  Description of Artificial Sequence: Synthetic oligonucleotide
ucacuguguggcaucccac

SEQ ID NO: 1919566 - RNA, 19 nt, Artificial Sequence
  Description of Artificial Sequence: Synthetic oligonucleotide
ugugagaagcucggcgagc

SEQ ID NO: 1919567 - RNA, 19 nt, Artificial Sequence
  Description of Artificial Sequence: Synthetic oligonucleotide
uggccgucaucuucaagcu

SEQ ID NO: 1919568 - RNA, 19 nt, Artificial Sequence
  Description of Artificial Sequence: Synthetic oligonucleotide
cguugaaugaugcugagga

SEQ ID NO: 1919569 - RNA, 19 nt, Artificial Sequence
  Description of Artificial Sequence: Synthetic oligonucleotide
cugugagaagcucggcgag

SEQ ID NO: 1919570 - RNA, 19 nt, Artificial Sequence
  Description of Artificial Sequence: Synthetic oligonucleotide
accugagaaguuucccuga

SEQ ID NO: 1919571 - RNA, 19 nt, Artificial Sequence
  Description of Artificial Sequence: Synthetic oligonucleotide
gucuuuacaucucgagcca

SEQ ID NO: 1919572 - RNA, 19 nt, Artificial Sequence
  Description of Artificial Sequence: Synthetic oligonucleotide
ucucucucucuucuccaaa

SEQ ID NO: 1919573 - RNA, 19 nt, Artificial Sequence
  Description of Artificial Sequence: Synthetic oligonucleotide
cuuuacaucucgagccaca

SEQ ID NO: 1919574 - RNA, 19 nt, Artificial Sequence
  Description of Artificial Sequence: Synthetic oligonucleotide
gagaaacgugggucuucgg

SEQ ID NO: 1919575 - RNA, 19 nt, Artificial Sequence
  Description of Artificial Sequence: Synthetic oligonucleotide
guguugugccuauggcccg

SEQ ID NO: 1919576 - RNA, 19 nt, Artificial Sequence
  Description of Artificial Sequence: Synthetic oligonucleotide
uuucccugacuucccucca

SEQ ID NO: 1919577 - RNA, 19 nt, Artificial Sequence
  Description of Artificial Sequence: Synthetic oligonucleotide
ugggguccagguuuacugu

SEQ ID NO: 1919578 - RNA, 19 nt, Artificial Sequence
  Description of Artificial Sequence: Synthetic oligonucleotide
cuacgugugcacguggcac

SEQ ID NO: 1919579 - RNA, 19 nt, Artificial Sequence
  Description of Artificial Sequence: Synthetic oligonucleotide
cuucaugcagagggagugg

SEQ ID NO: 1919580 - RNA, 19 nt, Artificial Sequence
  Description of Artificial Sequence: Synthetic oligonucleotide
gaaugcucucucucucuuc

SEQ ID NO: 1919581 - RNA, 19 nt, Artificial Sequence
  Description of Artificial Sequence: Synthetic oligonucleotide
cuauuugccuuaguuucuc

SEQ ID NO: 1919582 - RNA, 19 nt, Artificial Sequence
  Description of Artificial Sequence: Synthetic oligonucleotide
ggaccguuggcuucgcuug

SEQ ID NO: 1919583 - RNA, 19 nt, Artificial Sequence
  Description of Artificial Sequence: Synthetic oligonucleotide
uugucuacgugugcacgug

SEQ ID NO: 1919584 - RNA, 19 nt, Artificial Sequence
  Description of Artificial Sequence: Synthetic oligonucleotide
ugggagagccuuguguaac

SEQ ID NO: 1919585 - RNA, 19 nt, Artificial Sequence
  Description of Artificial Sequence: Synthetic oligonucleotide
ucccuuacagaaugcucuc

SEQ ID NO: 1919586 - RNA, 19 nt, Artificial Sequence
  Description of Artificial Sequence: Synthetic oligonucleotide
gaugccagucuccaaaguu

SEQ ID NO: 1919587 - RNA, 19 nt, Artificial Sequence
  Description of Artificial Sequence: Synthetic oligonucleotide
gccuauggcccguugaaug

SEQ ID NO: 1919588 - RNA, 19 nt, Artificial Sequence
  Description of Artificial Sequence: Synthetic oligonucleotide
uucuuugggagagccuugu

SEQ ID NO: 1919589 - RNA, 19 nt, Artificial Sequence
  Description of Artificial Sequence: Synthetic oligonucleotide
agaaugcucucucucucuu

SEQ ID NO: 1919590 - RNA, 19 nt, Artificial Sequence
  Description of Artificial Sequence: Synthetic oligonucleotide
uggaccguuggcuucgcuu

SEQ ID NO: 1919591 - RNA, 19 nt, Artificial Sequence
  Description of Artificial Sequence: Synthetic oligonucleotide
ugguccaguccuucuauuu

SEQ ID NO: 1919592 - RNA, 19 nt, Artificial Sequence
  Description of Artificial Sequence: Synthetic oligonucleotide
gcaguucacugugagaagc

SEQ ID NO: 1919593 - RNA, 19 nt, Artificial Sequence
  Description of Artificial Sequence: Synthetic oligonucleotide
uaacuggaccguuggcuuc

SEQ ID NO: 1919594 - RNA, 19 nt, Artificial Sequence
  Description of Artificial Sequence: Synthetic oligonucleotide
cugcaugcagcucggccgc

SEQ ID NO: 1919595 - RNA, 19 nt, Artificial Sequence
  Description of Artificial Sequence: Synthetic oligonucleotide
agucuggcuggaaagcucu

SEQ ID NO: 1919596 - RNA, 19 nt, Artificial Sequence
  Description of Artificial Sequence: Synthetic oligonucleotide
ugacuucccuccaucucau

SEQ ID NO: 1919597 - RNA, 19 nt, Artificial Sequence
  Description of Artificial Sequence: Synthetic oligonucleotide
cuuauaucuccaucaauuu

SEQ ID NO: 1919598 - RNA, 19 nt, Artificial Sequence
  Description of Artificial Sequence: Synthetic oligonucleotide
caucaacauugcacugagc

SEQ ID NO: 1919599 - RNA, 19 nt, Artificial Sequence
  Description of Artificial Sequence: Synthetic oligonucleotide
ugcacguggcacuccagua

SEQ ID NO: 1919600 - RNA, 19 nt, Artificial Sequence
  Description of Artificial Sequence: Synthetic oligonucleotide
aacugggcacucgaguuuu

SEQ ID NO: 1919601 - RNA, 19 nt, Artificial Sequence
  Description of Artificial Sequence: Synthetic oligonucleotide
cagugugaauaaagggcuc

SEQ ID NO: 1919602 - RNA, 19 nt, Artificial Sequence
  Description of Artificial Sequence: Synthetic oligonucleotide
uagcuguagcguugggacu

SEQ ID NO: 1919603 - RNA, 19 nt, Artificial Sequence
  Description of Artificial Sequence: Synthetic oligonucleotide
aaagcccgugcugucugca

SEQ ID NO: 1919604 - RNA, 19 nt, Artificial Sequence
  Description of Artificial Sequence: Synthetic oligonucleotide
agcagcuucccaugaggaa

SEQ ID NO: 1919605 - RNA, 19 nt, Artificial Sequence
  Description of Artificial Sequence: Synthetic oligonucleotide
ccuuaguuucucagaaaug

SEQ ID NO: 1919606 - RNA, 19 nt, Artificial Sequence
  Description of Artificial Sequence: Synthetic oligonucleotide
augcucucucucucuucuc

SEQ ID NO: 1919607 - RNA, 19 nt, Artificial Sequence
  Description of Artificial Sequence: Synthetic oligonucleotide
gaggcaguucacugugaga

SEQ ID NO: 1919608 - RNA, 19 nt, Artificial Sequence
  Description of Artificial Sequence: Synthetic oligonucleotide
guguaacuggaccguuggc

SEQ ID NO: 1919609 - RNA, 19 nt, Artificial Sequence
  Description of Artificial Sequence: Synthetic oligonucleotide
uugugcgccacgucccuuc

SEQ ID NO: 1919610 - RNA, 19 nt, Artificial Sequence
  Description of Artificial Sequence: Synthetic oligonucleotide
augauauugcauacuucau

SEQ ID NO: 1919611 - RNA, 19 nt, Artificial Sequence
  Description of Artificial Sequence: Synthetic oligonucleotide
agaagcucggcgagcagcu

SEQ ID NO: 1919612 - RNA, 19 nt, Artificial Sequence
  Description of Artificial Sequence: Synthetic oligonucleotide
ucccugacuucccuccauc

SEQ ID NO: 1919613 - RNA, 19 nt, Artificial Sequence
  Description of Artificial Sequence: Synthetic oligonucleotide
acucgaguuuucauugaga

SEQ ID NO: 1919614 - RNA, 19 nt, Artificial Sequence
  Description of Artificial Sequence: Synthetic oligonucleotide
gcagcuucccaugaggaac

SEQ ID NO: 1919615 - RNA, 19 nt, Artificial Sequence
  Description of Artificial Sequence: Synthetic oligonucleotide
cugacuguacccagaaggu

SEQ ID NO: 1919616 - RNA, 19 nt, Artificial Sequence
  Description of Artificial Sequence: Synthetic oligonucleotide
gucuacgugugcacguggc

SEQ ID NO: 1919617 - RNA, 19 nt, Artificial Sequence
  Description of Artificial Sequence: Synthetic oligonucleotide
ggagcuuagccacucaccu

SEQ ID NO: 1919618 - RNA, 19 nt, Artificial Sequence
  Description of Artificial Sequence: Synthetic oligonucleotide
cucgagccacaagaacugg

SEQ ID NO: 1919619 - RNA, 19 nt, Artificial Sequence
  Description of Artificial Sequence: Synthetic oligonucleotide
guacccagaagguggccga

SEQ ID NO: 1919620 - RNA, 19 nt, Artificial Sequence
  Description of Artificial Sequence: Synthetic oligonucleotide
ugugcgccacgucccuuca

SEQ ID NO: 1919621 - RNA, 19 nt, Artificial Sequence
  Description of Artificial Sequence: Synthetic oligonucleotide
caaagcccgugcugucugc

SEQ ID NO: 1919622 - RNA, 19 nt, Artificial Sequence
  Description of Artificial Sequence: Synthetic oligonucleotide
ggcccguugaaugaugcug

SEQ ID NO: 1919623 - RNA, 19 nt, Artificial Sequence
  Description of Artificial Sequence: Synthetic oligonucleotide
cuaugagauuugccuuuuc

SEQ ID NO: 1919624 - RNA, 19 nt, Artificial Sequence
  Description of Artificial Sequence: Synthetic oligonucleotide
ccuuacagaaugcucucuc

SEQ ID NO: 1919625 - RNA, 19 nt, Artificial Sequence
  Description of Artificial Sequence: Synthetic oligonucleotide
uccuucuauuugccuuagu

SEQ ID NO: 1919626 - RNA, 19 nt, Artificial Sequence
  Description of Artificial Sequence: Synthetic oligonucleotide
gccgcauucuuugggagag

SEQ ID NO: 1919627 - RNA, 19 nt, Artificial Sequence
  Description of Artificial Sequence: Synthetic oligonucleotide
auugagaaacgugggucuu

SEQ ID NO: 1919628 - RNA, 19 nt, Artificial Sequence
  Description of Artificial Sequence: Synthetic oligonucleotide
uucccugacuucccuccau

SEQ ID NO: 1919629 - RNA, 19 nt, Artificial Sequence
  Description of Artificial Sequence: Synthetic oligonucleotide
guccguguucaguucuuca

SEQ ID NO: 1919630 - RNA, 19 nt, Artificial Sequence
  Description of Artificial Sequence: Synthetic oligonucleotide
guucaguguguagggaguc

SEQ ID NO: 1919631 - RNA, 19 nt, Artificial Sequence
  Description of Artificial Sequence: Synthetic oligonucleotide
agcguugggacugggccca

SEQ ID NO: 1919632 - RNA, 19 nt, Artificial Sequence
  Description of Artificial Sequence: Synthetic oligonucleotide
uugugccuauggcccguug

SEQ ID NO: 1919633 - RNA, 19 nt, Artificial Sequence
  Description of Artificial Sequence: Synthetic oligonucleotide
caagaacugggguccuuga

SEQ ID NO: 1919634 - RNA, 19 nt, Artificial Sequence
  Description of Artificial Sequence: Synthetic oligonucleotide
ccacucaccuggaaagaag

SEQ ID NO: 1919635 - RNA, 19 nt, Artificial Sequence
  Description of Artificial Sequence: Synthetic oligonucleotide
uguugugccuauggcccgu

SEQ ID NO: 1919636 - RNA, 19 nt, Artificial Sequence
  Description of Artificial Sequence: Synthetic oligonucleotide
cagucuccaaaguucauau

SEQ ID NO: 1919637 - RNA, 19 nt, Artificial Sequence
  Description of Artificial Sequence: Synthetic oligonucleotide
acgugugcacguggcacuc

SEQ ID NO: 1919638 - RNA, 19 nt, Artificial Sequence
  Description of Artificial Sequence: Synthetic oligonucleotide
ucuucgggaccaccugguu

SEQ ID NO: 1919639 - RNA, 19 nt, Artificial Sequence
  Description of Artificial Sequence: Synthetic oligonucleotide
caugacucuuucccuuaca

SEQ ID NO: 1919640 - RNA, 19 nt, Artificial Sequence
  Description of Artificial Sequence: Synthetic oligonucleotide
gagccuuguguaacuggac

SEQ ID NO: 1919641 - RNA, 19 nt, Artificial Sequence
  Description of Artificial Sequence: Synthetic oligonucleotide
acggggagcuuagccacuc

SEQ ID NO: 1919642 - RNA, 19 nt, Artificial Sequence
  Description of Artificial Sequence: Synthetic oligonucleotide
gcuggaaagcucuguguga

SEQ ID NO: 1919643 - RNA, 19 nt, Artificial Sequence
  Description of Artificial Sequence: Synthetic oligonucleotide
ugcauacuucaugacucuu

SEQ ID NO: 1919644 - RNA, 19 nt, Artificial Sequence
  Description of Artificial Sequence: Synthetic oligonucleotide
ucccuucaguauuuucauu

SEQ ID NO: 1919645 - RNA, 19 nt, Artificial Sequence
  Description of Artificial Sequence: Synthetic oligonucleotide
gaggcagcauggucugguc

SEQ ID NO: 1919646 - RNA, 19 nt, Artificial Sequence
  Description of Artificial Sequence: Synthetic oligonucleotide
uaacaguguugugccuaug

SEQ ID NO: 1919647 - RNA, 19 nt, Artificial Sequence
  Description of Artificial Sequence: Synthetic oligonucleotide
gccuuaguuucucagaaau

SEQ ID NO: 1919648 - RNA, 19 nt, Artificial Sequence
  Description of Artificial Sequence: Synthetic oligonucleotide
uggcccguugaaugaugcu

SEQ ID NO: 1919649 - RNA, 19 nt, Artificial Sequence
  Description of Artificial Sequence: Synthetic oligonucleotide
cgagcagcuucccaugagg

SEQ ID NO: 1919650 - RNA, 19 nt, Artificial Sequence
  Description of Artificial Sequence: Synthetic oligonucleotide
acucuuucccuuacagaau

SEQ ID NO: 1919651 - RNA, 19 nt, Artificial Sequence
  Description of Artificial Sequence: Synthetic oligonucleotide
gugccuauggcccguugaa

SEQ ID NO: 1919652 - RNA, 19 nt, Artificial Sequence
  Description of Artificial Sequence: Synthetic oligonucleotide
cauucuuugggagagccuu

SEQ ID NO: 1919653 - RNA, 19 nt, Artificial Sequence
  Description of Artificial Sequence: Synthetic oligonucleotide
gggagcuuagccacucacc

SEQ ID NO: 1919654 - RNA, 19 nt, Artificial Sequence
  Description of Artificial Sequence: Synthetic oligonucleotide
gguuuacuguacauggcaa

SEQ ID NO: 1919655 - RNA, 19 nt, Artificial Sequence
  Description of Artificial Sequence: Synthetic oligonucleotide
gugugcacguggcacucca

SEQ ID NO: 1919656 - RNA, 19 nt, Artificial Sequence
  Description of Artificial Sequence: Synthetic oligonucleotide
caaaaugaccugagaaguu

SEQ ID NO: 1919657 - RNA, 19 nt, Artificial Sequence
  Description of Artificial Sequence: Synthetic oligonucleotide
cuucaugacucuuucccuu

SEQ ID NO: 1919658 - RNA, 19 nt, Artificial Sequence
  Description of Artificial Sequence: Synthetic oligonucleotide
agcugaaguucagugugua

SEQ ID NO: 1919659 - RNA, 19 nt, Artificial Sequence
  Description of Artificial Sequence: Synthetic oligonucleotide
cucuaugagauuugccuuu

SEQ ID NO: 1919660 - RNA, 19 nt, Artificial Sequence
  Description of Artificial Sequence: Synthetic oligonucleotide
ggggagcuuagccacucac

SEQ ID NO: 1919661 - RNA, 19 nt, Artificial Sequence
  Description of Artificial Sequence: Synthetic oligonucleotide
acgugggucuucgggacca

SEQ ID NO: 1919662 - RNA, 19 nt, Artificial Sequence
  Description of Artificial Sequence: Synthetic oligonucleotide
ccugagaaguuucccugac

SEQ ID NO: 1919663 - RNA, 19 nt, Artificial Sequence
  Description of Artificial Sequence: Synthetic oligonucleotide
guaacaguguugugccuau

SEQ ID NO: 1919664 - RNA, 19 nt, Artificial Sequence
  Description of Artificial Sequence: Synthetic oligonucleotide
acuggaccguuggcuucgc

SEQ ID NO: 1919665 - RNA, 19 nt, Artificial Sequence
  Description of Artificial Sequence: Synthetic oligonucleotide
ccugagacggggagcuuag

SEQ ID NO: 1919666 - RNA, 19 nt, Artificial Sequence
  Description of Artificial Sequence: Synthetic oligonucleotide
uggucugguccaguccuuc

SEQ ID NO: 1919667 - RNA, 19 nt, Artificial Sequence
  Description of Artificial Sequence: Synthetic oligonucleotide
ugccuauggcccguugaau

SEQ ID NO: 1919668 - RNA, 19 nt, Artificial Sequence
  Description of Artificial Sequence: Synthetic oligonucleotide
ccuauggcccguugaauga

SEQ ID NO: 1919669 - RNA, 19 nt, Artificial Sequence
  Description of Artificial Sequence: Synthetic oligonucleotide
caaguaccaauuacaugau

SEQ ID NO: 1919670 - RNA, 19 nt, Artificial Sequence
  Description of Artificial Sequence: Synthetic oligonucleotide
gcuucucaaguaccaauua

SEQ ID NO: 1919671 - RNA, 19 nt, Artificial Sequence
  Description of Artificial Sequence: Synthetic oligonucleotide
cucucucucucuucuccaa

SEQ ID NO: 1919672 - RNA, 19 nt, Artificial Sequence
  Description of Artificial Sequence: Synthetic oligonucleotide
ggcaucccacgcuucccag

SEQ ID NO: 1919673 - RNA, 19 nt, Artificial Sequence
  Description of Artificial Sequence: Synthetic oligonucleotide
cagaaugcucucucucucu

SEQ ID NO: 1919674 - RNA, 19 nt, Artificial Sequence
  Description of Artificial Sequence: Synthetic oligonucleotide
caucacuguguggcauccc

SEQ ID NO: 1919675 - RNA, 19 nt, Artificial Sequence
  Description of Artificial Sequence: Synthetic oligonucleotide
gggucuucgggaccaccug

SEQ ID NO: 1919676 - RNA, 19 nt, Artificial Sequence
  Description of Artificial Sequence: Synthetic oligonucleotide
acccggccauuuuauguuu

SEQ ID NO: 1919677 - RNA, 19 nt, Artificial Sequence
  Description of Artificial Sequence: Synthetic oligonucleotide
guaguuugggguccagguu

SEQ ID NO: 1919678 - RNA, 19 nt, Artificial Sequence
  Description of Artificial Sequence: Synthetic oligonucleotide
ggaacugggcacucgaguu

SEQ ID NO: 1919679 - RNA, 19 nt, Artificial Sequence
  Description of Artificial Sequence: Synthetic oligonucleotide
caauacccggccauuuuau

SEQ ID NO: 1919680 - RNA, 19 nt, Artificial Sequence
  Description of Artificial Sequence: Synthetic oligonucleotide
cguuggcuucgcuugugcg

SEQ ID NO: 1919681 - RNA, 19 nt, Artificial Sequence
  Description of Artificial Sequence: Synthetic oligonucleotide
caguucacugugagaagcu

SEQ ID NO: 1919682 - RNA, 19 nt, Artificial Sequence
  Description of Artificial Sequence: Synthetic oligonucleotide
agcucugugugaggcaguu

SEQ ID NO: 1919683 - RNA, 19 nt, Artificial Sequence
  Description of Artificial Sequence: Synthetic oligonucleotide
gccgucaucuucaagcucu

SEQ ID NO: 1919684 - RNA, 19 nt, Artificial Sequence
  Description of Artificial Sequence: Synthetic oligonucleotide
gcucgaacgucugcaauga

SEQ ID NO: 1919685 - RNA, 19 nt, Artificial Sequence
  Description of Artificial Sequence: Synthetic oligonucleotide
aucccacgcuucccagugu

SEQ ID NO: 1919686 - RNA, 19 nt, Artificial Sequence
  Description of Artificial Sequence: Synthetic oligonucleotide
accguuggcuucgcuugug

SEQ ID NO: 1919687 - RNA, 19 nt, Artificial Sequence
  Description of Artificial Sequence: Synthetic oligonucleotide
ccguugaaugaugcugagg

SEQ ID NO: 1919688 - RNA, 19 nt, Artificial Sequence
  Description of Artificial Sequence: Synthetic oligonucleotide
gugugaauaaagggcuccu

SEQ ID NO: 1919689 - RNA, 19 nt, Artificial Sequence
  Description of Artificial Sequence: Synthetic oligonucleotide
gcucucucucucuucucca

SEQ ID NO: 1919690 - RNA, 19 nt, Artificial Sequence
  Description of Artificial Sequence: Synthetic oligonucleotide
ccuucuauuugccuuaguu

SEQ ID NO: 1919691 - RNA, 19 nt, Artificial Sequence
  Description of Artificial Sequence: Synthetic oligonucleotide
cccaggccucaaaaugacc

SEQ ID NO: 1919692 - RNA, 19 nt, Artificial Sequence
  Description of Artificial Sequence: Synthetic oligonucleotide
gcacguggcacuccaguaa

SEQ ID NO: 1919693 - RNA, 19 nt, Artificial Sequence
  Description of Artificial Sequence: Synthetic oligonucleotide
agccaauacccggccauuu

SEQ ID NO: 1919694 - RNA, 19 nt, Artificial Sequence
  Description of Artificial Sequence: Synthetic oligonucleotide
ccggccauuuuauguuuug

SEQ ID NO: 1919695 - RNA, 19 nt, Artificial Sequence
  Description of Artificial Sequence: Synthetic oligonucleotide
cuauguugaucugcucucu

SEQ ID NO: 1919696 - RNA, 19 nt, Artificial Sequence
  Description of Artificial Sequence: Synthetic oligonucleotide
ggguccagguuuacuguac

SEQ ID NO: 1919697 - RNA, 19 nt, Artificial Sequence
  Description of Artificial Sequence: Synthetic oligonucleotide
cuguagcguugggacuggg

SEQ ID NO: 1919698 - RNA, 19 nt, Artificial Sequence
  Description of Artificial Sequence: Synthetic oligonucleotide
cugagacggggagcuuagc

SEQ ID NO: 1919699 - RNA, 19 nt, Artificial Sequence
  Description of Artificial Sequence: Synthetic oligonucleotide
cagcugggaguccguguuc

SEQ ID NO: 1919700 - RNA, 19 nt, Artificial Sequence
  Description of Artificial Sequence: Synthetic oligonucleotide
gcacucgaguuuucauuga

SEQ ID NO: 1919701 - RNA, 19 nt, Artificial Sequence
  Description of Artificial Sequence: Synthetic oligonucleotide
agcuucccaugaggaacug

SEQ ID NO: 1919702 - RNA, 19 nt, Artificial Sequence
  Description of Artificial Sequence: Synthetic oligonucleotide
gcuguagcguugggacugg

SEQ ID NO: 1919703 - RNA, 19 nt, Artificial Sequence
  Description of Artificial Sequence: Synthetic oligonucleotide
gcuucgcuugugcgccacg

SEQ ID NO: 1919704 - RNA, 19 nt, Artificial Sequence
  Description of Artificial Sequence: Synthetic oligonucleotide
cccacgcuucccagugugg

SEQ ID NO: 1919705 - RNA, 19 nt, Artificial Sequence
  Description of Artificial Sequence: Synthetic oligonucleotide
acauugcacugagccaaua

SEQ ID NO: 1919706 - RNA, 19 nt, Artificial Sequence
  Description of Artificial Sequence: Synthetic oligonucleotide
cacagacagugugaauaaa

SEQ ID NO: 1919707 - RNA, 19 nt, Artificial Sequence
  Description of Artificial Sequence: Synthetic oligonucleotide
ccaaacggcuucucaagua

SEQ ID NO: 1919708 - RNA, 19 nt, Artificial Sequence
  Description of Artificial Sequence: Synthetic oligonucleotide
ccguaguuugggguccagg

SEQ ID NO: 1919709 - RNA, 19 nt, Artificial Sequence
  Description of Artificial Sequence: Synthetic oligonucleotide
cuucgggaccaccugguuu

SEQ ID NO: 1919710 - RNA, 19 nt, Artificial Sequence
  Description of Artificial Sequence: Synthetic oligonucleotide
gguaugcaaggccuccuau

SEQ ID NO: 1919711 - RNA, 19 nt, Artificial Sequence
  Description of Artificial Sequence: Synthetic oligonucleotide
cacguggcacuccaguaau

SEQ ID NO: 1919712 - RNA, 19 nt, Artificial Sequence
  Description of Artificial Sequence: Synthetic oligonucleotide
ccguuggcuucgcuugugc

SEQ ID NO: 1919713 - RNA, 19 nt, Artificial Sequence
  Description of Artificial Sequence: Synthetic oligonucleotide
ggcacuccaguaaugacuu

SEQ ID NO: 1919714 - RNA, 19 nt, Artificial Sequence
  Description of Artificial Sequence: Synthetic oligonucleotide
ccaauacccggccauuuua

SEQ ID NO: 1919715 - RNA, 19 nt, Artificial Sequence
  Description of Artificial Sequence: Synthetic oligonucleotide
ccuccuauguugaucugcu

SEQ ID NO: 1919716 - RNA, 19 nt, Artificial Sequence
  Description of Artificial Sequence: Synthetic oligonucleotide
gccaaacggcuucucaagu

SEQ ID NO: 1919717 - RNA, 19 nt, Artificial Sequence
  Description of Artificial Sequence: Synthetic oligonucleotide
gggguccagguuuacugua

SEQ ID NO: 1919718 - RNA, 19 nt, Artificial Sequence
  Description of Artificial Sequence: Synthetic oligonucleotide
ggagucuggcuggaaagcu

SEQ ID NO: 1919719 - RNA, 19 nt, Artificial Sequence
  Description of Artificial Sequence: Synthetic oligonucleotide
ccguguucaguucuucaaa

SEQ ID NO: 1919720 - RNA, 19 nt, Artificial Sequence
  Description of Artificial Sequence: Synthetic oligonucleotide
ggguaugcaaggccuccua

SEQ ID NO: 1919721 - RNA, 19 nt, Artificial Sequence
  Description of Artificial Sequence: Synthetic oligonucleotide
caguaacaguguugugccu

SEQ ID NO: 1919722 - RNA, 19 nt, Artificial Sequence
  Description of Artificial Sequence: Synthetic oligonucleotide
gggcacucgaguuuucauu

SEQ ID NO: 1919723 - RNA, 19 nt, Artificial Sequence
  Description of Artificial Sequence: Synthetic oligonucleotide
cuucgcuugugcgccacgu

SEQ ID NO: 1919724 - RNA, 19 nt, Artificial Sequence
  Description of Artificial Sequence: Synthetic oligonucleotide
ucgggaccaccugguuuuc

SEQ ID NO: 1919725 - RNA, 19 nt, Artificial Sequence
  Description of Artificial Sequence: Synthetic oligonucleotide
gccacucaccuggaaagaa

SEQ ID NO: 1919726 - RNA, 19 nt, Artificial Sequence
  Description of Artificial Sequence: Synthetic oligonucleotide
gccacgucccuucaguauu

SEQ ID NO: 1919727 - RNA, 19 nt, Artificial Sequence
  Description of Artificial Sequence: Synthetic oligonucleotide
ggccuccuauguugaucug

SEQ ID NO: 1919728 - RNA, 19 nt, Artificial Sequence
  Description of Artificial Sequence: Synthetic oligonucleotide
cuuguguaacuggaccguu

SEQ ID NO: 1919729 - RNA, 19 nt, Artificial Sequence
  Description of Artificial Sequence: Synthetic oligonucleotide
ggucugguccaguccuucu

SEQ ID NO: 1919730 - RNA, 19 nt, Artificial Sequence
  Description of Artificial Sequence: Synthetic oligonucleotide
gcccgugcugucugcagaa

SEQ ID NO: 1919731 - RNA, 19 nt, Artificial Sequence
  Description of Artificial Sequence: Synthetic oligonucleotide
guagggagucuggcuggaa

SEQ ID NO: 1919732 - RNA, 19 nt, Artificial Sequence
  Description of Artificial Sequence: Synthetic oligonucleotide
cacagucauugaacucagu

SEQ ID NO: 1919733 - RNA, 19 nt, Artificial Sequence
  Description of Artificial Sequence: Synthetic oligonucleotide
cgugcugucugcagaagcu

SEQ ID NO: 1919734 - RNA, 19 nt, Artificial Sequence
  Description of Artificial Sequence: Synthetic oligonucleotide
gggacugggcccaggccuc

SEQ ID NO: 1919735 - RNA, 19 nt, Artificial Sequence
  Description of Artificial Sequence: Synthetic oligonucleotide
cggccgcauucuuugggag

SEQ ID NO: 1919736 - RNA, 19 nt, Artificial Sequence
  Description of Artificial Sequence: Synthetic oligonucleotide
gacggggagcuuagccacu

SEQ ID NO: 1919737 - RNA, 19 nt, Artificial Sequence
  Description of Artificial Sequence: Synthetic oligonucleotide
gagccaauacccggccauu

SEQ ID NO: 1919738 - RNA, 19 nt, Artificial Sequence
  Description of Artificial Sequence: Synthetic oligonucleotide
ccuuguguaacuggaccgu

SEQ ID NO: 1919739 - RNA, 19 nt, Artificial Sequence
  Description of Artificial Sequence: Synthetic oligonucleotide
cugguccaguccuucuauu

SEQ ID NO: 1919740 - RNA, 19 nt, Artificial Sequence
  Description of Artificial Sequence: Synthetic oligonucleotide
ggcuucgcuugugcgccac

SEQ ID NO: 1919741 - RNA, 19 nt, Artificial Sequence
  Description of Artificial Sequence: Synthetic oligonucleotide
gccaauacccggccauuuu

SEQ ID NO: 1919742 - RNA, 19 nt, Artificial Sequence
  Description of Artificial Sequence: Synthetic oligonucleotide
ccaguccuucuauuugccu

SEQ ID NO: 1919743 - RNA, 19 nt, Artificial Sequence
  Description of Artificial Sequence: Synthetic oligonucleotide
gcauucuuugggagagccu

SEQ ID NO: 1919744 - RNA, 19 nt, Artificial Sequence
  Description of Artificial Sequence: Synthetic oligonucleotide
cucgaacgucugcaaugau

SEQ ID NO: 1919745 - RNA, 19 nt, Artificial Sequence
  Description of Artificial Sequence: Synthetic oligonucleotide
gcucugugugaggcaguuc

SEQ ID NO: 1919746 - RNA, 19 nt, Artificial Sequence
  Description of Artificial Sequence: Synthetic oligonucleotide
caugcagcucggccgcauu

SEQ ID NO: 1919747 - RNA, 19 nt, Artificial Sequence
  Description of Artificial Sequence: Synthetic oligonucleotide
ccgcauucuuugggagagc

SEQ ID NO: 1919748 - RNA, 19 nt, Artificial Sequence
  Description of Artificial Sequence: Synthetic oligonucleotide
gcgccacgucccuucagua

SEQ ID NO: 1919749 - RNA, 19 nt, Artificial Sequence
  Description of Artificial Sequence: Synthetic oligonucleotide
gggguaugcaaggccuccu

SEQ ID NO: 1919750 - RNA, 19 nt, Artificial Sequence
  Description of Artificial Sequence: Synthetic oligonucleotide
cgugugcacguggcacucc

SEQ ID NO: 1919751 - RNA, 19 nt, Artificial Sequence
  Description of Artificial Sequence: Synthetic oligonucleotide
cccguaguuugggguccag

SEQ ID NO: 1919752 - RNA, 19 nt, Artificial Sequence
  Description of Artificial Sequence: Synthetic oligonucleotide
ggacugggcccaggccuca

SEQ ID NO: 1919753 - RNA, 19 nt, Artificial Sequence
  Description of Artificial Sequence: Synthetic oligonucleotide
gcucggcgagcagcuuccc

SEQ ID NO: 1919754 - RNA, 19 nt, Artificial Sequence
  Description of Artificial Sequence: Synthetic oligonucleotide
cuggaccguuggcuucgcu

SEQ ID NO: 1919755 - RNA, 19 nt, Artificial Sequence
  Description of Artificial Sequence: Synthetic oligonucleotide
cggcuucucaaguaccaau

SEQ ID NO: 1919756 - RNA, 19 nt, Artificial Sequence
  Description of Artificial Sequence: Synthetic oligonucleotide
cccuuacagaaugcucucu

SEQ ID NO: 1919757 - RNA, 19 nt, Artificial Sequence
  Description of Artificial Sequence: Synthetic oligonucleotide
cuugugcgccacgucccuu

SEQ ID NO: 1919758 - RNA, 19 nt, Artificial Sequence
  Description of Artificial Sequence: Synthetic oligonucleotide
gcguugggacugggcccag

SEQ ID NO: 1919759 - RNA, 19 nt, Artificial Sequence
  Description of Artificial Sequence: Synthetic oligonucleotide
cgugggucuucgggaccac

SEQ ID NO: 1919760 - RNA, 19 nt, Artificial Sequence
  Description of Artificial Sequence: Synthetic oligonucleotide
ugguauaaaacauaaaggg

SEQ ID NO: 1919761 - RNA, 19 nt, Artificial Sequence
  Description of Artificial Sequence: Synthetic oligonucleotide
uuuuccaucacuugaaggg

SEQ ID NO: 1919762 - RNA, 19 nt, Artificial Sequence
  Description of Artificial Sequence: Synthetic oligonucleotide
uuaacaaggguguacaagg

SEQ ID NO: 1919763 - RNA, 19 nt, Artificial Sequence
  Description of Artificial Sequence: Synthetic oligonucleotide
ugauaaagagcuaacaggc

SEQ ID NO: 1919764 - RNA, 19 nt, Artificial Sequence
  Description of Artificial Sequence: Synthetic oligonucleotide
uugauaaagagcuaacagg

SEQ ID NO: 1919765 - RNA, 19 nt, Artificial Sequence
  Description of Artificial Sequence: Synthetic oligonucleotide
ugcauagccauacaguugg

SEQ ID NO: 1919766 - RNA, 19 nt, Artificial Sequence
  Description of Artificial Sequence: Synthetic oligonucleotide
ucuuuaacaagcugggugg

SEQ ID NO: 1919767 - RNA, 19 nt, Artificial Sequence
  Description of Artificial Sequence: Synthetic oligonucleotide
ucaaaagacuuucugauuc

SEQ ID NO: 1919768 - RNA, 19 nt, Artificial Sequence
  Description of Artificial Sequence: Synthetic oligonucleotide
aguaaauugaauguaaagu

SEQ ID NO: 1919769 - RNA, 19 nt, Artificial Sequence
  Description of Artificial Sequence: Synthetic oligonucleotide
aaccuuauuaacaagggug

SEQ ID NO: 1919770 - RNA, 19 nt, Artificial Sequence
  Description of Artificial Sequence: Synthetic oligonucleotide
uaaggaugcaagaucagcc

SEQ ID NO: 1919771 - RNA, 19 nt, Artificial Sequence
  Description of Artificial Sequence: Synthetic oligonucleotide
uuaugaaagaauccaucag

SEQ ID NO: 1919772 - RNA, 19 nt, Artificial Sequence
  Description of Artificial Sequence: Synthetic oligonucleotide
agagcuaacaggcaacuuc

SEQ ID NO: 1919773 - RNA, 19 nt, Artificial Sequence
  Description of Artificial Sequence: Synthetic oligonucleotide
cuguccagcacauuaagcg

SEQ ID NO: 1919774 - RNA, 19 nt, Artificial Sequence
  Description of Artificial Sequence: Synthetic oligonucleotide
uaagcgguucucuacauag

SEQ ID NO: 1919775 - RNA, 19 nt, Artificial Sequence
  Description of Artificial Sequence: Synthetic oligonucleotide
gaaucuauaucuucucgag

SEQ ID NO: 1919776 - RNA, 19 nt, Artificial Sequence
  Description of Artificial Sequence: Synthetic oligonucleotide
uguaaagauaguacucugc

SEQ ID NO: 1919777 - RNA, 19 nt, Artificial Sequence
  Description of Artificial Sequence: Synthetic oligonucleotide
augguauaaaacauaaagg

SEQ ID NO: 1919778 - RNA, 19 nt, Artificial Sequence
  Description of Artificial Sequence: Synthetic oligonucleotide
aagaagugcauagccauac

SEQ ID NO: 1919779 - RNA, 19 nt, Artificial Sequence
  Description of Artificial Sequence: Synthetic oligonucleotide
gauaguacucugcagaauc

SEQ ID NO: 1919780 - RNA, 19 nt, Artificial Sequence
  Description of Artificial Sequence: Synthetic oligonucleotide
uaaauugaauguaaaguua

SEQ ID NO: 1919781 - RNA, 19 nt, Artificial Sequence
  Description of Artificial Sequence: Synthetic oligonucleotide
ucuuuuaccugccagggaa

SEQ ID NO: 1919782 - RNA, 19 nt, Artificial Sequence
  Description of Artificial Sequence: Synthetic oligonucleotide
uuugcugagcccaagcuac

SEQ ID NO: 1919783 - RNA, 19 nt, Artificial Sequence
  Description of Artificial Sequence: Synthetic oligonucleotide
cucauaagcggccaggucc

SEQ ID NO: 1919784 - RNA, 19 nt, Artificial Sequence
  Description of Artificial Sequence: Synthetic oligonucleotide
uuguuuuaggccuggaagc

SEQ ID NO: 1919785 - RNA, 19 nt, Artificial Sequence
  Description of Artificial Sequence: Synthetic oligonucleotide
uuuguaaagauaguacucu

SEQ ID NO: 1919786 - RNA, 19 nt, Artificial Sequence
  Description of Artificial Sequence: Synthetic oligonucleotide
uagcuugaggucuucaggg

SEQ ID NO: 1919787 - RNA, 19 nt, Artificial Sequence
  Description of Artificial Sequence: Synthetic oligonucleotide
uucucuacauagcuugagg

SEQ ID NO: 1919788 - RNA, 19 nt, Artificial Sequence
  Description of Artificial Sequence: Synthetic oligonucleotide
ugugccgaaauuuguaaag

SEQ ID NO: 1919789 - RNA, 19 nt, Artificial Sequence
  Description of Artificial Sequence: Synthetic oligonucleotide
gaagcuuggaauguucugg

SEQ ID NO: 1919790 - RNA, 19 nt, Artificial Sequence
  Description of Artificial Sequence: Synthetic oligonucleotide
cugcaguuuagauugagag

SEQ ID NO: 1919791 - RNA, 19 nt, Artificial Sequence
  Description of Artificial Sequence: Synthetic oligonucleotide
caaaccgugauauugauaa

SEQ ID NO: 1919792 - RNA, 19 nt, Artificial Sequence
  Description of Artificial Sequence: Synthetic oligonucleotide
ugcagaaucuauaucuucu

SEQ ID NO: 1919793 - RNA, 19 nt, Artificial Sequence
  Description of Artificial Sequence: Synthetic oligonucleotide
aaccgugauauugauaaag

SEQ ID NO: 1919794 - RNA, 19 nt, Artificial Sequence
  Description of Artificial Sequence: Synthetic oligonucleotide
gauugagaggccuuaaauc

SEQ ID NO: 1919795 - RNA, 19 nt, Artificial Sequence
  Description of Artificial Sequence: Synthetic oligonucleotide
acauuaagcgguucucuac

SEQ ID NO: 1919796 - RNA, 19 nt, Artificial Sequence
  Description of Artificial Sequence: Synthetic oligonucleotide
uuauuaacaaggguguaca

SEQ ID NO: 1919797 - RNA, 19 nt, Artificial Sequence
  Description of Artificial Sequence: Synthetic oligonucleotide
aauguaaaguuaucuggaa

SEQ ID NO: 1919798 - RNA, 19 nt, Artificial Sequence
  Description of Artificial Sequence: Synthetic oligonucleotide
auugaauguaaaguuaucu

SEQ ID NO: 1919799 - RNA, 19 nt, Artificial Sequence
  Description of Artificial Sequence: Synthetic oligonucleotide
cuuggaauguucugguucc

SEQ ID NO: 1919800 - RNA, 19 nt, Artificial Sequence
  Description of Artificial Sequence: Synthetic oligonucleotide
auaugcuuuguccauuaag

SEQ ID NO: 1919801 - RNA, 19 nt, Artificial Sequence
  Description of Artificial Sequence: Synthetic oligonucleotide
uccacaaaccgugauauug

SEQ ID NO: 1919802 - RNA, 19 nt, Artificial Sequence
  Description of Artificial Sequence: Synthetic oligonucleotide
gcuaccuucaccuuccugg

SEQ ID NO: 1919803 - RNA, 19 nt, Artificial Sequence
  Description of Artificial Sequence: Synthetic oligonucleotide
aaucgcuccagguaucgug

SEQ ID NO: 1919804 - RNA, 19 nt, Artificial Sequence
  Description of Artificial Sequence: Synthetic oligonucleotide
aacagggacacaccaaagu

SEQ ID NO: 1919805 - RNA, 19 nt, Artificial Sequence
  Description of Artificial Sequence: Synthetic oligonucleotide
ccgaaauuuguaaagauag

SEQ ID NO: 1919806 - RNA, 19 nt, Artificial Sequence
  Description of Artificial Sequence: Synthetic oligonucleotide
agagucaaaagacuuucug

SEQ ID NO: 1919807 - RNA, 19 nt, Artificial Sequence
  Description of Artificial Sequence: Synthetic oligonucleotide
agaaucuauaucuucucga

SEQ ID NO: 1919808 - RNA, 19 nt, Artificial Sequence
  Description of Artificial Sequence: Synthetic oligonucleotide
uccauacugaaccuuauua

SEQ ID NO: 1919809 - RNA, 19 nt, Artificial Sequence
  Description of Artificial Sequence: Synthetic oligonucleotide
cauuaaggaugcaagauca

SEQ ID NO: 1919810 - RNA, 19 nt, Artificial Sequence
  Description of Artificial Sequence: Synthetic oligonucleotide
cuuuuccaucacuugaagg

SEQ ID NO: 1919811 - RNA, 19 nt, Artificial Sequence
  Description of Artificial Sequence: Synthetic oligonucleotide
auaaagagcuaacaggcaa

SEQ ID NO: 1919812 - RNA, 19 nt, Artificial Sequence
  Description of Artificial Sequence: Synthetic oligonucleotide
uugugcaccguauuucagg

SEQ ID NO: 1919813 - RNA, 19 nt, Artificial Sequence
  Description of Artificial Sequence: Synthetic oligonucleotide
gauauugauaaagagcuaa

SEQ ID NO: 1919814 - RNA, 19 nt, Artificial Sequence
  Description of Artificial Sequence: Synthetic oligonucleotide
agaggccuuaaaucgcucc

SEQ ID NO: 1919815 - RNA, 19 nt, Artificial Sequence
  Description of Artificial Sequence: Synthetic oligonucleotide
aauugaauguaaaguuauc

SEQ ID NO: 1919816 - RNA, 19 nt, Artificial Sequence
  Description of Artificial Sequence: Synthetic oligonucleotide
aaggaugcaagaucagcca

SEQ ID NO: 1919817 - RNA, 19 nt, Artificial Sequence
  Description of Artificial Sequence: Synthetic oligonucleotide
uauugauaaagagcuaaca

SEQ ID NO: 1919818 - RNA, 19 nt, Artificial Sequence
  Description of Artificial Sequence: Synthetic oligonucleotide
guaaagauaguacucugca

SEQ ID NO: 1919819 - RNA, 19 nt, Artificial Sequence
  Description of Artificial Sequence: Synthetic oligonucleotide
gcaacuuccuuucauaugc

SEQ ID NO: 1919820 - RNA, 19 nt, Artificial Sequence
  Description of Artificial Sequence: Synthetic oligonucleotide
ugucuugguacacagcccu

SEQ ID NO: 1919821 - RNA, 19 nt, Artificial Sequence
  Description of Artificial Sequence: Synthetic oligonucleotide
cacagauaaagcaucuuug

SEQ ID NO: 1919822 - RNA, 19 nt, Artificial Sequence
  Description of Artificial Sequence: Synthetic oligonucleotide
auuaacaaggguguacaag

SEQ ID NO: 1919823 - RNA, 19 nt, Artificial Sequence
  Description of Artificial Sequence: Synthetic oligonucleotide
ucuugcaucaugaucucaa

SEQ ID NO: 1919824 - RNA, 19 nt, Artificial Sequence
  Description of Artificial Sequence: Synthetic oligonucleotide
gugauauugauaaagagcu

SEQ ID NO: 1919825 - RNA, 19 nt, Artificial Sequence
  Description of Artificial Sequence: Synthetic oligonucleotide
ugucuaauccagcugugga

SEQ ID NO: 1919826 - RNA, 19 nt, Artificial Sequence
  Description of Artificial Sequence: Synthetic oligonucleotide
gcaguuuagauugagaggc

SEQ ID NO: 1919827 - RNA, 19 nt, Artificial Sequence
  Description of Artificial Sequence: Synthetic oligonucleotide
uuaaggaugcaagaucagc

SEQ ID NO: 1919828 - RNA, 19 nt, Artificial Sequence
  Description of Artificial Sequence: Synthetic oligonucleotide
uaaagagcuaacaggcaac

SEQ ID NO: 1919829 - RNA, 19 nt, Artificial Sequence
  Description of Artificial Sequence: Synthetic oligonucleotide
ugucaagguagccuggugu

SEQ ID NO: 1919830 - RNA, 19 nt, Artificial Sequence
  Description of Artificial Sequence: Synthetic oligonucleotide
aagauaguacucugcagaa

SEQ ID NO: 1919831 - RNA, 19 nt, Artificial Sequence
  Description of Artificial Sequence: Synthetic oligonucleotide
aacaaggguguacaaggcu

SEQ ID NO: 1919832 - RNA, 19 nt, Artificial Sequence
  Description of Artificial Sequence: Synthetic oligonucleotide
aaagacuuucugauucaac

SEQ ID NO: 1919833 - RNA, 19 nt, Artificial Sequence
  Description of Artificial Sequence: Synthetic oligonucleotide
acuucugcucauaagcggc

SEQ ID NO: 1919834 - RNA, 19 nt, Artificial Sequence
  Description of Artificial Sequence: Synthetic oligonucleotide
uacugaaccuuauuaacaa

SEQ ID NO: 1919835 - RNA, 19 nt, Artificial Sequence
  Description of Artificial Sequence: Synthetic oligonucleotide
uaucuucucgagaugaaau

SEQ ID NO: 1919836 - RNA, 19 nt, Artificial Sequence
  Description of Artificial Sequence: Synthetic oligonucleotide
ugcaccguauuucaggcac

SEQ ID NO: 1919837 - RNA, 19 nt, Artificial Sequence
  Description of Artificial Sequence: Synthetic oligonucleotide
ucuaauccagcuguggaug

SEQ ID NO: 1919838 - RNA, 19 nt, Artificial Sequence
  Description of Artificial Sequence: Synthetic oligonucleotide
ggaguuuucuuuaacaagc

SEQ ID NO: 1919839 - RNA, 19 nt, Artificial Sequence
  Description of Artificial Sequence: Synthetic oligonucleotide
ugugcaccguauuucaggc

SEQ ID NO: 1919840 - RNA, 19 nt, Artificial Sequence
  Description of Artificial Sequence: Synthetic oligonucleotide
uuaccugccagggaaaggc

SEQ ID NO: 1919841 - RNA, 19 nt, Artificial Sequence
  Description of Artificial Sequence: Synthetic oligonucleotide
uacgcugcggaaaggaggc

SEQ ID NO: 1919842 - RNA, 19 nt, Artificial Sequence
  Description of Artificial Sequence: Synthetic oligonucleotide
cagaaucuauaucuucucg

SEQ ID NO: 1919843 - RNA, 19 nt, Artificial Sequence
  Description of Artificial Sequence: Synthetic oligonucleotide
uguucugguuccucgaugu

SEQ ID NO: 1919844 - RNA, 19 nt, Artificial Sequence
  Description of Artificial Sequence: Synthetic oligonucleotide
ucuauaucuucucgagaug

SEQ ID NO: 1919845 - RNA, 19 nt, Artificial Sequence
  Description of Artificial Sequence: Synthetic oligonucleotide
uuaacaagcugggugguca

SEQ ID NO: 1919846 - RNA, 19 nt, Artificial Sequence
  Description of Artificial Sequence: Synthetic oligonucleotide
gaauguaaaguuaucugga

SEQ ID NO: 1919847 - RNA, 19 nt, Artificial Sequence
  Description of Artificial Sequence: Synthetic oligonucleotide
agugcauagccauacaguu

SEQ ID NO: 1919848 - RNA, 19 nt, Artificial Sequence
  Description of Artificial Sequence: Synthetic oligonucleotide
auauugauaaagagcuaac

SEQ ID NO: 1919849 - RNA, 19 nt, Artificial Sequence
  Description of Artificial Sequence: Synthetic oligonucleotide
auaaagggagagaaauugg

SEQ ID NO: 1919850 - RNA, 19 nt, Artificial Sequence
  Description of Artificial Sequence: Synthetic oligonucleotide
aagaucagccagguggcac

SEQ ID NO: 1919851 - RNA, 19 nt, Artificial Sequence
  Description of Artificial Sequence: Synthetic oligonucleotide
cuuauuaacaaggguguac

SEQ ID NO: 1919852 - RNA, 19 nt, Artificial Sequence
  Description of Artificial Sequence: Synthetic oligonucleotide
uuuuguuuuaggccuggaa

SEQ ID NO: 1919853 - RNA, 19 nt, Artificial Sequence
  Description of Artificial Sequence: Synthetic oligonucleotide
uuuuaggccuggaagcaac

SEQ ID NO: 1919854 - RNA, 19 nt, Artificial Sequence
  Description of Artificial Sequence: Synthetic oligonucleotide
uaucguggaagcuuggaau

SEQ ID NO: 1919855 - RNA, 19 nt, Artificial Sequence
  Description of Artificial Sequence: Synthetic oligonucleotide
guaaauugaauguaaaguu

SEQ ID NO: 1919856 - RNA, 19 nt, Artificial Sequence
  Description of Artificial Sequence: Synthetic oligonucleotide
ucuugugcaccguauuuca

SEQ ID NO: 1919857 - RNA, 19 nt, Artificial Sequence
  Description of Artificial Sequence: Synthetic oligonucleotide
uugagaggccuuaaaucgc

SEQ ID NO: 1919858 - RNA, 19 nt, Artificial Sequence
  Description of Artificial Sequence: Synthetic oligonucleotide
aucuucucgagaugaaaug

SEQ ID NO: 1919859 - RNA, 19 nt, Artificial Sequence
  Description of Artificial Sequence: Synthetic oligonucleotide
uaacaaggguguacaaggc

SEQ ID NO: 1919860 - RNA, 19 nt, Artificial Sequence
  Description of Artificial Sequence: Synthetic oligonucleotide
agauugagaggccuuaaau

SEQ ID NO: 1919861 - RNA, 19 nt, Artificial Sequence
  Description of Artificial Sequence: Synthetic oligonucleotide
ugggaguuuucuuuaacaa

SEQ ID NO: 1919862 - RNA, 19 nt, Artificial Sequence
  Description of Artificial Sequence: Synthetic oligonucleotide
ugcuuuguccauuaaggau

SEQ ID NO: 1919863 - RNA, 19 nt, Artificial Sequence
  Description of Artificial Sequence: Synthetic oligonucleotide
aucguggaagcuuggaaug

SEQ ID NO: 1919864 - RNA, 19 nt, Artificial Sequence
  Description of Artificial Sequence: Synthetic oligonucleotide
cgugauauugauaaagagc

SEQ ID NO: 1919865 - RNA, 19 nt, Artificial Sequence
  Description of Artificial Sequence: Synthetic oligonucleotide
uaaaucgcuccagguaucg

SEQ ID NO: 1919866 - RNA, 19 nt, Artificial Sequence
  Description of Artificial Sequence: Synthetic oligonucleotide
uucccucuggaucaacugc

SEQ ID NO: 1919867 - RNA, 19 nt, Artificial Sequence
  Description of Artificial Sequence: Synthetic oligonucleotide
uccaccuucccaagaagug

SEQ ID NO: 1919868 - RNA, 19 nt, Artificial Sequence
  Description of Artificial Sequence: Synthetic oligonucleotide
ucuucucgagaugaaaugu

SEQ ID NO: 1919869 - RNA, 19 nt, Artificial Sequence
  Description of Artificial Sequence: Synthetic oligonucleotide
agguuugcugagcccaagc

SEQ ID NO: 1919870 - RNA, 19 nt, Artificial Sequence
  Description of Artificial Sequence: Synthetic oligonucleotide
gauaaagcaucuuuguaau

SEQ ID NO: 1919871 - RNA, 19 nt, Artificial Sequence
  Description of Artificial Sequence: Synthetic oligonucleotide
uuuccaucacuugaagggc

SEQ ID NO: 1919872 - RNA, 19 nt, Artificial Sequence
  Description of Artificial Sequence: Synthetic oligonucleotide
ugagaggccuuaaaucgcu

SEQ ID NO: 1919873 - RNA, 19 nt, Artificial Sequence
  Description of Artificial Sequence: Synthetic oligonucleotide
uguacgcugcggaaaggag

SEQ ID NO: 1919874 - RNA, 19 nt, Artificial Sequence
  Description of Artificial Sequence: Synthetic oligonucleotide
gagcuaacaggcaacuucc

SEQ ID NO: 1919875 - RNA, 19 nt, Artificial Sequence
  Description of Artificial Sequence: Synthetic oligonucleotide
cuaauccagcuguggaugg

SEQ ID NO: 1919876 - RNA, 19 nt, Artificial Sequence
  Description of Artificial Sequence: Synthetic oligonucleotide
uuagcucucucccucugcu

SEQ ID NO: 1919877 - RNA, 19 nt, Artificial Sequence
  Description of Artificial Sequence: Synthetic oligonucleotide
auaucagaggcaugucuug

SEQ ID NO: 1919878 - RNA, 19 nt, Artificial Sequence
  Description of Artificial Sequence: Synthetic oligonucleotide
uggucagagucaaaagacu

SEQ ID NO: 1919879 - RNA, 19 nt, Artificial Sequence
  Description of Artificial Sequence: Synthetic oligonucleotide
aacucaagcccacuguguu

SEQ ID NO: 1919880 - RNA, 19 nt, Artificial Sequence
  Description of Artificial Sequence: Synthetic oligonucleotide
ggaggcaucuuuuaccugc

SEQ ID NO: 1919881 - RNA, 19 nt, Artificial Sequence
  Description of Artificial Sequence: Synthetic oligonucleotide
ucauaagcggccagguccu

SEQ ID NO: 1919882 - RNA, 19 nt, Artificial Sequence
  Description of Artificial Sequence: Synthetic oligonucleotide
auguaaaguuaucuggaaa

SEQ ID NO: 1919883 - RNA, 19 nt, Artificial Sequence
  Description of Artificial Sequence: Synthetic oligonucleotide
aggaugcaagaucagccag

SEQ ID NO: 1919884 - RNA, 19 nt, Artificial Sequence
  Description of Artificial Sequence: Synthetic oligonucleotide
uguccacaaaccgugauau

SEQ ID NO: 1919885 - RNA, 19 nt, Artificial Sequence
  Description of Artificial Sequence: Synthetic oligonucleotide
ccuuucauaugcuuugucc

SEQ ID NO: 1919886 - RNA, 19 nt, Artificial Sequence
  Description of Artificial Sequence: Synthetic oligonucleotide
uccauuaaggaugcaagau

SEQ ID NO: 1919887 - RNA, 19 nt, Artificial Sequence
  Description of Artificial Sequence: Synthetic oligonucleotide
agcgguucucuacauagcu

SEQ ID NO: 1919888 - RNA, 19 nt, Artificial Sequence
  Description of Artificial Sequence: Synthetic oligonucleotide
acucugcagaaucuauauc

SEQ ID NO: 1919889 - RNA, 19 nt, Artificial Sequence
  Description of Artificial Sequence: Synthetic oligonucleotide
uuugucuugugcaccguau

SEQ ID NO: 1919890 - RNA, 19 nt, Artificial Sequence
  Description of Artificial Sequence: Synthetic oligonucleotide
agaggcaugucuugguaca

SEQ ID NO: 1919891 - RNA, 19 nt, Artificial Sequence
  Description of Artificial Sequence: Synthetic oligonucleotide
agaaauuggguggauggca

SEQ ID NO: 1919892 - RNA, 19 nt, Artificial Sequence
  Description of Artificial Sequence: Synthetic oligonucleotide
cuaccuucaccuuccuggg

SEQ ID NO: 1919893 - RNA, 19 nt, Artificial Sequence
  Description of Artificial Sequence: Synthetic oligonucleotide
uaacaggcaacuuccuuuc

SEQ ID NO: 1919894 - RNA, 19 nt, Artificial Sequence
  Description of Artificial Sequence: Synthetic oligonucleotide
ugggaacucaagcccacug

SEQ ID NO: 1919895 - RNA, 19 nt, Artificial Sequence
  Description of Artificial Sequence: Synthetic oligonucleotide
uuuuaccugccagggaaag

SEQ ID NO: 1919896 - RNA, 19 nt, Artificial Sequence
  Description of Artificial Sequence: Synthetic oligonucleotide
gaugucuagcugcuccacc

SEQ ID NO: 1919897 - RNA, 19 nt, Artificial Sequence
  Description of Artificial Sequence: Synthetic oligonucleotide
uuuaccugccagggaaagg

SEQ ID NO: 1919898 - RNA, 19 nt, Artificial Sequence
  Description of Artificial Sequence: Synthetic oligonucleotide
uguucccucuggaucaacu

SEQ ID NO: 1919899 - RNA, 19 nt, Artificial Sequence
  Description of Artificial Sequence: Synthetic oligonucleotide
cuguggaugguccagucuc

SEQ ID NO: 1919900 - RNA, 19 nt, Artificial Sequence
  Description of Artificial Sequence: Synthetic oligonucleotide
accuuauuaacaagggugu

SEQ ID NO: 1919901 - RNA, 19 nt, Artificial Sequence
  Description of Artificial Sequence: Synthetic oligonucleotide
guggucagagucaaaagac

SEQ ID NO: 1919902 - RNA, 19 nt, Artificial Sequence
  Description of Artificial Sequence: Synthetic oligonucleotide
ucugguuccucgaugucua

SEQ ID NO: 1919903 - RNA, 19 nt, Artificial Sequence
  Description of Artificial Sequence: Synthetic oligonucleotide
cuauaucuucucgagauga

SEQ ID NO: 1919904 - RNA, 19 nt, Artificial Sequence
  Description of Artificial Sequence: Synthetic oligonucleotide
uuuagauugagaggccuua

SEQ ID NO: 1919905 - RNA, 19 nt, Artificial Sequence
  Description of Artificial Sequence: Synthetic oligonucleotide
uuaaaucgcuccagguauc

SEQ ID NO: 1919906 - RNA, 19 nt, Artificial Sequence
  Description of Artificial Sequence: Synthetic oligonucleotide
aagcgguucucuacauagc

SEQ ID NO: 1919907 - RNA, 19 nt, Artificial Sequence
  Description of Artificial Sequence: Synthetic oligonucleotide
uguccguguacgcugcgga

SEQ ID NO: 1919908 - RNA, 19 nt, Artificial Sequence
  Description of Artificial Sequence: Synthetic oligonucleotide
acaccaaaguuccuuuccu

SEQ ID NO: 1919909 - RNA, 19 nt, Artificial Sequence
  Description of Artificial Sequence: Synthetic oligonucleotide
aaaagacuuucugauucaa

SEQ ID NO: 1919910 - RNA, 19 nt, Artificial Sequence
  Description of Artificial Sequence: Synthetic oligonucleotide
auguuguccacaaaccgug

SEQ ID NO: 1919911 - RNA, 19 nt, Artificial Sequence
  Description of Artificial Sequence: Synthetic oligonucleotide
guacgcugcggaaaggagg

SEQ ID NO: 1919912 - RNA, 19 nt, Artificial Sequence
  Description of Artificial Sequence: Synthetic oligonucleotide
uuuaggccuggaagcaaca

SEQ ID NO: 1919913 - RNA, 19 nt, Artificial Sequence
  Description of Artificial Sequence: Synthetic oligonucleotide
agcacauuaagcgguucuc

SEQ ID NO: 1919914 - RNA, 19 nt, Artificial Sequence
  Description of Artificial Sequence: Synthetic oligonucleotide
uagauugagaggccuuaaa

SEQ ID NO: 1919915 - RNA, 19 nt, Artificial Sequence
  Description of Artificial Sequence: Synthetic oligonucleotide
acugugccgaaauuuguaa

SEQ ID NO: 1919916 - RNA, 19 nt, Artificial Sequence
  Description of Artificial Sequence: Synthetic oligonucleotide
aguuccaccuucccaagaa

SEQ ID NO: 1919917 - RNA, 19 nt, Artificial Sequence
  Description of Artificial Sequence: Synthetic oligonucleotide
ugccgaaauuuguaaagau

SEQ ID NO: 1919918 - RNA, 19 nt, Artificial Sequence
  Description of Artificial Sequence: Synthetic oligonucleotide
gauaaagagcuaacaggca

SEQ ID NO: 1919919 - RNA, 19 nt, Artificial Sequence
  Description of Artificial Sequence: Synthetic oligonucleotide
ucauaugcuuuguccauua

SEQ ID NO: 1919920 - RNA, 19 nt, Artificial Sequence
  Description of Artificial Sequence: Synthetic oligonucleotide
gagaaauuggguggauggc

SEQ ID NO: 1919921 - RNA, 19 nt, Artificial Sequence
  Description of Artificial Sequence: Synthetic oligonucleotide
ugauauugauaaagagcua

SEQ ID NO: 1919922 - RNA, 19 nt, Artificial Sequence
  Description of Artificial Sequence: Synthetic oligonucleotide
cuuaaaucgcuccagguau

SEQ ID NO: 1919923 - RNA, 19 nt, Artificial Sequence
  Description of Artificial Sequence: Synthetic oligonucleotide
gaauguucugguuccucga

SEQ ID NO: 1919924 - RNA, 19 nt, Artificial Sequence
  Description of Artificial Sequence: Synthetic oligonucleotide
cauuaagcgguucucuaca

SEQ ID NO: 1919925 - RNA, 19 nt, Artificial Sequence
  Description of Artificial Sequence: Synthetic oligonucleotide
aacuuccuuucauaugcuu

SEQ ID NO: 1919926 - RNA, 19 nt, Artificial Sequence
  Description of Artificial Sequence: Synthetic oligonucleotide
gguggucagagucaaaaga

SEQ ID NO: 1919927 - RNA, 19 nt, Artificial Sequence
  Description of Artificial Sequence: Synthetic oligonucleotide
gagagaaauuggguggaug

SEQ ID NO: 1919928 - RNA, 19 nt, Artificial Sequence
  Description of Artificial Sequence: Synthetic oligonucleotide
cuucugcucauaagcggcc

SEQ ID NO: 1919929 - RNA, 19 nt, Artificial Sequence
  Description of Artificial Sequence: Synthetic oligonucleotide
uauuucaggcacugucuaa

SEQ ID NO: 1919930 - RNA, 19 nt, Artificial Sequence
  Description of Artificial Sequence: Synthetic oligonucleotide
uaacaagcuggguggucag

SEQ ID NO: 1919931 - RNA, 19 nt, Artificial Sequence
  Description of Artificial Sequence: Synthetic oligonucleotide
uugcuuagcucucucccuc

SEQ ID NO: 1919932 - RNA, 19 nt, Artificial Sequence
  Description of Artificial Sequence: Synthetic oligonucleotide
cugggaguuuucuuuaaca

SEQ ID NO: 1919933 - RNA, 19 nt, Artificial Sequence
  Description of Artificial Sequence: Synthetic oligonucleotide
ucuugguacacagcccuca

SEQ ID NO: 1919934 - RNA, 19 nt, Artificial Sequence
  Description of Artificial Sequence: Synthetic oligonucleotide
uggaucaacugcaccugcu

SEQ ID NO: 1919935 - RNA, 19 nt, Artificial Sequence
  Description of Artificial Sequence: Synthetic oligonucleotide
cuggaagcaacagggacac

SEQ ID NO: 1919936 - RNA, 19 nt, Artificial Sequence
  Description of Artificial Sequence: Synthetic oligonucleotide
uaccugccagggaaaggcg

SEQ ID NO: 1919937 - RNA, 19 nt, Artificial Sequence
  Description of Artificial Sequence: Synthetic oligonucleotide
gguauucuugcuuagcucu

SEQ ID NO: 1919938 - RNA, 19 nt, Artificial Sequence
  Description of Artificial Sequence: Synthetic oligonucleotide
cuccagguaucguggaagc

SEQ ID NO: 1919939 - RNA, 19 nt, Artificial Sequence
  Description of Artificial Sequence: Synthetic oligonucleotide
uguggaugguccagucucu

SEQ ID NO: 1919940 - RNA, 19 nt, Artificial Sequence
  Description of Artificial Sequence: Synthetic oligonucleotide
cuccaggugccacucacgc

SEQ ID NO: 1919941 - RNA, 19 nt, Artificial Sequence
  Description of Artificial Sequence: Synthetic oligonucleotide
aaauuccauacugaaccuu

SEQ ID NO: 1919942 - RNA, 19 nt, Artificial Sequence
  Description of Artificial Sequence: Synthetic oligonucleotide
ucagaggcaugucuuggua

SEQ ID NO: 1919943 - RNA, 19 nt, Artificial Sequence
  Description of Artificial Sequence: Synthetic oligonucleotide
uguuguccacaaaccguga

SEQ ID NO: 1919944 - RNA, 19 nt, Artificial Sequence
  Description of Artificial Sequence: Synthetic oligonucleotide
ucgaugucuagcugcucca

SEQ ID NO: 1919945 - RNA, 19 nt, Artificial Sequence
  Description of Artificial Sequence: Synthetic oligonucleotide
caguuuagauugagaggcc

SEQ ID NO: 1919946 - RNA, 19 nt, Artificial Sequence
  Description of Artificial Sequence: Synthetic oligonucleotide
caaaagacuuucugauuca

SEQ ID NO: 1919947 - RNA, 19 nt, Artificial Sequence
  Description of Artificial Sequence: Synthetic oligonucleotide
uuaagcgguucucuacaua

SEQ ID NO: 1919948 - RNA, 19 nt, Artificial Sequence
  Description of Artificial Sequence: Synthetic oligonucleotide
auguucugguuccucgaug

SEQ ID NO: 1919949 - RNA, 19 nt, Artificial Sequence
  Description of Artificial Sequence: Synthetic oligonucleotide
uuaggccuggaagcaacag

SEQ ID NO: 1919950 - RNA, 19 nt, Artificial Sequence
  Description of Artificial Sequence: Synthetic oligonucleotide
gucaagguagccugguguc

SEQ ID NO: 1919951 - RNA, 19 nt, Artificial Sequence
  Description of Artificial Sequence: Synthetic oligonucleotide
ugagcccaagcuaccuuca

SEQ ID NO: 1919952 - RNA, 19 nt, Artificial Sequence
  Description of Artificial Sequence: Synthetic oligonucleotide
ucacuugaagggcucuguc

SEQ ID NO: 1919953 - RNA, 19 nt, Artificial Sequence
  Description of Artificial Sequence: Synthetic oligonucleotide
cuugugcaccguauuucag

SEQ ID NO: 1919954 - RNA, 19 nt, Artificial Sequence
  Description of Artificial Sequence: Synthetic oligonucleotide
cagaggcaugucuugguac

SEQ ID NO: 1919955 - RNA, 19 nt, Artificial Sequence
  Description of Artificial Sequence: Synthetic oligonucleotide
ucccacugguggcuguccg

SEQ ID NO: 1919956 - RNA, 19 nt, Artificial Sequence
  Description of Artificial Sequence: Synthetic oligonucleotide
gaaccuuauuaacaagggu

SEQ ID NO: 1919957 - RNA, 19 nt, Artificial Sequence
  Description of Artificial Sequence: Synthetic oligonucleotide
ucaagguagccuggugucc

SEQ ID NO: 1919958 - RNA, 19 nt, Artificial Sequence
  Description of Artificial Sequence: Synthetic oligonucleotide
cauacaguugggaacucaa

SEQ ID NO: 1919959 - RNA, 19 nt, Artificial Sequence
  Description of Artificial Sequence: Synthetic oligonucleotide
auuaagcgguucucuacau

SEQ ID NO: 1919960 - RNA, 19 nt, Artificial Sequence
  Description of Artificial Sequence: Synthetic oligonucleotide
cugucuaauccagcugugg

SEQ ID NO: 1919961 - RNA, 19 nt, Artificial Sequence
  Description of Artificial Sequence: Synthetic oligonucleotide
guccauuaaggaugcaaga

SEQ ID NO: 1919962 - RNA, 19 nt, Artificial Sequence
  Description of Artificial Sequence: Synthetic oligonucleotide
accgugauauugauaaaga

SEQ ID NO: 1919963 - RNA, 19 nt, Artificial Sequence
  Description of Artificial Sequence: Synthetic oligonucleotide
cugagcccaagcuaccuuc

SEQ ID NO: 1919964 - RNA, 19 nt, Artificial Sequence
  Description of Artificial Sequence: Synthetic oligonucleotide
ccaggcaaugguauaaaac

SEQ ID NO: 1919965 - RNA, 19 nt, Artificial Sequence
  Description of Artificial Sequence: Synthetic oligonucleotide
accagguuugcugagccca

SEQ ID NO: 1919966 - RNA, 19 nt, Artificial Sequence
  Description of Artificial Sequence: Synthetic oligonucleotide
uguccauaucagaggcaug

SEQ ID NO: 1919967 - RNA, 19 nt, Artificial Sequence
  Description of Artificial Sequence: Synthetic oligonucleotide
aaaccgugauauugauaaa

SEQ ID NO: 1919968 - RNA, 19 nt, Artificial Sequence
  Description of Artificial Sequence: Synthetic oligonucleotide
uuucaggcacugucuaauc

SEQ ID NO: 1919969 - RNA, 19 nt, Artificial Sequence
  Description of Artificial Sequence: Synthetic oligonucleotide
cuugguacacagcccucag

SEQ ID NO: 1919970 - RNA, 19 nt, Artificial Sequence
  Description of Artificial Sequence: Synthetic oligonucleotide
ucugcccaacuccugcagu

SEQ ID NO: 1919971 - RNA, 19 nt, Artificial Sequence
  Description of Artificial Sequence: Synthetic oligonucleotide
acaggcaacuuccuuucau

SEQ ID NO: 1919972 - RNA, 19 nt, Artificial Sequence
  Description of Artificial Sequence: Synthetic oligonucleotide
uggcuguccguguacgcug

SEQ ID NO: 1919973 - RNA, 19 nt, Artificial Sequence
  Description of Artificial Sequence: Synthetic oligonucleotide
aggcaacuuccuuucauau

SEQ ID NO: 1919974 - RNA, 19 nt, Artificial Sequence
  Description of Artificial Sequence: Synthetic oligonucleotide
guucucuacauagcuugag

SEQ ID NO: 1919975 - RNA, 19 nt, Artificial Sequence
  Description of Artificial Sequence: Synthetic oligonucleotide
gucagcuggagaugucacc

SEQ ID NO: 1919976 - RNA, 19 nt, Artificial Sequence
  Description of Artificial Sequence: Synthetic oligonucleotide
auaucuucucgagaugaaa

SEQ ID NO: 1919977 - RNA, 19 nt, Artificial Sequence
  Description of Artificial Sequence: Synthetic oligonucleotide
uuagauugagaggccuuaa

SEQ ID NO: 1919978 - RNA, 19 nt, Artificial Sequence
  Description of Artificial Sequence: Synthetic oligonucleotide
ccauuaaggaugcaagauc

SEQ ID NO: 1919979 - RNA, 19 nt, Artificial Sequence
  Description of Artificial Sequence: Synthetic oligonucleotide
uuccauacugaaccuuauu

SEQ ID NO: 1919980 - RNA, 19 nt, Artificial Sequence
  Description of Artificial Sequence: Synthetic oligonucleotide
auaaagcaucuuuguaauu

SEQ ID NO: 1919981 - RNA, 19 nt, Artificial Sequence
  Description of Artificial Sequence: Synthetic oligonucleotide
auaguacucugcagaaucu

SEQ ID NO: 1919982 - RNA, 19 nt, Artificial Sequence
  Description of Artificial Sequence: Synthetic oligonucleotide
uuuaacaagcugggugguc

SEQ ID NO: 1919983 - RNA, 19 nt, Artificial Sequence
  Description of Artificial Sequence: Synthetic oligonucleotide
uccugcaguuuagauugag

SEQ ID NO: 1919984 - RNA, 19 nt, Artificial Sequence
  Description of Artificial Sequence: Synthetic oligonucleotide
aucuuuuaccugccaggga

SEQ ID NO: 1919985 - RNA, 19 nt, Artificial Sequence
  Description of Artificial Sequence: Synthetic oligonucleotide
auaagcggccagguccucg

SEQ ID NO: 1919986 - RNA, 19 nt, Artificial Sequence
  Description of Artificial Sequence: Synthetic oligonucleotide
ccgugauauugauaaagag

SEQ ID NO: 1919987 - RNA, 19 nt, Artificial Sequence
  Description of Artificial Sequence: Synthetic oligonucleotide
guaucguggaagcuuggaa

SEQ ID NO: 1919988 - RNA, 19 nt, Artificial Sequence
  Description of Artificial Sequence: Synthetic oligonucleotide
ggaugcaagaucagccagg

SEQ ID NO: 1919989 - RNA, 19 nt, Artificial Sequence
  Description of Artificial Sequence: Synthetic oligonucleotide
aaggguguacaaggcuuug

SEQ ID NO: 1919990 - RNA, 19 nt, Artificial Sequence
  Description of Artificial Sequence: Synthetic oligonucleotide
auuggguggauggcacuuc

SEQ ID NO: 1919991 - RNA, 19 nt, Artificial Sequence
  Description of Artificial Sequence: Synthetic oligonucleotide
ugggacugugccgaaauuu

SEQ ID NO: 1919992 - RNA, 19 nt, Artificial Sequence
  Description of Artificial Sequence: Synthetic oligonucleotide
ggccuuaaaucgcuccagg

SEQ ID NO: 1919993 - RNA, 19 nt, Artificial Sequence
  Description of Artificial Sequence: Synthetic oligonucleotide
gaucagccagguggcaccg

SEQ ID NO: 1919994 - RNA, 19 nt, Artificial Sequence
  Description of Artificial Sequence: Synthetic oligonucleotide
guauuucaggcacugucua

SEQ ID NO: 1919995 - RNA, 19 nt, Artificial Sequence
  Description of Artificial Sequence: Synthetic oligonucleotide
cuaacaggcaacuuccuuu

SEQ ID NO: 1919996 - RNA, 19 nt, Artificial Sequence
  Description of Artificial Sequence: Synthetic oligonucleotide
ggcaacuuccuuucauaug

SEQ ID NO: 1919997 - RNA, 19 nt, Artificial Sequence
  Description of Artificial Sequence: Synthetic oligonucleotide
gguccucggccucacaugc

SEQ ID NO: 1919998 - RNA, 19 nt, Artificial Sequence
  Description of Artificial Sequence: Synthetic oligonucleotide
ucugccaggcaaugguaua

SEQ ID NO: 1919999 - RNA, 19 nt, Artificial Sequence
  Description of Artificial Sequence: Synthetic oligonucleotide
aguacucugcagaaucuau

SEQ ID NO: 1920000 - RNA, 19 nt, Artificial Sequence
  Description of Artificial Sequence: Synthetic oligonucleotide
cagcccgugcugcaguucc

SEQ ID NO: 1920001 - RNA, 19 nt, Artificial Sequence
  Description of Artificial Sequence: Synthetic oligonucleotide
aggcaaugguauaaaacau

SEQ ID NO: 1920002 - RNA, 19 nt, Artificial Sequence
  Description of Artificial Sequence: Synthetic oligonucleotide
agguccucggccucacaug

SEQ ID NO: 1920003 - RNA, 19 nt, Artificial Sequence
  Description of Artificial Sequence: Synthetic oligonucleotide
ugcuuagcucucucccucu

SEQ ID NO: 1920004 - RNA, 19 nt, Artificial Sequence
  Description of Artificial Sequence: Synthetic oligonucleotide
caccuucccaagaagugca

SEQ ID NO: 1920005 - RNA, 19 nt, Artificial Sequence
  Description of Artificial Sequence: Synthetic oligonucleotide
gucuugugcaccguauuuc

SEQ ID NO: 1920006 - RNA, 19 nt, Artificial Sequence
  Description of Artificial Sequence: Synthetic oligonucleotide
cacugucuaauccagcugu

SEQ ID NO: 1920007 - RNA, 19 nt, Artificial Sequence
  Description of Artificial Sequence: Synthetic oligonucleotide
aggccuuaaaucgcuccag

SEQ ID NO: 1920008 - RNA, 19 nt, Artificial Sequence
  Description of Artificial Sequence: Synthetic oligonucleotide
gugcauagccauacaguug

SEQ ID NO: 1920009 - RNA, 19 nt, Artificial Sequence
  Description of Artificial Sequence: Synthetic oligonucleotide
guuccucgaugucuagcug

SEQ ID NO: 1920010 - RNA, 19 nt, Artificial Sequence
  Description of Artificial Sequence: Synthetic oligonucleotide
gguaccagcaguugggacu

SEQ ID NO: 1920011 - RNA, 19 nt, Artificial Sequence
  Description of Artificial Sequence: Synthetic oligonucleotide
uaguacucugcagaaucua

SEQ ID NO: 1920012 - RNA, 19 nt, Artificial Sequence
  Description of Artificial Sequence: Synthetic oligonucleotide
ucguggaagcuuggaaugu

SEQ ID NO: 1920013 - RNA, 19 nt, Artificial Sequence
  Description of Artificial Sequence: Synthetic oligonucleotide
gaugcaagaucagccaggu

SEQ ID NO: 1920014 - RNA, 19 nt, Artificial Sequence
  Description of Artificial Sequence: Synthetic oligonucleotide
aaaucgcuccagguaucgu

SEQ ID NO: 1920015 - RNA, 19 nt, Artificial Sequence
  Description of Artificial Sequence: Synthetic oligonucleotide
guccauaucagaggcaugu

SEQ ID NO: 1920016 - RNA, 19 nt, Artificial Sequence
  Description of Artificial Sequence: Synthetic oligonucleotide
cgguucucuacauagcuug

SEQ ID NO: 1920017 - RNA, 19 nt, Artificial Sequence
  Description of Artificial Sequence: Synthetic oligonucleotide
ccguauuucaggcacuguc

SEQ ID NO: 1920018 - RNA, 19 nt, Artificial Sequence
  Description of Artificial Sequence: Synthetic oligonucleotide
gugccgaaauuuguaaaga

SEQ ID NO: 1920019 - RNA, 19 nt, Artificial Sequence
  Description of Artificial Sequence: Synthetic oligonucleotide
agcuaccuucaccuuccug

SEQ ID NO: 1920020 - RNA, 19 nt, Artificial Sequence
  Description of Artificial Sequence: Synthetic oligonucleotide
ggguggucagagucaaaag

SEQ ID NO: 1920021 - RNA, 19 nt, Artificial Sequence
  Description of Artificial Sequence: Synthetic oligonucleotide
uccguguacgcugcggaaa

SEQ ID NO: 1920022 - RNA, 19 nt, Artificial Sequence
  Description of Artificial Sequence: Synthetic oligonucleotide
ugcugggaguuuucuuuaa

SEQ ID NO: 1920023 - RNA, 19 nt, Artificial Sequence
  Description of Artificial Sequence: Synthetic oligonucleotide
gcaagaucagccagguggc

SEQ ID NO: 1920024 - RNA, 19 nt, Artificial Sequence
  Description of Artificial Sequence: Synthetic oligonucleotide
aacaagcuggguggucaga

SEQ ID NO: 1920025 - RNA, 19 nt, Artificial Sequence
  Description of Artificial Sequence: Synthetic oligonucleotide
uaauccagcuguggauggu

SEQ ID NO: 1920026 - RNA, 19 nt, Artificial Sequence
  Description of Artificial Sequence: Synthetic oligonucleotide
agauaguacucugcagaau

SEQ ID NO: 1920027 - RNA, 19 nt, Artificial Sequence
  Description of Artificial Sequence: Synthetic oligonucleotide
gauggcacuucaaaggcuu

SEQ ID NO: 1920028 - RNA, 19 nt, Artificial Sequence
  Description of Artificial Sequence: Synthetic oligonucleotide
ccauacugaaccuuauuaa

SEQ ID NO: 1920029 - RNA, 19 nt, Artificial Sequence
  Description of Artificial Sequence: Synthetic oligonucleotide
aagguagccugguguccau

SEQ ID NO: 1920030 - RNA, 19 nt, Artificial Sequence
  Description of Artificial Sequence: Synthetic oligonucleotide
acugucuaauccagcugug

SEQ ID NO: 1920031 - RNA, 19 nt, Artificial Sequence
  Description of Artificial Sequence: Synthetic oligonucleotide
cucacgcaacuucugcuca

SEQ ID NO: 1920032 - RNA, 19 nt, Artificial Sequence
  Description of Artificial Sequence: Synthetic oligonucleotide
aagagcuaacaggcaacuu

SEQ ID NO: 1920033 - RNA, 19 nt, Artificial Sequence
  Description of Artificial Sequence: Synthetic oligonucleotide
ucacgcaacuucugcucau

SEQ ID NO: 1920034 - RNA, 19 nt, Artificial Sequence
  Description of Artificial Sequence: Synthetic oligonucleotide
uccauaucagaggcauguc

SEQ ID NO: 1920035 - RNA, 19 nt, Artificial Sequence
  Description of Artificial Sequence: Synthetic oligonucleotide
cuuuuaccugccagggaaa

SEQ ID NO: 1920036 - RNA, 19 nt, Artificial Sequence
  Description of Artificial Sequence: Synthetic oligonucleotide
cugugccgaaauuuguaaa

SEQ ID NO: 1920037 - RNA, 19 nt, Artificial Sequence
  Description of Artificial Sequence: Synthetic oligonucleotide
caccagguuugcugagccc

SEQ ID NO: 1920038 - RNA, 19 nt, Artificial Sequence
  Description of Artificial Sequence: Synthetic oligonucleotide
caccguauuucaggcacug

SEQ ID NO: 1920039 - RNA, 19 nt, Artificial Sequence
  Description of Artificial Sequence: Synthetic oligonucleotide
gucuaauccagcuguggau

SEQ ID NO: 1920040 - RNA, 19 nt, Artificial Sequence
  Description of Artificial Sequence: Synthetic oligonucleotide
gguuccucgaugucuagcu

SEQ ID NO: 1920041 - RNA, 19 nt, Artificial Sequence
  Description of Artificial Sequence: Synthetic oligonucleotide
guguacgcugcggaaagga

SEQ ID NO: 1920042 - RNA, 19 nt, Artificial Sequence
  Description of Artificial Sequence: Synthetic oligonucleotide
acauagcuugaggucuuca

SEQ ID NO: 1920043 - RNA, 19 nt, Artificial Sequence
  Description of Artificial Sequence: Synthetic oligonucleotide
acgcaacuucugcucauaa

SEQ ID NO: 1920044 - RNA, 19 nt, Artificial Sequence
  Description of Artificial Sequence: Synthetic oligonucleotide
gcacuucaaaggcuucuug

SEQ ID NO: 1920045 - RNA, 19 nt, Artificial Sequence
  Description of Artificial Sequence: Synthetic oligonucleotide
uugggacugugccgaaauu

SEQ ID NO: 1920046 - RNA, 19 nt, Artificial Sequence
  Description of Artificial Sequence: Synthetic oligonucleotide
gagcccaagcuaccuucac

SEQ ID NO: 1920047 - RNA, 19 nt, Artificial Sequence
  Description of Artificial Sequence: Synthetic oligonucleotide
guggaagcuuggaauguuc

SEQ ID NO: 1920048 - RNA, 19 nt, Artificial Sequence
  Description of Artificial Sequence: Synthetic oligonucleotide
cuguccguguacgcugcgg

SEQ ID NO: 1920049 - RNA, 19 nt, Artificial Sequence
  Description of Artificial Sequence: Synthetic oligonucleotide
uugcuucccacugguggcu

SEQ ID NO: 1920050 - RNA, 19 nt, Artificial Sequence
  Description of Artificial Sequence: Synthetic oligonucleotide
acucuguccagcacauuaa

SEQ ID NO: 1920051 - RNA, 19 nt, Artificial Sequence
  Description of Artificial Sequence: Synthetic oligonucleotide
caagguagccuggugucca

SEQ ID NO: 1920052 - RNA, 19 nt, Artificial Sequence
  Description of Artificial Sequence: Synthetic oligonucleotide
ucaggggaggcggccaccu

SEQ ID NO: 1920053 - RNA, 19 nt, Artificial Sequence
  Description of Artificial Sequence: Synthetic oligonucleotide
ggaggcggccaccuuuucc

SEQ ID NO: 1920054 - RNA, 19 nt, Artificial Sequence
  Description of Artificial Sequence: Synthetic oligonucleotide
ggaaaggaggcaucuuuua

SEQ ID NO: 1920055 - RNA, 19 nt, Artificial Sequence
  Description of Artificial Sequence: Synthetic oligonucleotide
gucaaaagacuuucugauu

SEQ ID NO: 1920056 - RNA, 19 nt, Artificial Sequence
  Description of Artificial Sequence: Synthetic oligonucleotide
auuccauacugaaccuuau

SEQ ID NO: 1920057 - RNA, 19 nt, Artificial Sequence
  Description of Artificial Sequence: Synthetic oligonucleotide
gcaguugggacugugccga

SEQ ID NO: 1920058 - RNA, 19 nt, Artificial Sequence
  Description of Artificial Sequence: Synthetic oligonucleotide
ucugucucugaggcuuggu

SEQ ID NO: 1920059 - RNA, 19 nt, Artificial Sequence
  Description of Artificial Sequence: Synthetic oligonucleotide
ugccaggcaaugguauaaa

SEQ ID NO: 1920060 - RNA, 19 nt, Artificial Sequence
  Description of Artificial Sequence: Synthetic oligonucleotide
ggcaaugguauaaaacaua

SEQ ID NO: 1920061 - RNA, 19 nt, Artificial Sequence
  Description of Artificial Sequence: Synthetic oligonucleotide
uugggaacucaagcccacu

SEQ ID NO: 1920062 - RNA, 19 nt, Artificial Sequence
  Description of Artificial Sequence: Synthetic oligonucleotide
ccacaaaccgugauauuga

SEQ ID NO: 1920063 - RNA, 19 nt, Artificial Sequence
  Description of Artificial Sequence: Synthetic oligonucleotide
ucgcuccagguaucgugga

SEQ ID NO: 1920064 - RNA, 19 nt, Artificial Sequence
  Description of Artificial Sequence: Synthetic oligonucleotide
gaacucaagcccacugugu

SEQ ID NO: 1920065 - RNA, 19 nt, Artificial Sequence
  Description of Artificial Sequence: Synthetic oligonucleotide
cugguuccucgaugucuag

SEQ ID NO: 1920066 - RNA, 19 nt, Artificial Sequence
  Description of Artificial Sequence: Synthetic oligonucleotide
guguccauaucagaggcau

SEQ ID NO: 1920067 - RNA, 19 nt, Artificial Sequence
  Description of Artificial Sequence: Synthetic oligonucleotide
guagccugguguccauauc

SEQ ID NO: 1920068 - RNA, 19 nt, Artificial Sequence
  Description of Artificial Sequence: Synthetic oligonucleotide
uacauagcuugaggucuuc

SEQ ID NO: 1920069 - RNA, 19 nt, Artificial Sequence
  Description of Artificial Sequence: Synthetic oligonucleotide
ccuuaaaucgcuccaggua

SEQ ID NO: 1920070 - RNA, 19 nt, Artificial Sequence
  Description of Artificial Sequence: Synthetic oligonucleotide
acaaaccgugauauugaua

SEQ ID NO: 1920071 - RNA, 19 nt, Artificial Sequence
  Description of Artificial Sequence: Synthetic oligonucleotide
agcaacagggacacaccaa

SEQ ID NO: 1920072 - RNA, 19 nt, Artificial Sequence
  Description of Artificial Sequence: Synthetic oligonucleotide
guucugguuccucgauguc

SEQ ID NO: 1920073 - RNA, 19 nt, Artificial Sequence
  Description of Artificial Sequence: Synthetic oligonucleotide
gguggcaccgcuccuucuc

SEQ ID NO: 1920074 - RNA, 19 nt, Artificial Sequence
  Description of Artificial Sequence: Synthetic oligonucleotide
aggcuucuugcaucaugau

SEQ ID NO: 1920075 - RNA, 19 nt, Artificial Sequence
  Description of Artificial Sequence: Synthetic oligonucleotide
agguaucguggaagcuugg

SEQ ID NO: 1920076 - RNA, 19 nt, Artificial Sequence
  Description of Artificial Sequence: Synthetic oligonucleotide
cuucucgagaugaaauguu

SEQ ID NO: 1920077 - RNA, 19 nt, Artificial Sequence
  Description of Artificial Sequence: Synthetic oligonucleotide
gcccaagcuaccuucaccu

SEQ ID NO: 1920078 - RNA, 19 nt, Artificial Sequence
  Description of Artificial Sequence: Synthetic oligonucleotide
aggugccacucacgcaacu

SEQ ID NO: 1920079 - RNA, 19 nt, Artificial Sequence
  Description of Artificial Sequence: Synthetic oligonucleotide
ugcuucccacugguggcug

SEQ ID NO: 1920080 - RNA, 19 nt, Artificial Sequence
  Description of Artificial Sequence: Synthetic oligonucleotide
guuguccacaaaccgugau

SEQ ID NO: 1920081 - RNA, 19 nt, Artificial Sequence
  Description of Artificial Sequence: Synthetic oligonucleotide
cauaugcuuuguccauuaa

SEQ ID NO: 1920082 - RNA, 19 nt, Artificial Sequence
  Description of Artificial Sequence: Synthetic oligonucleotide
gccgaaauuuguaaagaua

SEQ ID NO: 1920083 - RNA, 19 nt, Artificial Sequence
  Description of Artificial Sequence: Synthetic oligonucleotide
accugccagggaaaggcga

SEQ ID NO: 1920084 - RNA, 19 nt, Artificial Sequence
  Description of Artificial Sequence: Synthetic oligonucleotide
ccguguacgcugcggaaag

SEQ ID NO: 1920085 - RNA, 19 nt, Artificial Sequence
  Description of Artificial Sequence: Synthetic oligonucleotide
agcuaacaggcaacuuccu

SEQ ID NO: 1920086 - RNA, 19 nt, Artificial Sequence
  Description of Artificial Sequence: Synthetic oligonucleotide
gguaucguggaagcuugga

SEQ ID NO: 1920087 - RNA, 19 nt, Artificial Sequence
  Description of Artificial Sequence: Synthetic oligonucleotide
guccagucucucagguacc

SEQ ID NO: 1920088 - RNA, 19 nt, Artificial Sequence
  Description of Artificial Sequence: Synthetic oligonucleotide
caggugccacucacgcaac

SEQ ID NO: 1920089 - RNA, 19 nt, Artificial Sequence
  Description of Artificial Sequence: Synthetic oligonucleotide
ccugcaguuuagauugaga

SEQ ID NO: 1920090 - RNA, 19 nt, Artificial Sequence
  Description of Artificial Sequence: Synthetic oligonucleotide
gugcaccguauuucaggca

SEQ ID NO: 1920091 - RNA, 19 nt, Artificial Sequence
  Description of Artificial Sequence: Synthetic oligonucleotide
accguauuucaggcacugu

SEQ ID NO: 1920092 - RNA, 19 nt, Artificial Sequence
  Description of Artificial Sequence: Synthetic oligonucleotide
gcuuagcucucucccucug

SEQ ID NO: 1920093 - RNA, 19 nt, Artificial Sequence
  Description of Artificial Sequence: Synthetic oligonucleotide
guacaaggcuuugucuugu

SEQ ID NO: 1920094 - RNA, 19 nt, Artificial Sequence
  Description of Artificial Sequence: Synthetic oligonucleotide
uggcaccgcuccuucucuc

SEQ ID NO: 1920095 - RNA, 19 nt, Artificial Sequence
  Description of Artificial Sequence: Synthetic oligonucleotide
ugcggaaaggaggcaucuu

SEQ ID NO: 1920096 - RNA, 19 nt, Artificial Sequence
  Description of Artificial Sequence: Synthetic oligonucleotide
cucucagguaccagcaguu

SEQ ID NO: 1920097 - RNA, 19 nt, Artificial Sequence
  Description of Artificial Sequence: Synthetic oligonucleotide
cugauucaacucugcccaa

SEQ ID NO: 1920098 - RNA, 19 nt, Artificial Sequence
  Description of Artificial Sequence: Synthetic oligonucleotide
guggaugguccagucucuc

SEQ ID NO: 1920099 - RNA, 19 nt, Artificial Sequence
  Description of Artificial Sequence: Synthetic oligonucleotide
gcucauaagcggccagguc

SEQ ID NO: 1920100 - RNA, 19 nt, Artificial Sequence
  Description of Artificial Sequence: Synthetic oligonucleotide
gguucucuacauagcuuga

SEQ ID NO: 1920101 - RNA, 19 nt, Artificial Sequence
  Description of Artificial Sequence: Synthetic oligonucleotide
caacuuccuuucauaugcu

SEQ ID NO: 1920102 - RNA, 19 nt, Artificial Sequence
  Description of Artificial Sequence: Synthetic oligonucleotide
cuuuaacaagcuggguggu

SEQ ID NO: 1920103 - RNA, 19 nt, Artificial Sequence
  Description of Artificial Sequence: Synthetic oligonucleotide
gccuuaaaucgcuccaggu

SEQ ID NO: 1920104 - RNA, 19 nt, Artificial Sequence
  Description of Artificial Sequence: Synthetic oligonucleotide
guccguguacgcugcggaa

SEQ ID NO: 1920105 - RNA, 19 nt, Artificial Sequence
  Description of Artificial Sequence: Synthetic oligonucleotide
caaggguguacaaggcuuu

SEQ ID NO: 1920106 - RNA, 19 nt, Artificial Sequence
  Description of Artificial Sequence: Synthetic oligonucleotide
ccauaucagaggcaugucu

SEQ ID NO: 1920107 - RNA, 19 nt, Artificial Sequence
  Description of Artificial Sequence: Synthetic oligonucleotide
caagaucagccagguggca

SEQ ID NO: 1920108 - RNA, 19 nt, Artificial Sequence
  Description of Artificial Sequence: Synthetic oligonucleotide
guggcuguccguguacgcu

SEQ ID NO: 1920109 - RNA, 19 nt, Artificial Sequence
  Description of Artificial Sequence: Synthetic oligonucleotide
gguagccugguguccauau

SEQ ID NO: 1920110 - RNA, 19 nt, Artificial Sequence
  Description of Artificial Sequence: Synthetic oligonucleotide
gcuguccguguacgcugcg

SEQ ID NO: 1920111 - RNA, 19 nt, Artificial Sequence
  Description of Artificial Sequence: Synthetic oligonucleotide
aggcggccaccuuuuccau

SEQ ID NO: 1920112 - RNA, 19 nt, Artificial Sequence
  Description of Artificial Sequence: Synthetic oligonucleotide
gcacauuaagcgguucucu

SEQ ID NO: 1920113 - RNA, 19 nt, Artificial Sequence
  Description of Artificial Sequence: Synthetic oligonucleotide
gcggaaaggaggcaucuuu

SEQ ID NO: 1920114 - RNA, 19 nt, Artificial Sequence
  Description of Artificial Sequence: Synthetic oligonucleotide
ggcuguccguguacgcugc

SEQ ID NO: 1920115 - RNA, 19 nt, Artificial Sequence
  Description of Artificial Sequence: Synthetic oligonucleotide
guggcaccgcuccuucucu

SEQ ID NO: 1920116 - RNA, 19 nt, Artificial Sequence
  Description of Artificial Sequence: Synthetic oligonucleotide
cgaaauuuguaaagauagu

SEQ ID NO: 1920117 - RNA, 19 nt, Artificial Sequence
  Description of Artificial Sequence: Synthetic oligonucleotide
cuccugcaguuuagauuga

SEQ ID NO: 1920118 - RNA, 19 nt, Artificial Sequence
  Description of Artificial Sequence: Synthetic oligonucleotide
gcugcggaaaggaggcauc

SEQ ID NO: 1920119 - RNA, 19 nt, Artificial Sequence
  Description of Artificial Sequence: Synthetic oligonucleotide
cagguccucggccucacau

SEQ ID NO: 1920120 - RNA, 19 nt, Artificial Sequence
  Description of Artificial Sequence: Synthetic oligonucleotide
cucacaugcugggaguuuu

SEQ ID NO: 1920121 - RNA, 19 nt, Artificial Sequence
  Description of Artificial Sequence: Synthetic oligonucleotide
cauaagcggccagguccuc

SEQ ID NO: 1920122 - RNA, 19 nt, Artificial Sequence
  Description of Artificial Sequence: Synthetic oligonucleotide
cugcccaacuccugcaguu

SEQ ID NO: 1920123 - RNA, 19 nt, Artificial Sequence
  Description of Artificial Sequence: Synthetic oligonucleotide
gcuguggaugguccagucu

SEQ ID NO: 1920124 - RNA, 19 nt, Artificial Sequence
  Description of Artificial Sequence: Synthetic oligonucleotide
cacgcaacuucugcucaua

SEQ ID NO: 1920125 - RNA, 19 nt, Artificial Sequence
  Description of Artificial Sequence: Synthetic oligonucleotide
ccauacaguugggaacuca

SEQ ID NO: 1920126 - RNA, 19 nt, Artificial Sequence
  Description of Artificial Sequence: Synthetic oligonucleotide
ggauggcacuucaaaggcu

SEQ ID NO: 1920127 - RNA, 19 nt, Artificial Sequence
  Description of Artificial Sequence: Synthetic oligonucleotide
cugcggaaaggaggcaucu

SEQ ID NO: 1920128 - RNA, 19 nt, Artificial Sequence
  Description of Artificial Sequence: Synthetic oligonucleotide
agguagccugguguccaua

SEQ ID NO: 1920129 - RNA, 19 nt, Artificial Sequence
  Description of Artificial Sequence: Synthetic oligonucleotide
ccuuauuaacaagggugua

SEQ ID NO: 1920130 - RNA, 19 nt, Artificial Sequence
  Description of Artificial Sequence: Synthetic oligonucleotide
acgcugcggaaaggaggca

SEQ ID NO: 1920131 - RNA, 19 nt, Artificial Sequence
  Description of Artificial Sequence: Synthetic oligonucleotide
cguguacgcugcggaaagg

SEQ ID NO: 1920132 - RNA, 19 nt, Artificial Sequence
  Description of Artificial Sequence: Synthetic oligonucleotide
ccgugcugcaguuccaccu

SEQ ID NO: 1920133 - RNA, 19 nt, Artificial Sequence
  Description of Artificial Sequence: Synthetic oligonucleotide
ccagcacauuaagcgguuc

SEQ ID NO: 1920134 - RNA, 19 nt, Artificial Sequence
  Description of Artificial Sequence: Synthetic oligonucleotide
cuggguggucagagucaaa

SEQ ID NO: 1920135 - RNA, 19 nt, Artificial Sequence
  Description of Artificial Sequence: Synthetic oligonucleotide
agcccgugcugcaguucca

SEQ ID NO: 1920136 - RNA, 19 nt, Artificial Sequence
  Description of Artificial Sequence: Synthetic oligonucleotide
ccagguaucguggaagcuu

SEQ ID NO: 1920137 - RNA, 19 nt, Artificial Sequence
  Description of Artificial Sequence: Synthetic oligonucleotide
gcccgugcugcaguuccac

SEQ ID NO: 1920138 - RNA, 19 nt, Artificial Sequence
  Description of Artificial Sequence: Synthetic oligonucleotide
ggccaccuuuuccaucacu

SEQ ID NO: 1920139 - RNA, 19 nt, Artificial Sequence
  Description of Artificial Sequence: Synthetic oligonucleotide
gccauacaguugggaacuc

SEQ ID NO: 1920140 - RNA, 19 nt, Artificial Sequence
  Description of Artificial Sequence: Synthetic oligonucleotide
ggagagaaauuggguggau

SEQ ID NO: 1920141 - RNA, 19 nt, Artificial Sequence
  Description of Artificial Sequence: Synthetic oligonucleotide
cucagcccgugcugcaguu

SEQ ID NO: 1920142 - RNA, 19 nt, Artificial Sequence
  Description of Artificial Sequence: Synthetic oligonucleotide
gggaggcggccaccuuuuc

SEQ ID NO: 1920143 - RNA, 19 nt, Artificial Sequence
  Description of Artificial Sequence: Synthetic oligonucleotide
guccucggccucacaugcu

SEQ ID NO: 1920144 - RNA, 19 nt, Artificial Sequence
  Description of Artificial Sequence: Synthetic oligonucleotide
gcaccguauuucaggcacu

SEQ ID NO: 1920145 - RNA, 19 nt, Artificial Sequence
  Description of Artificial Sequence: Synthetic oligonucleotide
gcgguucucuacauagcuu

SEQ ID NO: 1920146 - RNA, 19 nt, Artificial Sequence
  Description of Artificial Sequence: Synthetic oligonucleotide
gggacacaccaaaguuccu

SEQ ID NO: 1920147 - RNA, 19 nt, Artificial Sequence
  Description of Artificial Sequence: Synthetic oligonucleotide
ccaucacuugaagggcucu

SEQ ID NO: 1920148 - RNA, 19 nt, Artificial Sequence
  Description of Artificial Sequence: Synthetic oligonucleotide
cccacugguggcuguccgu

SEQ ID NO: 1920149 - RNA, 19 nt, Artificial Sequence
  Description of Artificial Sequence: Synthetic oligonucleotide
cgcuccagguaucguggaa

SEQ ID NO: 1920150 - RNA, 19 nt, Artificial Sequence
  Description of Artificial Sequence: Synthetic oligonucleotide
cccaagcuaccuucaccuu

SEQ ID NO: 1920151 - RNA, 19 nt, Artificial Sequence
  Description of Artificial Sequence: Synthetic oligonucleotide
cguggaagcuuggaauguu

SEQ ID NO: 1920152 - RNA, 19 nt, Artificial Sequence
  Description of Artificial Sequence: Synthetic oligonucleotide
caccuuccuggggcucugu

SEQ ID NO: 1920153 - RNA, 19 nt, Artificial Sequence
  Description of Artificial Sequence: Synthetic oligonucleotide
cgcugcggaaaggaggcau

SEQ ID NO: 1920154 - RNA, 19 nt, Artificial Sequence
  Description of Artificial Sequence: Synthetic oligonucleotide
aauuggauaaccuuggccg

SEQ ID NO: 1920155 - RNA, 19 nt, Artificial Sequence
  Description of Artificial Sequence: Synthetic oligonucleotide
ucauauuuaugucagcugg

SEQ ID NO: 1920156 - RNA, 19 nt, Artificial Sequence
  Description of Artificial Sequence: Synthetic oligonucleotide
uuugaagacacaaagggcu

SEQ ID NO: 1920157 - RNA, 19 nt, Artificial Sequence
  Description of Artificial Sequence: Synthetic oligonucleotide
ucucugaccacguugaugg

SEQ ID NO: 1920158 - RNA, 19 nt, Artificial Sequence
  Description of Artificial Sequence: Synthetic oligonucleotide
gaugagguuacacagagug

SEQ ID NO: 1920159 - RNA, 19 nt, Artificial Sequence
  Description of Artificial Sequence: Synthetic oligonucleotide
uuaacuuccggauaucagg

SEQ ID NO: 1920160 - RNA, 19 nt, Artificial Sequence
  Description of Artificial Sequence: Synthetic oligonucleotide
uccaucaacauccuguagg

SEQ ID NO: 1920161 - RNA, 19 nt, Artificial Sequence
  Description of Artificial Sequence: Synthetic oligonucleotide
accaacacaguugagagcc

SEQ ID NO: 1920162 - RNA, 19 nt, Artificial Sequence
  Description of Artificial Sequence: Synthetic oligonucleotide
uucaauuggauaaccuugg

SEQ ID NO: 1920163 - RNA, 19 nt, Artificial Sequence
  Description of Artificial Sequence: Synthetic oligonucleotide
acaguugagagccagucgg

SEQ ID NO: 1920164 - RNA, 19 nt, Artificial Sequence
  Description of Artificial Sequence: Synthetic oligonucleotide
uggaucauauuuaugucag

SEQ ID NO: 1920165 - RNA, 19 nt, Artificial Sequence
  Description of Artificial Sequence: Synthetic oligonucleotide
uugaagaugguuuucgucu

SEQ ID NO: 1920166 - RNA, 19 nt, Artificial Sequence
  Description of Artificial Sequence: Synthetic oligonucleotide
ucacauggacgucagaucc

SEQ ID NO: 1920167 - RNA, 19 nt, Artificial Sequence
  Description of Artificial Sequence: Synthetic oligonucleotide
gcuuugaagacacaaaggg

SEQ ID NO: 1920168 - RNA, 19 nt, Artificial Sequence
  Description of Artificial Sequence: Synthetic oligonucleotide
guugccauagaucagcgcc

SEQ ID NO: 1920169 - RNA, 19 nt, Artificial Sequence
  Description of Artificial Sequence: Synthetic oligonucleotide
uguucgaaguccaucaaca

SEQ ID NO: 1920170 - RNA, 19 nt, Artificial Sequence
  Description of Artificial Sequence: Synthetic oligonucleotide
ugagguuacacagagugag

SEQ ID NO: 1920171 - RNA, 19 nt, Artificial Sequence
  Description of Artificial Sequence: Synthetic oligonucleotide
cuucaauuggauaaccuug

SEQ ID NO: 1920172 - RNA, 19 nt, Artificial Sequence
  Description of Artificial Sequence: Synthetic oligonucleotide
aucaacauccuguaggcug

SEQ ID NO: 1920173 - RNA, 19 nt, Artificial Sequence
  Description of Artificial Sequence: Synthetic oligonucleotide
aacucaucuagacuguggu

SEQ ID NO: 1920174 - RNA, 19 nt, Artificial Sequence
  Description of Artificial Sequence: Synthetic oligonucleotide
ugaacaccgccucaguccg

SEQ ID NO: 1920175 - RNA, 19 nt, Artificial Sequence
  Description of Artificial Sequence: Synthetic oligonucleotide
ugggauaaucacaugguga

SEQ ID NO: 1920176 - RNA, 19 nt, Artificial Sequence
  Description of Artificial Sequence: Synthetic oligonucleotide
cagagugagaaucaucucc

SEQ ID NO: 1920177 - RNA, 19 nt, Artificial Sequence
  Description of Artificial Sequence: Synthetic oligonucleotide
uuguccauuaacuuccgga

SEQ ID NO: 1920178 - RNA, 19 nt, Artificial Sequence
  Description of Artificial Sequence: Synthetic oligonucleotide
uuaggcgaagggcugaggc

SEQ ID NO: 1920179 - RNA, 19 nt, Artificial Sequence
  Description of Artificial Sequence: Synthetic oligonucleotide
ucugucucugaccacguug

SEQ ID NO: 1920180 - RNA, 19 nt, Artificial Sequence
  Description of Artificial Sequence: Synthetic oligonucleotide
uccauuaacuuccggauau

SEQ ID NO: 1920181 - RNA, 19 nt, Artificial Sequence
  Description of Artificial Sequence: Synthetic oligonucleotide
gauaaccuuggccggaucc

SEQ ID NO: 1920182 - RNA, 19 nt, Artificial Sequence
  Description of Artificial Sequence: Synthetic oligonucleotide
auuggauaaccuuggccgg

SEQ ID NO: 1920183 - RNA, 19 nt, Artificial Sequence
  Description of Artificial Sequence: Synthetic oligonucleotide
auggacgucagauccuccc

SEQ ID NO: 1920184 - RNA, 19 nt, Artificial Sequence
  Description of Artificial Sequence: Synthetic oligonucleotide
ucugggauaaucacauggu

SEQ ID NO: 1920185 - RNA, 19 nt, Artificial Sequence
  Description of Artificial Sequence: Synthetic oligonucleotide
aacucuucccaccaacaca

SEQ ID NO: 1920186 - RNA, 19 nt, Artificial Sequence
  Description of Artificial Sequence: Synthetic oligonucleotide
ugcagggguugacagauag

SEQ ID NO: 1920187 - RNA, 19 nt, Artificial Sequence
  Description of Artificial Sequence: Synthetic oligonucleotide
auugacaggggcugccagc

SEQ ID NO: 1920188 - RNA, 19 nt, Artificial Sequence
  Description of Artificial Sequence: Synthetic oligonucleotide
auuacaggcugcuuggcca

SEQ ID NO: 1920189 - RNA, 19 nt, Artificial Sequence
  Description of Artificial Sequence: Synthetic oligonucleotide
uccuccauaggucaccaug

SEQ ID NO: 1920190 - RNA, 19 nt, Artificial Sequence
  Description of Artificial Sequence: Synthetic oligonucleotide
uauuacaggcugcuuggcc

SEQ ID NO: 1920191 - RNA, 19 nt, Artificial Sequence
  Description of Artificial Sequence: Synthetic oligonucleotide
cuucaauccagacacgcug

SEQ ID NO: 1920192 - RNA, 19 nt, Artificial Sequence
  Description of Artificial Sequence: Synthetic oligonucleotide
caauuggauaaccuuggcc

SEQ ID NO: 1920193 - RNA, 19 nt, Artificial Sequence
  Description of Artificial Sequence: Synthetic oligonucleotide
ugugaggacauagucagcu

SEQ ID NO: 1920194 - RNA, 19 nt, Artificial Sequence
  Description of Artificial Sequence: Synthetic oligonucleotide
uuagggacuuggaucagug

SEQ ID NO: 1920195 - RNA, 19 nt, Artificial Sequence
  Description of Artificial Sequence: Synthetic oligonucleotide
agucucccggcuucaaucc

SEQ ID NO: 1920196 - RNA, 19 nt, Artificial Sequence
  Description of Artificial Sequence: Synthetic oligonucleotide
ucuucaauuggauaaccuu

SEQ ID NO: 1920197 - RNA, 19 nt, Artificial Sequence
  Description of Artificial Sequence: Synthetic oligonucleotide
uaacuuccggauaucaggu

SEQ ID NO: 1920198 - RNA, 19 nt, Artificial Sequence
  Description of Artificial Sequence: Synthetic oligonucleotide
gacgcauucuggaugacag

SEQ ID NO: 1920199 - RNA, 19 nt, Artificial Sequence
  Description of Artificial Sequence: Synthetic oligonucleotide
uuacacagagugagaauca

SEQ ID NO: 1920200 - RNA, 19 nt, Artificial Sequence
  Description of Artificial Sequence: Synthetic oligonucleotide
guuacacagagugagaauc

SEQ ID NO: 1920201 - RNA, 19 nt, Artificial Sequence
  Description of Artificial Sequence: Synthetic oligonucleotide
agggacuuggaucagugcu

SEQ ID NO: 1920202 - RNA, 19 nt, Artificial Sequence
  Description of Artificial Sequence: Synthetic oligonucleotide
uucuucaauuggauaaccu

SEQ ID NO: 1920203 - RNA, 19 nt, Artificial Sequence
  Description of Artificial Sequence: Synthetic oligonucleotide
ugggacaaccagaagcccc

SEQ ID NO: 1920204 - RNA, 19 nt, Artificial Sequence
  Description of Artificial Sequence: Synthetic oligonucleotide
ugguuuucgucucaggcau

SEQ ID NO: 1920205 - RNA, 19 nt, Artificial Sequence
  Description of Artificial Sequence: Synthetic oligonucleotide
auggucuuuaggcgaaggg

SEQ ID NO: 1920206 - RNA, 19 nt, Artificial Sequence
  Description of Artificial Sequence: Synthetic oligonucleotide
auaaccuuggccggauccc

SEQ ID NO: 1920207 - RNA, 19 nt, Artificial Sequence
  Description of Artificial Sequence: Synthetic oligonucleotide
auagaucagcgcccgcacc

SEQ ID NO: 1920208 - RNA, 19 nt, Artificial Sequence
  Description of Artificial Sequence: Synthetic oligonucleotide
aacaccgccucaguccgcc

SEQ ID NO: 1920209 - RNA, 19 nt, Artificial Sequence
  Description of Artificial Sequence: Synthetic oligonucleotide
aguaggaggaggcgguccg

SEQ ID NO: 1920210 - RNA, 19 nt, Artificial Sequence
  Description of Artificial Sequence: Synthetic oligonucleotide
ucaauuggauaaccuuggc

SEQ ID NO: 1920211 - RNA, 19 nt, Artificial Sequence
  Description of Artificial Sequence: Synthetic oligonucleotide
agacugugguuguucuucc

SEQ ID NO: 1920212 - RNA, 19 nt, Artificial Sequence
  Description of Artificial Sequence: Synthetic oligonucleotide
acuuccggauaucaggucu

SEQ ID NO: 1920213 - RNA, 19 nt, Artificial Sequence
  Description of Artificial Sequence: Synthetic oligonucleotide
aacuuccggauaucagguc

SEQ ID NO: 1920214 - RNA, 19 nt, Artificial Sequence
  Description of Artificial Sequence: Synthetic oligonucleotide
uccgccagguuccuaaccc

SEQ ID NO: 1920215 - RNA, 19 nt, Artificial Sequence
  Description of Artificial Sequence: Synthetic oligonucleotide
uuccuaacccagcacuugc

SEQ ID NO: 1920216 - RNA, 19 nt, Artificial Sequence
  Description of Artificial Sequence: Synthetic oligonucleotide
uuggccauuccuccauagg

SEQ ID NO: 1920217 - RNA, 19 nt, Artificial Sequence
  Description of Artificial Sequence: Synthetic oligonucleotide
uggucuuuaggcgaagggc

SEQ ID NO: 1920218 - RNA, 19 nt, Artificial Sequence
  Description of Artificial Sequence: Synthetic oligonucleotide
uugacagauaggguggcag

SEQ ID NO: 1920219 - RNA, 19 nt, Artificial Sequence
  Description of Artificial Sequence: Synthetic oligonucleotide
cuuggaucauauuuauguc

SEQ ID NO: 1920220 - RNA, 19 nt, Artificial Sequence
  Description of Artificial Sequence: Synthetic oligonucleotide
gcuauuacaggcugcuugg

SEQ ID NO: 1920221 - RNA, 19 nt, Artificial Sequence
  Description of Artificial Sequence: Synthetic oligonucleotide
ugccagcauccucacaugg

SEQ ID NO: 1920222 - RNA, 19 nt, Artificial Sequence
  Description of Artificial Sequence: Synthetic oligonucleotide
gaugacagaguccccuggc

SEQ ID NO: 1920223 - RNA, 19 nt, Artificial Sequence
  Description of Artificial Sequence: Synthetic oligonucleotide
ucuagacugugguuguucu

SEQ ID NO: 1920224 - RNA, 19 nt, Artificial Sequence
  Description of Artificial Sequence: Synthetic oligonucleotide
gagaaucugcuuugaagac

SEQ ID NO: 1920225 - RNA, 19 nt, Artificial Sequence
  Description of Artificial Sequence: Synthetic oligonucleotide
acaaagggcuucauggagg

SEQ ID NO: 1920226 - RNA, 19 nt, Artificial Sequence
  Description of Artificial Sequence: Synthetic oligonucleotide
gggguugacagauagggug

SEQ ID NO: 1920227 - RNA, 19 nt, Artificial Sequence
  Description of Artificial Sequence: Synthetic oligonucleotide
cuaacccagcacuugcuag

SEQ ID NO: 1920228 - RNA, 19 nt, Artificial Sequence
  Description of Artificial Sequence: Synthetic oligonucleotide
guuggacgcauucuggaug

SEQ ID NO: 1920229 - RNA, 19 nt, Artificial Sequence
  Description of Artificial Sequence: Synthetic oligonucleotide
caaagggcuucauggaggc

SEQ ID NO: 1920230 - RNA, 19 nt, Artificial Sequence
  Description of Artificial Sequence: Synthetic oligonucleotide
aagcggaguaggaggaggc

SEQ ID NO: 1920231 - RNA, 19 nt, Artificial Sequence
  Description of Artificial Sequence: Synthetic oligonucleotide
uagaucagcgcccgcaccu

SEQ ID NO: 1920232 - RNA, 19 nt, Artificial Sequence
  Description of Artificial Sequence: Synthetic oligonucleotide
gagacucguuugcagaggc

SEQ ID NO: 1920233 - RNA, 19 nt, Artificial Sequence
  Description of Artificial Sequence: Synthetic oligonucleotide
gauaucaggucugucucug

SEQ ID NO: 1920234 - RNA, 19 nt, Artificial Sequence
  Description of Artificial Sequence: Synthetic oligonucleotide
guaacuccuccucugugag

SEQ ID NO: 1920235 - RNA, 19 nt, Artificial Sequence
  Description of Artificial Sequence: Synthetic oligonucleotide
uucccuuggaucauauuua

SEQ ID NO: 1920236 - RNA, 19 nt, Artificial Sequence
  Description of Artificial Sequence: Synthetic oligonucleotide
aggagacucguuugcagag

SEQ ID NO: 1920237 - RNA, 19 nt, Artificial Sequence
  Description of Artificial Sequence: Synthetic oligonucleotide
aagccccgaaguuugacau

SEQ ID NO: 1920238 - RNA, 19 nt, Artificial Sequence
  Description of Artificial Sequence: Synthetic oligonucleotide
ugguugccauagaucagcg

SEQ ID NO: 1920239 - RNA, 19 nt, Artificial Sequence
  Description of Artificial Sequence: Synthetic oligonucleotide
auuaacuuccggauaucag

SEQ ID NO: 1920240 - RNA, 19 nt, Artificial Sequence
  Description of Artificial Sequence: Synthetic oligonucleotide
agguuccuaacccagcacu

SEQ ID NO: 1920241 - RNA, 19 nt, Artificial Sequence
  Description of Artificial Sequence: Synthetic oligonucleotide
uuucgucucaggcauccgu

SEQ ID NO: 1920242 - RNA, 19 nt, Artificial Sequence
  Description of Artificial Sequence: Synthetic oligonucleotide
ugacagauaggguggcagc

SEQ ID NO: 1920243 - RNA, 19 nt, Artificial Sequence
  Description of Artificial Sequence: Synthetic oligonucleotide
uccacuguuggacgcauuc

SEQ ID NO: 1920244 - RNA, 19 nt, Artificial Sequence
  Description of Artificial Sequence: Synthetic oligonucleotide
uuuaugucagcuggauuga

SEQ ID NO: 1920245 - RNA, 19 nt, Artificial Sequence
  Description of Artificial Sequence: Synthetic oligonucleotide
auggugagaaucugcuuug

SEQ ID NO: 1920246 - RNA, 19 nt, Artificial Sequence
  Description of Artificial Sequence: Synthetic oligonucleotide
aaccucagaacaggugggg

SEQ ID NO: 1920247 - RNA, 19 nt, Artificial Sequence
  Description of Artificial Sequence: Synthetic oligonucleotide
augacugcuugccccacuc

SEQ ID NO: 1920248 - RNA, 19 nt, Artificial Sequence
  Description of Artificial Sequence: Synthetic oligonucleotide
uugaccagcaugccgcuuc

SEQ ID NO: 1920249 - RNA, 19 nt, Artificial Sequence
  Description of Artificial Sequence: Synthetic oligonucleotide
uggaacucuucccaccaac

SEQ ID NO: 1920250 - RNA, 19 nt, Artificial Sequence
  Description of Artificial Sequence: Synthetic oligonucleotide
acugcuaccaccugcccaa

SEQ ID NO: 1920251 - RNA, 19 nt, Artificial Sequence
  Description of Artificial Sequence: Synthetic oligonucleotide
ugaagaugguuuucgucuc

SEQ ID NO: 1920252 - RNA, 19 nt, Artificial Sequence
  Description of Artificial Sequence: Synthetic oligonucleotide
gaaccucagaacagguggg

SEQ ID NO: 1920253 - RNA, 19 nt, Artificial Sequence
  Description of Artificial Sequence: Synthetic oligonucleotide
ggcuauuacaggcugcuug

SEQ ID NO: 1920254 - RNA, 19 nt, Artificial Sequence
  Description of Artificial Sequence: Synthetic oligonucleotide
uauuuaugucagcuggauu

SEQ ID NO: 1920255 - RNA, 19 nt, Artificial Sequence
  Description of Artificial Sequence: Synthetic oligonucleotide
ugggaaggaggccauaguu

SEQ ID NO: 1920256 - RNA, 19 nt, Artificial Sequence
  Description of Artificial Sequence: Synthetic oligonucleotide
guccuuagggacuuggauc

SEQ ID NO: 1920257 - RNA, 19 nt, Artificial Sequence
  Description of Artificial Sequence: Synthetic oligonucleotide
uuccacugggacaaccaga

SEQ ID NO: 1920258 - RNA, 19 nt, Artificial Sequence
  Description of Artificial Sequence: Synthetic oligonucleotide
ugugcagggguugacagau

SEQ ID NO: 1920259 - RNA, 19 nt, Artificial Sequence
  Description of Artificial Sequence: Synthetic oligonucleotide
gauugacaggggcugccag

SEQ ID NO: 1920260 - RNA, 19 nt, Artificial Sequence
  Description of Artificial Sequence: Synthetic oligonucleotide
ucucgaggagacucguuug

SEQ ID NO: 1920261 - RNA, 19 nt, Artificial Sequence
  Description of Artificial Sequence: Synthetic oligonucleotide
cugggauaaucacauggug

SEQ ID NO: 1920262 - RNA, 19 nt, Artificial Sequence
  Description of Artificial Sequence: Synthetic oligonucleotide
agagugagaaucaucuccu

SEQ ID NO: 1920263 - RNA, 19 nt, Artificial Sequence
  Description of Artificial Sequence: Synthetic oligonucleotide
ccggcuucaauccagacac

SEQ ID NO: 1920264 - RNA, 19 nt, Artificial Sequence
  Description of Artificial Sequence: Synthetic oligonucleotide
agugaguuccagguucuuc

SEQ ID NO: 1920265 - RNA, 19 nt, Artificial Sequence
  Description of Artificial Sequence: Synthetic oligonucleotide
aucuagacugugguuguuc

SEQ ID NO: 1920266 - RNA, 19 nt, Artificial Sequence
  Description of Artificial Sequence: Synthetic oligonucleotide
agaaucugcuuugaagaca

SEQ ID NO: 1920267 - RNA, 19 nt, Artificial Sequence
  Description of Artificial Sequence: Synthetic oligonucleotide
acuguuggacgcauucugg

SEQ ID NO: 1920268 - RNA, 19 nt, Artificial Sequence
  Description of Artificial Sequence: Synthetic oligonucleotide
guugagagccagucggggc

SEQ ID NO: 1920269 - RNA, 19 nt, Artificial Sequence
  Description of Artificial Sequence: Synthetic oligonucleotide
uuggacggcucagaggaag

SEQ ID NO: 1920270 - RNA, 19 nt, Artificial Sequence
  Description of Artificial Sequence: Synthetic oligonucleotide
agcggaaccucagaacagg

SEQ ID NO: 1920271 - RNA, 19 nt, Artificial Sequence
  Description of Artificial Sequence: Synthetic oligonucleotide
gugguugccauagaucagc

SEQ ID NO: 1920272 - RNA, 19 nt, Artificial Sequence
  Description of Artificial Sequence: Synthetic oligonucleotide
gagaaucaucuccuugaac

SEQ ID NO: 1920273 - RNA, 19 nt, Artificial Sequence
  Description of Artificial Sequence: Synthetic oligonucleotide
aggaucacccagucucccg

SEQ ID NO: 1920274 - RNA, 19 nt, Artificial Sequence
  Description of Artificial Sequence: Synthetic oligonucleotide
cacuguuggacgcauucug

SEQ ID NO: 1920275 - RNA, 19 nt, Artificial Sequence
  Description of Artificial Sequence: Synthetic oligonucleotide
guuuucgucucaggcaucc

SEQ ID NO: 1920276 - RNA, 19 nt, Artificial Sequence
  Description of Artificial Sequence: Synthetic oligonucleotide
gaucuggaugacugcuugc

SEQ ID NO: 1920277 - RNA, 19 nt, Artificial Sequence
  Description of Artificial Sequence: Synthetic oligonucleotide
auauuuaugucagcuggau

SEQ ID NO: 1920278 - RNA, 19 nt, Artificial Sequence
  Description of Artificial Sequence: Synthetic oligonucleotide
cucgaggagacucguuugc

SEQ ID NO: 1920279 - RNA, 19 nt, Artificial Sequence
  Description of Artificial Sequence: Synthetic oligonucleotide
acagauaggguggcagcac

SEQ ID NO: 1920280 - RNA, 19 nt, Artificial Sequence
  Description of Artificial Sequence: Synthetic oligonucleotide
cucacauggacgucagauc

SEQ ID NO: 1920281 - RNA, 19 nt, Artificial Sequence
  Description of Artificial Sequence: Synthetic oligonucleotide
accuuggacggcucagagg

SEQ ID NO: 1920282 - RNA, 19 nt, Artificial Sequence
  Description of Artificial Sequence: Synthetic oligonucleotide
agaggcuauuacaggcugc

SEQ ID NO: 1920283 - RNA, 19 nt, Artificial Sequence
  Description of Artificial Sequence: Synthetic oligonucleotide
uggaugacugcuugcccca

SEQ ID NO: 1920284 - RNA, 19 nt, Artificial Sequence
  Description of Artificial Sequence: Synthetic oligonucleotide
cuguucgaaguccaucaac

SEQ ID NO: 1920285 - RNA, 19 nt, Artificial Sequence
  Description of Artificial Sequence: Synthetic oligonucleotide
gaagccccgaaguuugaca

SEQ ID NO: 1920286 - RNA, 19 nt, Artificial Sequence
  Description of Artificial Sequence: Synthetic oligonucleotide
uggacgucagauccuccca

SEQ ID NO: 1920287 - RNA, 19 nt, Artificial Sequence
  Description of Artificial Sequence: Synthetic oligonucleotide
cuguggaacucuucccacc

SEQ ID NO: 1920288 - RNA, 19 nt, Artificial Sequence
  Description of Artificial Sequence: Synthetic oligonucleotide
cuuggaucagugcuuucuc

SEQ ID NO: 1920289 - RNA, 19 nt, Artificial Sequence
  Description of Artificial Sequence: Synthetic oligonucleotide
uguuggacgcauucuggau

SEQ ID NO: 1920290 - RNA, 19 nt, Artificial Sequence
  Description of Artificial Sequence: Synthetic oligonucleotide
ccuccauaggucaccaugg

SEQ ID NO: 1920291 - RNA, 19 nt, Artificial Sequence
  Description of Artificial Sequence: Synthetic oligonucleotide
cauagaucagcgcccgcac

SEQ ID NO: 1920292 - RNA, 19 nt, Artificial Sequence
  Description of Artificial Sequence: Synthetic oligonucleotide
cagcauccucacauggacg

SEQ ID NO: 1920293 - RNA, 19 nt, Artificial Sequence
  Description of Artificial Sequence: Synthetic oligonucleotide
aggcgaucuggaugacugc

SEQ ID NO: 1920294 - RNA, 19 nt, Artificial Sequence
  Description of Artificial Sequence: Synthetic oligonucleotide
aguccaucaacauccugua

SEQ ID NO: 1920295 - RNA, 19 nt, Artificial Sequence
  Description of Artificial Sequence: Synthetic oligonucleotide
acgucagauccucccacag

SEQ ID NO: 1920296 - RNA, 19 nt, Artificial Sequence
  Description of Artificial Sequence: Synthetic oligonucleotide
uucgucucaggcauccgua

SEQ ID NO: 1920297 - RNA, 19 nt, Artificial Sequence
  Description of Artificial Sequence: Synthetic oligonucleotide
ggaucacccagucucccgg

SEQ ID NO: 1920298 - RNA, 19 nt, Artificial Sequence
  Description of Artificial Sequence: Synthetic oligonucleotide
cuuccggauaucaggucug

SEQ ID NO: 1920299 - RNA, 19 nt, Artificial Sequence
  Description of Artificial Sequence: Synthetic oligonucleotide
auccguaacuccuccucug

SEQ ID NO: 1920300 - RNA, 19 nt, Artificial Sequence
  Description of Artificial Sequence: Synthetic oligonucleotide
cacgucucgaggagacucg

SEQ ID NO: 1920301 - RNA, 19 nt, Artificial Sequence
  Description of Artificial Sequence: Synthetic oligonucleotide
uggacggcucagaggaagc

SEQ ID NO: 1920302 - RNA, 19 nt, Artificial Sequence
  Description of Artificial Sequence: Synthetic oligonucleotide
acucguuugcagaggcgcc

SEQ ID NO: 1920303 - RNA, 19 nt, Artificial Sequence
  Description of Artificial Sequence: Synthetic oligonucleotide
uccuaacccagcacuugcu

SEQ ID NO: 1920304 - RNA, 19 nt, Artificial Sequence
  Description of Artificial Sequence: Synthetic oligonucleotide
guucccuuggaucauauuu

SEQ ID NO: 1920305 - RNA, 19 nt, Artificial Sequence
  Description of Artificial Sequence: Synthetic oligonucleotide
gaagacacaaagggcuuca

SEQ ID NO: 1920306 - RNA, 19 nt, Artificial Sequence
  Description of Artificial Sequence: Synthetic oligonucleotide
cauagucagcuccuagguc

SEQ ID NO: 1920307 - RNA, 19 nt, Artificial Sequence
  Description of Artificial Sequence: Synthetic oligonucleotide
gcugaggcgaucuggauga

SEQ ID NO: 1920308 - RNA, 19 nt, Artificial Sequence
  Description of Artificial Sequence: Synthetic oligonucleotide
uccauaggucaccaugguu

SEQ ID NO: 1920309 - RNA, 19 nt, Artificial Sequence
  Description of Artificial Sequence: Synthetic oligonucleotide
agaagccccgaaguuugac

SEQ ID NO: 1920310 - RNA, 19 nt, Artificial Sequence
  Description of Artificial Sequence: Synthetic oligonucleotide
ucuuuaggcgaagggcuga

SEQ ID NO: 1920311 - RNA, 19 nt, Artificial Sequence
  Description of Artificial Sequence: Synthetic oligonucleotide
uagggacuuggaucagugc

SEQ ID NO: 1920312 - RNA, 19 nt, Artificial Sequence
  Description of Artificial Sequence: Synthetic oligonucleotide
ccuuggaucauauuuaugu

SEQ ID NO: 1920313 - RNA, 19 nt, Artificial Sequence
  Description of Artificial Sequence: Synthetic oligonucleotide
cauuccuccauaggucacc

SEQ ID NO: 1920314 - RNA, 19 nt, Artificial Sequence
  Description of Artificial Sequence: Synthetic oligonucleotide
uuuaggcgaagggcugagg

SEQ ID NO: 1920315 - RNA, 19 nt, Artificial Sequence
  Description of Artificial Sequence: Synthetic oligonucleotide
agguuacacagagugagaa

SEQ ID NO: 1920316 - RNA, 19 nt, Artificial Sequence
  Description of Artificial Sequence: Synthetic oligonucleotide
caccaugguuccuccaggc

SEQ ID NO: 1920317 - RNA, 19 nt, Artificial Sequence
  Description of Artificial Sequence: Synthetic oligonucleotide
cagaggcuauuacaggcug

SEQ ID NO: 1920318 - RNA, 19 nt, Artificial Sequence
  Description of Artificial Sequence: Synthetic oligonucleotide
acacagagugagaaucauc

SEQ ID NO: 1920319 - RNA, 19 nt, Artificial Sequence
  Description of Artificial Sequence: Synthetic oligonucleotide
gagggacguccuuagggac

SEQ ID NO: 1920320 - RNA, 19 nt, Artificial Sequence
  Description of Artificial Sequence: Synthetic oligonucleotide
ucguuugcagaggcgcccg

SEQ ID NO: 1920321 - RNA, 19 nt, Artificial Sequence
  Description of Artificial Sequence: Synthetic oligonucleotide
ggguugacagauagggugg

SEQ ID NO: 1920322 - RNA, 19 nt, Artificial Sequence
  Description of Artificial Sequence: Synthetic oligonucleotide
caccaacacaguugagagc

SEQ ID NO: 1920323 - RNA, 19 nt, Artificial Sequence
  Description of Artificial Sequence: Synthetic oligonucleotide
gcagcggaaccucagaaca

SEQ ID NO: 1920324 - RNA, 19 nt, Artificial Sequence
  Description of Artificial Sequence: Synthetic oligonucleotide
uaaccuuggccggaucccc

SEQ ID NO: 1920325 - RNA, 19 nt, Artificial Sequence
  Description of Artificial Sequence: Synthetic oligonucleotide
ggcagcacucuggagaggg

SEQ ID NO: 1920326 - RNA, 19 nt, Artificial Sequence
  Description of Artificial Sequence: Synthetic oligonucleotide
cuuggccggauccccgugg

SEQ ID NO: 1920327 - RNA, 19 nt, Artificial Sequence
  Description of Artificial Sequence: Synthetic oligonucleotide
cauuaacuuccggauauca

SEQ ID NO: 1920328 - RNA, 19 nt, Artificial Sequence
  Description of Artificial Sequence: Synthetic oligonucleotide
uuuucgucucaggcauccg

SEQ ID NO: 1920329 - RNA, 19 nt, Artificial Sequence
  Description of Artificial Sequence: Synthetic oligonucleotide
ccuuggacggcucagagga

SEQ ID NO: 1920330 - RNA, 19 nt, Artificial Sequence
  Description of Artificial Sequence: Synthetic oligonucleotide
uuggauaaccuuggccgga

SEQ ID NO: 1920331 - RNA, 19 nt, Artificial Sequence
  Description of Artificial Sequence: Synthetic oligonucleotide
aggcgcuaggugccguagc

SEQ ID NO: 1920332 - RNA, 19 nt, Artificial Sequence
  Description of Artificial Sequence: Synthetic oligonucleotide
caacacaguugagagccag

SEQ ID NO: 1920333 - RNA, 19 nt, Artificial Sequence
  Description of Artificial Sequence: Synthetic oligonucleotide
guaguccugcagcggaacc

SEQ ID NO: 1920334 - RNA, 19 nt, Artificial Sequence
  Description of Artificial Sequence: Synthetic oligonucleotide
uggauugacaggggcugcc

SEQ ID NO: 1920335 - RNA, 19 nt, Artificial Sequence
  Description of Artificial Sequence: Synthetic oligonucleotide
cucaggcauccguaacucc

SEQ ID NO: 1920336 - RNA, 19 nt, Artificial Sequence
  Description of Artificial Sequence: Synthetic oligonucleotide
cguugauggucuuuaggcg

SEQ ID NO: 1920337 - RNA, 19 nt, Artificial Sequence
  Description of Artificial Sequence: Synthetic oligonucleotide
ccaugguuccuccaggcgc

SEQ ID NO: 1920338 - RNA, 19 nt, Artificial Sequence
  Description of Artificial Sequence: Synthetic oligonucleotide
uacacagagugagaaucau

SEQ ID NO: 1920339 - RNA, 19 nt, Artificial Sequence
  Description of Artificial Sequence: Synthetic oligonucleotide
auccccgugguugccauag

SEQ ID NO: 1920340 - RNA, 19 nt, Artificial Sequence
  Description of Artificial Sequence: Synthetic oligonucleotide
gggacaaccagaagccccg

SEQ ID NO: 1920341 - RNA, 19 nt, Artificial Sequence
  Description of Artificial Sequence: Synthetic oligonucleotide
aaccuuggccggauccccg

SEQ ID NO: 1920342 - RNA, 19 nt, Artificial Sequence
  Description of Artificial Sequence: Synthetic oligonucleotide
agauaggguggcagcacuc

SEQ ID NO: 1920343 - RNA, 19 nt, Artificial Sequence
  Description of Artificial Sequence: Synthetic oligonucleotide
ggacauagucagcuccuag

SEQ ID NO: 1920344 - RNA, 19 nt, Artificial Sequence
  Description of Artificial Sequence: Synthetic oligonucleotide
gaguaggaggaggcggucc

SEQ ID NO: 1920345 - RNA, 19 nt, Artificial Sequence
  Description of Artificial Sequence: Synthetic oligonucleotide
gacgucagauccucccaca

SEQ ID NO: 1920346 - RNA, 19 nt, Artificial Sequence
  Description of Artificial Sequence: Synthetic oligonucleotide
cuauuacaggcugcuuggc

SEQ ID NO: 1920347 - RNA, 19 nt, Artificial Sequence
  Description of Artificial Sequence: Synthetic oligonucleotide
uuaugucagcuggauugac

SEQ ID NO: 1920348 - RNA, 19 nt, Artificial Sequence
  Description of Artificial Sequence: Synthetic oligonucleotide
cuguuggacgcauucugga

SEQ ID NO: 1920349 - RNA, 19 nt, Artificial Sequence
  Description of Artificial Sequence: Synthetic oligonucleotide
ccagaagccccgaaguuug

SEQ ID NO: 1920350 - RNA, 19 nt, Artificial Sequence
  Description of Artificial Sequence: Synthetic oligonucleotide
cacauggugagaaucugcu

SEQ ID NO: 1920351 - RNA, 19 nt, Artificial Sequence
  Description of Artificial Sequence: Synthetic oligonucleotide
ucgaggagacucguuugca

SEQ ID NO: 1920352 - RNA, 19 nt, Artificial Sequence
  Description of Artificial Sequence: Synthetic oligonucleotide
cucguuugcagaggcgccc

SEQ ID NO: 1920353 - RNA, 19 nt, Artificial Sequence
  Description of Artificial Sequence: Synthetic oligonucleotide
guuugcagaggcgcccggg

SEQ ID NO: 1920354 - RNA, 19 nt, Artificial Sequence
  Description of Artificial Sequence: Synthetic oligonucleotide
gucucugaccacguugaug

SEQ ID NO: 1920355 - RNA, 19 nt, Artificial Sequence
  Description of Artificial Sequence: Synthetic oligonucleotide
accgccucaguccgccagg

SEQ ID NO: 1920356 - RNA, 19 nt, Artificial Sequence
  Description of Artificial Sequence: Synthetic oligonucleotide
ggcuucaauccagacacgc

SEQ ID NO: 1920357 - RNA, 19 nt, Artificial Sequence
  Description of Artificial Sequence: Synthetic oligonucleotide
caccuuggacggcucagag

SEQ ID NO: 1920358 - RNA, 19 nt, Artificial Sequence
  Description of Artificial Sequence: Synthetic oligonucleotide
ucgucucaggcauccguaa

SEQ ID NO: 1920359 - RNA, 19 nt, Artificial Sequence
  Description of Artificial Sequence: Synthetic oligonucleotide
ugcuugccccacuccacug

SEQ ID NO: 1920360 - RNA, 19 nt, Artificial Sequence
  Description of Artificial Sequence: Synthetic oligonucleotide
gcacuugcuaggaucaccc

SEQ ID NO: 1920361 - RNA, 19 nt, Artificial Sequence
  Description of Artificial Sequence: Synthetic oligonucleotide
cuuuaggcgaagggcugag

SEQ ID NO: 1920362 - RNA, 19 nt, Artificial Sequence
  Description of Artificial Sequence: Synthetic oligonucleotide
ccgugguugccauagauca

SEQ ID NO: 1920363 - RNA, 19 nt, Artificial Sequence
  Description of Artificial Sequence: Synthetic oligonucleotide
gucuuuaggcgaagggcug

SEQ ID NO: 1920364 - RNA, 19 nt, Artificial Sequence
  Description of Artificial Sequence: Synthetic oligonucleotide
cugaccacguugauggucu

SEQ ID NO: 1920365 - RNA, 19 nt, Artificial Sequence
  Description of Artificial Sequence: Synthetic oligonucleotide
uccucccacagcagugagu

SEQ ID NO: 1920366 - RNA, 19 nt, Artificial Sequence
  Description of Artificial Sequence: Synthetic oligonucleotide
ugauggucuuuaggcgaag

SEQ ID NO: 1920367 - RNA, 19 nt, Artificial Sequence
  Description of Artificial Sequence: Synthetic oligonucleotide
agcuggauugacaggggcu

SEQ ID NO: 1920368 - RNA, 19 nt, Artificial Sequence
  Description of Artificial Sequence: Synthetic oligonucleotide
uuggccggauccccguggu

SEQ ID NO: 1920369 - RNA, 19 nt, Artificial Sequence
  Description of Artificial Sequence: Synthetic oligonucleotide
augagguuacacagaguga

SEQ ID NO: 1920370 - RNA, 19 nt, Artificial Sequence
  Description of Artificial Sequence: Synthetic oligonucleotide
ugguaguccugcagcggaa

SEQ ID NO: 1920371 - RNA, 19 nt, Artificial Sequence
  Description of Artificial Sequence: Synthetic oligonucleotide
agacucguuugcagaggcg

SEQ ID NO: 1920372 - RNA, 19 nt, Artificial Sequence
  Description of Artificial Sequence: Synthetic oligonucleotide
cagguuccuaacccagcac

SEQ ID NO: 1920373 - RNA, 19 nt, Artificial Sequence
  Description of Artificial Sequence: Synthetic oligonucleotide
caacagugggcagcuuggg

SEQ ID NO: 1920374 - RNA, 19 nt, Artificial Sequence
  Description of Artificial Sequence: Synthetic oligonucleotide
cagcacucuggagagggac

SEQ ID NO: 1920375 - RNA, 19 nt, Artificial Sequence
  Description of Artificial Sequence: Synthetic oligonucleotide
uugccccacuccacuguug

SEQ ID NO: 1920376 - RNA, 19 nt, Artificial Sequence
  Description of Artificial Sequence: Synthetic oligonucleotide
ugaggcgaucuggaugacu

SEQ ID NO: 1920377 - RNA, 19 nt, Artificial Sequence
  Description of Artificial Sequence: Synthetic oligonucleotide
gucucaggcauccguaacu

SEQ ID NO: 1920378 - RNA, 19 nt, Artificial Sequence
  Description of Artificial Sequence: Synthetic oligonucleotide
ggagacucguuugcagagg

SEQ ID NO: 1920379 - RNA, 19 nt, Artificial Sequence
  Description of Artificial Sequence: Synthetic oligonucleotide
gagguuacacagagugaga

SEQ ID NO: 1920380 - RNA, 19 nt, Artificial Sequence
  Description of Artificial Sequence: Synthetic oligonucleotide
gccucaguccgccagguuc

SEQ ID NO: 1920381 - RNA, 19 nt, Artificial Sequence
  Description of Artificial Sequence: Synthetic oligonucleotide
gaggcuauuacaggcugcu

SEQ ID NO: 1920382 - RNA, 19 nt, Artificial Sequence
  Description of Artificial Sequence: Synthetic oligonucleotide
ucuggagagggacguccuu

SEQ ID NO: 1920383 - RNA, 19 nt, Artificial Sequence
  Description of Artificial Sequence: Synthetic oligonucleotide
cugggacaaccagaagccc

SEQ ID NO: 1920384 - RNA, 19 nt, Artificial Sequence
  Description of Artificial Sequence: Synthetic oligonucleotide
ggaggcgccacgucucgag

SEQ ID NO: 1920385 - RNA, 19 nt, Artificial Sequence
  Description of Artificial Sequence: Synthetic oligonucleotide
guaggcugugcagggguug

SEQ ID NO: 1920386 - RNA, 19 nt, Artificial Sequence
  Description of Artificial Sequence: Synthetic oligonucleotide
guccauuaacuuccggaua

SEQ ID NO: 1920387 - RNA, 19 nt, Artificial Sequence
  Description of Artificial Sequence: Synthetic oligonucleotide
gagccagucggggcagggg

SEQ ID NO: 1920388 - RNA, 19 nt, Artificial Sequence
  Description of Artificial Sequence: Synthetic oligonucleotide
acggcucagaggaagcgga

SEQ ID NO: 1920389 - RNA, 19 nt, Artificial Sequence
  Description of Artificial Sequence: Synthetic oligonucleotide
uggauaaccuuggccggau

SEQ ID NO: 1920390 - RNA, 19 nt, Artificial Sequence
  Description of Artificial Sequence: Synthetic oligonucleotide
gguugccauagaucagcgc

SEQ ID NO: 1920391 - RNA, 19 nt, Artificial Sequence
  Description of Artificial Sequence: Synthetic oligonucleotide
gauaggguggcagcacucu

SEQ ID NO: 1920392 - RNA, 19 nt, Artificial Sequence
  Description of Artificial Sequence: Synthetic oligonucleotide
aggcgccacgucucgagga

SEQ ID NO: 1920393 - RNA, 19 nt, Artificial Sequence
  Description of Artificial Sequence: Synthetic oligonucleotide
cugccagcauccucacaug

SEQ ID NO: 1920394 - RNA, 19 nt, Artificial Sequence
  Description of Artificial Sequence: Synthetic oligonucleotide
cuaggugccguagcagcuc

SEQ ID NO: 1920395 - RNA, 19 nt, Artificial Sequence
  Description of Artificial Sequence: Synthetic oligonucleotide
uuccggauaucaggucugu

SEQ ID NO: 1920396 - RNA, 19 nt, Artificial Sequence
  Description of Artificial Sequence: Synthetic oligonucleotide
ucccaccaacacaguugag

SEQ ID NO: 1920397 - RNA, 19 nt, Artificial Sequence
  Description of Artificial Sequence: Synthetic oligonucleotide
ggacgucagauccucccac

SEQ ID NO: 1920398 - RNA, 19 nt, Artificial Sequence
  Description of Artificial Sequence: Synthetic oligonucleotide
aggcugcuuggccauuccu

SEQ ID NO: 1920399 - RNA, 19 nt, Artificial Sequence
  Description of Artificial Sequence: Synthetic oligonucleotide
ggucuuuaggcgaagggcu

SEQ ID NO: 1920400 - RNA, 19 nt, Artificial Sequence
  Description of Artificial Sequence: Synthetic oligonucleotide
uccucacauggacgucaga

SEQ ID NO: 1920401 - RNA, 19 nt, Artificial Sequence
  Description of Artificial Sequence: Synthetic oligonucleotide
agggacguccuuagggacu

SEQ ID NO: 1920402 - RNA, 19 nt, Artificial Sequence
  Description of Artificial Sequence: Synthetic oligonucleotide
ugaguuggccuugguggau

SEQ ID NO: 1920403 - RNA, 19 nt, Artificial Sequence
  Description of Artificial Sequence: Synthetic oligonucleotide
aguucccuuggaucauauu

SEQ ID NO: 1920404 - RNA, 19 nt, Artificial Sequence
  Description of Artificial Sequence: Synthetic oligonucleotide
caugguuccuccaggcgcu

SEQ ID NO: 1920405 - RNA, 19 nt, Artificial Sequence
  Description of Artificial Sequence: Synthetic oligonucleotide
gacaaccagaagccccgaa

SEQ ID NO: 1920406 - RNA, 19 nt, Artificial Sequence
  Description of Artificial Sequence: Synthetic oligonucleotide
ggaacucuucccaccaaca

SEQ ID NO: 1920407 - RNA, 19 nt, Artificial Sequence
  Description of Artificial Sequence: Synthetic oligonucleotide
caguccgccagguuccuaa

SEQ ID NO: 1920408 - RNA, 19 nt, Artificial Sequence
  Description of Artificial Sequence: Synthetic oligonucleotide
gucucgaggagacucguuu

SEQ ID NO: 1920409 - RNA, 19 nt, Artificial Sequence
  Description of Artificial Sequence: Synthetic oligonucleotide
caccgccucaguccgccag

SEQ ID NO: 1920410 - RNA, 19 nt, Artificial Sequence
  Description of Artificial Sequence: Synthetic oligonucleotide
cagcuguucgaaguccauc

SEQ ID NO: 1920411 - RNA, 19 nt, Artificial Sequence
  Description of Artificial Sequence: Synthetic oligonucleotide
ggugagaaucugcuuugaa

SEQ ID NO: 1920412 - RNA, 19 nt, Artificial Sequence
  Description of Artificial Sequence: Synthetic oligonucleotide
ucccggcuucaauccagac

SEQ ID NO: 1920413 - RNA, 19 nt, Artificial Sequence
  Description of Artificial Sequence: Synthetic oligonucleotide
ggcgccacgucucgaggag

SEQ ID NO: 1920414 - RNA, 19 nt, Artificial Sequence
  Description of Artificial Sequence: Synthetic oligonucleotide
ggccggauccccgugguug

SEQ ID NO: 1920415 - RNA, 19 nt, Artificial Sequence
  Description of Artificial Sequence: Synthetic oligonucleotide
guugacagauaggguggca

SEQ ID NO: 1920416 - RNA, 19 nt, Artificial Sequence
  Description of Artificial Sequence: Synthetic oligonucleotide
auaguucccuuggaucaua

SEQ ID NO: 1920417 - RNA, 19 nt, Artificial Sequence
  Description of Artificial Sequence: Synthetic oligonucleotide
gcgcccgcaccuuggacgg

SEQ ID NO: 1920418 - RNA, 19 nt, Artificial Sequence
  Description of Artificial Sequence: Synthetic oligonucleotide
ggcgcuaggugccguagca

SEQ ID NO: 1920419 - RNA, 19 nt, Artificial Sequence
  Description of Artificial Sequence: Synthetic oligonucleotide
cgcuaggugccguagcagc

SEQ ID NO: 1920420 - RNA, 19 nt, Artificial Sequence
  Description of Artificial Sequence: Synthetic oligonucleotide
cugugcagggguugacaga

SEQ ID NO: 1920421 - RNA, 19 nt, Artificial Sequence
  Description of Artificial Sequence: Synthetic oligonucleotide
gaugacugcuugccccacu

SEQ ID NO: 1920422 - RNA, 19 nt, Artificial Sequence
  Description of Artificial Sequence: Synthetic oligonucleotide
ggccauuccuccauagguc

SEQ ID NO: 1920423 - RNA, 19 nt, Artificial Sequence
  Description of Artificial Sequence: Synthetic oligonucleotide
cccgugguugccauagauc

SEQ ID NO: 1920424 - RNA, 19 nt, Artificial Sequence
  Description of Artificial Sequence: Synthetic oligonucleotide
aggcgguccggccgcggag

SEQ ID NO: 1920425 - RNA, 19 nt, Artificial Sequence
  Description of Artificial Sequence: Synthetic oligonucleotide
auaggucaccaugguuccu

SEQ ID NO: 1920426 - RNA, 19 nt, Artificial Sequence
  Description of Artificial Sequence: Synthetic oligonucleotide
gcagggguugacagauagg

SEQ ID NO: 1920427 - RNA, 19 nt, Artificial Sequence
  Description of Artificial Sequence: Synthetic oligonucleotide
caggucugucucugaccac

SEQ ID NO: 1920428 - RNA, 19 nt, Artificial Sequence
  Description of Artificial Sequence: Synthetic oligonucleotide
cccaccaacacaguugaga

SEQ ID NO: 1920429 - RNA, 19 nt, Artificial Sequence
  Description of Artificial Sequence: Synthetic oligonucleotide
cauccguaacuccuccucu

SEQ ID NO: 1920430 - RNA, 19 nt, Artificial Sequence
  Description of Artificial Sequence: Synthetic oligonucleotide
ggaucagugcuuucucacu

SEQ ID NO: 1920431 - RNA, 19 nt, Artificial Sequence
  Description of Artificial Sequence: Synthetic oligonucleotide
gcuccuagguccuucaguu

SEQ ID NO: 1920432 - RNA, 19 nt, Artificial Sequence
  Description of Artificial Sequence: Synthetic oligonucleotide
gguaguccugcagcggaac

SEQ ID NO: 1920433 - RNA, 19 nt, Artificial Sequence
  Description of Artificial Sequence: Synthetic oligonucleotide
gucucccggcuucaaucca

SEQ ID NO: 1920434 - RNA, 19 nt, Artificial Sequence
  Description of Artificial Sequence: Synthetic oligonucleotide
ggaagcggaguaggaggag

SEQ ID NO: 1920435 - RNA, 19 nt, Artificial Sequence
  Description of Artificial Sequence: Synthetic oligonucleotide
cccuuggaucauauuuaug

SEQ ID NO: 1920436 - RNA, 19 nt, Artificial Sequence
  Description of Artificial Sequence: Synthetic oligonucleotide
ugacaggggcugccagcau

SEQ ID NO: 1920437 - RNA, 19 nt, Artificial Sequence
  Description of Artificial Sequence: Synthetic oligonucleotide
agacacgcugcugcccacu

SEQ ID NO: 1920438 - RNA, 19 nt, Artificial Sequence
  Description of Artificial Sequence: Synthetic oligonucleotide
acgucucgaggagacucgu

SEQ ID NO: 1920439 - RNA, 19 nt, Artificial Sequence
  Description of Artificial Sequence: Synthetic oligonucleotide
gcagcuugggaaggaggcc

SEQ ID NO: 1920440 - RNA, 19 nt, Artificial Sequence
  Description of Artificial Sequence: Synthetic oligonucleotide
cguaacuccuccucuguga

SEQ ID NO: 1920441 - RNA, 19 nt, Artificial Sequence
  Description of Artificial Sequence: Synthetic oligonucleotide
uccccgugguugccauaga

SEQ ID NO: 1920442 - RNA, 19 nt, Artificial Sequence
  Description of Artificial Sequence: Synthetic oligonucleotide
acguccuuagggacuugga

SEQ ID NO: 1920443 - RNA, 19 nt, Artificial Sequence
  Description of Artificial Sequence: Synthetic oligonucleotide
ccggauaucaggucugucu

SEQ ID NO: 1920444 - RNA, 19 nt, Artificial Sequence
  Description of Artificial Sequence: Synthetic oligonucleotide
gaggcgguccggccgcgga

SEQ ID NO: 1920445 - RNA, 19 nt, Artificial Sequence
  Description of Artificial Sequence: Synthetic oligonucleotide
gguuacacagagugagaau

SEQ ID NO: 1920446 - RNA, 19 nt, Artificial Sequence
  Description of Artificial Sequence: Synthetic oligonucleotide
ccacgucucgaggagacuc

SEQ ID NO: 1920447 - RNA, 19 nt, Artificial Sequence
  Description of Artificial Sequence: Synthetic oligonucleotide
ccauuccuccauaggucac

SEQ ID NO: 1920448 - RNA, 19 nt, Artificial Sequence
  Description of Artificial Sequence: Synthetic oligonucleotide
cucgcgccccugucaggag

SEQ ID NO: 1920449 - RNA, 19 nt, Artificial Sequence
  Description of Artificial Sequence: Synthetic oligonucleotide
gcagaggcgcccgggcucg

SEQ ID NO: 1920450 - RNA, 19 nt, Artificial Sequence
  Description of Artificial Sequence: Synthetic oligonucleotide
cgucagauccucccacagc

SEQ ID NO: 1920451 - RNA, 19 nt, Artificial Sequence
  Description of Artificial Sequence: Synthetic oligonucleotide
ccauagaucagcgcccgca

SEQ ID NO: 1920452 - RNA, 19 nt, Artificial Sequence
  Description of Artificial Sequence: Synthetic oligonucleotide
gagugagaaucaucuccuu

SEQ ID NO: 1920453 - RNA, 19 nt, Artificial Sequence
  Description of Artificial Sequence: Synthetic oligonucleotide
cuccaggcgcuaggugccg

SEQ ID NO: 1920454 - RNA, 19 nt, Artificial Sequence
  Description of Artificial Sequence: Synthetic oligonucleotide
cgugguugccauagaucag

SEQ ID NO: 1920455 - RNA, 19 nt, Artificial Sequence
  Description of Artificial Sequence: Synthetic oligonucleotide
caacauccuguaggcugug

SEQ ID NO: 1920456 - RNA, 19 nt, Artificial Sequence
  Description of Artificial Sequence: Synthetic oligonucleotide
cuuagggacuuggaucagu

SEQ ID NO: 1920457 - RNA, 19 nt, Artificial Sequence
  Description of Artificial Sequence: Synthetic oligonucleotide
cggaaccucagaacaggug

SEQ ID NO: 1920458 - RNA, 19 nt, Artificial Sequence
  Description of Artificial Sequence: Synthetic oligonucleotide
cccggcuucaauccagaca

SEQ ID NO: 1920459 - RNA, 19 nt, Artificial Sequence
  Description of Artificial Sequence: Synthetic oligonucleotide
ccagacacgcugcugccca

SEQ ID NO: 1920460 - RNA, 19 nt, Artificial Sequence
  Description of Artificial Sequence: Synthetic oligonucleotide
gcuguucgaaguccaucaa

SEQ ID NO: 1920461 - RNA, 19 nt, Artificial Sequence
  Description of Artificial Sequence: Synthetic oligonucleotide
gcggaggcgccacgucucg

SEQ ID NO: 1920462 - RNA, 19 nt, Artificial Sequence
  Description of Artificial Sequence: Synthetic oligonucleotide
ugaccacguugauggucuu

SEQ ID NO: 1920463 - RNA, 19 nt, Artificial Sequence
  Description of Artificial Sequence: Synthetic oligonucleotide
gccagguuccuaacccagc

SEQ ID NO: 1920464 - RNA, 19 nt, Artificial Sequence
  Description of Artificial Sequence: Synthetic oligonucleotide
ggauugacaggggcugcca

SEQ ID NO: 1920465 - RNA, 19 nt, Artificial Sequence
  Description of Artificial Sequence: Synthetic oligonucleotide
uccaggcgcuaggugccgu

SEQ ID NO: 1920466 - RNA, 19 nt, Artificial Sequence
  Description of Artificial Sequence: Synthetic oligonucleotide
uccccuggcugcagcuguu

SEQ ID NO: 1920467 - RNA, 19 nt, Artificial Sequence
  Description of Artificial Sequence: Synthetic oligonucleotide
ggauaaccuuggccggauc

SEQ ID NO: 1920468 - RNA, 19 nt, Artificial Sequence
  Description of Artificial Sequence: Synthetic oligonucleotide
cuccauaggucaccauggu

SEQ ID NO: 1920469 - RNA, 19 nt, Artificial Sequence
  Description of Artificial Sequence: Synthetic oligonucleotide
agaucagcgcccgcaccuu

SEQ ID NO: 1920470 - RNA, 19 nt, Artificial Sequence
  Description of Artificial Sequence: Synthetic oligonucleotide
cuuggacggcucagaggaa

SEQ ID NO: 1920471 - RNA, 19 nt, Artificial Sequence
  Description of Artificial Sequence: Synthetic oligonucleotide
cgccagguuccuaacccag

SEQ ID NO: 1920472 - RNA, 19 nt, Artificial Sequence
  Description of Artificial Sequence: Synthetic oligonucleotide
ccaacgccuucauucccuc

SEQ ID NO: 1920473 - RNA, 19 nt, Artificial Sequence
  Description of Artificial Sequence: Synthetic oligonucleotide
ggcgguccggccgcggagg

SEQ ID NO: 1920474 - RNA, 19 nt, Artificial Sequence
  Description of Artificial Sequence: Synthetic oligonucleotide
cagaguccccuggcugcag

SEQ ID NO: 1920475 - RNA, 19 nt, Artificial Sequence
  Description of Artificial Sequence: Synthetic oligonucleotide
gccagcauccucacaugga

SEQ ID NO: 1920476 - RNA, 19 nt, Artificial Sequence
  Description of Artificial Sequence: Synthetic oligonucleotide
gccauagaucagcgcccgc

SEQ ID NO: 1920477 - RNA, 19 nt, Artificial Sequence
  Description of Artificial Sequence: Synthetic oligonucleotide
acaccgccucaguccgcca

SEQ ID NO: 1920478 - RNA, 19 nt, Artificial Sequence
  Description of Artificial Sequence: Synthetic oligonucleotide
cauaguucccuuggaucau

SEQ ID NO: 1920479 - RNA, 19 nt, Artificial Sequence
  Description of Artificial Sequence: Synthetic oligonucleotide
gcgcuaggugccguagcag

SEQ ID NO: 1920480 - RNA, 19 nt, Artificial Sequence
  Description of Artificial Sequence: Synthetic oligonucleotide
cgucucaggcauccguaac

SEQ ID NO: 1920481 - RNA, 19 nt, Artificial Sequence
  Description of Artificial Sequence: Synthetic oligonucleotide
uggccggauccccgugguu

SEQ ID NO: 1920482 - RNA, 19 nt, Artificial Sequence
  Description of Artificial Sequence: Synthetic oligonucleotide
ccuaacccagcacuugcua

SEQ ID NO: 1920483 - RNA, 19 nt, Artificial Sequence
  Description of Artificial Sequence: Synthetic oligonucleotide
ccucacauggacgucagau

SEQ ID NO: 1920484 - RNA, 19 nt, Artificial Sequence
  Description of Artificial Sequence: Synthetic oligonucleotide
ggaguaggaggaggcgguc

SEQ ID NO: 1920485 - RNA, 19 nt, Artificial Sequence
  Description of Artificial Sequence: Synthetic oligonucleotide
ucaguccgccagguuccua

SEQ ID NO: 1920486 - RNA, 19 nt, Artificial Sequence
  Description of Artificial Sequence: Synthetic oligonucleotide
ccuugaagaugguuuucgu

SEQ ID NO: 1920487 - RNA, 19 nt, Artificial Sequence
  Description of Artificial Sequence: Synthetic oligonucleotide
gguuuucgucucaggcauc

SEQ ID NO: 1920488 - RNA, 19 nt, Artificial Sequence
  Description of Artificial Sequence: Synthetic oligonucleotide
cugaggcgaucuggaugac

SEQ ID NO: 1920489 - RNA, 19 nt, Artificial Sequence
  Description of Artificial Sequence: Synthetic oligonucleotide
ggccgugaguuggccuugg

SEQ ID NO: 1920490 - RNA, 19 nt, Artificial Sequence
  Description of Artificial Sequence: Synthetic oligonucleotide
gaccagcaugccgcuucca

SEQ ID NO: 1920491 - RNA, 19 nt, Artificial Sequence
  Description of Artificial Sequence: Synthetic oligonucleotide
gguugaccagcaugccgcu

SEQ ID NO: 1920492 - RNA, 19 nt, Artificial Sequence
  Description of Artificial Sequence: Synthetic oligonucleotide
cgcgccccugucaggagcc

SEQ ID NO: 1920493 - RNA, 19 nt, Artificial Sequence
  Description of Artificial Sequence: Synthetic oligonucleotide
ggugccguagcagcucugu

SEQ ID NO: 1920494 - RNA, 19 nt, Artificial Sequence
  Description of Artificial Sequence: Synthetic oligonucleotide
aggugccguagcagcucug

SEQ ID NO: 1920495 - RNA, 19 nt, Artificial Sequence
  Description of Artificial Sequence: Synthetic oligonucleotide
gcuugccccacuccacugu

SEQ ID NO: 1920496 - RNA, 19 nt, Artificial Sequence
  Description of Artificial Sequence: Synthetic oligonucleotide
gcuaggugccguagcagcu

SEQ ID NO: 1920497 - RNA, 19 nt, Artificial Sequence
  Description of Artificial Sequence: Synthetic oligonucleotide
caccugcccaacgccuuca

SEQ ID NO: 1920498 - RNA, 19 nt, Artificial Sequence
  Description of Artificial Sequence: Synthetic oligonucleotide
gguuccuaacccagcacuu

SEQ ID NO: 1920499 - RNA, 19 nt, Artificial Sequence
  Description of Artificial Sequence: Synthetic oligonucleotide
cguuugcagaggcgcccgg

SEQ ID NO: 1920500 - RNA, 19 nt, Artificial Sequence
  Description of Artificial Sequence: Synthetic oligonucleotide
gcacucuggagagggacgu

SEQ ID NO: 1920501 - RNA, 19 nt, Artificial Sequence
  Description of Artificial Sequence: Synthetic oligonucleotide
ggggccgugaguuggccuu

SEQ ID NO: 1920502 - RNA, 19 nt, Artificial Sequence
  Description of Artificial Sequence: Synthetic oligonucleotide
cccaacgccuucauucccu

SEQ ID NO: 1920503 - RNA, 19 nt, Artificial Sequence
  Description of Artificial Sequence: Synthetic oligonucleotide
cucugaccacguugauggu

SEQ ID NO: 1920504 - RNA, 19 nt, Artificial Sequence
  Description of Artificial Sequence: Synthetic oligonucleotide
ccgccagguuccuaaccca

SEQ ID NO: 1920505 - RNA, 19 nt, Artificial Sequence
  Description of Artificial Sequence: Synthetic oligonucleotide
ggaugagguuacacagagu

SEQ ID NO: 1920506 - RNA, 19 nt, Artificial Sequence
  Description of Artificial Sequence: Synthetic oligonucleotide
ggacaaccagaagccccga

SEQ ID NO: 1920507 - RNA, 19 nt, Artificial Sequence
  Description of Artificial Sequence: Synthetic oligonucleotide
gggccgugaguuggccuug

SEQ ID NO: 1920508 - RNA, 19 nt, Artificial Sequence
  Description of Artificial Sequence: Synthetic oligonucleotide
ggaggcgguccggccgcgg

SEQ ID NO: 1920509 - RNA, 19 nt, Artificial Sequence
  Description of Artificial Sequence: Synthetic oligonucleotide
cgcggaggcgccacgucuc

SEQ ID NO: 1920510 - RNA, 19 nt, Artificial Sequence
  Description of Artificial Sequence: Synthetic oligonucleotide
gcgguccggccgcggaggc

SEQ ID NO: 1920511 - RNA, 19 nt, Artificial Sequence
  Description of Artificial Sequence: Synthetic oligonucleotide
cagguccuugaagaugguu

SEQ ID NO: 1920512 - RNA, 19 nt, Artificial Sequence
  Description of Artificial Sequence: Synthetic oligonucleotide
gcggaaccucagaacaggu

SEQ ID NO: 1920513 - RNA, 19 nt, Artificial Sequence
  Description of Artificial Sequence: Synthetic oligonucleotide
gggacguccuuagggacuu

SEQ ID NO: 1920514 - RNA, 19 nt, Artificial Sequence
  Description of Artificial Sequence: Synthetic oligonucleotide
gccgcggaggcgccacguc

SEQ ID NO: 1920515 - RNA, 19 nt, Artificial Sequence
  Description of Artificial Sequence: Synthetic oligonucleotide
guugaccagcaugccgcuu

SEQ ID NO: 1920516 - RNA, 19 nt, Artificial Sequence
  Description of Artificial Sequence: Synthetic oligonucleotide
caucuagacugugguuguu

SEQ ID NO: 1920517 - RNA, 19 nt, Artificial Sequence
  Description of Artificial Sequence: Synthetic oligonucleotide
ggacguccuuagggacuug

SEQ ID NO: 1920518 - RNA, 19 nt, Artificial Sequence
  Description of Artificial Sequence: Synthetic oligonucleotide
gugcagggguugacagaua

SEQ ID NO: 1920519 - RNA, 19 nt, Artificial Sequence
  Description of Artificial Sequence: Synthetic oligonucleotide
ccggauccccgugguugcc

SEQ ID NO: 1920520 - RNA, 19 nt, Artificial Sequence
  Description of Artificial Sequence: Synthetic oligonucleotide
gcgccccugucaggagccg

SEQ ID NO: 1920521 - RNA, 19 nt, Artificial Sequence
  Description of Artificial Sequence: Synthetic oligonucleotide
cccgcaccuuggacggcuc

SEQ ID NO: 1920522 - RNA, 19 nt, Artificial Sequence
  Description of Artificial Sequence: Synthetic oligonucleotide
gcgaagggcugaggcgauc

SEQ ID NO: 1920523 - RNA, 19 nt, Artificial Sequence
  Description of Artificial Sequence: Synthetic oligonucleotide
ccacuguuggacgcauucu

SEQ ID NO: 1920524 - RNA, 19 nt, Artificial Sequence
  Description of Artificial Sequence: Synthetic oligonucleotide
cucaguccgccagguuccu

SEQ ID NO: 1920525 - RNA, 19 nt, Artificial Sequence
  Description of Artificial Sequence: Synthetic oligonucleotide
gcgccacgucucgaggaga

SEQ ID NO: 1920526 - RNA, 19 nt, Artificial Sequence
  Description of Artificial Sequence: Synthetic oligonucleotide
ggagccgguugaccagcau

SEQ ID NO: 1920527 - RNA, 19 nt, Artificial Sequence
  Description of Artificial Sequence: Synthetic oligonucleotide
ggccuugguggaugagguu

SEQ ID NO: 1920528 - RNA, 19 nt, Artificial Sequence
  Description of Artificial Sequence: Synthetic oligonucleotide
ccccgugguugccauagau

SEQ ID NO: 1920529 - RNA, 19 nt, Artificial Sequence
  Description of Artificial Sequence: Synthetic oligonucleotide
cgaagggcugaggcgaucu

SEQ ID NO: 1920530 - RNA, 19 nt, Artificial Sequence
  Description of Artificial Sequence: Synthetic oligonucleotide
ccaggcgcuaggugccgua

SEQ ID NO: 1920531 - RNA, 19 nt, Artificial Sequence
  Description of Artificial Sequence: Synthetic oligonucleotide
ccgggcucgcgccccuguc

SEQ ID NO: 1920532 - RNA, 19 nt, Artificial Sequence
  Description of Artificial Sequence: Synthetic oligonucleotide
gccccugucaggagccggu

SEQ ID NO: 1920533 - RNA, 19 nt, Artificial Sequence
  Description of Artificial Sequence: Synthetic oligonucleotide
gccgugaguuggccuuggu

SEQ ID NO: 1920534 - RNA, 19 nt, Artificial Sequence
  Description of Artificial Sequence: Synthetic oligonucleotide
ccgcggaggcgccacgucu

SEQ ID NO: 1920535 - RNA, 19 nt, Artificial Sequence
  Description of Artificial Sequence: Synthetic oligonucleotide
cgggcucgcgccccuguca

SEQ ID NO: 1920536 - RNA, 19 nt, Artificial Sequence
  Description of Artificial Sequence: Synthetic oligonucleotide
gccacgucucgaggagacu

SEQ ID NO: 1920537 - RNA, 19 nt, Artificial Sequence
  Description of Artificial Sequence: Synthetic oligonucleotide
ggcgaagggcugaggcgau

SEQ ID NO: 1920538 - RNA, 19 nt, Artificial Sequence
  Description of Artificial Sequence: Synthetic oligonucleotide
cgguccggccgcggaggcg

SEQ ID NO: 1920539 - RNA, 19 nt, Artificial Sequence
  Description of Artificial Sequence: Synthetic oligonucleotide
cggauccccgugguugcca

SEQ ID NO: 1920540 - RNA, 19 nt, Artificial Sequence
  Description of Artificial Sequence: Synthetic oligonucleotide
ggccgcggaggcgccacgu

SEQ ID NO: 1920541 - RNA, 19 nt, Artificial Sequence
  Description of Artificial Sequence: Synthetic oligonucleotide
cuccaacagugggcagcuu

SEQ ID NO: 1920542 - RNA, 19 nt, Artificial Sequence
  Description of Artificial Sequence: Synthetic oligonucleotide
cgucucgaggagacucguu

SEQ ID NO: 1920543 - RNA, 19 nt, Artificial Sequence
  Description of Artificial Sequence: Synthetic oligonucleotide
ccgccucaguccgccaggu

SEQ ID NO: 1920544 - RNA, 19 nt, Artificial Sequence
  Description of Artificial Sequence: Synthetic oligonucleotide
cccgggcucgcgccccugu

SEQ ID NO: 1920545 - RNA, 19 nt, Artificial Sequence
  Description of Artificial Sequence: Synthetic oligonucleotide
cgccucaguccgccagguu

SEQ ID NO: 1920546 - RNA, 19 nt, Artificial Sequence
  Description of Artificial Sequence: Synthetic oligonucleotide
uuaaaguggaaguagaaug

SEQ ID NO: 1920547 - RNA, 19 nt, Artificial Sequence
  Description of Artificial Sequence: Synthetic oligonucleotide
uuuuaagucucuuccaagg

SEQ ID NO: 1920548 - RNA, 19 nt, Artificial Sequence
  Description of Artificial Sequence: Synthetic oligonucleotide
aauuuguccagcaaucagc

SEQ ID NO: 1920549 - RNA, 19 nt, Artificial Sequence
  Description of Artificial Sequence: Synthetic oligonucleotide
aaauaguagaggcgggagc

SEQ ID NO: 1920550 - RNA, 19 nt, Artificial Sequence
  Description of Artificial Sequence: Synthetic oligonucleotide
uuauuccacggccagaacg

SEQ ID NO: 1920551 - RNA, 19 nt, Artificial Sequence
  Description of Artificial Sequence: Synthetic oligonucleotide
aaaggggacaaguucauug

SEQ ID NO: 1920552 - RNA, 19 nt, Artificial Sequence
  Description of Artificial Sequence: Synthetic oligonucleotide
ucugagaauaucccgaagc

SEQ ID NO: 1920553 - RNA, 19 nt, Artificial Sequence
  Description of Artificial Sequence: Synthetic oligonucleotide
aauaugucuucucucagca

SEQ ID NO: 1920554 - RNA, 19 nt, Artificial Sequence
  Description of Artificial Sequence: Synthetic oligonucleotide
aaggggacaaguucauugc

SEQ ID NO: 1920555 - RNA, 19 nt, Artificial Sequence
  Description of Artificial Sequence: Synthetic oligonucleotide
auccuauucacuucguagc

SEQ ID NO: 1920556 - RNA, 19 nt, Artificial Sequence
  Description of Artificial Sequence: Synthetic oligonucleotide
aguuguagauuuccaaggc

SEQ ID NO: 1920557 - RNA, 19 nt, Artificial Sequence
  Description of Artificial Sequence: Synthetic oligonucleotide
uuucucugcacauucauug

SEQ ID NO: 1920558 - RNA, 19 nt, Artificial Sequence
  Description of Artificial Sequence: Synthetic oligonucleotide
aaauuuguccagcaaucag

SEQ ID NO: 1920559 - RNA, 19 nt, Artificial Sequence
  Description of Artificial Sequence: Synthetic oligonucleotide
ucuuccuuugguaguaucg

SEQ ID NO: 1920560 - RNA, 19 nt, Artificial Sequence
  Description of Artificial Sequence: Synthetic oligonucleotide
aucgcuuuugaaugcagcc

SEQ ID NO: 1920561 - RNA, 19 nt, Artificial Sequence
  Description of Artificial Sequence: Synthetic oligonucleotide
uauuccacggccagaacgg

SEQ ID NO: 1920562 - RNA, 19 nt, Artificial Sequence
  Description of Artificial Sequence: Synthetic oligonucleotide
agacgggagguguagaugc

SEQ ID NO: 1920563 - RNA, 19 nt, Artificial Sequence
  Description of Artificial Sequence: Synthetic oligonucleotide
uuucuaaacgaccccuugg

SEQ ID NO: 1920564 - RNA, 19 nt, Artificial Sequence
  Description of Artificial Sequence: Synthetic oligonucleotide
aaguucauugcacuccauc

SEQ ID NO: 1920565 - RNA, 19 nt, Artificial Sequence
  Description of Artificial Sequence: Synthetic oligonucleotide
auuguuaaacugcaaggag

SEQ ID NO: 1920566 - RNA, 19 nt, Artificial Sequence
  Description of Artificial Sequence: Synthetic oligonucleotide
uuguuaaacugcaaggaga

SEQ ID NO: 1920567 - RNA, 19 nt, Artificial Sequence
  Description of Artificial Sequence: Synthetic oligonucleotide
uaaaguggaaguagaaugu

SEQ ID NO: 1920568 - RNA, 19 nt, Artificial Sequence
  Description of Artificial Sequence: Synthetic oligonucleotide
uuaagucucuuccaaggcc

SEQ ID NO: 1920569 - RNA, 19 nt, Artificial Sequence
  Description of Artificial Sequence: Synthetic oligonucleotide
acacuuuucgaauucuggg

SEQ ID NO: 1920570 - RNA, 19 nt, Artificial Sequence
  Description of Artificial Sequence: Synthetic oligonucleotide
uggguuucugagaauaucc

SEQ ID NO: 1920571 - RNA, 19 nt, Artificial Sequence
  Description of Artificial Sequence: Synthetic oligonucleotide
cacaagaagguauucuucg

SEQ ID NO: 1920572 - RNA, 19 nt, Artificial Sequence
  Description of Artificial Sequence: Synthetic oligonucleotide
aguuccugggcacaguucg

SEQ ID NO: 1920573 - RNA, 19 nt, Artificial Sequence
  Description of Artificial Sequence: Synthetic oligonucleotide
uguuaaacugcaaggagaa

SEQ ID NO: 1920574 - RNA, 19 nt, Artificial Sequence
  Description of Artificial Sequence: Synthetic oligonucleotide
uuuaagucucuuccaaggc

SEQ ID NO: 1920575 - RNA, 19 nt, Artificial Sequence
  Description of Artificial Sequence: Synthetic oligonucleotide
uauuuuaagucucuuccaa

SEQ ID NO: 1920576 - RNA, 19 nt, Artificial Sequence
  Description of Artificial Sequence: Synthetic oligonucleotide
uccagauuauuccacggcc

SEQ ID NO: 1920577 - RNA, 19 nt, Artificial Sequence
  Description of Artificial Sequence: Synthetic oligonucleotide
ggugauuugcacuuggccg

SEQ ID NO: 1920578 - RNA, 19 nt, Artificial Sequence
  Description of Artificial Sequence: Synthetic oligonucleotide
aggugauuugcacuuggcc

SEQ ID NO: 1920579 - RNA, 19 nt, Artificial Sequence
  Description of Artificial Sequence: Synthetic oligonucleotide
uauuguuaaacugcaagga

SEQ ID NO: 1920580 - RNA, 19 nt, Artificial Sequence
  Description of Artificial Sequence: Synthetic oligonucleotide
caaguuguagauuuccaag

SEQ ID NO: 1920581 - RNA, 19 nt, Artificial Sequence
  Description of Artificial Sequence: Synthetic oligonucleotide
cagcagguagcauagauag

SEQ ID NO: 1920582 - RNA, 19 nt, Artificial Sequence
  Description of Artificial Sequence: Synthetic oligonucleotide
uucacuucguagcacaaga

SEQ ID NO: 1920583 - RNA, 19 nt, Artificial Sequence
  Description of Artificial Sequence: Synthetic oligonucleotide
uggaaucuaaaauuuauuu

SEQ ID NO: 1920584 - RNA, 19 nt, Artificial Sequence
  Description of Artificial Sequence: Synthetic oligonucleotide
auagcggagguucuuaaag

SEQ ID NO: 1920585 - RNA, 19 nt, Artificial Sequence
  Description of Artificial Sequence: Synthetic oligonucleotide
aauaguagaggcgggagcu

SEQ ID NO: 1920586 - RNA, 19 nt, Artificial Sequence
  Description of Artificial Sequence: Synthetic oligonucleotide
cuuguuccaacacuuuucg

SEQ ID NO: 1920587 - RNA, 19 nt, Artificial Sequence
  Description of Artificial Sequence: Synthetic oligonucleotide
uucuaaacgaccccuuggc

SEQ ID NO: 1920588 - RNA, 19 nt, Artificial Sequence
  Description of Artificial Sequence: Synthetic oligonucleotide
aaaauaguagaggcgggag

SEQ ID NO: 1920589 - RNA, 19 nt, Artificial Sequence
  Description of Artificial Sequence: Synthetic oligonucleotide
uuugguaguaucgaugcug

SEQ ID NO: 1920590 - RNA, 19 nt, Artificial Sequence
  Description of Artificial Sequence: Synthetic oligonucleotide
agcaaauugcgggaggucc

SEQ ID NO: 1920591 - RNA, 19 nt, Artificial Sequence
  Description of Artificial Sequence: Synthetic oligonucleotide
aaggagaauaugucuucuc

SEQ ID NO: 1920592 - RNA, 19 nt, Artificial Sequence
  Description of Artificial Sequence: Synthetic oligonucleotide
uuaaacugcaaggagaaua

SEQ ID NO: 1920593 - RNA, 19 nt, Artificial Sequence
  Description of Artificial Sequence: Synthetic oligonucleotide
caccaaaucuugcagaccc

SEQ ID NO: 1920594 - RNA, 19 nt, Artificial Sequence
  Description of Artificial Sequence: Synthetic oligonucleotide
uccaguggaaguacagacg

SEQ ID NO: 1920595 - RNA, 19 nt, Artificial Sequence
  Description of Artificial Sequence: Synthetic oligonucleotide
cauccuauucacuucguag

SEQ ID NO: 1920596 - RNA, 19 nt, Artificial Sequence
  Description of Artificial Sequence: Synthetic oligonucleotide
uucuuaaaguggaaguaga

SEQ ID NO: 1920597 - RNA, 19 nt, Artificial Sequence
  Description of Artificial Sequence: Synthetic oligonucleotide
auaggucuuccuuugguag

SEQ ID NO: 1920598 - RNA, 19 nt, Artificial Sequence
  Description of Artificial Sequence: Synthetic oligonucleotide
aagcuuguuauccuggaau

SEQ ID NO: 1920599 - RNA, 19 nt, Artificial Sequence
  Description of Artificial Sequence: Synthetic oligonucleotide
uucgaagguuggcauagcg

SEQ ID NO: 1920600 - RNA, 19 nt, Artificial Sequence
  Description of Artificial Sequence: Synthetic oligonucleotide
ucgaagguuggcauagcgg

SEQ ID NO: 1920601 - RNA, 19 nt, Artificial Sequence
  Description of Artificial Sequence: Synthetic oligonucleotide
ugcacauucauugcagggg

SEQ ID NO: 1920602 - RNA, 19 nt, Artificial Sequence
  Description of Artificial Sequence: Synthetic oligonucleotide
gaauaugucuucucucagc

SEQ ID NO: 1920603 - RNA, 19 nt, Artificial Sequence
  Description of Artificial Sequence: Synthetic oligonucleotide
uuuucuaaacgaccccuug

SEQ ID NO: 1920604 - RNA, 19 nt, Artificial Sequence
  Description of Artificial Sequence: Synthetic oligonucleotide
agcuuguuauccuggaauc

SEQ ID NO: 1920605 - RNA, 19 nt, Artificial Sequence
  Description of Artificial Sequence: Synthetic oligonucleotide
ugcuggacuggcuugaccc

SEQ ID NO: 1920606 - RNA, 19 nt, Artificial Sequence
  Description of Artificial Sequence: Synthetic oligonucleotide
ucgaauucugggaagucca

SEQ ID NO: 1920607 - RNA, 19 nt, Artificial Sequence
  Description of Artificial Sequence: Synthetic oligonucleotide
uucuccagauuauuccacg

SEQ ID NO: 1920608 - RNA, 19 nt, Artificial Sequence
  Description of Artificial Sequence: Synthetic oligonucleotide
aguagaauguucuuugaua

SEQ ID NO: 1920609 - RNA, 19 nt, Artificial Sequence
  Description of Artificial Sequence: Synthetic oligonucleotide
aaaauuuguccagcaauca

SEQ ID NO: 1920610 - RNA, 19 nt, Artificial Sequence
  Description of Artificial Sequence: Synthetic oligonucleotide
auugcacuccauccuauuc

SEQ ID NO: 1920611 - RNA, 19 nt, Artificial Sequence
  Description of Artificial Sequence: Synthetic oligonucleotide
aauugcgggagguccauga

SEQ ID NO: 1920612 - RNA, 19 nt, Artificial Sequence
  Description of Artificial Sequence: Synthetic oligonucleotide
aacugcaaggagaauaugu

SEQ ID NO: 1920613 - RNA, 19 nt, Artificial Sequence
  Description of Artificial Sequence: Synthetic oligonucleotide
uuguacuuuucaucagggg

SEQ ID NO: 1920614 - RNA, 19 nt, Artificial Sequence
  Description of Artificial Sequence: Synthetic oligonucleotide
ucuccagauuauuccacgg

SEQ ID NO: 1920615 - RNA, 19 nt, Artificial Sequence
  Description of Artificial Sequence: Synthetic oligonucleotide
aaccaggucugggugaucg

SEQ ID NO: 1920616 - RNA, 19 nt, Artificial Sequence
  Description of Artificial Sequence: Synthetic oligonucleotide
aaguagaauguucuuugau

SEQ ID NO: 1920617 - RNA, 19 nt, Artificial Sequence
  Description of Artificial Sequence: Synthetic oligonucleotide
uccuuugguaguaucgaug

SEQ ID NO: 1920618 - RNA, 19 nt, Artificial Sequence
  Description of Artificial Sequence: Synthetic oligonucleotide
ucuuaaaguggaaguagaa

SEQ ID NO: 1920619 - RNA, 19 nt, Artificial Sequence
  Description of Artificial Sequence: Synthetic oligonucleotide
aggauuucugcguguuugc

SEQ ID NO: 1920620 - RNA, 19 nt, Artificial Sequence
  Description of Artificial Sequence: Synthetic oligonucleotide
agaauaugucuucucucag

SEQ ID NO: 1920621 - RNA, 19 nt, Artificial Sequence
  Description of Artificial Sequence: Synthetic oligonucleotide
guuguagauuuccaaggcc

SEQ ID NO: 1920622 - RNA, 19 nt, Artificial Sequence
  Description of Artificial Sequence: Synthetic oligonucleotide
uguagaugcgcagaaccag

SEQ ID NO: 1920623 - RNA, 19 nt, Artificial Sequence
  Description of Artificial Sequence: Synthetic oligonucleotide
aguuccaacgaacgcaucu

SEQ ID NO: 1920624 - RNA, 19 nt, Artificial Sequence
  Description of Artificial Sequence: Synthetic oligonucleotide
aggagaauaugucuucucu

SEQ ID NO: 1920625 - RNA, 19 nt, Artificial Sequence
  Description of Artificial Sequence: Synthetic oligonucleotide
ucuucgaagguuggcauag

SEQ ID NO: 1920626 - RNA, 19 nt, Artificial Sequence
  Description of Artificial Sequence: Synthetic oligonucleotide
agguucuuaaaguggaagu

SEQ ID NO: 1920627 - RNA, 19 nt, Artificial Sequence
  Description of Artificial Sequence: Synthetic oligonucleotide
aucccugaucgccacagac

SEQ ID NO: 1920628 - RNA, 19 nt, Artificial Sequence
  Description of Artificial Sequence: Synthetic oligonucleotide
uccaaggccauucaccaaa

SEQ ID NO: 1920629 - RNA, 19 nt, Artificial Sequence
  Description of Artificial Sequence: Synthetic oligonucleotide
aauaucccgaagcuuguua

SEQ ID NO: 1920630 - RNA, 19 nt, Artificial Sequence
  Description of Artificial Sequence: Synthetic oligonucleotide
uuugggaguucacaaaauu

SEQ ID NO: 1920631 - RNA, 19 nt, Artificial Sequence
  Description of Artificial Sequence: Synthetic oligonucleotide
aaguccauggcagcuaucu

SEQ ID NO: 1920632 - RNA, 19 nt, Artificial Sequence
  Description of Artificial Sequence: Synthetic oligonucleotide
uccuauucacuucguagca

SEQ ID NO: 1920633 - RNA, 19 nt, Artificial Sequence
  Description of Artificial Sequence: Synthetic oligonucleotide
uggagguugaugcucuucu

SEQ ID NO: 1920634 - RNA, 19 nt, Artificial Sequence
  Description of Artificial Sequence: Synthetic oligonucleotide
acuuggccgaguuccaacg

SEQ ID NO: 1920635 - RNA, 19 nt, Artificial Sequence
  Description of Artificial Sequence: Synthetic oligonucleotide
ugcguguuugccuuucuug

SEQ ID NO: 1920636 - RNA, 19 nt, Artificial Sequence
  Description of Artificial Sequence: Synthetic oligonucleotide
gguuucugagaauaucccg

SEQ ID NO: 1920637 - RNA, 19 nt, Artificial Sequence
  Description of Artificial Sequence: Synthetic oligonucleotide
ucuuguuuugcaggcagcc

SEQ ID NO: 1920638 - RNA, 19 nt, Artificial Sequence
  Description of Artificial Sequence: Synthetic oligonucleotide
ccuauuguuaaacugcaag

SEQ ID NO: 1920639 - RNA, 19 nt, Artificial Sequence
  Description of Artificial Sequence: Synthetic oligonucleotide
ugccuauuguuaaacugca

SEQ ID NO: 1920640 - RNA, 19 nt, Artificial Sequence
  Description of Artificial Sequence: Synthetic oligonucleotide
aaucuugcagaccccggga

SEQ ID NO: 1920641 - RNA, 19 nt, Artificial Sequence
  Description of Artificial Sequence: Synthetic oligonucleotide
uucgaauucugggaagucc

SEQ ID NO: 1920642 - RNA, 19 nt, Artificial Sequence
  Description of Artificial Sequence: Synthetic oligonucleotide
ucacaaaauuuguccagca

SEQ ID NO: 1920643 - RNA, 19 nt, Artificial Sequence
  Description of Artificial Sequence: Synthetic oligonucleotide
ucuaaacgaccccuuggca

SEQ ID NO: 1920644 - RNA, 19 nt, Artificial Sequence
  Description of Artificial Sequence: Synthetic oligonucleotide
uugcgggagguccaugacg

SEQ ID NO: 1920645 - RNA, 19 nt, Artificial Sequence
  Description of Artificial Sequence: Synthetic oligonucleotide
ugagguagcaggugauuug

SEQ ID NO: 1920646 - RNA, 19 nt, Artificial Sequence
  Description of Artificial Sequence: Synthetic oligonucleotide
gaggaagcacacuucagca

SEQ ID NO: 1920647 - RNA, 19 nt, Artificial Sequence
  Description of Artificial Sequence: Synthetic oligonucleotide
uagauaggucuuccuuugg

SEQ ID NO: 1920648 - RNA, 19 nt, Artificial Sequence
  Description of Artificial Sequence: Synthetic oligonucleotide
aguggaaguagaauguucu

SEQ ID NO: 1920649 - RNA, 19 nt, Artificial Sequence
  Description of Artificial Sequence: Synthetic oligonucleotide
cuccaguggaaguacagac

SEQ ID NO: 1920650 - RNA, 19 nt, Artificial Sequence
  Description of Artificial Sequence: Synthetic oligonucleotide
agguagcauagauaggucu

SEQ ID NO: 1920651 - RNA, 19 nt, Artificial Sequence
  Description of Artificial Sequence: Synthetic oligonucleotide
cacuucguagcacaagaag

SEQ ID NO: 1920652 - RNA, 19 nt, Artificial Sequence
  Description of Artificial Sequence: Synthetic oligonucleotide
aacgcaucucaucaaugaa

SEQ ID NO: 1920653 - RNA, 19 nt, Artificial Sequence
  Description of Artificial Sequence: Synthetic oligonucleotide
ucuuuguaugcaccugcug

SEQ ID NO: 1920654 - RNA, 19 nt, Artificial Sequence
  Description of Artificial Sequence: Synthetic oligonucleotide
uuuucgaauucugggaagu

SEQ ID NO: 1920655 - RNA, 19 nt, Artificial Sequence
  Description of Artificial Sequence: Synthetic oligonucleotide
cuuuucgaauucugggaag

SEQ ID NO: 1920656 - RNA, 19 nt, Artificial Sequence
  Description of Artificial Sequence: Synthetic oligonucleotide
agcggagguucuuaaagug

SEQ ID NO: 1920657 - RNA, 19 nt, Artificial Sequence
  Description of Artificial Sequence: Synthetic oligonucleotide
uugaaugcagccaguuccu

SEQ ID NO: 1920658 - RNA, 19 nt, Artificial Sequence
  Description of Artificial Sequence: Synthetic oligonucleotide
uaaacgaccccuuggcaaa

SEQ ID NO: 1920659 - RNA, 19 nt, Artificial Sequence
  Description of Artificial Sequence: Synthetic oligonucleotide
cugcacauucauugcaggg

SEQ ID NO: 1920660 - RNA, 19 nt, Artificial Sequence
  Description of Artificial Sequence: Synthetic oligonucleotide
gugccuauuguuaaacugc

SEQ ID NO: 1920661 - RNA, 19 nt, Artificial Sequence
  Description of Artificial Sequence: Synthetic oligonucleotide
aaggccugaaugacuugcc

SEQ ID NO: 1920662 - RNA, 19 nt, Artificial Sequence
  Description of Artificial Sequence: Synthetic oligonucleotide
aucuugcagaccccgggac

SEQ ID NO: 1920663 - RNA, 19 nt, Artificial Sequence
  Description of Artificial Sequence: Synthetic oligonucleotide
uucugagaauaucccgaag

SEQ ID NO: 1920664 - RNA, 19 nt, Artificial Sequence
  Description of Artificial Sequence: Synthetic oligonucleotide
uccaggacacauaccaggu

SEQ ID NO: 1920665 - RNA, 19 nt, Artificial Sequence
  Description of Artificial Sequence: Synthetic oligonucleotide
uagaggaagcacacuucag

SEQ ID NO: 1920666 - RNA, 19 nt, Artificial Sequence
  Description of Artificial Sequence: Synthetic oligonucleotide
uucauugcacuccauccua

SEQ ID NO: 1920667 - RNA, 19 nt, Artificial Sequence
  Description of Artificial Sequence: Synthetic oligonucleotide
ccuuugguaguaucgaugc

SEQ ID NO: 1920668 - RNA, 19 nt, Artificial Sequence
  Description of Artificial Sequence: Synthetic oligonucleotide
uuucugagaauaucccgaa

SEQ ID NO: 1920669 - RNA, 19 nt, Artificial Sequence
  Description of Artificial Sequence: Synthetic oligonucleotide
agauaggucuuccuuuggu

SEQ ID NO: 1920670 - RNA, 19 nt, Artificial Sequence
  Description of Artificial Sequence: Synthetic oligonucleotide
aguggaaguacagacggga

SEQ ID NO: 1920671 - RNA, 19 nt, Artificial Sequence
  Description of Artificial Sequence: Synthetic oligonucleotide
uuguuauccuggaaucuaa

SEQ ID NO: 1920672 - RNA, 19 nt, Artificial Sequence
  Description of Artificial Sequence: Synthetic oligonucleotide
guagaggaagcacacuuca

SEQ ID NO: 1920673 - RNA, 19 nt, Artificial Sequence
  Description of Artificial Sequence: Synthetic oligonucleotide
ggugccuauuguuaaacug

SEQ ID NO: 1920674 - RNA, 19 nt, Artificial Sequence
  Description of Artificial Sequence: Synthetic oligonucleotide
guagaauguucuuugauau

SEQ ID NO: 1920675 - RNA, 19 nt, Artificial Sequence
  Description of Artificial Sequence: Synthetic oligonucleotide
uggcaaaggggacaaguuc

SEQ ID NO: 1920676 - RNA, 19 nt, Artificial Sequence
  Description of Artificial Sequence: Synthetic oligonucleotide
ucguagcacaagaagguau

SEQ ID NO: 1920677 - RNA, 19 nt, Artificial Sequence
  Description of Artificial Sequence: Synthetic oligonucleotide
auuauuccacggccagaac

SEQ ID NO: 1920678 - RNA, 19 nt, Artificial Sequence
  Description of Artificial Sequence: Synthetic oligonucleotide
guuucugagaauaucccga

SEQ ID NO: 1920679 - RNA, 19 nt, Artificial Sequence
  Description of Artificial Sequence: Synthetic oligonucleotide
gauuauuccacggccagaa

SEQ ID NO: 1920680 - RNA, 19 nt, Artificial Sequence
  Description of Artificial Sequence: Synthetic oligonucleotide
auuucugcguguuugccuu

SEQ ID NO: 1920681 - RNA, 19 nt, Artificial Sequence
  Description of Artificial Sequence: Synthetic oligonucleotide
uccacggccagaacggacu

SEQ ID NO: 1920682 - RNA, 19 nt, Artificial Sequence
  Description of Artificial Sequence: Synthetic oligonucleotide
acaagaagguauucuucga

SEQ ID NO: 1920683 - RNA, 19 nt, Artificial Sequence
  Description of Artificial Sequence: Synthetic oligonucleotide
cagauuauuccacggccag

SEQ ID NO: 1920684 - RNA, 19 nt, Artificial Sequence
  Description of Artificial Sequence: Synthetic oligonucleotide
uugaaucucuucuuuccau

SEQ ID NO: 1920685 - RNA, 19 nt, Artificial Sequence
  Description of Artificial Sequence: Synthetic oligonucleotide
gugauuugcacuuggccga

SEQ ID NO: 1920686 - RNA, 19 nt, Artificial Sequence
  Description of Artificial Sequence: Synthetic oligonucleotide
auaucccgaagcuuguuau

SEQ ID NO: 1920687 - RNA, 19 nt, Artificial Sequence
  Description of Artificial Sequence: Synthetic oligonucleotide
cuauucacuucguagcaca

SEQ ID NO: 1920688 - RNA, 19 nt, Artificial Sequence
  Description of Artificial Sequence: Synthetic oligonucleotide
guagaugcgcagaaccagg

SEQ ID NO: 1920689 - RNA, 19 nt, Artificial Sequence
  Description of Artificial Sequence: Synthetic oligonucleotide
auugcgggagguccaugac

SEQ ID NO: 1920690 - RNA, 19 nt, Artificial Sequence
  Description of Artificial Sequence: Synthetic oligonucleotide
accaguagaggaagcacac

SEQ ID NO: 1920691 - RNA, 19 nt, Artificial Sequence
  Description of Artificial Sequence: Synthetic oligonucleotide
guuggcauagcggagguuc

SEQ ID NO: 1920692 - RNA, 19 nt, Artificial Sequence
  Description of Artificial Sequence: Synthetic oligonucleotide
acauucauugcaggggcuc

SEQ ID NO: 1920693 - RNA, 19 nt, Artificial Sequence
  Description of Artificial Sequence: Synthetic oligonucleotide
cuccagauuauuccacggc

SEQ ID NO: 1920694 - RNA, 19 nt, Artificial Sequence
  Description of Artificial Sequence: Synthetic oligonucleotide
aagguauucuucgaagguu

SEQ ID NO: 1920695 - RNA, 19 nt, Artificial Sequence
  Description of Artificial Sequence: Synthetic oligonucleotide
gaugcgcagaaccaggucu

SEQ ID NO: 1920696 - RNA, 19 nt, Artificial Sequence
  Description of Artificial Sequence: Synthetic oligonucleotide
uguuauccuggaaucuaaa

SEQ ID NO: 1920697 - RNA, 19 nt, Artificial Sequence
  Description of Artificial Sequence: Synthetic oligonucleotide
ugaaucucuucuuuccauu

SEQ ID NO: 1920698 - RNA, 19 nt, Artificial Sequence
  Description of Artificial Sequence: Synthetic oligonucleotide
caacgaacgcaucucauca

SEQ ID NO: 1920699 - RNA, 19 nt, Artificial Sequence
  Description of Artificial Sequence: Synthetic oligonucleotide
cuaaacgaccccuuggcaa

SEQ ID NO: 1920700 - RNA, 19 nt, Artificial Sequence
  Description of Artificial Sequence: Synthetic oligonucleotide
acuuucucugcacauucau

SEQ ID NO: 1920701 - RNA, 19 nt, Artificial Sequence
  Description of Artificial Sequence: Synthetic oligonucleotide
guaguaucgaugcuggacu

SEQ ID NO: 1920702 - RNA, 19 nt, Artificial Sequence
  Description of Artificial Sequence: Synthetic oligonucleotide
ugauucagccugcgaagcu

SEQ ID NO: 1920703 - RNA, 19 nt, Artificial Sequence
  Description of Artificial Sequence: Synthetic oligonucleotide
uagcggagguucuuaaagu

SEQ ID NO: 1920704 - RNA, 19 nt, Artificial Sequence
  Description of Artificial Sequence: Synthetic oligonucleotide
uaguaucgaugcuggacug

SEQ ID NO: 1920705 - RNA, 19 nt, Artificial Sequence
  Description of Artificial Sequence: Synthetic oligonucleotide
aaaguggaaguagaauguu

SEQ ID NO: 1920706 - RNA, 19 nt, Artificial Sequence
  Description of Artificial Sequence: Synthetic oligonucleotide
gauaggucuuccuuuggua

SEQ ID NO: 1920707 - RNA, 19 nt, Artificial Sequence
  Description of Artificial Sequence: Synthetic oligonucleotide
agaugcgcagaaccagguc

SEQ ID NO: 1920708 - RNA, 19 nt, Artificial Sequence
  Description of Artificial Sequence: Synthetic oligonucleotide
uuggagccgucuuuguaug

SEQ ID NO: 1920709 - RNA, 19 nt, Artificial Sequence
  Description of Artificial Sequence: Synthetic oligonucleotide
uagaugcgcagaaccaggu

SEQ ID NO: 1920710 - RNA, 19 nt, Artificial Sequence
  Description of Artificial Sequence: Synthetic oligonucleotide
ucuugcagaccccgggacu

SEQ ID NO: 1920711 - RNA, 19 nt, Artificial Sequence
  Description of Artificial Sequence: Synthetic oligonucleotide
aguaucgaugcuggacugg

SEQ ID NO: 1920712 - RNA, 19 nt, Artificial Sequence
  Description of Artificial Sequence: Synthetic oligonucleotide
cugaucgccacagacaaca

SEQ ID NO: 1920713 - RNA, 19 nt, Artificial Sequence
  Description of Artificial Sequence: Synthetic oligonucleotide
aacgaacgcaucucaucaa

SEQ ID NO: 1920714 - RNA, 19 nt, Artificial Sequence
  Description of Artificial Sequence: Synthetic oligonucleotide
gaaccaguagaggaagcac

SEQ ID NO: 1920715 - RNA, 19 nt, Artificial Sequence
  Description of Artificial Sequence: Synthetic oligonucleotide
uccaggugagguagcaggu

SEQ ID NO: 1920716 - RNA, 19 nt, Artificial Sequence
  Description of Artificial Sequence: Synthetic oligonucleotide
uagcacaagaagguauucu

SEQ ID NO: 1920717 - RNA, 19 nt, Artificial Sequence
  Description of Artificial Sequence: Synthetic oligonucleotide
ucgcuuuugaaugcagcca

SEQ ID NO: 1920718 - RNA, 19 nt, Artificial Sequence
  Description of Artificial Sequence: Synthetic oligonucleotide
ucacuucguagcacaagaa

SEQ ID NO: 1920719 - RNA, 19 nt, Artificial Sequence
  Description of Artificial Sequence: Synthetic oligonucleotide
cuugaaucucuucuuucca

SEQ ID NO: 1920720 - RNA, 19 nt, Artificial Sequence
  Description of Artificial Sequence: Synthetic oligonucleotide
ccagaacggacuuugggag

SEQ ID NO: 1920721 - RNA, 19 nt, Artificial Sequence
  Description of Artificial Sequence: Synthetic oligonucleotide
ucuccaguggaaguacaga

SEQ ID NO: 1920722 - RNA, 19 nt, Artificial Sequence
  Description of Artificial Sequence: Synthetic oligonucleotide
ucgaugcuggacuggcuug

SEQ ID NO: 1920723 - RNA, 19 nt, Artificial Sequence
  Description of Artificial Sequence: Synthetic oligonucleotide
uagcauagauaggucuucc

SEQ ID NO: 1920724 - RNA, 19 nt, Artificial Sequence
  Description of Artificial Sequence: Synthetic oligonucleotide
guaucgaugcuggacuggc

SEQ ID NO: 1920725 - RNA, 19 nt, Artificial Sequence
  Description of Artificial Sequence: Synthetic oligonucleotide
gguaguaucgaugcuggac

SEQ ID NO: 1920726 - RNA, 19 nt, Artificial Sequence
  Description of Artificial Sequence: Synthetic oligonucleotide
auucacuucguagcacaag

SEQ ID NO: 1920727 - RNA, 19 nt, Artificial Sequence
  Description of Artificial Sequence: Synthetic oligonucleotide
guugcgguguguguccagg

SEQ ID NO: 1920728 - RNA, 19 nt, Artificial Sequence
  Description of Artificial Sequence: Synthetic oligonucleotide
aucgaugcuggacuggcuu

SEQ ID NO: 1920729 - RNA, 19 nt, Artificial Sequence
  Description of Artificial Sequence: Synthetic oligonucleotide
ugagaauaucccgaagcuu

SEQ ID NO: 1920730 - RNA, 19 nt, Artificial Sequence
  Description of Artificial Sequence: Synthetic oligonucleotide
acgaccccuuggcaaaggg

SEQ ID NO: 1920731 - RNA, 19 nt, Artificial Sequence
  Description of Artificial Sequence: Synthetic oligonucleotide
ucauugcacuccauccuau

SEQ ID NO: 1920732 - RNA, 19 nt, Artificial Sequence
  Description of Artificial Sequence: Synthetic oligonucleotide
acgaacgcaucucaucaau

SEQ ID NO: 1920733 - RNA, 19 nt, Artificial Sequence
  Description of Artificial Sequence: Synthetic oligonucleotide
uuggccgaguuccaacgaa

SEQ ID NO: 1920734 - RNA, 19 nt, Artificial Sequence
  Description of Artificial Sequence: Synthetic oligonucleotide
ggugaucgcuuuugaaugc

SEQ ID NO: 1920735 - RNA, 19 nt, Artificial Sequence
  Description of Artificial Sequence: Synthetic oligonucleotide
cauucauugcaggggcucc

SEQ ID NO: 1920736 - RNA, 19 nt, Artificial Sequence
  Description of Artificial Sequence: Synthetic oligonucleotide
acgggagguguagaugcgc

SEQ ID NO: 1920737 - RNA, 19 nt, Artificial Sequence
  Description of Artificial Sequence: Synthetic oligonucleotide
gaucgccacagacaacaca

SEQ ID NO: 1920738 - RNA, 19 nt, Artificial Sequence
  Description of Artificial Sequence: Synthetic oligonucleotide
uggccgaguuccaacgaac

SEQ ID NO: 1920739 - RNA, 19 nt, Artificial Sequence
  Description of Artificial Sequence: Synthetic oligonucleotide
cuucguagcacaagaaggu

SEQ ID NO: 1920740 - RNA, 19 nt, Artificial Sequence
  Description of Artificial Sequence: Synthetic oligonucleotide
caagaagguauucuucgaa

SEQ ID NO: 1920741 - RNA, 19 nt, Artificial Sequence
  Description of Artificial Sequence: Synthetic oligonucleotide
ugauuugcacuuggccgag

SEQ ID NO: 1920742 - RNA, 19 nt, Artificial Sequence
  Description of Artificial Sequence: Synthetic oligonucleotide
uuccuuugguaguaucgau

SEQ ID NO: 1920743 - RNA, 19 nt, Artificial Sequence
  Description of Artificial Sequence: Synthetic oligonucleotide
accaggucugggugaucgc

SEQ ID NO: 1920744 - RNA, 19 nt, Artificial Sequence
  Description of Artificial Sequence: Synthetic oligonucleotide
auuugcacuuggccgaguu

SEQ ID NO: 1920745 - RNA, 19 nt, Artificial Sequence
  Description of Artificial Sequence: Synthetic oligonucleotide
agaggcgggagcugaagau

SEQ ID NO: 1920746 - RNA, 19 nt, Artificial Sequence
  Description of Artificial Sequence: Synthetic oligonucleotide
guauucuucgaagguuggc

SEQ ID NO: 1920747 - RNA, 19 nt, Artificial Sequence
  Description of Artificial Sequence: Synthetic oligonucleotide
uaguagaggcgggagcuga

SEQ ID NO: 1920748 - RNA, 19 nt, Artificial Sequence
  Description of Artificial Sequence: Synthetic oligonucleotide
aagaggauuucugcguguu

SEQ ID NO: 1920749 - RNA, 19 nt, Artificial Sequence
  Description of Artificial Sequence: Synthetic oligonucleotide
ggaaucuaaaauuuauuuu

SEQ ID NO: 1920750 - RNA, 19 nt, Artificial Sequence
  Description of Artificial Sequence: Synthetic oligonucleotide
agccgucuuuguaugcacc

SEQ ID NO: 1920751 - RNA, 19 nt, Artificial Sequence
  Description of Artificial Sequence: Synthetic oligonucleotide
guagcaggugauuugcacu

SEQ ID NO: 1920752 - RNA, 19 nt, Artificial Sequence
  Description of Artificial Sequence: Synthetic oligonucleotide
uucauugcaggggcuccag

SEQ ID NO: 1920753 - RNA, 19 nt, Artificial Sequence
  Description of Artificial Sequence: Synthetic oligonucleotide
aaacgaccccuuggcaaag

SEQ ID NO: 1920754 - RNA, 19 nt, Artificial Sequence
  Description of Artificial Sequence: Synthetic oligonucleotide
ccugauucagccugcgaag

SEQ ID NO: 1920755 - RNA, 19 nt, Artificial Sequence
  Description of Artificial Sequence: Synthetic oligonucleotide
uucuucgaagguuggcaua

SEQ ID NO: 1920756 - RNA, 19 nt, Artificial Sequence
  Description of Artificial Sequence: Synthetic oligonucleotide
aacggacuuugggaguuca

SEQ ID NO: 1920757 - RNA, 19 nt, Artificial Sequence
  Description of Artificial Sequence: Synthetic oligonucleotide
gcacaguucgggcaggggc

SEQ ID NO: 1920758 - RNA, 19 nt, Artificial Sequence
  Description of Artificial Sequence: Synthetic oligonucleotide
acggccagaacggacuuug

SEQ ID NO: 1920759 - RNA, 19 nt, Artificial Sequence
  Description of Artificial Sequence: Synthetic oligonucleotide
cuugacccggugccuauug

SEQ ID NO: 1920760 - RNA, 19 nt, Artificial Sequence
  Description of Artificial Sequence: Synthetic oligonucleotide
auggagguugaugcucuuc

SEQ ID NO: 1920761 - RNA, 19 nt, Artificial Sequence
  Description of Artificial Sequence: Synthetic oligonucleotide
ucgggcaggggcuccaggu

SEQ ID NO: 1920762 - RNA, 19 nt, Artificial Sequence
  Description of Artificial Sequence: Synthetic oligonucleotide
uuucgaauucugggaaguc

SEQ ID NO: 1920763 - RNA, 19 nt, Artificial Sequence
  Description of Artificial Sequence: Synthetic oligonucleotide
gaagcuuguccugguaguc

SEQ ID NO: 1920764 - RNA, 19 nt, Artificial Sequence
  Description of Artificial Sequence: Synthetic oligonucleotide
guggaaguacagacgggag

SEQ ID NO: 1920765 - RNA, 19 nt, Artificial Sequence
  Description of Artificial Sequence: Synthetic oligonucleotide
cagguagcauagauagguc

SEQ ID NO: 1920766 - RNA, 19 nt, Artificial Sequence
  Description of Artificial Sequence: Synthetic oligonucleotide
uuccacggccagaacggac

SEQ ID NO: 1920767 - RNA, 19 nt, Artificial Sequence
  Description of Artificial Sequence: Synthetic oligonucleotide
gcgaagcuuguccugguag

SEQ ID NO: 1920768 - RNA, 19 nt, Artificial Sequence
  Description of Artificial Sequence: Synthetic oligonucleotide
guucauugcacuccauccu

SEQ ID NO: 1920769 - RNA, 19 nt, Artificial Sequence
  Description of Artificial Sequence: Synthetic oligonucleotide
gccagaacggacuuuggga

SEQ ID NO: 1920770 - RNA, 19 nt, Artificial Sequence
  Description of Artificial Sequence: Synthetic oligonucleotide
cauagauaggucuuccuuu

SEQ ID NO: 1920771 - RNA, 19 nt, Artificial Sequence
  Description of Artificial Sequence: Synthetic oligonucleotide
uccugggcacaguucgggc

SEQ ID NO: 1920772 - RNA, 19 nt, Artificial Sequence
  Description of Artificial Sequence: Synthetic oligonucleotide
uccauccuauucacuucgu

SEQ ID NO: 1920773 - RNA, 19 nt, Artificial Sequence
  Description of Artificial Sequence: Synthetic oligonucleotide
cuugcagaccccgggacuc

SEQ ID NO: 1920774 - RNA, 19 nt, Artificial Sequence
  Description of Artificial Sequence: Synthetic oligonucleotide
aggccugaaugacuugcca

SEQ ID NO: 1920775 - RNA, 19 nt, Artificial Sequence
  Description of Artificial Sequence: Synthetic oligonucleotide
ugaucgccacagacaacac

SEQ ID NO: 1920776 - RNA, 19 nt, Artificial Sequence
  Description of Artificial Sequence: Synthetic oligonucleotide
cacuuggccgaguuccaac

SEQ ID NO: 1920777 - RNA, 19 nt, Artificial Sequence
  Description of Artificial Sequence: Synthetic oligonucleotide
gagccgucuuuguaugcac

SEQ ID NO: 1920778 - RNA, 19 nt, Artificial Sequence
  Description of Artificial Sequence: Synthetic oligonucleotide
cugagaauaucccgaagcu

SEQ ID NO: 1920779 - RNA, 19 nt, Artificial Sequence
  Description of Artificial Sequence: Synthetic oligonucleotide
ugaaugcagccaguuccug

SEQ ID NO: 1920780 - RNA, 19 nt, Artificial Sequence
  Description of Artificial Sequence: Synthetic oligonucleotide
uuuguccagcaaucagcaa

SEQ ID NO: 1920781 - RNA, 19 nt, Artificial Sequence
  Description of Artificial Sequence: Synthetic oligonucleotide
ccaaaucuugcagaccccg

SEQ ID NO: 1920782 - RNA, 19 nt, Artificial Sequence
  Description of Artificial Sequence: Synthetic oligonucleotide
uaucugggcuccugccuga

SEQ ID NO: 1920783 - RNA, 19 nt, Artificial Sequence
  Description of Artificial Sequence: Synthetic oligonucleotide
gaaguacagacgggaggug

SEQ ID NO: 1920784 - RNA, 19 nt, Artificial Sequence
  Description of Artificial Sequence: Synthetic oligonucleotide
guacagacgggagguguag

SEQ ID NO: 1920785 - RNA, 19 nt, Artificial Sequence
  Description of Artificial Sequence: Synthetic oligonucleotide
aaauugcgggagguccaug

SEQ ID NO: 1920786 - RNA, 19 nt, Artificial Sequence
  Description of Artificial Sequence: Synthetic oligonucleotide
gguguggaaccaguagagg

SEQ ID NO: 1920787 - RNA, 19 nt, Artificial Sequence
  Description of Artificial Sequence: Synthetic oligonucleotide
uggagccgucuuuguaugc

SEQ ID NO: 1920788 - RNA, 19 nt, Artificial Sequence
  Description of Artificial Sequence: Synthetic oligonucleotide
uugacccggugccuauugu

SEQ ID NO: 1920789 - RNA, 19 nt, Artificial Sequence
  Description of Artificial Sequence: Synthetic oligonucleotide
ugcgcagaaccaggucugg

SEQ ID NO: 1920790 - RNA, 19 nt, Artificial Sequence
  Description of Artificial Sequence: Synthetic oligonucleotide
gacgggagguguagaugcg

SEQ ID NO: 1920791 - RNA, 19 nt, Artificial Sequence
  Description of Artificial Sequence: Synthetic oligonucleotide
ucugcguguuugccuuucu

SEQ ID NO: 1920792 - RNA, 19 nt, Artificial Sequence
  Description of Artificial Sequence: Synthetic oligonucleotide
guuccaacgaacgcaucuc

SEQ ID NO: 1920793 - RNA, 19 nt, Artificial Sequence
  Description of Artificial Sequence: Synthetic oligonucleotide
cuuguuauccuggaaucua

SEQ ID NO: 1920794 - RNA, 19 nt, Artificial Sequence
  Description of Artificial Sequence: Synthetic oligonucleotide
cuuaaaguggaaguagaau

SEQ ID NO: 1920795 - RNA, 19 nt, Artificial Sequence
  Description of Artificial Sequence: Synthetic oligonucleotide
agccugcgaagcuuguccu

SEQ ID NO: 1920796 - RNA, 19 nt, Artificial Sequence
  Description of Artificial Sequence: Synthetic oligonucleotide
caucaaugaagaggauuuc

SEQ ID NO: 1920797 - RNA, 19 nt, Artificial Sequence
  Description of Artificial Sequence: Synthetic oligonucleotide
ugguaguccggaucccaaa

SEQ ID NO: 1920798 - RNA, 19 nt, Artificial Sequence
  Description of Artificial Sequence: Synthetic oligonucleotide
ggguuucugagaauauccc

SEQ ID NO: 1920799 - RNA, 19 nt, Artificial Sequence
  Description of Artificial Sequence: Synthetic oligonucleotide
ugacccggugccuauuguu

SEQ ID NO: 1920800 - RNA, 19 nt, Artificial Sequence
  Description of Artificial Sequence: Synthetic oligonucleotide
guguagaugcgcagaacca

SEQ ID NO: 1920801 - RNA, 19 nt, Artificial Sequence
  Description of Artificial Sequence: Synthetic oligonucleotide
agaacggacuuugggaguu

SEQ ID NO: 1920802 - RNA, 19 nt, Artificial Sequence
  Description of Artificial Sequence: Synthetic oligonucleotide
ggacuuugggaguucacaa

SEQ ID NO: 1920803 - RNA, 19 nt, Artificial Sequence
  Description of Artificial Sequence: Synthetic oligonucleotide
gccugaaugacuugccauc

SEQ ID NO: 1920804 - RNA, 19 nt, Artificial Sequence
  Description of Artificial Sequence: Synthetic oligonucleotide
ugguaguaucgaugcugga

SEQ ID NO: 1920805 - RNA, 19 nt, Artificial Sequence
  Description of Artificial Sequence: Synthetic oligonucleotide
auaguagaggcgggagcug

SEQ ID NO: 1920806 - RNA, 19 nt, Artificial Sequence
  Description of Artificial Sequence: Synthetic oligonucleotide
cugcaaggagaauaugucu

SEQ ID NO: 1920807 - RNA, 19 nt, Artificial Sequence
  Description of Artificial Sequence: Synthetic oligonucleotide
ugccugauucagccugcga

SEQ ID NO: 1920808 - RNA, 19 nt, Artificial Sequence
  Description of Artificial Sequence: Synthetic oligonucleotide
ggccauucaccaaaucuug

SEQ ID NO: 1920809 - RNA, 19 nt, Artificial Sequence
  Description of Artificial Sequence: Synthetic oligonucleotide
uugcgguguguguccagga

SEQ ID NO: 1920810 - RNA, 19 nt, Artificial Sequence
  Description of Artificial Sequence: Synthetic oligonucleotide
accccgggacuccuugauc

SEQ ID NO: 1920811 - RNA, 19 nt, Artificial Sequence
  Description of Artificial Sequence: Synthetic oligonucleotide
guagaggcgggagcugaag

SEQ ID NO: 1920812 - RNA, 19 nt, Artificial Sequence
  Description of Artificial Sequence: Synthetic oligonucleotide
ugggcuccugccugauuca

SEQ ID NO: 1920813 - RNA, 19 nt, Artificial Sequence
  Description of Artificial Sequence: Synthetic oligonucleotide
guagcacaagaagguauuc

SEQ ID NO: 1920814 - RNA, 19 nt, Artificial Sequence
  Description of Artificial Sequence: Synthetic oligonucleotide
gcuggacuggcuugacccg

SEQ ID NO: 1920815 - RNA, 19 nt, Artificial Sequence
  Description of Artificial Sequence: Synthetic oligonucleotide
ugucuucucucagcagacu

SEQ ID NO: 1920816 - RNA, 19 nt, Artificial Sequence
  Description of Artificial Sequence: Synthetic oligonucleotide
uacagacgggagguguaga

SEQ ID NO: 1920817 - RNA, 19 nt, Artificial Sequence
  Description of Artificial Sequence: Synthetic oligonucleotide
cuggaucccugaucgccac

SEQ ID NO: 1920818 - RNA, 19 nt, Artificial Sequence
  Description of Artificial Sequence: Synthetic oligonucleotide
ccaacgaacgcaucucauc

SEQ ID NO: 1920819 - RNA, 19 nt, Artificial Sequence
  Description of Artificial Sequence: Synthetic oligonucleotide
auccuuuggagccgucuuu

SEQ ID NO: 1920820 - RNA, 19 nt, Artificial Sequence
  Description of Artificial Sequence: Synthetic oligonucleotide
ggccgaguuccaacgaacg

SEQ ID NO: 1920821 - RNA, 19 nt, Artificial Sequence
  Description of Artificial Sequence: Synthetic oligonucleotide
ugcgaagcuuguccuggua

SEQ ID NO: 1920822 - RNA, 19 nt, Artificial Sequence
  Description of Artificial Sequence: Synthetic oligonucleotide
cgaagguuggcauagcgga

SEQ ID NO: 1920823 - RNA, 19 nt, Artificial Sequence
  Description of Artificial Sequence: Synthetic oligonucleotide
acaguucgggcaggggcuc

SEQ ID NO: 1920824 - RNA, 19 nt, Artificial Sequence
  Description of Artificial Sequence: Synthetic oligonucleotide
ccauucaccaaaucuugca

SEQ ID NO: 1920825 - RNA, 19 nt, Artificial Sequence
  Description of Artificial Sequence: Synthetic oligonucleotide
agaaccaggucugggugau

SEQ ID NO: 1920826 - RNA, 19 nt, Artificial Sequence
  Description of Artificial Sequence: Synthetic oligonucleotide
ggaaguacagacgggaggu

SEQ ID NO: 1920827 - RNA, 19 nt, Artificial Sequence
  Description of Artificial Sequence: Synthetic oligonucleotide
augcgcagaaccaggucug

SEQ ID NO: 1920828 - RNA, 19 nt, Artificial Sequence
  Description of Artificial Sequence: Synthetic oligonucleotide
cagacgggagguguagaug

SEQ ID NO: 1920829 - RNA, 19 nt, Artificial Sequence
  Description of Artificial Sequence: Synthetic oligonucleotide
cgucuuuguaugcaccugc

SEQ ID NO: 1920830 - RNA, 19 nt, Artificial Sequence
  Description of Artificial Sequence: Synthetic oligonucleotide
acccggugccuauuguuaa

SEQ ID NO: 1920831 - RNA, 19 nt, Artificial Sequence
  Description of Artificial Sequence: Synthetic oligonucleotide
cacuccauccuauucacuu

SEQ ID NO: 1920832 - RNA, 19 nt, Artificial Sequence
  Description of Artificial Sequence: Synthetic oligonucleotide
uggaucccugaucgccaca

SEQ ID NO: 1920833 - RNA, 19 nt, Artificial Sequence
  Description of Artificial Sequence: Synthetic oligonucleotide
cauagcggagguucuuaaa

SEQ ID NO: 1920834 - RNA, 19 nt, Artificial Sequence
  Description of Artificial Sequence: Synthetic oligonucleotide
gguaguccggaucccaaaa

SEQ ID NO: 1920835 - RNA, 19 nt, Artificial Sequence
  Description of Artificial Sequence: Synthetic oligonucleotide
gccgaguuccaacgaacgc

SEQ ID NO: 1920836 - RNA, 19 nt, Artificial Sequence
  Description of Artificial Sequence: Synthetic oligonucleotide
acggacuuugggaguucac

SEQ ID NO: 1920837 - RNA, 19 nt, Artificial Sequence
  Description of Artificial Sequence: Synthetic oligonucleotide
gauccuuuggagccgucuu

SEQ ID NO: 1920838 - RNA, 19 nt, Artificial Sequence
  Description of Artificial Sequence: Synthetic oligonucleotide
cuuuggagccgucuuugua

SEQ ID NO: 1920839 - RNA, 19 nt, Artificial Sequence
  Description of Artificial Sequence: Synthetic oligonucleotide
caucauuguccacaaacuu

SEQ ID NO: 1920840 - RNA, 19 nt, Artificial Sequence
  Description of Artificial Sequence: Synthetic oligonucleotide
ccagauuauuccacggcca

SEQ ID NO: 1920841 - RNA, 19 nt, Artificial Sequence
  Description of Artificial Sequence: Synthetic oligonucleotide
cagaccccgggacuccuug

SEQ ID NO: 1920842 - RNA, 19 nt, Artificial Sequence
  Description of Artificial Sequence: Synthetic oligonucleotide
cuucgaagguuggcauagc

SEQ ID NO: 1920843 - RNA, 19 nt, Artificial Sequence
  Description of Artificial Sequence: Synthetic oligonucleotide
caaggccauucaccaaauc

SEQ ID NO: 1920844 - RNA, 19 nt, Artificial Sequence
  Description of Artificial Sequence: Synthetic oligonucleotide
cuuggguguggaaccagua

SEQ ID NO: 1920845 - RNA, 19 nt, Artificial Sequence
  Description of Artificial Sequence: Synthetic oligonucleotide
ccugguacuuccuucucca

SEQ ID NO: 1920846 - RNA, 19 nt, Artificial Sequence
  Description of Artificial Sequence: Synthetic oligonucleotide
uucugcguguuugccuuuc

SEQ ID NO: 1920847 - RNA, 19 nt, Artificial Sequence
  Description of Artificial Sequence: Synthetic oligonucleotide
cgguguguguccaggaagc

SEQ ID NO: 1920848 - RNA, 19 nt, Artificial Sequence
  Description of Artificial Sequence: Synthetic oligonucleotide
ggguccaaguuguagauuu

SEQ ID NO: 1920849 - RNA, 19 nt, Artificial Sequence
  Description of Artificial Sequence: Synthetic oligonucleotide
gcacaagaagguauucuuc

SEQ ID NO: 1920850 - RNA, 19 nt, Artificial Sequence
  Description of Artificial Sequence: Synthetic oligonucleotide
acuggguuucugagaauau

SEQ ID NO: 1920851 - RNA, 19 nt, Artificial Sequence
  Description of Artificial Sequence: Synthetic oligonucleotide
aggucuuccuuugguagua

SEQ ID NO: 1920852 - RNA, 19 nt, Artificial Sequence
  Description of Artificial Sequence: Synthetic oligonucleotide
cacaguucgggcaggggcu

SEQ ID NO: 1920853 - RNA, 19 nt, Artificial Sequence
  Description of Artificial Sequence: Synthetic oligonucleotide
cuuggccgaguuccaacga

SEQ ID NO: 1920854 - RNA, 19 nt, Artificial Sequence
  Description of Artificial Sequence: Synthetic oligonucleotide
gccauucaccaaaucuugc

SEQ ID NO: 1920855 - RNA, 19 nt, Artificial Sequence
  Description of Artificial Sequence: Synthetic oligonucleotide
gaucccugaucgccacaga

SEQ ID NO: 1920856 - RNA, 19 nt, Artificial Sequence
  Description of Artificial Sequence: Synthetic oligonucleotide
uccugguaguccggauccc

SEQ ID NO: 1920857 - RNA, 19 nt, Artificial Sequence
  Description of Artificial Sequence: Synthetic oligonucleotide
cuuugggaguucacaaaau

SEQ ID NO: 1920858 - RNA, 19 nt, Artificial Sequence
  Description of Artificial Sequence: Synthetic oligonucleotide
uugcagaccccgggacucc

SEQ ID NO: 1920859 - RNA, 19 nt, Artificial Sequence
  Description of Artificial Sequence: Synthetic oligonucleotide
gacccggugccuauuguua

SEQ ID NO: 1920860 - RNA, 19 nt, Artificial Sequence
  Description of Artificial Sequence: Synthetic oligonucleotide
ccuggaaucuaaaauuuau

SEQ ID NO: 1920861 - RNA, 19 nt, Artificial Sequence
  Description of Artificial Sequence: Synthetic oligonucleotide
cuuguccugguaguccgga

SEQ ID NO: 1920862 - RNA, 19 nt, Artificial Sequence
  Description of Artificial Sequence: Synthetic oligonucleotide
caccuggaucccugaucgc

SEQ ID NO: 1920863 - RNA, 19 nt, Artificial Sequence
  Description of Artificial Sequence: Synthetic oligonucleotide
agaccccgggacuccuuga

SEQ ID NO: 1920864 - RNA, 19 nt, Artificial Sequence
  Description of Artificial Sequence: Synthetic oligonucleotide
caggugaucuuguacuuuu

SEQ ID NO: 1920865 - RNA, 19 nt, Artificial Sequence
  Description of Artificial Sequence: Synthetic oligonucleotide
ccuauucacuucguagcac

SEQ ID NO: 1920866 - RNA, 19 nt, Artificial Sequence
  Description of Artificial Sequence: Synthetic oligonucleotide
cagcaaauugcgggagguc

SEQ ID NO: 1920867 - RNA, 19 nt, Artificial Sequence
  Description of Artificial Sequence: Synthetic oligonucleotide
ggagccgucuuuguaugca

SEQ ID NO: 1920868 - RNA, 19 nt, Artificial Sequence
  Description of Artificial Sequence: Synthetic oligonucleotide
ccuugauccuuuggagccg

SEQ ID NO: 1920869 - RNA, 19 nt, Artificial Sequence
  Description of Artificial Sequence: Synthetic oligonucleotide
cgaacgcaucucaucaaug

SEQ ID NO: 1920870 - RNA, 19 nt, Artificial Sequence
  Description of Artificial Sequence: Synthetic oligonucleotide
gcauagauaggucuuccuu

SEQ ID NO: 1920871 - RNA, 19 nt, Artificial Sequence
  Description of Artificial Sequence: Synthetic oligonucleotide
ccgaguuccaacgaacgca

SEQ ID NO: 1920872 - RNA, 19 nt, Artificial Sequence
  Description of Artificial Sequence: Synthetic oligonucleotide
gggaguucacaaaauuugu

SEQ ID NO: 1920873 - RNA, 19 nt, Artificial Sequence
  Description of Artificial Sequence: Synthetic oligonucleotide
gcaaauugcgggaggucca

SEQ ID NO: 1920874 - RNA, 19 nt, Artificial Sequence
  Description of Artificial Sequence: Synthetic oligonucleotide
ccugccugauucagccugc

SEQ ID NO: 1920875 - RNA, 19 nt, Artificial Sequence
  Description of Artificial Sequence: Synthetic oligonucleotide
gguccaugacguccaccug

SEQ ID NO: 1920876 - RNA, 19 nt, Artificial Sequence
  Description of Artificial Sequence: Synthetic oligonucleotide
ucugggcuccugccugauu

SEQ ID NO: 1920877 - RNA, 19 nt, Artificial Sequence
  Description of Artificial Sequence: Synthetic oligonucleotide
cgaccccuuggcaaagggg

SEQ ID NO: 1920878 - RNA, 19 nt, Artificial Sequence
  Description of Artificial Sequence: Synthetic oligonucleotide
uggcuugacccggugccua

SEQ ID NO: 1920879 - RNA, 19 nt, Artificial Sequence
  Description of Artificial Sequence: Synthetic oligonucleotide
gaacggacuuugggaguuc

SEQ ID NO: 1920880 - RNA, 19 nt, Artificial Sequence
  Description of Artificial Sequence: Synthetic oligonucleotide
cucagcagacucacugggu

SEQ ID NO: 1920881 - RNA, 19 nt, Artificial Sequence
  Description of Artificial Sequence: Synthetic oligonucleotide
cagaacggacuuugggagu

SEQ ID NO: 1920882 - RNA, 19 nt, Artificial Sequence
  Description of Artificial Sequence: Synthetic oligonucleotide
gucuuuguaugcaccugcu

SEQ ID NO: 1920883 - RNA, 19 nt, Artificial Sequence
  Description of Artificial Sequence: Synthetic oligonucleotide
aguucgggcaggggcucca

SEQ ID NO: 1920884 - RNA, 19 nt, Artificial Sequence
  Description of Artificial Sequence: Synthetic oligonucleotide
cuuguuuugcaggcagccu

SEQ ID NO: 1920885 - RNA, 19 nt, Artificial Sequence
  Description of Artificial Sequence: Synthetic oligonucleotide
gguagcauagauaggucuu

SEQ ID NO: 1920886 - RNA, 19 nt, Artificial Sequence
  Description of Artificial Sequence: Synthetic oligonucleotide
gaguuccaacgaacgcauc

SEQ ID NO: 1920887 - RNA, 19 nt, Artificial Sequence
  Description of Artificial Sequence: Synthetic oligonucleotide
gcagcuaucugggcuccug

SEQ ID NO: 1920888 - RNA, 19 nt, Artificial Sequence
  Description of Artificial Sequence: Synthetic oligonucleotide
ggcacaguucgggcagggg

SEQ ID NO: 1920889 - RNA, 19 nt, Artificial Sequence
  Description of Artificial Sequence: Synthetic oligonucleotide
gugagguagcaggugauuu

SEQ ID NO: 1920890 - RNA, 19 nt, Artificial Sequence
  Description of Artificial Sequence: Synthetic oligonucleotide
ccuggaucccugaucgcca

SEQ ID NO: 1920891 - RNA, 19 nt, Artificial Sequence
  Description of Artificial Sequence: Synthetic oligonucleotide
gccugcgaagcuuguccug

SEQ ID NO: 1920892 - RNA, 19 nt, Artificial Sequence
  Description of Artificial Sequence: Synthetic oligonucleotide
ccggugccuauuguuaaac

SEQ ID NO: 1920893 - RNA, 19 nt, Artificial Sequence
  Description of Artificial Sequence: Synthetic oligonucleotide
ggccugaaugacuugccau

SEQ ID NO: 1920894 - RNA, 19 nt, Artificial Sequence
  Description of Artificial Sequence: Synthetic oligonucleotide
cucagguugcggugugugu

SEQ ID NO: 1920895 - RNA, 19 nt, Artificial Sequence
  Description of Artificial Sequence: Synthetic oligonucleotide
ucuuuccauucaggacaau

SEQ ID NO: 1920896 - RNA, 19 nt, Artificial Sequence
  Description of Artificial Sequence: Synthetic oligonucleotide
cuugauccuuuggagccgu

SEQ ID NO: 1920897 - RNA, 19 nt, Artificial Sequence
  Description of Artificial Sequence: Synthetic oligonucleotide
caguucgggcaggggcucc

SEQ ID NO: 1920898 - RNA, 19 nt, Artificial Sequence
  Description of Artificial Sequence: Synthetic oligonucleotide
guagauuuccaaggccauu

SEQ ID NO: 1920899 - RNA, 19 nt, Artificial Sequence
  Description of Artificial Sequence: Synthetic oligonucleotide
guucgggcaggggcuccag

SEQ ID NO: 1920900 - RNA, 19 nt, Artificial Sequence
  Description of Artificial Sequence: Synthetic oligonucleotide
gaccccgggacuccuugau

SEQ ID NO: 1920901 - RNA, 19 nt, Artificial Sequence
  Description of Artificial Sequence: Synthetic oligonucleotide
ccugaucgccacagacaac

SEQ ID NO: 1920902 - RNA, 19 nt, Artificial Sequence
  Description of Artificial Sequence: Synthetic oligonucleotide
gaaccaggucugggugauc

SEQ ID NO: 1920903 - RNA, 19 nt, Artificial Sequence
  Description of Artificial Sequence: Synthetic oligonucleotide
gggcuccugccugauucag

SEQ ID NO: 1920904 - RNA, 19 nt, Artificial Sequence
  Description of Artificial Sequence: Synthetic oligonucleotide
ccgucuuuguaugcaccug

SEQ ID NO: 1920905 - RNA, 19 nt, Artificial Sequence
  Description of Artificial Sequence: Synthetic oligonucleotide
cggacuuugggaguucaca

SEQ ID NO: 1920906 - RNA, 19 nt, Artificial Sequence
  Description of Artificial Sequence: Synthetic oligonucleotide
caaauugcgggagguccau

SEQ ID NO: 1920907 - RNA, 19 nt, Artificial Sequence
  Description of Artificial Sequence: Synthetic oligonucleotide
ggcgggagcugaagauggc

SEQ ID NO: 1920908 - RNA, 19 nt, Artificial Sequence
  Description of Artificial Sequence: Synthetic oligonucleotide
ccauccuauucacuucgua

SEQ ID NO: 1920909 - RNA, 19 nt, Artificial Sequence
  Description of Artificial Sequence: Synthetic oligonucleotide
gccuauuguuaaacugcaa

SEQ ID NO: 1920910 - RNA, 19 nt, Artificial Sequence
  Description of Artificial Sequence: Synthetic oligonucleotide
ccugguaguccggauccca

SEQ ID NO: 1920911 - RNA, 19 nt, Artificial Sequence
  Description of Artificial Sequence: Synthetic oligonucleotide
cugcgaagcuuguccuggu

SEQ ID NO: 1920912 - RNA, 19 nt, Artificial Sequence
  Description of Artificial Sequence: Synthetic oligonucleotide
gguguguguccaggaagcu

SEQ ID NO: 1920913 - RNA, 19 nt, Artificial Sequence
  Description of Artificial Sequence: Synthetic oligonucleotide
cgaagcuuguccugguagu

SEQ ID NO: 1920914 - RNA, 19 nt, Artificial Sequence
  Description of Artificial Sequence: Synthetic oligonucleotide
cugcguguuugccuuucuu

SEQ ID NO: 1920915 - RNA, 19 nt, Artificial Sequence
  Description of Artificial Sequence: Synthetic oligonucleotide
cggccagaacggacuuugg

SEQ ID NO: 1920916 - RNA, 19 nt, Artificial Sequence
  Description of Artificial Sequence: Synthetic oligonucleotide
cgaguuccaacgaacgcau

SEQ ID NO: 1920917 - RNA, 19 nt, Artificial Sequence
  Description of Artificial Sequence: Synthetic oligonucleotide
cuccugccugauucagccu

SEQ ID NO: 1920918 - RNA, 19 nt, Artificial Sequence
  Description of Artificial Sequence: Synthetic oligonucleotide
caaaggggacaaguucauu

SEQ ID NO: 1920919 - RNA, 19 nt, Artificial Sequence
  Description of Artificial Sequence: Synthetic oligonucleotide
ggugagguagcaggugauu

SEQ ID NO: 1920920 - RNA, 19 nt, Artificial Sequence
  Description of Artificial Sequence: Synthetic oligonucleotide
cauggagguugaugcucuu

SEQ ID NO: 1920921 - RNA, 19 nt, Artificial Sequence
  Description of Artificial Sequence: Synthetic oligonucleotide
ccccuuggcaaaggggaca

SEQ ID NO: 1920922 - RNA, 19 nt, Artificial Sequence
  Description of Artificial Sequence: Synthetic oligonucleotide
gcacuuggccgaguuccaa

SEQ ID NO: 1920923 - RNA, 19 nt, Artificial Sequence
  Description of Artificial Sequence: Synthetic oligonucleotide
ccuuuggagccgucuuugu

SEQ ID NO: 1920924 - RNA, 19 nt, Artificial Sequence
  Description of Artificial Sequence: Synthetic oligonucleotide
ggcuugacccggugccuau

SEQ ID NO: 1920925 - RNA, 19 nt, Artificial Sequence
  Description of Artificial Sequence: Synthetic oligonucleotide
ggucugggugaucgcuuuu

SEQ ID NO: 1920926 - RNA, 19 nt, Artificial Sequence
  Description of Artificial Sequence: Synthetic oligonucleotide
ggucuuccuuugguaguau

SEQ ID NO: 1920927 - RNA, 19 nt, Artificial Sequence
  Description of Artificial Sequence: Synthetic oligonucleotide
cggugccuauuguuaaacu

SEQ ID NO: 1920928 - RNA, 19 nt, Artificial Sequence
  Description of Artificial Sequence: Synthetic oligonucleotide
ccaggugaucuuguacuuu

SEQ ID NO: 1920929 - RNA, 19 nt, Artificial Sequence
  Description of Artificial Sequence: Synthetic oligonucleotide
cacggccagaacggacuuu

SEQ ID NO: 1920930 - RNA, 19 nt, Artificial Sequence
  Description of Artificial Sequence: Synthetic oligonucleotide
gcuugacccggugccuauu

SEQ ID NO: 1920931 - RNA, 19 nt, Artificial Sequence
  Description of Artificial Sequence: Synthetic oligonucleotide
ccacggccagaacggacuu

SEQ ID NO: 1920932 - RNA, 19 nt, Artificial Sequence
  Description of Artificial Sequence: Synthetic oligonucleotide
aaugcauacacuuggccac

SEQ ID NO: 1920933 - RNA, 19 nt, Artificial Sequence
  Description of Artificial Sequence: Synthetic oligonucleotide
uuuauuauagcucuccaca

SEQ ID NO: 1920934 - RNA, 19 nt, Artificial Sequence
  Description of Artificial Sequence: Synthetic oligonucleotide
aaauaugccuucaagauuc

SEQ ID NO: 1920935 - RNA, 19 nt, Artificial Sequence
  Description of Artificial Sequence: Synthetic oligonucleotide
uccuuauacaacuuuaccg

SEQ ID NO: 1920936 - RNA, 19 nt, Artificial Sequence
  Description of Artificial Sequence: Synthetic oligonucleotide
aauuuaaccaacaaggggu

SEQ ID NO: 1920937 - RNA, 19 nt, Artificial Sequence
  Description of Artificial Sequence: Synthetic oligonucleotide
uauuauuuuccacauagga

SEQ ID NO: 1920938 - RNA, 19 nt, Artificial Sequence
  Description of Artificial Sequence: Synthetic oligonucleotide
aacuauuaaaucaacauca

SEQ ID NO: 1920939 - RNA, 19 nt, Artificial Sequence
  Description of Artificial Sequence: Synthetic oligonucleotide
uuauagacugggcugaagg

SEQ ID NO: 1920940 - RNA, 19 nt, Artificial Sequence
  Description of Artificial Sequence: Synthetic oligonucleotide
uguguuccuauacugaggg

SEQ ID NO: 1920941 - RNA, 19 nt, Artificial Sequence
  Description of Artificial Sequence: Synthetic oligonucleotide
aaugccagaguuguguucc

SEQ ID NO: 1920942 - RNA, 19 nt, Artificial Sequence
  Description of Artificial Sequence: Synthetic oligonucleotide
guauucuuuaaauuuaacc

SEQ ID NO: 1920943 - RNA, 19 nt, Artificial Sequence
  Description of Artificial Sequence: Synthetic oligonucleotide
ucuuuaguucccaacaugc

SEQ ID NO: 1920944 - RNA, 19 nt, Artificial Sequence
  Description of Artificial Sequence: Synthetic oligonucleotide
aaaugaguccaacugcuuc

SEQ ID NO: 1920945 - RNA, 19 nt, Artificial Sequence
  Description of Artificial Sequence: Synthetic oligonucleotide
acaguaucaaguuuuguuc

SEQ ID NO: 1920946 - RNA, 19 nt, Artificial Sequence
  Description of Artificial Sequence: Synthetic oligonucleotide
aaugcagauucacuaaaag

SEQ ID NO: 1920947 - RNA, 19 nt, Artificial Sequence
  Description of Artificial Sequence: Synthetic oligonucleotide
aaaugcauacacuuggcca

SEQ ID NO: 1920948 - RNA, 19 nt, Artificial Sequence
  Description of Artificial Sequence: Synthetic oligonucleotide
augcagauucacuaaaagc

SEQ ID NO: 1920949 - RNA, 19 nt, Artificial Sequence
  Description of Artificial Sequence: Synthetic oligonucleotide
aaaucaaaagcugggagag

SEQ ID NO: 1920950 - RNA, 19 nt, Artificial Sequence
  Description of Artificial Sequence: Synthetic oligonucleotide
auacuuagaaaaucaaaag

SEQ ID NO: 1920951 - RNA, 19 nt, Artificial Sequence
  Description of Artificial Sequence: Synthetic oligonucleotide
gaaaaucaaaagcugggag

SEQ ID NO: 1920952 - RNA, 19 nt, Artificial Sequence
  Description of Artificial Sequence: Synthetic oligonucleotide
aucaauauaggauugcaga

SEQ ID NO: 1920953 - RNA, 19 nt, Artificial Sequence
  Description of Artificial Sequence: Synthetic oligonucleotide
uccugaucagauaaaauug

SEQ ID NO: 1920954 - RNA, 19 nt, Artificial Sequence
  Description of Artificial Sequence: Synthetic oligonucleotide
ucgagcauacaucagacca

SEQ ID NO: 1920955 - RNA, 19 nt, Artificial Sequence
  Description of Artificial Sequence: Synthetic oligonucleotide
acaagagcagaacaccugc

SEQ ID NO: 1920956 - RNA, 19 nt, Artificial Sequence
  Description of Artificial Sequence: Synthetic oligonucleotide
uauacaacuuuaccgcagg

SEQ ID NO: 1920957 - RNA, 19 nt, Artificial Sequence
  Description of Artificial Sequence: Synthetic oligonucleotide
aauugccacaucaauauag

SEQ ID NO: 1920958 - RNA, 19 nt, Artificial Sequence
  Description of Artificial Sequence: Synthetic oligonucleotide
gugccuuucaauuuaauug

SEQ ID NO: 1920959 - RNA, 19 nt, Artificial Sequence
  Description of Artificial Sequence: Synthetic oligonucleotide
uuuaccgcaggaaaugcag

SEQ ID NO: 1920960 - RNA, 19 nt, Artificial Sequence
  Description of Artificial Sequence: Synthetic oligonucleotide
uuuguuccguuauagacug

SEQ ID NO: 1920961 - RNA, 19 nt, Artificial Sequence
  Description of Artificial Sequence: Synthetic oligonucleotide
auagaugcuauguucacug

SEQ ID NO: 1920962 - RNA, 19 nt, Artificial Sequence
  Description of Artificial Sequence: Synthetic oligonucleotide
ugaucagauaaaauuguga

SEQ ID NO: 1920963 - RNA, 19 nt, Artificial Sequence
  Description of Artificial Sequence: Synthetic oligonucleotide
ugacugucgaguuaaaugu

SEQ ID NO: 1920964 - RNA, 19 nt, Artificial Sequence
  Description of Artificial Sequence: Synthetic oligonucleotide
aauugugauaggauuuucg

SEQ ID NO: 1920965 - RNA, 19 nt, Artificial Sequence
  Description of Artificial Sequence: Synthetic oligonucleotide
aagagcacuaagcugucag

SEQ ID NO: 1920966 - RNA, 19 nt, Artificial Sequence
  Description of Artificial Sequence: Synthetic oligonucleotide
agaaggauaguggaugugc

SEQ ID NO: 1920967 - RNA, 19 nt, Artificial Sequence
  Description of Artificial Sequence: Synthetic oligonucleotide
auaaaauugugauaggauu

SEQ ID NO: 1920968 - RNA, 19 nt, Artificial Sequence
  Description of Artificial Sequence: Synthetic oligonucleotide
ugccuuucaauuuaauugc

SEQ ID NO: 1920969 - RNA, 19 nt, Artificial Sequence
  Description of Artificial Sequence: Synthetic oligonucleotide
aauagccagaucuggaccu

SEQ ID NO: 1920970 - RNA, 19 nt, Artificial Sequence
  Description of Artificial Sequence: Synthetic oligonucleotide
uaggauugcagaaaugcca

SEQ ID NO: 1920971 - RNA, 19 nt, Artificial Sequence
  Description of Artificial Sequence: Synthetic oligonucleotide
uaaaauugugauaggauuu

SEQ ID NO: 1920972 - RNA, 19 nt, Artificial Sequence
  Description of Artificial Sequence: Synthetic oligonucleotide
cuagugagaaggauagugg

SEQ ID NO: 1920973 - RNA, 19 nt, Artificial Sequence
  Description of Artificial Sequence: Synthetic oligonucleotide
cuuucaauuuaauugccac

SEQ ID NO: 1920974 - RNA, 19 nt, Artificial Sequence
  Description of Artificial Sequence: Synthetic oligonucleotide
uguucacuggacaagagau

SEQ ID NO: 1920975 - RNA, 19 nt, Artificial Sequence
  Description of Artificial Sequence: Synthetic oligonucleotide
uuauacaacuuuaccgcag

SEQ ID NO: 1920976 - RNA, 19 nt, Artificial Sequence
  Description of Artificial Sequence: Synthetic oligonucleotide
aauguuuccuguguuaacu

SEQ ID NO: 1920977 - RNA, 19 nt, Artificial Sequence
  Description of Artificial Sequence: Synthetic oligonucleotide
uggaguauucuuuaaauuu

SEQ ID NO: 1920978 - RNA, 19 nt, Artificial Sequence
  Description of Artificial Sequence: Synthetic oligonucleotide
uggauagaugcuauguuca

SEQ ID NO: 1920979 - RNA, 19 nt, Artificial Sequence
  Description of Artificial Sequence: Synthetic oligonucleotide
uuugcuucgagcauacauc

SEQ ID NO: 1920980 - RNA, 19 nt, Artificial Sequence
  Description of Artificial Sequence: Synthetic oligonucleotide
cuaaaagcagcugaggaag

SEQ ID NO: 1920981 - RNA, 19 nt, Artificial Sequence
  Description of Artificial Sequence: Synthetic oligonucleotide
cuauacugaggguuuaugc

SEQ ID NO: 1920982 - RNA, 19 nt, Artificial Sequence
  Description of Artificial Sequence: Synthetic oligonucleotide
ucagaaguugugacugucg

SEQ ID NO: 1920983 - RNA, 19 nt, Artificial Sequence
  Description of Artificial Sequence: Synthetic oligonucleotide
aacaagggguaaaugaguc

SEQ ID NO: 1920984 - RNA, 19 nt, Artificial Sequence
  Description of Artificial Sequence: Synthetic oligonucleotide
auacaucagaccaaucugc

SEQ ID NO: 1920985 - RNA, 19 nt, Artificial Sequence
  Description of Artificial Sequence: Synthetic oligonucleotide
uuuagcuggacaacuucag

SEQ ID NO: 1920986 - RNA, 19 nt, Artificial Sequence
  Description of Artificial Sequence: Synthetic oligonucleotide
aguaucaaguuuuguuccg

SEQ ID NO: 1920987 - RNA, 19 nt, Artificial Sequence
  Description of Artificial Sequence: Synthetic oligonucleotide
gaaacuauuaaaucaacau

SEQ ID NO: 1920988 - RNA, 19 nt, Artificial Sequence
  Description of Artificial Sequence: Synthetic oligonucleotide
uuucauacacuccucgacu

SEQ ID NO: 1920989 - RNA, 19 nt, Artificial Sequence
  Description of Artificial Sequence: Synthetic oligonucleotide
accaacaagggguaaauga

SEQ ID NO: 1920990 - RNA, 19 nt, Artificial Sequence
  Description of Artificial Sequence: Synthetic oligonucleotide
ugaacaagaugagcaaugg

SEQ ID NO: 1920991 - RNA, 19 nt, Artificial Sequence
  Description of Artificial Sequence: Synthetic oligonucleotide
uuuauucuagugagaagga

SEQ ID NO: 1920992 - RNA, 19 nt, Artificial Sequence
  Description of Artificial Sequence: Synthetic oligonucleotide
uauucuagugagaaggaua

SEQ ID NO: 1920993 - RNA, 19 nt, Artificial Sequence
  Description of Artificial Sequence: Synthetic oligonucleotide
auugugauaggauuuucga

SEQ ID NO: 1920994 - RNA, 19 nt, Artificial Sequence
  Description of Artificial Sequence: Synthetic oligonucleotide
uuccugaucagauaaaauu

SEQ ID NO: 1920995 - RNA, 19 nt, Artificial Sequence
  Description of Artificial Sequence: Synthetic oligonucleotide
auagaagagcacuaagcug

SEQ ID NO: 1920996 - RNA, 19 nt, Artificial Sequence
  Description of Artificial Sequence: Synthetic oligonucleotide
gauaggauuuucgaguccc

SEQ ID NO: 1920997 - RNA, 19 nt, Artificial Sequence
  Description of Artificial Sequence: Synthetic oligonucleotide
uugugauaggauuuucgag

SEQ ID NO: 1920998 - RNA, 19 nt, Artificial Sequence
  Description of Artificial Sequence: Synthetic oligonucleotide
acaagggguaaaugagucc

SEQ ID NO: 1920999 - RNA, 19 nt, Artificial Sequence
  Description of Artificial Sequence: Synthetic oligonucleotide
cagaucuggaccuuucugg

SEQ ID NO: 1921000 - RNA, 19 nt, Artificial Sequence
  Description of Artificial Sequence: Synthetic oligonucleotide
uguacauauuauuuuccac

SEQ ID NO: 1921001 - RNA, 19 nt, Artificial Sequence
  Description of Artificial Sequence: Synthetic oligonucleotide
aguuaaauguuuccugugu

SEQ ID NO: 1921002 - RNA, 19 nt, Artificial Sequence
  Description of Artificial Sequence: Synthetic oligonucleotide
uccguuauagacugggcug

SEQ ID NO: 1921003 - RNA, 19 nt, Artificial Sequence
  Description of Artificial Sequence: Synthetic oligonucleotide
auucuagugagaaggauag

SEQ ID NO: 1921004 - RNA, 19 nt, Artificial Sequence
  Description of Artificial Sequence: Synthetic oligonucleotide
ucgacuuucuuugugggag

SEQ ID NO: 1921005 - RNA, 19 nt, Artificial Sequence
  Description of Artificial Sequence: Synthetic oligonucleotide
ucgaguuaaauguuuccug

SEQ ID NO: 1921006 - RNA, 19 nt, Artificial Sequence
  Description of Artificial Sequence: Synthetic oligonucleotide
ucaaguuuuguuccguuau

SEQ ID NO: 1921007 - RNA, 19 nt, Artificial Sequence
  Description of Artificial Sequence: Synthetic oligonucleotide
cugaaggaaaugcauacac

SEQ ID NO: 1921008 - RNA, 19 nt, Artificial Sequence
  Description of Artificial Sequence: Synthetic oligonucleotide
cuuuauuauagcucuccac

SEQ ID NO: 1921009 - RNA, 19 nt, Artificial Sequence
  Description of Artificial Sequence: Synthetic oligonucleotide
uccugcuucuuucauacac

SEQ ID NO: 1921010 - RNA, 19 nt, Artificial Sequence
  Description of Artificial Sequence: Synthetic oligonucleotide
acugggcugaaggaaaugc

SEQ ID NO: 1921011 - RNA, 19 nt, Artificial Sequence
  Description of Artificial Sequence: Synthetic oligonucleotide
ucaggaggucuuuaguucc

SEQ ID NO: 1921012 - RNA, 19 nt, Artificial Sequence
  Description of Artificial Sequence: Synthetic oligonucleotide
agauaaaauugugauagga

SEQ ID NO: 1921013 - RNA, 19 nt, Artificial Sequence
  Description of Artificial Sequence: Synthetic oligonucleotide
aaauauggcaggucuuuau

SEQ ID NO: 1921014 - RNA, 19 nt, Artificial Sequence
  Description of Artificial Sequence: Synthetic oligonucleotide
uguaaacaguuucugccac

SEQ ID NO: 1921015 - RNA, 19 nt, Artificial Sequence
  Description of Artificial Sequence: Synthetic oligonucleotide
aguagcauagaagagcacu

SEQ ID NO: 1921016 - RNA, 19 nt, Artificial Sequence
  Description of Artificial Sequence: Synthetic oligonucleotide
aacuuuaccgcaggaaaug

SEQ ID NO: 1921017 - RNA, 19 nt, Artificial Sequence
  Description of Artificial Sequence: Synthetic oligonucleotide
cuugaauagccagaucugg

SEQ ID NO: 1921018 - RNA, 19 nt, Artificial Sequence
  Description of Artificial Sequence: Synthetic oligonucleotide
uuccguuauagacugggcu

SEQ ID NO: 1921019 - RNA, 19 nt, Artificial Sequence
  Description of Artificial Sequence: Synthetic oligonucleotide
caucaauauaggauugcag

SEQ ID NO: 1921020 - RNA, 19 nt, Artificial Sequence
  Description of Artificial Sequence: Synthetic oligonucleotide
aaauugugauaggauuuuc

SEQ ID NO: 1921021 - RNA, 19 nt, Artificial Sequence
  Description of Artificial Sequence: Synthetic oligonucleotide
gguaaaugaguccaacugc

SEQ ID NO: 1921022 - RNA, 19 nt, Artificial Sequence
  Description of Artificial Sequence: Synthetic oligonucleotide
aauauggcaggucuuuauu

SEQ ID NO: 1921023 - RNA, 19 nt, Artificial Sequence
  Description of Artificial Sequence: Synthetic oligonucleotide
gaucagauaaaauugugau

SEQ ID NO: 1921024 - RNA, 19 nt, Artificial Sequence
  Description of Artificial Sequence: Synthetic oligonucleotide
uugaauagccagaucugga

SEQ ID NO: 1921025 - RNA, 19 nt, Artificial Sequence
  Description of Artificial Sequence: Synthetic oligonucleotide
ugucucaccaaugccagag

SEQ ID NO: 1921026 - RNA, 19 nt, Artificial Sequence
  Description of Artificial Sequence: Synthetic oligonucleotide
guuuaugcugccaucacug

SEQ ID NO: 1921027 - RNA, 19 nt, Artificial Sequence
  Description of Artificial Sequence: Synthetic oligonucleotide
acuggaguauucuuuaaau

SEQ ID NO: 1921028 - RNA, 19 nt, Artificial Sequence
  Description of Artificial Sequence: Synthetic oligonucleotide
auuuaacaccagaaauucc

SEQ ID NO: 1921029 - RNA, 19 nt, Artificial Sequence
  Description of Artificial Sequence: Synthetic oligonucleotide
gaguuguguuccuauacug

SEQ ID NO: 1921030 - RNA, 19 nt, Artificial Sequence
  Description of Artificial Sequence: Synthetic oligonucleotide
ugaaugcagauucacuaaa

SEQ ID NO: 1921031 - RNA, 19 nt, Artificial Sequence
  Description of Artificial Sequence: Synthetic oligonucleotide
auggccaaaauaugccuuc

SEQ ID NO: 1921032 - RNA, 19 nt, Artificial Sequence
  Description of Artificial Sequence: Synthetic oligonucleotide
uauagacugggcugaagga

SEQ ID NO: 1921033 - RNA, 19 nt, Artificial Sequence
  Description of Artificial Sequence: Synthetic oligonucleotide
uuuaagccacaguaucaag

SEQ ID NO: 1921034 - RNA, 19 nt, Artificial Sequence
  Description of Artificial Sequence: Synthetic oligonucleotide
ugcaugccaaguagcauag

SEQ ID NO: 1921035 - RNA, 19 nt, Artificial Sequence
  Description of Artificial Sequence: Synthetic oligonucleotide
ucuuggauagaugcuaugu

SEQ ID NO: 1921036 - RNA, 19 nt, Artificial Sequence
  Description of Artificial Sequence: Synthetic oligonucleotide
uuauuauagcucuccacau

SEQ ID NO: 1921037 - RNA, 19 nt, Artificial Sequence
  Description of Artificial Sequence: Synthetic oligonucleotide
gauguaggggcauccauca

SEQ ID NO: 1921038 - RNA, 19 nt, Artificial Sequence
  Description of Artificial Sequence: Synthetic oligonucleotide
ugucgaguuaaauguuucc

SEQ ID NO: 1921039 - RNA, 19 nt, Artificial Sequence
  Description of Artificial Sequence: Synthetic oligonucleotide
agcauagaagagcacuaag

SEQ ID NO: 1921040 - RNA, 19 nt, Artificial Sequence
  Description of Artificial Sequence: Synthetic oligonucleotide
cuuccuuauacaacuuuac

SEQ ID NO: 1921041 - RNA, 19 nt, Artificial Sequence
  Description of Artificial Sequence: Synthetic oligonucleotide
uugcuucgagcauacauca

SEQ ID NO: 1921042 - RNA, 19 nt, Artificial Sequence
  Description of Artificial Sequence: Synthetic oligonucleotide
aagauuccccuuccuacug

SEQ ID NO: 1921043 - RNA, 19 nt, Artificial Sequence
  Description of Artificial Sequence: Synthetic oligonucleotide
aaaauugugauaggauuuu

SEQ ID NO: 1921044 - RNA, 19 nt, Artificial Sequence
  Description of Artificial Sequence: Synthetic oligonucleotide
gacaagagauccuguuuag

SEQ ID NO: 1921045 - RNA, 19 nt, Artificial Sequence
  Description of Artificial Sequence: Synthetic oligonucleotide
auuauuuuccacauaggaa

SEQ ID NO: 1921046 - RNA, 19 nt, Artificial Sequence
  Description of Artificial Sequence: Synthetic oligonucleotide
auugccacaucaauauagg

SEQ ID NO: 1921047 - RNA, 19 nt, Artificial Sequence
  Description of Artificial Sequence: Synthetic oligonucleotide
gaguuaaauguuuccugug

SEQ ID NO: 1921048 - RNA, 19 nt, Artificial Sequence
  Description of Artificial Sequence: Synthetic oligonucleotide
aaaagcagcugaggaagag

SEQ ID NO: 1921049 - RNA, 19 nt, Artificial Sequence
  Description of Artificial Sequence: Synthetic oligonucleotide
agcaauggucuuugaaguc

SEQ ID NO: 1921050 - RNA, 19 nt, Artificial Sequence
  Description of Artificial Sequence: Synthetic oligonucleotide
uaagacacugggcucucgc

SEQ ID NO: 1921051 - RNA, 19 nt, Artificial Sequence
  Description of Artificial Sequence: Synthetic oligonucleotide
ucacuaaaagcagcugagg

SEQ ID NO: 1921052 - RNA, 19 nt, Artificial Sequence
  Description of Artificial Sequence: Synthetic oligonucleotide
acuuuaccgcaggaaaugc

SEQ ID NO: 1921053 - RNA, 19 nt, Artificial Sequence
  Description of Artificial Sequence: Synthetic oligonucleotide
agaguuguguuccuauacu

SEQ ID NO: 1921054 - RNA, 19 nt, Artificial Sequence
  Description of Artificial Sequence: Synthetic oligonucleotide
cagaacaccugcuuuuccc

SEQ ID NO: 1921055 - RNA, 19 nt, Artificial Sequence
  Description of Artificial Sequence: Synthetic oligonucleotide
aaggauaguggaugugccu

SEQ ID NO: 1921056 - RNA, 19 nt, Artificial Sequence
  Description of Artificial Sequence: Synthetic oligonucleotide
uauagcucuccacauuaaa

SEQ ID NO: 1921057 - RNA, 19 nt, Artificial Sequence
  Description of Artificial Sequence: Synthetic oligonucleotide
cugaucagauaaaauugug

SEQ ID NO: 1921058 - RNA, 19 nt, Artificial Sequence
  Description of Artificial Sequence: Synthetic oligonucleotide
gaugcuauguucacuggac

SEQ ID NO: 1921059 - RNA, 19 nt, Artificial Sequence
  Description of Artificial Sequence: Synthetic oligonucleotide
agagucccuggacaagagc

SEQ ID NO: 1921060 - RNA, 19 nt, Artificial Sequence
  Description of Artificial Sequence: Synthetic oligonucleotide
cuggacaagagcagaacac

SEQ ID NO: 1921061 - RNA, 19 nt, Artificial Sequence
  Description of Artificial Sequence: Synthetic oligonucleotide
uggacaagagcagaacacc

SEQ ID NO: 1921062 - RNA, 19 nt, Artificial Sequence
  Description of Artificial Sequence: Synthetic oligonucleotide
uucaggaggucuuuaguuc

SEQ ID NO: 1921063 - RNA, 19 nt, Artificial Sequence
  Description of Artificial Sequence: Synthetic oligonucleotide
acauaggaaacuauuaaau

SEQ ID NO: 1921064 - RNA, 19 nt, Artificial Sequence
  Description of Artificial Sequence: Synthetic oligonucleotide
cacuccucgacuuucuuug

SEQ ID NO: 1921065 - RNA, 19 nt, Artificial Sequence
  Description of Artificial Sequence: Synthetic oligonucleotide
ggguaaaugaguccaacug

SEQ ID NO: 1921066 - RNA, 19 nt, Artificial Sequence
  Description of Artificial Sequence: Synthetic oligonucleotide
acaagagauccuguuuagc

SEQ ID NO: 1921067 - RNA, 19 nt, Artificial Sequence
  Description of Artificial Sequence: Synthetic oligonucleotide
cuucgagcauacaucagac

SEQ ID NO: 1921068 - RNA, 19 nt, Artificial Sequence
  Description of Artificial Sequence: Synthetic oligonucleotide
aauaugccuucaagauucc

SEQ ID NO: 1921069 - RNA, 19 nt, Artificial Sequence
  Description of Artificial Sequence: Synthetic oligonucleotide
aucugcacaauuuauucua

SEQ ID NO: 1921070 - RNA, 19 nt, Artificial Sequence
  Description of Artificial Sequence: Synthetic oligonucleotide
uguaggggcauccaucaua

SEQ ID NO: 1921071 - RNA, 19 nt, Artificial Sequence
  Description of Artificial Sequence: Synthetic oligonucleotide
agaaaaucaaaagcuggga

SEQ ID NO: 1921072 - RNA, 19 nt, Artificial Sequence
  Description of Artificial Sequence: Synthetic oligonucleotide
uauggcaggucuuuauuau

SEQ ID NO: 1921073 - RNA, 19 nt, Artificial Sequence
  Description of Artificial Sequence: Synthetic oligonucleotide
aguccaacugcuucugucu

SEQ ID NO: 1921074 - RNA, 19 nt, Artificial Sequence
  Description of Artificial Sequence: Synthetic oligonucleotide
uucaagauuccccuuccua

SEQ ID NO: 1921075 - RNA, 19 nt, Artificial Sequence
  Description of Artificial Sequence: Synthetic oligonucleotide
cagauaaaauugugauagg

SEQ ID NO: 1921076 - RNA, 19 nt, Artificial Sequence
  Description of Artificial Sequence: Synthetic oligonucleotide
ugauaggauuuucgagucc

SEQ ID NO: 1921077 - RNA, 19 nt, Artificial Sequence
  Description of Artificial Sequence: Synthetic oligonucleotide
gucuuuauuauagcucucc

SEQ ID NO: 1921078 - RNA, 19 nt, Artificial Sequence
  Description of Artificial Sequence: Synthetic oligonucleotide
uauuauagcucuccacauu

SEQ ID NO: 1921079 - RNA, 19 nt, Artificial Sequence
  Description of Artificial Sequence: Synthetic oligonucleotide
cuuccuaucucuguaaaca

SEQ ID NO: 1921080 - RNA, 19 nt, Artificial Sequence
  Description of Artificial Sequence: Synthetic oligonucleotide
gggagcuugagauguaggg

SEQ ID NO: 1921081 - RNA, 19 nt, Artificial Sequence
  Description of Artificial Sequence: Synthetic oligonucleotide
aacaugcccucguaagaca

SEQ ID NO: 1921082 - RNA, 19 nt, Artificial Sequence
  Description of Artificial Sequence: Synthetic oligonucleotide
uuugugggagcuugagaug

SEQ ID NO: 1921083 - RNA, 19 nt, Artificial Sequence
  Description of Artificial Sequence: Synthetic oligonucleotide
uagaugcuauguucacugg

SEQ ID NO: 1921084 - RNA, 19 nt, Artificial Sequence
  Description of Artificial Sequence: Synthetic oligonucleotide
auuagcaugcugaggaaug

SEQ ID NO: 1921085 - RNA, 19 nt, Artificial Sequence
  Description of Artificial Sequence: Synthetic oligonucleotide
agaugcuauguucacugga

SEQ ID NO: 1921086 - RNA, 19 nt, Artificial Sequence
  Description of Artificial Sequence: Synthetic oligonucleotide
gaaggauaguggaugugcc

SEQ ID NO: 1921087 - RNA, 19 nt, Artificial Sequence
  Description of Artificial Sequence: Synthetic oligonucleotide
aggaaacuauuaaaucaac

SEQ ID NO: 1921088 - RNA, 19 nt, Artificial Sequence
  Description of Artificial Sequence: Synthetic oligonucleotide
uuaugcugccaucacugaa

SEQ ID NO: 1921089 - RNA, 19 nt, Artificial Sequence
  Description of Artificial Sequence: Synthetic oligonucleotide
gucuuuaguucccaacaug

SEQ ID NO: 1921090 - RNA, 19 nt, Artificial Sequence
  Description of Artificial Sequence: Synthetic oligonucleotide
ucuuccuaucucuguaaac

SEQ ID NO: 1921091 - RNA, 19 nt, Artificial Sequence
  Description of Artificial Sequence: Synthetic oligonucleotide
uaccgcaggaaaugcagug

SEQ ID NO: 1921092 - RNA, 19 nt, Artificial Sequence
  Description of Artificial Sequence: Synthetic oligonucleotide
cauagaagagcacuaagcu

SEQ ID NO: 1921093 - RNA, 19 nt, Artificial Sequence
  Description of Artificial Sequence: Synthetic oligonucleotide
agauguaggggcauccauc

SEQ ID NO: 1921094 - RNA, 19 nt, Artificial Sequence
  Description of Artificial Sequence: Synthetic oligonucleotide
uuuaugcugccaucacuga

SEQ ID NO: 1921095 - RNA, 19 nt, Artificial Sequence
  Description of Artificial Sequence: Synthetic oligonucleotide
uuaaccaacaagggguaaa

SEQ ID NO: 1921096 - RNA, 19 nt, Artificial Sequence
  Description of Artificial Sequence: Synthetic oligonucleotide
agaacaccugcuuuuccca

SEQ ID NO: 1921097 - RNA, 19 nt, Artificial Sequence
  Description of Artificial Sequence: Synthetic oligonucleotide
gugacguuuugcuucgagc

SEQ ID NO: 1921098 - RNA, 19 nt, Artificial Sequence
  Description of Artificial Sequence: Synthetic oligonucleotide
gugauaggauuuucgaguc

SEQ ID NO: 1921099 - RNA, 19 nt, Artificial Sequence
  Description of Artificial Sequence: Synthetic oligonucleotide
agugacguuuugcuucgag

SEQ ID NO: 1921100 - RNA, 19 nt, Artificial Sequence
  Description of Artificial Sequence: Synthetic oligonucleotide
cagaguuguguuccuauac

SEQ ID NO: 1921101 - RNA, 19 nt, Artificial Sequence
  Description of Artificial Sequence: Synthetic oligonucleotide
agauuccccuuccuacugg

SEQ ID NO: 1921102 - RNA, 19 nt, Artificial Sequence
  Description of Artificial Sequence: Synthetic oligonucleotide
cacuaaaagcagcugagga

SEQ ID NO: 1921103 - RNA, 19 nt, Artificial Sequence
  Description of Artificial Sequence: Synthetic oligonucleotide
gaggucuuuaguucccaac

SEQ ID NO: 1921104 - RNA, 19 nt, Artificial Sequence
  Description of Artificial Sequence: Synthetic oligonucleotide
accaaugccagaguugugu

SEQ ID NO: 1921105 - RNA, 19 nt, Artificial Sequence
  Description of Artificial Sequence: Synthetic oligonucleotide
aggauuuucgagucccgcu

SEQ ID NO: 1921106 - RNA, 19 nt, Artificial Sequence
  Description of Artificial Sequence: Synthetic oligonucleotide
uccuacuggaguauucuuu

SEQ ID NO: 1921107 - RNA, 19 nt, Artificial Sequence
  Description of Artificial Sequence: Synthetic oligonucleotide
gccaaaauaugccuucaag

SEQ ID NO: 1921108 - RNA, 19 nt, Artificial Sequence
  Description of Artificial Sequence: Synthetic oligonucleotide
uucgagcauacaucagacc

SEQ ID NO: 1921109 - RNA, 19 nt, Artificial Sequence
  Description of Artificial Sequence: Synthetic oligonucleotide
auauggcaggucuuuauua

SEQ ID NO: 1921110 - RNA, 19 nt, Artificial Sequence
  Description of Artificial Sequence: Synthetic oligonucleotide
gacaagagcagaacaccug

SEQ ID NO: 1921111 - RNA, 19 nt, Artificial Sequence
  Description of Artificial Sequence: Synthetic oligonucleotide
acuaagcugucagaaguug

SEQ ID NO: 1921112 - RNA, 19 nt, Artificial Sequence
  Description of Artificial Sequence: Synthetic oligonucleotide
uugccacaucaauauagga

SEQ ID NO: 1921113 - RNA, 19 nt, Artificial Sequence
  Description of Artificial Sequence: Synthetic oligonucleotide
uacaacuuuaccgcaggaa

SEQ ID NO: 1921114 - RNA, 19 nt, Artificial Sequence
  Description of Artificial Sequence: Synthetic oligonucleotide
uuucgagucccgcuucuaa

SEQ ID NO: 1921115 - RNA, 19 nt, Artificial Sequence
  Description of Artificial Sequence: Synthetic oligonucleotide
uugagauguaggggcaucc

SEQ ID NO: 1921116 - RNA, 19 nt, Artificial Sequence
  Description of Artificial Sequence: Synthetic oligonucleotide
auggccucuuccuaucucu

SEQ ID NO: 1921117 - RNA, 19 nt, Artificial Sequence
  Description of Artificial Sequence: Synthetic oligonucleotide
uucauacacuccucgacuu

SEQ ID NO: 1921118 - RNA, 19 nt, Artificial Sequence
  Description of Artificial Sequence: Synthetic oligonucleotide
ucccagaagacgccaugcc

SEQ ID NO: 1921119 - RNA, 19 nt, Artificial Sequence
  Description of Artificial Sequence: Synthetic oligonucleotide
uuauagcucuccacauuaa

SEQ ID NO: 1921120 - RNA, 19 nt, Artificial Sequence
  Description of Artificial Sequence: Synthetic oligonucleotide
ucucaccaaugccagaguu

SEQ ID NO: 1921121 - RNA, 19 nt, Artificial Sequence
  Description of Artificial Sequence: Synthetic oligonucleotide
cucgccuuccuuauacaac

SEQ ID NO: 1921122 - RNA, 19 nt, Artificial Sequence
  Description of Artificial Sequence: Synthetic oligonucleotide
uaguggaugugccuuucaa

SEQ ID NO: 1921123 - RNA, 19 nt, Artificial Sequence
  Description of Artificial Sequence: Synthetic oligonucleotide
gcauagaagagcacuaagc

SEQ ID NO: 1921124 - RNA, 19 nt, Artificial Sequence
  Description of Artificial Sequence: Synthetic oligonucleotide
uuaccgcaggaaaugcagu

SEQ ID NO: 1921125 - RNA, 19 nt, Artificial Sequence
  Description of Artificial Sequence: Synthetic oligonucleotide
uuauucuagugagaaggau

SEQ ID NO: 1921126 - RNA, 19 nt, Artificial Sequence
  Description of Artificial Sequence: Synthetic oligonucleotide
aaguugugacugucgaguu

SEQ ID NO: 1921127 - RNA, 19 nt, Artificial Sequence
  Description of Artificial Sequence: Synthetic oligonucleotide
ucguaagacacugggcucu

SEQ ID NO: 1921128 - RNA, 19 nt, Artificial Sequence
  Description of Artificial Sequence: Synthetic oligonucleotide
aggaaaugcagugacguuu

SEQ ID NO: 1921129 - RNA, 19 nt, Artificial Sequence
  Description of Artificial Sequence: Synthetic oligonucleotide
augagcaauggucuuugaa

SEQ ID NO: 1921130 - RNA, 19 nt, Artificial Sequence
  Description of Artificial Sequence: Synthetic oligonucleotide
caagggguaaaugagucca

SEQ ID NO: 1921131 - RNA, 19 nt, Artificial Sequence
  Description of Artificial Sequence: Synthetic oligonucleotide
agggguaaaugaguccaac

SEQ ID NO: 1921132 - RNA, 19 nt, Artificial Sequence
  Description of Artificial Sequence: Synthetic oligonucleotide
caagagauccuguuuagcu

SEQ ID NO: 1921133 - RNA, 19 nt, Artificial Sequence
  Description of Artificial Sequence: Synthetic oligonucleotide
cacaucaauauaggauugc

SEQ ID NO: 1921134 - RNA, 19 nt, Artificial Sequence
  Description of Artificial Sequence: Synthetic oligonucleotide
cugucgaguuaaauguuuc

SEQ ID NO: 1921135 - RNA, 19 nt, Artificial Sequence
  Description of Artificial Sequence: Synthetic oligonucleotide
ggagcuugagauguagggg

SEQ ID NO: 1921136 - RNA, 19 nt, Artificial Sequence
  Description of Artificial Sequence: Synthetic oligonucleotide
gauuuucgagucccgcuuc

SEQ ID NO: 1921137 - RNA, 19 nt, Artificial Sequence
  Description of Artificial Sequence: Synthetic oligonucleotide
agaagacgccaugccaccc

SEQ ID NO: 1921138 - RNA, 19 nt, Artificial Sequence
  Description of Artificial Sequence: Synthetic oligonucleotide
ucucgccuuccuuauacaa

SEQ ID NO: 1921139 - RNA, 19 nt, Artificial Sequence
  Description of Artificial Sequence: Synthetic oligonucleotide
ucucugcucuucugaaggc

SEQ ID NO: 1921140 - RNA, 19 nt, Artificial Sequence
  Description of Artificial Sequence: Synthetic oligonucleotide
aucagaccaaucugcacaa

SEQ ID NO: 1921141 - RNA, 19 nt, Artificial Sequence
  Description of Artificial Sequence: Synthetic oligonucleotide
uaggauuuucgagucccgc

SEQ ID NO: 1921142 - RNA, 19 nt, Artificial Sequence
  Description of Artificial Sequence: Synthetic oligonucleotide
agagcacuaagcugucaga

SEQ ID NO: 1921143 - RNA, 19 nt, Artificial Sequence
  Description of Artificial Sequence: Synthetic oligonucleotide
guaggggcauccaucauac

SEQ ID NO: 1921144 - RNA, 19 nt, Artificial Sequence
  Description of Artificial Sequence: Synthetic oligonucleotide
augcuauguucacuggaca

SEQ ID NO: 1921145 - RNA, 19 nt, Artificial Sequence
  Description of Artificial Sequence: Synthetic oligonucleotide
caugccaaguagcauagaa

SEQ ID NO: 1921146 - RNA, 19 nt, Artificial Sequence
  Description of Artificial Sequence: Synthetic oligonucleotide
uuagcaugcugaggaaugu

SEQ ID NO: 1921147 - RNA, 19 nt, Artificial Sequence
  Description of Artificial Sequence: Synthetic oligonucleotide
caacaugcccucguaagac

SEQ ID NO: 1921148 - RNA, 19 nt, Artificial Sequence
  Description of Artificial Sequence: Synthetic oligonucleotide
aaccaacaagggguaaaug

SEQ ID NO: 1921149 - RNA, 19 nt, Artificial Sequence
  Description of Artificial Sequence: Synthetic oligonucleotide
acuauuaaaucaacaucau

SEQ ID NO: 1921150 - RNA, 19 nt, Artificial Sequence
  Description of Artificial Sequence: Synthetic oligonucleotide
gaguauucuuuaaauuuaa

SEQ ID NO: 1921151 - RNA, 19 nt, Artificial Sequence
  Description of Artificial Sequence: Synthetic oligonucleotide
ugcuucgagcauacaucag

SEQ ID NO: 1921152 - RNA, 19 nt, Artificial Sequence
  Description of Artificial Sequence: Synthetic oligonucleotide
cagaagacgccaugccacc

SEQ ID NO: 1921153 - RNA, 19 nt, Artificial Sequence
  Description of Artificial Sequence: Synthetic oligonucleotide
guugugacugucgaguuaa

SEQ ID NO: 1921154 - RNA, 19 nt, Artificial Sequence
  Description of Artificial Sequence: Synthetic oligonucleotide
uaaccaacaagggguaaau

SEQ ID NO: 1921155 - RNA, 19 nt, Artificial Sequence
  Description of Artificial Sequence: Synthetic oligonucleotide
uggaugugccuuucaauuu

SEQ ID NO: 1921156 - RNA, 19 nt, Artificial Sequence
  Description of Artificial Sequence: Synthetic oligonucleotide
ggaaacuauuaaaucaaca

SEQ ID NO: 1921157 - RNA, 19 nt, Artificial Sequence
  Description of Artificial Sequence: Synthetic oligonucleotide
auuuucgagucccgcuucu

SEQ ID NO: 1921158 - RNA, 19 nt, Artificial Sequence
  Description of Artificial Sequence: Synthetic oligonucleotide
cauacacuuggccaccuga

SEQ ID NO: 1921159 - RNA, 19 nt, Artificial Sequence
  Description of Artificial Sequence: Synthetic oligonucleotide
uaucaaguuuuguuccguu

SEQ ID NO: 1921160 - RNA, 19 nt, Artificial Sequence
  Description of Artificial Sequence: Synthetic oligonucleotide
guaaaugaguccaacugcu

SEQ ID NO: 1921161 - RNA, 19 nt, Artificial Sequence
  Description of Artificial Sequence: Synthetic oligonucleotide
uuuucccagaagacgccau

SEQ ID NO: 1921162 - RNA, 19 nt, Artificial Sequence
  Description of Artificial Sequence: Synthetic oligonucleotide
auacaacuuuaccgcagga

SEQ ID NO: 1921163 - RNA, 19 nt, Artificial Sequence
  Description of Artificial Sequence: Synthetic oligonucleotide
cucguaagacacugggcuc

SEQ ID NO: 1921164 - RNA, 19 nt, Artificial Sequence
  Description of Artificial Sequence: Synthetic oligonucleotide
ugucagaaguugugacugu

SEQ ID NO: 1921165 - RNA, 19 nt, Artificial Sequence
  Description of Artificial Sequence: Synthetic oligonucleotide
gcagugacguuuugcuucg

SEQ ID NO: 1921166 - RNA, 19 nt, Artificial Sequence
  Description of Artificial Sequence: Synthetic oligonucleotide
cugaaugcagauucacuaa

SEQ ID NO: 1921167 - RNA, 19 nt, Artificial Sequence
  Description of Artificial Sequence: Synthetic oligonucleotide
gauuccccuuccuacugga

SEQ ID NO: 1921168 - RNA, 19 nt, Artificial Sequence
  Description of Artificial Sequence: Synthetic oligonucleotide
uucgagucccgcuucuaau

SEQ ID NO: 1921169 - RNA, 19 nt, Artificial Sequence
  Description of Artificial Sequence: Synthetic oligonucleotide
uaaauauggcaggucuuua

SEQ ID NO: 1921170 - RNA, 19 nt, Artificial Sequence
  Description of Artificial Sequence: Synthetic oligonucleotide
auaggauuuucgagucccg

SEQ ID NO: 1921171 - RNA, 19 nt, Artificial Sequence
  Description of Artificial Sequence: Synthetic oligonucleotide
uccccuuccuacuggagua

SEQ ID NO: 1921172 - RNA, 19 nt, Artificial Sequence
  Description of Artificial Sequence: Synthetic oligonucleotide
ugagauguaggggcaucca

SEQ ID NO: 1921173 - RNA, 19 nt, Artificial Sequence
  Description of Artificial Sequence: Synthetic oligonucleotide
ccagaagacgccaugccac

SEQ ID NO: 1921174 - RNA, 19 nt, Artificial Sequence
  Description of Artificial Sequence: Synthetic oligonucleotide
caauauaggauugcagaaa

SEQ ID NO: 1921175 - RNA, 19 nt, Artificial Sequence
  Description of Artificial Sequence: Synthetic oligonucleotide
auauaggauugcagaaaug

SEQ ID NO: 1921176 - RNA, 19 nt, Artificial Sequence
  Description of Artificial Sequence: Synthetic oligonucleotide
cuuuaccgcaggaaaugca

SEQ ID NO: 1921177 - RNA, 19 nt, Artificial Sequence
  Description of Artificial Sequence: Synthetic oligonucleotide
gaagacgccaugccaccca

SEQ ID NO: 1921178 - RNA, 19 nt, Artificial Sequence
  Description of Artificial Sequence: Synthetic oligonucleotide
gcuucgagcauacaucaga

SEQ ID NO: 1921179 - RNA, 19 nt, Artificial Sequence
  Description of Artificial Sequence: Synthetic oligonucleotide
ucauacacuccucgacuuu

SEQ ID NO: 1921180 - RNA, 19 nt, Artificial Sequence
  Description of Artificial Sequence: Synthetic oligonucleotide
caggaggucuuuaguuccc

SEQ ID NO: 1921181 - RNA, 19 nt, Artificial Sequence
  Description of Artificial Sequence: Synthetic oligonucleotide
uccaaagguaauggccucu

SEQ ID NO: 1921182 - RNA, 19 nt, Artificial Sequence
  Description of Artificial Sequence: Synthetic oligonucleotide
guuauagacugggcugaag

SEQ ID NO: 1921183 - RNA, 19 nt, Artificial Sequence
  Description of Artificial Sequence: Synthetic oligonucleotide
ucgagucccgcuucuaauu

SEQ ID NO: 1921184 - RNA, 19 nt, Artificial Sequence
  Description of Artificial Sequence: Synthetic oligonucleotide
uuuaaccaacaagggguaa

SEQ ID NO: 1921185 - RNA, 19 nt, Artificial Sequence
  Description of Artificial Sequence: Synthetic oligonucleotide
gaccuuucuggacuccauc

SEQ ID NO: 1921186 - RNA, 19 nt, Artificial Sequence
  Description of Artificial Sequence: Synthetic oligonucleotide
cacaguaucaaguuuuguu

SEQ ID NO: 1921187 - RNA, 19 nt, Artificial Sequence
  Description of Artificial Sequence: Synthetic oligonucleotide
ugcccucguaagacacugg

SEQ ID NO: 1921188 - RNA, 19 nt, Artificial Sequence
  Description of Artificial Sequence: Synthetic oligonucleotide
gagaaggauaguggaugug

SEQ ID NO: 1921189 - RNA, 19 nt, Artificial Sequence
  Description of Artificial Sequence: Synthetic oligonucleotide
cagcuccaaagguaauggc

SEQ ID NO: 1921190 - RNA, 19 nt, Artificial Sequence
  Description of Artificial Sequence: Synthetic oligonucleotide
gagcacuaagcugucagaa

SEQ ID NO: 1921191 - RNA, 19 nt, Artificial Sequence
  Description of Artificial Sequence: Synthetic oligonucleotide
aggauaguggaugugccuu

SEQ ID NO: 1921192 - RNA, 19 nt, Artificial Sequence
  Description of Artificial Sequence: Synthetic oligonucleotide
gaggguuuaugcugccauc

SEQ ID NO: 1921193 - RNA, 19 nt, Artificial Sequence
  Description of Artificial Sequence: Synthetic oligonucleotide
cucggcagucuccugcccc

SEQ ID NO: 1921194 - RNA, 19 nt, Artificial Sequence
  Description of Artificial Sequence: Synthetic oligonucleotide
uccuguuuagcuggacaac

SEQ ID NO: 1921195 - RNA, 19 nt, Artificial Sequence
  Description of Artificial Sequence: Synthetic oligonucleotide
ggacaagagauccuguuua

SEQ ID NO: 1921196 - RNA, 19 nt, Artificial Sequence
  Description of Artificial Sequence: Synthetic oligonucleotide
acauuagcaugcugaggaa

SEQ ID NO: 1921197 - RNA, 19 nt, Artificial Sequence
  Description of Artificial Sequence: Synthetic oligonucleotide
auuuaaccaacaaggggua

SEQ ID NO: 1921198 - RNA, 19 nt, Artificial Sequence
  Description of Artificial Sequence: Synthetic oligonucleotide
agugagaaggauaguggau

SEQ ID NO: 1921199 - RNA, 19 nt, Artificial Sequence
  Description of Artificial Sequence: Synthetic oligonucleotide
gaacaagaugagcaauggu

SEQ ID NO: 1921200 - RNA, 19 nt, Artificial Sequence
  Description of Artificial Sequence: Synthetic oligonucleotide
ucccaacaugcccucguaa

SEQ ID NO: 1921201 - RNA, 19 nt, Artificial Sequence
  Description of Artificial Sequence: Synthetic oligonucleotide
ggauagaugcuauguucac

SEQ ID NO: 1921202 - RNA, 19 nt, Artificial Sequence
  Description of Artificial Sequence: Synthetic oligonucleotide
aguugugacugucgaguua

SEQ ID NO: 1921203 - RNA, 19 nt, Artificial Sequence
  Description of Artificial Sequence: Synthetic oligonucleotide
gauaguggaugugccuuuc

SEQ ID NO: 1921204 - RNA, 19 nt, Artificial Sequence
  Description of Artificial Sequence: Synthetic oligonucleotide
agauccuguuuagcuggac

SEQ ID NO: 1921205 - RNA, 19 nt, Artificial Sequence
  Description of Artificial Sequence: Synthetic oligonucleotide
augcccucguaagacacug

SEQ ID NO: 1921206 - RNA, 19 nt, Artificial Sequence
  Description of Artificial Sequence: Synthetic oligonucleotide
auuccugaucagauaaaau

SEQ ID NO: 1921207 - RNA, 19 nt, Artificial Sequence
  Description of Artificial Sequence: Synthetic oligonucleotide
cuccaaagguaauggccuc

SEQ ID NO: 1921208 - RNA, 19 nt, Artificial Sequence
  Description of Artificial Sequence: Synthetic oligonucleotide
uggccaaaauaugccuuca

SEQ ID NO: 1921209 - RNA, 19 nt, Artificial Sequence
  Description of Artificial Sequence: Synthetic oligonucleotide
ccugaaugcagauucacua

SEQ ID NO: 1921210 - RNA, 19 nt, Artificial Sequence
  Description of Artificial Sequence: Synthetic oligonucleotide
uuccuacuggaguauucuu

SEQ ID NO: 1921211 - RNA, 19 nt, Artificial Sequence
  Description of Artificial Sequence: Synthetic oligonucleotide
acugucgaguuaaauguuu

SEQ ID NO: 1921212 - RNA, 19 nt, Artificial Sequence
  Description of Artificial Sequence: Synthetic oligonucleotide
agucccuggacaagagcag

SEQ ID NO: 1921213 - RNA, 19 nt, Artificial Sequence
  Description of Artificial Sequence: Synthetic oligonucleotide
gucgaguuaaauguuuccu

SEQ ID NO: 1921214 - RNA, 19 nt, Artificial Sequence
  Description of Artificial Sequence: Synthetic oligonucleotide
agguaauggccucuuccua

SEQ ID NO: 1921215 - RNA, 19 nt, Artificial Sequence
  Description of Artificial Sequence: Synthetic oligonucleotide
cuugagauguaggggcauc

SEQ ID NO: 1921216 - RNA, 19 nt, Artificial Sequence
  Description of Artificial Sequence: Synthetic oligonucleotide
ucggcagucuccugccccu

SEQ ID NO: 1921217 - RNA, 19 nt, Artificial Sequence
  Description of Artificial Sequence: Synthetic oligonucleotide
cuccucgacuuucuuugug

SEQ ID NO: 1921218 - RNA, 19 nt, Artificial Sequence
  Description of Artificial Sequence: Synthetic oligonucleotide
cuuccauuccugaucagau

SEQ ID NO: 1921219 - RNA, 19 nt, Artificial Sequence
  Description of Artificial Sequence: Synthetic oligonucleotide
guuccguuauagacugggc

SEQ ID NO: 1921220 - RNA, 19 nt, Artificial Sequence
  Description of Artificial Sequence: Synthetic oligonucleotide
gcucucgccuuccuuauac

SEQ ID NO: 1921221 - RNA, 19 nt, Artificial Sequence
  Description of Artificial Sequence: Synthetic oligonucleotide
caacaagggguaaaugagu

SEQ ID NO: 1921222 - RNA, 19 nt, Artificial Sequence
  Description of Artificial Sequence: Synthetic oligonucleotide
ccacaucaauauaggauug

SEQ ID NO: 1921223 - RNA, 19 nt, Artificial Sequence
  Description of Artificial Sequence: Synthetic oligonucleotide
gucagaaguugugacuguc

SEQ ID NO: 1921224 - RNA, 19 nt, Artificial Sequence
  Description of Artificial Sequence: Synthetic oligonucleotide
ugccccuccugcuucuuuc

SEQ ID NO: 1921225 - RNA, 19 nt, Artificial Sequence
  Description of Artificial Sequence: Synthetic oligonucleotide
caaagguaauggccucuuc

SEQ ID NO: 1921226 - RNA, 19 nt, Artificial Sequence
  Description of Artificial Sequence: Synthetic oligonucleotide
cuaagcugucagaaguugu

SEQ ID NO: 1921227 - RNA, 19 nt, Artificial Sequence
  Description of Artificial Sequence: Synthetic oligonucleotide
ugucagcuccaaagguaau

SEQ ID NO: 1921228 - RNA, 19 nt, Artificial Sequence
  Description of Artificial Sequence: Synthetic oligonucleotide
aguucccaacaugcccucg

SEQ ID NO: 1921229 - RNA, 19 nt, Artificial Sequence
  Description of Artificial Sequence: Synthetic oligonucleotide
gagguggcuuccauuccug

SEQ ID NO: 1921230 - RNA, 19 nt, Artificial Sequence
  Description of Artificial Sequence: Synthetic oligonucleotide
caagauuccccuuccuacu

SEQ ID NO: 1921231 - RNA, 19 nt, Artificial Sequence
  Description of Artificial Sequence: Synthetic oligonucleotide
cucgacuuucuuuguggga

SEQ ID NO: 1921232 - RNA, 19 nt, Artificial Sequence
  Description of Artificial Sequence: Synthetic oligonucleotide
uucuagugagaaggauagu

SEQ ID NO: 1921233 - RNA, 19 nt, Artificial Sequence
  Description of Artificial Sequence: Synthetic oligonucleotide
ggaugugccuuucaauuua

SEQ ID NO: 1921234 - RNA, 19 nt, Artificial Sequence
  Description of Artificial Sequence: Synthetic oligonucleotide
acuccucgacuuucuuugu

SEQ ID NO: 1921235 - RNA, 19 nt, Artificial Sequence
  Description of Artificial Sequence: Synthetic oligonucleotide
uagcaugcugaggaauguc

SEQ ID NO: 1921236 - RNA, 19 nt, Artificial Sequence
  Description of Artificial Sequence: Synthetic oligonucleotide
ugggagagguggcuuccau

SEQ ID NO: 1921237 - RNA, 19 nt, Artificial Sequence
  Description of Artificial Sequence: Synthetic oligonucleotide
ggcagauggccaaaauaug

SEQ ID NO: 1921238 - RNA, 19 nt, Artificial Sequence
  Description of Artificial Sequence: Synthetic oligonucleotide
gcaggucuuuauuauagcu

SEQ ID NO: 1921239 - RNA, 19 nt, Artificial Sequence
  Description of Artificial Sequence: Synthetic oligonucleotide
ugcucuucugaaggccaca

SEQ ID NO: 1921240 - RNA, 19 nt, Artificial Sequence
  Description of Artificial Sequence: Synthetic oligonucleotide
acguuuugcuucgagcaua

SEQ ID NO: 1921241 - RNA, 19 nt, Artificial Sequence
  Description of Artificial Sequence: Synthetic oligonucleotide
uccuauacugaggguuuau

SEQ ID NO: 1921242 - RNA, 19 nt, Artificial Sequence
  Description of Artificial Sequence: Synthetic oligonucleotide
ggcacuuccuucucugcuc

SEQ ID NO: 1921243 - RNA, 19 nt, Artificial Sequence
  Description of Artificial Sequence: Synthetic oligonucleotide
aagggguaaaugaguccaa

SEQ ID NO: 1921244 - RNA, 19 nt, Artificial Sequence
  Description of Artificial Sequence: Synthetic oligonucleotide
caaguuuuguuccguuaua

SEQ ID NO: 1921245 - RNA, 19 nt, Artificial Sequence
  Description of Artificial Sequence: Synthetic oligonucleotide
ccacauaggaaacuauuaa

SEQ ID NO: 1921246 - RNA, 19 nt, Artificial Sequence
  Description of Artificial Sequence: Synthetic oligonucleotide
cauggacacugcaugccaa

SEQ ID NO: 1921247 - RNA, 19 nt, Artificial Sequence
  Description of Artificial Sequence: Synthetic oligonucleotide
agcuugagauguaggggca

SEQ ID NO: 1921248 - RNA, 19 nt, Artificial Sequence
  Description of Artificial Sequence: Synthetic oligonucleotide
gagauguaggggcauccau

SEQ ID NO: 1921249 - RNA, 19 nt, Artificial Sequence
  Description of Artificial Sequence: Synthetic oligonucleotide
acuggacaagagauccugu

SEQ ID NO: 1921250 - RNA, 19 nt, Artificial Sequence
  Description of Artificial Sequence: Synthetic oligonucleotide
cuggaguauucuuuaaauu

SEQ ID NO: 1921251 - RNA, 19 nt, Artificial Sequence
  Description of Artificial Sequence: Synthetic oligonucleotide
caacuuuaccgcaggaaau

SEQ ID NO: 1921252 - RNA, 19 nt, Artificial Sequence
  Description of Artificial Sequence: Synthetic oligonucleotide
cuuggauagaugcuauguu

SEQ ID NO: 1921253 - RNA, 19 nt, Artificial Sequence
  Description of Artificial Sequence: Synthetic oligonucleotide
gacguuuugcuucgagcau

SEQ ID NO: 1921254 - RNA, 19 nt, Artificial Sequence
  Description of Artificial Sequence: Synthetic oligonucleotide
auacacuccucgacuuucu

SEQ ID NO: 1921255 - RNA, 19 nt, Artificial Sequence
  Description of Artificial Sequence: Synthetic oligonucleotide
cuacuggaguauucuuuaa

SEQ ID NO: 1921256 - RNA, 19 nt, Artificial Sequence
  Description of Artificial Sequence: Synthetic oligonucleotide
gguuuaugcugccaucacu

SEQ ID NO: 1921257 - RNA, 19 nt, Artificial Sequence
  Description of Artificial Sequence: Synthetic oligonucleotide
uuuucgagucccgcuucua

SEQ ID NO: 1921258 - RNA, 19 nt, Artificial Sequence
  Description of Artificial Sequence: Synthetic oligonucleotide
ccuggacaagagcagaaca

SEQ ID NO: 1921259 - RNA, 19 nt, Artificial Sequence
  Description of Artificial Sequence: Synthetic oligonucleotide
gcuuccauuccugaucaga

SEQ ID NO: 1921260 - RNA, 19 nt, Artificial Sequence
  Description of Artificial Sequence: Synthetic oligonucleotide
ggguuuaugcugccaucac

SEQ ID NO: 1921261 - RNA, 19 nt, Artificial Sequence
  Description of Artificial Sequence: Synthetic oligonucleotide
uuccuauacugaggguuua

SEQ ID NO: 1921262 - RNA, 19 nt, Artificial Sequence
  Description of Artificial Sequence: Synthetic oligonucleotide
cuuccuacuggaguauucu

SEQ ID NO: 1921263 - RNA, 19 nt, Artificial Sequence
  Description of Artificial Sequence: Synthetic oligonucleotide
gggcagauggccaaaauau

SEQ ID NO: 1921264 - RNA, 19 nt, Artificial Sequence
  Description of Artificial Sequence: Synthetic oligonucleotide
cccucguaagacacugggc

SEQ ID NO: 1921265 - RNA, 19 nt, Artificial Sequence
  Description of Artificial Sequence: Synthetic oligonucleotide
ccuacuggaguauucuuua

SEQ ID NO: 1921266 - RNA, 19 nt, Artificial Sequence
  Description of Artificial Sequence: Synthetic oligonucleotide
gggguaaaugaguccaacu

SEQ ID NO: 1921267 - RNA, 19 nt, Artificial Sequence
  Description of Artificial Sequence: Synthetic oligonucleotide
auguaggggcauccaucau

SEQ ID NO: 1921268 - RNA, 19 nt, Artificial Sequence
  Description of Artificial Sequence: Synthetic oligonucleotide
gcuccaaagguaauggccu

SEQ ID NO: 1921269 - RNA, 19 nt, Artificial Sequence
  Description of Artificial Sequence: Synthetic oligonucleotide
caccaaugccagaguugug

SEQ ID NO: 1921270 - RNA, 19 nt, Artificial Sequence
  Description of Artificial Sequence: Synthetic oligonucleotide
gcuuuucccagaagacgcc

SEQ ID NO: 1921271 - RNA, 19 nt, Artificial Sequence
  Description of Artificial Sequence: Synthetic oligonucleotide
ccuuccuacuggaguauuc

SEQ ID NO: 1921272 - RNA, 19 nt, Artificial Sequence
  Description of Artificial Sequence: Synthetic oligonucleotide
gcugaaggaaaugcauaca

SEQ ID NO: 1921273 - RNA, 19 nt, Artificial Sequence
  Description of Artificial Sequence: Synthetic oligonucleotide
gagauccuguuuagcugga

SEQ ID NO: 1921274 - RNA, 19 nt, Artificial Sequence
  Description of Artificial Sequence: Synthetic oligonucleotide
caagagcagaacaccugcu

SEQ ID NO: 1921275 - RNA, 19 nt, Artificial Sequence
  Description of Artificial Sequence: Synthetic oligonucleotide
ccuaucucuguaaacaguu

SEQ ID NO: 1921276 - RNA, 19 nt, Artificial Sequence
  Description of Artificial Sequence: Synthetic oligonucleotide
ccaacaugcccucguaaga

SEQ ID NO: 1921277 - RNA, 19 nt, Artificial Sequence
  Description of Artificial Sequence: Synthetic oligonucleotide
ucagaccaaucugcacaau

SEQ ID NO: 1921278 - RNA, 19 nt, Artificial Sequence
  Description of Artificial Sequence: Synthetic oligonucleotide
gcaugcugaggaaugucca

SEQ ID NO: 1921279 - RNA, 19 nt, Artificial Sequence
  Description of Artificial Sequence: Synthetic oligonucleotide
cuggaccuuucuggacucc

SEQ ID NO: 1921280 - RNA, 19 nt, Artificial Sequence
  Description of Artificial Sequence: Synthetic oligonucleotide
cuggacaagagauccuguu

SEQ ID NO: 1921281 - RNA, 19 nt, Artificial Sequence
  Description of Artificial Sequence: Synthetic oligonucleotide
caugcugaggaauguccau

SEQ ID NO: 1921282 - RNA, 19 nt, Artificial Sequence
  Description of Artificial Sequence: Synthetic oligonucleotide
ggauuuucgagucccgcuu

SEQ ID NO: 1921283 - RNA, 19 nt, Artificial Sequence
  Description of Artificial Sequence: Synthetic oligonucleotide
guuccuauacugaggguuu

SEQ ID NO: 1921284 - RNA, 19 nt, Artificial Sequence
  Description of Artificial Sequence: Synthetic oligonucleotide
caccugcuuuucccagaag

SEQ ID NO: 1921285 - RNA, 19 nt, Artificial Sequence
  Description of Artificial Sequence: Synthetic oligonucleotide
ggacaagagcagaacaccu

SEQ ID NO: 1921286 - RNA, 19 nt, Artificial Sequence
  Description of Artificial Sequence: Synthetic oligonucleotide
cgaguuaaauguuuccugu

SEQ ID NO: 1921287 - RNA, 19 nt, Artificial Sequence
  Description of Artificial Sequence: Synthetic oligonucleotide
gcauacacuuggccaccug

SEQ ID NO: 1921288 - RNA, 19 nt, Artificial Sequence
  Description of Artificial Sequence: Synthetic oligonucleotide
gcugaggaauguccauguc

SEQ ID NO: 1921289 - RNA, 19 nt, Artificial Sequence
  Description of Artificial Sequence: Synthetic oligonucleotide
cacuaagcugucagaaguu

SEQ ID NO: 1921290 - RNA, 19 nt, Artificial Sequence
  Description of Artificial Sequence: Synthetic oligonucleotide
cuguuuagcuggacaacuu

SEQ ID NO: 1921291 - RNA, 19 nt, Artificial Sequence
  Description of Artificial Sequence: Synthetic oligonucleotide
gacugucgaguuaaauguu

SEQ ID NO: 1921292 - RNA, 19 nt, Artificial Sequence
  Description of Artificial Sequence: Synthetic oligonucleotide
ggaggucuuuaguucccaa

SEQ ID NO: 1921293 - RNA, 19 nt, Artificial Sequence
  Description of Artificial Sequence: Synthetic oligonucleotide
gagucccgcuucuaauuuu

SEQ ID NO: 1921294 - RNA, 19 nt, Artificial Sequence
  Description of Artificial Sequence: Synthetic oligonucleotide
caugcccucguaagacacu

SEQ ID NO: 1921295 - RNA, 19 nt, Artificial Sequence
  Description of Artificial Sequence: Synthetic oligonucleotide
gggcugaaggaaaugcaua

SEQ ID NO: 1921296 - RNA, 19 nt, Artificial Sequence
  Description of Artificial Sequence: Synthetic oligonucleotide
ccguuauagacugggcuga

SEQ ID NO: 1921297 - RNA, 19 nt, Artificial Sequence
  Description of Artificial Sequence: Synthetic oligonucleotide
guguuccuauacugagggu

SEQ ID NO: 1921298 - RNA, 19 nt, Artificial Sequence
  Description of Artificial Sequence: Synthetic oligonucleotide
cccuggacaagagcagaac

SEQ ID NO: 1921299 - RNA, 19 nt, Artificial Sequence
  Description of Artificial Sequence: Synthetic oligonucleotide
gccagaguuguguuccuau

SEQ ID NO: 1921300 - RNA, 19 nt, Artificial Sequence
  Description of Artificial Sequence: Synthetic oligonucleotide
caggaaaugcagugacguu

SEQ ID NO: 1921301 - RNA, 19 nt, Artificial Sequence
  Description of Artificial Sequence: Synthetic oligonucleotide
ggauaguggaugugccuuu

SEQ ID NO: 1921302 - RNA, 19 nt, Artificial Sequence
  Description of Artificial Sequence: Synthetic oligonucleotide
gcaugccaaguagcauaga

SEQ ID NO: 1921303 - RNA, 19 nt, Artificial Sequence
  Description of Artificial Sequence: Synthetic oligonucleotide
gcuugagauguaggggcau

SEQ ID NO: 1921304 - RNA, 19 nt, Artificial Sequence
  Description of Artificial Sequence: Synthetic oligonucleotide
ggcucucgccuuccuuaua

SEQ ID NO: 1921305 - RNA, 19 nt, Artificial Sequence
  Description of Artificial Sequence: Synthetic oligonucleotide
ggaccuuucuggacuccau

SEQ ID NO: 1921306 - RNA, 19 nt, Artificial Sequence
  Description of Artificial Sequence: Synthetic oligonucleotide
gggcucucgccuuccuuau

SEQ ID NO: 1921307 - RNA, 19 nt, Artificial Sequence
  Description of Artificial Sequence: Synthetic oligonucleotide
cguuauagacugggcugaa

SEQ ID NO: 1921308 - RNA, 19 nt, Artificial Sequence
  Description of Artificial Sequence: Synthetic oligonucleotide
cugccccuccugcuucuuu

SEQ ID NO: 1921309 - RNA, 19 nt, Artificial Sequence
  Description of Artificial Sequence: Synthetic oligonucleotide
cgagucccgcuucuaauuu

SEQ ID NO: 1921310 - RNA, 19 nt, Artificial Sequence
  Description of Artificial Sequence: Synthetic oligonucleotide
aaagagaacaaagagaugg

SEQ ID NO: 1921311 - RNA, 19 nt, Artificial Sequence
  Description of Artificial Sequence: Synthetic oligonucleotide
aaagccaugccucaaaucg

SEQ ID NO: 1921312 - RNA, 19 nt, Artificial Sequence
  Description of Artificial Sequence: Synthetic oligonucleotide
acagaaaaugcucacaacc

SEQ ID NO: 1921313 - RNA, 19 nt, Artificial Sequence
  Description of Artificial Sequence: Synthetic oligonucleotide
uguaaguucagccuguucc

SEQ ID NO: 1921314 - RNA, 19 nt, Artificial Sequence
  Description of Artificial Sequence: Synthetic oligonucleotide
uuuauuacauacuaguuuc

SEQ ID NO: 1921315 - RNA, 19 nt, Artificial Sequence
  Description of Artificial Sequence: Synthetic oligonucleotide
uauugauuacagaaaaugc

SEQ ID NO: 1921316 - RNA, 19 nt, Artificial Sequence
  Description of Artificial Sequence: Synthetic oligonucleotide
aauucauuguauugauuac

SEQ ID NO: 1921317 - RNA, 19 nt, Artificial Sequence
  Description of Artificial Sequence: Synthetic oligonucleotide
uuacuaauaaugucugugg

SEQ ID NO: 1921318 - RNA, 19 nt, Artificial Sequence
  Description of Artificial Sequence: Synthetic oligonucleotide
guuaaugagagacaguggc

SEQ ID NO: 1921319 - RNA, 19 nt, Artificial Sequence
  Description of Artificial Sequence: Synthetic oligonucleotide
uuuacuaauaaugucugug

SEQ ID NO: 1921320 - RNA, 19 nt, Artificial Sequence
  Description of Artificial Sequence: Synthetic oligonucleotide
aauccuguguccccaaggg

SEQ ID NO: 1921321 - RNA, 19 nt, Artificial Sequence
  Description of Artificial Sequence: Synthetic oligonucleotide
auagcugucuuccuccugc

SEQ ID NO: 1921322 - RNA, 19 nt, Artificial Sequence
  Description of Artificial Sequence: Synthetic oligonucleotide
uauuaaacuuuaaucccag

SEQ ID NO: 1921323 - RNA, 19 nt, Artificial Sequence
  Description of Artificial Sequence: Synthetic oligonucleotide
aggaauaugugucuuguag

SEQ ID NO: 1921324 - RNA, 19 nt, Artificial Sequence
  Description of Artificial Sequence: Synthetic oligonucleotide
acuaauaaugucugugguc

SEQ ID NO: 1921325 - RNA, 19 nt, Artificial Sequence
  Description of Artificial Sequence: Synthetic oligonucleotide
guauugauuacagaaaaug

SEQ ID NO: 1921326 - RNA, 19 nt, Artificial Sequence
  Description of Artificial Sequence: Synthetic oligonucleotide
uuguauugauuacagaaaa

SEQ ID NO: 1921327 - RNA, 19 nt, Artificial Sequence
  Description of Artificial Sequence: Synthetic oligonucleotide
ugauuacagaaaaugcuca

SEQ ID NO: 1921328 - RNA, 19 nt, Artificial Sequence
  Description of Artificial Sequence: Synthetic oligonucleotide
cauaugaagaucucauagc

SEQ ID NO: 1921329 - RNA, 19 nt, Artificial Sequence
  Description of Artificial Sequence: Synthetic oligonucleotide
aaccacuucauagaaacug

SEQ ID NO: 1921330 - RNA, 19 nt, Artificial Sequence
  Description of Artificial Sequence: Synthetic oligonucleotide
agugguccagccuggaugc

SEQ ID NO: 1921331 - RNA, 19 nt, Artificial Sequence
  Description of Artificial Sequence: Synthetic oligonucleotide
cuuauagugguccagccug

SEQ ID NO: 1921332 - RNA, 19 nt, Artificial Sequence
  Description of Artificial Sequence: Synthetic oligonucleotide
gacaauauagcggauaaca

SEQ ID NO: 1921333 - RNA, 19 nt, Artificial Sequence
  Description of Artificial Sequence: Synthetic oligonucleotide
ucagguuaaugagagacag

SEQ ID NO: 1921334 - RNA, 19 nt, Artificial Sequence
  Description of Artificial Sequence: Synthetic oligonucleotide
aauaggggcaccuucccgu

SEQ ID NO: 1921335 - RNA, 19 nt, Artificial Sequence
  Description of Artificial Sequence: Synthetic oligonucleotide
uacauacuaguuucuaaag

SEQ ID NO: 1921336 - RNA, 19 nt, Artificial Sequence
  Description of Artificial Sequence: Synthetic oligonucleotide
uuacauacuaguuucuaaa

SEQ ID NO: 1921337 - RNA, 19 nt, Artificial Sequence
  Description of Artificial Sequence: Synthetic oligonucleotide
gauacucccauuguugagg

SEQ ID NO: 1921338 - RNA, 19 nt, Artificial Sequence
  Description of Artificial Sequence: Synthetic oligonucleotide
aaacuuuaaucccaggcuu

SEQ ID NO: 1921339 - RNA, 19 nt, Artificial Sequence
  Description of Artificial Sequence: Synthetic oligonucleotide
uuaaucccaggcuugcuag

SEQ ID NO: 1921340 - RNA, 19 nt, Artificial Sequence
  Description of Artificial Sequence: Synthetic oligonucleotide
cucugcagacaauauagcg

SEQ ID NO: 1921341 - RNA, 19 nt, Artificial Sequence
  Description of Artificial Sequence: Synthetic oligonucleotide
agguuaaugagagacagug

SEQ ID NO: 1921342 - RNA, 19 nt, Artificial Sequence
  Description of Artificial Sequence: Synthetic oligonucleotide
auugauuacagaaaaugcu

SEQ ID NO: 1921343 - RNA, 19 nt, Artificial Sequence
  Description of Artificial Sequence: Synthetic oligonucleotide
cauagaaacuguauuagga

SEQ ID NO: 1921344 - RNA, 19 nt, Artificial Sequence
  Description of Artificial Sequence: Synthetic oligonucleotide
ugucuuguagccuuugccu

SEQ ID NO: 1921345 - RNA, 19 nt, Artificial Sequence
  Description of Artificial Sequence: Synthetic oligonucleotide
cuaguuucuaaagagaaca

SEQ ID NO: 1921346 - RNA, 19 nt, Artificial Sequence
  Description of Artificial Sequence: Synthetic oligonucleotide
uacuaauaaugucuguggu

SEQ ID NO: 1921347 - RNA, 19 nt, Artificial Sequence
  Description of Artificial Sequence: Synthetic oligonucleotide
aguuccugaaggcagccuc

SEQ ID NO: 1921348 - RNA, 19 nt, Artificial Sequence
  Description of Artificial Sequence: Synthetic oligonucleotide
uuaaugagagacaguggcu

SEQ ID NO: 1921349 - RNA, 19 nt, Artificial Sequence
  Description of Artificial Sequence: Synthetic oligonucleotide
uaauacacagccucuggcu

SEQ ID NO: 1921350 - RNA, 19 nt, Artificial Sequence
  Description of Artificial Sequence: Synthetic oligonucleotide
guaggugauacucccauug

SEQ ID NO: 1921351 - RNA, 19 nt, Artificial Sequence
  Description of Artificial Sequence: Synthetic oligonucleotide
acucccauuguugagggac

SEQ ID NO: 1921352 - RNA, 19 nt, Artificial Sequence
  Description of Artificial Sequence: Synthetic oligonucleotide
ucuacagcacgggucaugg

SEQ ID NO: 1921353 - RNA, 19 nt, Artificial Sequence
  Description of Artificial Sequence: Synthetic oligonucleotide
uagugguccagccuggaug

SEQ ID NO: 1921354 - RNA, 19 nt, Artificial Sequence
  Description of Artificial Sequence: Synthetic oligonucleotide
aggucgaccgcuccguugc

SEQ ID NO: 1921355 - RNA, 19 nt, Artificial Sequence
  Description of Artificial Sequence: Synthetic oligonucleotide
uuggcguggcauaugaaga

SEQ ID NO: 1921356 - RNA, 19 nt, Artificial Sequence
  Description of Artificial Sequence: Synthetic oligonucleotide
uguauugauuacagaaaau

SEQ ID NO: 1921357 - RNA, 19 nt, Artificial Sequence
  Description of Artificial Sequence: Synthetic oligonucleotide
uguucccgaccuaaugggg

SEQ ID NO: 1921358 - RNA, 19 nt, Artificial Sequence
  Description of Artificial Sequence: Synthetic oligonucleotide
accuaauggggucagggug

SEQ ID NO: 1921359 - RNA, 19 nt, Artificial Sequence
  Description of Artificial Sequence: Synthetic oligonucleotide
uacaggcaaucucaggacc

SEQ ID NO: 1921360 - RNA, 19 nt, Artificial Sequence
  Description of Artificial Sequence: Synthetic oligonucleotide
aagagaacggcggccgagc

SEQ ID NO: 1921361 - RNA, 19 nt, Artificial Sequence
  Description of Artificial Sequence: Synthetic oligonucleotide
ucucgccugucccaguugg

SEQ ID NO: 1921362 - RNA, 19 nt, Artificial Sequence
  Description of Artificial Sequence: Synthetic oligonucleotide
aacacgaccguugggucgg

SEQ ID NO: 1921363 - RNA, 19 nt, Artificial Sequence
  Description of Artificial Sequence: Synthetic oligonucleotide
ugaagcgccugccggaaag

SEQ ID NO: 1921364 - RNA, 19 nt, Artificial Sequence
  Description of Artificial Sequence: Synthetic oligonucleotide
ggaauaugugucuuguagc

SEQ ID NO: 1921365 - RNA, 19 nt, Artificial Sequence
  Description of Artificial Sequence: Synthetic oligonucleotide
gaccggguaaucuugucug

SEQ ID NO: 1921366 - RNA, 19 nt, Artificial Sequence
  Description of Artificial Sequence: Synthetic oligonucleotide
uccugagugcaacacgacc

SEQ ID NO: 1921367 - RNA, 19 nt, Artificial Sequence
  Description of Artificial Sequence: Synthetic oligonucleotide
uccuguguccccaaggguc

SEQ ID NO: 1921368 - RNA, 19 nt, Artificial Sequence
  Description of Artificial Sequence: Synthetic oligonucleotide
aaucgcgcggccccacggc

SEQ ID NO: 1921369 - RNA, 19 nt, Artificial Sequence
  Description of Artificial Sequence: Synthetic oligonucleotide
gagaagagaacggcggccg

SEQ ID NO: 1921370 - RNA, 19 nt, Artificial Sequence
  Description of Artificial Sequence: Synthetic oligonucleotide
aagccaugccucaaaucgc

SEQ ID NO: 1921371 - RNA, 19 nt, Artificial Sequence
  Description of Artificial Sequence: Synthetic oligonucleotide
aaaucgcgcggccccacgg

SEQ ID NO: 1921372 - RNA, 19 nt, Artificial Sequence
  Description of Artificial Sequence: Synthetic oligonucleotide
ugcaacacgaccguugggu

SEQ ID NO: 1921373 - RNA, 19 nt, Artificial Sequence
  Description of Artificial Sequence: Synthetic oligonucleotide
cuguucccgaccuaauggg

SEQ ID NO: 1921374 - RNA, 19 nt, Artificial Sequence
  Description of Artificial Sequence: Synthetic oligonucleotide
agaacggcggccgagccac

SEQ ID NO: 1921375 - RNA, 19 nt, Artificial Sequence
  Description of Artificial Sequence: Synthetic oligonucleotide
auacacagccucuggcuuc

SEQ ID NO: 1921376 - RNA, 19 nt, Artificial Sequence
  Description of Artificial Sequence: Synthetic oligonucleotide
cagaaaaugcucacaacca

SEQ ID NO: 1921377 - RNA, 19 nt, Artificial Sequence
  Description of Artificial Sequence: Synthetic oligonucleotide
uaccgcggagaagagaacg

SEQ ID NO: 1921378 - RNA, 19 nt, Artificial Sequence
  Description of Artificial Sequence: Synthetic oligonucleotide
caugccucaaaucgcgcgg

SEQ ID NO: 1921379 - RNA, 19 nt, Artificial Sequence
  Description of Artificial Sequence: Synthetic oligonucleotide
ucacaaccacuucauagaa

SEQ ID NO: 1921380 - RNA, 19 nt, Artificial Sequence
  Description of Artificial Sequence: Synthetic oligonucleotide
ccugagugcaacacgaccg

SEQ ID NO: 1921381 - RNA, 19 nt, Artificial Sequence
  Description of Artificial Sequence: Synthetic oligonucleotide
auaugugucuuguagccuu

SEQ ID NO: 1921382 - RNA, 19 nt, Artificial Sequence
  Description of Artificial Sequence: Synthetic oligonucleotide
cucacaaccacuucauaga

SEQ ID NO: 1921383 - RNA, 19 nt, Artificial Sequence
  Description of Artificial Sequence: Synthetic oligonucleotide
uuugccuuauaguggucca

SEQ ID NO: 1921384 - RNA, 19 nt, Artificial Sequence
  Description of Artificial Sequence: Synthetic oligonucleotide
aauggggucagggugcggu

SEQ ID NO: 1921385 - RNA, 19 nt, Artificial Sequence
  Description of Artificial Sequence: Synthetic oligonucleotide
cauuguugagggacaggcg

SEQ ID NO: 1921386 - RNA, 19 nt, Artificial Sequence
  Description of Artificial Sequence: Synthetic oligonucleotide
ugugucuuguagccuuugc

SEQ ID NO: 1921387 - RNA, 19 nt, Artificial Sequence
  Description of Artificial Sequence: Synthetic oligonucleotide
uugcccaccgcuaccgcgg

SEQ ID NO: 1921388 - RNA, 19 nt, Artificial Sequence
  Description of Artificial Sequence: Synthetic oligonucleotide
uaaguucagccuguucccg

SEQ ID NO: 1921389 - RNA, 19 nt, Artificial Sequence
  Description of Artificial Sequence: Synthetic oligonucleotide
gugucuuguagccuuugcc

SEQ ID NO: 1921390 - RNA, 19 nt, Artificial Sequence
  Description of Artificial Sequence: Synthetic oligonucleotide
auagccuagacagggaaga

SEQ ID NO: 1921391 - RNA, 19 nt, Artificial Sequence
  Description of Artificial Sequence: Synthetic oligonucleotide
cuaauaaugucuguggucu

SEQ ID NO: 1921392 - RNA, 19 nt, Artificial Sequence
  Description of Artificial Sequence: Synthetic oligonucleotide
agagaacggcggccgagcc

SEQ ID NO: 1921393 - RNA, 19 nt, Artificial Sequence
  Description of Artificial Sequence: Synthetic oligonucleotide
auaacauuggcguggcaua

SEQ ID NO: 1921394 - RNA, 19 nt, Artificial Sequence
  Description of Artificial Sequence: Synthetic oligonucleotide
cagcauagccuagacaggg

SEQ ID NO: 1921395 - RNA, 19 nt, Artificial Sequence
  Description of Artificial Sequence: Synthetic oligonucleotide
agguguuuacuaauaaugu

SEQ ID NO: 1921396 - RNA, 19 nt, Artificial Sequence
  Description of Artificial Sequence: Synthetic oligonucleotide
acauuggcguggcauauga

SEQ ID NO: 1921397 - RNA, 19 nt, Artificial Sequence
  Description of Artificial Sequence: Synthetic oligonucleotide
aguccuacaggcaaucuca

SEQ ID NO: 1921398 - RNA, 19 nt, Artificial Sequence
  Description of Artificial Sequence: Synthetic oligonucleotide
ucugguucaauaggggcac

SEQ ID NO: 1921399 - RNA, 19 nt, Artificial Sequence
  Description of Artificial Sequence: Synthetic oligonucleotide
cauagccuagacagggaag

SEQ ID NO: 1921400 - RNA, 19 nt, Artificial Sequence
  Description of Artificial Sequence: Synthetic oligonucleotide
uauuacauacuaguuucua

SEQ ID NO: 1921401 - RNA, 19 nt, Artificial Sequence
  Description of Artificial Sequence: Synthetic oligonucleotide
accgcuaccgcggagaaga

SEQ ID NO: 1921402 - RNA, 19 nt, Artificial Sequence
  Description of Artificial Sequence: Synthetic oligonucleotide
ucccaggcuugcuagucgg

SEQ ID NO: 1921403 - RNA, 19 nt, Artificial Sequence
  Description of Artificial Sequence: Synthetic oligonucleotide
caacacgaccguugggucg

SEQ ID NO: 1921404 - RNA, 19 nt, Artificial Sequence
  Description of Artificial Sequence: Synthetic oligonucleotide
uaggugauacucccauugu

SEQ ID NO: 1921405 - RNA, 19 nt, Artificial Sequence
  Description of Artificial Sequence: Synthetic oligonucleotide
uugggucggauuaccaggu

SEQ ID NO: 1921406 - RNA, 19 nt, Artificial Sequence
  Description of Artificial Sequence: Synthetic oligonucleotide
acaggcaaucucaggaccg

SEQ ID NO: 1921407 - RNA, 19 nt, Artificial Sequence
  Description of Artificial Sequence: Synthetic oligonucleotide
aguuucuaaagagaacaaa

SEQ ID NO: 1921408 - RNA, 19 nt, Artificial Sequence
  Description of Artificial Sequence: Synthetic oligonucleotide
aagcgccugccggaaagcc

SEQ ID NO: 1921409 - RNA, 19 nt, Artificial Sequence
  Description of Artificial Sequence: Synthetic oligonucleotide
agacaauauagcggauaac

SEQ ID NO: 1921410 - RNA, 19 nt, Artificial Sequence
  Description of Artificial Sequence: Synthetic oligonucleotide
ucggagcccuguaaguuca

SEQ ID NO: 1921411 - RNA, 19 nt, Artificial Sequence
  Description of Artificial Sequence: Synthetic oligonucleotide
gggucaaauauuccaauuc

SEQ ID NO: 1921412 - RNA, 19 nt, Artificial Sequence
  Description of Artificial Sequence: Synthetic oligonucleotide
ggugcgguccuuuuccagg

SEQ ID NO: 1921413 - RNA, 19 nt, Artificial Sequence
  Description of Artificial Sequence: Synthetic oligonucleotide
cuugcccaccgcuaccgcg

SEQ ID NO: 1921414 - RNA, 19 nt, Artificial Sequence
  Description of Artificial Sequence: Synthetic oligonucleotide
caauaggggcaccuucccg

SEQ ID NO: 1921415 - RNA, 19 nt, Artificial Sequence
  Description of Artificial Sequence: Synthetic oligonucleotide
ugccuuauagugguccagc

SEQ ID NO: 1921416 - RNA, 19 nt, Artificial Sequence
  Description of Artificial Sequence: Synthetic oligonucleotide
aaucucaggaccggguaau

SEQ ID NO: 1921417 - RNA, 19 nt, Artificial Sequence
  Description of Artificial Sequence: Synthetic oligonucleotide
ugggucaaauauuccaauu

SEQ ID NO: 1921418 - RNA, 19 nt, Artificial Sequence
  Description of Artificial Sequence: Synthetic oligonucleotide
ccuguucccgaccuaaugg

SEQ ID NO: 1921419 - RNA, 19 nt, Artificial Sequence
  Description of Artificial Sequence: Synthetic oligonucleotide
ggagccaaccuuccggagg

SEQ ID NO: 1921420 - RNA, 19 nt, Artificial Sequence
  Description of Artificial Sequence: Synthetic oligonucleotide
agccuuugccuuauagugg

SEQ ID NO: 1921421 - RNA, 19 nt, Artificial Sequence
  Description of Artificial Sequence: Synthetic oligonucleotide
acaauauagcggauaacau

SEQ ID NO: 1921422 - RNA, 19 nt, Artificial Sequence
  Description of Artificial Sequence: Synthetic oligonucleotide
agccaugccucaaaucgcg

SEQ ID NO: 1921423 - RNA, 19 nt, Artificial Sequence
  Description of Artificial Sequence: Synthetic oligonucleotide
acggccggacgccagggac

SEQ ID NO: 1921424 - RNA, 19 nt, Artificial Sequence
  Description of Artificial Sequence: Synthetic oligonucleotide
cagacaauauagcggauaa

SEQ ID NO: 1921425 - RNA, 19 nt, Artificial Sequence
  Description of Artificial Sequence: Synthetic oligonucleotide
ccuaauggggucagggugc

SEQ ID NO: 1921426 - RNA, 19 nt, Artificial Sequence
  Description of Artificial Sequence: Synthetic oligonucleotide
ggagccauccacaugguac

SEQ ID NO: 1921427 - RNA, 19 nt, Artificial Sequence
  Description of Artificial Sequence: Synthetic oligonucleotide
gaagagaacggcggccgag

SEQ ID NO: 1921428 - RNA, 19 nt, Artificial Sequence
  Description of Artificial Sequence: Synthetic oligonucleotide
gguuaaugagagacagugg

SEQ ID NO: 1921429 - RNA, 19 nt, Artificial Sequence
  Description of Artificial Sequence: Synthetic oligonucleotide
gagccaaccuuccggagga

SEQ ID NO: 1921430 - RNA, 19 nt, Artificial Sequence
  Description of Artificial Sequence: Synthetic oligonucleotide
uaauaaugucuguggucuc

SEQ ID NO: 1921431 - RNA, 19 nt, Artificial Sequence
  Description of Artificial Sequence: Synthetic oligonucleotide
gggcgagacaacaugaagc

SEQ ID NO: 1921432 - RNA, 19 nt, Artificial Sequence
  Description of Artificial Sequence: Synthetic oligonucleotide
accguugggucggauuacc

SEQ ID NO: 1921433 - RNA, 19 nt, Artificial Sequence
  Description of Artificial Sequence: Synthetic oligonucleotide
cugcuuggcaucagcucgg

SEQ ID NO: 1921434 - RNA, 19 nt, Artificial Sequence
  Description of Artificial Sequence: Synthetic oligonucleotide
aucgcgcggccccacggcc

SEQ ID NO: 1921435 - RNA, 19 nt, Artificial Sequence
  Description of Artificial Sequence: Synthetic oligonucleotide
aggaauggacaauuuuauu

SEQ ID NO: 1921436 - RNA, 19 nt, Artificial Sequence
  Description of Artificial Sequence: Synthetic oligonucleotide
ggucggauuaccagguagg

SEQ ID NO: 1921437 - RNA, 19 nt, Artificial Sequence
  Description of Artificial Sequence: Synthetic oligonucleotide
augccucaaaucgcgcggc

SEQ ID NO: 1921438 - RNA, 19 nt, Artificial Sequence
  Description of Artificial Sequence: Synthetic oligonucleotide
aacauuggcguggcauaug

SEQ ID NO: 1921439 - RNA, 19 nt, Artificial Sequence
  Description of Artificial Sequence: Synthetic oligonucleotide
aggguccugagugcaacac

SEQ ID NO: 1921440 - RNA, 19 nt, Artificial Sequence
  Description of Artificial Sequence: Synthetic oligonucleotide
aauccgggcuccaucuuca

SEQ ID NO: 1921441 - RNA, 19 nt, Artificial Sequence
  Description of Artificial Sequence: Synthetic oligonucleotide
gcggauaacauuggcgugg

SEQ ID NO: 1921442 - RNA, 19 nt, Artificial Sequence
  Description of Artificial Sequence: Synthetic oligonucleotide
caggcuugcuagucggagc

SEQ ID NO: 1921443 - RNA, 19 nt, Artificial Sequence
  Description of Artificial Sequence: Synthetic oligonucleotide
ggcggagccaaccuuccgg

SEQ ID NO: 1921444 - RNA, 19 nt, Artificial Sequence
  Description of Artificial Sequence: Synthetic oligonucleotide
uagucggagcccuguaagu

SEQ ID NO: 1921445 - RNA, 19 nt, Artificial Sequence
  Description of Artificial Sequence: Synthetic oligonucleotide
ccuacaggcaaucucagga

SEQ ID NO: 1921446 - RNA, 19 nt, Artificial Sequence
  Description of Artificial Sequence: Synthetic oligonucleotide
ggaucugguucaauagggg

SEQ ID NO: 1921447 - RNA, 19 nt, Artificial Sequence
  Description of Artificial Sequence: Synthetic oligonucleotide
guagccuuugccuuauagu

SEQ ID NO: 1921448 - RNA, 19 nt, Artificial Sequence
  Description of Artificial Sequence: Synthetic oligonucleotide
caguccuacaggcaaucuc

SEQ ID NO: 1921449 - RNA, 19 nt, Artificial Sequence
  Description of Artificial Sequence: Synthetic oligonucleotide
aggugauacucccauuguu

SEQ ID NO: 1921450 - RNA, 19 nt, Artificial Sequence
  Description of Artificial Sequence: Synthetic oligonucleotide
ccugaaggcagccucaauc

SEQ ID NO: 1921451 - RNA, 19 nt, Artificial Sequence
  Description of Artificial Sequence: Synthetic oligonucleotide
gggucggauuaccagguag

SEQ ID NO: 1921452 - RNA, 19 nt, Artificial Sequence
  Description of Artificial Sequence: Synthetic oligonucleotide
aggaccggguaaucuuguc

SEQ ID NO: 1921453 - RNA, 19 nt, Artificial Sequence
  Description of Artificial Sequence: Synthetic oligonucleotide
guacugggaaugccggaug

SEQ ID NO: 1921454 - RNA, 19 nt, Artificial Sequence
  Description of Artificial Sequence: Synthetic oligonucleotide
uaaucccaggcuugcuagu

SEQ ID NO: 1921455 - RNA, 19 nt, Artificial Sequence
  Description of Artificial Sequence: Synthetic oligonucleotide
aaugccggaugaggaauau

SEQ ID NO: 1921456 - RNA, 19 nt, Artificial Sequence
  Description of Artificial Sequence: Synthetic oligonucleotide
cggauuaccagguagguga

SEQ ID NO: 1921457 - RNA, 19 nt, Artificial Sequence
  Description of Artificial Sequence: Synthetic oligonucleotide
uaacauuggcguggcauau

SEQ ID NO: 1921458 - RNA, 19 nt, Artificial Sequence
  Description of Artificial Sequence: Synthetic oligonucleotide
uaugugucuuguagccuuu

SEQ ID NO: 1921459 - RNA, 19 nt, Artificial Sequence
  Description of Artificial Sequence: Synthetic oligonucleotide
ggaggaauggacaauuuua

SEQ ID NO: 1921460 - RNA, 19 nt, Artificial Sequence
  Description of Artificial Sequence: Synthetic oligonucleotide
ugguucaauaggggcaccu

SEQ ID NO: 1921461 - RNA, 19 nt, Artificial Sequence
  Description of Artificial Sequence: Synthetic oligonucleotide
caauccgggcuccaucuuc

SEQ ID NO: 1921462 - RNA, 19 nt, Artificial Sequence
  Description of Artificial Sequence: Synthetic oligonucleotide
ggggcaugaauccuguguc

SEQ ID NO: 1921463 - RNA, 19 nt, Artificial Sequence
  Description of Artificial Sequence: Synthetic oligonucleotide
accgcggagaagagaacgg

SEQ ID NO: 1921464 - RNA, 19 nt, Artificial Sequence
  Description of Artificial Sequence: Synthetic oligonucleotide
gucggagcccuguaaguuc

SEQ ID NO: 1921465 - RNA, 19 nt, Artificial Sequence
  Description of Artificial Sequence: Synthetic oligonucleotide
ugccucaaaucgcgcggcc

SEQ ID NO: 1921466 - RNA, 19 nt, Artificial Sequence
  Description of Artificial Sequence: Synthetic oligonucleotide
ccaugccucaaaucgcgcg

SEQ ID NO: 1921467 - RNA, 19 nt, Artificial Sequence
  Description of Artificial Sequence: Synthetic oligonucleotide
uccguugcgcgcgugucug

SEQ ID NO: 1921468 - RNA, 19 nt, Artificial Sequence
  Description of Artificial Sequence: Synthetic oligonucleotide
cugugcugacucugcagac

SEQ ID NO: 1921469 - RNA, 19 nt, Artificial Sequence
  Description of Artificial Sequence: Synthetic oligonucleotide
ggggcgagacaacaugaag

SEQ ID NO: 1921470 - RNA, 19 nt, Artificial Sequence
  Description of Artificial Sequence: Synthetic oligonucleotide
agaagagaacggcggccga

SEQ ID NO: 1921471 - RNA, 19 nt, Artificial Sequence
  Description of Artificial Sequence: Synthetic oligonucleotide
agccuagacagggaagaca

SEQ ID NO: 1921472 - RNA, 19 nt, Artificial Sequence
  Description of Artificial Sequence: Synthetic oligonucleotide
ggguccugagugcaacacg

SEQ ID NO: 1921473 - RNA, 19 nt, Artificial Sequence
  Description of Artificial Sequence: Synthetic oligonucleotide
gagacaacaugaagccaca

SEQ ID NO: 1921474 - RNA, 19 nt, Artificial Sequence
  Description of Artificial Sequence: Synthetic oligonucleotide
accuucccguagcaggucu

SEQ ID NO: 1921475 - RNA, 19 nt, Artificial Sequence
  Description of Artificial Sequence: Synthetic oligonucleotide
gagagacaguggcucucgc

SEQ ID NO: 1921476 - RNA, 19 nt, Artificial Sequence
  Description of Artificial Sequence: Synthetic oligonucleotide
ucauggaggaauggacaau

SEQ ID NO: 1921477 - RNA, 19 nt, Artificial Sequence
  Description of Artificial Sequence: Synthetic oligonucleotide
caaagagaugggucaaaua

SEQ ID NO: 1921478 - RNA, 19 nt, Artificial Sequence
  Description of Artificial Sequence: Synthetic oligonucleotide
uaggggcaccuucccguag

SEQ ID NO: 1921479 - RNA, 19 nt, Artificial Sequence
  Description of Artificial Sequence: Synthetic oligonucleotide
cacgggucauggaggaaug

SEQ ID NO: 1921480 - RNA, 19 nt, Artificial Sequence
  Description of Artificial Sequence: Synthetic oligonucleotide
caaaucgcgcggccccacg

SEQ ID NO: 1921481 - RNA, 19 nt, Artificial Sequence
  Description of Artificial Sequence: Synthetic oligonucleotide
ugcgcgcgugucugcaucc

SEQ ID NO: 1921482 - RNA, 19 nt, Artificial Sequence
  Description of Artificial Sequence: Synthetic oligonucleotide
gaccgcuccguugcgcgcg

SEQ ID NO: 1921483 - RNA, 19 nt, Artificial Sequence
  Description of Artificial Sequence: Synthetic oligonucleotide
cuugcuagucggagcccug

SEQ ID NO: 1921484 - RNA, 19 nt, Artificial Sequence
  Description of Artificial Sequence: Synthetic oligonucleotide
ccaaccuuccggaggaaac

SEQ ID NO: 1921485 - RNA, 19 nt, Artificial Sequence
  Description of Artificial Sequence: Synthetic oligonucleotide
ugcagacaauauagcggau

SEQ ID NO: 1921486 - RNA, 19 nt, Artificial Sequence
  Description of Artificial Sequence: Synthetic oligonucleotide
cuguaaguucagccuguuc

SEQ ID NO: 1921487 - RNA, 19 nt, Artificial Sequence
  Description of Artificial Sequence: Synthetic oligonucleotide
caggcggagccaaccuucc

SEQ ID NO: 1921488 - RNA, 19 nt, Artificial Sequence
  Description of Artificial Sequence: Synthetic oligonucleotide
ugcucacaaccacuucaua

SEQ ID NO: 1921489 - RNA, 19 nt, Artificial Sequence
  Description of Artificial Sequence: Synthetic oligonucleotide
gcccuguaaguucagccug

SEQ ID NO: 1921490 - RNA, 19 nt, Artificial Sequence
  Description of Artificial Sequence: Synthetic oligonucleotide
aggaaacugcagugcucug

SEQ ID NO: 1921491 - RNA, 19 nt, Artificial Sequence
  Description of Artificial Sequence: Synthetic oligonucleotide
uugcgcgcgugucugcauc

SEQ ID NO: 1921492 - RNA, 19 nt, Artificial Sequence
  Description of Artificial Sequence: Synthetic oligonucleotide
ucgcgcggccccacggccg

SEQ ID NO: 1921493 - RNA, 19 nt, Artificial Sequence
  Description of Artificial Sequence: Synthetic oligonucleotide
uccuguccaggucgaccgc

SEQ ID NO: 1921494 - RNA, 19 nt, Artificial Sequence
  Description of Artificial Sequence: Synthetic oligonucleotide
gugcaacacgaccguuggg

SEQ ID NO: 1921495 - RNA, 19 nt, Artificial Sequence
  Description of Artificial Sequence: Synthetic oligonucleotide
gaagcgccugccggaaagc

SEQ ID NO: 1921496 - RNA, 19 nt, Artificial Sequence
  Description of Artificial Sequence: Synthetic oligonucleotide
cucaauccgggcuccaucu

SEQ ID NO: 1921497 - RNA, 19 nt, Artificial Sequence
  Description of Artificial Sequence: Synthetic oligonucleotide
gcuaccgcggagaagagaa

SEQ ID NO: 1921498 - RNA, 19 nt, Artificial Sequence
  Description of Artificial Sequence: Synthetic oligonucleotide
guucagccuguucccgacc

SEQ ID NO: 1921499 - RNA, 19 nt, Artificial Sequence
  Description of Artificial Sequence: Synthetic oligonucleotide
agucggagcccuguaaguu

SEQ ID NO: 1921500 - RNA, 19 nt, Artificial Sequence
  Description of Artificial Sequence: Synthetic oligonucleotide
uguccccaaggguccugag

SEQ ID NO: 1921501 - RNA, 19 nt, Artificial Sequence
  Description of Artificial Sequence: Synthetic oligonucleotide
gagaacggcggccgagcca

SEQ ID NO: 1921502 - RNA, 19 nt, Artificial Sequence
  Description of Artificial Sequence: Synthetic oligonucleotide
acgggucauggaggaaugg

SEQ ID NO: 1921503 - RNA, 19 nt, Artificial Sequence
  Description of Artificial Sequence: Synthetic oligonucleotide
caggucgaccgcuccguug

SEQ ID NO: 1921504 - RNA, 19 nt, Artificial Sequence
  Description of Artificial Sequence: Synthetic oligonucleotide
uugcuagucggagcccugu

SEQ ID NO: 1921505 - RNA, 19 nt, Artificial Sequence
  Description of Artificial Sequence: Synthetic oligonucleotide
uagccuagacagggaagac

SEQ ID NO: 1921506 - RNA, 19 nt, Artificial Sequence
  Description of Artificial Sequence: Synthetic oligonucleotide
auccccgccgccgcgcggc

SEQ ID NO: 1921507 - RNA, 19 nt, Artificial Sequence
  Description of Artificial Sequence: Synthetic oligonucleotide
ugucccaguuggaguccca

SEQ ID NO: 1921508 - RNA, 19 nt, Artificial Sequence
  Description of Artificial Sequence: Synthetic oligonucleotide
ugcuagucggagcccugua

SEQ ID NO: 1921509 - RNA, 19 nt, Artificial Sequence
  Description of Artificial Sequence: Synthetic oligonucleotide
gucccaguuggagucccag

SEQ ID NO: 1921510 - RNA, 19 nt, Artificial Sequence
  Description of Artificial Sequence: Synthetic oligonucleotide
auaggggcaccuucccgua

SEQ ID NO: 1921511 - RNA, 19 nt, Artificial Sequence
  Description of Artificial Sequence: Synthetic oligonucleotide
uacucccauuguugaggga

SEQ ID NO: 1921512 - RNA, 19 nt, Artificial Sequence
  Description of Artificial Sequence: Synthetic oligonucleotide
gccuagacagggaagacaa

SEQ ID NO: 1921513 - RNA, 19 nt, Artificial Sequence
  Description of Artificial Sequence: Synthetic oligonucleotide
cuaccgcggagaagagaac

SEQ ID NO: 1921514 - RNA, 19 nt, Artificial Sequence
  Description of Artificial Sequence: Synthetic oligonucleotide
cagaccgcaggccgccagc

SEQ ID NO: 1921515 - RNA, 19 nt, Artificial Sequence
  Description of Artificial Sequence: Synthetic oligonucleotide
cguugggucggauuaccag

SEQ ID NO: 1921516 - RNA, 19 nt, Artificial Sequence
  Description of Artificial Sequence: Synthetic oligonucleotide
ucaaaucgcgcggccccac

SEQ ID NO: 1921517 - RNA, 19 nt, Artificial Sequence
  Description of Artificial Sequence: Synthetic oligonucleotide
augugucuuguagccuuug

SEQ ID NO: 1921518 - RNA, 19 nt, Artificial Sequence
  Description of Artificial Sequence: Synthetic oligonucleotide
ggccgcgagauuccugucc

SEQ ID NO: 1921519 - RNA, 19 nt, Artificial Sequence
  Description of Artificial Sequence: Synthetic oligonucleotide
cggguaaucuugucugggg

SEQ ID NO: 1921520 - RNA, 19 nt, Artificial Sequence
  Description of Artificial Sequence: Synthetic oligonucleotide
gccuguucccgaccuaaug

SEQ ID NO: 1921521 - RNA, 19 nt, Artificial Sequence
  Description of Artificial Sequence: Synthetic oligonucleotide
ccgggcuccaucuucauaa

SEQ ID NO: 1921522 - RNA, 19 nt, Artificial Sequence
  Description of Artificial Sequence: Synthetic oligonucleotide
guggcucucgccuguccca

SEQ ID NO: 1921523 - RNA, 19 nt, Artificial Sequence
  Description of Artificial Sequence: Synthetic oligonucleotide
ucagccuguucccgaccua

SEQ ID NO: 1921524 - RNA, 19 nt, Artificial Sequence
  Description of Artificial Sequence: Synthetic oligonucleotide
uguguccccaaggguccug

SEQ ID NO: 1921525 - RNA, 19 nt, Artificial Sequence
  Description of Artificial Sequence: Synthetic oligonucleotide
cgaccuaauggggucaggg

SEQ ID NO: 1921526 - RNA, 19 nt, Artificial Sequence
  Description of Artificial Sequence: Synthetic oligonucleotide
gcaacacgaccguuggguc

SEQ ID NO: 1921527 - RNA, 19 nt, Artificial Sequence
  Description of Artificial Sequence: Synthetic oligonucleotide
ugggucggauuaccaggua

SEQ ID NO: 1921528 - RNA, 19 nt, Artificial Sequence
  Description of Artificial Sequence: Synthetic oligonucleotide
gaccguugggucggauuac

SEQ ID NO: 1921529 - RNA, 19 nt, Artificial Sequence
  Description of Artificial Sequence: Synthetic oligonucleotide
ugagugcaacacgaccguu

SEQ ID NO: 1921530 - RNA, 19 nt, Artificial Sequence
  Description of Artificial Sequence: Synthetic oligonucleotide
gggaaugccggaugaggaa

SEQ ID NO: 1921531 - RNA, 19 nt, Artificial Sequence
  Description of Artificial Sequence: Synthetic oligonucleotide
gggacaggcggagccaacc

SEQ ID NO: 1921532 - RNA, 19 nt, Artificial Sequence
  Description of Artificial Sequence: Synthetic oligonucleotide
cauggaggaauggacaauu

SEQ ID NO: 1921533 - RNA, 19 nt, Artificial Sequence
  Description of Artificial Sequence: Synthetic oligonucleotide
ugcauccccgccgccgcgc

SEQ ID NO: 1921534 - RNA, 19 nt, Artificial Sequence
  Description of Artificial Sequence: Synthetic oligonucleotide
gcaaucucaggaccgggua

SEQ ID NO: 1921535 - RNA, 19 nt, Artificial Sequence
  Description of Artificial Sequence: Synthetic oligonucleotide
ccggguaaucuugucuggg

SEQ ID NO: 1921536 - RNA, 19 nt, Artificial Sequence
  Description of Artificial Sequence: Synthetic oligonucleotide
ugcccaccgcuaccgcgga

SEQ ID NO: 1921537 - RNA, 19 nt, Artificial Sequence
  Description of Artificial Sequence: Synthetic oligonucleotide
guucccgaccuaauggggu

SEQ ID NO: 1921538 - RNA, 19 nt, Artificial Sequence
  Description of Artificial Sequence: Synthetic oligonucleotide
cugagugcaacacgaccgu

SEQ ID NO: 1921539 - RNA, 19 nt, Artificial Sequence
  Description of Artificial Sequence: Synthetic oligonucleotide
ccuagacagggaagacaag

SEQ ID NO: 1921540 - RNA, 19 nt, Artificial Sequence
  Description of Artificial Sequence: Synthetic oligonucleotide
cugguucaauaggggcacc

SEQ ID NO: 1921541 - RNA, 19 nt, Artificial Sequence
  Description of Artificial Sequence: Synthetic oligonucleotide
gaccgcaggccgccagcug

SEQ ID NO: 1921542 - RNA, 19 nt, Artificial Sequence
  Description of Artificial Sequence: Synthetic oligonucleotide
ggaccggguaaucuugucu

SEQ ID NO: 1921543 - RNA, 19 nt, Artificial Sequence
  Description of Artificial Sequence: Synthetic oligonucleotide
gcagacaauauagcggaua

SEQ ID NO: 1921544 - RNA, 19 nt, Artificial Sequence
  Description of Artificial Sequence: Synthetic oligonucleotide
gccgcgagauuccugucca

SEQ ID NO: 1921545 - RNA, 19 nt, Artificial Sequence
  Description of Artificial Sequence: Synthetic oligonucleotide
caaccacuucauagaaacu

SEQ ID NO: 1921546 - RNA, 19 nt, Artificial Sequence
  Description of Artificial Sequence: Synthetic oligonucleotide
ccaggcuugcuagucggag

SEQ ID NO: 1921547 - RNA, 19 nt, Artificial Sequence
  Description of Artificial Sequence: Synthetic oligonucleotide
agaccgcaggccgccagcu

SEQ ID NO: 1921548 - RNA, 19 nt, Artificial Sequence
  Description of Artificial Sequence: Synthetic oligonucleotide
cauuggcguggcauaugaa

SEQ ID NO: 1921549 - RNA, 19 nt, Artificial Sequence
  Description of Artificial Sequence: Synthetic oligonucleotide
agcgccugccggaaagcca

SEQ ID NO: 1921550 - RNA, 19 nt, Artificial Sequence
  Description of Artificial Sequence: Synthetic oligonucleotide
gcuagucggagcccuguaa

SEQ ID NO: 1921551 - RNA, 19 nt, Artificial Sequence
  Description of Artificial Sequence: Synthetic oligonucleotide
gcgcgugucugcauccccg

SEQ ID NO: 1921552 - RNA, 19 nt, Artificial Sequence
  Description of Artificial Sequence: Synthetic oligonucleotide
gucggauuaccagguaggu

SEQ ID NO: 1921553 - RNA, 19 nt, Artificial Sequence
  Description of Artificial Sequence: Synthetic oligonucleotide
cagccucaauccgggcucc

SEQ ID NO: 1921554 - RNA, 19 nt, Artificial Sequence
  Description of Artificial Sequence: Synthetic oligonucleotide
gucgaccgcuccguugcgc

SEQ ID NO: 1921555 - RNA, 19 nt, Artificial Sequence
  Description of Artificial Sequence: Synthetic oligonucleotide
ccucaauccgggcuccauc

SEQ ID NO: 1921556 - RNA, 19 nt, Artificial Sequence
  Description of Artificial Sequence: Synthetic oligonucleotide
gcggagccaaccuuccgga

SEQ ID NO: 1921557 - RNA, 19 nt, Artificial Sequence
  Description of Artificial Sequence: Synthetic oligonucleotide
ccggacgccagggacacac

SEQ ID NO: 1921558 - RNA, 19 nt, Artificial Sequence
  Description of Artificial Sequence: Synthetic oligonucleotide
caaccuuccggaggaaacu

SEQ ID NO: 1921559 - RNA, 19 nt, Artificial Sequence
  Description of Artificial Sequence: Synthetic oligonucleotide
gacaggcggagccaaccuu

SEQ ID NO: 1921560 - RNA, 19 nt, Artificial Sequence
  Description of Artificial Sequence: Synthetic oligonucleotide
gcggcuugcccaccgcuac

SEQ ID NO: 1921561 - RNA, 19 nt, Artificial Sequence
  Description of Artificial Sequence: Synthetic oligonucleotide
cuacagcacgggucaugga

SEQ ID NO: 1921562 - RNA, 19 nt, Artificial Sequence
  Description of Artificial Sequence: Synthetic oligonucleotide
cgagauuccuguccagguc

SEQ ID NO: 1921563 - RNA, 19 nt, Artificial Sequence
  Description of Artificial Sequence: Synthetic oligonucleotide
cgcgagauuccuguccagg

SEQ ID NO: 1921564 - RNA, 19 nt, Artificial Sequence
  Description of Artificial Sequence: Synthetic oligonucleotide
ggucgaccgcuccguugcg

SEQ ID NO: 1921565 - RNA, 19 nt, Artificial Sequence
  Description of Artificial Sequence: Synthetic oligonucleotide
gcgagauuccuguccaggu

SEQ ID NO: 1921566 - RNA, 19 nt, Artificial Sequence
  Description of Artificial Sequence: Synthetic oligonucleotide
cucaaaucgcgcggcccca

SEQ ID NO: 1921567 - RNA, 19 nt, Artificial Sequence
  Description of Artificial Sequence: Synthetic oligonucleotide
cagccuguucccgaccuaa

SEQ ID NO: 1921568 - RNA, 19 nt, Artificial Sequence
  Description of Artificial Sequence: Synthetic oligonucleotide
cuuuaaucccaggcuugcu

SEQ ID NO: 1921569 - RNA, 19 nt, Artificial Sequence
  Description of Artificial Sequence: Synthetic oligonucleotide
auccgggcuccaucuucau

SEQ ID NO: 1921570 - RNA, 19 nt, Artificial Sequence
  Description of Artificial Sequence: Synthetic oligonucleotide
ccacuucauagaaacugua

SEQ ID NO: 1921571 - RNA, 19 nt, Artificial Sequence
  Description of Artificial Sequence: Synthetic oligonucleotide
ccuucccguagcaggucug

SEQ ID NO: 1921572 - RNA, 19 nt, Artificial Sequence
  Description of Artificial Sequence: Synthetic oligonucleotide
gcguggcauaugaagaucu

SEQ ID NO: 1921573 - RNA, 19 nt, Artificial Sequence
  Description of Artificial Sequence: Synthetic oligonucleotide
ccuuauagugguccagccu

SEQ ID NO: 1921574 - RNA, 19 nt, Artificial Sequence
  Description of Artificial Sequence: Synthetic oligonucleotide
caggaccggguaaucuugu

SEQ ID NO: 1921575 - RNA, 19 nt, Artificial Sequence
  Description of Artificial Sequence: Synthetic oligonucleotide
ggauaacauuggcguggca

SEQ ID NO: 1921576 - RNA, 19 nt, Artificial Sequence
  Description of Artificial Sequence: Synthetic oligonucleotide
accgcuccguugcgcgcgu

SEQ ID NO: 1921577 - RNA, 19 nt, Artificial Sequence
  Description of Artificial Sequence: Synthetic oligonucleotide
caccgcuaccgcggagaag

SEQ ID NO: 1921578 - RNA, 19 nt, Artificial Sequence
  Description of Artificial Sequence: Synthetic oligonucleotide
gccugccggaaagccaugc

SEQ ID NO: 1921579 - RNA, 19 nt, Artificial Sequence
  Description of Artificial Sequence: Synthetic oligonucleotide
ggcuugcuagucggagccc

SEQ ID NO: 1921580 - RNA, 19 nt, Artificial Sequence
  Description of Artificial Sequence: Synthetic oligonucleotide
ggcaaucucaggaccgggu

SEQ ID NO: 1921581 - RNA, 19 nt, Artificial Sequence
  Description of Artificial Sequence: Synthetic oligonucleotide
cccacggccggacgccagg

SEQ ID NO: 1921582 - RNA, 19 nt, Artificial Sequence
  Description of Artificial Sequence: Synthetic oligonucleotide
ccagaccgcaggccgccag

SEQ ID NO: 1921583 - RNA, 19 nt, Artificial Sequence
  Description of Artificial Sequence: Synthetic oligonucleotide
agccuguucccgaccuaau

SEQ ID NO: 1921584 - RNA, 19 nt, Artificial Sequence
  Description of Artificial Sequence: Synthetic oligonucleotide
cuucccguagcaggucugu

SEQ ID NO: 1921585 - RNA, 19 nt, Artificial Sequence
  Description of Artificial Sequence: Synthetic oligonucleotide
ggccggacgccagggacac

SEQ ID NO: 1921586 - RNA, 19 nt, Artificial Sequence
  Description of Artificial Sequence: Synthetic oligonucleotide
ccguagcaggucugugcug

SEQ ID NO: 1921587 - RNA, 19 nt, Artificial Sequence
  Description of Artificial Sequence: Synthetic oligonucleotide
cuccguugcgcgcgugucu

SEQ ID NO: 1921588 - RNA, 19 nt, Artificial Sequence
  Description of Artificial Sequence: Synthetic oligonucleotide
cgaccguugggucggauua

SEQ ID NO: 1921589 - RNA, 19 nt, Artificial Sequence
  Description of Artificial Sequence: Synthetic oligonucleotide
gaacggcggccgagccacc

SEQ ID NO: 1921590 - RNA, 19 nt, Artificial Sequence
  Description of Artificial Sequence: Synthetic oligonucleotide
ccgccagaccgcaggccgc

SEQ ID NO: 1921591 - RNA, 19 nt, Artificial Sequence
  Description of Artificial Sequence: Synthetic oligonucleotide
cccgaccuaauggggucag

SEQ ID NO: 1921592 - RNA, 19 nt, Artificial Sequence
  Description of Artificial Sequence: Synthetic oligonucleotide
ccguugggucggauuacca

SEQ ID NO: 1921593 - RNA, 19 nt, Artificial Sequence
  Description of Artificial Sequence: Synthetic oligonucleotide
ccgcgagauuccuguccag

SEQ ID NO: 1921594 - RNA, 19 nt, Artificial Sequence
  Description of Artificial Sequence: Synthetic oligonucleotide
guugcgcgcgugucugcau

SEQ ID NO: 1921595 - RNA, 19 nt, Artificial Sequence
  Description of Artificial Sequence: Synthetic oligonucleotide
cacggccggacgccaggga

SEQ ID NO: 1921596 - RNA, 19 nt, Artificial Sequence
  Description of Artificial Sequence: Synthetic oligonucleotide
gcuccguugcgcgcguguc

SEQ ID NO: 1921597 - RNA, 19 nt, Artificial Sequence
  Description of Artificial Sequence: Synthetic oligonucleotide
ccgaccuaauggggucagg

SEQ ID NO: 1921598 - RNA, 19 nt, Artificial Sequence
  Description of Artificial Sequence: Synthetic oligonucleotide
ggacgccagggacacacuu

SEQ ID NO: 1921599 - RNA, 19 nt, Artificial Sequence
  Description of Artificial Sequence: Synthetic oligonucleotide
cccaccgcuaccgcggaga

SEQ ID NO: 1921600 - RNA, 19 nt, Artificial Sequence
  Description of Artificial Sequence: Synthetic oligonucleotide
ccaaggguccugagugcaa

SEQ ID NO: 1921601 - RNA, 19 nt, Artificial Sequence
  Description of Artificial Sequence: Synthetic oligonucleotide
uccccgccgccgcgcggcu

SEQ ID NO: 1921602 - RNA, 19 nt, Artificial Sequence
  Description of Artificial Sequence: Synthetic oligonucleotide
cccuguaaguucagccugu

SEQ ID NO: 1921603 - RNA, 19 nt, Artificial Sequence
  Description of Artificial Sequence: Synthetic oligonucleotide
cgggucauggaggaaugga

SEQ ID NO: 1921604 - RNA, 19 nt, Artificial Sequence
  Description of Artificial Sequence: Synthetic oligonucleotide
cgcgcgugucugcaucccc

SEQ ID NO: 1921605 - RNA, 19 nt, Artificial Sequence
  Description of Artificial Sequence: Synthetic oligonucleotide
ccguugcgcgcgugucugc

SEQ ID NO: 1921606 - RNA, 19 nt, Artificial Sequence
  Description of Artificial Sequence: Synthetic oligonucleotide
ccgcuaccgcggagaagag

SEQ ID NO: 1921607 - RNA, 19 nt, Artificial Sequence
  Description of Artificial Sequence: Synthetic oligonucleotide
acacgaccguugggucgga

SEQ ID NO: 1921608 - RNA, 19 nt, Artificial Sequence
  Description of Artificial Sequence: Synthetic oligonucleotide
ccgcgcggcuugcccaccg

SEQ ID NO: 1921609 - RNA, 19 nt, Artificial Sequence
  Description of Artificial Sequence: Synthetic oligonucleotide
gggccgcgagauuccuguc

SEQ ID NO: 1921610 - RNA, 19 nt, Artificial Sequence
  Description of Artificial Sequence: Synthetic oligonucleotide
gcggccgagccacccgcca

SEQ ID NO: 1921611 - RNA, 19 nt, Artificial Sequence
  Description of Artificial Sequence: Synthetic oligonucleotide
cgaccgcuccguugcgcgc

SEQ ID NO: 1921612 - RNA, 19 nt, Artificial Sequence
  Description of Artificial Sequence: Synthetic oligonucleotide
gcaguccuacaggcaaucu

SEQ ID NO: 1921613 - RNA, 19 nt, Artificial Sequence
  Description of Artificial Sequence: Synthetic oligonucleotide
gcgcgcgugucugcauccc

SEQ ID NO: 1921614 - RNA, 19 nt, Artificial Sequence
  Description of Artificial Sequence: Synthetic oligonucleotide
ggcggccgagccacccgcc

SEQ ID NO: 1921615 - RNA, 19 nt, Artificial Sequence
  Description of Artificial Sequence: Synthetic oligonucleotide
gcccaccgcuaccgcggag

SEQ ID NO: 1921616 - RNA, 19 nt, Artificial Sequence
  Description of Artificial Sequence: Synthetic oligonucleotide
ccgggccgcgagauuccug

SEQ ID NO: 1921617 - RNA, 19 nt, Artificial Sequence
  Description of Artificial Sequence: Synthetic oligonucleotide
cgccagaccgcaggccgcc

SEQ ID NO: 1921618 - RNA, 19 nt, Artificial Sequence
  Description of Artificial Sequence: Synthetic oligonucleotide
cgggccgcgagauuccugu

SEQ ID NO: 1921619 - RNA, 19 nt, Artificial Sequence
  Description of Artificial Sequence: Synthetic oligonucleotide
cggccggacgccagggaca

SEQ ID NO: 1921620 - RNA, 19 nt, Artificial Sequence
  Description of Artificial Sequence: Synthetic oligonucleotide
cguugcgcgcgugucugca

SEQ ID NO: 1921621 - RNA, 19 nt, Artificial Sequence
  Description of Artificial Sequence: Synthetic oligonucleotide
gcgcggcuugcccaccgcu

SEQ ID NO: 1921622 - RNA, 19 nt, Artificial Sequence
  Description of Artificial Sequence: Synthetic oligonucleotide
cgcgcggcuugcccaccgc

SEQ ID NO: 1921623 - RNA, 19 nt, Artificial Sequence
  Description of Artificial Sequence: Synthetic oligonucleotide
ggcucucgccugucccagu

SEQ ID NO: 1921624 - RNA, 19 nt, Artificial Sequence
  Description of Artificial Sequence: Synthetic oligonucleotide
ccgcaggccgccagcugaa

SEQ ID NO: 1921625 - RNA, 19 nt, Artificial Sequence
  Description of Artificial Sequence: Synthetic oligonucleotide
cgcuaccgcggagaagaga

SEQ ID NO: 1921626 - RNA, 19 nt, Artificial Sequence
  Description of Artificial Sequence: Synthetic oligonucleotide
cgcggcuugcccaccgcua

SEQ ID NO: 1921627 - RNA, 19 nt, Artificial Sequence
  Description of Artificial Sequence: Synthetic oligonucleotide
gccgcgcggcuugcccacc

SEQ ID NO: 1921628 - RNA, 19 nt, Artificial Sequence
  Description of Artificial Sequence: Synthetic oligonucleotide
gccagaccgcaggccgcca

SEQ ID NO: 1921629 - RNA, 19 nt, Artificial Sequence
  Description of Artificial Sequence: Synthetic oligonucleotide
ccuguaaguucagccuguu

SEQ ID NO: 1921630 - RNA, 19 nt, Artificial Sequence
  Description of Artificial Sequence: Synthetic oligonucleotide
cgcuccguugcgcgcgugu

SEQ ID NO: 1921631 - RNA, 19 nt, Artificial Sequence
  Description of Artificial Sequence: Synthetic oligonucleotide
gccggacgccagggacaca

SEQ ID NO: 1921632 - RNA, 19 nt, Artificial Sequence
  Description of Artificial Sequence: Synthetic oligonucleotide
ccgcuccguugcgcgcgug

SEQ ID NO: 1921633 - RNA, 19 nt, Artificial Sequence
  Description of Artificial Sequence: Synthetic oligonucleotide
cggacgccagggacacacu

SEQ ID NO: 1921634 - RNA, 19 nt, Artificial Sequence
  Description of Artificial Sequence: Synthetic oligonucleotide
aaaauugagauguuaauag

SEQ ID NO: 1921635 - RNA, 19 nt, Artificial Sequence
  Description of Artificial Sequence: Synthetic oligonucleotide
uguuuuacugguuacaugg

SEQ ID NO: 1921636 - RNA, 19 nt, Artificial Sequence
  Description of Artificial Sequence: Synthetic oligonucleotide
aaaacguugacaaagccgc

SEQ ID NO: 1921637 - RNA, 19 nt, Artificial Sequence
  Description of Artificial Sequence: Synthetic oligonucleotide
aaaccgacagcacaguucc

SEQ ID NO: 1921638 - RNA, 19 nt, Artificial Sequence
  Description of Artificial Sequence: Synthetic oligonucleotide
aaauuagucuucugaaagc

SEQ ID NO: 1921639 - RNA, 19 nt, Artificial Sequence
  Description of Artificial Sequence: Synthetic oligonucleotide
aaauugagauguuaauagc

SEQ ID NO: 1921640 - RNA, 19 nt, Artificial Sequence
  Description of Artificial Sequence: Synthetic oligonucleotide
uuaacaacuagacauggag

SEQ ID NO: 1921641 - RNA, 19 nt, Artificial Sequence
  Description of Artificial Sequence: Synthetic oligonucleotide
uauacaacggaaaauugag

SEQ ID NO: 1921642 - RNA, 19 nt, Artificial Sequence
  Description of Artificial Sequence: Synthetic oligonucleotide
agcaacauacacuuggugc

SEQ ID NO: 1921643 - RNA, 19 nt, Artificial Sequence
  Description of Artificial Sequence: Synthetic oligonucleotide
cauuaauucggcaagagug

SEQ ID NO: 1921644 - RNA, 19 nt, Artificial Sequence
  Description of Artificial Sequence: Synthetic oligonucleotide
ugaauuuucuuaauggaca

SEQ ID NO: 1921645 - RNA, 19 nt, Artificial Sequence
  Description of Artificial Sequence: Synthetic oligonucleotide
acauauaguacuuaagucu

SEQ ID NO: 1921646 - RNA, 19 nt, Artificial Sequence
  Description of Artificial Sequence: Synthetic oligonucleotide
uuaauggacauauaguacu

SEQ ID NO: 1921647 - RNA, 19 nt, Artificial Sequence
  Description of Artificial Sequence: Synthetic oligonucleotide
uguacaucagcccaacaag

SEQ ID NO: 1921648 - RNA, 19 nt, Artificial Sequence
  Description of Artificial Sequence: Synthetic oligonucleotide
ucuuaauggacauauagua

SEQ ID NO: 1921649 - RNA, 19 nt, Artificial Sequence
  Description of Artificial Sequence: Synthetic oligonucleotide
uuuaaaguugagcaugugu

SEQ ID NO: 1921650 - RNA, 19 nt, Artificial Sequence
  Description of Artificial Sequence: Synthetic oligonucleotide
gauucauuaauucggcaag

SEQ ID NO: 1921651 - RNA, 19 nt, Artificial Sequence
  Description of Artificial Sequence: Synthetic oligonucleotide
cugugaauuuucuuaaugg

SEQ ID NO: 1921652 - RNA, 19 nt, Artificial Sequence
  Description of Artificial Sequence: Synthetic oligonucleotide
agauaggcaaaccaucugg

SEQ ID NO: 1921653 - RNA, 19 nt, Artificial Sequence
  Description of Artificial Sequence: Synthetic oligonucleotide
ucagauaucuuccuucccc

SEQ ID NO: 1921654 - RNA, 19 nt, Artificial Sequence
  Description of Artificial Sequence: Synthetic oligonucleotide
caaaacguugacaaagccg

SEQ ID NO: 1921655 - RNA, 19 nt, Artificial Sequence
  Description of Artificial Sequence: Synthetic oligonucleotide
aaauguauacaacggaaaa

SEQ ID NO: 1921656 - RNA, 19 nt, Artificial Sequence
  Description of Artificial Sequence: Synthetic oligonucleotide
ucugaaagcaacauacacu

SEQ ID NO: 1921657 - RNA, 19 nt, Artificial Sequence
  Description of Artificial Sequence: Synthetic oligonucleotide
guaaguagggaaaaugugg

SEQ ID NO: 1921658 - RNA, 19 nt, Artificial Sequence
  Description of Artificial Sequence: Synthetic oligonucleotide
uguaaguagggaaaaugug

SEQ ID NO: 1921659 - RNA, 19 nt, Artificial Sequence
  Description of Artificial Sequence: Synthetic oligonucleotide
ugagaaaccgacagcacag

SEQ ID NO: 1921660 - RNA, 19 nt, Artificial Sequence
  Description of Artificial Sequence: Synthetic oligonucleotide
acuuaagucuguuuuacug

SEQ ID NO: 1921661 - RNA, 19 nt, Artificial Sequence
  Description of Artificial Sequence: Synthetic oligonucleotide
cauauaguacuuaagucug

SEQ ID NO: 1921662 - RNA, 19 nt, Artificial Sequence
  Description of Artificial Sequence: Synthetic oligonucleotide
ugugaauuuucuuaaugga

SEQ ID NO: 1921663 - RNA, 19 nt, Artificial Sequence
  Description of Artificial Sequence: Synthetic oligonucleotide
aauacaccaccccuguaag

SEQ ID NO: 1921664 - RNA, 19 nt, Artificial Sequence
  Description of Artificial Sequence: Synthetic oligonucleotide
auugcuaagaacuuucaaa

SEQ ID NO: 1921665 - RNA, 19 nt, Artificial Sequence
  Description of Artificial Sequence: Synthetic oligonucleotide
uauuaacaacuagacaugg

SEQ ID NO: 1921666 - RNA, 19 nt, Artificial Sequence
  Description of Artificial Sequence: Synthetic oligonucleotide
aauucggcaagagugaacu

SEQ ID NO: 1921667 - RNA, 19 nt, Artificial Sequence
  Description of Artificial Sequence: Synthetic oligonucleotide
caaaaugucaacccugggc

SEQ ID NO: 1921668 - RNA, 19 nt, Artificial Sequence
  Description of Artificial Sequence: Synthetic oligonucleotide
uagaacuucauauguaaac

SEQ ID NO: 1921669 - RNA, 19 nt, Artificial Sequence
  Description of Artificial Sequence: Synthetic oligonucleotide
uacaacggaaaauugagau

SEQ ID NO: 1921670 - RNA, 19 nt, Artificial Sequence
  Description of Artificial Sequence: Synthetic oligonucleotide
uaaguagggaaaauguggu

SEQ ID NO: 1921671 - RNA, 19 nt, Artificial Sequence
  Description of Artificial Sequence: Synthetic oligonucleotide
uucuuaauggacauauagu

SEQ ID NO: 1921672 - RNA, 19 nt, Artificial Sequence
  Description of Artificial Sequence: Synthetic oligonucleotide
uggauuccuauuaacaacu

SEQ ID NO: 1921673 - RNA, 19 nt, Artificial Sequence
  Description of Artificial Sequence: Synthetic oligonucleotide
aagcccaaaacguugacaa

SEQ ID NO: 1921674 - RNA, 19 nt, Artificial Sequence
  Description of Artificial Sequence: Synthetic oligonucleotide
uguauacaacggaaaauug

SEQ ID NO: 1921675 - RNA, 19 nt, Artificial Sequence
  Description of Artificial Sequence: Synthetic oligonucleotide
cuuaauggacauauaguac

SEQ ID NO: 1921676 - RNA, 19 nt, Artificial Sequence
  Description of Artificial Sequence: Synthetic oligonucleotide
gacauauaguacuuaaguc

SEQ ID NO: 1921677 - RNA, 19 nt, Artificial Sequence
  Description of Artificial Sequence: Synthetic oligonucleotide
uaguacaggggcuucaaag

SEQ ID NO: 1921678 - RNA, 19 nt, Artificial Sequence
  Description of Artificial Sequence: Synthetic oligonucleotide
ugauucauuaauucggcaa

SEQ ID NO: 1921679 - RNA, 19 nt, Artificial Sequence
  Description of Artificial Sequence: Synthetic oligonucleotide
uuuacugguuacaugguuc

SEQ ID NO: 1921680 - RNA, 19 nt, Artificial Sequence
  Description of Artificial Sequence: Synthetic oligonucleotide
aggcaaaccaucugguccc

SEQ ID NO: 1921681 - RNA, 19 nt, Artificial Sequence
  Description of Artificial Sequence: Synthetic oligonucleotide
ugagauguuaauagccuca

SEQ ID NO: 1921682 - RNA, 19 nt, Artificial Sequence
  Description of Artificial Sequence: Synthetic oligonucleotide
aauacaaaugccagucauc

SEQ ID NO: 1921683 - RNA, 19 nt, Artificial Sequence
  Description of Artificial Sequence: Synthetic oligonucleotide
guugaaauacaaaugccag

SEQ ID NO: 1921684 - RNA, 19 nt, Artificial Sequence
  Description of Artificial Sequence: Synthetic oligonucleotide
agaccaaauacaccacccc

SEQ ID NO: 1921685 - RNA, 19 nt, Artificial Sequence
  Description of Artificial Sequence: Synthetic oligonucleotide
uuaauagccucaaaauguc

SEQ ID NO: 1921686 - RNA, 19 nt, Artificial Sequence
  Description of Artificial Sequence: Synthetic oligonucleotide
ugaggagauaggcaaacca

SEQ ID NO: 1921687 - RNA, 19 nt, Artificial Sequence
  Description of Artificial Sequence: Synthetic oligonucleotide
aaccagacuggcuuugauc

SEQ ID NO: 1921688 - RNA, 19 nt, Artificial Sequence
  Description of Artificial Sequence: Synthetic oligonucleotide
acacugugaauuucuuucc

SEQ ID NO: 1921689 - RNA, 19 nt, Artificial Sequence
  Description of Artificial Sequence: Synthetic oligonucleotide
cuucauauguaaaccagac

SEQ ID NO: 1921690 - RNA, 19 nt, Artificial Sequence
  Description of Artificial Sequence: Synthetic oligonucleotide
ugagucggaacccguaggg

SEQ ID NO: 1921691 - RNA, 19 nt, Artificial Sequence
  Description of Artificial Sequence: Synthetic oligonucleotide
aucaaaucuguggaggcgc

SEQ ID NO: 1921692 - RNA, 19 nt, Artificial Sequence
  Description of Artificial Sequence: Synthetic oligonucleotide
gauuccuauuaacaacuag

SEQ ID NO: 1921693 - RNA, 19 nt, Artificial Sequence
  Description of Artificial Sequence: Synthetic oligonucleotide
agaacuuucaaagcaaaca

SEQ ID NO: 1921694 - RNA, 19 nt, Artificial Sequence
  Description of Artificial Sequence: Synthetic oligonucleotide
auagccucaaaaugucaac

SEQ ID NO: 1921695 - RNA, 19 nt, Artificial Sequence
  Description of Artificial Sequence: Synthetic oligonucleotide
aacuucauauguaaaccag

SEQ ID NO: 1921696 - RNA, 19 nt, Artificial Sequence
  Description of Artificial Sequence: Synthetic oligonucleotide
ugcacaguuggcaugcacc

SEQ ID NO: 1921697 - RNA, 19 nt, Artificial Sequence
  Description of Artificial Sequence: Synthetic oligonucleotide
gaacuuucaaagcaaacaa

SEQ ID NO: 1921698 - RNA, 19 nt, Artificial Sequence
  Description of Artificial Sequence: Synthetic oligonucleotide
caaaacuccugagaaaccg

SEQ ID NO: 1921699 - RNA, 19 nt, Artificial Sequence
  Description of Artificial Sequence: Synthetic oligonucleotide
aauguauacaacggaaaau

SEQ ID NO: 1921700 - RNA, 19 nt, Artificial Sequence
  Description of Artificial Sequence: Synthetic oligonucleotide
uggacauauaguacuuaag

SEQ ID NO: 1921701 - RNA, 19 nt, Artificial Sequence
  Description of Artificial Sequence: Synthetic oligonucleotide
aagaacuuucaaagcaaac

SEQ ID NO: 1921702 - RNA, 19 nt, Artificial Sequence
  Description of Artificial Sequence: Synthetic oligonucleotide
ugaacugcaagaccaaaua

SEQ ID NO: 1921703 - RNA, 19 nt, Artificial Sequence
  Description of Artificial Sequence: Synthetic oligonucleotide
ucauuaauucggcaagagu

SEQ ID NO: 1921704 - RNA, 19 nt, Artificial Sequence
  Description of Artificial Sequence: Synthetic oligonucleotide
gaccauuucugguauuucc

SEQ ID NO: 1921705 - RNA, 19 nt, Artificial Sequence
  Description of Artificial Sequence: Synthetic oligonucleotide
auuccuauuaacaacuaga

SEQ ID NO: 1921706 - RNA, 19 nt, Artificial Sequence
  Description of Artificial Sequence: Synthetic oligonucleotide
auuugcuuagcccauuuau

SEQ ID NO: 1921707 - RNA, 19 nt, Artificial Sequence
  Description of Artificial Sequence: Synthetic oligonucleotide
aaccaucugguccccaguc

SEQ ID NO: 1921708 - RNA, 19 nt, Artificial Sequence
  Description of Artificial Sequence: Synthetic oligonucleotide
cagcaagccaaucuguugg

SEQ ID NO: 1921709 - RNA, 19 nt, Artificial Sequence
  Description of Artificial Sequence: Synthetic oligonucleotide
aaacuccugagaaaccgac

SEQ ID NO: 1921710 - RNA, 19 nt, Artificial Sequence
  Description of Artificial Sequence: Synthetic oligonucleotide
acccguaggguguuggacc

SEQ ID NO: 1921711 - RNA, 19 nt, Artificial Sequence
  Description of Artificial Sequence: Synthetic oligonucleotide
uagcccauuuauaugcaag

SEQ ID NO: 1921712 - RNA, 19 nt, Artificial Sequence
  Description of Artificial Sequence: Synthetic oligonucleotide
auacaaaugccagucaucu

SEQ ID NO: 1921713 - RNA, 19 nt, Artificial Sequence
  Description of Artificial Sequence: Synthetic oligonucleotide
cucauuucuucuucuggcg

SEQ ID NO: 1921714 - RNA, 19 nt, Artificial Sequence
  Description of Artificial Sequence: Synthetic oligonucleotide
gaacuucauauguaaacca

SEQ ID NO: 1921715 - RNA, 19 nt, Artificial Sequence
  Description of Artificial Sequence: Synthetic oligonucleotide
guaacacuuuuccacacug

SEQ ID NO: 1921716 - RNA, 19 nt, Artificial Sequence
  Description of Artificial Sequence: Synthetic oligonucleotide
uucauauguaaaccagacu

SEQ ID NO: 1921717 - RNA, 19 nt, Artificial Sequence
  Description of Artificial Sequence: Synthetic oligonucleotide
cauggauuugcuuagccca

SEQ ID NO: 1921718 - RNA, 19 nt, Artificial Sequence
  Description of Artificial Sequence: Synthetic oligonucleotide
ugcuaagaacuuucaaagc

SEQ ID NO: 1921719 - RNA, 19 nt, Artificial Sequence
  Description of Artificial Sequence: Synthetic oligonucleotide
aaagcaguaaacgcugcca

SEQ ID NO: 1921720 - RNA, 19 nt, Artificial Sequence
  Description of Artificial Sequence: Synthetic oligonucleotide
uucucuccagcuuuauucc

SEQ ID NO: 1921721 - RNA, 19 nt, Artificial Sequence
  Description of Artificial Sequence: Synthetic oligonucleotide
ugguucuugauuuauuaua

SEQ ID NO: 1921722 - RNA, 19 nt, Artificial Sequence
  Description of Artificial Sequence: Synthetic oligonucleotide
acaacggaaaauugagaug

SEQ ID NO: 1921723 - RNA, 19 nt, Artificial Sequence
  Description of Artificial Sequence: Synthetic oligonucleotide
aagucuguuuuacugguua

SEQ ID NO: 1921724 - RNA, 19 nt, Artificial Sequence
  Description of Artificial Sequence: Synthetic oligonucleotide
aguagggaaaaugugguga

SEQ ID NO: 1921725 - RNA, 19 nt, Artificial Sequence
  Description of Artificial Sequence: Synthetic oligonucleotide
aaguagggaaaauguggug

SEQ ID NO: 1921726 - RNA, 19 nt, Artificial Sequence
  Description of Artificial Sequence: Synthetic oligonucleotide
agucuguuuuacugguuac

SEQ ID NO: 1921727 - RNA, 19 nt, Artificial Sequence
  Description of Artificial Sequence: Synthetic oligonucleotide
gaaaauugagauguuaaua

SEQ ID NO: 1921728 - RNA, 19 nt, Artificial Sequence
  Description of Artificial Sequence: Synthetic oligonucleotide
gcuuagcccauuuauaugc

SEQ ID NO: 1921729 - RNA, 19 nt, Artificial Sequence
  Description of Artificial Sequence: Synthetic oligonucleotide
agagugaacugcaagacca

SEQ ID NO: 1921730 - RNA, 19 nt, Artificial Sequence
  Description of Artificial Sequence: Synthetic oligonucleotide
auaggcaaaccaucugguc

SEQ ID NO: 1921731 - RNA, 19 nt, Artificial Sequence
  Description of Artificial Sequence: Synthetic oligonucleotide
cuuagaacuucauauguaa

SEQ ID NO: 1921732 - RNA, 19 nt, Artificial Sequence
  Description of Artificial Sequence: Synthetic oligonucleotide
augauugcuaagaacuuuc

SEQ ID NO: 1921733 - RNA, 19 nt, Artificial Sequence
  Description of Artificial Sequence: Synthetic oligonucleotide
uuugcuuagcccauuuaua

SEQ ID NO: 1921734 - RNA, 19 nt, Artificial Sequence
  Description of Artificial Sequence: Synthetic oligonucleotide
aagcaacauacacuuggug

SEQ ID NO: 1921735 - RNA, 19 nt, Artificial Sequence
  Description of Artificial Sequence: Synthetic oligonucleotide
gagaaagcaguaaacgcug

SEQ ID NO: 1921736 - RNA, 19 nt, Artificial Sequence
  Description of Artificial Sequence: Synthetic oligonucleotide
gacuucauggauuugcuua

SEQ ID NO: 1921737 - RNA, 19 nt, Artificial Sequence
  Description of Artificial Sequence: Synthetic oligonucleotide
uuacugguuacaugguucu

SEQ ID NO: 1921738 - RNA, 19 nt, Artificial Sequence
  Description of Artificial Sequence: Synthetic oligonucleotide
uucauuaauucggcaagag

SEQ ID NO: 1921739 - RNA, 19 nt, Artificial Sequence
  Description of Artificial Sequence: Synthetic oligonucleotide
uugcuuagcccauuuauau

SEQ ID NO: 1921740 - RNA, 19 nt, Artificial Sequence
  Description of Artificial Sequence: Synthetic oligonucleotide
agcuuuauuccuuuccaga

SEQ ID NO: 1921741 - RNA, 19 nt, Artificial Sequence
  Description of Artificial Sequence: Synthetic oligonucleotide
acaucguaguuccuucuuc

SEQ ID NO: 1921742 - RNA, 19 nt, Artificial Sequence
  Description of Artificial Sequence: Synthetic oligonucleotide
ggguugauucauuaauucg

SEQ ID NO: 1921743 - RNA, 19 nt, Artificial Sequence
  Description of Artificial Sequence: Synthetic oligonucleotide
guagggaaaauguggugag

SEQ ID NO: 1921744 - RNA, 19 nt, Artificial Sequence
  Description of Artificial Sequence: Synthetic oligonucleotide
ucauuucuucuucuggcgu

SEQ ID NO: 1921745 - RNA, 19 nt, Artificial Sequence
  Description of Artificial Sequence: Synthetic oligonucleotide
gcuaagaacuuucaaagca

SEQ ID NO: 1921746 - RNA, 19 nt, Artificial Sequence
  Description of Artificial Sequence: Synthetic oligonucleotide
aauguggugaggagauagg

SEQ ID NO: 1921747 - RNA, 19 nt, Artificial Sequence
  Description of Artificial Sequence: Synthetic oligonucleotide
uaauagccucaaaauguca

SEQ ID NO: 1921748 - RNA, 19 nt, Artificial Sequence
  Description of Artificial Sequence: Synthetic oligonucleotide
gcaacauacacuuggugcc

SEQ ID NO: 1921749 - RNA, 19 nt, Artificial Sequence
  Description of Artificial Sequence: Synthetic oligonucleotide
auguauacaacggaaaauu

SEQ ID NO: 1921750 - RNA, 19 nt, Artificial Sequence
  Description of Artificial Sequence: Synthetic oligonucleotide
uggcuuagaacuucauaug

SEQ ID NO: 1921751 - RNA, 19 nt, Artificial Sequence
  Description of Artificial Sequence: Synthetic oligonucleotide
aaguugagcauguguuugu

SEQ ID NO: 1921752 - RNA, 19 nt, Artificial Sequence
  Description of Artificial Sequence: Synthetic oligonucleotide
gugaauuuucuuaauggac

SEQ ID NO: 1921753 - RNA, 19 nt, Artificial Sequence
  Description of Artificial Sequence: Synthetic oligonucleotide
ugauugcuaagaacuuuca

SEQ ID NO: 1921754 - RNA, 19 nt, Artificial Sequence
  Description of Artificial Sequence: Synthetic oligonucleotide
uguucugccuggcuuagaa

SEQ ID NO: 1921755 - RNA, 19 nt, Artificial Sequence
  Description of Artificial Sequence: Synthetic oligonucleotide
aaugauugcuaagaacuuu

SEQ ID NO: 1921756 - RNA, 19 nt, Artificial Sequence
  Description of Artificial Sequence: Synthetic oligonucleotide
uuuuacugguuacaugguu

SEQ ID NO: 1921757 - RNA, 19 nt, Artificial Sequence
  Description of Artificial Sequence: Synthetic oligonucleotide
agugucaaagacauuccag

SEQ ID NO: 1921758 - RNA, 19 nt, Artificial Sequence
  Description of Artificial Sequence: Synthetic oligonucleotide
uguuggaccauuucuggua

SEQ ID NO: 1921759 - RNA, 19 nt, Artificial Sequence
  Description of Artificial Sequence: Synthetic oligonucleotide
aguccugcuguguagacau

SEQ ID NO: 1921760 - RNA, 19 nt, Artificial Sequence
  Description of Artificial Sequence: Synthetic oligonucleotide
acaaggaagcccaaaacgu

SEQ ID NO: 1921761 - RNA, 19 nt, Artificial Sequence
  Description of Artificial Sequence: Synthetic oligonucleotide
acccugaguguacaucagc

SEQ ID NO: 1921762 - RNA, 19 nt, Artificial Sequence
  Description of Artificial Sequence: Synthetic oligonucleotide
agucggaacccguagggug

SEQ ID NO: 1921763 - RNA, 19 nt, Artificial Sequence
  Description of Artificial Sequence: Synthetic oligonucleotide
auuaauucggcaagaguga

SEQ ID NO: 1921764 - RNA, 19 nt, Artificial Sequence
  Description of Artificial Sequence: Synthetic oligonucleotide
uugauucauuaauucggca

SEQ ID NO: 1921765 - RNA, 19 nt, Artificial Sequence
  Description of Artificial Sequence: Synthetic oligonucleotide
aacauacacuuggugccac

SEQ ID NO: 1921766 - RNA, 19 nt, Artificial Sequence
  Description of Artificial Sequence: Synthetic oligonucleotide
ucggcaagagugaacugca

SEQ ID NO: 1921767 - RNA, 19 nt, Artificial Sequence
  Description of Artificial Sequence: Synthetic oligonucleotide
guauacaacggaaaauuga

SEQ ID NO: 1921768 - RNA, 19 nt, Artificial Sequence
  Description of Artificial Sequence: Synthetic oligonucleotide
ugcaaaagugaauggccac

SEQ ID NO: 1921769 - RNA, 19 nt, Artificial Sequence
  Description of Artificial Sequence: Synthetic oligonucleotide
uaaugauugcuaagaacuu

SEQ ID NO: 1921770 - RNA, 19 nt, Artificial Sequence
  Description of Artificial Sequence: Synthetic oligonucleotide
aucagcccaacaagaaugc

SEQ ID NO: 1921771 - RNA, 19 nt, Artificial Sequence
  Description of Artificial Sequence: Synthetic oligonucleotide
ugugccacucugcuaggcc

SEQ ID NO: 1921772 - RNA, 19 nt, Artificial Sequence
  Description of Artificial Sequence: Synthetic oligonucleotide
uagccucaaaaugucaacc

SEQ ID NO: 1921773 - RNA, 19 nt, Artificial Sequence
  Description of Artificial Sequence: Synthetic oligonucleotide
ugcuuagcccauuuauaug

SEQ ID NO: 1921774 - RNA, 19 nt, Artificial Sequence
  Description of Artificial Sequence: Synthetic oligonucleotide
gggagaaagcaguaaacgc

SEQ ID NO: 1921775 - RNA, 19 nt, Artificial Sequence
  Description of Artificial Sequence: Synthetic oligonucleotide
aacccguaggguguuggac

SEQ ID NO: 1921776 - RNA, 19 nt, Artificial Sequence
  Description of Artificial Sequence: Synthetic oligonucleotide
gguguuggaccauuucugg

SEQ ID NO: 1921777 - RNA, 19 nt, Artificial Sequence
  Description of Artificial Sequence: Synthetic oligonucleotide
gagauaggcaaaccaucug

SEQ ID NO: 1921778 - RNA, 19 nt, Artificial Sequence
  Description of Artificial Sequence: Synthetic oligonucleotide
ccauuuauaugcaaguguc

SEQ ID NO: 1921779 - RNA, 19 nt, Artificial Sequence
  Description of Artificial Sequence: Synthetic oligonucleotide
aaacguugacaaagccgcc

SEQ ID NO: 1921780 - RNA, 19 nt, Artificial Sequence
  Description of Artificial Sequence: Synthetic oligonucleotide
ggaaguaaugauugcuaag

SEQ ID NO: 1921781 - RNA, 19 nt, Artificial Sequence
  Description of Artificial Sequence: Synthetic oligonucleotide
agcccauuuauaugcaagu

SEQ ID NO: 1921782 - RNA, 19 nt, Artificial Sequence
  Description of Artificial Sequence: Synthetic oligonucleotide
aggagauaggcaaaccauc

SEQ ID NO: 1921783 - RNA, 19 nt, Artificial Sequence
  Description of Artificial Sequence: Synthetic oligonucleotide
cauuucuucuucuggcgug

SEQ ID NO: 1921784 - RNA, 19 nt, Artificial Sequence
  Description of Artificial Sequence: Synthetic oligonucleotide
uccagguggauuccuauua

SEQ ID NO: 1921785 - RNA, 19 nt, Artificial Sequence
  Description of Artificial Sequence: Synthetic oligonucleotide
agcgaaggaagucccuggg

SEQ ID NO: 1921786 - RNA, 19 nt, Artificial Sequence
  Description of Artificial Sequence: Synthetic oligonucleotide
uagcucuuaaugcucuuuc

SEQ ID NO: 1921787 - RNA, 19 nt, Artificial Sequence
  Description of Artificial Sequence: Synthetic oligonucleotide
cuuggugccacggucacug

SEQ ID NO: 1921788 - RNA, 19 nt, Artificial Sequence
  Description of Artificial Sequence: Synthetic oligonucleotide
caagagugaacugcaagac

SEQ ID NO: 1921789 - RNA, 19 nt, Artificial Sequence
  Description of Artificial Sequence: Synthetic oligonucleotide
ccagucaucugcauggugc

SEQ ID NO: 1921790 - RNA, 19 nt, Artificial Sequence
  Description of Artificial Sequence: Synthetic oligonucleotide
agcaagccaaucuguuggg

SEQ ID NO: 1921791 - RNA, 19 nt, Artificial Sequence
  Description of Artificial Sequence: Synthetic oligonucleotide
aacguugacaaagccgcca

SEQ ID NO: 1921792 - RNA, 19 nt, Artificial Sequence
  Description of Artificial Sequence: Synthetic oligonucleotide
ugaguguacaucagcccaa

SEQ ID NO: 1921793 - RNA, 19 nt, Artificial Sequence
  Description of Artificial Sequence: Synthetic oligonucleotide
agggaaaauguggugagga

SEQ ID NO: 1921794 - RNA, 19 nt, Artificial Sequence
  Description of Artificial Sequence: Synthetic oligonucleotide
ggggagaaagcaguaaacg

SEQ ID NO: 1921795 - RNA, 19 nt, Artificial Sequence
  Description of Artificial Sequence: Synthetic oligonucleotide
uaauucggcaagagugaac

SEQ ID NO: 1921796 - RNA, 19 nt, Artificial Sequence
  Description of Artificial Sequence: Synthetic oligonucleotide
aaagccgccagggaaguaa

SEQ ID NO: 1921797 - RNA, 19 nt, Artificial Sequence
  Description of Artificial Sequence: Synthetic oligonucleotide
cuucuucuggcgugagucg

SEQ ID NO: 1921798 - RNA, 19 nt, Artificial Sequence
  Description of Artificial Sequence: Synthetic oligonucleotide
ucucagacuucauggauuu

SEQ ID NO: 1921799 - RNA, 19 nt, Artificial Sequence
  Description of Artificial Sequence: Synthetic oligonucleotide
caucaaaucuguggaggcg

SEQ ID NO: 1921800 - RNA, 19 nt, Artificial Sequence
  Description of Artificial Sequence: Synthetic oligonucleotide
uuuugcugguaacacuuuu

SEQ ID NO: 1921801 - RNA, 19 nt, Artificial Sequence
  Description of Artificial Sequence: Synthetic oligonucleotide
acguugacaaagccgccag

SEQ ID NO: 1921802 - RNA, 19 nt, Artificial Sequence
  Description of Artificial Sequence: Synthetic oligonucleotide
gauugcuaagaacuuucaa

SEQ ID NO: 1921803 - RNA, 19 nt, Artificial Sequence
  Description of Artificial Sequence: Synthetic oligonucleotide
guguacaucagcccaacaa

SEQ ID NO: 1921804 - RNA, 19 nt, Artificial Sequence
  Description of Artificial Sequence: Synthetic oligonucleotide
aaaacuccugagaaaccga

SEQ ID NO: 1921805 - RNA, 19 nt, Artificial Sequence
  Description of Artificial Sequence: Synthetic oligonucleotide
uacuuaagucuguuuuacu

SEQ ID NO: 1921806 - RNA, 19 nt, Artificial Sequence
  Description of Artificial Sequence: Synthetic oligonucleotide
ucguaguuccuucuucaaa

SEQ ID NO: 1921807 - RNA, 19 nt, Artificial Sequence
  Description of Artificial Sequence: Synthetic oligonucleotide
aggccugugaauuuucuua

SEQ ID NO: 1921808 - RNA, 19 nt, Artificial Sequence
  Description of Artificial Sequence: Synthetic oligonucleotide
cauuuauaugcaaguguca

SEQ ID NO: 1921809 - RNA, 19 nt, Artificial Sequence
  Description of Artificial Sequence: Synthetic oligonucleotide
ucggguugauucauuaauu

SEQ ID NO: 1921810 - RNA, 19 nt, Artificial Sequence
  Description of Artificial Sequence: Synthetic oligonucleotide
cuggcuuagaacuucauau

SEQ ID NO: 1921811 - RNA, 19 nt, Artificial Sequence
  Description of Artificial Sequence: Synthetic oligonucleotide
aagucggguugauucauua

SEQ ID NO: 1921812 - RNA, 19 nt, Artificial Sequence
  Description of Artificial Sequence: Synthetic oligonucleotide
uuuuaaaguugagcaugug

SEQ ID NO: 1921813 - RNA, 19 nt, Artificial Sequence
  Description of Artificial Sequence: Synthetic oligonucleotide
ggacauauaguacuuaagu

SEQ ID NO: 1921814 - RNA, 19 nt, Artificial Sequence
  Description of Artificial Sequence: Synthetic oligonucleotide
acuucauauguaaaccaga

SEQ ID NO: 1921815 - RNA, 19 nt, Artificial Sequence
  Description of Artificial Sequence: Synthetic oligonucleotide
cuguuuuacugguuacaug

SEQ ID NO: 1921816 - RNA, 19 nt, Artificial Sequence
  Description of Artificial Sequence: Synthetic oligonucleotide
uauaguacuuaagucuguu

SEQ ID NO: 1921817 - RNA, 19 nt, Artificial Sequence
  Description of Artificial Sequence: Synthetic oligonucleotide
ugagcauguguuuguaguu

SEQ ID NO: 1921818 - RNA, 19 nt, Artificial Sequence
  Description of Artificial Sequence: Synthetic oligonucleotide
ucccuggggugcaaaagug

SEQ ID NO: 1921819 - RNA, 19 nt, Artificial Sequence
  Description of Artificial Sequence: Synthetic oligonucleotide
cugagaaaccgacagcaca

SEQ ID NO: 1921820 - RNA, 19 nt, Artificial Sequence
  Description of Artificial Sequence: Synthetic oligonucleotide
ugcucucagacuucaugga

SEQ ID NO: 1921821 - RNA, 19 nt, Artificial Sequence
  Description of Artificial Sequence: Synthetic oligonucleotide
acaucagcccaacaagaau

SEQ ID NO: 1921822 - RNA, 19 nt, Artificial Sequence
  Description of Artificial Sequence: Synthetic oligonucleotide
uuaauucggcaagagugaa

SEQ ID NO: 1921823 - RNA, 19 nt, Artificial Sequence
  Description of Artificial Sequence: Synthetic oligonucleotide
gaggcuagcucuuaaugcu

SEQ ID NO: 1921824 - RNA, 19 nt, Artificial Sequence
  Description of Artificial Sequence: Synthetic oligonucleotide
caacggaaaauugagaugu

SEQ ID NO: 1921825 - RNA, 19 nt, Artificial Sequence
  Description of Artificial Sequence: Synthetic oligonucleotide
ggcaagagugaacugcaag

SEQ ID NO: 1921826 - RNA, 19 nt, Artificial Sequence
  Description of Artificial Sequence: Synthetic oligonucleotide
aacaagaaugccagccaga

SEQ ID NO: 1921827 - RNA, 19 nt, Artificial Sequence
  Description of Artificial Sequence: Synthetic oligonucleotide
gcaagagugaacugcaaga

SEQ ID NO: 1921828 - RNA, 19 nt, Artificial Sequence
  Description of Artificial Sequence: Synthetic oligonucleotide
ugguaacacuuuuccacac

SEQ ID NO: 1921829 - RNA, 19 nt, Artificial Sequence
  Description of Artificial Sequence: Synthetic oligonucleotide
gguggauuccuauuaacaa

SEQ ID NO: 1921830 - RNA, 19 nt, Artificial Sequence
  Description of Artificial Sequence: Synthetic oligonucleotide
cugguauuuccucgguccc

SEQ ID NO: 1921831 - RNA, 19 nt, Artificial Sequence
  Description of Artificial Sequence: Synthetic oligonucleotide
auucauuaauucggcaaga

SEQ ID NO: 1921832 - RNA, 19 nt, Artificial Sequence
  Description of Artificial Sequence: Synthetic oligonucleotide
agguggauuccuauuaaca

SEQ ID NO: 1921833 - RNA, 19 nt, Artificial Sequence
  Description of Artificial Sequence: Synthetic oligonucleotide
uuagcccauuuauaugcaa

SEQ ID NO: 1921834 - RNA, 19 nt, Artificial Sequence
  Description of Artificial Sequence: Synthetic oligonucleotide
aauggacauauaguacuua

SEQ ID NO: 1921835 - RNA, 19 nt, Artificial Sequence
  Description of Artificial Sequence: Synthetic oligonucleotide
auaguacuuaagucuguuu

SEQ ID NO: 1921836 - RNA, 19 nt, Artificial Sequence
  Description of Artificial Sequence: Synthetic oligonucleotide
cuuaaugcucuuuccagcu

SEQ ID NO: 1921837 - RNA, 19 nt, Artificial Sequence
  Description of Artificial Sequence: Synthetic oligonucleotide
uucugguauuuccucgguc

SEQ ID NO: 1921838 - RNA, 19 nt, Artificial Sequence
  Description of Artificial Sequence: Synthetic oligonucleotide
gcccaaaacguugacaaag

SEQ ID NO: 1921839 - RNA, 19 nt, Artificial Sequence
  Description of Artificial Sequence: Synthetic oligonucleotide
acaccaccccuguaaguag

SEQ ID NO: 1921840 - RNA, 19 nt, Artificial Sequence
  Description of Artificial Sequence: Synthetic oligonucleotide
cagcgaaggaagucccugg

SEQ ID NO: 1921841 - RNA, 19 nt, Artificial Sequence
  Description of Artificial Sequence: Synthetic oligonucleotide
aguaaacgcugccagucuu

SEQ ID NO: 1921842 - RNA, 19 nt, Artificial Sequence
  Description of Artificial Sequence: Synthetic oligonucleotide
caucguaguuccuucuuca

SEQ ID NO: 1921843 - RNA, 19 nt, Artificial Sequence
  Description of Artificial Sequence: Synthetic oligonucleotide
aaaggacccugaguguaca

SEQ ID NO: 1921844 - RNA, 19 nt, Artificial Sequence
  Description of Artificial Sequence: Synthetic oligonucleotide
ugcaccagaugugucaaau

SEQ ID NO: 1921845 - RNA, 19 nt, Artificial Sequence
  Description of Artificial Sequence: Synthetic oligonucleotide
caagccaaucuguugggga

SEQ ID NO: 1921846 - RNA, 19 nt, Artificial Sequence
  Description of Artificial Sequence: Synthetic oligonucleotide
ccugugaauuuucuuaaug

SEQ ID NO: 1921847 - RNA, 19 nt, Artificial Sequence
  Description of Artificial Sequence: Synthetic oligonucleotide
cagguggauuccuauuaac

SEQ ID NO: 1921848 - RNA, 19 nt, Artificial Sequence
  Description of Artificial Sequence: Synthetic oligonucleotide
gaggugcacaguuggcaug

SEQ ID NO: 1921849 - RNA, 19 nt, Artificial Sequence
  Description of Artificial Sequence: Synthetic oligonucleotide
ucucuccagcuuuauuccu

SEQ ID NO: 1921850 - RNA, 19 nt, Artificial Sequence
  Description of Artificial Sequence: Synthetic oligonucleotide
caccaccccuguaaguagg

SEQ ID NO: 1921851 - RNA, 19 nt, Artificial Sequence
  Description of Artificial Sequence: Synthetic oligonucleotide
cugguuacaugguucuuga

SEQ ID NO: 1921852 - RNA, 19 nt, Artificial Sequence
  Description of Artificial Sequence: Synthetic oligonucleotide
ggaaaauguggugaggaga

SEQ ID NO: 1921853 - RNA, 19 nt, Artificial Sequence
  Description of Artificial Sequence: Synthetic oligonucleotide
gaagcccaaaacguugaca

SEQ ID NO: 1921854 - RNA, 19 nt, Artificial Sequence
  Description of Artificial Sequence: Synthetic oligonucleotide
ccucaaaaugucaacccug

SEQ ID NO: 1921855 - RNA, 19 nt, Artificial Sequence
  Description of Artificial Sequence: Synthetic oligonucleotide
agcauguguuuguaguuuu

SEQ ID NO: 1921856 - RNA, 19 nt, Artificial Sequence
  Description of Artificial Sequence: Synthetic oligonucleotide
ugugugccacucugcuagg

SEQ ID NO: 1921857 - RNA, 19 nt, Artificial Sequence
  Description of Artificial Sequence: Synthetic oligonucleotide
agagcauggacaccauguu

SEQ ID NO: 1921858 - RNA, 19 nt, Artificial Sequence
  Description of Artificial Sequence: Synthetic oligonucleotide
uaggguguuggaccauuuc

SEQ ID NO: 1921859 - RNA, 19 nt, Artificial Sequence
  Description of Artificial Sequence: Synthetic oligonucleotide
ugggcaccagcucauuuua

SEQ ID NO: 1921860 - RNA, 19 nt, Artificial Sequence
  Description of Artificial Sequence: Synthetic oligonucleotide
auacaacggaaaauugaga

SEQ ID NO: 1921861 - RNA, 19 nt, Artificial Sequence
  Description of Artificial Sequence: Synthetic oligonucleotide
uggugccacggucacuggc

SEQ ID NO: 1921862 - RNA, 19 nt, Artificial Sequence
  Description of Artificial Sequence: Synthetic oligonucleotide
cccaaaacguugacaaagc

SEQ ID NO: 1921863 - RNA, 19 nt, Artificial Sequence
  Description of Artificial Sequence: Synthetic oligonucleotide
caaaugccagucaucugca

SEQ ID NO: 1921864 - RNA, 19 nt, Artificial Sequence
  Description of Artificial Sequence: Synthetic oligonucleotide
ggacaaggaagcccaaaac

SEQ ID NO: 1921865 - RNA, 19 nt, Artificial Sequence
  Description of Artificial Sequence: Synthetic oligonucleotide
cuccugagaaaccgacagc

SEQ ID NO: 1921866 - RNA, 19 nt, Artificial Sequence
  Description of Artificial Sequence: Synthetic oligonucleotide
gcaaaagugaauggccacc

SEQ ID NO: 1921867 - RNA, 19 nt, Artificial Sequence
  Description of Artificial Sequence: Synthetic oligonucleotide
aacuccugagaaaccgaca

SEQ ID NO: 1921868 - RNA, 19 nt, Artificial Sequence
  Description of Artificial Sequence: Synthetic oligonucleotide
ccaaaacguugacaaagcc

SEQ ID NO: 1921869 - RNA, 19 nt, Artificial Sequence
  Description of Artificial Sequence: Synthetic oligonucleotide
caaaagugaauggccacca

SEQ ID NO: 1921870 - RNA, 19 nt, Artificial Sequence
  Description of Artificial Sequence: Synthetic oligonucleotide
agaaaccgacagcacaguu

SEQ ID NO: 1921871 - RNA, 19 nt, Artificial Sequence
  Description of Artificial Sequence: Synthetic oligonucleotide
gugcaaaagugaauggcca

SEQ ID NO: 1921872 - RNA, 19 nt, Artificial Sequence
  Description of Artificial Sequence: Synthetic oligonucleotide
uuguguguucugccuggcu

SEQ ID NO: 1921873 - RNA, 19 nt, Artificial Sequence
  Description of Artificial Sequence: Synthetic oligonucleotide
ggacccugaguguacauca

SEQ ID NO: 1921874 - RNA, 19 nt, Artificial Sequence
  Description of Artificial Sequence: Synthetic oligonucleotide
uuuguguguucugccuggc

SEQ ID NO: 1921875 - RNA, 19 nt, Artificial Sequence
  Description of Artificial Sequence: Synthetic oligonucleotide
auacaccaccccuguaagu

SEQ ID NO: 1921876 - RNA, 19 nt, Artificial Sequence
  Description of Artificial Sequence: Synthetic oligonucleotide
ugaagucggguugauucau

SEQ ID NO: 1921877 - RNA, 19 nt, Artificial Sequence
  Description of Artificial Sequence: Synthetic oligonucleotide
auauaguacuuaagucugu

SEQ ID NO: 1921878 - RNA, 19 nt, Artificial Sequence
  Description of Artificial Sequence: Synthetic oligonucleotide
cugaagucggguugauuca

SEQ ID NO: 1921879 - RNA, 19 nt, Artificial Sequence
  Description of Artificial Sequence: Synthetic oligonucleotide
acggucacuggccaucaaa

SEQ ID NO: 1921880 - RNA, 19 nt, Artificial Sequence
  Description of Artificial Sequence: Synthetic oligonucleotide
agucggguugauucauuaa

SEQ ID NO: 1921881 - RNA, 19 nt, Artificial Sequence
  Description of Artificial Sequence: Synthetic oligonucleotide
caagaaugccagccagaug

SEQ ID NO: 1921882 - RNA, 19 nt, Artificial Sequence
  Description of Artificial Sequence: Synthetic oligonucleotide
auucggcaagagugaacug

SEQ ID NO: 1921883 - RNA, 19 nt, Artificial Sequence
  Description of Artificial Sequence: Synthetic oligonucleotide
aguguacaucagcccaaca

SEQ ID NO: 1921884 - RNA, 19 nt, Artificial Sequence
  Description of Artificial Sequence: Synthetic oligonucleotide
agggaaguaaugauugcua

SEQ ID NO: 1921885 - RNA, 19 nt, Artificial Sequence
  Description of Artificial Sequence: Synthetic oligonucleotide
aggcuagcucuuaaugcuc

SEQ ID NO: 1921886 - RNA, 19 nt, Artificial Sequence
  Description of Artificial Sequence: Synthetic oligonucleotide
gucggguugauucauuaau

SEQ ID NO: 1921887 - RNA, 19 nt, Artificial Sequence
  Description of Artificial Sequence: Synthetic oligonucleotide
uggcgugagucggaacccg

SEQ ID NO: 1921888 - RNA, 19 nt, Artificial Sequence
  Description of Artificial Sequence: Synthetic oligonucleotide
gacauggaggugcacaguu

SEQ ID NO: 1921889 - RNA, 19 nt, Artificial Sequence
  Description of Artificial Sequence: Synthetic oligonucleotide
ggaaaauugagauguuaau

SEQ ID NO: 1921890 - RNA, 19 nt, Artificial Sequence
  Description of Artificial Sequence: Synthetic oligonucleotide
acaccauguugaaauacaa

SEQ ID NO: 1921891 - RNA, 19 nt, Artificial Sequence
  Description of Artificial Sequence: Synthetic oligonucleotide
augcccagcgaaggaaguc

SEQ ID NO: 1921892 - RNA, 19 nt, Artificial Sequence
  Description of Artificial Sequence: Synthetic oligonucleotide
caccauguugaaauacaaa

SEQ ID NO: 1921893 - RNA, 19 nt, Artificial Sequence
  Description of Artificial Sequence: Synthetic oligonucleotide
gaggagauaggcaaaccau

SEQ ID NO: 1921894 - RNA, 19 nt, Artificial Sequence
  Description of Artificial Sequence: Synthetic oligonucleotide
ugguauuuccucggucccu

SEQ ID NO: 1921895 - RNA, 19 nt, Artificial Sequence
  Description of Artificial Sequence: Synthetic oligonucleotide
caggggagaaagcaguaaa

SEQ ID NO: 1921896 - RNA, 19 nt, Artificial Sequence
  Description of Artificial Sequence: Synthetic oligonucleotide
ggguguuggaccauuucug

SEQ ID NO: 1921897 - RNA, 19 nt, Artificial Sequence
  Description of Artificial Sequence: Synthetic oligonucleotide
gaguguacaucagcccaac

SEQ ID NO: 1921898 - RNA, 19 nt, Artificial Sequence
  Description of Artificial Sequence: Synthetic oligonucleotide
guucugccuggcuuagaac

SEQ ID NO: 1921899 - RNA, 19 nt, Artificial Sequence
  Description of Artificial Sequence: Synthetic oligonucleotide
gcaugcaccagauguguca

SEQ ID NO: 1921900 - RNA, 19 nt, Artificial Sequence
  Description of Artificial Sequence: Synthetic oligonucleotide
uuccagguggauuccuauu

SEQ ID NO: 1921901 - RNA, 19 nt, Artificial Sequence
  Description of Artificial Sequence: Synthetic oligonucleotide
agugaacugcaagaccaaa

SEQ ID NO: 1921902 - RNA, 19 nt, Artificial Sequence
  Description of Artificial Sequence: Synthetic oligonucleotide
gcaguaaacgcugccaguc

SEQ ID NO: 1921903 - RNA, 19 nt, Artificial Sequence
  Description of Artificial Sequence: Synthetic oligonucleotide
uggaggcgcugucuccuca

SEQ ID NO: 1921904 - RNA, 19 nt, Artificial Sequence
  Description of Artificial Sequence: Synthetic oligonucleotide
gguuacaugguucuugauu

SEQ ID NO: 1921905 - RNA, 19 nt, Artificial Sequence
  Description of Artificial Sequence: Synthetic oligonucleotide
ggugaggagauaggcaaac

SEQ ID NO: 1921906 - RNA, 19 nt, Artificial Sequence
  Description of Artificial Sequence: Synthetic oligonucleotide
uaaacgcugccagucuuuu

SEQ ID NO: 1921907 - RNA, 19 nt, Artificial Sequence
  Description of Artificial Sequence: Synthetic oligonucleotide
aggaguaguacaggggcuu

SEQ ID NO: 1921908 - RNA, 19 nt, Artificial Sequence
  Description of Artificial Sequence: Synthetic oligonucleotide
caccccuguaaguagggaa

SEQ ID NO: 1921909 - RNA, 19 nt, Artificial Sequence
  Description of Artificial Sequence: Synthetic oligonucleotide
gucaacccugggcaccagc

SEQ ID NO: 1921910 - RNA, 19 nt, Artificial Sequence
  Description of Artificial Sequence: Synthetic oligonucleotide
gguucuugauuuauuauau

SEQ ID NO: 1921911 - RNA, 19 nt, Artificial Sequence
  Description of Artificial Sequence: Synthetic oligonucleotide
ggaacccguaggguguugg

SEQ ID NO: 1921912 - RNA, 19 nt, Artificial Sequence
  Description of Artificial Sequence: Synthetic oligonucleotide
ccagcaagccaaucuguug

SEQ ID NO: 1921913 - RNA, 19 nt, Artificial Sequence
  Description of Artificial Sequence: Synthetic oligonucleotide
gccagaugcccagcgaagg

SEQ ID NO: 1921914 - RNA, 19 nt, Artificial Sequence
  Description of Artificial Sequence: Synthetic oligonucleotide
agcccaaaacguugacaaa

SEQ ID NO: 1921915 - RNA, 19 nt, Artificial Sequence
  Description of Artificial Sequence: Synthetic oligonucleotide
ugcuaggccugugaauuuu

SEQ ID NO: 1921916 - RNA, 19 nt, Artificial Sequence
  Description of Artificial Sequence: Synthetic oligonucleotide
ugguuacaugguucuugau

SEQ ID NO: 1921917 - RNA, 19 nt, Artificial Sequence
  Description of Artificial Sequence: Synthetic oligonucleotide
aacggaaaauugagauguu

SEQ ID NO: 1921918 - RNA, 19 nt, Artificial Sequence
  Description of Artificial Sequence: Synthetic oligonucleotide
agccaaucuguuggggaca

SEQ ID NO: 1921919 - RNA, 19 nt, Artificial Sequence
  Description of Artificial Sequence: Synthetic oligonucleotide
ggucacuggccaucaaauc

SEQ ID NO: 1921920 - RNA, 19 nt, Artificial Sequence
  Description of Artificial Sequence: Synthetic oligonucleotide
ggccugugaauuuucuuaa

SEQ ID NO: 1921921 - RNA, 19 nt, Artificial Sequence
  Description of Artificial Sequence: Synthetic oligonucleotide
gcccauuuauaugcaagug

SEQ ID NO: 1921922 - RNA, 19 nt, Artificial Sequence
  Description of Artificial Sequence: Synthetic oligonucleotide
cacaguuggcaugcaccag

SEQ ID NO: 1921923 - RNA, 19 nt, Artificial Sequence
  Description of Artificial Sequence: Synthetic oligonucleotide
cagaugugucaaauguaua

SEQ ID NO: 1921924 - RNA, 19 nt, Artificial Sequence
  Description of Artificial Sequence: Synthetic oligonucleotide
ugcaagugucaaagacauu

SEQ ID NO: 1921925 - RNA, 19 nt, Artificial Sequence
  Description of Artificial Sequence: Synthetic oligonucleotide
caacauacacuuggugcca

SEQ ID NO: 1921926 - RNA, 19 nt, Artificial Sequence
  Description of Artificial Sequence: Synthetic oligonucleotide
ggagauaggcaaaccaucu

SEQ ID NO: 1921927 - RNA, 19 nt, Artificial Sequence
  Description of Artificial Sequence: Synthetic oligonucleotide
cagacuucauggauuugcu

SEQ ID NO: 1921928 - RNA, 19 nt, Artificial Sequence
  Description of Artificial Sequence: Synthetic oligonucleotide
ggcgcugucuccucauuuc

SEQ ID NO: 1921929 - RNA, 19 nt, Artificial Sequence
  Description of Artificial Sequence: Synthetic oligonucleotide
agacauggaggugcacagu

SEQ ID NO: 1921930 - RNA, 19 nt, Artificial Sequence
  Description of Artificial Sequence: Synthetic oligonucleotide
guagacaucguaguuccuu

SEQ ID NO: 1921931 - RNA, 19 nt, Artificial Sequence
  Description of Artificial Sequence: Synthetic oligonucleotide
caaggaagcccaaaacguu

SEQ ID NO: 1921932 - RNA, 19 nt, Artificial Sequence
  Description of Artificial Sequence: Synthetic oligonucleotide
uucuggcgugagucggaac

SEQ ID NO: 1921933 - RNA, 19 nt, Artificial Sequence
  Description of Artificial Sequence: Synthetic oligonucleotide
gucccuggggugcaaaagu

SEQ ID NO: 1921934 - RNA, 19 nt, Artificial Sequence
  Description of Artificial Sequence: Synthetic oligonucleotide
caugcaccagaugugucaa

SEQ ID NO: 1921935 - RNA, 19 nt, Artificial Sequence
  Description of Artificial Sequence: Synthetic oligonucleotide
cucucagacuucauggauu

SEQ ID NO: 1921936 - RNA, 19 nt, Artificial Sequence
  Description of Artificial Sequence: Synthetic oligonucleotide
aggcgcugucuccucauuu

SEQ ID NO: 1921937 - RNA, 19 nt, Artificial Sequence
  Description of Artificial Sequence: Synthetic oligonucleotide
cauuccagguggauuccua

SEQ ID NO: 1921938 - RNA, 19 nt, Artificial Sequence
  Description of Artificial Sequence: Synthetic oligonucleotide
ccagaugugucaaauguau

SEQ ID NO: 1921939 - RNA, 19 nt, Artificial Sequence
  Description of Artificial Sequence: Synthetic oligonucleotide
ucugcccagcaagccaauc

SEQ ID NO: 1921940 - RNA, 19 nt, Artificial Sequence
  Description of Artificial Sequence: Synthetic oligonucleotide
cccauuuauaugcaagugu

SEQ ID NO: 1921941 - RNA, 19 nt, Artificial Sequence
  Description of Artificial Sequence: Synthetic oligonucleotide
gcaagaccaaauacaccac

SEQ ID NO: 1921942 - RNA, 19 nt, Artificial Sequence
  Description of Artificial Sequence: Synthetic oligonucleotide
cagcacaguuccuucugaa

SEQ ID NO: 1921943 - RNA, 19 nt, Artificial Sequence
  Description of Artificial Sequence: Synthetic oligonucleotide
ugccagucaucugcauggu

SEQ ID NO: 1921944 - RNA, 19 nt, Artificial Sequence
  Description of Artificial Sequence: Synthetic oligonucleotide
aagccgccagggaaguaau

SEQ ID NO: 1921945 - RNA, 19 nt, Artificial Sequence
  Description of Artificial Sequence: Synthetic oligonucleotide
gagcauguguuuguaguuu

SEQ ID NO: 1921946 - RNA, 19 nt, Artificial Sequence
  Description of Artificial Sequence: Synthetic oligonucleotide
cgugagucggaacccguag

SEQ ID NO: 1921947 - RNA, 19 nt, Artificial Sequence
  Description of Artificial Sequence: Synthetic oligonucleotide
gccgccagggaaguaauga

SEQ ID NO: 1921948 - RNA, 19 nt, Artificial Sequence
  Description of Artificial Sequence: Synthetic oligonucleotide
cugcccagcaagccaaucu

SEQ ID NO: 1921949 - RNA, 19 nt, Artificial Sequence
  Description of Artificial Sequence: Synthetic oligonucleotide
gagaaaccgacagcacagu

SEQ ID NO: 1921950 - RNA, 19 nt, Artificial Sequence
  Description of Artificial Sequence: Synthetic oligonucleotide
ucgcucaguccugcugugu

SEQ ID NO: 1921951 - RNA, 19 nt, Artificial Sequence
  Description of Artificial Sequence: Synthetic oligonucleotide
uacugguuacaugguucuu

SEQ ID NO: 1921952 - RNA, 19 nt, Artificial Sequence
  Description of Artificial Sequence: Synthetic oligonucleotide
ugucaacccugggcaccag

SEQ ID NO: 1921953 - RNA, 19 nt, Artificial Sequence
  Description of Artificial Sequence: Synthetic oligonucleotide
augcaccagaugugucaaa

SEQ ID NO: 1921954 - RNA, 19 nt, Artificial Sequence
  Description of Artificial Sequence: Synthetic oligonucleotide
ccagcgaaggaagucccug

SEQ ID NO: 1921955 - RNA, 19 nt, Artificial Sequence
  Description of Artificial Sequence: Synthetic oligonucleotide
gccagucaucugcauggug

SEQ ID NO: 1921956 - RNA, 19 nt, Artificial Sequence
  Description of Artificial Sequence: Synthetic oligonucleotide
caaauacaccaccccugua

SEQ ID NO: 1921957 - RNA, 19 nt, Artificial Sequence
  Description of Artificial Sequence: Synthetic oligonucleotide
cauggacaccauguugaaa

SEQ ID NO: 1921958 - RNA, 19 nt, Artificial Sequence
  Description of Artificial Sequence: Synthetic oligonucleotide
ccgacagcacaguuccuuc

SEQ ID NO: 1921959 - RNA, 19 nt, Artificial Sequence
  Description of Artificial Sequence: Synthetic oligonucleotide
caguaaacgcugccagucu

SEQ ID NO: 1921960 - RNA, 19 nt, Artificial Sequence
  Description of Artificial Sequence: Synthetic oligonucleotide
gucggaacccguagggugu

SEQ ID NO: 1921961 - RNA, 19 nt, Artificial Sequence
  Description of Artificial Sequence: Synthetic oligonucleotide
ggaccauuucugguauuuc

SEQ ID NO: 1921962 - RNA, 19 nt, Artificial Sequence
  Description of Artificial Sequence: Synthetic oligonucleotide
aaccgacagcacaguuccu

SEQ ID NO: 1921963 - RNA, 19 nt, Artificial Sequence
  Description of Artificial Sequence: Synthetic oligonucleotide
cugggcaccagcucauuuu

SEQ ID NO: 1921964 - RNA, 19 nt, Artificial Sequence
  Description of Artificial Sequence: Synthetic oligonucleotide
ggaguaguacaggggcuuc

SEQ ID NO: 1921965 - RNA, 19 nt, Artificial Sequence
  Description of Artificial Sequence: Synthetic oligonucleotide
cuguguagacaucguaguu

SEQ ID NO: 1921966 - RNA, 19 nt, Artificial Sequence
  Description of Artificial Sequence: Synthetic oligonucleotide
ugccacggucacuggccau

SEQ ID NO: 1921967 - RNA, 19 nt, Artificial Sequence
  Description of Artificial Sequence: Synthetic oligonucleotide
gcuaggccugugaauuuuc

SEQ ID NO: 1921968 - RNA, 19 nt, Artificial Sequence
  Description of Artificial Sequence: Synthetic oligonucleotide
ucggaacccguaggguguu

SEQ ID NO: 1921969 - RNA, 19 nt, Artificial Sequence
  Description of Artificial Sequence: Synthetic oligonucleotide
cuucuggcgugagucggaa

SEQ ID NO: 1921970 - RNA, 19 nt, Artificial Sequence
  Description of Artificial Sequence: Synthetic oligonucleotide
guaaacgcugccagucuuu

SEQ ID NO: 1921971 - RNA, 19 nt, Artificial Sequence
  Description of Artificial Sequence: Synthetic oligonucleotide
ggauuccuauuaacaacua

SEQ ID NO: 1921972 - RNA, 19 nt, Artificial Sequence
  Description of Artificial Sequence: Synthetic oligonucleotide
cccguaggguguuggacca

SEQ ID NO: 1921973 - RNA, 19 nt, Artificial Sequence
  Description of Artificial Sequence: Synthetic oligonucleotide
cuggggugcaaaagugaau

SEQ ID NO: 1921974 - RNA, 19 nt, Artificial Sequence
  Description of Artificial Sequence: Synthetic oligonucleotide
ggcaaaccaucuggucccc

SEQ ID NO: 1921975 - RNA, 19 nt, Artificial Sequence
  Description of Artificial Sequence: Synthetic oligonucleotide
cccuggggugcaaaaguga

SEQ ID NO: 1921976 - RNA, 19 nt, Artificial Sequence
  Description of Artificial Sequence: Synthetic oligonucleotide
ccagaugcccagcgaagga

SEQ ID NO: 1921977 - RNA, 19 nt, Artificial Sequence
  Description of Artificial Sequence: Synthetic oligonucleotide
agccgccagggaaguaaug

SEQ ID NO: 1921978 - RNA, 19 nt, Artificial Sequence
  Description of Artificial Sequence: Synthetic oligonucleotide
gcucugcccagcaagccaa

SEQ ID NO: 1921979 - RNA, 19 nt, Artificial Sequence
  Description of Artificial Sequence: Synthetic oligonucleotide
gaagucggguugauucauu

SEQ ID NO: 1921980 - RNA, 19 nt, Artificial Sequence
  Description of Artificial Sequence: Synthetic oligonucleotide
gccacggucacuggccauc

SEQ ID NO: 1921981 - RNA, 19 nt, Artificial Sequence
  Description of Artificial Sequence: Synthetic oligonucleotide
ggcuagcucuuaaugcucu

SEQ ID NO: 1921982 - RNA, 19 nt, Artificial Sequence
  Description of Artificial Sequence: Synthetic oligonucleotide
ggcuuugaucucagauauc

SEQ ID NO: 1921983 - RNA, 19 nt, Artificial Sequence
  Description of Artificial Sequence: Synthetic oligonucleotide
gcgcugucuccucauuucu

SEQ ID NO: 1921984 - RNA, 19 nt, Artificial Sequence
  Description of Artificial Sequence: Synthetic oligonucleotide
gccugugaauuuucuuaau

SEQ ID NO: 1921985 - RNA, 19 nt, Artificial Sequence
  Description of Artificial Sequence: Synthetic oligonucleotide
guaggguguuggaccauuu

SEQ ID NO: 1921986 - RNA, 19 nt, Artificial Sequence
  Description of Artificial Sequence: Synthetic oligonucleotide
gaggcgcugucuccucauu

SEQ ID NO: 1921987 - RNA, 19 nt, Artificial Sequence
  Description of Artificial Sequence: Synthetic oligonucleotide
cugcuaggccugugaauuu

SEQ ID NO: 1921988 - RNA, 19 nt, Artificial Sequence
  Description of Artificial Sequence: Synthetic oligonucleotide
gcaaaccaucuggucccca

SEQ ID NO: 1921989 - RNA, 19 nt, Artificial Sequence
  Description of Artificial Sequence: Synthetic oligonucleotide
ggugcacaguuggcaugca

SEQ ID NO: 1921990 - RNA, 19 nt, Artificial Sequence
  Description of Artificial Sequence: Synthetic oligonucleotide
ggaggcgcugucuccucau

SEQ ID NO: 1921991 - RNA, 19 nt, Artificial Sequence
  Description of Artificial Sequence: Synthetic oligonucleotide
gcuagcucuuaaugcucuu

SEQ ID NO: 1921992 - RNA, 19 nt, Artificial Sequence
  Description of Artificial Sequence: Synthetic oligonucleotide
cacggucacuggccaucaa

SEQ ID NO: 1921993 - RNA, 19 nt, Artificial Sequence
  Description of Artificial Sequence: Synthetic oligonucleotide
cggucacuggccaucaaau

SEQ ID NO: 1921994 - RNA, 19 nt, Artificial Sequence
  Description of Artificial Sequence: Synthetic oligonucleotide
gcauggugcaggggagaaa

SEQ ID NO: 1921995 - RNA, 19 nt, Artificial Sequence
  Description of Artificial Sequence: Synthetic oligonucleotide
cccagcaagccaaucuguu

SEQ ID NO: 1921996 - RNA, 19 nt, Artificial Sequence
  Description of Artificial Sequence: Synthetic oligonucleotide
caaagccgccagggaagua

SEQ ID NO: 1921997 - RNA, 19 nt, Artificial Sequence
  Description of Artificial Sequence: Synthetic oligonucleotide
gggcaccagcucauuuuaa

SEQ ID NO: 1921998 - RNA, 19 nt, Artificial Sequence
  Description of Artificial Sequence: Synthetic oligonucleotide
gcgugagucggaacccgua

SEQ ID NO: 1921999 - RNA, 19 nt, Artificial Sequence
  Description of Artificial Sequence: Synthetic oligonucleotide
ccgccagggaaguaaugau

SEQ ID NO: 1922000 - RNA, 19 nt, Artificial Sequence
  Description of Artificial Sequence: Synthetic oligonucleotide
ggcgugagucggaacccgu

SEQ ID NO: 1922001 - RNA, 19 nt, Artificial Sequence
  Description of Artificial Sequence: Synthetic oligonucleotide
ccacggucacuggccauca

SEQ ID NO: 1922002 - RNA, 19 nt, Artificial Sequence
  Description of Artificial Sequence: Synthetic oligonucleotide
cccagcgaaggaagucccu

SEQ ID NO: 1922003 - RNA, 19 nt, Artificial Sequence
  Description of Artificial Sequence: Synthetic oligonucleotide
cggaacccguaggguguug

SEQ ID NO: 1922004 - RNA, 19 nt, Artificial Sequence
  Description of Artificial Sequence: Synthetic oligonucleotide
cguaggguguuggaccauu

SEQ ID NO: 1922005 - RNA, 19 nt, Artificial Sequence
  Description of Artificial Sequence: Synthetic oligonucleotide
uauaaagaagacaaaaccg

SEQ ID NO: 1922006 - RNA, 19 nt, Artificial Sequence
  Description of Artificial Sequence: Synthetic oligonucleotide
uuacuaaccaccaagaugu

SEQ ID NO: 1922007 - RNA, 19 nt, Artificial Sequence
  Description of Artificial Sequence: Synthetic oligonucleotide
uuuaauaugaagucuaugu

SEQ ID NO: 1922008 - RNA, 19 nt, Artificial Sequence
  Description of Artificial Sequence: Synthetic oligonucleotide
aauaaauuauucuguauca

SEQ ID NO: 1922009 - RNA, 19 nt, Artificial Sequence
  Description of Artificial Sequence: Synthetic oligonucleotide
uuuguaaucagauccaggc

SEQ ID NO: 1922010 - RNA, 19 nt, Artificial Sequence
  Description of Artificial Sequence: Synthetic oligonucleotide
auaauuacuaaccaccaag

SEQ ID NO: 1922011 - RNA, 19 nt, Artificial Sequence
  Description of Artificial Sequence: Synthetic oligonucleotide
caugguaggaccauuaucc

SEQ ID NO: 1922012 - RNA, 19 nt, Artificial Sequence
  Description of Artificial Sequence: Synthetic oligonucleotide
aaauaugguccuauuaggc

SEQ ID NO: 1922013 - RNA, 19 nt, Artificial Sequence
  Description of Artificial Sequence: Synthetic oligonucleotide
uguaagcaaagccacaugc

SEQ ID NO: 1922014 - RNA, 19 nt, Artificial Sequence
  Description of Artificial Sequence: Synthetic oligonucleotide
uaugucaucuacaugcaag

SEQ ID NO: 1922015 - RNA, 19 nt, Artificial Sequence
  Description of Artificial Sequence: Synthetic oligonucleotide
aucaauguccuucgaaucc

SEQ ID NO: 1922016 - RNA, 19 nt, Artificial Sequence
  Description of Artificial Sequence: Synthetic oligonucleotide
ugaccaguccauaagagag

SEQ ID NO: 1922017 - RNA, 19 nt, Artificial Sequence
  Description of Artificial Sequence: Synthetic oligonucleotide
aaacuugucagauacccca

SEQ ID NO: 1922018 - RNA, 19 nt, Artificial Sequence
  Description of Artificial Sequence: Synthetic oligonucleotide
auuacuaaccaccaagaug

SEQ ID NO: 1922019 - RNA, 19 nt, Artificial Sequence
  Description of Artificial Sequence: Synthetic oligonucleotide
aaauccugcuuacagaacu

SEQ ID NO: 1922020 - RNA, 19 nt, Artificial Sequence
  Description of Artificial Sequence: Synthetic oligonucleotide
cugaaaacggacuugacug

SEQ ID NO: 1922021 - RNA, 19 nt, Artificial Sequence
  Description of Artificial Sequence: Synthetic oligonucleotide
cuugcaaccacgucaaacg

SEQ ID NO: 1922022 - RNA, 19 nt, Artificial Sequence
  Description of Artificial Sequence: Synthetic oligonucleotide
uaugugacgggauaugucc

SEQ ID NO: 1922023 - RNA, 19 nt, Artificial Sequence
  Description of Artificial Sequence: Synthetic oligonucleotide
acugcuucuagcuugagcu

SEQ ID NO: 1922024 - RNA, 19 nt, Artificial Sequence
  Description of Artificial Sequence: Synthetic oligonucleotide
aacauuuccagaacaaauc

SEQ ID NO: 1922025 - RNA, 19 nt, Artificial Sequence
  Description of Artificial Sequence: Synthetic oligonucleotide
uccuaaacuugucagauac

SEQ ID NO: 1922026 - RNA, 19 nt, Artificial Sequence
  Description of Artificial Sequence: Synthetic oligonucleotide
caauaaauuauucuguauc

SEQ ID NO: 1922027 - RNA, 19 nt, Artificial Sequence
  Description of Artificial Sequence: Synthetic oligonucleotide
uggccuuuuaauaugaagu

SEQ ID NO: 1922028 - RNA, 19 nt, Artificial Sequence
  Description of Artificial Sequence: Synthetic oligonucleotide
aagaggauuagccuguccu

SEQ ID NO: 1922029 - RNA, 19 nt, Artificial Sequence
  Description of Artificial Sequence: Synthetic oligonucleotide
aagcuggcaaauauggucc

SEQ ID NO: 1922030 - RNA, 19 nt, Artificial Sequence
  Description of Artificial Sequence: Synthetic oligonucleotide
agacauaauuacuaaccac

SEQ ID NO: 1922031 - RNA, 19 nt, Artificial Sequence
  Description of Artificial Sequence: Synthetic oligonucleotide
uauguccuaaacuugucag

SEQ ID NO: 1922032 - RNA, 19 nt, Artificial Sequence
  Description of Artificial Sequence: Synthetic oligonucleotide
uuaauaugaagucuauguc

SEQ ID NO: 1922033 - RNA, 19 nt, Artificial Sequence
  Description of Artificial Sequence: Synthetic oligonucleotide
ucagauaccccauuuacgu

SEQ ID NO: 1922034 - RNA, 19 nt, Artificial Sequence
  Description of Artificial Sequence: Synthetic oligonucleotide
cuaaccaccaagaugucag

SEQ ID NO: 1922035 - RNA, 19 nt, Artificial Sequence
  Description of Artificial Sequence: Synthetic oligonucleotide
gaugcugccucugaaaacg

SEQ ID NO: 1922036 - RNA, 19 nt, Artificial Sequence
  Description of Artificial Sequence: Synthetic oligonucleotide
caaauaugguccuauuagg

SEQ ID NO: 1922037 - RNA, 19 nt, Artificial Sequence
  Description of Artificial Sequence: Synthetic oligonucleotide
aaaccaaagucucugugga

SEQ ID NO: 1922038 - RNA, 19 nt, Artificial Sequence
  Description of Artificial Sequence: Synthetic oligonucleotide
aauggcaagucuucuaaga

SEQ ID NO: 1922039 - RNA, 19 nt, Artificial Sequence
  Description of Artificial Sequence: Synthetic oligonucleotide
aaggcuuauauguucucag

SEQ ID NO: 1922040 - RNA, 19 nt, Artificial Sequence
  Description of Artificial Sequence: Synthetic oligonucleotide
aauguggccuuuuaauaug

SEQ ID NO: 1922041 - RNA, 19 nt, Artificial Sequence
  Description of Artificial Sequence: Synthetic oligonucleotide
ugucucagugccaagagga

SEQ ID NO: 1922042 - RNA, 19 nt, Artificial Sequence
  Description of Artificial Sequence: Synthetic oligonucleotide
acugaguugacaaagcuag

SEQ ID NO: 1922043 - RNA, 19 nt, Artificial Sequence
  Description of Artificial Sequence: Synthetic oligonucleotide
guaucugucaggaaugugg

SEQ ID NO: 1922044 - RNA, 19 nt, Artificial Sequence
  Description of Artificial Sequence: Synthetic oligonucleotide
uguaaucagauccaggcua

SEQ ID NO: 1922045 - RNA, 19 nt, Artificial Sequence
  Description of Artificial Sequence: Synthetic oligonucleotide
auggaauugaacugguauc

SEQ ID NO: 1922046 - RNA, 19 nt, Artificial Sequence
  Description of Artificial Sequence: Synthetic oligonucleotide
uuugugaccaguccauaag

SEQ ID NO: 1922047 - RNA, 19 nt, Artificial Sequence
  Description of Artificial Sequence: Synthetic oligonucleotide
cuaaacuugucagauaccc

SEQ ID NO: 1922048 - RNA, 19 nt, Artificial Sequence
  Description of Artificial Sequence: Synthetic oligonucleotide
acaguuuucgcuguauagc

SEQ ID NO: 1922049 - RNA, 19 nt, Artificial Sequence
  Description of Artificial Sequence: Synthetic oligonucleotide
aaacucuucgcaucgaaaa

SEQ ID NO: 1922050 - RNA, 19 nt, Artificial Sequence
  Description of Artificial Sequence: Synthetic oligonucleotide
gauaucaaacacaaacacc

SEQ ID NO: 1922051 - RNA, 19 nt, Artificial Sequence
  Description of Artificial Sequence: Synthetic oligonucleotide
gagucaugaauguaguuug

SEQ ID NO: 1922052 - RNA, 19 nt, Artificial Sequence
  Description of Artificial Sequence: Synthetic oligonucleotide
cuucuaagaagucauuggc

SEQ ID NO: 1922053 - RNA, 19 nt, Artificial Sequence
  Description of Artificial Sequence: Synthetic oligonucleotide
aguuuggaugguuugaugu

SEQ ID NO: 1922054 - RNA, 19 nt, Artificial Sequence
  Description of Artificial Sequence: Synthetic oligonucleotide
uuaucuuugugaccagucc

SEQ ID NO: 1922055 - RNA, 19 nt, Artificial Sequence
  Description of Artificial Sequence: Synthetic oligonucleotide
auaaauuauucuguaucac

SEQ ID NO: 1922056 - RNA, 19 nt, Artificial Sequence
  Description of Artificial Sequence: Synthetic oligonucleotide
aaaguuucacagucgagaa

SEQ ID NO: 1922057 - RNA, 19 nt, Artificial Sequence
  Description of Artificial Sequence: Synthetic oligonucleotide
gcuguauaugucuauaagg

SEQ ID NO: 1922058 - RNA, 19 nt, Artificial Sequence
  Description of Artificial Sequence: Synthetic oligonucleotide
aauccgugcuugcggaacc

SEQ ID NO: 1922059 - RNA, 19 nt, Artificial Sequence
  Description of Artificial Sequence: Synthetic oligonucleotide
cuauuaggcaugcugaaac

SEQ ID NO: 1922060 - RNA, 19 nt, Artificial Sequence
  Description of Artificial Sequence: Synthetic oligonucleotide
ucgaaaaguuucacagucg

SEQ ID NO: 1922061 - RNA, 19 nt, Artificial Sequence
  Description of Artificial Sequence: Synthetic oligonucleotide
uaucuuugugaccagucca

SEQ ID NO: 1922062 - RNA, 19 nt, Artificial Sequence
  Description of Artificial Sequence: Synthetic oligonucleotide
auaaagaagacaaaaccgu

SEQ ID NO: 1922063 - RNA, 19 nt, Artificial Sequence
  Description of Artificial Sequence: Synthetic oligonucleotide
aacucuucgcaucgaaaag

SEQ ID NO: 1922064 - RNA, 19 nt, Artificial Sequence
  Description of Artificial Sequence: Synthetic oligonucleotide
aaagcuagacuuuccggcu

SEQ ID NO: 1922065 - RNA, 19 nt, Artificial Sequence
  Description of Artificial Sequence: Synthetic oligonucleotide
uccauaagagagcuguuca

SEQ ID NO: 1922066 - RNA, 19 nt, Artificial Sequence
  Description of Artificial Sequence: Synthetic oligonucleotide
gcaaauaugguccuauuag

SEQ ID NO: 1922067 - RNA, 19 nt, Artificial Sequence
  Description of Artificial Sequence: Synthetic oligonucleotide
ugucagauaccccauuuac

SEQ ID NO: 1922068 - RNA, 19 nt, Artificial Sequence
  Description of Artificial Sequence: Synthetic oligonucleotide
ucgagaauagaacaauaaa

SEQ ID NO: 1922069 - RNA, 19 nt, Artificial Sequence
  Description of Artificial Sequence: Synthetic oligonucleotide
aucuuaucaauguccuucg

SEQ ID NO: 1922070 - RNA, 19 nt, Artificial Sequence
  Description of Artificial Sequence: Synthetic oligonucleotide
ugaacugguaucugucagg

SEQ ID NO: 1922071 - RNA, 19 nt, Artificial Sequence
  Description of Artificial Sequence: Synthetic oligonucleotide
aauaugaagucuaugucau

SEQ ID NO: 1922072 - RNA, 19 nt, Artificial Sequence
  Description of Artificial Sequence: Synthetic oligonucleotide
uaucccaacauuuccagaa

SEQ ID NO: 1922073 - RNA, 19 nt, Artificial Sequence
  Description of Artificial Sequence: Synthetic oligonucleotide
cagaauugauaucaaacac

SEQ ID NO: 1922074 - RNA, 19 nt, Artificial Sequence
  Description of Artificial Sequence: Synthetic oligonucleotide
aauuacuaaccaccaagau

SEQ ID NO: 1922075 - RNA, 19 nt, Artificial Sequence
  Description of Artificial Sequence: Synthetic oligonucleotide
gucaaacgaguucucaugg

SEQ ID NO: 1922076 - RNA, 19 nt, Artificial Sequence
  Description of Artificial Sequence: Synthetic oligonucleotide
aaccacgucaaacgaguuc

SEQ ID NO: 1922077 - RNA, 19 nt, Artificial Sequence
  Description of Artificial Sequence: Synthetic oligonucleotide
uacgucacagcccaccaag

SEQ ID NO: 1922078 - RNA, 19 nt, Artificial Sequence
  Description of Artificial Sequence: Synthetic oligonucleotide
gcaucgaaaaguuucacag

SEQ ID NO: 1922079 - RNA, 19 nt, Artificial Sequence
  Description of Artificial Sequence: Synthetic oligonucleotide
ugugaccaguccauaagag

SEQ ID NO: 1922080 - RNA, 19 nt, Artificial Sequence
  Description of Artificial Sequence: Synthetic oligonucleotide
cuucgcaucgaaaaguuuc

SEQ ID NO: 1922081 - RNA, 19 nt, Artificial Sequence
  Description of Artificial Sequence: Synthetic oligonucleotide
uuuaucuuugugaccaguc

SEQ ID NO: 1922082 - RNA, 19 nt, Artificial Sequence
  Description of Artificial Sequence: Synthetic oligonucleotide
cuucauggaauugaacugg

SEQ ID NO: 1922083 - RNA, 19 nt, Artificial Sequence
  Description of Artificial Sequence: Synthetic oligonucleotide
auuuacgucacagcccacc

SEQ ID NO: 1922084 - RNA, 19 nt, Artificial Sequence
  Description of Artificial Sequence: Synthetic oligonucleotide
ugcaaaaggggugauagac

SEQ ID NO: 1922085 - RNA, 19 nt, Artificial Sequence
  Description of Artificial Sequence: Synthetic oligonucleotide
agauaccccauuuacguca

SEQ ID NO: 1922086 - RNA, 19 nt, Artificial Sequence
  Description of Artificial Sequence: Synthetic oligonucleotide
aguugacaaagcuagacuu

SEQ ID NO: 1922087 - RNA, 19 nt, Artificial Sequence
  Description of Artificial Sequence: Synthetic oligonucleotide
gaauugauaucaaacacaa

SEQ ID NO: 1922088 - RNA, 19 nt, Artificial Sequence
  Description of Artificial Sequence: Synthetic oligonucleotide
acacagaacaaacggcagg

SEQ ID NO: 1922089 - RNA, 19 nt, Artificial Sequence
  Description of Artificial Sequence: Synthetic oligonucleotide
gaaaccaucacucccauau

SEQ ID NO: 1922090 - RNA, 19 nt, Artificial Sequence
  Description of Artificial Sequence: Synthetic oligonucleotide
gagacauaauuacuaacca

SEQ ID NO: 1922091 - RNA, 19 nt, Artificial Sequence
  Description of Artificial Sequence: Synthetic oligonucleotide
uguauaugucuauaagguc

SEQ ID NO: 1922092 - RNA, 19 nt, Artificial Sequence
  Description of Artificial Sequence: Synthetic oligonucleotide
agcuguauaugucuauaag

SEQ ID NO: 1922093 - RNA, 19 nt, Artificial Sequence
  Description of Artificial Sequence: Synthetic oligonucleotide
uauaugucuauaaggucuc

SEQ ID NO: 1922094 - RNA, 19 nt, Artificial Sequence
  Description of Artificial Sequence: Synthetic oligonucleotide
uuugaugugauuggcuuca

SEQ ID NO: 1922095 - RNA, 19 nt, Artificial Sequence
  Description of Artificial Sequence: Synthetic oligonucleotide
augguaggaccauuauccc

SEQ ID NO: 1922096 - RNA, 19 nt, Artificial Sequence
  Description of Artificial Sequence: Synthetic oligonucleotide
cagggagucaugaauguag

SEQ ID NO: 1922097 - RNA, 19 nt, Artificial Sequence
  Description of Artificial Sequence: Synthetic oligonucleotide
agaauugauaucaaacaca

SEQ ID NO: 1922098 - RNA, 19 nt, Artificial Sequence
  Description of Artificial Sequence: Synthetic oligonucleotide
aaccaaagucucuguggac

SEQ ID NO: 1922099 - RNA, 19 nt, Artificial Sequence
  Description of Artificial Sequence: Synthetic oligonucleotide
ucuccauaaggcuuauaug

SEQ ID NO: 1922100 - RNA, 19 nt, Artificial Sequence
  Description of Artificial Sequence: Synthetic oligonucleotide
ucacagucgagaauagaac

SEQ ID NO: 1922101 - RNA, 19 nt, Artificial Sequence
  Description of Artificial Sequence: Synthetic oligonucleotide
uggaauugaacugguaucu

SEQ ID NO: 1922102 - RNA, 19 nt, Artificial Sequence
  Description of Artificial Sequence: Synthetic oligonucleotide
caucuuaucaauguccuuc

SEQ ID NO: 1922103 - RNA, 19 nt, Artificial Sequence
  Description of Artificial Sequence: Synthetic oligonucleotide
uuaggcaugcugaaacuuc

SEQ ID NO: 1922104 - RNA, 19 nt, Artificial Sequence
  Description of Artificial Sequence: Synthetic oligonucleotide
auaugguccuauuaggcau

SEQ ID NO: 1922105 - RNA, 19 nt, Artificial Sequence
  Description of Artificial Sequence: Synthetic oligonucleotide
ugaguugacaaagcuagac

SEQ ID NO: 1922106 - RNA, 19 nt, Artificial Sequence
  Description of Artificial Sequence: Synthetic oligonucleotide
uucgcaucgaaaaguuuca

SEQ ID NO: 1922107 - RNA, 19 nt, Artificial Sequence
  Description of Artificial Sequence: Synthetic oligonucleotide
aagcuagacuuuccggcuc

SEQ ID NO: 1922108 - RNA, 19 nt, Artificial Sequence
  Description of Artificial Sequence: Synthetic oligonucleotide
auauguccuaaacuuguca

SEQ ID NO: 1922109 - RNA, 19 nt, Artificial Sequence
  Description of Artificial Sequence: Synthetic oligonucleotide
cacuuuucuugcaaccacg

SEQ ID NO: 1922110 - RNA, 19 nt, Artificial Sequence
  Description of Artificial Sequence: Synthetic oligonucleotide
uuuacgucacagcccacca

SEQ ID NO: 1922111 - RNA, 19 nt, Artificial Sequence
  Description of Artificial Sequence: Synthetic oligonucleotide
uuccgagacauaauuacua

SEQ ID NO: 1922112 - RNA, 19 nt, Artificial Sequence
  Description of Artificial Sequence: Synthetic oligonucleotide
agcuagacuuuccggcucc

SEQ ID NO: 1922113 - RNA, 19 nt, Artificial Sequence
  Description of Artificial Sequence: Synthetic oligonucleotide
aaacggacuugacugaguu

SEQ ID NO: 1922114 - RNA, 19 nt, Artificial Sequence
  Description of Artificial Sequence: Synthetic oligonucleotide
cacaguuuucgcuguauag

SEQ ID NO: 1922115 - RNA, 19 nt, Artificial Sequence
  Description of Artificial Sequence: Synthetic oligonucleotide
ugauagacaucucucuuuu

SEQ ID NO: 1922116 - RNA, 19 nt, Artificial Sequence
  Description of Artificial Sequence: Synthetic oligonucleotide
aguuucacagucgagaaua

SEQ ID NO: 1922117 - RNA, 19 nt, Artificial Sequence
  Description of Artificial Sequence: Synthetic oligonucleotide
aaacuucagucuccuggag

SEQ ID NO: 1922118 - RNA, 19 nt, Artificial Sequence
  Description of Artificial Sequence: Synthetic oligonucleotide
cucgcuuuauaaagaagac

SEQ ID NO: 1922119 - RNA, 19 nt, Artificial Sequence
  Description of Artificial Sequence: Synthetic oligonucleotide
uauuaggcaugcugaaacu

SEQ ID NO: 1922120 - RNA, 19 nt, Artificial Sequence
  Description of Artificial Sequence: Synthetic oligonucleotide
accccauuuacgucacagc

SEQ ID NO: 1922121 - RNA, 19 nt, Artificial Sequence
  Description of Artificial Sequence: Synthetic oligonucleotide
cuccauaaggcuuauaugu

SEQ ID NO: 1922122 - RNA, 19 nt, Artificial Sequence
  Description of Artificial Sequence: Synthetic oligonucleotide
cgagacauaauuacuaacc

SEQ ID NO: 1922123 - RNA, 19 nt, Artificial Sequence
  Description of Artificial Sequence: Synthetic oligonucleotide
auaaggucuccuuuuguaa

SEQ ID NO: 1922124 - RNA, 19 nt, Artificial Sequence
  Description of Artificial Sequence: Synthetic oligonucleotide
ugcagaacaccacaucuua

SEQ ID NO: 1922125 - RNA, 19 nt, Artificial Sequence
  Description of Artificial Sequence: Synthetic oligonucleotide
aaagaagacaaaaccguuu

SEQ ID NO: 1922126 - RNA, 19 nt, Artificial Sequence
  Description of Artificial Sequence: Synthetic oligonucleotide
guuuggaugguuugaugug

SEQ ID NO: 1922127 - RNA, 19 nt, Artificial Sequence
  Description of Artificial Sequence: Synthetic oligonucleotide
guggccuuuuaauaugaag

SEQ ID NO: 1922128 - RNA, 19 nt, Artificial Sequence
  Description of Artificial Sequence: Synthetic oligonucleotide
gacuugacugaguugacaa

SEQ ID NO: 1922129 - RNA, 19 nt, Artificial Sequence
  Description of Artificial Sequence: Synthetic oligonucleotide
ugcaaguaggcaccaacaa

SEQ ID NO: 1922130 - RNA, 19 nt, Artificial Sequence
  Description of Artificial Sequence: Synthetic oligonucleotide
acggacuugacugaguuga

SEQ ID NO: 1922131 - RNA, 19 nt, Artificial Sequence
  Description of Artificial Sequence: Synthetic oligonucleotide
gaaaacggacuugacugag

SEQ ID NO: 1922132 - RNA, 19 nt, Artificial Sequence
  Description of Artificial Sequence: Synthetic oligonucleotide
ucccaacauuuccagaaca

SEQ ID NO: 1922133 - RNA, 19 nt, Artificial Sequence
  Description of Artificial Sequence: Synthetic oligonucleotide
ugcuugcggaaccaggucu

SEQ ID NO: 1922134 - RNA, 19 nt, Artificial Sequence
  Description of Artificial Sequence: Synthetic oligonucleotide
ucuguggacugcuucuagc

SEQ ID NO: 1922135 - RNA, 19 nt, Artificial Sequence
  Description of Artificial Sequence: Synthetic oligonucleotide
cauaagagagcuguucaac

SEQ ID NO: 1922136 - RNA, 19 nt, Artificial Sequence
  Description of Artificial Sequence: Synthetic oligonucleotide
uaaggcuuauauguucuca

SEQ ID NO: 1922137 - RNA, 19 nt, Artificial Sequence
  Description of Artificial Sequence: Synthetic oligonucleotide
guuuucgcuguauagcaca

SEQ ID NO: 1922138 - RNA, 19 nt, Artificial Sequence
  Description of Artificial Sequence: Synthetic oligonucleotide
gacuuuccggcuccagucg

SEQ ID NO: 1922139 - RNA, 19 nt, Artificial Sequence
  Description of Artificial Sequence: Synthetic oligonucleotide
auagcacaaccaugguagg

SEQ ID NO: 1922140 - RNA, 19 nt, Artificial Sequence
  Description of Artificial Sequence: Synthetic oligonucleotide
acgggauauguccuaaacu

SEQ ID NO: 1922141 - RNA, 19 nt, Artificial Sequence
  Description of Artificial Sequence: Synthetic oligonucleotide
gucaucuacaugcaagcca

SEQ ID NO: 1922142 - RNA, 19 nt, Artificial Sequence
  Description of Artificial Sequence: Synthetic oligonucleotide
uguauagcacaaccauggu

SEQ ID NO: 1922143 - RNA, 19 nt, Artificial Sequence
  Description of Artificial Sequence: Synthetic oligonucleotide
ucgcuuuauaaagaagaca

SEQ ID NO: 1922144 - RNA, 19 nt, Artificial Sequence
  Description of Artificial Sequence: Synthetic oligonucleotide
uuguccaauggcaagucuu

SEQ ID NO: 1922145 - RNA, 19 nt, Artificial Sequence
  Description of Artificial Sequence: Synthetic oligonucleotide
ugucuauaaggucuccuuu

SEQ ID NO: 1922146 - RNA, 19 nt, Artificial Sequence
  Description of Artificial Sequence: Synthetic oligonucleotide
gacgggauauguccuaaac

SEQ ID NO: 1922147 - RNA, 19 nt, Artificial Sequence
  Description of Artificial Sequence: Synthetic oligonucleotide
guggacugcuucuagcuug

SEQ ID NO: 1922148 - RNA, 19 nt, Artificial Sequence
  Description of Artificial Sequence: Synthetic oligonucleotide
aggggugauagacaucucu

SEQ ID NO: 1922149 - RNA, 19 nt, Artificial Sequence
  Description of Artificial Sequence: Synthetic oligonucleotide
aaacgaguucucauggcca

SEQ ID NO: 1922150 - RNA, 19 nt, Artificial Sequence
  Description of Artificial Sequence: Synthetic oligonucleotide
aacgaguucucauggccau

SEQ ID NO: 1922151 - RNA, 19 nt, Artificial Sequence
  Description of Artificial Sequence: Synthetic oligonucleotide
uauguucucaggguuugca

SEQ ID NO: 1922152 - RNA, 19 nt, Artificial Sequence
  Description of Artificial Sequence: Synthetic oligonucleotide
ugguuugaugugauuggcu

SEQ ID NO: 1922153 - RNA, 19 nt, Artificial Sequence
  Description of Artificial Sequence: Synthetic oligonucleotide
uccgagacauaauuacuaa

SEQ ID NO: 1922154 - RNA, 19 nt, Artificial Sequence
  Description of Artificial Sequence: Synthetic oligonucleotide
ugcacacucgcuuuauaaa

SEQ ID NO: 1922155 - RNA, 19 nt, Artificial Sequence
  Description of Artificial Sequence: Synthetic oligonucleotide
gccccauugagucacacag

SEQ ID NO: 1922156 - RNA, 19 nt, Artificial Sequence
  Description of Artificial Sequence: Synthetic oligonucleotide
aacggacuugacugaguug

SEQ ID NO: 1922157 - RNA, 19 nt, Artificial Sequence
  Description of Artificial Sequence: Synthetic oligonucleotide
ugguaggaccauuauccca

SEQ ID NO: 1922158 - RNA, 19 nt, Artificial Sequence
  Description of Artificial Sequence: Synthetic oligonucleotide
ucacucccauaugugacgg

SEQ ID NO: 1922159 - RNA, 19 nt, Artificial Sequence
  Description of Artificial Sequence: Synthetic oligonucleotide
acauaauuacuaaccacca

SEQ ID NO: 1922160 - RNA, 19 nt, Artificial Sequence
  Description of Artificial Sequence: Synthetic oligonucleotide
uccauaaggcuuauauguu

SEQ ID NO: 1922161 - RNA, 19 nt, Artificial Sequence
  Description of Artificial Sequence: Synthetic oligonucleotide
guauucaggaucugucuca

SEQ ID NO: 1922162 - RNA, 19 nt, Artificial Sequence
  Description of Artificial Sequence: Synthetic oligonucleotide
uaucacagcaaugucucuc

SEQ ID NO: 1922163 - RNA, 19 nt, Artificial Sequence
  Description of Artificial Sequence: Synthetic oligonucleotide
ucgcuguauagcacaacca

SEQ ID NO: 1922164 - RNA, 19 nt, Artificial Sequence
  Description of Artificial Sequence: Synthetic oligonucleotide
cuuacagcuguauaugucu

SEQ ID NO: 1922165 - RNA, 19 nt, Artificial Sequence
  Description of Artificial Sequence: Synthetic oligonucleotide
auggcaagucuucuaagaa

SEQ ID NO: 1922166 - RNA, 19 nt, Artificial Sequence
  Description of Artificial Sequence: Synthetic oligonucleotide
ccacaucuuaucaaugucc

SEQ ID NO: 1922167 - RNA, 19 nt, Artificial Sequence
  Description of Artificial Sequence: Synthetic oligonucleotide
guccagaugccauuccgag

SEQ ID NO: 1922168 - RNA, 19 nt, Artificial Sequence
  Description of Artificial Sequence: Synthetic oligonucleotide
ucuacaugcaagccagcuu

SEQ ID NO: 1922169 - RNA, 19 nt, Artificial Sequence
  Description of Artificial Sequence: Synthetic oligonucleotide
auaugugacgggauauguc

SEQ ID NO: 1922170 - RNA, 19 nt, Artificial Sequence
  Description of Artificial Sequence: Synthetic oligonucleotide
auguccuaaacuugucaga

SEQ ID NO: 1922171 - RNA, 19 nt, Artificial Sequence
  Description of Artificial Sequence: Synthetic oligonucleotide
caguuuucgcuguauagca

SEQ ID NO: 1922172 - RNA, 19 nt, Artificial Sequence
  Description of Artificial Sequence: Synthetic oligonucleotide
ugaugugauuggcuucaug

SEQ ID NO: 1922173 - RNA, 19 nt, Artificial Sequence
  Description of Artificial Sequence: Synthetic oligonucleotide
gaauguggccuuuuaauau

SEQ ID NO: 1922174 - RNA, 19 nt, Artificial Sequence
  Description of Artificial Sequence: Synthetic oligonucleotide
uuaucccaacauuuccaga

SEQ ID NO: 1922175 - RNA, 19 nt, Artificial Sequence
  Description of Artificial Sequence: Synthetic oligonucleotide
aaguuucacagucgagaau

SEQ ID NO: 1922176 - RNA, 19 nt, Artificial Sequence
  Description of Artificial Sequence: Synthetic oligonucleotide
uuuucgcuguauagcacaa

SEQ ID NO: 1922177 - RNA, 19 nt, Artificial Sequence
  Description of Artificial Sequence: Synthetic oligonucleotide
ugucaucuacaugcaagcc

SEQ ID NO: 1922178 - RNA, 19 nt, Artificial Sequence
  Description of Artificial Sequence: Synthetic oligonucleotide
ccagcuuucugacucagcc

SEQ ID NO: 1922179 - RNA, 19 nt, Artificial Sequence
  Description of Artificial Sequence: Synthetic oligonucleotide
uucacaggguccagaugcc

SEQ ID NO: 1922180 - RNA, 19 nt, Artificial Sequence
  Description of Artificial Sequence: Synthetic oligonucleotide
gacaucucucuuuucugga

SEQ ID NO: 1922181 - RNA, 19 nt, Artificial Sequence
  Description of Artificial Sequence: Synthetic oligonucleotide
aggguuugcaauaaauuau

SEQ ID NO: 1922182 - RNA, 19 nt, Artificial Sequence
  Description of Artificial Sequence: Synthetic oligonucleotide
aaaacucuucgcaucgaaa

SEQ ID NO: 1922183 - RNA, 19 nt, Artificial Sequence
  Description of Artificial Sequence: Synthetic oligonucleotide
uccgcguguguaagcaaag

SEQ ID NO: 1922184 - RNA, 19 nt, Artificial Sequence
  Description of Artificial Sequence: Synthetic oligonucleotide
aguuuucgcuguauagcac

SEQ ID NO: 1922185 - RNA, 19 nt, Artificial Sequence
  Description of Artificial Sequence: Synthetic oligonucleotide
agcagaauccgugcuugcg

SEQ ID NO: 1922186 - RNA, 19 nt, Artificial Sequence
  Description of Artificial Sequence: Synthetic oligonucleotide
uugagucacacagaacaaa

SEQ ID NO: 1922187 - RNA, 19 nt, Artificial Sequence
  Description of Artificial Sequence: Synthetic oligonucleotide
acucuucgcaucgaaaagu

SEQ ID NO: 1922188 - RNA, 19 nt, Artificial Sequence
  Description of Artificial Sequence: Synthetic oligonucleotide
gcagaauccgugcuugcgg

SEQ ID NO: 1922189 - RNA, 19 nt, Artificial Sequence
  Description of Artificial Sequence: Synthetic oligonucleotide
agucaugaauguaguuugg

SEQ ID NO: 1922190 - RNA, 19 nt, Artificial Sequence
  Description of Artificial Sequence: Synthetic oligonucleotide
uggacugcuucuagcuuga

SEQ ID NO: 1922191 - RNA, 19 nt, Artificial Sequence
  Description of Artificial Sequence: Synthetic oligonucleotide
auauguucucaggguuugc

SEQ ID NO: 1922192 - RNA, 19 nt, Artificial Sequence
  Description of Artificial Sequence: Synthetic oligonucleotide
aggauuagccuguccuuca

SEQ ID NO: 1922193 - RNA, 19 nt, Artificial Sequence
  Description of Artificial Sequence: Synthetic oligonucleotide
acgucaaacgaguucucau

SEQ ID NO: 1922194 - RNA, 19 nt, Artificial Sequence
  Description of Artificial Sequence: Synthetic oligonucleotide
caugcagaacaccacaucu

SEQ ID NO: 1922195 - RNA, 19 nt, Artificial Sequence
  Description of Artificial Sequence: Synthetic oligonucleotide
ugauuggcuucauggaauu

SEQ ID NO: 1922196 - RNA, 19 nt, Artificial Sequence
  Description of Artificial Sequence: Synthetic oligonucleotide
aucuacaugcaagccagcu

SEQ ID NO: 1922197 - RNA, 19 nt, Artificial Sequence
  Description of Artificial Sequence: Synthetic oligonucleotide
gauauguccuaaacuuguc

SEQ ID NO: 1922198 - RNA, 19 nt, Artificial Sequence
  Description of Artificial Sequence: Synthetic oligonucleotide
ccaacaacacaguuuucgc

SEQ ID NO: 1922199 - RNA, 19 nt, Artificial Sequence
  Description of Artificial Sequence: Synthetic oligonucleotide
cagcuuucugacucagccc

SEQ ID NO: 1922200 - RNA, 19 nt, Artificial Sequence
  Description of Artificial Sequence: Synthetic oligonucleotide
uuucacagucgagaauaga

SEQ ID NO: 1922201 - RNA, 19 nt, Artificial Sequence
  Description of Artificial Sequence: Synthetic oligonucleotide
ucccauaugugacgggaua

SEQ ID NO: 1922202 - RNA, 19 nt, Artificial Sequence
  Description of Artificial Sequence: Synthetic oligonucleotide
aggcuuacagcuguauaug

SEQ ID NO: 1922203 - RNA, 19 nt, Artificial Sequence
  Description of Artificial Sequence: Synthetic oligonucleotide
uccaauggcaagucuucua

SEQ ID NO: 1922204 - RNA, 19 nt, Artificial Sequence
  Description of Artificial Sequence: Synthetic oligonucleotide
acucccauaugugacggga

SEQ ID NO: 1922205 - RNA, 19 nt, Artificial Sequence
  Description of Artificial Sequence: Synthetic oligonucleotide
aaaacggacuugacugagu

SEQ ID NO: 1922206 - RNA, 19 nt, Artificial Sequence
  Description of Artificial Sequence: Synthetic oligonucleotide
agccuucuugcaaguaggc

SEQ ID NO: 1922207 - RNA, 19 nt, Artificial Sequence
  Description of Artificial Sequence: Synthetic oligonucleotide
acuaaccaccaagauguca

SEQ ID NO: 1922208 - RNA, 19 nt, Artificial Sequence
  Description of Artificial Sequence: Synthetic oligonucleotide
uacagcuguauaugucuau

SEQ ID NO: 1922209 - RNA, 19 nt, Artificial Sequence
  Description of Artificial Sequence: Synthetic oligonucleotide
cacacucgcuuuauaaaga

SEQ ID NO: 1922210 - RNA, 19 nt, Artificial Sequence
  Description of Artificial Sequence: Synthetic oligonucleotide
gaccaguccauaagagagc

SEQ ID NO: 1922211 - RNA, 19 nt, Artificial Sequence
  Description of Artificial Sequence: Synthetic oligonucleotide
gucgagaauagaacaauaa

SEQ ID NO: 1922212 - RNA, 19 nt, Artificial Sequence
  Description of Artificial Sequence: Synthetic oligonucleotide
ugccucugaaaacggacuu

SEQ ID NO: 1922213 - RNA, 19 nt, Artificial Sequence
  Description of Artificial Sequence: Synthetic oligonucleotide
aauugauaucaaacacaaa

SEQ ID NO: 1922214 - RNA, 19 nt, Artificial Sequence
  Description of Artificial Sequence: Synthetic oligonucleotide
cauaauuacuaaccaccaa

SEQ ID NO: 1922215 - RNA, 19 nt, Artificial Sequence
  Description of Artificial Sequence: Synthetic oligonucleotide
uguggacugcuucuagcuu

SEQ ID NO: 1922216 - RNA, 19 nt, Artificial Sequence
  Description of Artificial Sequence: Synthetic oligonucleotide
caggcacuuuucuugcaac

SEQ ID NO: 1922217 - RNA, 19 nt, Artificial Sequence
  Description of Artificial Sequence: Synthetic oligonucleotide
uguggccuuuuaauaugaa

SEQ ID NO: 1922218 - RNA, 19 nt, Artificial Sequence
  Description of Artificial Sequence: Synthetic oligonucleotide
augccauuccgagacauaa

SEQ ID NO: 1922219 - RNA, 19 nt, Artificial Sequence
  Description of Artificial Sequence: Synthetic oligonucleotide
agauccaggcuauccgcgu

SEQ ID NO: 1922220 - RNA, 19 nt, Artificial Sequence
  Description of Artificial Sequence: Synthetic oligonucleotide
cuuugugaccaguccauaa

SEQ ID NO: 1922221 - RNA, 19 nt, Artificial Sequence
  Description of Artificial Sequence: Synthetic oligonucleotide
caagaggauuagccugucc

SEQ ID NO: 1922222 - RNA, 19 nt, Artificial Sequence
  Description of Artificial Sequence: Synthetic oligonucleotide
auuaggcaugcugaaacuu

SEQ ID NO: 1922223 - RNA, 19 nt, Artificial Sequence
  Description of Artificial Sequence: Synthetic oligonucleotide
ugagcuucagaggcuuaca

SEQ ID NO: 1922224 - RNA, 19 nt, Artificial Sequence
  Description of Artificial Sequence: Synthetic oligonucleotide
agaggcuuacagcuguaua

SEQ ID NO: 1922225 - RNA, 19 nt, Artificial Sequence
  Description of Artificial Sequence: Synthetic oligonucleotide
ugugacgggauauguccua

SEQ ID NO: 1922226 - RNA, 19 nt, Artificial Sequence
  Description of Artificial Sequence: Synthetic oligonucleotide
ugaauguaguuuggauggu

SEQ ID NO: 1922227 - RNA, 19 nt, Artificial Sequence
  Description of Artificial Sequence: Synthetic oligonucleotide
ggaauguggccuuuuaaua

SEQ ID NO: 1922228 - RNA, 19 nt, Artificial Sequence
  Description of Artificial Sequence: Synthetic oligonucleotide
cccauuuacgucacagccc

SEQ ID NO: 1922229 - RNA, 19 nt, Artificial Sequence
  Description of Artificial Sequence: Synthetic oligonucleotide
uuacgucacagcccaccaa

SEQ ID NO: 1922230 - RNA, 19 nt, Artificial Sequence
  Description of Artificial Sequence: Synthetic oligonucleotide
ucuucgcaucgaaaaguuu

SEQ ID NO: 1922231 - RNA, 19 nt, Artificial Sequence
  Description of Artificial Sequence: Synthetic oligonucleotide
uagcacaaccaugguagga

SEQ ID NO: 1922232 - RNA, 19 nt, Artificial Sequence
  Description of Artificial Sequence: Synthetic oligonucleotide
cagauaccccauuuacguc

SEQ ID NO: 1922233 - RNA, 19 nt, Artificial Sequence
  Description of Artificial Sequence: Synthetic oligonucleotide
uacaugcaagccagcuuuc

SEQ ID NO: 1922234 - RNA, 19 nt, Artificial Sequence
  Description of Artificial Sequence: Synthetic oligonucleotide
cucugaaaacggacuugac

SEQ ID NO: 1922235 - RNA, 19 nt, Artificial Sequence
  Description of Artificial Sequence: Synthetic oligonucleotide
gucaugaauguaguuugga

SEQ ID NO: 1922236 - RNA, 19 nt, Artificial Sequence
  Description of Artificial Sequence: Synthetic oligonucleotide
cucuguggacugcuucuag

SEQ ID NO: 1922237 - RNA, 19 nt, Artificial Sequence
  Description of Artificial Sequence: Synthetic oligonucleotide
ugguaucugucaggaaugu

SEQ ID NO: 1922238 - RNA, 19 nt, Artificial Sequence
  Description of Artificial Sequence: Synthetic oligonucleotide
accaugguaggaccauuau

SEQ ID NO: 1922239 - RNA, 19 nt, Artificial Sequence
  Description of Artificial Sequence: Synthetic oligonucleotide
aacugguaucugucaggaa

SEQ ID NO: 1922240 - RNA, 19 nt, Artificial Sequence
  Description of Artificial Sequence: Synthetic oligonucleotide
gguaggaccauuaucccaa

SEQ ID NO: 1922241 - RNA, 19 nt, Artificial Sequence
  Description of Artificial Sequence: Synthetic oligonucleotide
cuacaugcaagccagcuuu

SEQ ID NO: 1922242 - RNA, 19 nt, Artificial Sequence
  Description of Artificial Sequence: Synthetic oligonucleotide
aucuuugugaccaguccau

SEQ ID NO: 1922243 - RNA, 19 nt, Artificial Sequence
  Description of Artificial Sequence: Synthetic oligonucleotide
gagcagaauccgugcuugc

SEQ ID NO: 1922244 - RNA, 19 nt, Artificial Sequence
  Description of Artificial Sequence: Synthetic oligonucleotide
ccauuuacgucacagccca

SEQ ID NO: 1922245 - RNA, 19 nt, Artificial Sequence
  Description of Artificial Sequence: Synthetic oligonucleotide
cagaauccgugcuugcgga

SEQ ID NO: 1922246 - RNA, 19 nt, Artificial Sequence
  Description of Artificial Sequence: Synthetic oligonucleotide
ucugcacacucgcuuuaua

SEQ ID NO: 1922247 - RNA, 19 nt, Artificial Sequence
  Description of Artificial Sequence: Synthetic oligonucleotide
aaccaugguaggaccauua

SEQ ID NO: 1922248 - RNA, 19 nt, Artificial Sequence
  Description of Artificial Sequence: Synthetic oligonucleotide
agcuggcaaauaugguccu

SEQ ID NO: 1922249 - RNA, 19 nt, Artificial Sequence
  Description of Artificial Sequence: Synthetic oligonucleotide
ugccauuccgagacauaau

SEQ ID NO: 1922250 - RNA, 19 nt, Artificial Sequence
  Description of Artificial Sequence: Synthetic oligonucleotide
caguccauaagagagcugu

SEQ ID NO: 1922251 - RNA, 19 nt, Artificial Sequence
  Description of Artificial Sequence: Synthetic oligonucleotide
acagcuguauaugucuaua

SEQ ID NO: 1922252 - RNA, 19 nt, Artificial Sequence
  Description of Artificial Sequence: Synthetic oligonucleotide
aggagcagaauccgugcuu

SEQ ID NO: 1922253 - RNA, 19 nt, Artificial Sequence
  Description of Artificial Sequence: Synthetic oligonucleotide
cuauccgcguguguaagca

SEQ ID NO: 1922254 - RNA, 19 nt, Artificial Sequence
  Description of Artificial Sequence: Synthetic oligonucleotide
ggcaaauaugguccuauua

SEQ ID NO: 1922255 - RNA, 19 nt, Artificial Sequence
  Description of Artificial Sequence: Synthetic oligonucleotide
gcacuuuucuugcaaccac

SEQ ID NO: 1922256 - RNA, 19 nt, Artificial Sequence
  Description of Artificial Sequence: Synthetic oligonucleotide
agucgagaauagaacaaua

SEQ ID NO: 1922257 - RNA, 19 nt, Artificial Sequence
  Description of Artificial Sequence: Synthetic oligonucleotide
ccuuuuguaaucagaucca

SEQ ID NO: 1922258 - RNA, 19 nt, Artificial Sequence
  Description of Artificial Sequence: Synthetic oligonucleotide
agggagucaugaauguagu

SEQ ID NO: 1922259 - RNA, 19 nt, Artificial Sequence
  Description of Artificial Sequence: Synthetic oligonucleotide
ccgagacauaauuacuaac

SEQ ID NO: 1922260 - RNA, 19 nt, Artificial Sequence
  Description of Artificial Sequence: Synthetic oligonucleotide
auguggccuuuuaauauga

SEQ ID NO: 1922261 - RNA, 19 nt, Artificial Sequence
  Description of Artificial Sequence: Synthetic oligonucleotide
uuucgcuguauagcacaac

SEQ ID NO: 1922262 - RNA, 19 nt, Artificial Sequence
  Description of Artificial Sequence: Synthetic oligonucleotide
gguuugcaauaaauuauuc

SEQ ID NO: 1922263 - RNA, 19 nt, Artificial Sequence
  Description of Artificial Sequence: Synthetic oligonucleotide
ucacaggguccagaugcca

SEQ ID NO: 1922264 - RNA, 19 nt, Artificial Sequence
  Description of Artificial Sequence: Synthetic oligonucleotide
uacuaaccaccaagauguc

SEQ ID NO: 1922265 - RNA, 19 nt, Artificial Sequence
  Description of Artificial Sequence: Synthetic oligonucleotide
uauccgcguguguaagcaa

SEQ ID NO: 1922266 - RNA, 19 nt, Artificial Sequence
  Description of Artificial Sequence: Synthetic oligonucleotide
agccccauugagucacaca

SEQ ID NO: 1922267 - RNA, 19 nt, Artificial Sequence
  Description of Artificial Sequence: Synthetic oligonucleotide
caguauucaggaucugucu

SEQ ID NO: 1922268 - RNA, 19 nt, Artificial Sequence
  Description of Artificial Sequence: Synthetic oligonucleotide
ugacgggauauguccuaaa

SEQ ID NO: 1922269 - RNA, 19 nt, Artificial Sequence
  Description of Artificial Sequence: Synthetic oligonucleotide
gcguguguaagcaaagcca

SEQ ID NO: 1922270 - RNA, 19 nt, Artificial Sequence
  Description of Artificial Sequence: Synthetic oligonucleotide
ucuuugugaccaguccaua

SEQ ID NO: 1922271 - RNA, 19 nt, Artificial Sequence
  Description of Artificial Sequence: Synthetic oligonucleotide
gcacaaccaugguaggacc

SEQ ID NO: 1922272 - RNA, 19 nt, Artificial Sequence
  Description of Artificial Sequence: Synthetic oligonucleotide
ucgcaucgaaaaguuucac

SEQ ID NO: 1922273 - RNA, 19 nt, Artificial Sequence
  Description of Artificial Sequence: Synthetic oligonucleotide
gugauagacaucucucuuu

SEQ ID NO: 1922274 - RNA, 19 nt, Artificial Sequence
  Description of Artificial Sequence: Synthetic oligonucleotide
uggcaaauaugguccuauu

SEQ ID NO: 1922275 - RNA, 19 nt, Artificial Sequence
  Description of Artificial Sequence: Synthetic oligonucleotide
cuugcggaaccaggucucc

SEQ ID NO: 1922276 - RNA, 19 nt, Artificial Sequence
  Description of Artificial Sequence: Synthetic oligonucleotide
cacucccauaugugacggg

SEQ ID NO: 1922277 - RNA, 19 nt, Artificial Sequence
  Description of Artificial Sequence: Synthetic oligonucleotide
ucagaggcuuacagcugua

SEQ ID NO: 1922278 - RNA, 19 nt, Artificial Sequence
  Description of Artificial Sequence: Synthetic oligonucleotide
ggauauguccuaaacuugu

SEQ ID NO: 1922279 - RNA, 19 nt, Artificial Sequence
  Description of Artificial Sequence: Synthetic oligonucleotide
acgucacagcccaccaagg

SEQ ID NO: 1922280 - RNA, 19 nt, Artificial Sequence
  Description of Artificial Sequence: Synthetic oligonucleotide
cgucaaacgaguucucaug

SEQ ID NO: 1922281 - RNA, 19 nt, Artificial Sequence
  Description of Artificial Sequence: Synthetic oligonucleotide
cuguggacugcuucuagcu

SEQ ID NO: 1922282 - RNA, 19 nt, Artificial Sequence
  Description of Artificial Sequence: Synthetic oligonucleotide
guaggaccauuaucccaac

SEQ ID NO: 1922283 - RNA, 19 nt, Artificial Sequence
  Description of Artificial Sequence: Synthetic oligonucleotide
augugacgggauauguccu

SEQ ID NO: 1922284 - RNA, 19 nt, Artificial Sequence
  Description of Artificial Sequence: Synthetic oligonucleotide
aggcuauccgcguguguaa

SEQ ID NO: 1922285 - RNA, 19 nt, Artificial Sequence
  Description of Artificial Sequence: Synthetic oligonucleotide
cgcguguguaagcaaagcc

SEQ ID NO: 1922286 - RNA, 19 nt, Artificial Sequence
  Description of Artificial Sequence: Synthetic oligonucleotide
cgaaaaguuucacagucga

SEQ ID NO: 1922287 - RNA, 19 nt, Artificial Sequence
  Description of Artificial Sequence: Synthetic oligonucleotide
cauaugugacgggauaugu

SEQ ID NO: 1922288 - RNA, 19 nt, Artificial Sequence
  Description of Artificial Sequence: Synthetic oligonucleotide
cugaguugacaaagcuaga

SEQ ID NO: 1922289 - RNA, 19 nt, Artificial Sequence
  Description of Artificial Sequence: Synthetic oligonucleotide
gugcaaaaggggugauaga

SEQ ID NO: 1922290 - RNA, 19 nt, Artificial Sequence
  Description of Artificial Sequence: Synthetic oligonucleotide
ggggugauagacaucucuc

SEQ ID NO: 1922291 - RNA, 19 nt, Artificial Sequence
  Description of Artificial Sequence: Synthetic oligonucleotide
ccaugguaggaccauuauc

SEQ ID NO: 1922292 - RNA, 19 nt, Artificial Sequence
  Description of Artificial Sequence: Synthetic oligonucleotide
uccaggcuauccgcgugug

SEQ ID NO: 1922293 - RNA, 19 nt, Artificial Sequence
  Description of Artificial Sequence: Synthetic oligonucleotide
gcuauccgcguguguaagc

SEQ ID NO: 1922294 - RNA, 19 nt, Artificial Sequence
  Description of Artificial Sequence: Synthetic oligonucleotide
cauuuacgucacagcccac

SEQ ID NO: 1922295 - RNA, 19 nt, Artificial Sequence
  Description of Artificial Sequence: Synthetic oligonucleotide
gcuuacagcuguauauguc

SEQ ID NO: 1922296 - RNA, 19 nt, Artificial Sequence
  Description of Artificial Sequence: Synthetic oligonucleotide
gguaucugucaggaaugug

SEQ ID NO: 1922297 - RNA, 19 nt, Artificial Sequence
  Description of Artificial Sequence: Synthetic oligonucleotide
cacgucaaacgaguucuca

SEQ ID NO: 1922298 - RNA, 19 nt, Artificial Sequence
  Description of Artificial Sequence: Synthetic oligonucleotide
auccgcguguguaagcaaa

SEQ ID NO: 1922299 - RNA, 19 nt, Artificial Sequence
  Description of Artificial Sequence: Synthetic oligonucleotide
gugcuugcggaaccagguc

SEQ ID NO: 1922300 - RNA, 19 nt, Artificial Sequence
  Description of Artificial Sequence: Synthetic oligonucleotide
gaauguaguuuggaugguu

SEQ ID NO: 1922301 - RNA, 19 nt, Artificial Sequence
  Description of Artificial Sequence: Synthetic oligonucleotide
gggugauagacaucucucu

SEQ ID NO: 1922302 - RNA, 19 nt, Artificial Sequence
  Description of Artificial Sequence: Synthetic oligonucleotide
caggcuauccgcgugugua

SEQ ID NO: 1922303 - RNA, 19 nt, Artificial Sequence
  Description of Artificial Sequence: Synthetic oligonucleotide
cuuuccggcuccagucgga

SEQ ID NO: 1922304 - RNA, 19 nt, Artificial Sequence
  Description of Artificial Sequence: Synthetic oligonucleotide
guccuaaacuugucagaua

SEQ ID NO: 1922305 - RNA, 19 nt, Artificial Sequence
  Description of Artificial Sequence: Synthetic oligonucleotide
gcuuuauaaagaagacaaa

SEQ ID NO: 1922306 - RNA, 19 nt, Artificial Sequence
  Description of Artificial Sequence: Synthetic oligonucleotide
ccauugagucacacagaac

SEQ ID NO: 1922307 - RNA, 19 nt, Artificial Sequence
  Description of Artificial Sequence: Synthetic oligonucleotide
ggugauagacaucucucuu

SEQ ID NO: 1922308 - RNA, 19 nt, Artificial Sequence
  Description of Artificial Sequence: Synthetic oligonucleotide
ccauaugugacgggauaug

SEQ ID NO: 1922309 - RNA, 19 nt, Artificial Sequence
  Description of Artificial Sequence: Synthetic oligonucleotide
ccgugcuugcggaaccagg

SEQ ID NO: 1922310 - RNA, 19 nt, Artificial Sequence
  Description of Artificial Sequence: Synthetic oligonucleotide
gaugccauuccgagacaua

SEQ ID NO: 1922311 - RNA, 19 nt, Artificial Sequence
  Description of Artificial Sequence: Synthetic oligonucleotide
ggcuauccgcguguguaag

SEQ ID NO: 1922312 - RNA, 19 nt, Artificial Sequence
  Description of Artificial Sequence: Synthetic oligonucleotide
ggcuuacagcuguauaugu

SEQ ID NO: 1922313 - RNA, 19 nt, Artificial Sequence
  Description of Artificial Sequence: Synthetic oligonucleotide
cccaacauuuccagaacaa

SEQ ID NO: 1922314 - RNA, 19 nt, Artificial Sequence
  Description of Artificial Sequence: Synthetic oligonucleotide
gcaaccacgucaaacgagu

SEQ ID NO: 1922315 - RNA, 19 nt, Artificial Sequence
  Description of Artificial Sequence: Synthetic oligonucleotide
guaucacagcaaugucucu

SEQ ID NO: 1922316 - RNA, 19 nt, Artificial Sequence
  Description of Artificial Sequence: Synthetic oligonucleotide
uugaugugauuggcuucau

SEQ ID NO: 1922317 - RNA, 19 nt, Artificial Sequence
  Description of Artificial Sequence: Synthetic oligonucleotide
gccauuccgagacauaauu

SEQ ID NO: 1922318 - RNA, 19 nt, Artificial Sequence
  Description of Artificial Sequence: Synthetic oligonucleotide
auaccccauuuacgucaca

SEQ ID NO: 1922319 - RNA, 19 nt, Artificial Sequence
  Description of Artificial Sequence: Synthetic oligonucleotide
gccacaugcagaacaccac

SEQ ID NO: 1922320 - RNA, 19 nt, Artificial Sequence
  Description of Artificial Sequence: Synthetic oligonucleotide
ggaccauuaucccaacauu

SEQ ID NO: 1922321 - RNA, 19 nt, Artificial Sequence
  Description of Artificial Sequence: Synthetic oligonucleotide
gugacgggauauguccuaa

SEQ ID NO: 1922322 - RNA, 19 nt, Artificial Sequence
  Description of Artificial Sequence: Synthetic oligonucleotide
cagucgagaauagaacaau

SEQ ID NO: 1922323 - RNA, 19 nt, Artificial Sequence
  Description of Artificial Sequence: Synthetic oligonucleotide
cgcaucgaaaaguuucaca

SEQ ID NO: 1922324 - RNA, 19 nt, Artificial Sequence
  Description of Artificial Sequence: Synthetic oligonucleotide
ggguuugcaauaaauuauu

SEQ ID NO: 1922325 - RNA, 19 nt, Artificial Sequence
  Description of Artificial Sequence: Synthetic oligonucleotide
cagucggacccaggagcag

SEQ ID NO: 1922326 - RNA, 19 nt, Artificial Sequence
  Description of Artificial Sequence: Synthetic oligonucleotide
ccagucggacccaggagca

SEQ ID NO: 1922327 - RNA, 19 nt, Artificial Sequence
  Description of Artificial Sequence: Synthetic oligonucleotide
gccuucuugcaaguaggca

SEQ ID NO: 1922328 - RNA, 19 nt, Artificial Sequence
  Description of Artificial Sequence: Synthetic oligonucleotide
gcuugcggaaccaggucuc

SEQ ID NO: 1922329 - RNA, 19 nt, Artificial Sequence
  Description of Artificial Sequence: Synthetic oligonucleotide
ggcaccaacaacacaguuu

SEQ ID NO: 1922330 - RNA, 19 nt, Artificial Sequence
  Description of Artificial Sequence: Synthetic oligonucleotide
ccuauuaggcaugcugaaa

SEQ ID NO: 1922331 - RNA, 19 nt, Artificial Sequence
  Description of Artificial Sequence: Synthetic oligonucleotide
gucggacccaggagcagaa

SEQ ID NO: 1922332 - RNA, 19 nt, Artificial Sequence
  Description of Artificial Sequence: Synthetic oligonucleotide
cucccauaugugacgggau

SEQ ID NO: 1922333 - RNA, 19 nt, Artificial Sequence
  Description of Artificial Sequence: Synthetic oligonucleotide
ccgcguguguaagcaaagc

SEQ ID NO: 1922334 - RNA, 19 nt, Artificial Sequence
  Description of Artificial Sequence: Synthetic oligonucleotide
gccaagaggauuagccugu

SEQ ID NO: 1922335 - RNA, 19 nt, Artificial Sequence
  Description of Artificial Sequence: Synthetic oligonucleotide
ucggacccaggagcagaau

SEQ ID NO: 1922336 - RNA, 19 nt, Artificial Sequence
  Description of Artificial Sequence: Synthetic oligonucleotide
cauuggcaguauucaggau

SEQ ID NO: 1922337 - RNA, 19 nt, Artificial Sequence
  Description of Artificial Sequence: Synthetic oligonucleotide
ccacgucaaacgaguucuc

SEQ ID NO: 1922338 - RNA, 19 nt, Artificial Sequence
  Description of Artificial Sequence: Synthetic oligonucleotide
ccccauugagucacacaga

SEQ ID NO: 1922339 - RNA, 19 nt, Artificial Sequence
  Description of Artificial Sequence: Synthetic oligonucleotide
cugcuucuagcuugagcuu

SEQ ID NO: 1922340 - RNA, 19 nt, Artificial Sequence
  Description of Artificial Sequence: Synthetic oligonucleotide
caaccacgucaaacgaguu

SEQ ID NO: 1922341 - RNA, 19 nt, Artificial Sequence
  Description of Artificial Sequence: Synthetic oligonucleotide
cgcuguauagcacaaccau

SEQ ID NO: 1922342 - RNA, 19 nt, Artificial Sequence
  Description of Artificial Sequence: Synthetic oligonucleotide
gcagggagucaugaaugua

SEQ ID NO: 1922343 - RNA, 19 nt, Artificial Sequence
  Description of Artificial Sequence: Synthetic oligonucleotide
ggacugcuucuagcuugag

SEQ ID NO: 1922344 - RNA, 19 nt, Artificial Sequence
  Description of Artificial Sequence: Synthetic oligonucleotide
gcggaaccaggucuccaua

SEQ ID NO: 1922345 - RNA, 19 nt, Artificial Sequence
  Description of Artificial Sequence: Synthetic oligonucleotide
gcuagacuuuccggcucca

SEQ ID NO: 1922346 - RNA, 19 nt, Artificial Sequence
  Description of Artificial Sequence: Synthetic oligonucleotide
cagaggcuuacagcuguau

SEQ ID NO: 1922347 - RNA, 19 nt, Artificial Sequence
  Description of Artificial Sequence: Synthetic oligonucleotide
cccauaugugacgggauau

SEQ ID NO: 1922348 - RNA, 19 nt, Artificial Sequence
  Description of Artificial Sequence: Synthetic oligonucleotide
ccaggcuauccgcgugugu

SEQ ID NO: 1922349 - RNA, 19 nt, Artificial Sequence
  Description of Artificial Sequence: Synthetic oligonucleotide
aguaacuucauuuaaauug

SEQ ID NO: 1922350 - RNA, 19 nt, Artificial Sequence
  Description of Artificial Sequence: Synthetic oligonucleotide
ugugaucccaucaauaagg

SEQ ID NO: 1922351 - RNA, 19 nt, Artificial Sequence
  Description of Artificial Sequence: Synthetic oligonucleotide
acaagaacugcucuaacgc

SEQ ID NO: 1922352 - RNA, 19 nt, Artificial Sequence
  Description of Artificial Sequence: Synthetic oligonucleotide
gacagauuugucuugaucc

SEQ ID NO: 1922353 - RNA, 19 nt, Artificial Sequence
  Description of Artificial Sequence: Synthetic oligonucleotide
aguguuaugacucccgcac

SEQ ID NO: 1922354 - RNA, 19 nt, Artificial Sequence
  Description of Artificial Sequence: Synthetic oligonucleotide
ucuaacgccuucaugaaag

SEQ ID NO: 1922355 - RNA, 19 nt, Artificial Sequence
  Description of Artificial Sequence: Synthetic oligonucleotide
agacauuuuacuaauuacc

SEQ ID NO: 1922356 - RNA, 19 nt, Artificial Sequence
  Description of Artificial Sequence: Synthetic oligonucleotide
ugauuuucagagaugucgg

SEQ ID NO: 1922357 - RNA, 19 nt, Artificial Sequence
  Description of Artificial Sequence: Synthetic oligonucleotide
uuuagcuguggauagaucu

SEQ ID NO: 1922358 - RNA, 19 nt, Artificial Sequence
  Description of Artificial Sequence: Synthetic oligonucleotide
aacuugugcaacuucuccg

SEQ ID NO: 1922359 - RNA, 19 nt, Artificial Sequence
  Description of Artificial Sequence: Synthetic oligonucleotide
agauuuaaaauaacuauuc

SEQ ID NO: 1922360 - RNA, 19 nt, Artificial Sequence
  Description of Artificial Sequence: Synthetic oligonucleotide
cauuuuacuaauuaccuuc

SEQ ID NO: 1922361 - RNA, 19 nt, Artificial Sequence
  Description of Artificial Sequence: Synthetic oligonucleotide
aaauggugaaccauccugc

SEQ ID NO: 1922362 - RNA, 19 nt, Artificial Sequence
  Description of Artificial Sequence: Synthetic oligonucleotide
aauggugaaccauccugcc

SEQ ID NO: 1922363 - RNA, 19 nt, Artificial Sequence
  Description of Artificial Sequence: Synthetic oligonucleotide
uuacuaauuaccuucaguu

SEQ ID NO: 1922364 - RNA, 19 nt, Artificial Sequence
  Description of Artificial Sequence: Synthetic oligonucleotide
acuaauuaccuucaguugu

SEQ ID NO: 1922365 - RNA, 19 nt, Artificial Sequence
  Description of Artificial Sequence: Synthetic oligonucleotide
uuugucaacaagaacugcu

SEQ ID NO: 1922366 - RNA, 19 nt, Artificial Sequence
  Description of Artificial Sequence: Synthetic oligonucleotide
cauuguucaguauauauuc

SEQ ID NO: 1922367 - RNA, 19 nt, Artificial Sequence
  Description of Artificial Sequence: Synthetic oligonucleotide
aaggaaguaacccagcuuu

SEQ ID NO: 1922368 - RNA, 19 nt, Artificial Sequence
  Description of Artificial Sequence: Synthetic oligonucleotide
aagggcaacauaugguuuc

SEQ ID NO: 1922369 - RNA, 19 nt, Artificial Sequence
  Description of Artificial Sequence: Synthetic oligonucleotide
agagggaccuuucaguagc

SEQ ID NO: 1922370 - RNA, 19 nt, Artificial Sequence
  Description of Artificial Sequence: Synthetic oligonucleotide
auaaccuccgcccacauca

SEQ ID NO: 1922371 - RNA, 19 nt, Artificial Sequence
  Description of Artificial Sequence: Synthetic oligonucleotide
cuuuugagugaguugaacc

SEQ ID NO: 1922372 - RNA, 19 nt, Artificial Sequence
  Description of Artificial Sequence: Synthetic oligonucleotide
uccgaaucuacaaagugug

SEQ ID NO: 1922373 - RNA, 19 nt, Artificial Sequence
  Description of Artificial Sequence: Synthetic oligonucleotide
uuuccuugaagucuuggca

SEQ ID NO: 1922374 - RNA, 19 nt, Artificial Sequence
  Description of Artificial Sequence: Synthetic oligonucleotide
aucauguucagagacagag

SEQ ID NO: 1922375 - RNA, 19 nt, Artificial Sequence
  Description of Artificial Sequence: Synthetic oligonucleotide
gugaguugaaccucgacag

SEQ ID NO: 1922376 - RNA, 19 nt, Artificial Sequence
  Description of Artificial Sequence: Synthetic oligonucleotide
ucucgugucaaauucugcc

SEQ ID NO: 1922377 - RNA, 19 nt, Artificial Sequence
  Description of Artificial Sequence: Synthetic oligonucleotide
uauuccauggucaguaccu

SEQ ID NO: 1922378 - RNA, 19 nt, Artificial Sequence
  Description of Artificial Sequence: Synthetic oligonucleotide
ugaagucuuggcaagaaau

SEQ ID NO: 1922379 - RNA, 19 nt, Artificial Sequence
  Description of Artificial Sequence: Synthetic oligonucleotide
uugagugaguugaaccucg

SEQ ID NO: 1922380 - RNA, 19 nt, Artificial Sequence
  Description of Artificial Sequence: Synthetic oligonucleotide
guuguucuauggcaaaugg

SEQ ID NO: 1922381 - RNA, 19 nt, Artificial Sequence
  Description of Artificial Sequence: Synthetic oligonucleotide
ucccuuuaugauaaucagg

SEQ ID NO: 1922382 - RNA, 19 nt, Artificial Sequence
  Description of Artificial Sequence: Synthetic oligonucleotide
uuuaaauuggcugguuucc

SEQ ID NO: 1922383 - RNA, 19 nt, Artificial Sequence
  Description of Artificial Sequence: Synthetic oligonucleotide
uauuuuguccacguguucc

SEQ ID NO: 1922384 - RNA, 19 nt, Artificial Sequence
  Description of Artificial Sequence: Synthetic oligonucleotide
agugaguugaaccucgaca

SEQ ID NO: 1922385 - RNA, 19 nt, Artificial Sequence
  Description of Artificial Sequence: Synthetic oligonucleotide
gagacauuuuacuaauuac

SEQ ID NO: 1922386 - RNA, 19 nt, Artificial Sequence
  Description of Artificial Sequence: Synthetic oligonucleotide
aaaucacugcuucccagag

SEQ ID NO: 1922387 - RNA, 19 nt, Artificial Sequence
  Description of Artificial Sequence: Synthetic oligonucleotide
uguuaugacucccgcacag

SEQ ID NO: 1922388 - RNA, 19 nt, Artificial Sequence
  Description of Artificial Sequence: Synthetic oligonucleotide
ucggaaucguccaugaacu

SEQ ID NO: 1922389 - RNA, 19 nt, Artificial Sequence
  Description of Artificial Sequence: Synthetic oligonucleotide
ugauaaucaggaaugucuc

SEQ ID NO: 1922390 - RNA, 19 nt, Artificial Sequence
  Description of Artificial Sequence: Synthetic oligonucleotide
ugcaugguagcuuucuaag

SEQ ID NO: 1922391 - RNA, 19 nt, Artificial Sequence
  Description of Artificial Sequence: Synthetic oligonucleotide
aacaacucuuccucuaacu

SEQ ID NO: 1922392 - RNA, 19 nt, Artificial Sequence
  Description of Artificial Sequence: Synthetic oligonucleotide
ucaauaagggcaacauaug

SEQ ID NO: 1922393 - RNA, 19 nt, Artificial Sequence
  Description of Artificial Sequence: Synthetic oligonucleotide
augauaaucaggaaugucu

SEQ ID NO: 1922394 - RNA, 19 nt, Artificial Sequence
  Description of Artificial Sequence: Synthetic oligonucleotide
uuuucagagaugucggaga

SEQ ID NO: 1922395 - RNA, 19 nt, Artificial Sequence
  Description of Artificial Sequence: Synthetic oligonucleotide
aucaauaagggcaacauau

SEQ ID NO: 1922396 - RNA, 19 nt, Artificial Sequence
  Description of Artificial Sequence: Synthetic oligonucleotide
ucuccgaaucuacaaagug

SEQ ID NO: 1922397 - RNA, 19 nt, Artificial Sequence
  Description of Artificial Sequence: Synthetic oligonucleotide
cuuggcaagaaauaaccuc

SEQ ID NO: 1922398 - RNA, 19 nt, Artificial Sequence
  Description of Artificial Sequence: Synthetic oligonucleotide
ugcugcaauauaacauugg

SEQ ID NO: 1922399 - RNA, 19 nt, Artificial Sequence
  Description of Artificial Sequence: Synthetic oligonucleotide
uuaugacucccgcacagcc

SEQ ID NO: 1922400 - RNA, 19 nt, Artificial Sequence
  Description of Artificial Sequence: Synthetic oligonucleotide
uacuaauuaccuucaguug

SEQ ID NO: 1922401 - RNA, 19 nt, Artificial Sequence
  Description of Artificial Sequence: Synthetic oligonucleotide
caaauggugaaccauccug

SEQ ID NO: 1922402 - RNA, 19 nt, Artificial Sequence
  Description of Artificial Sequence: Synthetic oligonucleotide
agugcaaggaaguaaccca

SEQ ID NO: 1922403 - RNA, 19 nt, Artificial Sequence
  Description of Artificial Sequence: Synthetic oligonucleotide
aauuuguuccacaguauug

SEQ ID NO: 1922404 - RNA, 19 nt, Artificial Sequence
  Description of Artificial Sequence: Synthetic oligonucleotide
caugguagcuuucuaagac

SEQ ID NO: 1922405 - RNA, 19 nt, Artificial Sequence
  Description of Artificial Sequence: Synthetic oligonucleotide
auugugaucccaucaauaa

SEQ ID NO: 1922406 - RNA, 19 nt, Artificial Sequence
  Description of Artificial Sequence: Synthetic oligonucleotide
uugaaccucgacaggagcc

SEQ ID NO: 1922407 - RNA, 19 nt, Artificial Sequence
  Description of Artificial Sequence: Synthetic oligonucleotide
ugugcaacuucuccgaauc

SEQ ID NO: 1922408 - RNA, 19 nt, Artificial Sequence
  Description of Artificial Sequence: Synthetic oligonucleotide
ucuacaaaguguguggcga

SEQ ID NO: 1922409 - RNA, 19 nt, Artificial Sequence
  Description of Artificial Sequence: Synthetic oligonucleotide
uugugaucccaucaauaag

SEQ ID NO: 1922410 - RNA, 19 nt, Artificial Sequence
  Description of Artificial Sequence: Synthetic oligonucleotide
uuuuacuaauuaccuucag

SEQ ID NO: 1922411 - RNA, 19 nt, Artificial Sequence
  Description of Artificial Sequence: Synthetic oligonucleotide
uggugaaccauccugccgu

SEQ ID NO: 1922412 - RNA, 19 nt, Artificial Sequence
  Description of Artificial Sequence: Synthetic oligonucleotide
caguauauauucuucucug

SEQ ID NO: 1922413 - RNA, 19 nt, Artificial Sequence
  Description of Artificial Sequence: Synthetic oligonucleotide
gcaugcuugaguuagccgg

SEQ ID NO: 1922414 - RNA, 19 nt, Artificial Sequence
  Description of Artificial Sequence: Synthetic oligonucleotide
cuguggauagaucugccgg

SEQ ID NO: 1922415 - RNA, 19 nt, Artificial Sequence
  Description of Artificial Sequence: Synthetic oligonucleotide
ugaaccauccugccguaag

SEQ ID NO: 1922416 - RNA, 19 nt, Artificial Sequence
  Description of Artificial Sequence: Synthetic oligonucleotide
aacgccuucaugaaaguca

SEQ ID NO: 1922417 - RNA, 19 nt, Artificial Sequence
  Description of Artificial Sequence: Synthetic oligonucleotide
cuucuccgaaucuacaaag

SEQ ID NO: 1922418 - RNA, 19 nt, Artificial Sequence
  Description of Artificial Sequence: Synthetic oligonucleotide
ucagaugcugcaauauaac

SEQ ID NO: 1922419 - RNA, 19 nt, Artificial Sequence
  Description of Artificial Sequence: Synthetic oligonucleotide
acaaaguguguggcgaucc

SEQ ID NO: 1922420 - RNA, 19 nt, Artificial Sequence
  Description of Artificial Sequence: Synthetic oligonucleotide
uaacauuggcuucuuuuga

SEQ ID NO: 1922421 - RNA, 19 nt, Artificial Sequence
  Description of Artificial Sequence: Synthetic oligonucleotide
ugagauugcuuugauguca

SEQ ID NO: 1922422 - RNA, 19 nt, Artificial Sequence
  Description of Artificial Sequence: Synthetic oligonucleotide
cuucuuuagcuguggauag

SEQ ID NO: 1922423 - RNA, 19 nt, Artificial Sequence
  Description of Artificial Sequence: Synthetic oligonucleotide
aagagggaccuuucaguag

SEQ ID NO: 1922424 - RNA, 19 nt, Artificial Sequence
  Description of Artificial Sequence: Synthetic oligonucleotide
ucccagagauuuaaaauaa

SEQ ID NO: 1922425 - RNA, 19 nt, Artificial Sequence
  Description of Artificial Sequence: Synthetic oligonucleotide
ugguagcuuucuaagacac

SEQ ID NO: 1922426 - RNA, 19 nt, Artificial Sequence
  Description of Artificial Sequence: Synthetic oligonucleotide
cucggaaucguccaugaac

SEQ ID NO: 1922427 - RNA, 19 nt, Artificial Sequence
  Description of Artificial Sequence: Synthetic oligonucleotide
aguauauauucuucucuga

SEQ ID NO: 1922428 - RNA, 19 nt, Artificial Sequence
  Description of Artificial Sequence: Synthetic oligonucleotide
ugaguugaaccucgacagg

SEQ ID NO: 1922429 - RNA, 19 nt, Artificial Sequence
  Description of Artificial Sequence: Synthetic oligonucleotide
uggcaagaaauaaccuccg

SEQ ID NO: 1922430 - RNA, 19 nt, Artificial Sequence
  Description of Artificial Sequence: Synthetic oligonucleotide
ugcaauaucuucugcugcu

SEQ ID NO: 1922431 - RNA, 19 nt, Artificial Sequence
  Description of Artificial Sequence: Synthetic oligonucleotide
agagcguugaggaacuugg

SEQ ID NO: 1922432 - RNA, 19 nt, Artificial Sequence
  Description of Artificial Sequence: Synthetic oligonucleotide
aucuacaaaguguguggcg

SEQ ID NO: 1922433 - RNA, 19 nt, Artificial Sequence
  Description of Artificial Sequence: Synthetic oligonucleotide
uucuaagacaccugcaaua

SEQ ID NO: 1922434 - RNA, 19 nt, Artificial Sequence
  Description of Artificial Sequence: Synthetic oligonucleotide
auuuucagagaugucggag

SEQ ID NO: 1922435 - RNA, 19 nt, Artificial Sequence
  Description of Artificial Sequence: Synthetic oligonucleotide
ucugaacccugucagugca

SEQ ID NO: 1922436 - RNA, 19 nt, Artificial Sequence
  Description of Artificial Sequence: Synthetic oligonucleotide
uaacuauucaaaucuucau

SEQ ID NO: 1922437 - RNA, 19 nt, Artificial Sequence
  Description of Artificial Sequence: Synthetic oligonucleotide
uguucaguguuaugacucc

SEQ ID NO: 1922438 - RNA, 19 nt, Artificial Sequence
  Description of Artificial Sequence: Synthetic oligonucleotide
uuucuaagacaccugcaau

SEQ ID NO: 1922439 - RNA, 19 nt, Artificial Sequence
  Description of Artificial Sequence: Synthetic oligonucleotide
ucuggucuuugucaacaag

SEQ ID NO: 1922440 - RNA, 19 nt, Artificial Sequence
  Description of Artificial Sequence: Synthetic oligonucleotide
ucuuggcaagaaauaaccu

SEQ ID NO: 1922441 - RNA, 19 nt, Artificial Sequence
  Description of Artificial Sequence: Synthetic oligonucleotide
ugucaacaagaacugcucu

SEQ ID NO: 1922442 - RNA, 19 nt, Artificial Sequence
  Description of Artificial Sequence: Synthetic oligonucleotide
ugaaccucgacaggagccg

SEQ ID NO: 1922443 - RNA, 19 nt, Artificial Sequence
  Description of Artificial Sequence: Synthetic oligonucleotide
uuuagcuucugagauugcu

SEQ ID NO: 1922444 - RNA, 19 nt, Artificial Sequence
  Description of Artificial Sequence: Synthetic oligonucleotide
acauccugcugucccaugg

SEQ ID NO: 1922445 - RNA, 19 nt, Artificial Sequence
  Description of Artificial Sequence: Synthetic oligonucleotide
uguggauagaucugccgga

SEQ ID NO: 1922446 - RNA, 19 nt, Artificial Sequence
  Description of Artificial Sequence: Synthetic oligonucleotide
agucuuggcaagaaauaac

SEQ ID NO: 1922447 - RNA, 19 nt, Artificial Sequence
  Description of Artificial Sequence: Synthetic oligonucleotide
cucccuuuaugauaaucag

SEQ ID NO: 1922448 - RNA, 19 nt, Artificial Sequence
  Description of Artificial Sequence: Synthetic oligonucleotide
uggacauucucagaugcug

SEQ ID NO: 1922449 - RNA, 19 nt, Artificial Sequence
  Description of Artificial Sequence: Synthetic oligonucleotide
uuguucuauggcaaauggu

SEQ ID NO: 1922450 - RNA, 19 nt, Artificial Sequence
  Description of Artificial Sequence: Synthetic oligonucleotide
cauuggcuucuuuugagug

SEQ ID NO: 1922451 - RNA, 19 nt, Artificial Sequence
  Description of Artificial Sequence: Synthetic oligonucleotide
aucguccaugaacugaaag

SEQ ID NO: 1922452 - RNA, 19 nt, Artificial Sequence
  Description of Artificial Sequence: Synthetic oligonucleotide
gcaagaaauaaccuccgcc

SEQ ID NO: 1922453 - RNA, 19 nt, Artificial Sequence
  Description of Artificial Sequence: Synthetic oligonucleotide
ucaacaagaacugcucuaa

SEQ ID NO: 1922454 - RNA, 19 nt, Artificial Sequence
  Description of Artificial Sequence: Synthetic oligonucleotide
aagucuuggcaagaaauaa

SEQ ID NO: 1922455 - RNA, 19 nt, Artificial Sequence
  Description of Artificial Sequence: Synthetic oligonucleotide
aaucucgugucaaauucug

SEQ ID NO: 1922456 - RNA, 19 nt, Artificial Sequence
  Description of Artificial Sequence: Synthetic oligonucleotide
aacuugggucuguucagug

SEQ ID NO: 1922457 - RNA, 19 nt, Artificial Sequence
  Description of Artificial Sequence: Synthetic oligonucleotide
aagaacugcucuaacgccu

SEQ ID NO: 1922458 - RNA, 19 nt, Artificial Sequence
  Description of Artificial Sequence: Synthetic oligonucleotide
uguucccacuucuuuagcu

SEQ ID NO: 1922459 - RNA, 19 nt, Artificial Sequence
  Description of Artificial Sequence: Synthetic oligonucleotide
caauaucuucugcugcugg

SEQ ID NO: 1922460 - RNA, 19 nt, Artificial Sequence
  Description of Artificial Sequence: Synthetic oligonucleotide
ugacagauuugucuugauc

SEQ ID NO: 1922461 - RNA, 19 nt, Artificial Sequence
  Description of Artificial Sequence: Synthetic oligonucleotide
ugcaugcuugaguuagccg

SEQ ID NO: 1922462 - RNA, 19 nt, Artificial Sequence
  Description of Artificial Sequence: Synthetic oligonucleotide
uucuauggcaaauggugaa

SEQ ID NO: 1922463 - RNA, 19 nt, Artificial Sequence
  Description of Artificial Sequence: Synthetic oligonucleotide
uaaauuggcugguuuccac

SEQ ID NO: 1922464 - RNA, 19 nt, Artificial Sequence
  Description of Artificial Sequence: Synthetic oligonucleotide
caacauaugguuucugaca

SEQ ID NO: 1922465 - RNA, 19 nt, Artificial Sequence
  Description of Artificial Sequence: Synthetic oligonucleotide
gauaaucaggaaugucuca

SEQ ID NO: 1922466 - RNA, 19 nt, Artificial Sequence
  Description of Artificial Sequence: Synthetic oligonucleotide
augucggagacauuuuacu

SEQ ID NO: 1922467 - RNA, 19 nt, Artificial Sequence
  Description of Artificial Sequence: Synthetic oligonucleotide
uauggcaaauggugaacca

SEQ ID NO: 1922468 - RNA, 19 nt, Artificial Sequence
  Description of Artificial Sequence: Synthetic oligonucleotide
agagaugucggagacauuu

SEQ ID NO: 1922469 - RNA, 19 nt, Artificial Sequence
  Description of Artificial Sequence: Synthetic oligonucleotide
gcugcaauauaacauuggc

SEQ ID NO: 1922470 - RNA, 19 nt, Artificial Sequence
  Description of Artificial Sequence: Synthetic oligonucleotide
uuccgaagcuucuguaugc

SEQ ID NO: 1922471 - RNA, 19 nt, Artificial Sequence
  Description of Artificial Sequence: Synthetic oligonucleotide
uccuguuucuggcauugca

SEQ ID NO: 1922472 - RNA, 19 nt, Artificial Sequence
  Description of Artificial Sequence: Synthetic oligonucleotide
uucauuuaaauuggcuggu

SEQ ID NO: 1922473 - RNA, 19 nt, Artificial Sequence
  Description of Artificial Sequence: Synthetic oligonucleotide
gacauuuuacuaauuaccu

SEQ ID NO: 1922474 - RNA, 19 nt, Artificial Sequence
  Description of Artificial Sequence: Synthetic oligonucleotide
augcaugcuugaguuagcc

SEQ ID NO: 1922475 - RNA, 19 nt, Artificial Sequence
  Description of Artificial Sequence: Synthetic oligonucleotide
uuaugauaaucaggaaugu

SEQ ID NO: 1922476 - RNA, 19 nt, Artificial Sequence
  Description of Artificial Sequence: Synthetic oligonucleotide
uguucagagacagagcguu

SEQ ID NO: 1922477 - RNA, 19 nt, Artificial Sequence
  Description of Artificial Sequence: Synthetic oligonucleotide
auggugaaccauccugccg

SEQ ID NO: 1922478 - RNA, 19 nt, Artificial Sequence
  Description of Artificial Sequence: Synthetic oligonucleotide
aguguguggcgaucccugc

SEQ ID NO: 1922479 - RNA, 19 nt, Artificial Sequence
  Description of Artificial Sequence: Synthetic oligonucleotide
cccacaucaggaaauagcc

SEQ ID NO: 1922480 - RNA, 19 nt, Artificial Sequence
  Description of Artificial Sequence: Synthetic oligonucleotide
aaaucucgugucaaauucu

SEQ ID NO: 1922481 - RNA, 19 nt, Artificial Sequence
  Description of Artificial Sequence: Synthetic oligonucleotide
uucuccgaaucuacaaagu

SEQ ID NO: 1922482 - RNA, 19 nt, Artificial Sequence
  Description of Artificial Sequence: Synthetic oligonucleotide
acuucuuuagcuguggaua

SEQ ID NO: 1922483 - RNA, 19 nt, Artificial Sequence
  Description of Artificial Sequence: Synthetic oligonucleotide
cuauggcaaauggugaacc

SEQ ID NO: 1922484 - RNA, 19 nt, Artificial Sequence
  Description of Artificial Sequence: Synthetic oligonucleotide
ugaaagucaugaccuucca

SEQ ID NO: 1922485 - RNA, 19 nt, Artificial Sequence
  Description of Artificial Sequence: Synthetic oligonucleotide
uuagcuucugagauugcuu

SEQ ID NO: 1922486 - RNA, 19 nt, Artificial Sequence
  Description of Artificial Sequence: Synthetic oligonucleotide
uaugauaaucaggaauguc

SEQ ID NO: 1922487 - RNA, 19 nt, Artificial Sequence
  Description of Artificial Sequence: Synthetic oligonucleotide
ugccguaaguuuucaauaa

SEQ ID NO: 1922488 - RNA, 19 nt, Artificial Sequence
  Description of Artificial Sequence: Synthetic oligonucleotide
guauuccauggucaguacc

SEQ ID NO: 1922489 - RNA, 19 nt, Artificial Sequence
  Description of Artificial Sequence: Synthetic oligonucleotide
uccucuaacuugugcaacu

SEQ ID NO: 1922490 - RNA, 19 nt, Artificial Sequence
  Description of Artificial Sequence: Synthetic oligonucleotide
aguaccucuugcaaggucu

SEQ ID NO: 1922491 - RNA, 19 nt, Artificial Sequence
  Description of Artificial Sequence: Synthetic oligonucleotide
ugucaaauucugccuugug

SEQ ID NO: 1922492 - RNA, 19 nt, Artificial Sequence
  Description of Artificial Sequence: Synthetic oligonucleotide
acauuuuacuaauuaccuu

SEQ ID NO: 1922493 - RNA, 19 nt, Artificial Sequence
  Description of Artificial Sequence: Synthetic oligonucleotide
aauagcccuauuccuguuu

SEQ ID NO: 1922494 - RNA, 19 nt, Artificial Sequence
  Description of Artificial Sequence: Synthetic oligonucleotide
ucggagacauuuuacuaau

SEQ ID NO: 1922495 - RNA, 19 nt, Artificial Sequence
  Description of Artificial Sequence: Synthetic oligonucleotide
agauuugucuugauccauc

SEQ ID NO: 1922496 - RNA, 19 nt, Artificial Sequence
  Description of Artificial Sequence: Synthetic oligonucleotide
auuuuacuaauuaccuuca

SEQ ID NO: 1922497 - RNA, 19 nt, Artificial Sequence
  Description of Artificial Sequence: Synthetic oligonucleotide
ugucggagacauuuuacua

SEQ ID NO: 1922498 - RNA, 19 nt, Artificial Sequence
  Description of Artificial Sequence: Synthetic oligonucleotide
uuugagugaguugaaccuc

SEQ ID NO: 1922499 - RNA, 19 nt, Artificial Sequence
  Description of Artificial Sequence: Synthetic oligonucleotide
cuugaguuagccgguauuc

SEQ ID NO: 1922500 - RNA, 19 nt, Artificial Sequence
  Description of Artificial Sequence: Synthetic oligonucleotide
guaugcauggacauucuca

SEQ ID NO: 1922501 - RNA, 19 nt, Artificial Sequence
  Description of Artificial Sequence: Synthetic oligonucleotide
guugaaccucgacaggagc

SEQ ID NO: 1922502 - RNA, 19 nt, Artificial Sequence
  Description of Artificial Sequence: Synthetic oligonucleotide
aaauaacuauucaaaucuu

SEQ ID NO: 1922503 - RNA, 19 nt, Artificial Sequence
  Description of Artificial Sequence: Synthetic oligonucleotide
gaugucggagacauuuuac

SEQ ID NO: 1922504 - RNA, 19 nt, Artificial Sequence
  Description of Artificial Sequence: Synthetic oligonucleotide
cucagaugcugcaauauaa

SEQ ID NO: 1922505 - RNA, 19 nt, Artificial Sequence
  Description of Artificial Sequence: Synthetic oligonucleotide
aguuguucuauggcaaaug

SEQ ID NO: 1922506 - RNA, 19 nt, Artificial Sequence
  Description of Artificial Sequence: Synthetic oligonucleotide
cagugcaaggaaguaaccc

SEQ ID NO: 1922507 - RNA, 19 nt, Artificial Sequence
  Description of Artificial Sequence: Synthetic oligonucleotide
cuaacuugugcaacuucuc

SEQ ID NO: 1922508 - RNA, 19 nt, Artificial Sequence
  Description of Artificial Sequence: Synthetic oligonucleotide
agcguugaggaacuugggu

SEQ ID NO: 1922509 - RNA, 19 nt, Artificial Sequence
  Description of Artificial Sequence: Synthetic oligonucleotide
gacuucaaggccaacaacu

SEQ ID NO: 1922510 - RNA, 19 nt, Artificial Sequence
  Description of Artificial Sequence: Synthetic oligonucleotide
gaaauagcccuauuccugu

SEQ ID NO: 1922511 - RNA, 19 nt, Artificial Sequence
  Description of Artificial Sequence: Synthetic oligonucleotide
uaugacucccgcacagccu

SEQ ID NO: 1922512 - RNA, 19 nt, Artificial Sequence
  Description of Artificial Sequence: Synthetic oligonucleotide
ucuuuagcuguggauagau

SEQ ID NO: 1922513 - RNA, 19 nt, Artificial Sequence
  Description of Artificial Sequence: Synthetic oligonucleotide
caugaccuuccaugcaugc

SEQ ID NO: 1922514 - RNA, 19 nt, Artificial Sequence
  Description of Artificial Sequence: Synthetic oligonucleotide
ucuauggcaaauggugaac

SEQ ID NO: 1922515 - RNA, 19 nt, Artificial Sequence
  Description of Artificial Sequence: Synthetic oligonucleotide
cauaugguuucugacagga

SEQ ID NO: 1922516 - RNA, 19 nt, Artificial Sequence
  Description of Artificial Sequence: Synthetic oligonucleotide
ucucagaugcugcaauaua

SEQ ID NO: 1922517 - RNA, 19 nt, Artificial Sequence
  Description of Artificial Sequence: Synthetic oligonucleotide
acuucuccgaaucuacaaa

SEQ ID NO: 1922518 - RNA, 19 nt, Artificial Sequence
  Description of Artificial Sequence: Synthetic oligonucleotide
ugaacccugucagugcaag

SEQ ID NO: 1922519 - RNA, 19 nt, Artificial Sequence
  Description of Artificial Sequence: Synthetic oligonucleotide
cuuugaugucaccuccagc

SEQ ID NO: 1922520 - RNA, 19 nt, Artificial Sequence
  Description of Artificial Sequence: Synthetic oligonucleotide
aaaguguguggcgaucccu

SEQ ID NO: 1922521 - RNA, 19 nt, Artificial Sequence
  Description of Artificial Sequence: Synthetic oligonucleotide
uuagccgguauuccauggu

SEQ ID NO: 1922522 - RNA, 19 nt, Artificial Sequence
  Description of Artificial Sequence: Synthetic oligonucleotide
uguaugcauggacauucuc

SEQ ID NO: 1922523 - RNA, 19 nt, Artificial Sequence
  Description of Artificial Sequence: Synthetic oligonucleotide
gaguugaaccucgacagga

SEQ ID NO: 1922524 - RNA, 19 nt, Artificial Sequence
  Description of Artificial Sequence: Synthetic oligonucleotide
aguuagccgguauuccaug

SEQ ID NO: 1922525 - RNA, 19 nt, Artificial Sequence
  Description of Artificial Sequence: Synthetic oligonucleotide
auggucaguaccucuugca

SEQ ID NO: 1922526 - RNA, 19 nt, Artificial Sequence
  Description of Artificial Sequence: Synthetic oligonucleotide
ggauagaucugccggauca

SEQ ID NO: 1922527 - RNA, 19 nt, Artificial Sequence
  Description of Artificial Sequence: Synthetic oligonucleotide
cacaucaggaaauagcccu

SEQ ID NO: 1922528 - RNA, 19 nt, Artificial Sequence
  Description of Artificial Sequence: Synthetic oligonucleotide
ugcuuugaugucaccucca

SEQ ID NO: 1922529 - RNA, 19 nt, Artificial Sequence
  Description of Artificial Sequence: Synthetic oligonucleotide
acuuccgaagcuucuguau

SEQ ID NO: 1922530 - RNA, 19 nt, Artificial Sequence
  Description of Artificial Sequence: Synthetic oligonucleotide
uccagcucccuuuaugaua

SEQ ID NO: 1922531 - RNA, 19 nt, Artificial Sequence
  Description of Artificial Sequence: Synthetic oligonucleotide
uaagggcaacauaugguuu

SEQ ID NO: 1922532 - RNA, 19 nt, Artificial Sequence
  Description of Artificial Sequence: Synthetic oligonucleotide
cuuucaguagccacucgga

SEQ ID NO: 1922533 - RNA, 19 nt, Artificial Sequence
  Description of Artificial Sequence: Synthetic oligonucleotide
ucugugcacaucucuuccu

SEQ ID NO: 1922534 - RNA, 19 nt, Artificial Sequence
  Description of Artificial Sequence: Synthetic oligonucleotide
aucucgugucaaauucugc

SEQ ID NO: 1922535 - RNA, 19 nt, Artificial Sequence
  Description of Artificial Sequence: Synthetic oligonucleotide
ucgugucaaauucugccuu

SEQ ID NO: 1922536 - RNA, 19 nt, Artificial Sequence
  Description of Artificial Sequence: Synthetic oligonucleotide
cagaugcugcaauauaaca

SEQ ID NO: 1922537 - RNA, 19 nt, Artificial Sequence
  Description of Artificial Sequence: Synthetic oligonucleotide
guagcuuucuaagacaccu

SEQ ID NO: 1922538 - RNA, 19 nt, Artificial Sequence
  Description of Artificial Sequence: Synthetic oligonucleotide
gcaacauaugguuucugac

SEQ ID NO: 1922539 - RNA, 19 nt, Artificial Sequence
  Description of Artificial Sequence: Synthetic oligonucleotide
gucaaauucugccuugugu

SEQ ID NO: 1922540 - RNA, 19 nt, Artificial Sequence
  Description of Artificial Sequence: Synthetic oligonucleotide
uuuuagcuucugagauugc

SEQ ID NO: 1922541 - RNA, 19 nt, Artificial Sequence
  Description of Artificial Sequence: Synthetic oligonucleotide
uccauggucaguaccucuu

SEQ ID NO: 1922542 - RNA, 19 nt, Artificial Sequence
  Description of Artificial Sequence: Synthetic oligonucleotide
ggagacauuuuacuaauua

SEQ ID NO: 1922543 - RNA, 19 nt, Artificial Sequence
  Description of Artificial Sequence: Synthetic oligonucleotide
agcucccuuuaugauaauc

SEQ ID NO: 1922544 - RNA, 19 nt, Artificial Sequence
  Description of Artificial Sequence: Synthetic oligonucleotide
uagccgguauuccaugguc

SEQ ID NO: 1922545 - RNA, 19 nt, Artificial Sequence
  Description of Artificial Sequence: Synthetic oligonucleotide
caggagccgccacacaucc

SEQ ID NO: 1922546 - RNA, 19 nt, Artificial Sequence
  Description of Artificial Sequence: Synthetic oligonucleotide
agaugucggagacauuuua

SEQ ID NO: 1922547 - RNA, 19 nt, Artificial Sequence
  Description of Artificial Sequence: Synthetic oligonucleotide
agucaugaccuuccaugca

SEQ ID NO: 1922548 - RNA, 19 nt, Artificial Sequence
  Description of Artificial Sequence: Synthetic oligonucleotide
aaccucgacaggagccgcc

SEQ ID NO: 1922549 - RNA, 19 nt, Artificial Sequence
  Description of Artificial Sequence: Synthetic oligonucleotide
cagagacagagcguugagg

SEQ ID NO: 1922550 - RNA, 19 nt, Artificial Sequence
  Description of Artificial Sequence: Synthetic oligonucleotide
auuccauggucaguaccuc

SEQ ID NO: 1922551 - RNA, 19 nt, Artificial Sequence
  Description of Artificial Sequence: Synthetic oligonucleotide
uucuuuugagugaguugaa

SEQ ID NO: 1922552 - RNA, 19 nt, Artificial Sequence
  Description of Artificial Sequence: Synthetic oligonucleotide
cauugugaucccaucaaua

SEQ ID NO: 1922553 - RNA, 19 nt, Artificial Sequence
  Description of Artificial Sequence: Synthetic oligonucleotide
uuccauggucaguaccucu

SEQ ID NO: 1922554 - RNA, 19 nt, Artificial Sequence
  Description of Artificial Sequence: Synthetic oligonucleotide
gcuguggauagaucugccg

SEQ ID NO: 1922555 - RNA, 19 nt, Artificial Sequence
  Description of Artificial Sequence: Synthetic oligonucleotide
aacugcucuaacgccuuca

SEQ ID NO: 1922556 - RNA, 19 nt, Artificial Sequence
  Description of Artificial Sequence: Synthetic oligonucleotide
ugagugaguugaaccucga

SEQ ID NO: 1922557 - RNA, 19 nt, Artificial Sequence
  Description of Artificial Sequence: Synthetic oligonucleotide
guucuauggcaaaugguga

SEQ ID NO: 1922558 - RNA, 19 nt, Artificial Sequence
  Description of Artificial Sequence: Synthetic oligonucleotide
uccgcccacaucaggaaau

SEQ ID NO: 1922559 - RNA, 19 nt, Artificial Sequence
  Description of Artificial Sequence: Synthetic oligonucleotide
caaaguguguggcgauccc

SEQ ID NO: 1922560 - RNA, 19 nt, Artificial Sequence
  Description of Artificial Sequence: Synthetic oligonucleotide
aguugaaccucgacaggag

SEQ ID NO: 1922561 - RNA, 19 nt, Artificial Sequence
  Description of Artificial Sequence: Synthetic oligonucleotide
aaauagcccuauuccuguu

SEQ ID NO: 1922562 - RNA, 19 nt, Artificial Sequence
  Description of Artificial Sequence: Synthetic oligonucleotide
ggagccgccacacauccug

SEQ ID NO: 1922563 - RNA, 19 nt, Artificial Sequence
  Description of Artificial Sequence: Synthetic oligonucleotide
caugcaugcuugaguuagc

SEQ ID NO: 1922564 - RNA, 19 nt, Artificial Sequence
  Description of Artificial Sequence: Synthetic oligonucleotide
gcaauauaacauuggcuuc

SEQ ID NO: 1922565 - RNA, 19 nt, Artificial Sequence
  Description of Artificial Sequence: Synthetic oligonucleotide
cuuuagcuguggauagauc

SEQ ID NO: 1922566 - RNA, 19 nt, Artificial Sequence
  Description of Artificial Sequence: Synthetic oligonucleotide
caaagagggaccuuucagu

SEQ ID NO: 1922567 - RNA, 19 nt, Artificial Sequence
  Description of Artificial Sequence: Synthetic oligonucleotide
caacaacucuuccucuaac

SEQ ID NO: 1922568 - RNA, 19 nt, Artificial Sequence
  Description of Artificial Sequence: Synthetic oligonucleotide
auagaucugccggaucaug

SEQ ID NO: 1922569 - RNA, 19 nt, Artificial Sequence
  Description of Artificial Sequence: Synthetic oligonucleotide
uaaccuccgcccacaucag

SEQ ID NO: 1922570 - RNA, 19 nt, Artificial Sequence
  Description of Artificial Sequence: Synthetic oligonucleotide
uugugcaacuucuccgaau

SEQ ID NO: 1922571 - RNA, 19 nt, Artificial Sequence
  Description of Artificial Sequence: Synthetic oligonucleotide
gagugaguugaaccucgac

SEQ ID NO: 1922572 - RNA, 19 nt, Artificial Sequence
  Description of Artificial Sequence: Synthetic oligonucleotide
uugcaaagagggaccuuuc

SEQ ID NO: 1922573 - RNA, 19 nt, Artificial Sequence
  Description of Artificial Sequence: Synthetic oligonucleotide
gcguugaggaacuuggguc

SEQ ID NO: 1922574 - RNA, 19 nt, Artificial Sequence
  Description of Artificial Sequence: Synthetic oligonucleotide
ggcaacauaugguuucuga

SEQ ID NO: 1922575 - RNA, 19 nt, Artificial Sequence
  Description of Artificial Sequence: Synthetic oligonucleotide
uaauuaccuucaguuguuc

SEQ ID NO: 1922576 - RNA, 19 nt, Artificial Sequence
  Description of Artificial Sequence: Synthetic oligonucleotide
ggaaguaacccagcuuucc

SEQ ID NO: 1922577 - RNA, 19 nt, Artificial Sequence
  Description of Artificial Sequence: Synthetic oligonucleotide
uccacguguuccucaaaua

SEQ ID NO: 1922578 - RNA, 19 nt, Artificial Sequence
  Description of Artificial Sequence: Synthetic oligonucleotide
cugcaauauaacauuggcu

SEQ ID NO: 1922579 - RNA, 19 nt, Artificial Sequence
  Description of Artificial Sequence: Synthetic oligonucleotide
cuccgaaucuacaaagugu

SEQ ID NO: 1922580 - RNA, 19 nt, Artificial Sequence
  Description of Artificial Sequence: Synthetic oligonucleotide
gugcacaucucuuccuuuc

SEQ ID NO: 1922581 - RNA, 19 nt, Artificial Sequence
  Description of Artificial Sequence: Synthetic oligonucleotide
uggauagaucugccggauc

SEQ ID NO: 1922582 - RNA, 19 nt, Artificial Sequence
  Description of Artificial Sequence: Synthetic oligonucleotide
aggaaguaacccagcuuuc

SEQ ID NO: 1922583 - RNA, 19 nt, Artificial Sequence
  Description of Artificial Sequence: Synthetic oligonucleotide
guuaugacucccgcacagc

SEQ ID NO: 1922584 - RNA, 19 nt, Artificial Sequence
  Description of Artificial Sequence: Synthetic oligonucleotide
cuuucaaucugaacccugu

SEQ ID NO: 1922585 - RNA, 19 nt, Artificial Sequence
  Description of Artificial Sequence: Synthetic oligonucleotide
uccuuucaaucugaacccu

SEQ ID NO: 1922586 - RNA, 19 nt, Artificial Sequence
  Description of Artificial Sequence: Synthetic oligonucleotide
gagcguugaggaacuuggg

SEQ ID NO: 1922587 - RNA, 19 nt, Artificial Sequence
  Description of Artificial Sequence: Synthetic oligonucleotide
ggcaaauggugaaccaucc

SEQ ID NO: 1922588 - RNA, 19 nt, Artificial Sequence
  Description of Artificial Sequence: Synthetic oligonucleotide
ggcauugcaaagagggacc

SEQ ID NO: 1922589 - RNA, 19 nt, Artificial Sequence
  Description of Artificial Sequence: Synthetic oligonucleotide
agccacucggaaucgucca

SEQ ID NO: 1922590 - RNA, 19 nt, Artificial Sequence
  Description of Artificial Sequence: Synthetic oligonucleotide
cccuauuccuguuucuggc

SEQ ID NO: 1922591 - RNA, 19 nt, Artificial Sequence
  Description of Artificial Sequence: Synthetic oligonucleotide
ucgacaggagccgccacac

SEQ ID NO: 1922592 - RNA, 19 nt, Artificial Sequence
  Description of Artificial Sequence: Synthetic oligonucleotide
uacaaaguguguggcgauc

SEQ ID NO: 1922593 - RNA, 19 nt, Artificial Sequence
  Description of Artificial Sequence: Synthetic oligonucleotide
agcacuuccgaagcuucug

SEQ ID NO: 1922594 - RNA, 19 nt, Artificial Sequence
  Description of Artificial Sequence: Synthetic oligonucleotide
ugugcacaucucuuccuuu

SEQ ID NO: 1922595 - RNA, 19 nt, Artificial Sequence
  Description of Artificial Sequence: Synthetic oligonucleotide
aaccauccugccguaaguu

SEQ ID NO: 1922596 - RNA, 19 nt, Artificial Sequence
  Description of Artificial Sequence: Synthetic oligonucleotide
cugccguaaguuuucaaua

SEQ ID NO: 1922597 - RNA, 19 nt, Artificial Sequence
  Description of Artificial Sequence: Synthetic oligonucleotide
ugcuugaguuagccgguau

SEQ ID NO: 1922598 - RNA, 19 nt, Artificial Sequence
  Description of Artificial Sequence: Synthetic oligonucleotide
uggacucugcaugguagcu

SEQ ID NO: 1922599 - RNA, 19 nt, Artificial Sequence
  Description of Artificial Sequence: Synthetic oligonucleotide
gcucccuuuaugauaauca

SEQ ID NO: 1922600 - RNA, 19 nt, Artificial Sequence
  Description of Artificial Sequence: Synthetic oligonucleotide
gggaccuuucaguagccac

SEQ ID NO: 1922601 - RNA, 19 nt, Artificial Sequence
  Description of Artificial Sequence: Synthetic oligonucleotide
gacucuggucuuugucaac

SEQ ID NO: 1922602 - RNA, 19 nt, Artificial Sequence
  Description of Artificial Sequence: Synthetic oligonucleotide
cagaaggccuuuccuccag

SEQ ID NO: 1922603 - RNA, 19 nt, Artificial Sequence
  Description of Artificial Sequence: Synthetic oligonucleotide
uguggcgaucccugcucug

SEQ ID NO: 1922604 - RNA, 19 nt, Artificial Sequence
  Description of Artificial Sequence: Synthetic oligonucleotide
gagacagagcguugaggaa

SEQ ID NO: 1922605 - RNA, 19 nt, Artificial Sequence
  Description of Artificial Sequence: Synthetic oligonucleotide
gauccaucuuggacucugc

SEQ ID NO: 1922606 - RNA, 19 nt, Artificial Sequence
  Description of Artificial Sequence: Synthetic oligonucleotide
uggcgaucccugcucugug

SEQ ID NO: 1922607 - RNA, 19 nt, Artificial Sequence
  Description of Artificial Sequence: Synthetic oligonucleotide
cuguuuauuuuguccacgu

SEQ ID NO: 1922608 - RNA, 19 nt, Artificial Sequence
  Description of Artificial Sequence: Synthetic oligonucleotide
auauaacauuggcuucuuu

SEQ ID NO: 1922609 - RNA, 19 nt, Artificial Sequence
  Description of Artificial Sequence: Synthetic oligonucleotide
ccacaucaggaaauagccc

SEQ ID NO: 1922610 - RNA, 19 nt, Artificial Sequence
  Description of Artificial Sequence: Synthetic oligonucleotide
ggaaucguccaugaacuga

SEQ ID NO: 1922611 - RNA, 19 nt, Artificial Sequence
  Description of Artificial Sequence: Synthetic oligonucleotide
ggcauuguucaguauauau

SEQ ID NO: 1922612 - RNA, 19 nt, Artificial Sequence
  Description of Artificial Sequence: Synthetic oligonucleotide
gucaugaccuuccaugcau

SEQ ID NO: 1922613 - RNA, 19 nt, Artificial Sequence
  Description of Artificial Sequence: Synthetic oligonucleotide
cgaaucuacaaagugugug

SEQ ID NO: 1922614 - RNA, 19 nt, Artificial Sequence
  Description of Artificial Sequence: Synthetic oligonucleotide
gccgguauuccauggucag

SEQ ID NO: 1922615 - RNA, 19 nt, Artificial Sequence
  Description of Artificial Sequence: Synthetic oligonucleotide
gcuucccagagauuuaaaa

SEQ ID NO: 1922616 - RNA, 19 nt, Artificial Sequence
  Description of Artificial Sequence: Synthetic oligonucleotide
gaaagucaugaccuuccau

SEQ ID NO: 1922617 - RNA, 19 nt, Artificial Sequence
  Description of Artificial Sequence: Synthetic oligonucleotide
augaccuuccaugcaugcu

SEQ ID NO: 1922618 - RNA, 19 nt, Artificial Sequence
  Description of Artificial Sequence: Synthetic oligonucleotide
cagagcguugaggaacuug

SEQ ID NO: 1922619 - RNA, 19 nt, Artificial Sequence
  Description of Artificial Sequence: Synthetic oligonucleotide
augacagauuugucuugau

SEQ ID NO: 1922620 - RNA, 19 nt, Artificial Sequence
  Description of Artificial Sequence: Synthetic oligonucleotide
gaaccauccugccguaagu

SEQ ID NO: 1922621 - RNA, 19 nt, Artificial Sequence
  Description of Artificial Sequence: Synthetic oligonucleotide
guguuaugacucccgcaca

SEQ ID NO: 1922622 - RNA, 19 nt, Artificial Sequence
  Description of Artificial Sequence: Synthetic oligonucleotide
gacucugcaugguagcuuu

SEQ ID NO: 1922623 - RNA, 19 nt, Artificial Sequence
  Description of Artificial Sequence: Synthetic oligonucleotide
cucgugucaaauucugccu

SEQ ID NO: 1922624 - RNA, 19 nt, Artificial Sequence
  Description of Artificial Sequence: Synthetic oligonucleotide
gaaccucgacaggagccgc

SEQ ID NO: 1922625 - RNA, 19 nt, Artificial Sequence
  Description of Artificial Sequence: Synthetic oligonucleotide
ccuuucaaucugaacccug

SEQ ID NO: 1922626 - RNA, 19 nt, Artificial Sequence
  Description of Artificial Sequence: Synthetic oligonucleotide
gguauuccauggucaguac

SEQ ID NO: 1922627 - RNA, 19 nt, Artificial Sequence
  Description of Artificial Sequence: Synthetic oligonucleotide
acauucucagaugcugcaa

SEQ ID NO: 1922628 - RNA, 19 nt, Artificial Sequence
  Description of Artificial Sequence: Synthetic oligonucleotide
cuaauuaccuucaguuguu

SEQ ID NO: 1922629 - RNA, 19 nt, Artificial Sequence
  Description of Artificial Sequence: Synthetic oligonucleotide
agggugauuuucagagaug

SEQ ID NO: 1922630 - RNA, 19 nt, Artificial Sequence
  Description of Artificial Sequence: Synthetic oligonucleotide
caguaccucuugcaagguc

SEQ ID NO: 1922631 - RNA, 19 nt, Artificial Sequence
  Description of Artificial Sequence: Synthetic oligonucleotide
cagggugauuuucagagau

SEQ ID NO: 1922632 - RNA, 19 nt, Artificial Sequence
  Description of Artificial Sequence: Synthetic oligonucleotide
cacucggaaucguccauga

SEQ ID NO: 1922633 - RNA, 19 nt, Artificial Sequence
  Description of Artificial Sequence: Synthetic oligonucleotide
gcaugguagcuuucuaaga

SEQ ID NO: 1922634 - RNA, 19 nt, Artificial Sequence
  Description of Artificial Sequence: Synthetic oligonucleotide
agccgguauuccaugguca

SEQ ID NO: 1922635 - RNA, 19 nt, Artificial Sequence
  Description of Artificial Sequence: Synthetic oligonucleotide
auguucagagacagagcgu

SEQ ID NO: 1922636 - RNA, 19 nt, Artificial Sequence
  Description of Artificial Sequence: Synthetic oligonucleotide
gagggaccuuucaguagcc

SEQ ID NO: 1922637 - RNA, 19 nt, Artificial Sequence
  Description of Artificial Sequence: Synthetic oligonucleotide
auggacauucucagaugcu

SEQ ID NO: 1922638 - RNA, 19 nt, Artificial Sequence
  Description of Artificial Sequence: Synthetic oligonucleotide
gucuuugaggagccuucca

SEQ ID NO: 1922639 - RNA, 19 nt, Artificial Sequence
  Description of Artificial Sequence: Synthetic oligonucleotide
uuccacaguauuggcugaa

SEQ ID NO: 1922640 - RNA, 19 nt, Artificial Sequence
  Description of Artificial Sequence: Synthetic oligonucleotide
guagccacucggaaucguc

SEQ ID NO: 1922641 - RNA, 19 nt, Artificial Sequence
  Description of Artificial Sequence: Synthetic oligonucleotide
ucccgcacagccucuccuc

SEQ ID NO: 1922642 - RNA, 19 nt, Artificial Sequence
  Description of Artificial Sequence: Synthetic oligonucleotide
gguagcuuucuaagacacc

SEQ ID NO: 1922643 - RNA, 19 nt, Artificial Sequence
  Description of Artificial Sequence: Synthetic oligonucleotide
ccagcucccuuuaugauaa

SEQ ID NO: 1922644 - RNA, 19 nt, Artificial Sequence
  Description of Artificial Sequence: Synthetic oligonucleotide
gaauuucaaaucacugcuu

SEQ ID NO: 1922645 - RNA, 19 nt, Artificial Sequence
  Description of Artificial Sequence: Synthetic oligonucleotide
acgccuucaugaaagucau

SEQ ID NO: 1922646 - RNA, 19 nt, Artificial Sequence
  Description of Artificial Sequence: Synthetic oligonucleotide
uccugccguaaguuuucaa

SEQ ID NO: 1922647 - RNA, 19 nt, Artificial Sequence
  Description of Artificial Sequence: Synthetic oligonucleotide
aaucguccaugaacugaaa

SEQ ID NO: 1922648 - RNA, 19 nt, Artificial Sequence
  Description of Artificial Sequence: Synthetic oligonucleotide
cucgacaggagccgccaca

SEQ ID NO: 1922649 - RNA, 19 nt, Artificial Sequence
  Description of Artificial Sequence: Synthetic oligonucleotide
aguagccacucggaaucgu

SEQ ID NO: 1922650 - RNA, 19 nt, Artificial Sequence
  Description of Artificial Sequence: Synthetic oligonucleotide
gcaauaucuucugcugcug

SEQ ID NO: 1922651 - RNA, 19 nt, Artificial Sequence
  Description of Artificial Sequence: Synthetic oligonucleotide
caugcuugaguuagccggu

SEQ ID NO: 1922652 - RNA, 19 nt, Artificial Sequence
  Description of Artificial Sequence: Synthetic oligonucleotide
gacagagcguugaggaacu

SEQ ID NO: 1922653 - RNA, 19 nt, Artificial Sequence
  Description of Artificial Sequence: Synthetic oligonucleotide
gccucagggugauuuucag

SEQ ID NO: 1922654 - RNA, 19 nt, Artificial Sequence
  Description of Artificial Sequence: Synthetic oligonucleotide
acucggaaucguccaugaa

SEQ ID NO: 1922655 - RNA, 19 nt, Artificial Sequence
  Description of Artificial Sequence: Synthetic oligonucleotide
cucuaacgccuucaugaaa

SEQ ID NO: 1922656 - RNA, 19 nt, Artificial Sequence
  Description of Artificial Sequence: Synthetic oligonucleotide
cuauuccuguuucuggcau

SEQ ID NO: 1922657 - RNA, 19 nt, Artificial Sequence
  Description of Artificial Sequence: Synthetic oligonucleotide
ggcgaucccugcucugugc

SEQ ID NO: 1922658 - RNA, 19 nt, Artificial Sequence
  Description of Artificial Sequence: Synthetic oligonucleotide
cccagcuuuccuugaaguc

SEQ ID NO: 1922659 - RNA, 19 nt, Artificial Sequence
  Description of Artificial Sequence: Synthetic oligonucleotide
gaguuagccgguauuccau

SEQ ID NO: 1922660 - RNA, 19 nt, Artificial Sequence
  Description of Artificial Sequence: Synthetic oligonucleotide
accucgacaggagccgcca

SEQ ID NO: 1922661 - RNA, 19 nt, Artificial Sequence
  Description of Artificial Sequence: Synthetic oligonucleotide
cacugcuucccagagauuu

SEQ ID NO: 1922662 - RNA, 19 nt, Artificial Sequence
  Description of Artificial Sequence: Synthetic oligonucleotide
agggaccuuucaguagcca

SEQ ID NO: 1922663 - RNA, 19 nt, Artificial Sequence
  Description of Artificial Sequence: Synthetic oligonucleotide
gagccgccacacauccugc

SEQ ID NO: 1922664 - RNA, 19 nt, Artificial Sequence
  Description of Artificial Sequence: Synthetic oligonucleotide
cucuggucuuugucaacaa

SEQ ID NO: 1922665 - RNA, 19 nt, Artificial Sequence
  Description of Artificial Sequence: Synthetic oligonucleotide
gcuuucuaagacaccugca

SEQ ID NO: 1922666 - RNA, 19 nt, Artificial Sequence
  Description of Artificial Sequence: Synthetic oligonucleotide
cuaacgccuucaugaaagu

SEQ ID NO: 1922667 - RNA, 19 nt, Artificial Sequence
  Description of Artificial Sequence: Synthetic oligonucleotide
caaggaaguaacccagcuu

SEQ ID NO: 1922668 - RNA, 19 nt, Artificial Sequence
  Description of Artificial Sequence: Synthetic oligonucleotide
ccauggucaguaccucuug

SEQ ID NO: 1922669 - RNA, 19 nt, Artificial Sequence
  Description of Artificial Sequence: Synthetic oligonucleotide
cuacaaaguguguggcgau

SEQ ID NO: 1922670 - RNA, 19 nt, Artificial Sequence
  Description of Artificial Sequence: Synthetic oligonucleotide
cuggggacuucaaggccaa

SEQ ID NO: 1922671 - RNA, 19 nt, Artificial Sequence
  Description of Artificial Sequence: Synthetic oligonucleotide
gcgaucccugcucugugca

SEQ ID NO: 1922672 - RNA, 19 nt, Artificial Sequence
  Description of Artificial Sequence: Synthetic oligonucleotide
gccggaucauguucagaga

SEQ ID NO: 1922673 - RNA, 19 nt, Artificial Sequence
  Description of Artificial Sequence: Synthetic oligonucleotide
ccugccguaaguuuucaau

SEQ ID NO: 1922674 - RNA, 19 nt, Artificial Sequence
  Description of Artificial Sequence: Synthetic oligonucleotide
gcaaauggugaaccauccu

SEQ ID NO: 1922675 - RNA, 19 nt, Artificial Sequence
  Description of Artificial Sequence: Synthetic oligonucleotide
uaccucuugcaaggucuuu

SEQ ID NO: 1922676 - RNA, 19 nt, Artificial Sequence
  Description of Artificial Sequence: Synthetic oligonucleotide
cuccgcccacaucaggaaa

SEQ ID NO: 1922677 - RNA, 19 nt, Artificial Sequence
  Description of Artificial Sequence: Synthetic oligonucleotide
ccguaaguuuucaauaauu

SEQ ID NO: 1922678 - RNA, 19 nt, Artificial Sequence
  Description of Artificial Sequence: Synthetic oligonucleotide
ccacguguuccucaaauau

SEQ ID NO: 1922679 - RNA, 19 nt, Artificial Sequence
  Description of Artificial Sequence: Synthetic oligonucleotide
augcuugaguuagccggua

SEQ ID NO: 1922680 - RNA, 19 nt, Artificial Sequence
  Description of Artificial Sequence: Synthetic oligonucleotide
ccacucggaaucguccaug

SEQ ID NO: 1922681 - RNA, 19 nt, Artificial Sequence
  Description of Artificial Sequence: Synthetic oligonucleotide
ccaugaacugaaagaccaa

SEQ ID NO: 1922682 - RNA, 19 nt, Artificial Sequence
  Description of Artificial Sequence: Synthetic oligonucleotide
guggcgaucccugcucugu

SEQ ID NO: 1922683 - RNA, 19 nt, Artificial Sequence
  Description of Artificial Sequence: Synthetic oligonucleotide
gcuugaguuagccgguauu

SEQ ID NO: 1922684 - RNA, 19 nt, Artificial Sequence
  Description of Artificial Sequence: Synthetic oligonucleotide
caucaggaaauagcccuau

SEQ ID NO: 1922685 - RNA, 19 nt, Artificial Sequence
  Description of Artificial Sequence: Synthetic oligonucleotide
gcacuuccgaagcuucugu

SEQ ID NO: 1922686 - RNA, 19 nt, Artificial Sequence
  Description of Artificial Sequence: Synthetic oligonucleotide
caguuguucuauggcaaau

SEQ ID NO: 1922687 - RNA, 19 nt, Artificial Sequence
  Description of Artificial Sequence: Synthetic oligonucleotide
ggugaaccauccugccgua

SEQ ID NO: 1922688 - RNA, 19 nt, Artificial Sequence
  Description of Artificial Sequence: Synthetic oligonucleotide
cggaaucguccaugaacug

SEQ ID NO: 1922689 - RNA, 19 nt, Artificial Sequence
  Description of Artificial Sequence: Synthetic oligonucleotide
gugaaccauccugccguaa

SEQ ID NO: 1922690 - RNA, 19 nt, Artificial Sequence
  Description of Artificial Sequence: Synthetic oligonucleotide
cugccggaucauguucaga

SEQ ID NO: 1922691 - RNA, 19 nt, Artificial Sequence
  Description of Artificial Sequence: Synthetic oligonucleotide
cgguauuccauggucagua

SEQ ID NO: 1922692 - RNA, 19 nt, Artificial Sequence
  Description of Artificial Sequence: Synthetic oligonucleotide
caauggcauuguucaguau

SEQ ID NO: 1922693 - RNA, 19 nt, Artificial Sequence
  Description of Artificial Sequence: Synthetic oligonucleotide
cucccgcacagccucuccu

SEQ ID NO: 1922694 - RNA, 19 nt, Artificial Sequence
  Description of Artificial Sequence: Synthetic oligonucleotide
acagagcguugaggaacuu

SEQ ID NO: 1922695 - RNA, 19 nt, Artificial Sequence
  Description of Artificial Sequence: Synthetic oligonucleotide
guaccucuugcaaggucuu

SEQ ID NO: 1922696 - RNA, 19 nt, Artificial Sequence
  Description of Artificial Sequence: Synthetic oligonucleotide
ccauugugaucccaucaau

SEQ ID NO: 1922697 - RNA, 19 nt, Artificial Sequence
  Description of Artificial Sequence: Synthetic oligonucleotide
ccgaaucuacaaagugugu

SEQ ID NO: 1922698 - RNA, 19 nt, Artificial Sequence
  Description of Artificial Sequence: Synthetic oligonucleotide
ccgcacagccucuccucuc

SEQ ID NO: 1922699 - RNA, 19 nt, Artificial Sequence
  Description of Artificial Sequence: Synthetic oligonucleotide
ccucgacaggagccgccac

SEQ ID NO: 1922700 - RNA, 19 nt, Artificial Sequence
  Description of Artificial Sequence: Synthetic oligonucleotide
ccuccgcccacaucaggaa

SEQ ID NO: 1922701 - RNA, 19 nt, Artificial Sequence
  Description of Artificial Sequence: Synthetic oligonucleotide
cauugcaaagagggaccuu

SEQ ID NO: 1922702 - RNA, 19 nt, Artificial Sequence
  Description of Artificial Sequence: Synthetic oligonucleotide
ccacccauugugaucccau

SEQ ID NO: 1922703 - RNA, 19 nt, Artificial Sequence
  Description of Artificial Sequence: Synthetic oligonucleotide
ggagcugccucagggugau

SEQ ID NO: 1922704 - RNA, 19 nt, Artificial Sequence
  Description of Artificial Sequence: Synthetic oligonucleotide
ccgccacacauccugcugu

SEQ ID NO: 1922705 - RNA, 19 nt, Artificial Sequence
  Description of Artificial Sequence: Synthetic oligonucleotide
ccccacccauugugauccc

SEQ ID NO: 1922706 - RNA, 19 nt, Artificial Sequence
  Description of Artificial Sequence: Synthetic oligonucleotide
ccgaagcuucuguaugcau

SEQ ID NO: 1922707 - RNA, 19 nt, Artificial Sequence
  Description of Artificial Sequence: Synthetic oligonucleotide
cccacccauugugauccca

SEQ ID NO: 1922708 - RNA, 19 nt, Artificial Sequence
  Description of Artificial Sequence: Synthetic oligonucleotide
cccgcacagccucuccucu

SEQ ID NO: 1922709 - RNA, 19 nt, Artificial Sequence
  Description of Artificial Sequence: Synthetic oligonucleotide
ccgguauuccauggucagu

SEQ ID NO: 1922710 - RNA, 19 nt, Artificial Sequence
  Description of Artificial Sequence: Synthetic oligonucleotide
cagcucccuuuaugauaau

SEQ ID NO: 1922711 - RNA, 19 nt, Artificial Sequence
  Description of Artificial Sequence: Synthetic oligonucleotide
ccgcccacaucaggaaaua

SEQ ID NO: 1922712 - RNA, 19 nt, Artificial Sequence
  Description of Artificial Sequence: Synthetic oligonucleotide
aauaaauagaccuuaaccu

SEQ ID NO: 1922713 - RNA, 19 nt, Artificial Sequence
  Description of Artificial Sequence: Synthetic oligonucleotide
aaacaaaccagcccuaacc

SEQ ID NO: 1922714 - RNA, 19 nt, Artificial Sequence
  Description of Artificial Sequence: Synthetic oligonucleotide
aauccuacaggauagggcg

SEQ ID NO: 1922715 - RNA, 19 nt, Artificial Sequence
  Description of Artificial Sequence: Synthetic oligonucleotide
auagguuagauucugaguc

SEQ ID NO: 1922716 - RNA, 19 nt, Artificial Sequence
  Description of Artificial Sequence: Synthetic oligonucleotide
agaguuaguaauuaaaucu

SEQ ID NO: 1922717 - RNA, 19 nt, Artificial Sequence
  Description of Artificial Sequence: Synthetic oligonucleotide
aacaaaccagcccuaaccc

SEQ ID NO: 1922718 - RNA, 19 nt, Artificial Sequence
  Description of Artificial Sequence: Synthetic oligonucleotide
uaguaauuaaaucucaugu

SEQ ID NO: 1922719 - RNA, 19 nt, Artificial Sequence
  Description of Artificial Sequence: Synthetic oligonucleotide
aaucugucagcacaugggc

SEQ ID NO: 1922720 - RNA, 19 nt, Artificial Sequence
  Description of Artificial Sequence: Synthetic oligonucleotide
aaucuggacaaagagaagg

SEQ ID NO: 1922721 - RNA, 19 nt, Artificial Sequence
  Description of Artificial Sequence: Synthetic oligonucleotide
aaauaggggugacugaugg

SEQ ID NO: 1922722 - RNA, 19 nt, Artificial Sequence
  Description of Artificial Sequence: Synthetic oligonucleotide
auaaauagaccuuaaccuc

SEQ ID NO: 1922723 - RNA, 19 nt, Artificial Sequence
  Description of Artificial Sequence: Synthetic oligonucleotide
aaauagguuagauucugag

SEQ ID NO: 1922724 - RNA, 19 nt, Artificial Sequence
  Description of Artificial Sequence: Synthetic oligonucleotide
agugauaugaucgggaaac

SEQ ID NO: 1922725 - RNA, 19 nt, Artificial Sequence
  Description of Artificial Sequence: Synthetic oligonucleotide
cuuaaccucaggaacaggg

SEQ ID NO: 1922726 - RNA, 19 nt, Artificial Sequence
  Description of Artificial Sequence: Synthetic oligonucleotide
gaaguagccauucauguug

SEQ ID NO: 1922727 - RNA, 19 nt, Artificial Sequence
  Description of Artificial Sequence: Synthetic oligonucleotide
cugaguaugagccaguccc

SEQ ID NO: 1922728 - RNA, 19 nt, Artificial Sequence
  Description of Artificial Sequence: Synthetic oligonucleotide
uggaaaucuggacaaagag

SEQ ID NO: 1922729 - RNA, 19 nt, Artificial Sequence
  Description of Artificial Sequence: Synthetic oligonucleotide
aaccguguugaacuugugc

SEQ ID NO: 1922730 - RNA, 19 nt, Artificial Sequence
  Description of Artificial Sequence: Synthetic oligonucleotide
aaauccuacaggauagggc

SEQ ID NO: 1922731 - RNA, 19 nt, Artificial Sequence
  Description of Artificial Sequence: Synthetic oligonucleotide
ucggaugaaggcuacauag

SEQ ID NO: 1922732 - RNA, 19 nt, Artificial Sequence
  Description of Artificial Sequence: Synthetic oligonucleotide
uuaguaauuaaaucucaug

SEQ ID NO: 1922733 - RNA, 19 nt, Artificial Sequence
  Description of Artificial Sequence: Synthetic oligonucleotide
uuuuaaucaaugaccaccu

SEQ ID NO: 1922734 - RNA, 19 nt, Artificial Sequence
  Description of Artificial Sequence: Synthetic oligonucleotide
aaaacaaaccagcccuaac

SEQ ID NO: 1922735 - RNA, 19 nt, Artificial Sequence
  Description of Artificial Sequence: Synthetic oligonucleotide
aauagguuagauucugagu

SEQ ID NO: 1922736 - RNA, 19 nt, Artificial Sequence
  Description of Artificial Sequence: Synthetic oligonucleotide
agaccuuaaccucaggaac

SEQ ID NO: 1922737 - RNA, 19 nt, Artificial Sequence
  Description of Artificial Sequence: Synthetic oligonucleotide
aauauggaggcacuuggca

SEQ ID NO: 1922738 - RNA, 19 nt, Artificial Sequence
  Description of Artificial Sequence: Synthetic oligonucleotide
uagauucugagucaggccu

SEQ ID NO: 1922739 - RNA, 19 nt, Artificial Sequence
  Description of Artificial Sequence: Synthetic oligonucleotide
aaaggccgcaguucgggcc

SEQ ID NO: 1922740 - RNA, 19 nt, Artificial Sequence
  Description of Artificial Sequence: Synthetic oligonucleotide
ucagaguuaguaauuaaau

SEQ ID NO: 1922741 - RNA, 19 nt, Artificial Sequence
  Description of Artificial Sequence: Synthetic oligonucleotide
aauuaaaucucauguuaaa

SEQ ID NO: 1922742 - RNA, 19 nt, Artificial Sequence
  Description of Artificial Sequence: Synthetic oligonucleotide
caaauauggaggcacuugg

SEQ ID NO: 1922743 - RNA, 19 nt, Artificial Sequence
  Description of Artificial Sequence: Synthetic oligonucleotide
uuaaccucaggaacagggg

SEQ ID NO: 1922744 - RNA, 19 nt, Artificial Sequence
  Description of Artificial Sequence: Synthetic oligonucleotide
ugaucgggaaacaucuggg

SEQ ID NO: 1922745 - RNA, 19 nt, Artificial Sequence
  Description of Artificial Sequence: Synthetic oligonucleotide
aaaauccuacaggauaggg

SEQ ID NO: 1922746 - RNA, 19 nt, Artificial Sequence
  Description of Artificial Sequence: Synthetic oligonucleotide
uccgaaauaaucuccacaa

SEQ ID NO: 1922747 - RNA, 19 nt, Artificial Sequence
  Description of Artificial Sequence: Synthetic oligonucleotide
acuacagcuucauugagca

SEQ ID NO: 1922748 - RNA, 19 nt, Artificial Sequence
  Description of Artificial Sequence: Synthetic oligonucleotide
gaauuuccacuucauaagc

SEQ ID NO: 1922749 - RNA, 19 nt, Artificial Sequence
  Description of Artificial Sequence: Synthetic oligonucleotide
uaaucaaugaccaccuuua

SEQ ID NO: 1922750 - RNA, 19 nt, Artificial Sequence
  Description of Artificial Sequence: Synthetic oligonucleotide
uaagcuucuuucuucagac

SEQ ID NO: 1922751 - RNA, 19 nt, Artificial Sequence
  Description of Artificial Sequence: Synthetic oligonucleotide
aacuacagcuucauugagc

SEQ ID NO: 1922752 - RNA, 19 nt, Artificial Sequence
  Description of Artificial Sequence: Synthetic oligonucleotide
augaucgggaaacaucugg

SEQ ID NO: 1922753 - RNA, 19 nt, Artificial Sequence
  Description of Artificial Sequence: Synthetic oligonucleotide
uucaggacggucaauaaau

SEQ ID NO: 1922754 - RNA, 19 nt, Artificial Sequence
  Description of Artificial Sequence: Synthetic oligonucleotide
ugugauccaaaacuacagc

SEQ ID NO: 1922755 - RNA, 19 nt, Artificial Sequence
  Description of Artificial Sequence: Synthetic oligonucleotide
aaauauggaggcacuuggc

SEQ ID NO: 1922756 - RNA, 19 nt, Artificial Sequence
  Description of Artificial Sequence: Synthetic oligonucleotide
ucaucaguugggcacagca

SEQ ID NO: 1922757 - RNA, 19 nt, Artificial Sequence
  Description of Artificial Sequence: Synthetic oligonucleotide
uucacaaggguccuugcug

SEQ ID NO: 1922758 - RNA, 19 nt, Artificial Sequence
  Description of Artificial Sequence: Synthetic oligonucleotide
acauuccugagcuggacac

SEQ ID NO: 1922759 - RNA, 19 nt, Artificial Sequence
  Description of Artificial Sequence: Synthetic oligonucleotide
uuaaucaaugaccaccuuu

SEQ ID NO: 1922760 - RNA, 19 nt, Artificial Sequence
  Description of Artificial Sequence: Synthetic oligonucleotide
ggaaguaauaaauagaccu

SEQ ID NO: 1922761 - RNA, 19 nt, Artificial Sequence
  Description of Artificial Sequence: Synthetic oligonucleotide
agcccuaaccccuaccagc

SEQ ID NO: 1922762 - RNA, 19 nt, Artificial Sequence
  Description of Artificial Sequence: Synthetic oligonucleotide
cagaggggaauaaaggccg

SEQ ID NO: 1922763 - RNA, 19 nt, Artificial Sequence
  Description of Artificial Sequence: Synthetic oligonucleotide
ucuuccgaaauaaucucca

SEQ ID NO: 1922764 - RNA, 19 nt, Artificial Sequence
  Description of Artificial Sequence: Synthetic oligonucleotide
acaaaccagcccuaacccc

SEQ ID NO: 1922765 - RNA, 19 nt, Artificial Sequence
  Description of Artificial Sequence: Synthetic oligonucleotide
agcacaugggcccaacugg

SEQ ID NO: 1922766 - RNA, 19 nt, Artificial Sequence
  Description of Artificial Sequence: Synthetic oligonucleotide
ucaauaaauagguuagauu

SEQ ID NO: 1922767 - RNA, 19 nt, Artificial Sequence
  Description of Artificial Sequence: Synthetic oligonucleotide
guaauuaaaucucauguua

SEQ ID NO: 1922768 - RNA, 19 nt, Artificial Sequence
  Description of Artificial Sequence: Synthetic oligonucleotide
aguaauuaaaucucauguu

SEQ ID NO: 1922769 - RNA, 19 nt, Artificial Sequence
  Description of Artificial Sequence: Synthetic oligonucleotide
aaggcuacauagguauggc

SEQ ID NO: 1922770 - RNA, 19 nt, Artificial Sequence
  Description of Artificial Sequence: Synthetic oligonucleotide
gaaggcuacauagguaugg

SEQ ID NO: 1922771 - RNA, 19 nt, Artificial Sequence
  Description of Artificial Sequence: Synthetic oligonucleotide
uucuuccgaaauaaucucc

SEQ ID NO: 1922772 - RNA, 19 nt, Artificial Sequence
  Description of Artificial Sequence: Synthetic oligonucleotide
auagaccuuaaccucagga

SEQ ID NO: 1922773 - RNA, 19 nt, Artificial Sequence
  Description of Artificial Sequence: Synthetic oligonucleotide
aggaaaauaggggugacug

SEQ ID NO: 1922774 - RNA, 19 nt, Artificial Sequence
  Description of Artificial Sequence: Synthetic oligonucleotide
cucugagugaaucugucag

SEQ ID NO: 1922775 - RNA, 19 nt, Artificial Sequence
  Description of Artificial Sequence: Synthetic oligonucleotide
agcaucuacaaaauccuac

SEQ ID NO: 1922776 - RNA, 19 nt, Artificial Sequence
  Description of Artificial Sequence: Synthetic oligonucleotide
uugaacuugugcuucuuga

SEQ ID NO: 1922777 - RNA, 19 nt, Artificial Sequence
  Description of Artificial Sequence: Synthetic oligonucleotide
uuccgaaauaaucuccaca

SEQ ID NO: 1922778 - RNA, 19 nt, Artificial Sequence
  Description of Artificial Sequence: Synthetic oligonucleotide
uuagauucugagucaggcc

SEQ ID NO: 1922779 - RNA, 19 nt, Artificial Sequence
  Description of Artificial Sequence: Synthetic oligonucleotide
uguuccggcauccgcaucc

SEQ ID NO: 1922780 - RNA, 19 nt, Artificial Sequence
  Description of Artificial Sequence: Synthetic oligonucleotide
accguguugaacuugugcu

SEQ ID NO: 1922781 - RNA, 19 nt, Artificial Sequence
  Description of Artificial Sequence: Synthetic oligonucleotide
guugccacgaacauccagg

SEQ ID NO: 1922782 - RNA, 19 nt, Artificial Sequence
  Description of Artificial Sequence: Synthetic oligonucleotide
aggacggucaauaaauagg

SEQ ID NO: 1922783 - RNA, 19 nt, Artificial Sequence
  Description of Artificial Sequence: Synthetic oligonucleotide
auaaauagguuagauucug

SEQ ID NO: 1922784 - RNA, 19 nt, Artificial Sequence
  Description of Artificial Sequence: Synthetic oligonucleotide
cugugauccaaaacuacag

SEQ ID NO: 1922785 - RNA, 19 nt, Artificial Sequence
  Description of Artificial Sequence: Synthetic oligonucleotide
guaauaaauagaccuuaac

SEQ ID NO: 1922786 - RNA, 19 nt, Artificial Sequence
  Description of Artificial Sequence: Synthetic oligonucleotide
acaugggcccaacugggcc

SEQ ID NO: 1922787 - RNA, 19 nt, Artificial Sequence
  Description of Artificial Sequence: Synthetic oligonucleotide
aggugguaaagucaucauc

SEQ ID NO: 1922788 - RNA, 19 nt, Artificial Sequence
  Description of Artificial Sequence: Synthetic oligonucleotide
aggaaguaauaaauagacc

SEQ ID NO: 1922789 - RNA, 19 nt, Artificial Sequence
  Description of Artificial Sequence: Synthetic oligonucleotide
aucggcugcccagagaucc

SEQ ID NO: 1922790 - RNA, 19 nt, Artificial Sequence
  Description of Artificial Sequence: Synthetic oligonucleotide
ucgggaaacaucugggaug

SEQ ID NO: 1922791 - RNA, 19 nt, Artificial Sequence
  Description of Artificial Sequence: Synthetic oligonucleotide
cagaguuaguaauuaaauc

SEQ ID NO: 1922792 - RNA, 19 nt, Artificial Sequence
  Description of Artificial Sequence: Synthetic oligonucleotide
ucauguuuguucagcggcc

SEQ ID NO: 1922793 - RNA, 19 nt, Artificial Sequence
  Description of Artificial Sequence: Synthetic oligonucleotide
gugguugccacgaacaucc

SEQ ID NO: 1922794 - RNA, 19 nt, Artificial Sequence
  Description of Artificial Sequence: Synthetic oligonucleotide
aaguaauaaauagaccuua

SEQ ID NO: 1922795 - RNA, 19 nt, Artificial Sequence
  Description of Artificial Sequence: Synthetic oligonucleotide
aaccccuaccagcaucuac

SEQ ID NO: 1922796 - RNA, 19 nt, Artificial Sequence
  Description of Artificial Sequence: Synthetic oligonucleotide
gaguuaguaauuaaaucuc

SEQ ID NO: 1922797 - RNA, 19 nt, Artificial Sequence
  Description of Artificial Sequence: Synthetic oligonucleotide
gucuacauuccugagcugg

SEQ ID NO: 1922798 - RNA, 19 nt, Artificial Sequence
  Description of Artificial Sequence: Synthetic oligonucleotide
acggucaauaaauagguua

SEQ ID NO: 1922799 - RNA, 19 nt, Artificial Sequence
  Description of Artificial Sequence: Synthetic oligonucleotide
gauaugaucgggaaacauc

SEQ ID NO: 1922800 - RNA, 19 nt, Artificial Sequence
  Description of Artificial Sequence: Synthetic oligonucleotide
aauagaccuuaaccucagg

SEQ ID NO: 1922801 - RNA, 19 nt, Artificial Sequence
  Description of Artificial Sequence: Synthetic oligonucleotide
uccaacaaggaaguaauaa

SEQ ID NO: 1922802 - RNA, 19 nt, Artificial Sequence
  Description of Artificial Sequence: Synthetic oligonucleotide
aaagugguucuucuuccga

SEQ ID NO: 1922803 - RNA, 19 nt, Artificial Sequence
  Description of Artificial Sequence: Synthetic oligonucleotide
uagaccuuaaccucaggaa

SEQ ID NO: 1922804 - RNA, 19 nt, Artificial Sequence
  Description of Artificial Sequence: Synthetic oligonucleotide
uaaauagguuagauucuga

SEQ ID NO: 1922805 - RNA, 19 nt, Artificial Sequence
  Description of Artificial Sequence: Synthetic oligonucleotide
aucaguugggcacagcagu

SEQ ID NO: 1922806 - RNA, 19 nt, Artificial Sequence
  Description of Artificial Sequence: Synthetic oligonucleotide
aagggucucugagugaauc

SEQ ID NO: 1922807 - RNA, 19 nt, Artificial Sequence
  Description of Artificial Sequence: Synthetic oligonucleotide
cuugcugugauccaaaacu

SEQ ID NO: 1922808 - RNA, 19 nt, Artificial Sequence
  Description of Artificial Sequence: Synthetic oligonucleotide
guaugagccagucccaccc

SEQ ID NO: 1922809 - RNA, 19 nt, Artificial Sequence
  Description of Artificial Sequence: Synthetic oligonucleotide
gagcuggacaccuggaacc

SEQ ID NO: 1922810 - RNA, 19 nt, Artificial Sequence
  Description of Artificial Sequence: Synthetic oligonucleotide
auccaaaagagguccuggg

SEQ ID NO: 1922811 - RNA, 19 nt, Artificial Sequence
  Description of Artificial Sequence: Synthetic oligonucleotide
acauccaggucccaaauau

SEQ ID NO: 1922812 - RNA, 19 nt, Artificial Sequence
  Description of Artificial Sequence: Synthetic oligonucleotide
ugauccaaaacuacagcuu

SEQ ID NO: 1922813 - RNA, 19 nt, Artificial Sequence
  Description of Artificial Sequence: Synthetic oligonucleotide
cuucauguuuguucagcgg

SEQ ID NO: 1922814 - RNA, 19 nt, Artificial Sequence
  Description of Artificial Sequence: Synthetic oligonucleotide
ucugggaugaugccacucu

SEQ ID NO: 1922815 - RNA, 19 nt, Artificial Sequence
  Description of Artificial Sequence: Synthetic oligonucleotide
aggcuacauagguauggcc

SEQ ID NO: 1922816 - RNA, 19 nt, Artificial Sequence
  Description of Artificial Sequence: Synthetic oligonucleotide
agaaaggagucuucacaag

SEQ ID NO: 1922817 - RNA, 19 nt, Artificial Sequence
  Description of Artificial Sequence: Synthetic oligonucleotide
cugaguaaggggaggcugg

SEQ ID NO: 1922818 - RNA, 19 nt, Artificial Sequence
  Description of Artificial Sequence: Synthetic oligonucleotide
aauaaaggccgcaguucgg

SEQ ID NO: 1922819 - RNA, 19 nt, Artificial Sequence
  Description of Artificial Sequence: Synthetic oligonucleotide
gaucaggggacccuucccc

SEQ ID NO: 1922820 - RNA, 19 nt, Artificial Sequence
  Description of Artificial Sequence: Synthetic oligonucleotide
guagccauucauguugagg

SEQ ID NO: 1922821 - RNA, 19 nt, Artificial Sequence
  Description of Artificial Sequence: Synthetic oligonucleotide
guggcguccaggaaaauag

SEQ ID NO: 1922822 - RNA, 19 nt, Artificial Sequence
  Description of Artificial Sequence: Synthetic oligonucleotide
uagguuagauucugaguca

SEQ ID NO: 1922823 - RNA, 19 nt, Artificial Sequence
  Description of Artificial Sequence: Synthetic oligonucleotide
uucuccaacaaggaaguaa

SEQ ID NO: 1922824 - RNA, 19 nt, Artificial Sequence
  Description of Artificial Sequence: Synthetic oligonucleotide
caggacggucaauaaauag

SEQ ID NO: 1922825 - RNA, 19 nt, Artificial Sequence
  Description of Artificial Sequence: Synthetic oligonucleotide
uucgggccuauucccaagg

SEQ ID NO: 1922826 - RNA, 19 nt, Artificial Sequence
  Description of Artificial Sequence: Synthetic oligonucleotide
aagugguucuucuuccgaa

SEQ ID NO: 1922827 - RNA, 19 nt, Artificial Sequence
  Description of Artificial Sequence: Synthetic oligonucleotide
ucuacauuccugagcugga

SEQ ID NO: 1922828 - RNA, 19 nt, Artificial Sequence
  Description of Artificial Sequence: Synthetic oligonucleotide
uuuauccagcuuuggaaau

SEQ ID NO: 1922829 - RNA, 19 nt, Artificial Sequence
  Description of Artificial Sequence: Synthetic oligonucleotide
aagugauaugaucgggaaa

SEQ ID NO: 1922830 - RNA, 19 nt, Artificial Sequence
  Description of Artificial Sequence: Synthetic oligonucleotide
caaagugauaugaucggga

SEQ ID NO: 1922831 - RNA, 19 nt, Artificial Sequence
  Description of Artificial Sequence: Synthetic oligonucleotide
ugcugugauccaaaacuac

SEQ ID NO: 1922832 - RNA, 19 nt, Artificial Sequence
  Description of Artificial Sequence: Synthetic oligonucleotide
cuuuauccagcuuuggaaa

SEQ ID NO: 1922833 - RNA, 19 nt, Artificial Sequence
  Description of Artificial Sequence: Synthetic oligonucleotide
auauggaggcacuuggcaa

SEQ ID NO: 1922834 - RNA, 19 nt, Artificial Sequence
  Description of Artificial Sequence: Synthetic oligonucleotide
aguuaguaauuaaaucuca

SEQ ID NO: 1922835 - RNA, 19 nt, Artificial Sequence
  Description of Artificial Sequence: Synthetic oligonucleotide
aguacccagcccugcaggg

SEQ ID NO: 1922836 - RNA, 19 nt, Artificial Sequence
  Description of Artificial Sequence: Synthetic oligonucleotide
ugaguaugagccaguccca

SEQ ID NO: 1922837 - RNA, 19 nt, Artificial Sequence
  Description of Artificial Sequence: Synthetic oligonucleotide
gacaccuggaaccguguug

SEQ ID NO: 1922838 - RNA, 19 nt, Artificial Sequence
  Description of Artificial Sequence: Synthetic oligonucleotide
aucuccacaagcccuggug

SEQ ID NO: 1922839 - RNA, 19 nt, Artificial Sequence
  Description of Artificial Sequence: Synthetic oligonucleotide
uccaggaaaauagggguga

SEQ ID NO: 1922840 - RNA, 19 nt, Artificial Sequence
  Description of Artificial Sequence: Synthetic oligonucleotide
aaaauaggggugacugaug

SEQ ID NO: 1922841 - RNA, 19 nt, Artificial Sequence
  Description of Artificial Sequence: Synthetic oligonucleotide
uccauucggaugaaggcua

SEQ ID NO: 1922842 - RNA, 19 nt, Artificial Sequence
  Description of Artificial Sequence: Synthetic oligonucleotide
ugguccagugucuaagggu

SEQ ID NO: 1922843 - RNA, 19 nt, Artificial Sequence
  Description of Artificial Sequence: Synthetic oligonucleotide
aucuuucuccauucggaug

SEQ ID NO: 1922844 - RNA, 19 nt, Artificial Sequence
  Description of Artificial Sequence: Synthetic oligonucleotide
ucagacugucuacauuccu

SEQ ID NO: 1922845 - RNA, 19 nt, Artificial Sequence
  Description of Artificial Sequence: Synthetic oligonucleotide
aggggugacugaugguggc

SEQ ID NO: 1922846 - RNA, 19 nt, Artificial Sequence
  Description of Artificial Sequence: Synthetic oligonucleotide
agggcgacgggcuagccug

SEQ ID NO: 1922847 - RNA, 19 nt, Artificial Sequence
  Description of Artificial Sequence: Synthetic oligonucleotide
uaugaucgggaaacaucug

SEQ ID NO: 1922848 - RNA, 19 nt, Artificial Sequence
  Description of Artificial Sequence: Synthetic oligonucleotide
uucugagucaggccuggga

SEQ ID NO: 1922849 - RNA, 19 nt, Artificial Sequence
  Description of Artificial Sequence: Synthetic oligonucleotide
ugucuggcagaaaggaguc

SEQ ID NO: 1922850 - RNA, 19 nt, Artificial Sequence
  Description of Artificial Sequence: Synthetic oligonucleotide
aucugucagcacaugggcc

SEQ ID NO: 1922851 - RNA, 19 nt, Artificial Sequence
  Description of Artificial Sequence: Synthetic oligonucleotide
gaguccaggugguaaaguc

SEQ ID NO: 1922852 - RNA, 19 nt, Artificial Sequence
  Description of Artificial Sequence: Synthetic oligonucleotide
agggguguuggaucagggg

SEQ ID NO: 1922853 - RNA, 19 nt, Artificial Sequence
  Description of Artificial Sequence: Synthetic oligonucleotide
gccaaagugauaugaucgg

SEQ ID NO: 1922854 - RNA, 19 nt, Artificial Sequence
  Description of Artificial Sequence: Synthetic oligonucleotide
caucaguugggcacagcag

SEQ ID NO: 1922855 - RNA, 19 nt, Artificial Sequence
  Description of Artificial Sequence: Synthetic oligonucleotide
ugaaggcuacauagguaug

SEQ ID NO: 1922856 - RNA, 19 nt, Artificial Sequence
  Description of Artificial Sequence: Synthetic oligonucleotide
uaaggggaggcugggaccc

SEQ ID NO: 1922857 - RNA, 19 nt, Artificial Sequence
  Description of Artificial Sequence: Synthetic oligonucleotide
gauucugagucaggccugg

SEQ ID NO: 1922858 - RNA, 19 nt, Artificial Sequence
  Description of Artificial Sequence: Synthetic oligonucleotide
uggcguccaggaaaauagg

SEQ ID NO: 1922859 - RNA, 19 nt, Artificial Sequence
  Description of Artificial Sequence: Synthetic oligonucleotide
cacuuggcaagcugagucc

SEQ ID NO: 1922860 - RNA, 19 nt, Artificial Sequence
  Description of Artificial Sequence: Synthetic oligonucleotide
uugcugugauccaaaacua

SEQ ID NO: 1922861 - RNA, 19 nt, Artificial Sequence
  Description of Artificial Sequence: Synthetic oligonucleotide
uccaggucccaaauaugga

SEQ ID NO: 1922862 - RNA, 19 nt, Artificial Sequence
  Description of Artificial Sequence: Synthetic oligonucleotide
ggcuacauagguauggccc

SEQ ID NO: 1922863 - RNA, 19 nt, Artificial Sequence
  Description of Artificial Sequence: Synthetic oligonucleotide
uauccagcuuuggaaaucu

SEQ ID NO: 1922864 - RNA, 19 nt, Artificial Sequence
  Description of Artificial Sequence: Synthetic oligonucleotide
aucgggaaacaucugggau

SEQ ID NO: 1922865 - RNA, 19 nt, Artificial Sequence
  Description of Artificial Sequence: Synthetic oligonucleotide
ccagaggggaauaaaggcc

SEQ ID NO: 1922866 - RNA, 19 nt, Artificial Sequence
  Description of Artificial Sequence: Synthetic oligonucleotide
acugaguaaggggaggcug

SEQ ID NO: 1922867 - RNA, 19 nt, Artificial Sequence
  Description of Artificial Sequence: Synthetic oligonucleotide
cagagauccaaaagagguc

SEQ ID NO: 1922868 - RNA, 19 nt, Artificial Sequence
  Description of Artificial Sequence: Synthetic oligonucleotide
gaacagggguguuggauca

SEQ ID NO: 1922869 - RNA, 19 nt, Artificial Sequence
  Description of Artificial Sequence: Synthetic oligonucleotide
ugaguaaggggaggcuggg

SEQ ID NO: 1922870 - RNA, 19 nt, Artificial Sequence
  Description of Artificial Sequence: Synthetic oligonucleotide
uccccucagaguuaguaau

SEQ ID NO: 1922871 - RNA, 19 nt, Artificial Sequence
  Description of Artificial Sequence: Synthetic oligonucleotide
ucacugaguaaggggaggc

SEQ ID NO: 1922872 - RNA, 19 nt, Artificial Sequence
  Description of Artificial Sequence: Synthetic oligonucleotide
ucuaagggucucugaguga

SEQ ID NO: 1922873 - RNA, 19 nt, Artificial Sequence
  Description of Artificial Sequence: Synthetic oligonucleotide
guaaggggaggcugggacc

SEQ ID NO: 1922874 - RNA, 19 nt, Artificial Sequence
  Description of Artificial Sequence: Synthetic oligonucleotide
agguuagauucugagucag

SEQ ID NO: 1922875 - RNA, 19 nt, Artificial Sequence
  Description of Artificial Sequence: Synthetic oligonucleotide
gaccuuaaccucaggaaca

SEQ ID NO: 1922876 - RNA, 19 nt, Artificial Sequence
  Description of Artificial Sequence: Synthetic oligonucleotide
caguuuccugaguaugagc

SEQ ID NO: 1922877 - RNA, 19 nt, Artificial Sequence
  Description of Artificial Sequence: Synthetic oligonucleotide
acaguacccagcccugcag

SEQ ID NO: 1922878 - RNA, 19 nt, Artificial Sequence
  Description of Artificial Sequence: Synthetic oligonucleotide
gaaaauaggggugacugau

SEQ ID NO: 1922879 - RNA, 19 nt, Artificial Sequence
  Description of Artificial Sequence: Synthetic oligonucleotide
ccaaaagagguccugggug

SEQ ID NO: 1922880 - RNA, 19 nt, Artificial Sequence
  Description of Artificial Sequence: Synthetic oligonucleotide
aguaauaaauagaccuuaa

SEQ ID NO: 1922881 - RNA, 19 nt, Artificial Sequence
  Description of Artificial Sequence: Synthetic oligonucleotide
ugcccuucuccaacaagga

SEQ ID NO: 1922882 - RNA, 19 nt, Artificial Sequence
  Description of Artificial Sequence: Synthetic oligonucleotide
cuacaggauagggcgacgg

SEQ ID NO: 1922883 - RNA, 19 nt, Artificial Sequence
  Description of Artificial Sequence: Synthetic oligonucleotide
cuuccgaaauaaucuccac

SEQ ID NO: 1922884 - RNA, 19 nt, Artificial Sequence
  Description of Artificial Sequence: Synthetic oligonucleotide
ucccaaauauggaggcacu

SEQ ID NO: 1922885 - RNA, 19 nt, Artificial Sequence
  Description of Artificial Sequence: Synthetic oligonucleotide
agugucuaagggucucuga

SEQ ID NO: 1922886 - RNA, 19 nt, Artificial Sequence
  Description of Artificial Sequence: Synthetic oligonucleotide
ucaggacggucaauaaaua

SEQ ID NO: 1922887 - RNA, 19 nt, Artificial Sequence
  Description of Artificial Sequence: Synthetic oligonucleotide
uaaaggccgcaguucgggc

SEQ ID NO: 1922888 - RNA, 19 nt, Artificial Sequence
  Description of Artificial Sequence: Synthetic oligonucleotide
accagcccuaaccccuacc

SEQ ID NO: 1922889 - RNA, 19 nt, Artificial Sequence
  Description of Artificial Sequence: Synthetic oligonucleotide
uucggaugaaggcuacaua

SEQ ID NO: 1922890 - RNA, 19 nt, Artificial Sequence
  Description of Artificial Sequence: Synthetic oligonucleotide
gcaucuacaaaauccuaca

SEQ ID NO: 1922891 - RNA, 19 nt, Artificial Sequence
  Description of Artificial Sequence: Synthetic oligonucleotide
uuauccagcuuuggaaauc

SEQ ID NO: 1922892 - RNA, 19 nt, Artificial Sequence
  Description of Artificial Sequence: Synthetic oligonucleotide
uugaggcccacgaugccaa

SEQ ID NO: 1922893 - RNA, 19 nt, Artificial Sequence
  Description of Artificial Sequence: Synthetic oligonucleotide
guacacaguacccagcccu

SEQ ID NO: 1922894 - RNA, 19 nt, Artificial Sequence
  Description of Artificial Sequence: Synthetic oligonucleotide
uuuaaucaaugaccaccuu

SEQ ID NO: 1922895 - RNA, 19 nt, Artificial Sequence
  Description of Artificial Sequence: Synthetic oligonucleotide
gucccaaauauggaggcac

SEQ ID NO: 1922896 - RNA, 19 nt, Artificial Sequence
  Description of Artificial Sequence: Synthetic oligonucleotide
ugagugaaucugucagcac

SEQ ID NO: 1922897 - RNA, 19 nt, Artificial Sequence
  Description of Artificial Sequence: Synthetic oligonucleotide
uuccccucagaguuaguaa

SEQ ID NO: 1922898 - RNA, 19 nt, Artificial Sequence
  Description of Artificial Sequence: Synthetic oligonucleotide
ggaaacaucugggaugaug

SEQ ID NO: 1922899 - RNA, 19 nt, Artificial Sequence
  Description of Artificial Sequence: Synthetic oligonucleotide
cauguuuguucagcggccc

SEQ ID NO: 1922900 - RNA, 19 nt, Artificial Sequence
  Description of Artificial Sequence: Synthetic oligonucleotide
accuggaaccguguugaac

SEQ ID NO: 1922901 - RNA, 19 nt, Artificial Sequence
  Description of Artificial Sequence: Synthetic oligonucleotide
cauccaggucccaaauaug

SEQ ID NO: 1922902 - RNA, 19 nt, Artificial Sequence
  Description of Artificial Sequence: Synthetic oligonucleotide
aaccagcccuaaccccuac

SEQ ID NO: 1922903 - RNA, 19 nt, Artificial Sequence
  Description of Artificial Sequence: Synthetic oligonucleotide
uugccacgaacauccaggu

SEQ ID NO: 1922904 - RNA, 19 nt, Artificial Sequence
  Description of Artificial Sequence: Synthetic oligonucleotide
cggucaauaaauagguuag

SEQ ID NO: 1922905 - RNA, 19 nt, Artificial Sequence
  Description of Artificial Sequence: Synthetic oligonucleotide
aaguagccauucauguuga

SEQ ID NO: 1922906 - RNA, 19 nt, Artificial Sequence
  Description of Artificial Sequence: Synthetic oligonucleotide
uaaucuccacaagcccugg

SEQ ID NO: 1922907 - RNA, 19 nt, Artificial Sequence
  Description of Artificial Sequence: Synthetic oligonucleotide
ggaaaucuggacaaagaga

SEQ ID NO: 1922908 - RNA, 19 nt, Artificial Sequence
  Description of Artificial Sequence: Synthetic oligonucleotide
aggggaauaaaggccgcag

SEQ ID NO: 1922909 - RNA, 19 nt, Artificial Sequence
  Description of Artificial Sequence: Synthetic oligonucleotide
cuggugguugccacgaaca

SEQ ID NO: 1922910 - RNA, 19 nt, Artificial Sequence
  Description of Artificial Sequence: Synthetic oligonucleotide
cuggacaccuggaaccgug

SEQ ID NO: 1922911 - RNA, 19 nt, Artificial Sequence
  Description of Artificial Sequence: Synthetic oligonucleotide
ucaguugggcacagcaguu

SEQ ID NO: 1922912 - RNA, 19 nt, Artificial Sequence
  Description of Artificial Sequence: Synthetic oligonucleotide
gacgggcuagccugccugg

SEQ ID NO: 1922913 - RNA, 19 nt, Artificial Sequence
  Description of Artificial Sequence: Synthetic oligonucleotide
gaaguaauaaauagaccuu

SEQ ID NO: 1922914 - RNA, 19 nt, Artificial Sequence
  Description of Artificial Sequence: Synthetic oligonucleotide
auucggaugaaggcuacau

SEQ ID NO: 1922915 - RNA, 19 nt, Artificial Sequence
  Description of Artificial Sequence: Synthetic oligonucleotide
agggucucugagugaaucu

SEQ ID NO: 1922916 - RNA, 19 nt, Artificial Sequence
  Description of Artificial Sequence: Synthetic oligonucleotide
guaaagucaucaucuuucu

SEQ ID NO: 1922917 - RNA, 19 nt, Artificial Sequence
  Description of Artificial Sequence: Synthetic oligonucleotide
gcuccuucguuccuuuggg

SEQ ID NO: 1922918 - RNA, 19 nt, Artificial Sequence
  Description of Artificial Sequence: Synthetic oligonucleotide
acacaguacccagcccugc

SEQ ID NO: 1922919 - RNA, 19 nt, Artificial Sequence
  Description of Artificial Sequence: Synthetic oligonucleotide
aguccaggugguaaaguca

SEQ ID NO: 1922920 - RNA, 19 nt, Artificial Sequence
  Description of Artificial Sequence: Synthetic oligonucleotide
gggguguuggaucagggga

SEQ ID NO: 1922921 - RNA, 19 nt, Artificial Sequence
  Description of Artificial Sequence: Synthetic oligonucleotide
gcacuuggcaagcugaguc

SEQ ID NO: 1922922 - RNA, 19 nt, Artificial Sequence
  Description of Artificial Sequence: Synthetic oligonucleotide
accccuaccagcaucuaca

SEQ ID NO: 1922923 - RNA, 19 nt, Artificial Sequence
  Description of Artificial Sequence: Synthetic oligonucleotide
gaugaaggcuacauaggua

SEQ ID NO: 1922924 - RNA, 19 nt, Artificial Sequence
  Description of Artificial Sequence: Synthetic oligonucleotide
agugaaucugucagcacau

SEQ ID NO: 1922925 - RNA, 19 nt, Artificial Sequence
  Description of Artificial Sequence: Synthetic oligonucleotide
aggcccacgaugccaaagu

SEQ ID NO: 1922926 - RNA, 19 nt, Artificial Sequence
  Description of Artificial Sequence: Synthetic oligonucleotide
guuuccugaguaugagcca

SEQ ID NO: 1922927 - RNA, 19 nt, Artificial Sequence
  Description of Artificial Sequence: Synthetic oligonucleotide
cauccgcauccacaugucc

SEQ ID NO: 1922928 - RNA, 19 nt, Artificial Sequence
  Description of Artificial Sequence: Synthetic oligonucleotide
uccuacaggauagggcgac

SEQ ID NO: 1922929 - RNA, 19 nt, Artificial Sequence
  Description of Artificial Sequence: Synthetic oligonucleotide
gccacucucggccuuggcg

SEQ ID NO: 1922930 - RNA, 19 nt, Artificial Sequence
  Description of Artificial Sequence: Synthetic oligonucleotide
agccugugaauuuccacuu

SEQ ID NO: 1922931 - RNA, 19 nt, Artificial Sequence
  Description of Artificial Sequence: Synthetic oligonucleotide
ucgggccuauucccaaggc

SEQ ID NO: 1922932 - RNA, 19 nt, Artificial Sequence
  Description of Artificial Sequence: Synthetic oligonucleotide
gcguccaggaaaauagggg

SEQ ID NO: 1922933 - RNA, 19 nt, Artificial Sequence
  Description of Artificial Sequence: Synthetic oligonucleotide
cuaagggucucugagugaa

SEQ ID NO: 1922934 - RNA, 19 nt, Artificial Sequence
  Description of Artificial Sequence: Synthetic oligonucleotide
gaggcacuuggcaagcuga

SEQ ID NO: 1922935 - RNA, 19 nt, Artificial Sequence
  Description of Artificial Sequence: Synthetic oligonucleotide
cuuggcaagcugaguccag

SEQ ID NO: 1922936 - RNA, 19 nt, Artificial Sequence
  Description of Artificial Sequence: Synthetic oligonucleotide
guccaggaaaauaggggug

SEQ ID NO: 1922937 - RNA, 19 nt, Artificial Sequence
  Description of Artificial Sequence: Synthetic oligonucleotide
ggcguccaggaaaauaggg

SEQ ID NO: 1922938 - RNA, 19 nt, Artificial Sequence
  Description of Artificial Sequence: Synthetic oligonucleotide
auugagcagccugugaauu

SEQ ID NO: 1922939 - RNA, 19 nt, Artificial Sequence
  Description of Artificial Sequence: Synthetic oligonucleotide
ggaauaaaggccgcaguuc

SEQ ID NO: 1922940 - RNA, 19 nt, Artificial Sequence
  Description of Artificial Sequence: Synthetic oligonucleotide
gaguaugagccagucccac

SEQ ID NO: 1922941 - RNA, 19 nt, Artificial Sequence
  Description of Artificial Sequence: Synthetic oligonucleotide
gauagggcgacgggcuagc

SEQ ID NO: 1922942 - RNA, 19 nt, Artificial Sequence
  Description of Artificial Sequence: Synthetic oligonucleotide
ccagagauccaaaagaggu

SEQ ID NO: 1922943 - RNA, 19 nt, Artificial Sequence
  Description of Artificial Sequence: Synthetic oligonucleotide
uucagcggccccuggggcu

SEQ ID NO: 1922944 - RNA, 19 nt, Artificial Sequence
  Description of Artificial Sequence: Synthetic oligonucleotide
acauagguauggcccucug

SEQ ID NO: 1922945 - RNA, 19 nt, Artificial Sequence
  Description of Artificial Sequence: Synthetic oligonucleotide
ccaacaaggaaguaauaaa

SEQ ID NO: 1922946 - RNA, 19 nt, Artificial Sequence
  Description of Artificial Sequence: Synthetic oligonucleotide
cacgaugccaaagugauau

SEQ ID NO: 1922947 - RNA, 19 nt, Artificial Sequence
  Description of Artificial Sequence: Synthetic oligonucleotide
gcaguucgggccuauuccc

SEQ ID NO: 1922948 - RNA, 19 nt, Artificial Sequence
  Description of Artificial Sequence: Synthetic oligonucleotide
uacauagguauggcccucu

SEQ ID NO: 1922949 - RNA, 19 nt, Artificial Sequence
  Description of Artificial Sequence: Synthetic oligonucleotide
auggcccucugugucuggc

SEQ ID NO: 1922950 - RNA, 19 nt, Artificial Sequence
  Description of Artificial Sequence: Synthetic oligonucleotide
uuccugaguaugagccagu

SEQ ID NO: 1922951 - RNA, 19 nt, Artificial Sequence
  Description of Artificial Sequence: Synthetic oligonucleotide
cagcaguuuccugaguaug

SEQ ID NO: 1922952 - RNA, 19 nt, Artificial Sequence
  Description of Artificial Sequence: Synthetic oligonucleotide
cuucaggacggucaauaaa

SEQ ID NO: 1922953 - RNA, 19 nt, Artificial Sequence
  Description of Artificial Sequence: Synthetic oligonucleotide
aguucgggccuauucccaa

SEQ ID NO: 1922954 - RNA, 19 nt, Artificial Sequence
  Description of Artificial Sequence: Synthetic oligonucleotide
aggaacagggguguuggau

SEQ ID NO: 1922955 - RNA, 19 nt, Artificial Sequence
  Description of Artificial Sequence: Synthetic oligonucleotide
cauuccugagcuggacacc

SEQ ID NO: 1922956 - RNA, 19 nt, Artificial Sequence
  Description of Artificial Sequence: Synthetic oligonucleotide
aacagggguguuggaucag

SEQ ID NO: 1922957 - RNA, 19 nt, Artificial Sequence
  Description of Artificial Sequence: Synthetic oligonucleotide
guucgggccuauucccaag

SEQ ID NO: 1922958 - RNA, 19 nt, Artificial Sequence
  Description of Artificial Sequence: Synthetic oligonucleotide
cuacagcuucauugagcag

SEQ ID NO: 1922959 - RNA, 19 nt, Artificial Sequence
  Description of Artificial Sequence: Synthetic oligonucleotide
gguugccacgaacauccag

SEQ ID NO: 1922960 - RNA, 19 nt, Artificial Sequence
  Description of Artificial Sequence: Synthetic oligonucleotide
cuauucccaaggccuucag

SEQ ID NO: 1922961 - RNA, 19 nt, Artificial Sequence
  Description of Artificial Sequence: Synthetic oligonucleotide
agccagucccacccucagg

SEQ ID NO: 1922962 - RNA, 19 nt, Artificial Sequence
  Description of Artificial Sequence: Synthetic oligonucleotide
agcccuggugguugccacg

SEQ ID NO: 1922963 - RNA, 19 nt, Artificial Sequence
  Description of Artificial Sequence: Synthetic oligonucleotide
uccuugcugugauccaaaa

SEQ ID NO: 1922964 - RNA, 19 nt, Artificial Sequence
  Description of Artificial Sequence: Synthetic oligonucleotide
ugggaccccgaccaccaaa

SEQ ID NO: 1922965 - RNA, 19 nt, Artificial Sequence
  Description of Artificial Sequence: Synthetic oligonucleotide
cagccugugaauuuccacu

SEQ ID NO: 1922966 - RNA, 19 nt, Artificial Sequence
  Description of Artificial Sequence: Synthetic oligonucleotide
cuacauuccugagcuggac

SEQ ID NO: 1922967 - RNA, 19 nt, Artificial Sequence
  Description of Artificial Sequence: Synthetic oligonucleotide
acgaugccaaagugauaug

SEQ ID NO: 1922968 - RNA, 19 nt, Artificial Sequence
  Description of Artificial Sequence: Synthetic oligonucleotide
gguuagauucugagucagg

SEQ ID NO: 1922969 - RNA, 19 nt, Artificial Sequence
  Description of Artificial Sequence: Synthetic oligonucleotide
cugaguccaggugguaaag

SEQ ID NO: 1922970 - RNA, 19 nt, Artificial Sequence
  Description of Artificial Sequence: Synthetic oligonucleotide
ggcaggaucggcugcccag

SEQ ID NO: 1922971 - RNA, 19 nt, Artificial Sequence
  Description of Artificial Sequence: Synthetic oligonucleotide
cuaaccccuaccagcaucu

SEQ ID NO: 1922972 - RNA, 19 nt, Artificial Sequence
  Description of Artificial Sequence: Synthetic oligonucleotide
gaugccaaagugauaugau

SEQ ID NO: 1922973 - RNA, 19 nt, Artificial Sequence
  Description of Artificial Sequence: Synthetic oligonucleotide
ggcuucauguuuguucagc

SEQ ID NO: 1922974 - RNA, 19 nt, Artificial Sequence
  Description of Artificial Sequence: Synthetic oligonucleotide
guugggcacagcaguuucc

SEQ ID NO: 1922975 - RNA, 19 nt, Artificial Sequence
  Description of Artificial Sequence: Synthetic oligonucleotide
ccaaauauggaggcacuug

SEQ ID NO: 1922976 - RNA, 19 nt, Artificial Sequence
  Description of Artificial Sequence: Synthetic oligonucleotide
aggcuucauguuuguucag

SEQ ID NO: 1922977 - RNA, 19 nt, Artificial Sequence
  Description of Artificial Sequence: Synthetic oligonucleotide
gguacacaguacccagccc

SEQ ID NO: 1922978 - RNA, 19 nt, Artificial Sequence
  Description of Artificial Sequence: Synthetic oligonucleotide
caccuuuauccagcuuugg

SEQ ID NO: 1922979 - RNA, 19 nt, Artificial Sequence
  Description of Artificial Sequence: Synthetic oligonucleotide
cagcccuaaccccuaccag

SEQ ID NO: 1922980 - RNA, 19 nt, Artificial Sequence
  Description of Artificial Sequence: Synthetic oligonucleotide
cacaagcccuggugguugc

SEQ ID NO: 1922981 - RNA, 19 nt, Artificial Sequence
  Description of Artificial Sequence: Synthetic oligonucleotide
gcacaugggcccaacuggg

SEQ ID NO: 1922982 - RNA, 19 nt, Artificial Sequence
  Description of Artificial Sequence: Synthetic oligonucleotide
ucaggggacccuuccccuc

SEQ ID NO: 1922983 - RNA, 19 nt, Artificial Sequence
  Description of Artificial Sequence: Synthetic oligonucleotide
cggaugaaggcuacauagg

SEQ ID NO: 1922984 - RNA, 19 nt, Artificial Sequence
  Description of Artificial Sequence: Synthetic oligonucleotide
ggaggcacuuggcaagcug

SEQ ID NO: 1922985 - RNA, 19 nt, Artificial Sequence
  Description of Artificial Sequence: Synthetic oligonucleotide
ccuggaaccguguugaacu

SEQ ID NO: 1922986 - RNA, 19 nt, Artificial Sequence
  Description of Artificial Sequence: Synthetic oligonucleotide
ggaucaggggacccuuccc

SEQ ID NO: 1922987 - RNA, 19 nt, Artificial Sequence
  Description of Artificial Sequence: Synthetic oligonucleotide
gggucucugagugaaucug

SEQ ID NO: 1922988 - RNA, 19 nt, Artificial Sequence
  Description of Artificial Sequence: Synthetic oligonucleotide
gucucugagugaaucuguc

SEQ ID NO: 1922989 - RNA, 19 nt, Artificial Sequence
  Description of Artificial Sequence: Synthetic oligonucleotide
ccgaaauaaucuccacaag

SEQ ID NO: 1922990 - RNA, 19 nt, Artificial Sequence
  Description of Artificial Sequence: Synthetic oligonucleotide
auagggcgacgggcuagcc

SEQ ID NO: 1922991 - RNA, 19 nt, Artificial Sequence
  Description of Artificial Sequence: Synthetic oligonucleotide
ggacggucaauaaauaggu

SEQ ID NO: 1922992 - RNA, 19 nt, Artificial Sequence
  Description of Artificial Sequence: Synthetic oligonucleotide
cacaaggguccuugcugug

SEQ ID NO: 1922993 - RNA, 19 nt, Artificial Sequence
  Description of Artificial Sequence: Synthetic oligonucleotide
guauggcccucugugucug

SEQ ID NO: 1922994 - RNA, 19 nt, Artificial Sequence
  Description of Artificial Sequence: Synthetic oligonucleotide
ccacgaacauccagguccc

SEQ ID NO: 1922995 - RNA, 19 nt, Artificial Sequence
  Description of Artificial Sequence: Synthetic oligonucleotide
auucugagucaggccuggg

SEQ ID NO: 1922996 - RNA, 19 nt, Artificial Sequence
  Description of Artificial Sequence: Synthetic oligonucleotide
acgaacauccaggucccaa

SEQ ID NO: 1922997 - RNA, 19 nt, Artificial Sequence
  Description of Artificial Sequence: Synthetic oligonucleotide
ggaucggcugcccagagau

SEQ ID NO: 1922998 - RNA, 19 nt, Artificial Sequence
  Description of Artificial Sequence: Synthetic oligonucleotide
gcagccugugaauuuccac

SEQ ID NO: 1922999 - RNA, 19 nt, Artificial Sequence
  Description of Artificial Sequence: Synthetic oligonucleotide
cagugucuaagggucucug

SEQ ID NO: 1923000 - RNA, 19 nt, Artificial Sequence
  Description of Artificial Sequence: Synthetic oligonucleotide
ccugugaauuuccacuuca

SEQ ID NO: 1923001 - RNA, 19 nt, Artificial Sequence
  Description of Artificial Sequence: Synthetic oligonucleotide
aggaucggcugcccagaga

SEQ ID NO: 1923002 - RNA, 19 nt, Artificial Sequence
  Description of Artificial Sequence: Synthetic oligonucleotide
cgcaguucgggccuauucc

SEQ ID NO: 1923003 - RNA, 19 nt, Artificial Sequence
  Description of Artificial Sequence: Synthetic oligonucleotide
ccaccuuuauccagcuuug

SEQ ID NO: 1923004 - RNA, 19 nt, Artificial Sequence
  Description of Artificial Sequence: Synthetic oligonucleotide
ggcauccgcauccacaugu

SEQ ID NO: 1923005 - RNA, 19 nt, Artificial Sequence
  Description of Artificial Sequence: Synthetic oligonucleotide
aggccugggaggauggggu

SEQ ID NO: 1923006 - RNA, 19 nt, Artificial Sequence
  Description of Artificial Sequence: Synthetic oligonucleotide
gaggggaauaaaggccgca

SEQ ID NO: 1923007 - RNA, 19 nt, Artificial Sequence
  Description of Artificial Sequence: Synthetic oligonucleotide
ggacaaagagaaggcugag

SEQ ID NO: 1923008 - RNA, 19 nt, Artificial Sequence
  Description of Artificial Sequence: Synthetic oligonucleotide
gaaccguguugaacuugug

SEQ ID NO: 1923009 - RNA, 19 nt, Artificial Sequence
  Description of Artificial Sequence: Synthetic oligonucleotide
cagucccacccucagggca

SEQ ID NO: 1923010 - RNA, 19 nt, Artificial Sequence
  Description of Artificial Sequence: Synthetic oligonucleotide
cuuccccucagaguuagua

SEQ ID NO: 1923011 - RNA, 19 nt, Artificial Sequence
  Description of Artificial Sequence: Synthetic oligonucleotide
ccuaaccccuaccagcauc

SEQ ID NO: 1923012 - RNA, 19 nt, Artificial Sequence
  Description of Artificial Sequence: Synthetic oligonucleotide
gggaggaugggguguaaaa

SEQ ID NO: 1923013 - RNA, 19 nt, Artificial Sequence
  Description of Artificial Sequence: Synthetic oligonucleotide
caguucgggccuauuccca

SEQ ID NO: 1923014 - RNA, 19 nt, Artificial Sequence
  Description of Artificial Sequence: Synthetic oligonucleotide
caggaucggcugcccagag

SEQ ID NO: 1923015 - RNA, 19 nt, Artificial Sequence
  Description of Artificial Sequence: Synthetic oligonucleotide
ccaggugguaaagucauca

SEQ ID NO: 1923016 - RNA, 19 nt, Artificial Sequence
  Description of Artificial Sequence: Synthetic oligonucleotide
ggauagggcgacgggcuag

SEQ ID NO: 1923017 - RNA, 19 nt, Artificial Sequence
  Description of Artificial Sequence: Synthetic oligonucleotide
guguuggaucaggggaccc

SEQ ID NO: 1923018 - RNA, 19 nt, Artificial Sequence
  Description of Artificial Sequence: Synthetic oligonucleotide
aaaccagcccuaaccccua

SEQ ID NO: 1923019 - RNA, 19 nt, Artificial Sequence
  Description of Artificial Sequence: Synthetic oligonucleotide
ugccacucucggccuuggc

SEQ ID NO: 1923020 - RNA, 19 nt, Artificial Sequence
  Description of Artificial Sequence: Synthetic oligonucleotide
ugacugaugguggcuucuu

SEQ ID NO: 1923021 - RNA, 19 nt, Artificial Sequence
  Description of Artificial Sequence: Synthetic oligonucleotide
ccaacugggccugucauca

SEQ ID NO: 1923022 - RNA, 19 nt, Artificial Sequence
  Description of Artificial Sequence: Synthetic oligonucleotide
gggaauaaaggccgcaguu

SEQ ID NO: 1923023 - RNA, 19 nt, Artificial Sequence
  Description of Artificial Sequence: Synthetic oligonucleotide
ggugacugaugguggcuuc

SEQ ID NO: 1923024 - RNA, 19 nt, Artificial Sequence
  Description of Artificial Sequence: Synthetic oligonucleotide
acgggcuagccugccuggg

SEQ ID NO: 1923025 - RNA, 19 nt, Artificial Sequence
  Description of Artificial Sequence: Synthetic oligonucleotide
uggcgcuguuccggcaucc

SEQ ID NO: 1923026 - RNA, 19 nt, Artificial Sequence
  Description of Artificial Sequence: Synthetic oligonucleotide
cauucauguugaggcccac

SEQ ID NO: 1923027 - RNA, 19 nt, Artificial Sequence
  Description of Artificial Sequence: Synthetic oligonucleotide
cauagguauggcccucugu

SEQ ID NO: 1923028 - RNA, 19 nt, Artificial Sequence
  Description of Artificial Sequence: Synthetic oligonucleotide
auccuacaggauagggcga

SEQ ID NO: 1923029 - RNA, 19 nt, Artificial Sequence
  Description of Artificial Sequence: Synthetic oligonucleotide
gcugcccagagauccaaaa

SEQ ID NO: 1923030 - RNA, 19 nt, Artificial Sequence
  Description of Artificial Sequence: Synthetic oligonucleotide
ggccucauggaaguagcca

SEQ ID NO: 1923031 - RNA, 19 nt, Artificial Sequence
  Description of Artificial Sequence: Synthetic oligonucleotide
agaggaggccugguccagu

SEQ ID NO: 1923032 - RNA, 19 nt, Artificial Sequence
  Description of Artificial Sequence: Synthetic oligonucleotide
gagauccaaaagagguccu

SEQ ID NO: 1923033 - RNA, 19 nt, Artificial Sequence
  Description of Artificial Sequence: Synthetic oligonucleotide
gggccuauucccaaggccu

SEQ ID NO: 1923034 - RNA, 19 nt, Artificial Sequence
  Description of Artificial Sequence: Synthetic oligonucleotide
cugugaauuuccacuucau

SEQ ID NO: 1923035 - RNA, 19 nt, Artificial Sequence
  Description of Artificial Sequence: Synthetic oligonucleotide
uggaggcacuuggcaagcu

SEQ ID NO: 1923036 - RNA, 19 nt, Artificial Sequence
  Description of Artificial Sequence: Synthetic oligonucleotide
ggaaccguguugaacuugu

SEQ ID NO: 1923037 - RNA, 19 nt, Artificial Sequence
  Description of Artificial Sequence: Synthetic oligonucleotide
ccauucggaugaaggcuac

SEQ ID NO: 1923038 - RNA, 19 nt, Artificial Sequence
  Description of Artificial Sequence: Synthetic oligonucleotide
auccagcuuuggaaaucug

SEQ ID NO: 1923039 - RNA, 19 nt, Artificial Sequence
  Description of Artificial Sequence: Synthetic oligonucleotide
caggggacccuuccccuca

SEQ ID NO: 1923040 - RNA, 19 nt, Artificial Sequence
  Description of Artificial Sequence: Synthetic oligonucleotide
gggguacacaguacccagc

SEQ ID NO: 1923041 - RNA, 19 nt, Artificial Sequence
  Description of Artificial Sequence: Synthetic oligonucleotide
ccauucauguugaggccca

SEQ ID NO: 1923042 - RNA, 19 nt, Artificial Sequence
  Description of Artificial Sequence: Synthetic oligonucleotide
ggggaauaaaggccgcagu

SEQ ID NO: 1923043 - RNA, 19 nt, Artificial Sequence
  Description of Artificial Sequence: Synthetic oligonucleotide
cgggccuauucccaaggcc

SEQ ID NO: 1923044 - RNA, 19 nt, Artificial Sequence
  Description of Artificial Sequence: Synthetic oligonucleotide
cuccacaagcccugguggu

SEQ ID NO: 1923045 - RNA, 19 nt, Artificial Sequence
  Description of Artificial Sequence: Synthetic oligonucleotide
gguggcguccaggaaaaua

SEQ ID NO: 1923046 - RNA, 19 nt, Artificial Sequence
  Description of Artificial Sequence: Synthetic oligonucleotide
ccacccucagggcaguguc

SEQ ID NO: 1923047 - RNA, 19 nt, Artificial Sequence
  Description of Artificial Sequence: Synthetic oligonucleotide
gcccuaaccccuaccagca

SEQ ID NO: 1923048 - RNA, 19 nt, Artificial Sequence
  Description of Artificial Sequence: Synthetic oligonucleotide
gaucggcugcccagagauc

SEQ ID NO: 1923049 - RNA, 19 nt, Artificial Sequence
  Description of Artificial Sequence: Synthetic oligonucleotide
cccacgaugccaaagugau

SEQ ID NO: 1923050 - RNA, 19 nt, Artificial Sequence
  Description of Artificial Sequence: Synthetic oligonucleotide
aagcugaguccagguggua

SEQ ID NO: 1923051 - RNA, 19 nt, Artificial Sequence
  Description of Artificial Sequence: Synthetic oligonucleotide
ccacaagcccuggugguug

SEQ ID NO: 1923052 - RNA, 19 nt, Artificial Sequence
  Description of Artificial Sequence: Synthetic oligonucleotide
cgaugccaaagugauauga

SEQ ID NO: 1923053 - RNA, 19 nt, Artificial Sequence
  Description of Artificial Sequence: Synthetic oligonucleotide
ccuacaggauagggcgacg

SEQ ID NO: 1923054 - RNA, 19 nt, Artificial Sequence
  Description of Artificial Sequence: Synthetic oligonucleotide
cuguuccggcauccgcauc

SEQ ID NO: 1923055 - RNA, 19 nt, Artificial Sequence
  Description of Artificial Sequence: Synthetic oligonucleotide
ccucagaguuaguaauuaa

SEQ ID NO: 1923056 - RNA, 19 nt, Artificial Sequence
  Description of Artificial Sequence: Synthetic oligonucleotide
gcccacgaugccaaaguga

SEQ ID NO: 1923057 - RNA, 19 nt, Artificial Sequence
  Description of Artificial Sequence: Synthetic oligonucleotide
caaggguccuugcugugau

SEQ ID NO: 1923058 - RNA, 19 nt, Artificial Sequence
  Description of Artificial Sequence: Synthetic oligonucleotide
gguccuugcugugauccaa

SEQ ID NO: 1923059 - RNA, 19 nt, Artificial Sequence
  Description of Artificial Sequence: Synthetic oligonucleotide
cccaacugggccugucauc

SEQ ID NO: 1923060 - RNA, 19 nt, Artificial Sequence
  Description of Artificial Sequence: Synthetic oligonucleotide
ggcgcuguuccggcauccg

SEQ ID NO: 1923061 - RNA, 19 nt, Artificial Sequence
  Description of Artificial Sequence: Synthetic oligonucleotide
gacggucaauaaauagguu

SEQ ID NO: 1923062 - RNA, 19 nt, Artificial Sequence
  Description of Artificial Sequence: Synthetic oligonucleotide
caggaacagggguguugga

SEQ ID NO: 1923063 - RNA, 19 nt, Artificial Sequence
  Description of Artificial Sequence: Synthetic oligonucleotide
caggaaaauaggggugacu

SEQ ID NO: 1923064 - RNA, 19 nt, Artificial Sequence
  Description of Artificial Sequence: Synthetic oligonucleotide
cuuggcgcuguuccggcau

SEQ ID NO: 1923065 - RNA, 19 nt, Artificial Sequence
  Description of Artificial Sequence: Synthetic oligonucleotide
uaaccccuaccagcaucua

SEQ ID NO: 1923066 - RNA, 19 nt, Artificial Sequence
  Description of Artificial Sequence: Synthetic oligonucleotide
ccgcaguucgggccuauuc

SEQ ID NO: 1923067 - RNA, 19 nt, Artificial Sequence
  Description of Artificial Sequence: Synthetic oligonucleotide
cccuggggcuccuucguuc

SEQ ID NO: 1923068 - RNA, 19 nt, Artificial Sequence
  Description of Artificial Sequence: Synthetic oligonucleotide
guuccggcauccgcaucca

SEQ ID NO: 1923069 - RNA, 19 nt, Artificial Sequence
  Description of Artificial Sequence: Synthetic oligonucleotide
cccuuccccucagaguuag

SEQ ID NO: 1923070 - RNA, 19 nt, Artificial Sequence
  Description of Artificial Sequence: Synthetic oligonucleotide
ggucucugagugaaucugu

SEQ ID NO: 1923071 - RNA, 19 nt, Artificial Sequence
  Description of Artificial Sequence: Synthetic oligonucleotide
gggaccccgaccaccaaaa

SEQ ID NO: 1923072 - RNA, 19 nt, Artificial Sequence
  Description of Artificial Sequence: Synthetic oligonucleotide
cgacgggcuagccugccug

SEQ ID NO: 1923073 - RNA, 19 nt, Artificial Sequence
  Description of Artificial Sequence: Synthetic oligonucleotide
ccuauucccaaggccuuca

SEQ ID NO: 1923074 - RNA, 19 nt, Artificial Sequence
  Description of Artificial Sequence: Synthetic oligonucleotide
cgcuguuccggcauccgca

SEQ ID NO: 1923075 - RNA, 19 nt, Artificial Sequence
  Description of Artificial Sequence: Synthetic oligonucleotide
cugguccagaggggaauaa

SEQ ID NO: 1923076 - RNA, 19 nt, Artificial Sequence
  Description of Artificial Sequence: Synthetic oligonucleotide
cacugaguaaggggaggcu

SEQ ID NO: 1923077 - RNA, 19 nt, Artificial Sequence
  Description of Artificial Sequence: Synthetic oligonucleotide
gggguggcguccaggaaaa

SEQ ID NO: 1923078 - RNA, 19 nt, Artificial Sequence
  Description of Artificial Sequence: Synthetic oligonucleotide
gcauccgcauccacauguc

SEQ ID NO: 1923079 - RNA, 19 nt, Artificial Sequence
  Description of Artificial Sequence: Synthetic oligonucleotide
cgggcuagccugccugggg

SEQ ID NO: 1923080 - RNA, 19 nt, Artificial Sequence
  Description of Artificial Sequence: Synthetic oligonucleotide
guacccagcccugcagggu

SEQ ID NO: 1923081 - RNA, 19 nt, Artificial Sequence
  Description of Artificial Sequence: Synthetic oligonucleotide
cuggaaccguguugaacuu

SEQ ID NO: 1923082 - RNA, 19 nt, Artificial Sequence
  Description of Artificial Sequence: Synthetic oligonucleotide
gccuauucccaaggccuuc

SEQ ID NO: 1923083 - RNA, 19 nt, Artificial Sequence
  Description of Artificial Sequence: Synthetic oligonucleotide
cccucagaguuaguaauua

SEQ ID NO: 1923084 - RNA, 19 nt, Artificial Sequence
  Description of Artificial Sequence: Synthetic oligonucleotide
caucugggaugaugccacu

SEQ ID NO: 1923085 - RNA, 19 nt, Artificial Sequence
  Description of Artificial Sequence: Synthetic oligonucleotide
cacucucggccuuggcgcu

SEQ ID NO: 1923086 - RNA, 19 nt, Artificial Sequence
  Description of Artificial Sequence: Synthetic oligonucleotide
caccuggaaccguguugaa

SEQ ID NO: 1923087 - RNA, 19 nt, Artificial Sequence
  Description of Artificial Sequence: Synthetic oligonucleotide
gcuguuccggcauccgcau

SEQ ID NO: 1923088 - RNA, 19 nt, Artificial Sequence
  Description of Artificial Sequence: Synthetic oligonucleotide
gaccaccuuuauccagcuu

SEQ ID NO: 1923089 - RNA, 19 nt, Artificial Sequence
  Description of Artificial Sequence: Synthetic oligonucleotide
ggcgacgggcuagccugcc

SEQ ID NO: 1923090 - RNA, 19 nt, Artificial Sequence
  Description of Artificial Sequence: Synthetic oligonucleotide
ccccuaccagcaucuacaa

SEQ ID NO: 1923091 - RNA, 19 nt, Artificial Sequence
  Description of Artificial Sequence: Synthetic oligonucleotide
ugggcccaacugggccugu

SEQ ID NO: 1923092 - RNA, 19 nt, Artificial Sequence
  Description of Artificial Sequence: Synthetic oligonucleotide
acccuuccccucagaguua

SEQ ID NO: 1923093 - RNA, 19 nt, Artificial Sequence
  Description of Artificial Sequence: Synthetic oligonucleotide
cacgaacauccagguccca

SEQ ID NO: 1923094 - RNA, 19 nt, Artificial Sequence
  Description of Artificial Sequence: Synthetic oligonucleotide
ucucggccuuggcgcuguu

SEQ ID NO: 1923095 - RNA, 19 nt, Artificial Sequence
  Description of Artificial Sequence: Synthetic oligonucleotide
ccguguugaacuugugcuu

SEQ ID NO: 1923096 - RNA, 19 nt, Artificial Sequence
  Description of Artificial Sequence: Synthetic oligonucleotide
ggacaccuggaaccguguu

SEQ ID NO: 1923097 - RNA, 19 nt, Artificial Sequence
  Description of Artificial Sequence: Synthetic oligonucleotide
cugggaccccgaccaccaa

SEQ ID NO: 1923098 - RNA, 19 nt, Artificial Sequence
  Description of Artificial Sequence: Synthetic oligonucleotide
ggggacccuuccccucaga

SEQ ID NO: 1923099 - RNA, 19 nt, Artificial Sequence
  Description of Artificial Sequence: Synthetic oligonucleotide
gggcgacgggcuagccugc

SEQ ID NO: 1923100 - RNA, 19 nt, Artificial Sequence
  Description of Artificial Sequence: Synthetic oligonucleotide
ccuuggcgcuguuccggca

SEQ ID NO: 1923101 - RNA, 19 nt, Artificial Sequence
  Description of Artificial Sequence: Synthetic oligonucleotide
ccacgaugccaaagugaua

SEQ ID NO: 1923102 - RNA, 19 nt, Artificial Sequence
  Description of Artificial Sequence: Synthetic oligonucleotide
gcacagcaguuuccugagu

SEQ ID NO: 1923103 - RNA, 19 nt, Artificial Sequence
  Description of Artificial Sequence: Synthetic oligonucleotide
cggcauccgcauccacaug

SEQ ID NO: 1923104 - RNA, 19 nt, Artificial Sequence
  Description of Artificial Sequence: Synthetic oligonucleotide
aggccgcaguucgggccua

SEQ ID NO: 1923105 - RNA, 19 nt, Artificial Sequence
  Description of Artificial Sequence: Synthetic oligonucleotide
gcgacgggcuagccugccu

SEQ ID NO: 1923106 - RNA, 19 nt, Artificial Sequence
  Description of Artificial Sequence: Synthetic oligonucleotide
guccuggaggaggcuucau

SEQ ID NO: 1923107 - RNA, 19 nt, Artificial Sequence
  Description of Artificial Sequence: Synthetic oligonucleotide
ggguggcguccaggaaaau

SEQ ID NO: 1923108 - RNA, 19 nt, Artificial Sequence
  Description of Artificial Sequence: Synthetic oligonucleotide
gccgcaguucgggccuauu

SEQ ID NO: 1923109 - RNA, 19 nt, Artificial Sequence
  Description of Artificial Sequence: Synthetic oligonucleotide
ccccuggggcuccuucguu

SEQ ID NO: 1923110 - RNA, 19 nt, Artificial Sequence
  Description of Artificial Sequence: Synthetic oligonucleotide
ggccgcaguucgggccuau

SEQ ID NO: 1923111 - RNA, 19 nt, Artificial Sequence
  Description of Artificial Sequence: Synthetic oligonucleotide
gcggccccuggggcuccuu

SEQ ID NO: 1923112 - RNA, 19 nt, Artificial Sequence
  Description of Artificial Sequence: Synthetic oligonucleotide
cuuacaaacacccaugugg

SEQ ID NO: 1923113 - RNA, 19 nt, Artificial Sequence
  Description of Artificial Sequence: Synthetic oligonucleotide
aaagcagcaacuguuaagc

SEQ ID NO: 1923114 - RNA, 19 nt, Artificial Sequence
  Description of Artificial Sequence: Synthetic oligonucleotide
acaggcuucaaucucaggc

SEQ ID NO: 1923115 - RNA, 19 nt, Artificial Sequence
  Description of Artificial Sequence: Synthetic oligonucleotide
uucuauuuaaaaucaacag

SEQ ID NO: 1923116 - RNA, 19 nt, Artificial Sequence
  Description of Artificial Sequence: Synthetic oligonucleotide
uuuguaugaaggaauaucu

SEQ ID NO: 1923117 - RNA, 19 nt, Artificial Sequence
  Description of Artificial Sequence: Synthetic oligonucleotide
ugugucuaaacaaacaccu

SEQ ID NO: 1923118 - RNA, 19 nt, Artificial Sequence
  Description of Artificial Sequence: Synthetic oligonucleotide
uauucaauacggcagauaa

SEQ ID NO: 1923119 - RNA, 19 nt, Artificial Sequence
  Description of Artificial Sequence: Synthetic oligonucleotide
aauuugacauagcauagca

SEQ ID NO: 1923120 - RNA, 19 nt, Artificial Sequence
  Description of Artificial Sequence: Synthetic oligonucleotide
uuugacauagcauagcaaa

SEQ ID NO: 1923121 - RNA, 19 nt, Artificial Sequence
  Description of Artificial Sequence: Synthetic oligonucleotide
uauaacaacagaagcauuc

SEQ ID NO: 1923122 - RNA, 19 nt, Artificial Sequence
  Description of Artificial Sequence: Synthetic oligonucleotide
uaucuuauaguccacguaa

SEQ ID NO: 1923123 - RNA, 19 nt, Artificial Sequence
  Description of Artificial Sequence: Synthetic oligonucleotide
ugucuaaacaaacaccuga

SEQ ID NO: 1923124 - RNA, 19 nt, Artificial Sequence
  Description of Artificial Sequence: Synthetic oligonucleotide
uuaacuuacaaacacccau

SEQ ID NO: 1923125 - RNA, 19 nt, Artificial Sequence
  Description of Artificial Sequence: Synthetic oligonucleotide
aggaaguucagguaccggc

SEQ ID NO: 1923126 - RNA, 19 nt, Artificial Sequence
  Description of Artificial Sequence: Synthetic oligonucleotide
aggaauaucuuauagucca

SEQ ID NO: 1923127 - RNA, 19 nt, Artificial Sequence
  Description of Artificial Sequence: Synthetic oligonucleotide
aaggaauaucuuauagucc

SEQ ID NO: 1923128 - RNA, 19 nt, Artificial Sequence
  Description of Artificial Sequence: Synthetic oligonucleotide
aauaucuuauaguccacgu

SEQ ID NO: 1923129 - RNA, 19 nt, Artificial Sequence
  Description of Artificial Sequence: Synthetic oligonucleotide
cugugcuuaacuuacaaac

SEQ ID NO: 1923130 - RNA, 19 nt, Artificial Sequence
  Description of Artificial Sequence: Synthetic oligonucleotide
ugggacaguauucaauacg

SEQ ID NO: 1923131 - RNA, 19 nt, Artificial Sequence
  Description of Artificial Sequence: Synthetic oligonucleotide
agaagcauucuguugggac

SEQ ID NO: 1923132 - RNA, 19 nt, Artificial Sequence
  Description of Artificial Sequence: Synthetic oligonucleotide
acguaagaauuccaggagc

SEQ ID NO: 1923133 - RNA, 19 nt, Artificial Sequence
  Description of Artificial Sequence: Synthetic oligonucleotide
acaaccaaaaugcuccagg

SEQ ID NO: 1923134 - RNA, 19 nt, Artificial Sequence
  Description of Artificial Sequence: Synthetic oligonucleotide
aacaaacaccugaagaaac

SEQ ID NO: 1923135 - RNA, 19 nt, Artificial Sequence
  Description of Artificial Sequence: Synthetic oligonucleotide
aaaacugcagccugccaag

SEQ ID NO: 1923136 - RNA, 19 nt, Artificial Sequence
  Description of Artificial Sequence: Synthetic oligonucleotide
acgaauucacgguagcggc

SEQ ID NO: 1923137 - RNA, 19 nt, Artificial Sequence
  Description of Artificial Sequence: Synthetic oligonucleotide
augaaggaauaucuuauag

SEQ ID NO: 1923138 - RNA, 19 nt, Artificial Sequence
  Description of Artificial Sequence: Synthetic oligonucleotide
aauaucacagcaugauggu

SEQ ID NO: 1923139 - RNA, 19 nt, Artificial Sequence
  Description of Artificial Sequence: Synthetic oligonucleotide
cuugcaauaucacagcaug

SEQ ID NO: 1923140 - RNA, 19 nt, Artificial Sequence
  Description of Artificial Sequence: Synthetic oligonucleotide
ucuaaacaaacaccugaag

SEQ ID NO: 1923141 - RNA, 19 nt, Artificial Sequence
  Description of Artificial Sequence: Synthetic oligonucleotide
acuuucuaaggaugggccc

SEQ ID NO: 1923142 - RNA, 19 nt, Artificial Sequence
  Description of Artificial Sequence: Synthetic oligonucleotide
aguucuauuuaaaaucaac

SEQ ID NO: 1923143 - RNA, 19 nt, Artificial Sequence
  Description of Artificial Sequence: Synthetic oligonucleotide
aagaaacucagcuccugag

SEQ ID NO: 1923144 - RNA, 19 nt, Artificial Sequence
  Description of Artificial Sequence: Synthetic oligonucleotide
agaaaguggacuucccagg

SEQ ID NO: 1923145 - RNA, 19 nt, Artificial Sequence
  Description of Artificial Sequence: Synthetic oligonucleotide
uaacuuacaaacacccaug

SEQ ID NO: 1923146 - RNA, 19 nt, Artificial Sequence
  Description of Artificial Sequence: Synthetic oligonucleotide
aaucucaggcacugagagc

SEQ ID NO: 1923147 - RNA, 19 nt, Artificial Sequence
  Description of Artificial Sequence: Synthetic oligonucleotide
uuacaaacacccauguggu

SEQ ID NO: 1923148 - RNA, 19 nt, Artificial Sequence
  Description of Artificial Sequence: Synthetic oligonucleotide
gaugcaacugacuaucuga

SEQ ID NO: 1923149 - RNA, 19 nt, Artificial Sequence
  Description of Artificial Sequence: Synthetic oligonucleotide
uucaauacggcagauaaau

SEQ ID NO: 1923150 - RNA, 19 nt, Artificial Sequence
  Description of Artificial Sequence: Synthetic oligonucleotide
gauggugaagaguugggug

SEQ ID NO: 1923151 - RNA, 19 nt, Artificial Sequence
  Description of Artificial Sequence: Synthetic oligonucleotide
uugacauagcauagcaaag

SEQ ID NO: 1923152 - RNA, 19 nt, Artificial Sequence
  Description of Artificial Sequence: Synthetic oligonucleotide
acccgcauuccucugaagc

SEQ ID NO: 1923153 - RNA, 19 nt, Artificial Sequence
  Description of Artificial Sequence: Synthetic oligonucleotide
gaaagcagcaacuguuaag

SEQ ID NO: 1923154 - RNA, 19 nt, Artificial Sequence
  Description of Artificial Sequence: Synthetic oligonucleotide
ugggacuuucuaaggaugg

SEQ ID NO: 1923155 - RNA, 19 nt, Artificial Sequence
  Description of Artificial Sequence: Synthetic oligonucleotide
aacuuacaaacacccaugu

SEQ ID NO: 1923156 - RNA, 19 nt, Artificial Sequence
  Description of Artificial Sequence: Synthetic oligonucleotide
gacaguauucaauacggca

SEQ ID NO: 1923157 - RNA, 19 nt, Artificial Sequence
  Description of Artificial Sequence: Synthetic oligonucleotide
ucagagucgaucacuggag

SEQ ID NO: 1923158 - RNA, 19 nt, Artificial Sequence
  Description of Artificial Sequence: Synthetic oligonucleotide
gaauaucuuauaguccacg

SEQ ID NO: 1923159 - RNA, 19 nt, Artificial Sequence
  Description of Artificial Sequence: Synthetic oligonucleotide
aauacggcagauaaaucug

SEQ ID NO: 1923160 - RNA, 19 nt, Artificial Sequence
  Description of Artificial Sequence: Synthetic oligonucleotide
gugguguuuauucccaugg

SEQ ID NO: 1923161 - RNA, 19 nt, Artificial Sequence
  Description of Artificial Sequence: Synthetic oligonucleotide
acccaugugguguuuauuc

SEQ ID NO: 1923162 - RNA, 19 nt, Artificial Sequence
  Description of Artificial Sequence: Synthetic oligonucleotide
aacuguuaagcuggucucc

SEQ ID NO: 1923163 - RNA, 19 nt, Artificial Sequence
  Description of Artificial Sequence: Synthetic oligonucleotide
aaggaccacgcucuguagg

SEQ ID NO: 1923164 - RNA, 19 nt, Artificial Sequence
  Description of Artificial Sequence: Synthetic oligonucleotide
ugcuuaacuuacaaacacc

SEQ ID NO: 1923165 - RNA, 19 nt, Artificial Sequence
  Description of Artificial Sequence: Synthetic oligonucleotide
caaaggcacagcauggucc

SEQ ID NO: 1923166 - RNA, 19 nt, Artificial Sequence
  Description of Artificial Sequence: Synthetic oligonucleotide
uggcaucugacacagucag

SEQ ID NO: 1923167 - RNA, 19 nt, Artificial Sequence
  Description of Artificial Sequence: Synthetic oligonucleotide
uauaguccacguaagaauu

SEQ ID NO: 1923168 - RNA, 19 nt, Artificial Sequence
  Description of Artificial Sequence: Synthetic oligonucleotide
acaguauucaauacggcag

SEQ ID NO: 1923169 - RNA, 19 nt, Artificial Sequence
  Description of Artificial Sequence: Synthetic oligonucleotide
aggaugggcccucagaguc

SEQ ID NO: 1923170 - RNA, 19 nt, Artificial Sequence
  Description of Artificial Sequence: Synthetic oligonucleotide
augaagagguuccccaaac

SEQ ID NO: 1923171 - RNA, 19 nt, Artificial Sequence
  Description of Artificial Sequence: Synthetic oligonucleotide
gaaccuagggcucagccac

SEQ ID NO: 1923172 - RNA, 19 nt, Artificial Sequence
  Description of Artificial Sequence: Synthetic oligonucleotide
uuggaagaaagcagcaacu

SEQ ID NO: 1923173 - RNA, 19 nt, Artificial Sequence
  Description of Artificial Sequence: Synthetic oligonucleotide
cugugucuaaacaaacacc

SEQ ID NO: 1923174 - RNA, 19 nt, Artificial Sequence
  Description of Artificial Sequence: Synthetic oligonucleotide
ucagccacaguucacuuuc

SEQ ID NO: 1923175 - RNA, 19 nt, Artificial Sequence
  Description of Artificial Sequence: Synthetic oligonucleotide
uucuaggaaaugcuguaga

SEQ ID NO: 1923176 - RNA, 19 nt, Artificial Sequence
  Description of Artificial Sequence: Synthetic oligonucleotide
uuccccaaaccauucaccc

SEQ ID NO: 1923177 - RNA, 19 nt, Artificial Sequence
  Description of Artificial Sequence: Synthetic oligonucleotide
ucuaggaaaugcuguagac

SEQ ID NO: 1923178 - RNA, 19 nt, Artificial Sequence
  Description of Artificial Sequence: Synthetic oligonucleotide
gaagagguuccccaaacca

SEQ ID NO: 1923179 - RNA, 19 nt, Artificial Sequence
  Description of Artificial Sequence: Synthetic oligonucleotide
gcaacugacuaucugacag

SEQ ID NO: 1923180 - RNA, 19 nt, Artificial Sequence
  Description of Artificial Sequence: Synthetic oligonucleotide
caugauggugaagaguugg

SEQ ID NO: 1923181 - RNA, 19 nt, Artificial Sequence
  Description of Artificial Sequence: Synthetic oligonucleotide
uccugaggaaguaaauaca

SEQ ID NO: 1923182 - RNA, 19 nt, Artificial Sequence
  Description of Artificial Sequence: Synthetic oligonucleotide
aucucaggcacugagagcu

SEQ ID NO: 1923183 - RNA, 19 nt, Artificial Sequence
  Description of Artificial Sequence: Synthetic oligonucleotide
uagcauagcaaagaauggc

SEQ ID NO: 1923184 - RNA, 19 nt, Artificial Sequence
  Description of Artificial Sequence: Synthetic oligonucleotide
agaauggcaucugacacag

SEQ ID NO: 1923185 - RNA, 19 nt, Artificial Sequence
  Description of Artificial Sequence: Synthetic oligonucleotide
aaccauucacccauggcag

SEQ ID NO: 1923186 - RNA, 19 nt, Artificial Sequence
  Description of Artificial Sequence: Synthetic oligonucleotide
agcagcaacuguuaagcug

SEQ ID NO: 1923187 - RNA, 19 nt, Artificial Sequence
  Description of Artificial Sequence: Synthetic oligonucleotide
cuaucugacagaaggacca

SEQ ID NO: 1923188 - RNA, 19 nt, Artificial Sequence
  Description of Artificial Sequence: Synthetic oligonucleotide
uccugccugaucuuggaag

SEQ ID NO: 1923189 - RNA, 19 nt, Artificial Sequence
  Description of Artificial Sequence: Synthetic oligonucleotide
uucacuuuccccacacugu

SEQ ID NO: 1923190 - RNA, 19 nt, Artificial Sequence
  Description of Artificial Sequence: Synthetic oligonucleotide
uaacaacagaagcauucug

SEQ ID NO: 1923191 - RNA, 19 nt, Artificial Sequence
  Description of Artificial Sequence: Synthetic oligonucleotide
guucacuuuccccacacug

SEQ ID NO: 1923192 - RNA, 19 nt, Artificial Sequence
  Description of Artificial Sequence: Synthetic oligonucleotide
ucacuuuccccacacugug

SEQ ID NO: 1923193 - RNA, 19 nt, Artificial Sequence
  Description of Artificial Sequence: Synthetic oligonucleotide
ugaagagguuccccaaacc

SEQ ID NO: 1923194 - RNA, 19 nt, Artificial Sequence
  Description of Artificial Sequence: Synthetic oligonucleotide
uuagccaggugagaggugc

SEQ ID NO: 1923195 - RNA, 19 nt, Artificial Sequence
  Description of Artificial Sequence: Synthetic oligonucleotide
aauucacgguagcggcgcc

SEQ ID NO: 1923196 - RNA, 19 nt, Artificial Sequence
  Description of Artificial Sequence: Synthetic oligonucleotide
cacugugucuagcugaccc

SEQ ID NO: 1923197 - RNA, 19 nt, Artificial Sequence
  Description of Artificial Sequence: Synthetic oligonucleotide
ugacagaaggaccacgcuc

SEQ ID NO: 1923198 - RNA, 19 nt, Artificial Sequence
  Description of Artificial Sequence: Synthetic oligonucleotide
gacuuucuaaggaugggcc

SEQ ID NO: 1923199 - RNA, 19 nt, Artificial Sequence
  Description of Artificial Sequence: Synthetic oligonucleotide
gggaauauaacaacagaag

SEQ ID NO: 1923200 - RNA, 19 nt, Artificial Sequence
  Description of Artificial Sequence: Synthetic oligonucleotide
guuuguaugaaggaauauc

SEQ ID NO: 1923201 - RNA, 19 nt, Artificial Sequence
  Description of Artificial Sequence: Synthetic oligonucleotide
agcaugggacuuucuaagg

SEQ ID NO: 1923202 - RNA, 19 nt, Artificial Sequence
  Description of Artificial Sequence: Synthetic oligonucleotide
cagagagucccucaucggg

SEQ ID NO: 1923203 - RNA, 19 nt, Artificial Sequence
  Description of Artificial Sequence: Synthetic oligonucleotide
cacgaauucacgguagcgg

SEQ ID NO: 1923204 - RNA, 19 nt, Artificial Sequence
  Description of Artificial Sequence: Synthetic oligonucleotide
gggacaguauucaauacgg

SEQ ID NO: 1923205 - RNA, 19 nt, Artificial Sequence
  Description of Artificial Sequence: Synthetic oligonucleotide
auucccauggaggagauau

SEQ ID NO: 1923206 - RNA, 19 nt, Artificial Sequence
  Description of Artificial Sequence: Synthetic oligonucleotide
gguguuuauucccauggag

SEQ ID NO: 1923207 - RNA, 19 nt, Artificial Sequence
  Description of Artificial Sequence: Synthetic oligonucleotide
uaagcuggucuccuuuagc

SEQ ID NO: 1923208 - RNA, 19 nt, Artificial Sequence
  Description of Artificial Sequence: Synthetic oligonucleotide
gagaaccuagggcucagcc

SEQ ID NO: 1923209 - RNA, 19 nt, Artificial Sequence
  Description of Artificial Sequence: Synthetic oligonucleotide
aggcuucaaucucaggcac

SEQ ID NO: 1923210 - RNA, 19 nt, Artificial Sequence
  Description of Artificial Sequence: Synthetic oligonucleotide
ucuugcaauaucacagcau

SEQ ID NO: 1923211 - RNA, 19 nt, Artificial Sequence
  Description of Artificial Sequence: Synthetic oligonucleotide
acccuguccacacaaggag

SEQ ID NO: 1923212 - RNA, 19 nt, Artificial Sequence
  Description of Artificial Sequence: Synthetic oligonucleotide
uucacugggaguuggggaa

SEQ ID NO: 1923213 - RNA, 19 nt, Artificial Sequence
  Description of Artificial Sequence: Synthetic oligonucleotide
uggaggagauauagcaggc

SEQ ID NO: 1923214 - RNA, 19 nt, Artificial Sequence
  Description of Artificial Sequence: Synthetic oligonucleotide
cacguaagaauuccaggag

SEQ ID NO: 1923215 - RNA, 19 nt, Artificial Sequence
  Description of Artificial Sequence: Synthetic oligonucleotide
gacuaucugacagaaggac

SEQ ID NO: 1923216 - RNA, 19 nt, Artificial Sequence
  Description of Artificial Sequence: Synthetic oligonucleotide
cacacaggaggucuuggcg

SEQ ID NO: 1923217 - RNA, 19 nt, Artificial Sequence
  Description of Artificial Sequence: Synthetic oligonucleotide
gcaucugacacagucaggg

SEQ ID NO: 1923218 - RNA, 19 nt, Artificial Sequence
  Description of Artificial Sequence: Synthetic oligonucleotide
uaugaaggaauaucuuaua

SEQ ID NO: 1923219 - RNA, 19 nt, Artificial Sequence
  Description of Artificial Sequence: Synthetic oligonucleotide
ucuagcugacccaggaauc

SEQ ID NO: 1923220 - RNA, 19 nt, Artificial Sequence
  Description of Artificial Sequence: Synthetic oligonucleotide
auacggcagauaaaucugc

SEQ ID NO: 1923221 - RNA, 19 nt, Artificial Sequence
  Description of Artificial Sequence: Synthetic oligonucleotide
aaaugcuccagggacugca

SEQ ID NO: 1923222 - RNA, 19 nt, Artificial Sequence
  Description of Artificial Sequence: Synthetic oligonucleotide
gcuuaacuuacaaacaccc

SEQ ID NO: 1923223 - RNA, 19 nt, Artificial Sequence
  Description of Artificial Sequence: Synthetic oligonucleotide
aggagauauagcaggcagc

SEQ ID NO: 1923224 - RNA, 19 nt, Artificial Sequence
  Description of Artificial Sequence: Synthetic oligonucleotide
gagcccacguuucuaagug

SEQ ID NO: 1923225 - RNA, 19 nt, Artificial Sequence
  Description of Artificial Sequence: Synthetic oligonucleotide
ugccaagaugggaauauaa

SEQ ID NO: 1923226 - RNA, 19 nt, Artificial Sequence
  Description of Artificial Sequence: Synthetic oligonucleotide
caauacggcagauaaaucu

SEQ ID NO: 1923227 - RNA, 19 nt, Artificial Sequence
  Description of Artificial Sequence: Synthetic oligonucleotide
ugugguguuuauucccaug

SEQ ID NO: 1923228 - RNA, 19 nt, Artificial Sequence
  Description of Artificial Sequence: Synthetic oligonucleotide
uugcaauaucacagcauga

SEQ ID NO: 1923229 - RNA, 19 nt, Artificial Sequence
  Description of Artificial Sequence: Synthetic oligonucleotide
gaaaguggacuucccagga

SEQ ID NO: 1923230 - RNA, 19 nt, Artificial Sequence
  Description of Artificial Sequence: Synthetic oligonucleotide
auucuguugggacaguauu

SEQ ID NO: 1923231 - RNA, 19 nt, Artificial Sequence
  Description of Artificial Sequence: Synthetic oligonucleotide
acuuacaaacacccaugug

SEQ ID NO: 1923232 - RNA, 19 nt, Artificial Sequence
  Description of Artificial Sequence: Synthetic oligonucleotide
uguuaagcuggucuccuuu

SEQ ID NO: 1923233 - RNA, 19 nt, Artificial Sequence
  Description of Artificial Sequence: Synthetic oligonucleotide
uugccgucgcuucucaaug

SEQ ID NO: 1923234 - RNA, 19 nt, Artificial Sequence
  Description of Artificial Sequence: Synthetic oligonucleotide
gaauucacgguagcggcgc

SEQ ID NO: 1923235 - RNA, 19 nt, Artificial Sequence
  Description of Artificial Sequence: Synthetic oligonucleotide
caauuugacauagcauagc

SEQ ID NO: 1923236 - RNA, 19 nt, Artificial Sequence
  Description of Artificial Sequence: Synthetic oligonucleotide
augcaacugacuaucugac

SEQ ID NO: 1923237 - RNA, 19 nt, Artificial Sequence
  Description of Artificial Sequence: Synthetic oligonucleotide
ucaauacggcagauaaauc

SEQ ID NO: 1923238 - RNA, 19 nt, Artificial Sequence
  Description of Artificial Sequence: Synthetic oligonucleotide
ggagauauagcaggcagcc

SEQ ID NO: 1923239 - RNA, 19 nt, Artificial Sequence
  Description of Artificial Sequence: Synthetic oligonucleotide
ucaucagagcugccaaaga

SEQ ID NO: 1923240 - RNA, 19 nt, Artificial Sequence
  Description of Artificial Sequence: Synthetic oligonucleotide
agcauagcaaagaauggca

SEQ ID NO: 1923241 - RNA, 19 nt, Artificial Sequence
  Description of Artificial Sequence: Synthetic oligonucleotide
cacccaagagaaccuaggg

SEQ ID NO: 1923242 - RNA, 19 nt, Artificial Sequence
  Description of Artificial Sequence: Synthetic oligonucleotide
aacugacuaucugacagaa

SEQ ID NO: 1923243 - RNA, 19 nt, Artificial Sequence
  Description of Artificial Sequence: Synthetic oligonucleotide
agaaccuagggcucagcca

SEQ ID NO: 1923244 - RNA, 19 nt, Artificial Sequence
  Description of Artificial Sequence: Synthetic oligonucleotide
gguaccggcaccaaacccg

SEQ ID NO: 1923245 - RNA, 19 nt, Artificial Sequence
  Description of Artificial Sequence: Synthetic oligonucleotide
gagucgaucacuggagccc

SEQ ID NO: 1923246 - RNA, 19 nt, Artificial Sequence
  Description of Artificial Sequence: Synthetic oligonucleotide
auaucuuauaguccacgua

SEQ ID NO: 1923247 - RNA, 19 nt, Artificial Sequence
  Description of Artificial Sequence: Synthetic oligonucleotide
agugcccugugucuaaaca

SEQ ID NO: 1923248 - RNA, 19 nt, Artificial Sequence
  Description of Artificial Sequence: Synthetic oligonucleotide
agaguuggguggcagcaug

SEQ ID NO: 1923249 - RNA, 19 nt, Artificial Sequence
  Description of Artificial Sequence: Synthetic oligonucleotide
agaaggaccacgcucugua

SEQ ID NO: 1923250 - RNA, 19 nt, Artificial Sequence
  Description of Artificial Sequence: Synthetic oligonucleotide
caacuguuaagcuggucuc

SEQ ID NO: 1923251 - RNA, 19 nt, Artificial Sequence
  Description of Artificial Sequence: Synthetic oligonucleotide
uaggaccuguucuaggaaa

SEQ ID NO: 1923252 - RNA, 19 nt, Artificial Sequence
  Description of Artificial Sequence: Synthetic oligonucleotide
gagcccucauucugcaccg

SEQ ID NO: 1923253 - RNA, 19 nt, Artificial Sequence
  Description of Artificial Sequence: Synthetic oligonucleotide
ugaagaaacucagcuccug

SEQ ID NO: 1923254 - RNA, 19 nt, Artificial Sequence
  Description of Artificial Sequence: Synthetic oligonucleotide
aaaguggacuucccaggaa

SEQ ID NO: 1923255 - RNA, 19 nt, Artificial Sequence
  Description of Artificial Sequence: Synthetic oligonucleotide
ugguguuuauucccaugga

SEQ ID NO: 1923256 - RNA, 19 nt, Artificial Sequence
  Description of Artificial Sequence: Synthetic oligonucleotide
ugccaaagaaaguggacuu

SEQ ID NO: 1923257 - RNA, 19 nt, Artificial Sequence
  Description of Artificial Sequence: Synthetic oligonucleotide
cuuaacuuacaaacaccca

SEQ ID NO: 1923258 - RNA, 19 nt, Artificial Sequence
  Description of Artificial Sequence: Synthetic oligonucleotide
accaaacccgcauuccucu

SEQ ID NO: 1923259 - RNA, 19 nt, Artificial Sequence
  Description of Artificial Sequence: Synthetic oligonucleotide
cuuauaguccacguaagaa

SEQ ID NO: 1923260 - RNA, 19 nt, Artificial Sequence
  Description of Artificial Sequence: Synthetic oligonucleotide
gcuuuggaggaagagaugc

SEQ ID NO: 1923261 - RNA, 19 nt, Artificial Sequence
  Description of Artificial Sequence: Synthetic oligonucleotide
ugcuguuuguaugaaggaa

SEQ ID NO: 1923262 - RNA, 19 nt, Artificial Sequence
  Description of Artificial Sequence: Synthetic oligonucleotide
aagcagcaacuguuaagcu

SEQ ID NO: 1923263 - RNA, 19 nt, Artificial Sequence
  Description of Artificial Sequence: Synthetic oligonucleotide
acacgaauucacgguagcg

SEQ ID NO: 1923264 - RNA, 19 nt, Artificial Sequence
  Description of Artificial Sequence: Synthetic oligonucleotide
cuagcugacccaggaaucc

SEQ ID NO: 1923265 - RNA, 19 nt, Artificial Sequence
  Description of Artificial Sequence: Synthetic oligonucleotide
ccugugucuaaacaaacac

SEQ ID NO: 1923266 - RNA, 19 nt, Artificial Sequence
  Description of Artificial Sequence: Synthetic oligonucleotide
accggggucugacacgcac

SEQ ID NO: 1923267 - RNA, 19 nt, Artificial Sequence
  Description of Artificial Sequence: Synthetic oligonucleotide
cucagagucgaucacugga

SEQ ID NO: 1923268 - RNA, 19 nt, Artificial Sequence
  Description of Artificial Sequence: Synthetic oligonucleotide
cagguaagaggccagccuc

SEQ ID NO: 1923269 - RNA, 19 nt, Artificial Sequence
  Description of Artificial Sequence: Synthetic oligonucleotide
ugcaacugacuaucugaca

SEQ ID NO: 1923270 - RNA, 19 nt, Artificial Sequence
  Description of Artificial Sequence: Synthetic oligonucleotide
ugauggugaagaguugggu

SEQ ID NO: 1923271 - RNA, 19 nt, Artificial Sequence
  Description of Artificial Sequence: Synthetic oligonucleotide
ugagaggugcuuugccucu

SEQ ID NO: 1923272 - RNA, 19 nt, Artificial Sequence
  Description of Artificial Sequence: Synthetic oligonucleotide
acaaacaccugaagaaacu

SEQ ID NO: 1923273 - RNA, 19 nt, Artificial Sequence
  Description of Artificial Sequence: Synthetic oligonucleotide
gaagaguuggguggcagca

SEQ ID NO: 1923274 - RNA, 19 nt, Artificial Sequence
  Description of Artificial Sequence: Synthetic oligonucleotide
gaaguaaauacaguucuau

SEQ ID NO: 1923275 - RNA, 19 nt, Artificial Sequence
  Description of Artificial Sequence: Synthetic oligonucleotide
uacaaacacccauguggug

SEQ ID NO: 1923276 - RNA, 19 nt, Artificial Sequence
  Description of Artificial Sequence: Synthetic oligonucleotide
aggaccacgcucuguagga

SEQ ID NO: 1923277 - RNA, 19 nt, Artificial Sequence
  Description of Artificial Sequence: Synthetic oligonucleotide
aaacccgcauuccucugaa

SEQ ID NO: 1923278 - RNA, 19 nt, Artificial Sequence
  Description of Artificial Sequence: Synthetic oligonucleotide
cacagcaugguccccuccc

SEQ ID NO: 1923279 - RNA, 19 nt, Artificial Sequence
  Description of Artificial Sequence: Synthetic oligonucleotide
gacccugugcuuaacuuac

SEQ ID NO: 1923280 - RNA, 19 nt, Artificial Sequence
  Description of Artificial Sequence: Synthetic oligonucleotide
guaagaauuccaggagccc

SEQ ID NO: 1923281 - RNA, 19 nt, Artificial Sequence
  Description of Artificial Sequence: Synthetic oligonucleotide
cguaagaauuccaggagcc

SEQ ID NO: 1923282 - RNA, 19 nt, Artificial Sequence
  Description of Artificial Sequence: Synthetic oligonucleotide
agccacacgaauucacggu

SEQ ID NO: 1923283 - RNA, 19 nt, Artificial Sequence
  Description of Artificial Sequence: Synthetic oligonucleotide
augauggugaagaguuggg

SEQ ID NO: 1923284 - RNA, 19 nt, Artificial Sequence
  Description of Artificial Sequence: Synthetic oligonucleotide
cacacugugucuagcugac

SEQ ID NO: 1923285 - RNA, 19 nt, Artificial Sequence
  Description of Artificial Sequence: Synthetic oligonucleotide
ugcaccggggucugacacg

SEQ ID NO: 1923286 - RNA, 19 nt, Artificial Sequence
  Description of Artificial Sequence: Synthetic oligonucleotide
gcaauuugacauagcauag

SEQ ID NO: 1923287 - RNA, 19 nt, Artificial Sequence
  Description of Artificial Sequence: Synthetic oligonucleotide
acugugucuagcugaccca

SEQ ID NO: 1923288 - RNA, 19 nt, Artificial Sequence
  Description of Artificial Sequence: Synthetic oligonucleotide
guccacguaagaauuccag

SEQ ID NO: 1923289 - RNA, 19 nt, Artificial Sequence
  Description of Artificial Sequence: Synthetic oligonucleotide
uguuuguaugaaggaauau

SEQ ID NO: 1923290 - RNA, 19 nt, Artificial Sequence
  Description of Artificial Sequence: Synthetic oligonucleotide
ggucuugcaauaucacagc

SEQ ID NO: 1923291 - RNA, 19 nt, Artificial Sequence
  Description of Artificial Sequence: Synthetic oligonucleotide
acggcagauaaaucugcca

SEQ ID NO: 1923292 - RNA, 19 nt, Artificial Sequence
  Description of Artificial Sequence: Synthetic oligonucleotide
ggaaaugcuguagaccuug

SEQ ID NO: 1923293 - RNA, 19 nt, Artificial Sequence
  Description of Artificial Sequence: Synthetic oligonucleotide
cacacgaauucacgguagc

SEQ ID NO: 1923294 - RNA, 19 nt, Artificial Sequence
  Description of Artificial Sequence: Synthetic oligonucleotide
gcuggucuccuuuagccag

SEQ ID NO: 1923295 - RNA, 19 nt, Artificial Sequence
  Description of Artificial Sequence: Synthetic oligonucleotide
aucugacagaaggaccacg

SEQ ID NO: 1923296 - RNA, 19 nt, Artificial Sequence
  Description of Artificial Sequence: Synthetic oligonucleotide
uagaccuugccgucgcuuc

SEQ ID NO: 1923297 - RNA, 19 nt, Artificial Sequence
  Description of Artificial Sequence: Synthetic oligonucleotide
ucgggucuugcaauaucac

SEQ ID NO: 1923298 - RNA, 19 nt, Artificial Sequence
  Description of Artificial Sequence: Synthetic oligonucleotide
gugagaggugcuuugccuc

SEQ ID NO: 1923299 - RNA, 19 nt, Artificial Sequence
  Description of Artificial Sequence: Synthetic oligonucleotide
agggcucagccacaguuca

SEQ ID NO: 1923300 - RNA, 19 nt, Artificial Sequence
  Description of Artificial Sequence: Synthetic oligonucleotide
ccauggaggagauauagca

SEQ ID NO: 1923301 - RNA, 19 nt, Artificial Sequence
  Description of Artificial Sequence: Synthetic oligonucleotide
gaguuggguggcagcaugg

SEQ ID NO: 1923302 - RNA, 19 nt, Artificial Sequence
  Description of Artificial Sequence: Synthetic oligonucleotide
gucuugcaauaucacagca

SEQ ID NO: 1923303 - RNA, 19 nt, Artificial Sequence
  Description of Artificial Sequence: Synthetic oligonucleotide
uucagguaccggcaccaaa

SEQ ID NO: 1923304 - RNA, 19 nt, Artificial Sequence
  Description of Artificial Sequence: Synthetic oligonucleotide
caguauucaauacggcaga

SEQ ID NO: 1923305 - RNA, 19 nt, Artificial Sequence
  Description of Artificial Sequence: Synthetic oligonucleotide
gacagaaggaccacgcucu

SEQ ID NO: 1923306 - RNA, 19 nt, Artificial Sequence
  Description of Artificial Sequence: Synthetic oligonucleotide
ucgaucacuggagcccacg

SEQ ID NO: 1923307 - RNA, 19 nt, Artificial Sequence
  Description of Artificial Sequence: Synthetic oligonucleotide
cuucacugggaguugggga

SEQ ID NO: 1923308 - RNA, 19 nt, Artificial Sequence
  Description of Artificial Sequence: Synthetic oligonucleotide
ggcagauaaaucugccaug

SEQ ID NO: 1923309 - RNA, 19 nt, Artificial Sequence
  Description of Artificial Sequence: Synthetic oligonucleotide
caucagagcugccaaagaa

SEQ ID NO: 1923310 - RNA, 19 nt, Artificial Sequence
  Description of Artificial Sequence: Synthetic oligonucleotide
aucgggucuugcaauauca

SEQ ID NO: 1923311 - RNA, 19 nt, Artificial Sequence
  Description of Artificial Sequence: Synthetic oligonucleotide
uggacuucccaggaaguuc

SEQ ID NO: 1923312 - RNA, 19 nt, Artificial Sequence
  Description of Artificial Sequence: Synthetic oligonucleotide
ugucuagcugacccaggaa

SEQ ID NO: 1923313 - RNA, 19 nt, Artificial Sequence
  Description of Artificial Sequence: Synthetic oligonucleotide
ccaugugguguuuauuccc

SEQ ID NO: 1923314 - RNA, 19 nt, Artificial Sequence
  Description of Artificial Sequence: Synthetic oligonucleotide
aguccuucucacaggcugg

SEQ ID NO: 1923315 - RNA, 19 nt, Artificial Sequence
  Description of Artificial Sequence: Synthetic oligonucleotide
acuguuaagcuggucuccu

SEQ ID NO: 1923316 - RNA, 19 nt, Artificial Sequence
  Description of Artificial Sequence: Synthetic oligonucleotide
gccgcaauuugacauagca

SEQ ID NO: 1923317 - RNA, 19 nt, Artificial Sequence
  Description of Artificial Sequence: Synthetic oligonucleotide
ugcagccugccaagauggg

SEQ ID NO: 1923318 - RNA, 19 nt, Artificial Sequence
  Description of Artificial Sequence: Synthetic oligonucleotide
cuggucuccuuuagccagg

SEQ ID NO: 1923319 - RNA, 19 nt, Artificial Sequence
  Description of Artificial Sequence: Synthetic oligonucleotide
cuaaggaugggcccucaga

SEQ ID NO: 1923320 - RNA, 19 nt, Artificial Sequence
  Description of Artificial Sequence: Synthetic oligonucleotide
uggguggcagcaugggacu

SEQ ID NO: 1923321 - RNA, 19 nt, Artificial Sequence
  Description of Artificial Sequence: Synthetic oligonucleotide
uggacccugugcuuaacuu

SEQ ID NO: 1923322 - RNA, 19 nt, Artificial Sequence
  Description of Artificial Sequence: Synthetic oligonucleotide
cugugucuagcugacccag

SEQ ID NO: 1923323 - RNA, 19 nt, Artificial Sequence
  Description of Artificial Sequence: Synthetic oligonucleotide
agagaaccuagggcucagc

SEQ ID NO: 1923324 - RNA, 19 nt, Artificial Sequence
  Description of Artificial Sequence: Synthetic oligonucleotide
caccaaacccgcauuccuc

SEQ ID NO: 1923325 - RNA, 19 nt, Artificial Sequence
  Description of Artificial Sequence: Synthetic oligonucleotide
gagagucccucaucggguc

SEQ ID NO: 1923326 - RNA, 19 nt, Artificial Sequence
  Description of Artificial Sequence: Synthetic oligonucleotide
ggcgguaagggccuugcug

SEQ ID NO: 1923327 - RNA, 19 nt, Artificial Sequence
  Description of Artificial Sequence: Synthetic oligonucleotide
aacccgcauuccucugaag

SEQ ID NO: 1923328 - RNA, 19 nt, Artificial Sequence
  Description of Artificial Sequence: Synthetic oligonucleotide
uuccccacacugugucuag

SEQ ID NO: 1923329 - RNA, 19 nt, Artificial Sequence
  Description of Artificial Sequence: Synthetic oligonucleotide
auuugacauagcauagcaa

SEQ ID NO: 1923330 - RNA, 19 nt, Artificial Sequence
  Description of Artificial Sequence: Synthetic oligonucleotide
gugucuagcugacccagga

SEQ ID NO: 1923331 - RNA, 19 nt, Artificial Sequence
  Description of Artificial Sequence: Synthetic oligonucleotide
agggccuugcuguuuguau

SEQ ID NO: 1923332 - RNA, 19 nt, Artificial Sequence
  Description of Artificial Sequence: Synthetic oligonucleotide
agagagucccucaucgggu

SEQ ID NO: 1923333 - RNA, 19 nt, Artificial Sequence
  Description of Artificial Sequence: Synthetic oligonucleotide
ccacguaagaauuccagga

SEQ ID NO: 1923334 - RNA, 19 nt, Artificial Sequence
  Description of Artificial Sequence: Synthetic oligonucleotide
uuuccccacacugugucua

SEQ ID NO: 1923335 - RNA, 19 nt, Artificial Sequence
  Description of Artificial Sequence: Synthetic oligonucleotide
ccuuuagccaggugagagg

SEQ ID NO: 1923336 - RNA, 19 nt, Artificial Sequence
  Description of Artificial Sequence: Synthetic oligonucleotide
caacugacuaucugacaga

SEQ ID NO: 1923337 - RNA, 19 nt, Artificial Sequence
  Description of Artificial Sequence: Synthetic oligonucleotide
ugccucucuuccugggccc

SEQ ID NO: 1923338 - RNA, 19 nt, Artificial Sequence
  Description of Artificial Sequence: Synthetic oligonucleotide
acauagcauagcaaagaau

SEQ ID NO: 1923339 - RNA, 19 nt, Artificial Sequence
  Description of Artificial Sequence: Synthetic oligonucleotide
cgcaauuugacauagcaua

SEQ ID NO: 1923340 - RNA, 19 nt, Artificial Sequence
  Description of Artificial Sequence: Synthetic oligonucleotide
acagaaggaccacgcucug

SEQ ID NO: 1923341 - RNA, 19 nt, Artificial Sequence
  Description of Artificial Sequence: Synthetic oligonucleotide
uaucugacagaaggaccac

SEQ ID NO: 1923342 - RNA, 19 nt, Artificial Sequence
  Description of Artificial Sequence: Synthetic oligonucleotide
uuggcgguaagggccuugc

SEQ ID NO: 1923343 - RNA, 19 nt, Artificial Sequence
  Description of Artificial Sequence: Synthetic oligonucleotide
aguauucaauacggcagau

SEQ ID NO: 1923344 - RNA, 19 nt, Artificial Sequence
  Description of Artificial Sequence: Synthetic oligonucleotide
ggagccucggcccuggaca

SEQ ID NO: 1923345 - RNA, 19 nt, Artificial Sequence
  Description of Artificial Sequence: Synthetic oligonucleotide
guuaagcuggucuccuuua

SEQ ID NO: 1923346 - RNA, 19 nt, Artificial Sequence
  Description of Artificial Sequence: Synthetic oligonucleotide
ccacguuucuaaguggucc

SEQ ID NO: 1923347 - RNA, 19 nt, Artificial Sequence
  Description of Artificial Sequence: Synthetic oligonucleotide
cucauucugcaccgggguc

SEQ ID NO: 1923348 - RNA, 19 nt, Artificial Sequence
  Description of Artificial Sequence: Synthetic oligonucleotide
gugcccugugucuaaacaa

SEQ ID NO: 1923349 - RNA, 19 nt, Artificial Sequence
  Description of Artificial Sequence: Synthetic oligonucleotide
uuucuaaggaugggcccuc

SEQ ID NO: 1923350 - RNA, 19 nt, Artificial Sequence
  Description of Artificial Sequence: Synthetic oligonucleotide
ugccugaucuuggaagaaa

SEQ ID NO: 1923351 - RNA, 19 nt, Artificial Sequence
  Description of Artificial Sequence: Synthetic oligonucleotide
cccaugugguguuuauucc

SEQ ID NO: 1923352 - RNA, 19 nt, Artificial Sequence
  Description of Artificial Sequence: Synthetic oligonucleotide
accggcaccaaacccgcau

SEQ ID NO: 1923353 - RNA, 19 nt, Artificial Sequence
  Description of Artificial Sequence: Synthetic oligonucleotide
agguuccccaaaccauuca

SEQ ID NO: 1923354 - RNA, 19 nt, Artificial Sequence
  Description of Artificial Sequence: Synthetic oligonucleotide
cagccugccaagaugggaa

SEQ ID NO: 1923355 - RNA, 19 nt, Artificial Sequence
  Description of Artificial Sequence: Synthetic oligonucleotide
ucccacaguccuucucaca

SEQ ID NO: 1923356 - RNA, 19 nt, Artificial Sequence
  Description of Artificial Sequence: Synthetic oligonucleotide
caucgggucuugcaauauc

SEQ ID NO: 1923357 - RNA, 19 nt, Artificial Sequence
  Description of Artificial Sequence: Synthetic oligonucleotide
ugccgucgcuucucaauga

SEQ ID NO: 1923358 - RNA, 19 nt, Artificial Sequence
  Description of Artificial Sequence: Synthetic oligonucleotide
cccaagagaaccuagggcu

SEQ ID NO: 1923359 - RNA, 19 nt, Artificial Sequence
  Description of Artificial Sequence: Synthetic oligonucleotide
agucgaucacuggagccca

SEQ ID NO: 1923360 - RNA, 19 nt, Artificial Sequence
  Description of Artificial Sequence: Synthetic oligonucleotide
auauaacaacagaagcauu

SEQ ID NO: 1923361 - RNA, 19 nt, Artificial Sequence
  Description of Artificial Sequence: Synthetic oligonucleotide
cugcaccggggucugacac

SEQ ID NO: 1923362 - RNA, 19 nt, Artificial Sequence
  Description of Artificial Sequence: Synthetic oligonucleotide
agaccuugccgucgcuucu

SEQ ID NO: 1923363 - RNA, 19 nt, Artificial Sequence
  Description of Artificial Sequence: Synthetic oligonucleotide
cacccuguccacacaagga

SEQ ID NO: 1923364 - RNA, 19 nt, Artificial Sequence
  Description of Artificial Sequence: Synthetic oligonucleotide
agagguuccccaaaccauu

SEQ ID NO: 1923365 - RNA, 19 nt, Artificial Sequence
  Description of Artificial Sequence: Synthetic oligonucleotide
gggccuugcuguuuguaug

SEQ ID NO: 1923366 - RNA, 19 nt, Artificial Sequence
  Description of Artificial Sequence: Synthetic oligonucleotide
gggacuuucuaaggauggg

SEQ ID NO: 1923367 - RNA, 19 nt, Artificial Sequence
  Description of Artificial Sequence: Synthetic oligonucleotide
acugacuaucugacagaag

SEQ ID NO: 1923368 - RNA, 19 nt, Artificial Sequence
  Description of Artificial Sequence: Synthetic oligonucleotide
aguggacuucccaggaagu

SEQ ID NO: 1923369 - RNA, 19 nt, Artificial Sequence
  Description of Artificial Sequence: Synthetic oligonucleotide
cagccgcaauuugacauag

SEQ ID NO: 1923370 - RNA, 19 nt, Artificial Sequence
  Description of Artificial Sequence: Synthetic oligonucleotide
cuuuagccaggugagaggu

SEQ ID NO: 1923371 - RNA, 19 nt, Artificial Sequence
  Description of Artificial Sequence: Synthetic oligonucleotide
guaccggcaccaaacccgc

SEQ ID NO: 1923372 - RNA, 19 nt, Artificial Sequence
  Description of Artificial Sequence: Synthetic oligonucleotide
cucuguaggaccuguucua

SEQ ID NO: 1923373 - RNA, 19 nt, Artificial Sequence
  Description of Artificial Sequence: Synthetic oligonucleotide
caggugagaggugcuuugc

SEQ ID NO: 1923374 - RNA, 19 nt, Artificial Sequence
  Description of Artificial Sequence: Synthetic oligonucleotide
gagguuccccaaaccauuc

SEQ ID NO: 1923375 - RNA, 19 nt, Artificial Sequence
  Description of Artificial Sequence: Synthetic oligonucleotide
guaggaccuguucuaggaa

SEQ ID NO: 1923376 - RNA, 19 nt, Artificial Sequence
  Description of Artificial Sequence: Synthetic oligonucleotide
ggaaguucagguaccggca

SEQ ID NO: 1923377 - RNA, 19 nt, Artificial Sequence
  Description of Artificial Sequence: Synthetic oligonucleotide
aacacccaugugguguuua

SEQ ID NO: 1923378 - RNA, 19 nt, Artificial Sequence
  Description of Artificial Sequence: Synthetic oligonucleotide
caaacccgcauuccucuga

SEQ ID NO: 1923379 - RNA, 19 nt, Artificial Sequence
  Description of Artificial Sequence: Synthetic oligonucleotide
cugaggaaguaaauacagu

SEQ ID NO: 1923380 - RNA, 19 nt, Artificial Sequence
  Description of Artificial Sequence: Synthetic oligonucleotide
gcagcaugggacuuucuaa

SEQ ID NO: 1923381 - RNA, 19 nt, Artificial Sequence
  Description of Artificial Sequence: Synthetic oligonucleotide
uucacgguagcggcgccuc

SEQ ID NO: 1923382 - RNA, 19 nt, Artificial Sequence
  Description of Artificial Sequence: Synthetic oligonucleotide
auauagcaggcagccacaa

SEQ ID NO: 1923383 - RNA, 19 nt, Artificial Sequence
  Description of Artificial Sequence: Synthetic oligonucleotide
ucaucgggucuugcaauau

SEQ ID NO: 1923384 - RNA, 19 nt, Artificial Sequence
  Description of Artificial Sequence: Synthetic oligonucleotide
gagauauagcaggcagcca

SEQ ID NO: 1923385 - RNA, 19 nt, Artificial Sequence
  Description of Artificial Sequence: Synthetic oligonucleotide
ggacaguauucaauacggc

SEQ ID NO: 1923386 - RNA, 19 nt, Artificial Sequence
  Description of Artificial Sequence: Synthetic oligonucleotide
caucugacacagucaggga

SEQ ID NO: 1923387 - RNA, 19 nt, Artificial Sequence
  Description of Artificial Sequence: Synthetic oligonucleotide
ggaggucuuggcgguaagg

SEQ ID NO: 1923388 - RNA, 19 nt, Artificial Sequence
  Description of Artificial Sequence: Synthetic oligonucleotide
ggaauaucuuauaguccac

SEQ ID NO: 1923389 - RNA, 19 nt, Artificial Sequence
  Description of Artificial Sequence: Synthetic oligonucleotide
aggaccuguucuaggaaau

SEQ ID NO: 1923390 - RNA, 19 nt, Artificial Sequence
  Description of Artificial Sequence: Synthetic oligonucleotide
guauucaauacggcagaua

SEQ ID NO: 1923391 - RNA, 19 nt, Artificial Sequence
  Description of Artificial Sequence: Synthetic oligonucleotide
ccaagagaaccuagggcuc

SEQ ID NO: 1923392 - RNA, 19 nt, Artificial Sequence
  Description of Artificial Sequence: Synthetic oligonucleotide
ugggcccucagagucgauc

SEQ ID NO: 1923393 - RNA, 19 nt, Artificial Sequence
  Description of Artificial Sequence: Synthetic oligonucleotide
agccgcaauuugacauagc

SEQ ID NO: 1923394 - RNA, 19 nt, Artificial Sequence
  Description of Artificial Sequence: Synthetic oligonucleotide
cugccaugaagagguuccc

SEQ ID NO: 1923395 - RNA, 19 nt, Artificial Sequence
  Description of Artificial Sequence: Synthetic oligonucleotide
ggugagaggugcuuugccu

SEQ ID NO: 1923396 - RNA, 19 nt, Artificial Sequence
  Description of Artificial Sequence: Synthetic oligonucleotide
cuucucuucacugggaguu

SEQ ID NO: 1923397 - RNA, 19 nt, Artificial Sequence
  Description of Artificial Sequence: Synthetic oligonucleotide
agaggccagccucccacaa

SEQ ID NO: 1923398 - RNA, 19 nt, Artificial Sequence
  Description of Artificial Sequence: Synthetic oligonucleotide
cacguuucuaagugguccu

SEQ ID NO: 1923399 - RNA, 19 nt, Artificial Sequence
  Description of Artificial Sequence: Synthetic oligonucleotide
cucaucgggucuugcaaua

SEQ ID NO: 1923400 - RNA, 19 nt, Artificial Sequence
  Description of Artificial Sequence: Synthetic oligonucleotide
ucacgguagcggcgccuca

SEQ ID NO: 1923401 - RNA, 19 nt, Artificial Sequence
  Description of Artificial Sequence: Synthetic oligonucleotide
aagggccuugcuguuugua

SEQ ID NO: 1923402 - RNA, 19 nt, Artificial Sequence
  Description of Artificial Sequence: Synthetic oligonucleotide
guaagaggccagccuccca

SEQ ID NO: 1923403 - RNA, 19 nt, Artificial Sequence
  Description of Artificial Sequence: Synthetic oligonucleotide
ggaugggcccucagagucg

SEQ ID NO: 1923404 - RNA, 19 nt, Artificial Sequence
  Description of Artificial Sequence: Synthetic oligonucleotide
ggcaccaaacccgcauucc

SEQ ID NO: 1923405 - RNA, 19 nt, Artificial Sequence
  Description of Artificial Sequence: Synthetic oligonucleotide
gggcccucagagucgauca

SEQ ID NO: 1923406 - RNA, 19 nt, Artificial Sequence
  Description of Artificial Sequence: Synthetic oligonucleotide
cagugcccugugucuaaac

SEQ ID NO: 1923407 - RNA, 19 nt, Artificial Sequence
  Description of Artificial Sequence: Synthetic oligonucleotide
gcgguaagggccuugcugu

SEQ ID NO: 1923408 - RNA, 19 nt, Artificial Sequence
  Description of Artificial Sequence: Synthetic oligonucleotide
agccugccaagaugggaau

SEQ ID NO: 1923409 - RNA, 19 nt, Artificial Sequence
  Description of Artificial Sequence: Synthetic oligonucleotide
ggcagcaugggacuuucua

SEQ ID NO: 1923410 - RNA, 19 nt, Artificial Sequence
  Description of Artificial Sequence: Synthetic oligonucleotide
cauucuguugggacaguau

SEQ ID NO: 1923411 - RNA, 19 nt, Artificial Sequence
  Description of Artificial Sequence: Synthetic oligonucleotide
gucacagagagucccucau

SEQ ID NO: 1923412 - RNA, 19 nt, Artificial Sequence
  Description of Artificial Sequence: Synthetic oligonucleotide
auucacgguagcggcgccu

SEQ ID NO: 1923413 - RNA, 19 nt, Artificial Sequence
  Description of Artificial Sequence: Synthetic oligonucleotide
cuugccgucgcuucucaau

SEQ ID NO: 1923414 - RNA, 19 nt, Artificial Sequence
  Description of Artificial Sequence: Synthetic oligonucleotide
accuugccgucgcuucuca

SEQ ID NO: 1923415 - RNA, 19 nt, Artificial Sequence
  Description of Artificial Sequence: Synthetic oligonucleotide
ccugccugaucuuggaaga

SEQ ID NO: 1923416 - RNA, 19 nt, Artificial Sequence
  Description of Artificial Sequence: Synthetic oligonucleotide
uggcgguaagggccuugcu

SEQ ID NO: 1923417 - RNA, 19 nt, Artificial Sequence
  Description of Artificial Sequence: Synthetic oligonucleotide
uggucuccuuuagccaggu

SEQ ID NO: 1923418 - RNA, 19 nt, Artificial Sequence
  Description of Artificial Sequence: Synthetic oligonucleotide
uccccacacugugucuagc

SEQ ID NO: 1923419 - RNA, 19 nt, Artificial Sequence
  Description of Artificial Sequence: Synthetic oligonucleotide
gcucuguaggaccuguucu

SEQ ID NO: 1923420 - RNA, 19 nt, Artificial Sequence
  Description of Artificial Sequence: Synthetic oligonucleotide
uagcggcgccucacacagg

SEQ ID NO: 1923421 - RNA, 19 nt, Artificial Sequence
  Description of Artificial Sequence: Synthetic oligonucleotide
ggaccuguucuaggaaaug

SEQ ID NO: 1923422 - RNA, 19 nt, Artificial Sequence
  Description of Artificial Sequence: Synthetic oligonucleotide
ucuggacccugugcuuaac

SEQ ID NO: 1923423 - RNA, 19 nt, Artificial Sequence
  Description of Artificial Sequence: Synthetic oligonucleotide
aaccuagggcucagccaca

SEQ ID NO: 1923424 - RNA, 19 nt, Artificial Sequence
  Description of Artificial Sequence: Synthetic oligonucleotide
cuguugggacaguauucaa

SEQ ID NO: 1923425 - RNA, 19 nt, Artificial Sequence
  Description of Artificial Sequence: Synthetic oligonucleotide
ggaaguaaauacaguucua

SEQ ID NO: 1923426 - RNA, 19 nt, Artificial Sequence
  Description of Artificial Sequence: Synthetic oligonucleotide
ggaggagauauagcaggca

SEQ ID NO: 1923427 - RNA, 19 nt, Artificial Sequence
  Description of Artificial Sequence: Synthetic oligonucleotide
cacgguagcggcgccucac

SEQ ID NO: 1923428 - RNA, 19 nt, Artificial Sequence
  Description of Artificial Sequence: Synthetic oligonucleotide
gaucacuggagcccacguu

SEQ ID NO: 1923429 - RNA, 19 nt, Artificial Sequence
  Description of Artificial Sequence: Synthetic oligonucleotide
gccaaagaaaguggacuuc

SEQ ID NO: 1923430 - RNA, 19 nt, Artificial Sequence
  Description of Artificial Sequence: Synthetic oligonucleotide
cuuggcgguaagggccuug

SEQ ID NO: 1923431 - RNA, 19 nt, Artificial Sequence
  Description of Artificial Sequence: Synthetic oligonucleotide
ccauucacccauggcagug

SEQ ID NO: 1923432 - RNA, 19 nt, Artificial Sequence
  Description of Artificial Sequence: Synthetic oligonucleotide
uaccggcaccaaacccgca

SEQ ID NO: 1923433 - RNA, 19 nt, Artificial Sequence
  Description of Artificial Sequence: Synthetic oligonucleotide
cggcgccucacacaggagg

SEQ ID NO: 1923434 - RNA, 19 nt, Artificial Sequence
  Description of Artificial Sequence: Synthetic oligonucleotide
gcaugauggugaagaguug

SEQ ID NO: 1923435 - RNA, 19 nt, Artificial Sequence
  Description of Artificial Sequence: Synthetic oligonucleotide
cugacagaaggaccacgcu

SEQ ID NO: 1923436 - RNA, 19 nt, Artificial Sequence
  Description of Artificial Sequence: Synthetic oligonucleotide
caaacacccaugugguguu

SEQ ID NO: 1923437 - RNA, 19 nt, Artificial Sequence
  Description of Artificial Sequence: Synthetic oligonucleotide
ggcccagccgcaauuugac

SEQ ID NO: 1923438 - RNA, 19 nt, Artificial Sequence
  Description of Artificial Sequence: Synthetic oligonucleotide
acguuucuaagugguccuu

SEQ ID NO: 1923439 - RNA, 19 nt, Artificial Sequence
  Description of Artificial Sequence: Synthetic oligonucleotide
agcccucauucugcaccgg

SEQ ID NO: 1923440 - RNA, 19 nt, Artificial Sequence
  Description of Artificial Sequence: Synthetic oligonucleotide
ccaaaaugcuccagggacu

SEQ ID NO: 1923441 - RNA, 19 nt, Artificial Sequence
  Description of Artificial Sequence: Synthetic oligonucleotide
aaucugccaugaagagguu

SEQ ID NO: 1923442 - RNA, 19 nt, Artificial Sequence
  Description of Artificial Sequence: Synthetic oligonucleotide
cuucaaucucaggcacuga

SEQ ID NO: 1923443 - RNA, 19 nt, Artificial Sequence
  Description of Artificial Sequence: Synthetic oligonucleotide
agcauucuguugggacagu

SEQ ID NO: 1923444 - RNA, 19 nt, Artificial Sequence
  Description of Artificial Sequence: Synthetic oligonucleotide
gcccugugucuaaacaaac

SEQ ID NO: 1923445 - RNA, 19 nt, Artificial Sequence
  Description of Artificial Sequence: Synthetic oligonucleotide
cuguccacacaaggagaca

SEQ ID NO: 1923446 - RNA, 19 nt, Artificial Sequence
  Description of Artificial Sequence: Synthetic oligonucleotide
ccgucgcuucucaaugaac

SEQ ID NO: 1923447 - RNA, 19 nt, Artificial Sequence
  Description of Artificial Sequence: Synthetic oligonucleotide
cgucgcuucucaaugaacu

SEQ ID NO: 1923448 - RNA, 19 nt, Artificial Sequence
  Description of Artificial Sequence: Synthetic oligonucleotide
cacccauggcagugcccug

SEQ ID NO: 1923449 - RNA, 19 nt, Artificial Sequence
  Description of Artificial Sequence: Synthetic oligonucleotide
ccaaacccgcauuccucug

SEQ ID NO: 1923450 - RNA, 19 nt, Artificial Sequence
  Description of Artificial Sequence: Synthetic oligonucleotide
gugcuuugccucucuuccu

SEQ ID NO: 1923451 - RNA, 19 nt, Artificial Sequence
  Description of Artificial Sequence: Synthetic oligonucleotide
cuccuuuagccaggugaga

SEQ ID NO: 1923452 - RNA, 19 nt, Artificial Sequence
  Description of Artificial Sequence: Synthetic oligonucleotide
gcagccugccaagauggga

SEQ ID NO: 1923453 - RNA, 19 nt, Artificial Sequence
  Description of Artificial Sequence: Synthetic oligonucleotide
gucagggagccucggcccu

SEQ ID NO: 1923454 - RNA, 19 nt, Artificial Sequence
  Description of Artificial Sequence: Synthetic oligonucleotide
cuccugccugaucuuggaa

SEQ ID NO: 1923455 - RNA, 19 nt, Artificial Sequence
  Description of Artificial Sequence: Synthetic oligonucleotide
acccugugcuuaacuuaca

SEQ ID NO: 1923456 - RNA, 19 nt, Artificial Sequence
  Description of Artificial Sequence: Synthetic oligonucleotide
gucuuggcgguaagggccu

SEQ ID NO: 1923457 - RNA, 19 nt, Artificial Sequence
  Description of Artificial Sequence: Synthetic oligonucleotide
ggcccucagagucgaucac

SEQ ID NO: 1923458 - RNA, 19 nt, Artificial Sequence
  Description of Artificial Sequence: Synthetic oligonucleotide
gggagccucggcccuggac

SEQ ID NO: 1923459 - RNA, 19 nt, Artificial Sequence
  Description of Artificial Sequence: Synthetic oligonucleotide
gccgucgcuucucaaugaa

SEQ ID NO: 1923460 - RNA, 19 nt, Artificial Sequence
  Description of Artificial Sequence: Synthetic oligonucleotide
cucagcuccugaggaagua

SEQ ID NO: 1923461 - RNA, 19 nt, Artificial Sequence
  Description of Artificial Sequence: Synthetic oligonucleotide
caggaggucuuggcgguaa

SEQ ID NO: 1923462 - RNA, 19 nt, Artificial Sequence
  Description of Artificial Sequence: Synthetic oligonucleotide
gucccucaucgggucuugc

SEQ ID NO: 1923463 - RNA, 19 nt, Artificial Sequence
  Description of Artificial Sequence: Synthetic oligonucleotide
cccucaucgggucuugcaa

SEQ ID NO: 1923464 - RNA, 19 nt, Artificial Sequence
  Description of Artificial Sequence: Synthetic oligonucleotide
ggaccacgcucuguaggac

SEQ ID NO: 1923465 - RNA, 19 nt, Artificial Sequence
  Description of Artificial Sequence: Synthetic oligonucleotide
gggcccagccgcaauuuga

SEQ ID NO: 1923466 - RNA, 19 nt, Artificial Sequence
  Description of Artificial Sequence: Synthetic oligonucleotide
cccagccgcaauuugacau

SEQ ID NO: 1923467 - RNA, 19 nt, Artificial Sequence
  Description of Artificial Sequence: Synthetic oligonucleotide
cugccugaucuuggaagaa

SEQ ID NO: 1923468 - RNA, 19 nt, Artificial Sequence
  Description of Artificial Sequence: Synthetic oligonucleotide
ggcagugcccugugucuaa

SEQ ID NO: 1923469 - RNA, 19 nt, Artificial Sequence
  Description of Artificial Sequence: Synthetic oligonucleotide
gucgaucacuggagcccac

SEQ ID NO: 1923470 - RNA, 19 nt, Artificial Sequence
  Description of Artificial Sequence: Synthetic oligonucleotide
cugccaagaugggaauaua

SEQ ID NO: 1923471 - RNA, 19 nt, Artificial Sequence
  Description of Artificial Sequence: Synthetic oligonucleotide
guagaccuugccgucgcuu

SEQ ID NO: 1923472 - RNA, 19 nt, Artificial Sequence
  Description of Artificial Sequence: Synthetic oligonucleotide
guggacuucccaggaaguu

SEQ ID NO: 1923473 - RNA, 19 nt, Artificial Sequence
  Description of Artificial Sequence: Synthetic oligonucleotide
gaggugcuuugccucucuu

SEQ ID NO: 1923474 - RNA, 19 nt, Artificial Sequence
  Description of Artificial Sequence: Synthetic oligonucleotide
gcccacguuucuaaguggu

SEQ ID NO: 1923475 - RNA, 19 nt, Artificial Sequence
  Description of Artificial Sequence: Synthetic oligonucleotide
ccgcaauuugacauagcau

SEQ ID NO: 1923476 - RNA, 19 nt, Artificial Sequence
  Description of Artificial Sequence: Synthetic oligonucleotide
cuguuaagcuggucuccuu

SEQ ID NO: 1923477 - RNA, 19 nt, Artificial Sequence
  Description of Artificial Sequence: Synthetic oligonucleotide
gcccagccgcaauuugaca

SEQ ID NO: 1923478 - RNA, 19 nt, Artificial Sequence
  Description of Artificial Sequence: Synthetic oligonucleotide
cggcagauaaaucugccau

SEQ ID NO: 1923479 - RNA, 19 nt, Artificial Sequence
  Description of Artificial Sequence: Synthetic oligonucleotide
gagucccucaucgggucuu

SEQ ID NO: 1923480 - RNA, 19 nt, Artificial Sequence
  Description of Artificial Sequence: Synthetic oligonucleotide
cagaaggaccacgcucugu

SEQ ID NO: 1923481 - RNA, 19 nt, Artificial Sequence
  Description of Artificial Sequence: Synthetic oligonucleotide
cggcaccaaacccgcauuc

SEQ ID NO: 1923482 - RNA, 19 nt, Artificial Sequence
  Description of Artificial Sequence: Synthetic oligonucleotide
aggcugggucacagagagu

SEQ ID NO: 1923483 - RNA, 19 nt, Artificial Sequence
  Description of Artificial Sequence: Synthetic oligonucleotide
cauuccucugaagcugcuu

SEQ ID NO: 1923484 - RNA, 19 nt, Artificial Sequence
  Description of Artificial Sequence: Synthetic oligonucleotide
ccugccaagaugggaauau

SEQ ID NO: 1923485 - RNA, 19 nt, Artificial Sequence
  Description of Artificial Sequence: Synthetic oligonucleotide
ccucaucgggucuugcaau

SEQ ID NO: 1923486 - RNA, 19 nt, Artificial Sequence
  Description of Artificial Sequence: Synthetic oligonucleotide
acgcucuguaggaccuguu

SEQ ID NO: 1923487 - RNA, 19 nt, Artificial Sequence
  Description of Artificial Sequence: Synthetic oligonucleotide
ccccacacugugucuagcu

SEQ ID NO: 1923488 - RNA, 19 nt, Artificial Sequence
  Description of Artificial Sequence: Synthetic oligonucleotide
gguaagggccuugcuguuu

SEQ ID NO: 1923489 - RNA, 19 nt, Artificial Sequence
  Description of Artificial Sequence: Synthetic oligonucleotide
ccucagccacacgaauuca

SEQ ID NO: 1923490 - RNA, 19 nt, Artificial Sequence
  Description of Artificial Sequence: Synthetic oligonucleotide
gccuugcuguuuguaugaa

SEQ ID NO: 1923491 - RNA, 19 nt, Artificial Sequence
  Description of Artificial Sequence: Synthetic oligonucleotide
caccggggucugacacgca

SEQ ID NO: 1923492 - RNA, 19 nt, Artificial Sequence
  Description of Artificial Sequence: Synthetic oligonucleotide
gcagugcccugugucuaaa

SEQ ID NO: 1923493 - RNA, 19 nt, Artificial Sequence
  Description of Artificial Sequence: Synthetic oligonucleotide
gcgccucacacaggagguc

SEQ ID NO: 1923494 - RNA, 19 nt, Artificial Sequence
  Description of Artificial Sequence: Synthetic oligonucleotide
gccugccaagaugggaaua

SEQ ID NO: 1923495 - RNA, 19 nt, Artificial Sequence
  Description of Artificial Sequence: Synthetic oligonucleotide
gcggcgccucacacaggag

SEQ ID NO: 1923496 - RNA, 19 nt, Artificial Sequence
  Description of Artificial Sequence: Synthetic oligonucleotide
cgaucacuggagcccacgu

SEQ ID NO: 1923497 - RNA, 19 nt, Artificial Sequence
  Description of Artificial Sequence: Synthetic oligonucleotide
ccggggucugacacgcacu

SEQ ID NO: 1923498 - RNA, 19 nt, Artificial Sequence
  Description of Artificial Sequence: Synthetic oligonucleotide
ggggucugacacgcacugu

SEQ ID NO: 1923499 - RNA, 19 nt, Artificial Sequence
  Description of Artificial Sequence: Synthetic oligonucleotide
augggcccucagagucgau

SEQ ID NO: 1923500 - RNA, 19 nt, Artificial Sequence
  Description of Artificial Sequence: Synthetic oligonucleotide
cgccucacacaggaggucu

SEQ ID NO: 1923501 - RNA, 19 nt, Artificial Sequence
  Description of Artificial Sequence: Synthetic oligonucleotide
ccuagggcucagccacagu

SEQ ID NO: 1923502 - RNA, 19 nt, Artificial Sequence
  Description of Artificial Sequence: Synthetic oligonucleotide
ccggcaccaaacccgcauu

SEQ ID NO: 1923503 - RNA, 19 nt, Artificial Sequence
  Description of Artificial Sequence: Synthetic oligonucleotide
cgguaagggccuugcuguu

SEQ ID NO: 1923504 - RNA, 19 nt, Artificial Sequence
  Description of Artificial Sequence: Synthetic oligonucleotide
aauugauccuuuuaggagc

SEQ ID NO: 1923505 - RNA, 19 nt, Artificial Sequence
  Description of Artificial Sequence: Synthetic oligonucleotide
ucuauuauuucuuacaaag

SEQ ID NO: 1923506 - RNA, 19 nt, Artificial Sequence
  Description of Artificial Sequence: Synthetic oligonucleotide
aguuugguauaauugaucc

SEQ ID NO: 1923507 - RNA, 19 nt, Artificial Sequence
  Description of Artificial Sequence: Synthetic oligonucleotide
uaauaaguguaauacacgg

SEQ ID NO: 1923508 - RNA, 19 nt, Artificial Sequence
  Description of Artificial Sequence: Synthetic oligonucleotide
auaugggcaauccauaacc

SEQ ID NO: 1923509 - RNA, 19 nt, Artificial Sequence
  Description of Artificial Sequence: Synthetic oligonucleotide
gaugcuuuaacucacagca

SEQ ID NO: 1923510 - RNA, 19 nt, Artificial Sequence
  Description of Artificial Sequence: Synthetic oligonucleotide
aagcuaauaaguguaauac

SEQ ID NO: 1923511 - RNA, 19 nt, Artificial Sequence
  Description of Artificial Sequence: Synthetic oligonucleotide
uauaauugauccuuuuagg

SEQ ID NO: 1923512 - RNA, 19 nt, Artificial Sequence
  Description of Artificial Sequence: Synthetic oligonucleotide
uauaauguggcuccaaaca

SEQ ID NO: 1923513 - RNA, 19 nt, Artificial Sequence
  Description of Artificial Sequence: Synthetic oligonucleotide
agagccuuaauauagauaa

SEQ ID NO: 1923514 - RNA, 19 nt, Artificial Sequence
  Description of Artificial Sequence: Synthetic oligonucleotide
auagauaacagcgucaguc

SEQ ID NO: 1923515 - RNA, 19 nt, Artificial Sequence
  Description of Artificial Sequence: Synthetic oligonucleotide
uuuaaagcuaauaagugua

SEQ ID NO: 1923516 - RNA, 19 nt, Artificial Sequence
  Description of Artificial Sequence: Synthetic oligonucleotide
uaaaugucacucaugaaca

SEQ ID NO: 1923517 - RNA, 19 nt, Artificial Sequence
  Description of Artificial Sequence: Synthetic oligonucleotide
uccucaguuaggaacagcg

SEQ ID NO: 1923518 - RNA, 19 nt, Artificial Sequence
  Description of Artificial Sequence: Synthetic oligonucleotide
uaauugauccuuuuaggag

SEQ ID NO: 1923519 - RNA, 19 nt, Artificial Sequence
  Description of Artificial Sequence: Synthetic oligonucleotide
ucagaauaaaguuugguau

SEQ ID NO: 1923520 - RNA, 19 nt, Artificial Sequence
  Description of Artificial Sequence: Synthetic oligonucleotide
agauaaauccuaucaagag

SEQ ID NO: 1923521 - RNA, 19 nt, Artificial Sequence
  Description of Artificial Sequence: Synthetic oligonucleotide
uugugaaaaucacaaauga

SEQ ID NO: 1923522 - RNA, 19 nt, Artificial Sequence
  Description of Artificial Sequence: Synthetic oligonucleotide
ugacagagccuuaauauag

SEQ ID NO: 1923523 - RNA, 19 nt, Artificial Sequence
  Description of Artificial Sequence: Synthetic oligonucleotide
uguaauacacggaauaaau

SEQ ID NO: 1923524 - RNA, 19 nt, Artificial Sequence
  Description of Artificial Sequence: Synthetic oligonucleotide
aauuaaccaaacauuauca

SEQ ID NO: 1923525 - RNA, 19 nt, Artificial Sequence
  Description of Artificial Sequence: Synthetic oligonucleotide
cuaauaaguguaauacacg

SEQ ID NO: 1923526 - RNA, 19 nt, Artificial Sequence
  Description of Artificial Sequence: Synthetic oligonucleotide
uuaauauagauaacagcgu

SEQ ID NO: 1923527 - RNA, 19 nt, Artificial Sequence
  Description of Artificial Sequence: Synthetic oligonucleotide
auaauugauccuuuuagga

SEQ ID NO: 1923528 - RNA, 19 nt, Artificial Sequence
  Description of Artificial Sequence: Synthetic oligonucleotide
uaccagauaaauccuauca

SEQ ID NO: 1923529 - RNA, 19 nt, Artificial Sequence
  Description of Artificial Sequence: Synthetic oligonucleotide
uaauauagauaacagcguc

SEQ ID NO: 1923530 - RNA, 19 nt, Artificial Sequence
  Description of Artificial Sequence: Synthetic oligonucleotide
auaaguguaauacacggaa

SEQ ID NO: 1923531 - RNA, 19 nt, Artificial Sequence
  Description of Artificial Sequence: Synthetic oligonucleotide
auaaauccuaucaagagug

SEQ ID NO: 1923532 - RNA, 19 nt, Artificial Sequence
  Description of Artificial Sequence: Synthetic oligonucleotide
uugguuauaauguggcucc

SEQ ID NO: 1923533 - RNA, 19 nt, Artificial Sequence
  Description of Artificial Sequence: Synthetic oligonucleotide
aauacacggaauaaauguc

SEQ ID NO: 1923534 - RNA, 19 nt, Artificial Sequence
  Description of Artificial Sequence: Synthetic oligonucleotide
auagagaugggaugguaac

SEQ ID NO: 1923535 - RNA, 19 nt, Artificial Sequence
  Description of Artificial Sequence: Synthetic oligonucleotide
caccaugugauagagaugg

SEQ ID NO: 1923536 - RNA, 19 nt, Artificial Sequence
  Description of Artificial Sequence: Synthetic oligonucleotide
aaugcuuccaggcagcuuu

SEQ ID NO: 1923537 - RNA, 19 nt, Artificial Sequence
  Description of Artificial Sequence: Synthetic oligonucleotide
uuuaggagcuuuuagcaac

SEQ ID NO: 1923538 - RNA, 19 nt, Artificial Sequence
  Description of Artificial Sequence: Synthetic oligonucleotide
auuaaccaaacauuaucag

SEQ ID NO: 1923539 - RNA, 19 nt, Artificial Sequence
  Description of Artificial Sequence: Synthetic oligonucleotide
ugaacauagucuauuauuu

SEQ ID NO: 1923540 - RNA, 19 nt, Artificial Sequence
  Description of Artificial Sequence: Synthetic oligonucleotide
aggagaguuaacauaauac

SEQ ID NO: 1923541 - RNA, 19 nt, Artificial Sequence
  Description of Artificial Sequence: Synthetic oligonucleotide
auaaaguuugguauaauug

SEQ ID NO: 1923542 - RNA, 19 nt, Artificial Sequence
  Description of Artificial Sequence: Synthetic oligonucleotide
ugugaaaaucacaaaugac

SEQ ID NO: 1923543 - RNA, 19 nt, Artificial Sequence
  Description of Artificial Sequence: Synthetic oligonucleotide
agugagaugcuuuaacuca

SEQ ID NO: 1923544 - RNA, 19 nt, Artificial Sequence
  Description of Artificial Sequence: Synthetic oligonucleotide
uuagcaacaugaauuugug

SEQ ID NO: 1923545 - RNA, 19 nt, Artificial Sequence
  Description of Artificial Sequence: Synthetic oligonucleotide
cucaguuaggaacagcggg

SEQ ID NO: 1923546 - RNA, 19 nt, Artificial Sequence
  Description of Artificial Sequence: Synthetic oligonucleotide
uuaucagaauaaaguuugg

SEQ ID NO: 1923547 - RNA, 19 nt, Artificial Sequence
  Description of Artificial Sequence: Synthetic oligonucleotide
aaguguaauacacggaaua

SEQ ID NO: 1923548 - RNA, 19 nt, Artificial Sequence
  Description of Artificial Sequence: Synthetic oligonucleotide
cacgggaugucucaaaacg

SEQ ID NO: 1923549 - RNA, 19 nt, Artificial Sequence
  Description of Artificial Sequence: Synthetic oligonucleotide
cauauuugguuauaaugug

SEQ ID NO: 1923550 - RNA, 19 nt, Artificial Sequence
  Description of Artificial Sequence: Synthetic oligonucleotide
cauuuauugacaguuguac

SEQ ID NO: 1923551 - RNA, 19 nt, Artificial Sequence
  Description of Artificial Sequence: Synthetic oligonucleotide
aaucacaaagccgccuagc

SEQ ID NO: 1923552 - RNA, 19 nt, Artificial Sequence
  Description of Artificial Sequence: Synthetic oligonucleotide
ugugcaucuaagagcuucg

SEQ ID NO: 1923553 - RNA, 19 nt, Artificial Sequence
  Description of Artificial Sequence: Synthetic oligonucleotide
auauagauaacagcgucag

SEQ ID NO: 1923554 - RNA, 19 nt, Artificial Sequence
  Description of Artificial Sequence: Synthetic oligonucleotide
aguacauuuauugacaguu

SEQ ID NO: 1923555 - RNA, 19 nt, Artificial Sequence
  Description of Artificial Sequence: Synthetic oligonucleotide
ugucucaaaacgaggccgg

SEQ ID NO: 1923556 - RNA, 19 nt, Artificial Sequence
  Description of Artificial Sequence: Synthetic oligonucleotide
ucgcauuuaguucuucaag

SEQ ID NO: 1923557 - RNA, 19 nt, Artificial Sequence
  Description of Artificial Sequence: Synthetic oligonucleotide
uuugguauaauugauccuu

SEQ ID NO: 1923558 - RNA, 19 nt, Artificial Sequence
  Description of Artificial Sequence: Synthetic oligonucleotide
uaacauaaaccacuuguau

SEQ ID NO: 1923559 - RNA, 19 nt, Artificial Sequence
  Description of Artificial Sequence: Synthetic oligonucleotide
aauauagauaacagcguca

SEQ ID NO: 1923560 - RNA, 19 nt, Artificial Sequence
  Description of Artificial Sequence: Synthetic oligonucleotide
uagauaacagcgucagucc

SEQ ID NO: 1923561 - RNA, 19 nt, Artificial Sequence
  Description of Artificial Sequence: Synthetic oligonucleotide
aaguuugguauaauugauc

SEQ ID NO: 1923562 - RNA, 19 nt, Artificial Sequence
  Description of Artificial Sequence: Synthetic oligonucleotide
ccuaucaagagugagaugc

SEQ ID NO: 1923563 - RNA, 19 nt, Artificial Sequence
  Description of Artificial Sequence: Synthetic oligonucleotide
uuuauuauacacggggagu

SEQ ID NO: 1923564 - RNA, 19 nt, Artificial Sequence
  Description of Artificial Sequence: Synthetic oligonucleotide
uuugguuauaauguggcuc

SEQ ID NO: 1923565 - RNA, 19 nt, Artificial Sequence
  Description of Artificial Sequence: Synthetic oligonucleotide
uauuuuguaccagauaaau

SEQ ID NO: 1923566 - RNA, 19 nt, Artificial Sequence
  Description of Artificial Sequence: Synthetic oligonucleotide
aaauccuaucaagagugag

SEQ ID NO: 1923567 - RNA, 19 nt, Artificial Sequence
  Description of Artificial Sequence: Synthetic oligonucleotide
cuuuuaggagcuuuuagca

SEQ ID NO: 1923568 - RNA, 19 nt, Artificial Sequence
  Description of Artificial Sequence: Synthetic oligonucleotide
aaucgcauuuaguucuuca

SEQ ID NO: 1923569 - RNA, 19 nt, Artificial Sequence
  Description of Artificial Sequence: Synthetic oligonucleotide
uuuaacucacagcacuuuc

SEQ ID NO: 1923570 - RNA, 19 nt, Artificial Sequence
  Description of Artificial Sequence: Synthetic oligonucleotide
augaacauagucuauuauu

SEQ ID NO: 1923571 - RNA, 19 nt, Artificial Sequence
  Description of Artificial Sequence: Synthetic oligonucleotide
uccugaauugaccacccug

SEQ ID NO: 1923572 - RNA, 19 nt, Artificial Sequence
  Description of Artificial Sequence: Synthetic oligonucleotide
ugucaaucuuucucagugg

SEQ ID NO: 1923573 - RNA, 19 nt, Artificial Sequence
  Description of Artificial Sequence: Synthetic oligonucleotide
gaugucucaaaacgaggcc

SEQ ID NO: 1923574 - RNA, 19 nt, Artificial Sequence
  Description of Artificial Sequence: Synthetic oligonucleotide
ucaguuaggaacagcgggu

SEQ ID NO: 1923575 - RNA, 19 nt, Artificial Sequence
  Description of Artificial Sequence: Synthetic oligonucleotide
uucaucauugcaagaaaau

SEQ ID NO: 1923576 - RNA, 19 nt, Artificial Sequence
  Description of Artificial Sequence: Synthetic oligonucleotide
caaccuacaaguuucuauc

SEQ ID NO: 1923577 - RNA, 19 nt, Artificial Sequence
  Description of Artificial Sequence: Synthetic oligonucleotide
ucaaccuacaaguuucuau

SEQ ID NO: 1923578 - RNA, 19 nt, Artificial Sequence
  Description of Artificial Sequence: Synthetic oligonucleotide
uaagagcuucggaaugugg

SEQ ID NO: 1923579 - RNA, 19 nt, Artificial Sequence
  Description of Artificial Sequence: Synthetic oligonucleotide
gauaaauccuaucaagagu

SEQ ID NO: 1923580 - RNA, 19 nt, Artificial Sequence
  Description of Artificial Sequence: Synthetic oligonucleotide
ucuaguucaggagaguuaa

SEQ ID NO: 1923581 - RNA, 19 nt, Artificial Sequence
  Description of Artificial Sequence: Synthetic oligonucleotide
aggaccugaguuucaggcc

SEQ ID NO: 1923582 - RNA, 19 nt, Artificial Sequence
  Description of Artificial Sequence: Synthetic oligonucleotide
aaacuuagcaaaaccacau

SEQ ID NO: 1923583 - RNA, 19 nt, Artificial Sequence
  Description of Artificial Sequence: Synthetic oligonucleotide
augucucaaaacgaggccg

SEQ ID NO: 1923584 - RNA, 19 nt, Artificial Sequence
  Description of Artificial Sequence: Synthetic oligonucleotide
uuauuauacacggggaguc

SEQ ID NO: 1923585 - RNA, 19 nt, Artificial Sequence
  Description of Artificial Sequence: Synthetic oligonucleotide
ugucuuucggcucucugcu

SEQ ID NO: 1923586 - RNA, 19 nt, Artificial Sequence
  Description of Artificial Sequence: Synthetic oligonucleotide
acagcgucagucccguagc

SEQ ID NO: 1923587 - RNA, 19 nt, Artificial Sequence
  Description of Artificial Sequence: Synthetic oligonucleotide
aaccuacaaguuucuauca

SEQ ID NO: 1923588 - RNA, 19 nt, Artificial Sequence
  Description of Artificial Sequence: Synthetic oligonucleotide
aauccuaucaagagugaga

SEQ ID NO: 1923589 - RNA, 19 nt, Artificial Sequence
  Description of Artificial Sequence: Synthetic oligonucleotide
aauaaguguaauacacgga

SEQ ID NO: 1923590 - RNA, 19 nt, Artificial Sequence
  Description of Artificial Sequence: Synthetic oligonucleotide
uguaccagauaaauccuau

SEQ ID NO: 1923591 - RNA, 19 nt, Artificial Sequence
  Description of Artificial Sequence: Synthetic oligonucleotide
gcuaauaaguguaauacac

SEQ ID NO: 1923592 - RNA, 19 nt, Artificial Sequence
  Description of Artificial Sequence: Synthetic oligonucleotide
cauagaggcgugauauggg

SEQ ID NO: 1923593 - RNA, 19 nt, Artificial Sequence
  Description of Artificial Sequence: Synthetic oligonucleotide
agcuaauaaguguaauaca

SEQ ID NO: 1923594 - RNA, 19 nt, Artificial Sequence
  Description of Artificial Sequence: Synthetic oligonucleotide
cacggaauaaaugucacuc

SEQ ID NO: 1923595 - RNA, 19 nt, Artificial Sequence
  Description of Artificial Sequence: Synthetic oligonucleotide
uaguucaggagaguuaaca

SEQ ID NO: 1923596 - RNA, 19 nt, Artificial Sequence
  Description of Artificial Sequence: Synthetic oligonucleotide
ggagaguuaacauaauaca

SEQ ID NO: 1923597 - RNA, 19 nt, Artificial Sequence
  Description of Artificial Sequence: Synthetic oligonucleotide
aaagccgccuagcauuuca

SEQ ID NO: 1923598 - RNA, 19 nt, Artificial Sequence
  Description of Artificial Sequence: Synthetic oligonucleotide
uuuuaggagcuuuuagcaa

SEQ ID NO: 1923599 - RNA, 19 nt, Artificial Sequence
  Description of Artificial Sequence: Synthetic oligonucleotide
uguugacagagccuuaaua

SEQ ID NO: 1923600 - RNA, 19 nt, Artificial Sequence
  Description of Artificial Sequence: Synthetic oligonucleotide
cagauaaauccuaucaaga

SEQ ID NO: 1923601 - RNA, 19 nt, Artificial Sequence
  Description of Artificial Sequence: Synthetic oligonucleotide
gauaugggcaauccauaac

SEQ ID NO: 1923602 - RNA, 19 nt, Artificial Sequence
  Description of Artificial Sequence: Synthetic oligonucleotide
uacacggaauaaaugucac

SEQ ID NO: 1923603 - RNA, 19 nt, Artificial Sequence
  Description of Artificial Sequence: Synthetic oligonucleotide
gaaguacugugcauagagg

SEQ ID NO: 1923604 - RNA, 19 nt, Artificial Sequence
  Description of Artificial Sequence: Synthetic oligonucleotide
aaguucuaguucaggagag

SEQ ID NO: 1923605 - RNA, 19 nt, Artificial Sequence
  Description of Artificial Sequence: Synthetic oligonucleotide
uuaggagcuuuuagcaaca

SEQ ID NO: 1923606 - RNA, 19 nt, Artificial Sequence
  Description of Artificial Sequence: Synthetic oligonucleotide
uacaaaucacaaagccgcc

SEQ ID NO: 1923607 - RNA, 19 nt, Artificial Sequence
  Description of Artificial Sequence: Synthetic oligonucleotide
ugaggguccugaauugacc

SEQ ID NO: 1923608 - RNA, 19 nt, Artificial Sequence
  Description of Artificial Sequence: Synthetic oligonucleotide
uuccaggugccccaugugc

SEQ ID NO: 1923609 - RNA, 19 nt, Artificial Sequence
  Description of Artificial Sequence: Synthetic oligonucleotide
aacaugaauuugugaaaau

SEQ ID NO: 1923610 - RNA, 19 nt, Artificial Sequence
  Description of Artificial Sequence: Synthetic oligonucleotide
aaccacauuuuggauuuuc

SEQ ID NO: 1923611 - RNA, 19 nt, Artificial Sequence
  Description of Artificial Sequence: Synthetic oligonucleotide
caaacuuagcaaaaccaca

SEQ ID NO: 1923612 - RNA, 19 nt, Artificial Sequence
  Description of Artificial Sequence: Synthetic oligonucleotide
gguaacauaaaccacuugu

SEQ ID NO: 1923613 - RNA, 19 nt, Artificial Sequence
  Description of Artificial Sequence: Synthetic oligonucleotide
gagaugcuuuaacucacag

SEQ ID NO: 1923614 - RNA, 19 nt, Artificial Sequence
  Description of Artificial Sequence: Synthetic oligonucleotide
uaucagaauaaaguuuggu

SEQ ID NO: 1923615 - RNA, 19 nt, Artificial Sequence
  Description of Artificial Sequence: Synthetic oligonucleotide
uggaccaacaggaccugag

SEQ ID NO: 1923616 - RNA, 19 nt, Artificial Sequence
  Description of Artificial Sequence: Synthetic oligonucleotide
ugauaugggcaauccauaa

SEQ ID NO: 1923617 - RNA, 19 nt, Artificial Sequence
  Description of Artificial Sequence: Synthetic oligonucleotide
gugaaaucgcauuuaguuc

SEQ ID NO: 1923618 - RNA, 19 nt, Artificial Sequence
  Description of Artificial Sequence: Synthetic oligonucleotide
gagaguuaacauaauacaa

SEQ ID NO: 1923619 - RNA, 19 nt, Artificial Sequence
  Description of Artificial Sequence: Synthetic oligonucleotide
ccuuuuaggagcuuuuagc

SEQ ID NO: 1923620 - RNA, 19 nt, Artificial Sequence
  Description of Artificial Sequence: Synthetic oligonucleotide
aaaugucacucaugaacau

SEQ ID NO: 1923621 - RNA, 19 nt, Artificial Sequence
  Description of Artificial Sequence: Synthetic oligonucleotide
ucaugaacauagucuauua

SEQ ID NO: 1923622 - RNA, 19 nt, Artificial Sequence
  Description of Artificial Sequence: Synthetic oligonucleotide
auuauacacggggagucuc

SEQ ID NO: 1923623 - RNA, 19 nt, Artificial Sequence
  Description of Artificial Sequence: Synthetic oligonucleotide
cagguaaguagccaagcac

SEQ ID NO: 1923624 - RNA, 19 nt, Artificial Sequence
  Description of Artificial Sequence: Synthetic oligonucleotide
aaccaaacauuaucagaau

SEQ ID NO: 1923625 - RNA, 19 nt, Artificial Sequence
  Description of Artificial Sequence: Synthetic oligonucleotide
caaguucuaguucaggaga

SEQ ID NO: 1923626 - RNA, 19 nt, Artificial Sequence
  Description of Artificial Sequence: Synthetic oligonucleotide
uugacagagccuuaauaua

SEQ ID NO: 1923627 - RNA, 19 nt, Artificial Sequence
  Description of Artificial Sequence: Synthetic oligonucleotide
ugcaucuaagagcuucgga

SEQ ID NO: 1923628 - RNA, 19 nt, Artificial Sequence
  Description of Artificial Sequence: Synthetic oligonucleotide
uguggucaugucuuucggc

SEQ ID NO: 1923629 - RNA, 19 nt, Artificial Sequence
  Description of Artificial Sequence: Synthetic oligonucleotide
auuugguuauaauguggcu

SEQ ID NO: 1923630 - RNA, 19 nt, Artificial Sequence
  Description of Artificial Sequence: Synthetic oligonucleotide
guauugucuguccugguga

SEQ ID NO: 1923631 - RNA, 19 nt, Artificial Sequence
  Description of Artificial Sequence: Synthetic oligonucleotide
guugacagagccuuaauau

SEQ ID NO: 1923632 - RNA, 19 nt, Artificial Sequence
  Description of Artificial Sequence: Synthetic oligonucleotide
acggggagucucucgaugg

SEQ ID NO: 1923633 - RNA, 19 nt, Artificial Sequence
  Description of Artificial Sequence: Synthetic oligonucleotide
ucuaagagcuucggaaugu

SEQ ID NO: 1923634 - RNA, 19 nt, Artificial Sequence
  Description of Artificial Sequence: Synthetic oligonucleotide
ugccccaugugcaucuaag

SEQ ID NO: 1923635 - RNA, 19 nt, Artificial Sequence
  Description of Artificial Sequence: Synthetic oligonucleotide
ggaguacagcuuuaggucc

SEQ ID NO: 1923636 - RNA, 19 nt, Artificial Sequence
  Description of Artificial Sequence: Synthetic oligonucleotide
caaggaguacagcuuuagg

SEQ ID NO: 1923637 - RNA, 19 nt, Artificial Sequence
  Description of Artificial Sequence: Synthetic oligonucleotide
ucucacaugaggguccuga

SEQ ID NO: 1923638 - RNA, 19 nt, Artificial Sequence
  Description of Artificial Sequence: Synthetic oligonucleotide
aacuuagcaaaaccacauu

SEQ ID NO: 1923639 - RNA, 19 nt, Artificial Sequence
  Description of Artificial Sequence: Synthetic oligonucleotide
agucccguagcccuccaag

SEQ ID NO: 1923640 - RNA, 19 nt, Artificial Sequence
  Description of Artificial Sequence: Synthetic oligonucleotide
cuggugaaaucgcauuuag

SEQ ID NO: 1923641 - RNA, 19 nt, Artificial Sequence
  Description of Artificial Sequence: Synthetic oligonucleotide
ugagaugcuuuaacucaca

SEQ ID NO: 1923642 - RNA, 19 nt, Artificial Sequence
  Description of Artificial Sequence: Synthetic oligonucleotide
accaaacauuaucagaaua

SEQ ID NO: 1923643 - RNA, 19 nt, Artificial Sequence
  Description of Artificial Sequence: Synthetic oligonucleotide
ucgucagcuucaugguugg

SEQ ID NO: 1923644 - RNA, 19 nt, Artificial Sequence
  Description of Artificial Sequence: Synthetic oligonucleotide
agcaccaauuaaccaaaca

SEQ ID NO: 1923645 - RNA, 19 nt, Artificial Sequence
  Description of Artificial Sequence: Synthetic oligonucleotide
ucaaucuuucucaguggaa

SEQ ID NO: 1923646 - RNA, 19 nt, Artificial Sequence
  Description of Artificial Sequence: Synthetic oligonucleotide
ggcagcuuuauuauacacg

SEQ ID NO: 1923647 - RNA, 19 nt, Artificial Sequence
  Description of Artificial Sequence: Synthetic oligonucleotide
gucaaucuuucucagugga

SEQ ID NO: 1923648 - RNA, 19 nt, Artificial Sequence
  Description of Artificial Sequence: Synthetic oligonucleotide
auccuaucaagagugagau

SEQ ID NO: 1923649 - RNA, 19 nt, Artificial Sequence
  Description of Artificial Sequence: Synthetic oligonucleotide
gaggguccugaauugacca

SEQ ID NO: 1923650 - RNA, 19 nt, Artificial Sequence
  Description of Artificial Sequence: Synthetic oligonucleotide
guuauaauguggcuccaaa

SEQ ID NO: 1923651 - RNA, 19 nt, Artificial Sequence
  Description of Artificial Sequence: Synthetic oligonucleotide
uucuaguucaggagaguua

SEQ ID NO: 1923652 - RNA, 19 nt, Artificial Sequence
  Description of Artificial Sequence: Synthetic oligonucleotide
uauagauaacagcgucagu

SEQ ID NO: 1923653 - RNA, 19 nt, Artificial Sequence
  Description of Artificial Sequence: Synthetic oligonucleotide
uggugaaaucgcauuuagu

SEQ ID NO: 1923654 - RNA, 19 nt, Artificial Sequence
  Description of Artificial Sequence: Synthetic oligonucleotide
aucgcauuuaguucuucaa

SEQ ID NO: 1923655 - RNA, 19 nt, Artificial Sequence
  Description of Artificial Sequence: Synthetic oligonucleotide
cugaauugaccacccuggg

SEQ ID NO: 1923656 - RNA, 19 nt, Artificial Sequence
  Description of Artificial Sequence: Synthetic oligonucleotide
aacagcggguauaagguau

SEQ ID NO: 1923657 - RNA, 19 nt, Artificial Sequence
  Description of Artificial Sequence: Synthetic oligonucleotide
aaaucgcauuuaguucuuc

SEQ ID NO: 1923658 - RNA, 19 nt, Artificial Sequence
  Description of Artificial Sequence: Synthetic oligonucleotide
uuaggaacagcggguauaa

SEQ ID NO: 1923659 - RNA, 19 nt, Artificial Sequence
  Description of Artificial Sequence: Synthetic oligonucleotide
gcauagaggcgugauaugg

SEQ ID NO: 1923660 - RNA, 19 nt, Artificial Sequence
  Description of Artificial Sequence: Synthetic oligonucleotide
uaguacauuuauugacagu

SEQ ID NO: 1923661 - RNA, 19 nt, Artificial Sequence
  Description of Artificial Sequence: Synthetic oligonucleotide
uccaacauuugguuguauu

SEQ ID NO: 1923662 - RNA, 19 nt, Artificial Sequence
  Description of Artificial Sequence: Synthetic oligonucleotide
ugguaacauaaaccacuug

SEQ ID NO: 1923663 - RNA, 19 nt, Artificial Sequence
  Description of Artificial Sequence: Synthetic oligonucleotide
uuguaccagauaaauccua

SEQ ID NO: 1923664 - RNA, 19 nt, Artificial Sequence
  Description of Artificial Sequence: Synthetic oligonucleotide
ggaugucucaaaacgaggc

SEQ ID NO: 1923665 - RNA, 19 nt, Artificial Sequence
  Description of Artificial Sequence: Synthetic oligonucleotide
gauagagaugggaugguaa

SEQ ID NO: 1923666 - RNA, 19 nt, Artificial Sequence
  Description of Artificial Sequence: Synthetic oligonucleotide
uagaggcgugauaugggca

SEQ ID NO: 1923667 - RNA, 19 nt, Artificial Sequence
  Description of Artificial Sequence: Synthetic oligonucleotide
ggugaaaucgcauuuaguu

SEQ ID NO: 1923668 - RNA, 19 nt, Artificial Sequence
  Description of Artificial Sequence: Synthetic oligonucleotide
uagcaacaugaauuuguga

SEQ ID NO: 1923669 - RNA, 19 nt, Artificial Sequence
  Description of Artificial Sequence: Synthetic oligonucleotide
uucuuacaaaguccucagu

SEQ ID NO: 1923670 - RNA, 19 nt, Artificial Sequence
  Description of Artificial Sequence: Synthetic oligonucleotide
agaggcgugauaugggcaa

SEQ ID NO: 1923671 - RNA, 19 nt, Artificial Sequence
  Description of Artificial Sequence: Synthetic oligonucleotide
caucucuuccaaacuuagc

SEQ ID NO: 1923672 - RNA, 19 nt, Artificial Sequence
  Description of Artificial Sequence: Synthetic oligonucleotide
aggguccugaauugaccac

SEQ ID NO: 1923673 - RNA, 19 nt, Artificial Sequence
  Description of Artificial Sequence: Synthetic oligonucleotide
uauuauacacggggagucu

SEQ ID NO: 1923674 - RNA, 19 nt, Artificial Sequence
  Description of Artificial Sequence: Synthetic oligonucleotide
uauugucuguccuggugaa

SEQ ID NO: 1923675 - RNA, 19 nt, Artificial Sequence
  Description of Artificial Sequence: Synthetic oligonucleotide
acagagccuuaauauagau

SEQ ID NO: 1923676 - RNA, 19 nt, Artificial Sequence
  Description of Artificial Sequence: Synthetic oligonucleotide
gcaucuaagagcuucggaa

SEQ ID NO: 1923677 - RNA, 19 nt, Artificial Sequence
  Description of Artificial Sequence: Synthetic oligonucleotide
accucucacaugagggucc

SEQ ID NO: 1923678 - RNA, 19 nt, Artificial Sequence
  Description of Artificial Sequence: Synthetic oligonucleotide
auguaauuuaaagcuaaua

SEQ ID NO: 1923679 - RNA, 19 nt, Artificial Sequence
  Description of Artificial Sequence: Synthetic oligonucleotide
aguacagcuuuaggucccc

SEQ ID NO: 1923680 - RNA, 19 nt, Artificial Sequence
  Description of Artificial Sequence: Synthetic oligonucleotide
ugcauagaggcgugauaug

SEQ ID NO: 1923681 - RNA, 19 nt, Artificial Sequence
  Description of Artificial Sequence: Synthetic oligonucleotide
acaucucuuccaaacuuag

SEQ ID NO: 1923682 - RNA, 19 nt, Artificial Sequence
  Description of Artificial Sequence: Synthetic oligonucleotide
gucgucagcuucaugguug

SEQ ID NO: 1923683 - RNA, 19 nt, Artificial Sequence
  Description of Artificial Sequence: Synthetic oligonucleotide
ucuguugacagagccuuaa

SEQ ID NO: 1923684 - RNA, 19 nt, Artificial Sequence
  Description of Artificial Sequence: Synthetic oligonucleotide
aggagcuuuuagcaacaug

SEQ ID NO: 1923685 - RNA, 19 nt, Artificial Sequence
  Description of Artificial Sequence: Synthetic oligonucleotide
uguccuggugaaaucgcau

SEQ ID NO: 1923686 - RNA, 19 nt, Artificial Sequence
  Description of Artificial Sequence: Synthetic oligonucleotide
augaggguccugaauugac

SEQ ID NO: 1923687 - RNA, 19 nt, Artificial Sequence
  Description of Artificial Sequence: Synthetic oligonucleotide
uccuggugaaaucgcauuu

SEQ ID NO: 1923688 - RNA, 19 nt, Artificial Sequence
  Description of Artificial Sequence: Synthetic oligonucleotide
cagcuuuauuauacacggg

SEQ ID NO: 1923689 - RNA, 19 nt, Artificial Sequence
  Description of Artificial Sequence: Synthetic oligonucleotide
uuucuaucauuugguacaa

SEQ ID NO: 1923690 - RNA, 19 nt, Artificial Sequence
  Description of Artificial Sequence: Synthetic oligonucleotide
acacggaauaaaugucacu

SEQ ID NO: 1923691 - RNA, 19 nt, Artificial Sequence
  Description of Artificial Sequence: Synthetic oligonucleotide
accuacaaguuucuaucau

SEQ ID NO: 1923692 - RNA, 19 nt, Artificial Sequence
  Description of Artificial Sequence: Synthetic oligonucleotide
gucccguagcccuccaagg

SEQ ID NO: 1923693 - RNA, 19 nt, Artificial Sequence
  Description of Artificial Sequence: Synthetic oligonucleotide
guaacauaaaccacuugua

SEQ ID NO: 1923694 - RNA, 19 nt, Artificial Sequence
  Description of Artificial Sequence: Synthetic oligonucleotide
acaaaucacaaagccgccu

SEQ ID NO: 1923695 - RNA, 19 nt, Artificial Sequence
  Description of Artificial Sequence: Synthetic oligonucleotide
cuauuuuguaccagauaaa

SEQ ID NO: 1923696 - RNA, 19 nt, Artificial Sequence
  Description of Artificial Sequence: Synthetic oligonucleotide
augacauauuugguuauaa

SEQ ID NO: 1923697 - RNA, 19 nt, Artificial Sequence
  Description of Artificial Sequence: Synthetic oligonucleotide
uugcauucuugaacaguuc

SEQ ID NO: 1923698 - RNA, 19 nt, Artificial Sequence
  Description of Artificial Sequence: Synthetic oligonucleotide
ggcauccucaaccuacaag

SEQ ID NO: 1923699 - RNA, 19 nt, Artificial Sequence
  Description of Artificial Sequence: Synthetic oligonucleotide
caugugauagagaugggau

SEQ ID NO: 1923700 - RNA, 19 nt, Artificial Sequence
  Description of Artificial Sequence: Synthetic oligonucleotide
gguauaauugauccuuuua

SEQ ID NO: 1923701 - RNA, 19 nt, Artificial Sequence
  Description of Artificial Sequence: Synthetic oligonucleotide
agucucucgauggauucug

SEQ ID NO: 1923702 - RNA, 19 nt, Artificial Sequence
  Description of Artificial Sequence: Synthetic oligonucleotide
ugguauaauugauccuuuu

SEQ ID NO: 1923703 - RNA, 19 nt, Artificial Sequence
  Description of Artificial Sequence: Synthetic oligonucleotide
aguagccaagcaccaauua

SEQ ID NO: 1923704 - RNA, 19 nt, Artificial Sequence
  Description of Artificial Sequence: Synthetic oligonucleotide
guaccagauaaauccuauc

SEQ ID NO: 1923705 - RNA, 19 nt, Artificial Sequence
  Description of Artificial Sequence: Synthetic oligonucleotide
auaacagcgucagucccgu

SEQ ID NO: 1923706 - RNA, 19 nt, Artificial Sequence
  Description of Artificial Sequence: Synthetic oligonucleotide
gugagaugcuuuaacucac

SEQ ID NO: 1923707 - RNA, 19 nt, Artificial Sequence
  Description of Artificial Sequence: Synthetic oligonucleotide
uccuaucaagagugagaug

SEQ ID NO: 1923708 - RNA, 19 nt, Artificial Sequence
  Description of Artificial Sequence: Synthetic oligonucleotide
cauuugguuguauuagcua

SEQ ID NO: 1923709 - RNA, 19 nt, Artificial Sequence
  Description of Artificial Sequence: Synthetic oligonucleotide
ucaggagaguuaacauaau

SEQ ID NO: 1923710 - RNA, 19 nt, Artificial Sequence
  Description of Artificial Sequence: Synthetic oligonucleotide
ugauccuuuuaggagcuuu

SEQ ID NO: 1923711 - RNA, 19 nt, Artificial Sequence
  Description of Artificial Sequence: Synthetic oligonucleotide
gacagagccuuaauauaga

SEQ ID NO: 1923712 - RNA, 19 nt, Artificial Sequence
  Description of Artificial Sequence: Synthetic oligonucleotide
caaaucacaaagccgccua

SEQ ID NO: 1923713 - RNA, 19 nt, Artificial Sequence
  Description of Artificial Sequence: Synthetic oligonucleotide
gggaugucucaaaacgagg

SEQ ID NO: 1923714 - RNA, 19 nt, Artificial Sequence
  Description of Artificial Sequence: Synthetic oligonucleotide
agcggguauaagguauguc

SEQ ID NO: 1923715 - RNA, 19 nt, Artificial Sequence
  Description of Artificial Sequence: Synthetic oligonucleotide
aguuaggaacagcggguau

SEQ ID NO: 1923716 - RNA, 19 nt, Artificial Sequence
  Description of Artificial Sequence: Synthetic oligonucleotide
ccaagcaccaauuaaccaa

SEQ ID NO: 1923717 - RNA, 19 nt, Artificial Sequence
  Description of Artificial Sequence: Synthetic oligonucleotide
uuguauugucuguccuggu

SEQ ID NO: 1923718 - RNA, 19 nt, Artificial Sequence
  Description of Artificial Sequence: Synthetic oligonucleotide
uucuaucauuugguacaag

SEQ ID NO: 1923719 - RNA, 19 nt, Artificial Sequence
  Description of Artificial Sequence: Synthetic oligonucleotide
cuaguucaggagaguuaac

SEQ ID NO: 1923720 - RNA, 19 nt, Artificial Sequence
  Description of Artificial Sequence: Synthetic oligonucleotide
acauuuauugacaguugua

SEQ ID NO: 1923721 - RNA, 19 nt, Artificial Sequence
  Description of Artificial Sequence: Synthetic oligonucleotide
gcggguauaagguaugucu

SEQ ID NO: 1923722 - RNA, 19 nt, Artificial Sequence
  Description of Artificial Sequence: Synthetic oligonucleotide
ccccaugugcaucuaagag

SEQ ID NO: 1923723 - RNA, 19 nt, Artificial Sequence
  Description of Artificial Sequence: Synthetic oligonucleotide
ccucaguuaggaacagcgg

SEQ ID NO: 1923724 - RNA, 19 nt, Artificial Sequence
  Description of Artificial Sequence: Synthetic oligonucleotide
gauucuguugacagagccu

SEQ ID NO: 1923725 - RNA, 19 nt, Artificial Sequence
  Description of Artificial Sequence: Synthetic oligonucleotide
aguucuaguucaggagagu

SEQ ID NO: 1923726 - RNA, 19 nt, Artificial Sequence
  Description of Artificial Sequence: Synthetic oligonucleotide
gugcaucuaagagcuucgg

SEQ ID NO: 1923727 - RNA, 19 nt, Artificial Sequence
  Description of Artificial Sequence: Synthetic oligonucleotide
acgggaugucucaaaacga

SEQ ID NO: 1923728 - RNA, 19 nt, Artificial Sequence
  Description of Artificial Sequence: Synthetic oligonucleotide
augguaacauaaaccacuu

SEQ ID NO: 1923729 - RNA, 19 nt, Artificial Sequence
  Description of Artificial Sequence: Synthetic oligonucleotide
guuaggaacagcggguaua

SEQ ID NO: 1923730 - RNA, 19 nt, Artificial Sequence
  Description of Artificial Sequence: Synthetic oligonucleotide
ggagucucucgauggauuc

SEQ ID NO: 1923731 - RNA, 19 nt, Artificial Sequence
  Description of Artificial Sequence: Synthetic oligonucleotide
gaacagcggguauaaggua

SEQ ID NO: 1923732 - RNA, 19 nt, Artificial Sequence
  Description of Artificial Sequence: Synthetic oligonucleotide
gucucaaaacgaggccggg

SEQ ID NO: 1923733 - RNA, 19 nt, Artificial Sequence
  Description of Artificial Sequence: Synthetic oligonucleotide
gagccuuaauauagauaac

SEQ ID NO: 1923734 - RNA, 19 nt, Artificial Sequence
  Description of Artificial Sequence: Synthetic oligonucleotide
cacggggagucucucgaug

SEQ ID NO: 1923735 - RNA, 19 nt, Artificial Sequence
  Description of Artificial Sequence: Synthetic oligonucleotide
ggguccugaauugaccacc

SEQ ID NO: 1923736 - RNA, 19 nt, Artificial Sequence
  Description of Artificial Sequence: Synthetic oligonucleotide
ugguuauaauguggcucca

SEQ ID NO: 1923737 - RNA, 19 nt, Artificial Sequence
  Description of Artificial Sequence: Synthetic oligonucleotide
acagcggguauaagguaug

SEQ ID NO: 1923738 - RNA, 19 nt, Artificial Sequence
  Description of Artificial Sequence: Synthetic oligonucleotide
gugcauagaggcgugauau

SEQ ID NO: 1923739 - RNA, 19 nt, Artificial Sequence
  Description of Artificial Sequence: Synthetic oligonucleotide
caccucucacaugaggguc

SEQ ID NO: 1923740 - RNA, 19 nt, Artificial Sequence
  Description of Artificial Sequence: Synthetic oligonucleotide
gaccaacaggaccugaguu

SEQ ID NO: 1923741 - RNA, 19 nt, Artificial Sequence
  Description of Artificial Sequence: Synthetic oligonucleotide
caugaacauagucuauuau

SEQ ID NO: 1923742 - RNA, 19 nt, Artificial Sequence
  Description of Artificial Sequence: Synthetic oligonucleotide
cauuugguacaagaauucu

SEQ ID NO: 1923743 - RNA, 19 nt, Artificial Sequence
  Description of Artificial Sequence: Synthetic oligonucleotide
caugaggguccugaauuga

SEQ ID NO: 1923744 - RNA, 19 nt, Artificial Sequence
  Description of Artificial Sequence: Synthetic oligonucleotide
gccaagcaccaauuaacca

SEQ ID NO: 1923745 - RNA, 19 nt, Artificial Sequence
  Description of Artificial Sequence: Synthetic oligonucleotide
cuaucaagagugagaugcu

SEQ ID NO: 1923746 - RNA, 19 nt, Artificial Sequence
  Description of Artificial Sequence: Synthetic oligonucleotide
cauugcauucuugaacagu

SEQ ID NO: 1923747 - RNA, 19 nt, Artificial Sequence
  Description of Artificial Sequence: Synthetic oligonucleotide
guucuaguucaggagaguu

SEQ ID NO: 1923748 - RNA, 19 nt, Artificial Sequence
  Description of Artificial Sequence: Synthetic oligonucleotide
acaaagccgccuagcauuu

SEQ ID NO: 1923749 - RNA, 19 nt, Artificial Sequence
  Description of Artificial Sequence: Synthetic oligonucleotide
acugugcauagaggcguga

SEQ ID NO: 1923750 - RNA, 19 nt, Artificial Sequence
  Description of Artificial Sequence: Synthetic oligonucleotide
aagccgccuagcauuucau

SEQ ID NO: 1923751 - RNA, 19 nt, Artificial Sequence
  Description of Artificial Sequence: Synthetic oligonucleotide
cacuuguauugucuguccu

SEQ ID NO: 1923752 - RNA, 19 nt, Artificial Sequence
  Description of Artificial Sequence: Synthetic oligonucleotide
acacggggagucucucgau

SEQ ID NO: 1923753 - RNA, 19 nt, Artificial Sequence
  Description of Artificial Sequence: Synthetic oligonucleotide
ccagguaaguagccaagca

SEQ ID NO: 1923754 - RNA, 19 nt, Artificial Sequence
  Description of Artificial Sequence: Synthetic oligonucleotide
ccaugugauagagauggga

SEQ ID NO: 1923755 - RNA, 19 nt, Artificial Sequence
  Description of Artificial Sequence: Synthetic oligonucleotide
cccagaucccuccagguaa

SEQ ID NO: 1923756 - RNA, 19 nt, Artificial Sequence
  Description of Artificial Sequence: Synthetic oligonucleotide
caguuaggaacagcgggua

SEQ ID NO: 1923757 - RNA, 19 nt, Artificial Sequence
  Description of Artificial Sequence: Synthetic oligonucleotide
gcaguugaguacauguagu

SEQ ID NO: 1923758 - RNA, 19 nt, Artificial Sequence
  Description of Artificial Sequence: Synthetic oligonucleotide
cagucgucagcuucauggu

SEQ ID NO: 1923759 - RNA, 19 nt, Artificial Sequence
  Description of Artificial Sequence: Synthetic oligonucleotide
gcgugauaugggcaaucca

SEQ ID NO: 1923760 - RNA, 19 nt, Artificial Sequence
  Description of Artificial Sequence: Synthetic oligonucleotide
ccaauuaaccaaacauuau

SEQ ID NO: 1923761 - RNA, 19 nt, Artificial Sequence
  Description of Artificial Sequence: Synthetic oligonucleotide
gagucucucgauggauucu

SEQ ID NO: 1923762 - RNA, 19 nt, Artificial Sequence
  Description of Artificial Sequence: Synthetic oligonucleotide
gaaaucgcauuuaguucuu

SEQ ID NO: 1923763 - RNA, 19 nt, Artificial Sequence
  Description of Artificial Sequence: Synthetic oligonucleotide
cuuuaacucacagcacuuu

SEQ ID NO: 1923764 - RNA, 19 nt, Artificial Sequence
  Description of Artificial Sequence: Synthetic oligonucleotide
ccggggugcaguugaguac

SEQ ID NO: 1923765 - RNA, 19 nt, Artificial Sequence
  Description of Artificial Sequence: Synthetic oligonucleotide
ggguauaagguaugucuuu

SEQ ID NO: 1923766 - RNA, 19 nt, Artificial Sequence
  Description of Artificial Sequence: Synthetic oligonucleotide
ggaccaacaggaccugagu

SEQ ID NO: 1923767 - RNA, 19 nt, Artificial Sequence
  Description of Artificial Sequence: Synthetic oligonucleotide
gugauagagaugggauggu

SEQ ID NO: 1923768 - RNA, 19 nt, Artificial Sequence
  Description of Artificial Sequence: Synthetic oligonucleotide
gcgucagucccguagcccu

SEQ ID NO: 1923769 - RNA, 19 nt, Artificial Sequence
  Description of Artificial Sequence: Synthetic oligonucleotide
ccuacaaguuucuaucauu

SEQ ID NO: 1923770 - RNA, 19 nt, Artificial Sequence
  Description of Artificial Sequence: Synthetic oligonucleotide
caaagccgccuagcauuuc

SEQ ID NO: 1923771 - RNA, 19 nt, Artificial Sequence
  Description of Artificial Sequence: Synthetic oligonucleotide
cuggaccaacaggaccuga

SEQ ID NO: 1923772 - RNA, 19 nt, Artificial Sequence
  Description of Artificial Sequence: Synthetic oligonucleotide
gcuucggaauguggucaug

SEQ ID NO: 1923773 - RNA, 19 nt, Artificial Sequence
  Description of Artificial Sequence: Synthetic oligonucleotide
guccugaauugaccacccu

SEQ ID NO: 1923774 - RNA, 19 nt, Artificial Sequence
  Description of Artificial Sequence: Synthetic oligonucleotide
ccggucacucaucuucaca

SEQ ID NO: 1923775 - RNA, 19 nt, Artificial Sequence
  Description of Artificial Sequence: Synthetic oligonucleotide
ggccccucaccucucacau

SEQ ID NO: 1923776 - RNA, 19 nt, Artificial Sequence
  Description of Artificial Sequence: Synthetic oligonucleotide
gcuuuaacucacagcacuu

SEQ ID NO: 1923777 - RNA, 19 nt, Artificial Sequence
  Description of Artificial Sequence: Synthetic oligonucleotide
gucucucgauggauucugu

SEQ ID NO: 1923778 - RNA, 19 nt, Artificial Sequence
  Description of Artificial Sequence: Synthetic oligonucleotide
gaggcgugauaugggcaau

SEQ ID NO: 1923779 - RNA, 19 nt, Artificial Sequence
  Description of Artificial Sequence: Synthetic oligonucleotide
cggggugcaguugaguaca

SEQ ID NO: 1923780 - RNA, 19 nt, Artificial Sequence
  Description of Artificial Sequence: Synthetic oligonucleotide
gggcauccucaaccuacaa

SEQ ID NO: 1923781 - RNA, 19 nt, Artificial Sequence
  Description of Artificial Sequence: Synthetic oligonucleotide
cagcggguauaagguaugu

SEQ ID NO: 1923782 - RNA, 19 nt, Artificial Sequence
  Description of Artificial Sequence: Synthetic oligonucleotide
gggagucucucgauggauu

SEQ ID NO: 1923783 - RNA, 19 nt, Artificial Sequence
  Description of Artificial Sequence: Synthetic oligonucleotide
cagucccguagcccuccaa

SEQ ID NO: 1923784 - RNA, 19 nt, Artificial Sequence
  Description of Artificial Sequence: Synthetic oligonucleotide
ccguagcccuccaaggagu

SEQ ID NO: 1923785 - RNA, 19 nt, Artificial Sequence
  Description of Artificial Sequence: Synthetic oligonucleotide
cgucagucccguagcccuc

SEQ ID NO: 1923786 - RNA, 19 nt, Artificial Sequence
  Description of Artificial Sequence: Synthetic oligonucleotide
ggggagucucucgauggau

SEQ ID NO: 1923787 - RNA, 19 nt, Artificial Sequence
  Description of Artificial Sequence: Synthetic oligonucleotide
cagaucccuccagguaagu

SEQ ID NO: 1923788 - RNA, 19 nt, Artificial Sequence
  Description of Artificial Sequence: Synthetic oligonucleotide
cggggagucucucgaugga

SEQ ID NO: 1923789 - RNA, 19 nt, Artificial Sequence
  Description of Artificial Sequence: Synthetic oligonucleotide
cccuggaaguacugugcau

SEQ ID NO: 1923790 - RNA, 19 nt, Artificial Sequence
  Description of Artificial Sequence: Synthetic oligonucleotide
ggugccccaugugcaucua

SEQ ID NO: 1923791 - RNA, 19 nt, Artificial Sequence
  Description of Artificial Sequence: Synthetic oligonucleotide
acguuaaugaauuaaaacc

SEQ ID NO: 1923792 - RNA, 19 nt, Artificial Sequence
  Description of Artificial Sequence: Synthetic oligonucleotide
auuaaaaccuuccagaaac

SEQ ID NO: 1923793 - RNA, 19 nt, Artificial Sequence
  Description of Artificial Sequence: Synthetic oligonucleotide
aacguuaaugaauuaaaac

SEQ ID NO: 1923794 - RNA, 19 nt, Artificial Sequence
  Description of Artificial Sequence: Synthetic oligonucleotide
uuuauaauuaacuauuaac

SEQ ID NO: 1923795 - RNA, 19 nt, Artificial Sequence
  Description of Artificial Sequence: Synthetic oligonucleotide
ugaacacuaaacaucaacg

SEQ ID NO: 1923796 - RNA, 19 nt, Artificial Sequence
  Description of Artificial Sequence: Synthetic oligonucleotide
guuuuaaccauccaaauag

SEQ ID NO: 1923797 - RNA, 19 nt, Artificial Sequence
  Description of Artificial Sequence: Synthetic oligonucleotide
aacgacuuguacuuggugc

SEQ ID NO: 1923798 - RNA, 19 nt, Artificial Sequence
  Description of Artificial Sequence: Synthetic oligonucleotide
uuaacuauuaacguuaaug

SEQ ID NO: 1923799 - RNA, 19 nt, Artificial Sequence
  Description of Artificial Sequence: Synthetic oligonucleotide
uuuagaaccuguaagaguc

SEQ ID NO: 1923800 - RNA, 19 nt, Artificial Sequence
  Description of Artificial Sequence: Synthetic oligonucleotide
gauuuaauuuacuugcugc

SEQ ID NO: 1923801 - RNA, 19 nt, Artificial Sequence
  Description of Artificial Sequence: Synthetic oligonucleotide
aaaacgugcacaguauugc

SEQ ID NO: 1923802 - RNA, 19 nt, Artificial Sequence
  Description of Artificial Sequence: Synthetic oligonucleotide
uucaaacucucauaaauag

SEQ ID NO: 1923803 - RNA, 19 nt, Artificial Sequence
  Description of Artificial Sequence: Synthetic oligonucleotide
cacaguauugcuauuaggc

SEQ ID NO: 1923804 - RNA, 19 nt, Artificial Sequence
  Description of Artificial Sequence: Synthetic oligonucleotide
augauggucucugagaucc

SEQ ID NO: 1923805 - RNA, 19 nt, Artificial Sequence
  Description of Artificial Sequence: Synthetic oligonucleotide
gacaagugaaaauagcacc

SEQ ID NO: 1923806 - RNA, 19 nt, Artificial Sequence
  Description of Artificial Sequence: Synthetic oligonucleotide
aaaaggaaauguccaacag

SEQ ID NO: 1923807 - RNA, 19 nt, Artificial Sequence
  Description of Artificial Sequence: Synthetic oligonucleotide
gaacacuaaacaucaacgg

SEQ ID NO: 1923808 - RNA, 19 nt, Artificial Sequence
  Description of Artificial Sequence: Synthetic oligonucleotide
aguacacagcccuugaugg

SEQ ID NO: 1923809 - RNA, 19 nt, Artificial Sequence
  Description of Artificial Sequence: Synthetic oligonucleotide
cucauaaauagcaaagcag

SEQ ID NO: 1923810 - RNA, 19 nt, Artificial Sequence
  Description of Artificial Sequence: Synthetic oligonucleotide
uuaauuuacuugcugcuca

SEQ ID NO: 1923811 - RNA, 19 nt, Artificial Sequence
  Description of Artificial Sequence: Synthetic oligonucleotide
aacacuaaacaucaacgga

SEQ ID NO: 1923812 - RNA, 19 nt, Artificial Sequence
  Description of Artificial Sequence: Synthetic oligonucleotide
aaauaggauucauuaaggu

SEQ ID NO: 1923813 - RNA, 19 nt, Artificial Sequence
  Description of Artificial Sequence: Synthetic oligonucleotide
uuaacguuaaugaauuaaa

SEQ ID NO: 1923814 - RNA, 19 nt, Artificial Sequence
  Description of Artificial Sequence: Synthetic oligonucleotide
aacggagcuuccuucagac

SEQ ID NO: 1923815 - RNA, 19 nt, Artificial Sequence
  Description of Artificial Sequence: Synthetic oligonucleotide
aauaggauucauuaaggua

SEQ ID NO: 1923816 - RNA, 19 nt, Artificial Sequence
  Description of Artificial Sequence: Synthetic oligonucleotide
uaauacaccguccgaagag

SEQ ID NO: 1923817 - RNA, 19 nt, Artificial Sequence
  Description of Artificial Sequence: Synthetic oligonucleotide
uugaacacuaaacaucaac

SEQ ID NO: 1923818 - RNA, 19 nt, Artificial Sequence
  Description of Artificial Sequence: Synthetic oligonucleotide
acuugaggguaauacaccg

SEQ ID NO: 1923819 - RNA, 19 nt, Artificial Sequence
  Description of Artificial Sequence: Synthetic oligonucleotide
aauacaccguccgaagagc

SEQ ID NO: 1923820 - RNA, 19 nt, Artificial Sequence
  Description of Artificial Sequence: Synthetic oligonucleotide
ugcucaauaccucaauacc

SEQ ID NO: 1923821 - RNA, 19 nt, Artificial Sequence
  Description of Artificial Sequence: Synthetic oligonucleotide
caaacucucauaaauagca

SEQ ID NO: 1923822 - RNA, 19 nt, Artificial Sequence
  Description of Artificial Sequence: Synthetic oligonucleotide
ugcaacuccaaccaaauuu

SEQ ID NO: 1923823 - RNA, 19 nt, Artificial Sequence
  Description of Artificial Sequence: Synthetic oligonucleotide
aaguacacagcccuugaug

SEQ ID NO: 1923824 - RNA, 19 nt, Artificial Sequence
  Description of Artificial Sequence: Synthetic oligonucleotide
auuuaauuuacuugcugcu

SEQ ID NO: 1923825 - RNA, 19 nt, Artificial Sequence
  Description of Artificial Sequence: Synthetic oligonucleotide
aaaucucuaggguuuucag

SEQ ID NO: 1923826 - RNA, 19 nt, Artificial Sequence
  Description of Artificial Sequence: Synthetic oligonucleotide
uuucguucuagcugcaucc

SEQ ID NO: 1923827 - RNA, 19 nt, Artificial Sequence
  Description of Artificial Sequence: Synthetic oligonucleotide
guauuugugacaaaagcug

SEQ ID NO: 1923828 - RNA, 19 nt, Artificial Sequence
  Description of Artificial Sequence: Synthetic oligonucleotide
uuaaccauccaaauaggau

SEQ ID NO: 1923829 - RNA, 19 nt, Artificial Sequence
  Description of Artificial Sequence: Synthetic oligonucleotide
gaggguaauacaccguccg

SEQ ID NO: 1923830 - RNA, 19 nt, Artificial Sequence
  Description of Artificial Sequence: Synthetic oligonucleotide
acaaacgacuuguacuugg

SEQ ID NO: 1923831 - RNA, 19 nt, Artificial Sequence
  Description of Artificial Sequence: Synthetic oligonucleotide
aacuugaggguaauacacc

SEQ ID NO: 1923832 - RNA, 19 nt, Artificial Sequence
  Description of Artificial Sequence: Synthetic oligonucleotide
aucaacggaaaagaaaauc

SEQ ID NO: 1923833 - RNA, 19 nt, Artificial Sequence
  Description of Artificial Sequence: Synthetic oligonucleotide
uaaccauccaaauaggauu

SEQ ID NO: 1923834 - RNA, 19 nt, Artificial Sequence
  Description of Artificial Sequence: Synthetic oligonucleotide
gacuuuagaaccuguaaga

SEQ ID NO: 1923835 - RNA, 19 nt, Artificial Sequence
  Description of Artificial Sequence: Synthetic oligonucleotide
aacucucauaaauagcaaa

SEQ ID NO: 1923836 - RNA, 19 nt, Artificial Sequence
  Description of Artificial Sequence: Synthetic oligonucleotide
uccaaccaaauuuggaccc

SEQ ID NO: 1923837 - RNA, 19 nt, Artificial Sequence
  Description of Artificial Sequence: Synthetic oligonucleotide
accucaauaccucuuaagu

SEQ ID NO: 1923838 - RNA, 19 nt, Artificial Sequence
  Description of Artificial Sequence: Synthetic oligonucleotide
ugcaaccucgucuuaauga

SEQ ID NO: 1923839 - RNA, 19 nt, Artificial Sequence
  Description of Artificial Sequence: Synthetic oligonucleotide
acuaaugguccccagguga

SEQ ID NO: 1923840 - RNA, 19 nt, Artificial Sequence
  Description of Artificial Sequence: Synthetic oligonucleotide
aaccauccaaauaggauuc

SEQ ID NO: 1923841 - RNA, 19 nt, Artificial Sequence
  Description of Artificial Sequence: Synthetic oligonucleotide
ucuuccagagcacagccgu

SEQ ID NO: 1923842 - RNA, 19 nt, Artificial Sequence
  Description of Artificial Sequence: Synthetic oligonucleotide
aauaccucaauaccucuua

SEQ ID NO: 1923843 - RNA, 19 nt, Artificial Sequence
  Description of Artificial Sequence: Synthetic oligonucleotide
gauggugcaacuccaacca

SEQ ID NO: 1923844 - RNA, 19 nt, Artificial Sequence
  Description of Artificial Sequence: Synthetic oligonucleotide
uccacuaaugguccccagg

SEQ ID NO: 1923845 - RNA, 19 nt, Artificial Sequence
  Description of Artificial Sequence: Synthetic oligonucleotide
caguauugcuauuaggcac

SEQ ID NO: 1923846 - RNA, 19 nt, Artificial Sequence
  Description of Artificial Sequence: Synthetic oligonucleotide
ugcacaguauugcuauuag

SEQ ID NO: 1923847 - RNA, 19 nt, Artificial Sequence
  Description of Artificial Sequence: Synthetic oligonucleotide
acaguauugcuauuaggca

SEQ ID NO: 1923848 - RNA, 19 nt, Artificial Sequence
  Description of Artificial Sequence: Synthetic oligonucleotide
ugcauccucguuuuaacca

SEQ ID NO: 1923849 - RNA, 19 nt, Artificial Sequence
  Description of Artificial Sequence: Synthetic oligonucleotide
uuaaugaccucuagcggac

SEQ ID NO: 1923850 - RNA, 19 nt, Artificial Sequence
  Description of Artificial Sequence: Synthetic oligonucleotide
agcaaagaguccucgguag

SEQ ID NO: 1923851 - RNA, 19 nt, Artificial Sequence
  Description of Artificial Sequence: Synthetic oligonucleotide
aagacugcaaccucgucuu

SEQ ID NO: 1923852 - RNA, 19 nt, Artificial Sequence
  Description of Artificial Sequence: Synthetic oligonucleotide
auuaacguuaaugaauuaa

SEQ ID NO: 1923853 - RNA, 19 nt, Artificial Sequence
  Description of Artificial Sequence: Synthetic oligonucleotide
auuaagguauuugugacaa

SEQ ID NO: 1923854 - RNA, 19 nt, Artificial Sequence
  Description of Artificial Sequence: Synthetic oligonucleotide
agucgggaagacugcaacc

SEQ ID NO: 1923855 - RNA, 19 nt, Artificial Sequence
  Description of Artificial Sequence: Synthetic oligonucleotide
ugagcaaagaguccucggu

SEQ ID NO: 1923856 - RNA, 19 nt, Artificial Sequence
  Description of Artificial Sequence: Synthetic oligonucleotide
uugaggguaauacaccguc

SEQ ID NO: 1923857 - RNA, 19 nt, Artificial Sequence
  Description of Artificial Sequence: Synthetic oligonucleotide
cuccaaccaaauuuggacc

SEQ ID NO: 1923858 - RNA, 19 nt, Artificial Sequence
  Description of Artificial Sequence: Synthetic oligonucleotide
ucaauaccucuuaaguuaa

SEQ ID NO: 1923859 - RNA, 19 nt, Artificial Sequence
  Description of Artificial Sequence: Synthetic oligonucleotide
gaaaacgugcacaguauug

SEQ ID NO: 1923860 - RNA, 19 nt, Artificial Sequence
  Description of Artificial Sequence: Synthetic oligonucleotide
caccuuucguucuagcugc

SEQ ID NO: 1923861 - RNA, 19 nt, Artificial Sequence
  Description of Artificial Sequence: Synthetic oligonucleotide
aaacgacuuguacuuggug

SEQ ID NO: 1923862 - RNA, 19 nt, Artificial Sequence
  Description of Artificial Sequence: Synthetic oligonucleotide
ggaaauguccaacagguga

SEQ ID NO: 1923863 - RNA, 19 nt, Artificial Sequence
  Description of Artificial Sequence: Synthetic oligonucleotide
ucuagcugcauccucguuu

SEQ ID NO: 1923864 - RNA, 19 nt, Artificial Sequence
  Description of Artificial Sequence: Synthetic oligonucleotide
uuuaauuuacuugcugcuc

SEQ ID NO: 1923865 - RNA, 19 nt, Artificial Sequence
  Description of Artificial Sequence: Synthetic oligonucleotide
cucaauaccucuuaaguua

SEQ ID NO: 1923866 - RNA, 19 nt, Artificial Sequence
  Description of Artificial Sequence: Synthetic oligonucleotide
auuaaauagcaugauuuaa

SEQ ID NO: 1923867 - RNA, 19 nt, Artificial Sequence
  Description of Artificial Sequence: Synthetic oligonucleotide
cugcucaauaccucaauac

SEQ ID NO: 1923868 - RNA, 19 nt, Artificial Sequence
  Description of Artificial Sequence: Synthetic oligonucleotide
uccaaauaggauucauuaa

SEQ ID NO: 1923869 - RNA, 19 nt, Artificial Sequence
  Description of Artificial Sequence: Synthetic oligonucleotide
acguuggucucaucauucc

SEQ ID NO: 1923870 - RNA, 19 nt, Artificial Sequence
  Description of Artificial Sequence: Synthetic oligonucleotide
guggacagcacaauggcag

SEQ ID NO: 1923871 - RNA, 19 nt, Artificial Sequence
  Description of Artificial Sequence: Synthetic oligonucleotide
auacgaggcagucagcccu

SEQ ID NO: 1923872 - RNA, 19 nt, Artificial Sequence
  Description of Artificial Sequence: Synthetic oligonucleotide
cagcauacgaggcagucag

SEQ ID NO: 1923873 - RNA, 19 nt, Artificial Sequence
  Description of Artificial Sequence: Synthetic oligonucleotide
uguccugaugaccucgugu

SEQ ID NO: 1923874 - RNA, 19 nt, Artificial Sequence
  Description of Artificial Sequence: Synthetic oligonucleotide
ucauagguggacagcacaa

SEQ ID NO: 1923875 - RNA, 19 nt, Artificial Sequence
  Description of Artificial Sequence: Synthetic oligonucleotide
uuagaaccuguaagagucc

SEQ ID NO: 1923876 - RNA, 19 nt, Artificial Sequence
  Description of Artificial Sequence: Synthetic oligonucleotide
ugaggguaauacaccgucc

SEQ ID NO: 1923877 - RNA, 19 nt, Artificial Sequence
  Description of Artificial Sequence: Synthetic oligonucleotide
accucuagcggacaaguga

SEQ ID NO: 1923878 - RNA, 19 nt, Artificial Sequence
  Description of Artificial Sequence: Synthetic oligonucleotide
gagcuagucgggaagacug

SEQ ID NO: 1923879 - RNA, 19 nt, Artificial Sequence
  Description of Artificial Sequence: Synthetic oligonucleotide
aaccucgucuuaaugaccu

SEQ ID NO: 1923880 - RNA, 19 nt, Artificial Sequence
  Description of Artificial Sequence: Synthetic oligonucleotide
cucguuuuaaccauccaaa

SEQ ID NO: 1923881 - RNA, 19 nt, Artificial Sequence
  Description of Artificial Sequence: Synthetic oligonucleotide
uuagagacggcagcggcug

SEQ ID NO: 1923882 - RNA, 19 nt, Artificial Sequence
  Description of Artificial Sequence: Synthetic oligonucleotide
aagcagaugauggucucug

SEQ ID NO: 1923883 - RNA, 19 nt, Artificial Sequence
  Description of Artificial Sequence: Synthetic oligonucleotide
gaagacugcaaccucgucu

SEQ ID NO: 1923884 - RNA, 19 nt, Artificial Sequence
  Description of Artificial Sequence: Synthetic oligonucleotide
gguaauacaccguccgaag

SEQ ID NO: 1923885 - RNA, 19 nt, Artificial Sequence
  Description of Artificial Sequence: Synthetic oligonucleotide
guacuuggugccuuccucc

SEQ ID NO: 1923886 - RNA, 19 nt, Artificial Sequence
  Description of Artificial Sequence: Synthetic oligonucleotide
ucgucuuaaugaccucuag

SEQ ID NO: 1923887 - RNA, 19 nt, Artificial Sequence
  Description of Artificial Sequence: Synthetic oligonucleotide
uagucgggaagacugcaac

SEQ ID NO: 1923888 - RNA, 19 nt, Artificial Sequence
  Description of Artificial Sequence: Synthetic oligonucleotide
uugauggugcaacuccaac

SEQ ID NO: 1923889 - RNA, 19 nt, Artificial Sequence
  Description of Artificial Sequence: Synthetic oligonucleotide
agccucucaccuuucguuc

SEQ ID NO: 1923890 - RNA, 19 nt, Artificial Sequence
  Description of Artificial Sequence: Synthetic oligonucleotide
aguauugcuauuaggcaca

SEQ ID NO: 1923891 - RNA, 19 nt, Artificial Sequence
  Description of Artificial Sequence: Synthetic oligonucleotide
ggaggcacaucccuuagag

SEQ ID NO: 1923892 - RNA, 19 nt, Artificial Sequence
  Description of Artificial Sequence: Synthetic oligonucleotide
aaugguccccaggugaacu

SEQ ID NO: 1923893 - RNA, 19 nt, Artificial Sequence
  Description of Artificial Sequence: Synthetic oligonucleotide
aaugaccucuagcggacaa

SEQ ID NO: 1923894 - RNA, 19 nt, Artificial Sequence
  Description of Artificial Sequence: Synthetic oligonucleotide
ucguuuuaaccauccaaau

SEQ ID NO: 1923895 - RNA, 19 nt, Artificial Sequence
  Description of Artificial Sequence: Synthetic oligonucleotide
uguguucaucugcuugcag

SEQ ID NO: 1923896 - RNA, 19 nt, Artificial Sequence
  Description of Artificial Sequence: Synthetic oligonucleotide
cuuuggaguaacaugcaaa

SEQ ID NO: 1923897 - RNA, 19 nt, Artificial Sequence
  Description of Artificial Sequence: Synthetic oligonucleotide
aauuaacuauuaacguuaa

SEQ ID NO: 1923898 - RNA, 19 nt, Artificial Sequence
  Description of Artificial Sequence: Synthetic oligonucleotide
guguggguaagcaaugcag

SEQ ID NO: 1923899 - RNA, 19 nt, Artificial Sequence
  Description of Artificial Sequence: Synthetic oligonucleotide
guaacaugcaaaguacaca

SEQ ID NO: 1923900 - RNA, 19 nt, Artificial Sequence
  Description of Artificial Sequence: Synthetic oligonucleotide
gucagcccucuauagaagc

SEQ ID NO: 1923901 - RNA, 19 nt, Artificial Sequence
  Description of Artificial Sequence: Synthetic oligonucleotide
caacuccaaccaaauuugg

SEQ ID NO: 1923902 - RNA, 19 nt, Artificial Sequence
  Description of Artificial Sequence: Synthetic oligonucleotide
uaauuuacuugcugcucaa

SEQ ID NO: 1923903 - RNA, 19 nt, Artificial Sequence
  Description of Artificial Sequence: Synthetic oligonucleotide
aacuccaaccaaauuugga

SEQ ID NO: 1923904 - RNA, 19 nt, Artificial Sequence
  Description of Artificial Sequence: Synthetic oligonucleotide
cuuucguucuagcugcauc

SEQ ID NO: 1923905 - RNA, 19 nt, Artificial Sequence
  Description of Artificial Sequence: Synthetic oligonucleotide
caucccuuagagacggcag

SEQ ID NO: 1923906 - RNA, 19 nt, Artificial Sequence
  Description of Artificial Sequence: Synthetic oligonucleotide
uaacggagcuuccuucaga

SEQ ID NO: 1923907 - RNA, 19 nt, Artificial Sequence
  Description of Artificial Sequence: Synthetic oligonucleotide
auccucguuuuaaccaucc

SEQ ID NO: 1923908 - RNA, 19 nt, Artificial Sequence
  Description of Artificial Sequence: Synthetic oligonucleotide
ucuagcggacaagugaaaa

SEQ ID NO: 1923909 - RNA, 19 nt, Artificial Sequence
  Description of Artificial Sequence: Synthetic oligonucleotide
cauacgaggcagucagccc

SEQ ID NO: 1923910 - RNA, 19 nt, Artificial Sequence
  Description of Artificial Sequence: Synthetic oligonucleotide
agaaaacgugcacaguauu

SEQ ID NO: 1923911 - RNA, 19 nt, Artificial Sequence
  Description of Artificial Sequence: Synthetic oligonucleotide
gaagccacggaugccuucc

SEQ ID NO: 1923912 - RNA, 19 nt, Artificial Sequence
  Description of Artificial Sequence: Synthetic oligonucleotide
cugcauccucguuuuaacc

SEQ ID NO: 1923913 - RNA, 19 nt, Artificial Sequence
  Description of Artificial Sequence: Synthetic oligonucleotide
uagcggacaagugaaaaua

SEQ ID NO: 1923914 - RNA, 19 nt, Artificial Sequence
  Description of Artificial Sequence: Synthetic oligonucleotide
aaagcagaugauggucucu

SEQ ID NO: 1923915 - RNA, 19 nt, Artificial Sequence
  Description of Artificial Sequence: Synthetic oligonucleotide
aggagccuaacggagcuuc

SEQ ID NO: 1923916 - RNA, 19 nt, Artificial Sequence
  Description of Artificial Sequence: Synthetic oligonucleotide
guaauacaccguccgaaga

SEQ ID NO: 1923917 - RNA, 19 nt, Artificial Sequence
  Description of Artificial Sequence: Synthetic oligonucleotide
acaccguccgaagagcuag

SEQ ID NO: 1923918 - RNA, 19 nt, Artificial Sequence
  Description of Artificial Sequence: Synthetic oligonucleotide
gaguccucgguagaaggcc

SEQ ID NO: 1923919 - RNA, 19 nt, Artificial Sequence
  Description of Artificial Sequence: Synthetic oligonucleotide
caucauuccagcuccacua

SEQ ID NO: 1923920 - RNA, 19 nt, Artificial Sequence
  Description of Artificial Sequence: Synthetic oligonucleotide
gaucccagcauacgaggca

SEQ ID NO: 1923921 - RNA, 19 nt, Artificial Sequence
  Description of Artificial Sequence: Synthetic oligonucleotide
caaccucgucuuaaugacc

SEQ ID NO: 1923922 - RNA, 19 nt, Artificial Sequence
  Description of Artificial Sequence: Synthetic oligonucleotide
ugaccucuagcggacaagu

SEQ ID NO: 1923923 - RNA, 19 nt, Artificial Sequence
  Description of Artificial Sequence: Synthetic oligonucleotide
cguccgaagagcuagucgg

SEQ ID NO: 1923924 - RNA, 19 nt, Artificial Sequence
  Description of Artificial Sequence: Synthetic oligonucleotide
uauuaacguuaaugaauua

SEQ ID NO: 1923925 - RNA, 19 nt, Artificial Sequence
  Description of Artificial Sequence: Synthetic oligonucleotide
ggauucauuaagguauuug

SEQ ID NO: 1923926 - RNA, 19 nt, Artificial Sequence
  Description of Artificial Sequence: Synthetic oligonucleotide
aaacucucauaaauagcaa

SEQ ID NO: 1923927 - RNA, 19 nt, Artificial Sequence
  Description of Artificial Sequence: Synthetic oligonucleotide
auuaacuauuaacguuaau

SEQ ID NO: 1923928 - RNA, 19 nt, Artificial Sequence
  Description of Artificial Sequence: Synthetic oligonucleotide
ugguacacaugccgagcgc

SEQ ID NO: 1923929 - RNA, 19 nt, Artificial Sequence
  Description of Artificial Sequence: Synthetic oligonucleotide
ggacaagugaaaauagcac

SEQ ID NO: 1923930 - RNA, 19 nt, Artificial Sequence
  Description of Artificial Sequence: Synthetic oligonucleotide
agcggacaagugaaaauag

SEQ ID NO: 1923931 - RNA, 19 nt, Artificial Sequence
  Description of Artificial Sequence: Synthetic oligonucleotide
uaggauucauuaagguauu

SEQ ID NO: 1923932 - RNA, 19 nt, Artificial Sequence
  Description of Artificial Sequence: Synthetic oligonucleotide
cugcacaaacgacuuguac

SEQ ID NO: 1923933 - RNA, 19 nt, Artificial Sequence
  Description of Artificial Sequence: Synthetic oligonucleotide
uuuggacccaagccucuaa

SEQ ID NO: 1923934 - RNA, 19 nt, Artificial Sequence
  Description of Artificial Sequence: Synthetic oligonucleotide
gcaaccucgucuuaaugac

SEQ ID NO: 1923935 - RNA, 19 nt, Artificial Sequence
  Description of Artificial Sequence: Synthetic oligonucleotide
gguauuugugacaaaagcu

SEQ ID NO: 1923936 - RNA, 19 nt, Artificial Sequence
  Description of Artificial Sequence: Synthetic oligonucleotide
cuaacggagcuuccuucag

SEQ ID NO: 1923937 - RNA, 19 nt, Artificial Sequence
  Description of Artificial Sequence: Synthetic oligonucleotide
caaagcagaugauggucuc

SEQ ID NO: 1923938 - RNA, 19 nt, Artificial Sequence
  Description of Artificial Sequence: Synthetic oligonucleotide
cuuuagaaccuguaagagu

SEQ ID NO: 1923939 - RNA, 19 nt, Artificial Sequence
  Description of Artificial Sequence: Synthetic oligonucleotide
aaccaaauuuggacccaag

SEQ ID NO: 1923940 - RNA, 19 nt, Artificial Sequence
  Description of Artificial Sequence: Synthetic oligonucleotide
gccgagaaaacgugcacag

SEQ ID NO: 1923941 - RNA, 19 nt, Artificial Sequence
  Description of Artificial Sequence: Synthetic oligonucleotide
aagccacggaugccuuccg

SEQ ID NO: 1923942 - RNA, 19 nt, Artificial Sequence
  Description of Artificial Sequence: Synthetic oligonucleotide
guaagaguccaggugucac

SEQ ID NO: 1923943 - RNA, 19 nt, Artificial Sequence
  Description of Artificial Sequence: Synthetic oligonucleotide
caggugucacagacguugg

SEQ ID NO: 1923944 - RNA, 19 nt, Artificial Sequence
  Description of Artificial Sequence: Synthetic oligonucleotide
uggacccaagccucuaaaa

SEQ ID NO: 1923945 - RNA, 19 nt, Artificial Sequence
  Description of Artificial Sequence: Synthetic oligonucleotide
agcuagucgggaagacugc

SEQ ID NO: 1923946 - RNA, 19 nt, Artificial Sequence
  Description of Artificial Sequence: Synthetic oligonucleotide
uccucguuuuaaccaucca

SEQ ID NO: 1923947 - RNA, 19 nt, Artificial Sequence
  Description of Artificial Sequence: Synthetic oligonucleotide
gaagagcuagucgggaaga

SEQ ID NO: 1923948 - RNA, 19 nt, Artificial Sequence
  Description of Artificial Sequence: Synthetic oligonucleotide
aggguaauacaccguccga

SEQ ID NO: 1923949 - RNA, 19 nt, Artificial Sequence
  Description of Artificial Sequence: Synthetic oligonucleotide
ucuuuggcuuuggaguaac

SEQ ID NO: 1923950 - RNA, 19 nt, Artificial Sequence
  Description of Artificial Sequence: Synthetic oligonucleotide
gaugaccucguguggguaa

SEQ ID NO: 1923951 - RNA, 19 nt, Artificial Sequence
  Description of Artificial Sequence: Synthetic oligonucleotide
agcgcacuggaguguguuc

SEQ ID NO: 1923952 - RNA, 19 nt, Artificial Sequence
  Description of Artificial Sequence: Synthetic oligonucleotide
cuguaagaguccagguguc

SEQ ID NO: 1923953 - RNA, 19 nt, Artificial Sequence
  Description of Artificial Sequence: Synthetic oligonucleotide
aaaagccagaggaacucuu

SEQ ID NO: 1923954 - RNA, 19 nt, Artificial Sequence
  Description of Artificial Sequence: Synthetic oligonucleotide
gagcaaagaguccucggua

SEQ ID NO: 1923955 - RNA, 19 nt, Artificial Sequence
  Description of Artificial Sequence: Synthetic oligonucleotide
agacgagccagguacucua

SEQ ID NO: 1923956 - RNA, 19 nt, Artificial Sequence
  Description of Artificial Sequence: Synthetic oligonucleotide
gcacaucccuuagagacgg

SEQ ID NO: 1923957 - RNA, 19 nt, Artificial Sequence
  Description of Artificial Sequence: Synthetic oligonucleotide
caugccgagcgcacuggag

SEQ ID NO: 1923958 - RNA, 19 nt, Artificial Sequence
  Description of Artificial Sequence: Synthetic oligonucleotide
ucguguggguaagcaaugc

SEQ ID NO: 1923959 - RNA, 19 nt, Artificial Sequence
  Description of Artificial Sequence: Synthetic oligonucleotide
agccgagaaaacgugcaca

SEQ ID NO: 1923960 - RNA, 19 nt, Artificial Sequence
  Description of Artificial Sequence: Synthetic oligonucleotide
ggcagucagcccucuauag

SEQ ID NO: 1923961 - RNA, 19 nt, Artificial Sequence
  Description of Artificial Sequence: Synthetic oligonucleotide
ucguucuagcugcauccuc

SEQ ID NO: 1923962 - RNA, 19 nt, Artificial Sequence
  Description of Artificial Sequence: Synthetic oligonucleotide
ccgucugguacacaugccg

SEQ ID NO: 1923963 - RNA, 19 nt, Artificial Sequence
  Description of Artificial Sequence: Synthetic oligonucleotide
gcauacgaggcagucagcc

SEQ ID NO: 1923964 - RNA, 19 nt, Artificial Sequence
  Description of Artificial Sequence: Synthetic oligonucleotide
agcccucuauagaagccac

SEQ ID NO: 1923965 - RNA, 19 nt, Artificial Sequence
  Description of Artificial Sequence: Synthetic oligonucleotide
agagcuagucgggaagacu

SEQ ID NO: 1923966 - RNA, 19 nt, Artificial Sequence
  Description of Artificial Sequence: Synthetic oligonucleotide
ugccauuaaacugcucuuu

SEQ ID NO: 1923967 - RNA, 19 nt, Artificial Sequence
  Description of Artificial Sequence: Synthetic oligonucleotide
aacgugcacaguauugcua

SEQ ID NO: 1923968 - RNA, 19 nt, Artificial Sequence
  Description of Artificial Sequence: Synthetic oligonucleotide
ucucuaggguuuucaguuu

SEQ ID NO: 1923969 - RNA, 19 nt, Artificial Sequence
  Description of Artificial Sequence: Synthetic oligonucleotide
accucgucuuaaugaccuc

SEQ ID NO: 1923970 - RNA, 19 nt, Artificial Sequence
  Description of Artificial Sequence: Synthetic oligonucleotide
agccguguccugaugaccu

SEQ ID NO: 1923971 - RNA, 19 nt, Artificial Sequence
  Description of Artificial Sequence: Synthetic oligonucleotide
ucggcacgcucucccagca

SEQ ID NO: 1923972 - RNA, 19 nt, Artificial Sequence
  Description of Artificial Sequence: Synthetic oligonucleotide
augaccucuagcggacaag

SEQ ID NO: 1923973 - RNA, 19 nt, Artificial Sequence
  Description of Artificial Sequence: Synthetic oligonucleotide
cucggcacgcucucccagc

SEQ ID NO: 1923974 - RNA, 19 nt, Artificial Sequence
  Description of Artificial Sequence: Synthetic oligonucleotide
uacaccguccgaagagcua

SEQ ID NO: 1923975 - RNA, 19 nt, Artificial Sequence
  Description of Artificial Sequence: Synthetic oligonucleotide
agccgucugcacaaacgac

SEQ ID NO: 1923976 - RNA, 19 nt, Artificial Sequence
  Description of Artificial Sequence: Synthetic oligonucleotide
uacacaugccgagcgcacu

SEQ ID NO: 1923977 - RNA, 19 nt, Artificial Sequence
  Description of Artificial Sequence: Synthetic oligonucleotide
cugcaaccucgucuuaaug

SEQ ID NO: 1923978 - RNA, 19 nt, Artificial Sequence
  Description of Artificial Sequence: Synthetic oligonucleotide
uccucccggagccgugucc

SEQ ID NO: 1923979 - RNA, 19 nt, Artificial Sequence
  Description of Artificial Sequence: Synthetic oligonucleotide
agcauacgaggcagucagc

SEQ ID NO: 1923980 - RNA, 19 nt, Artificial Sequence
  Description of Artificial Sequence: Synthetic oligonucleotide
cuuccagagcacagccgug

SEQ ID NO: 1923981 - RNA, 19 nt, Artificial Sequence
  Description of Artificial Sequence: Synthetic oligonucleotide
ccuuagagacggcagcggc

SEQ ID NO: 1923982 - RNA, 19 nt, Artificial Sequence
  Description of Artificial Sequence: Synthetic oligonucleotide
uacgaggcagucagcccuc

SEQ ID NO: 1923983 - RNA, 19 nt, Artificial Sequence
  Description of Artificial Sequence: Synthetic oligonucleotide
augaccucguguggguaag

SEQ ID NO: 1923984 - RNA, 19 nt, Artificial Sequence
  Description of Artificial Sequence: Synthetic oligonucleotide
cgucuuaaugaccucuagc

SEQ ID NO: 1923985 - RNA, 19 nt, Artificial Sequence
  Description of Artificial Sequence: Synthetic oligonucleotide
gguacucuauggccuuugc

SEQ ID NO: 1923986 - RNA, 19 nt, Artificial Sequence
  Description of Artificial Sequence: Synthetic oligonucleotide
agcccuugauggugcaacu

SEQ ID NO: 1923987 - RNA, 19 nt, Artificial Sequence
  Description of Artificial Sequence: Synthetic oligonucleotide
aggaggcacaucccuuaga

SEQ ID NO: 1923988 - RNA, 19 nt, Artificial Sequence
  Description of Artificial Sequence: Synthetic oligonucleotide
agcugcauccucguuuuaa

SEQ ID NO: 1923989 - RNA, 19 nt, Artificial Sequence
  Description of Artificial Sequence: Synthetic oligonucleotide
auacaccguccgaagagcu

SEQ ID NO: 1923990 - RNA, 19 nt, Artificial Sequence
  Description of Artificial Sequence: Synthetic oligonucleotide
gagccguguccugaugacc

SEQ ID NO: 1923991 - RNA, 19 nt, Artificial Sequence
  Description of Artificial Sequence: Synthetic oligonucleotide
ccagaggaacucuucucag

SEQ ID NO: 1923992 - RNA, 19 nt, Artificial Sequence
  Description of Artificial Sequence: Synthetic oligonucleotide
uaaugaccucuagcggaca

SEQ ID NO: 1923993 - RNA, 19 nt, Artificial Sequence
  Description of Artificial Sequence: Synthetic oligonucleotide
cagccgagaaaacgugcac

SEQ ID NO: 1923994 - RNA, 19 nt, Artificial Sequence
  Description of Artificial Sequence: Synthetic oligonucleotide
accucguguggguaagcaa

SEQ ID NO: 1923995 - RNA, 19 nt, Artificial Sequence
  Description of Artificial Sequence: Synthetic oligonucleotide
agccuaacggagcuuccuu

SEQ ID NO: 1923996 - RNA, 19 nt, Artificial Sequence
  Description of Artificial Sequence: Synthetic oligonucleotide
gagaaaacgugcacaguau

SEQ ID NO: 1923997 - RNA, 19 nt, Artificial Sequence
  Description of Artificial Sequence: Synthetic oligonucleotide
cacggaugccuuccgucug

SEQ ID NO: 1923998 - RNA, 19 nt, Artificial Sequence
  Description of Artificial Sequence: Synthetic oligonucleotide
accguccgaagagcuaguc

SEQ ID NO: 1923999 - RNA, 19 nt, Artificial Sequence
  Description of Artificial Sequence: Synthetic oligonucleotide
cacuggaguguguucaucu

SEQ ID NO: 1924000 - RNA, 19 nt, Artificial Sequence
  Description of Artificial Sequence: Synthetic oligonucleotide
cuuagagacggcagcggcu

SEQ ID NO: 1924001 - RNA, 19 nt, Artificial Sequence
  Description of Artificial Sequence: Synthetic oligonucleotide
acaugccgagcgcacugga

SEQ ID NO: 1924002 - RNA, 19 nt, Artificial Sequence
  Description of Artificial Sequence: Synthetic oligonucleotide
gguacacaugccgagcgca

SEQ ID NO: 1924003 - RNA, 19 nt, Artificial Sequence
  Description of Artificial Sequence: Synthetic oligonucleotide
ggggaggagccuaacggag

SEQ ID NO: 1924004 - RNA, 19 nt, Artificial Sequence
  Description of Artificial Sequence: Synthetic oligonucleotide
cuccacuaaugguccccag

SEQ ID NO: 1924005 - RNA, 19 nt, Artificial Sequence
  Description of Artificial Sequence: Synthetic oligonucleotide
gauugacuuuagaaccugu

SEQ ID NO: 1924006 - RNA, 19 nt, Artificial Sequence
  Description of Artificial Sequence: Synthetic oligonucleotide
gaccucguguggguaagca

SEQ ID NO: 1924007 - RNA, 19 nt, Artificial Sequence
  Description of Artificial Sequence: Synthetic oligonucleotide
cuagucgggaagacugcaa

SEQ ID NO: 1924008 - RNA, 19 nt, Artificial Sequence
  Description of Artificial Sequence: Synthetic oligonucleotide
cuagcggacaagugaaaau

SEQ ID NO: 1924009 - RNA, 19 nt, Artificial Sequence
  Description of Artificial Sequence: Synthetic oligonucleotide
acggagcuuccuucagaca

SEQ ID NO: 1924010 - RNA, 19 nt, Artificial Sequence
  Description of Artificial Sequence: Synthetic oligonucleotide
cucgucuuaaugaccucua

SEQ ID NO: 1924011 - RNA, 19 nt, Artificial Sequence
  Description of Artificial Sequence: Synthetic oligonucleotide
cuugaggguaauacaccgu

SEQ ID NO: 1924012 - RNA, 19 nt, Artificial Sequence
  Description of Artificial Sequence: Synthetic oligonucleotide
gcucaauaccucaauaccu

SEQ ID NO: 1924013 - RNA, 19 nt, Artificial Sequence
  Description of Artificial Sequence: Synthetic oligonucleotide
guacacaugccgagcgcac

SEQ ID NO: 1924014 - RNA, 19 nt, Artificial Sequence
  Description of Artificial Sequence: Synthetic oligonucleotide
accauccaaauaggauuca

SEQ ID NO: 1924015 - RNA, 19 nt, Artificial Sequence
  Description of Artificial Sequence: Synthetic oligonucleotide
gcagucagcccucuauaga

SEQ ID NO: 1924016 - RNA, 19 nt, Artificial Sequence
  Description of Artificial Sequence: Synthetic oligonucleotide
caggcgagccgucugcaca

SEQ ID NO: 1924017 - RNA, 19 nt, Artificial Sequence
  Description of Artificial Sequence: Synthetic oligonucleotide
caaacgacuuguacuuggu

SEQ ID NO: 1924018 - RNA, 19 nt, Artificial Sequence
  Description of Artificial Sequence: Synthetic oligonucleotide
ccguccgaagagcuagucg

SEQ ID NO: 1924019 - RNA, 19 nt, Artificial Sequence
  Description of Artificial Sequence: Synthetic oligonucleotide
ggguaauacaccguccgaa

SEQ ID NO: 1924020 - RNA, 19 nt, Artificial Sequence
  Description of Artificial Sequence: Synthetic oligonucleotide
cagccguguggccugucac

SEQ ID NO: 1924021 - RNA, 19 nt, Artificial Sequence
  Description of Artificial Sequence: Synthetic oligonucleotide
agccagccgagaaaacgug

SEQ ID NO: 1924022 - RNA, 19 nt, Artificial Sequence
  Description of Artificial Sequence: Synthetic oligonucleotide
gugcacaguauugcuauua

SEQ ID NO: 1924023 - RNA, 19 nt, Artificial Sequence
  Description of Artificial Sequence: Synthetic oligonucleotide
gcaaagaguccucgguaga

SEQ ID NO: 1924024 - RNA, 19 nt, Artificial Sequence
  Description of Artificial Sequence: Synthetic oligonucleotide
cgagaaaacgugcacagua

SEQ ID NO: 1924025 - RNA, 19 nt, Artificial Sequence
  Description of Artificial Sequence: Synthetic oligonucleotide
ugaccucguguggguaagc

SEQ ID NO: 1924026 - RNA, 19 nt, Artificial Sequence
  Description of Artificial Sequence: Synthetic oligonucleotide
ccuaacggagcuuccuuca

SEQ ID NO: 1924027 - RNA, 19 nt, Artificial Sequence
  Description of Artificial Sequence: Synthetic oligonucleotide
cagcccucuauagaagcca

SEQ ID NO: 1924028 - RNA, 19 nt, Artificial Sequence
  Description of Artificial Sequence: Synthetic oligonucleotide
gcugcucaauaccucaaua

SEQ ID NO: 1924029 - RNA, 19 nt, Artificial Sequence
  Description of Artificial Sequence: Synthetic oligonucleotide
gccuaacggagcuuccuuc

SEQ ID NO: 1924030 - RNA, 19 nt, Artificial Sequence
  Description of Artificial Sequence: Synthetic oligonucleotide
cguguggccugucacucgg

SEQ ID NO: 1924031 - RNA, 19 nt, Artificial Sequence
  Description of Artificial Sequence: Synthetic oligonucleotide
ccagccgagaaaacgugca

SEQ ID NO: 1924032 - RNA, 19 nt, Artificial Sequence
  Description of Artificial Sequence: Synthetic oligonucleotide
guacacagcccuugauggu

SEQ ID NO: 1924033 - RNA, 19 nt, Artificial Sequence
  Description of Artificial Sequence: Synthetic oligonucleotide
cacaucccuuagagacggc

SEQ ID NO: 1924034 - RNA, 19 nt, Artificial Sequence
  Description of Artificial Sequence: Synthetic oligonucleotide
ccggaugagcugagcaaag

SEQ ID NO: 1924035 - RNA, 19 nt, Artificial Sequence
  Description of Artificial Sequence: Synthetic oligonucleotide
gccacggaugccuuccguc

SEQ ID NO: 1924036 - RNA, 19 nt, Artificial Sequence
  Description of Artificial Sequence: Synthetic oligonucleotide
caauaccucaauaccucuu

SEQ ID NO: 1924037 - RNA, 19 nt, Artificial Sequence
  Description of Artificial Sequence: Synthetic oligonucleotide
ggaggagccuaacggagcu

SEQ ID NO: 1924038 - RNA, 19 nt, Artificial Sequence
  Description of Artificial Sequence: Synthetic oligonucleotide
cucuagcggacaagugaaa

SEQ ID NO: 1924039 - RNA, 19 nt, Artificial Sequence
  Description of Artificial Sequence: Synthetic oligonucleotide
ggaagacugcaaccucguc

SEQ ID NO: 1924040 - RNA, 19 nt, Artificial Sequence
  Description of Artificial Sequence: Synthetic oligonucleotide
agguagccuuccucccgga

SEQ ID NO: 1924041 - RNA, 19 nt, Artificial Sequence
  Description of Artificial Sequence: Synthetic oligonucleotide
cagacguuggucucaucau

SEQ ID NO: 1924042 - RNA, 19 nt, Artificial Sequence
  Description of Artificial Sequence: Synthetic oligonucleotide
cucuaggguuuucaguuuu

SEQ ID NO: 1924043 - RNA, 19 nt, Artificial Sequence
  Description of Artificial Sequence: Synthetic oligonucleotide
gcuagucgggaagacugca

SEQ ID NO: 1924044 - RNA, 19 nt, Artificial Sequence
  Description of Artificial Sequence: Synthetic oligonucleotide
gcccucuauagaagccacg

SEQ ID NO: 1924045 - RNA, 19 nt, Artificial Sequence
  Description of Artificial Sequence: Synthetic oligonucleotide
ccugucacucggcacgcuc

SEQ ID NO: 1924046 - RNA, 19 nt, Artificial Sequence
  Description of Artificial Sequence: Synthetic oligonucleotide
gagccuaacggagcuuccu

SEQ ID NO: 1924047 - RNA, 19 nt, Artificial Sequence
  Description of Artificial Sequence: Synthetic oligonucleotide
gcauccucguuuuaaccau

SEQ ID NO: 1924048 - RNA, 19 nt, Artificial Sequence
  Description of Artificial Sequence: Synthetic oligonucleotide
ccguguccugaugaccucg

SEQ ID NO: 1924049 - RNA, 19 nt, Artificial Sequence
  Description of Artificial Sequence: Synthetic oligonucleotide
gaacucuucucagccccgu

SEQ ID NO: 1924050 - RNA, 19 nt, Artificial Sequence
  Description of Artificial Sequence: Synthetic oligonucleotide
gcgcacuggaguguguuca

SEQ ID NO: 1924051 - RNA, 19 nt, Artificial Sequence
  Description of Artificial Sequence: Synthetic oligonucleotide
ggagccuaacggagcuucc

SEQ ID NO: 1924052 - RNA, 19 nt, Artificial Sequence
  Description of Artificial Sequence: Synthetic oligonucleotide
cacucggcacgcucuccca

SEQ ID NO: 1924053 - RNA, 19 nt, Artificial Sequence
  Description of Artificial Sequence: Synthetic oligonucleotide
gccgucugcacaaacgacu

SEQ ID NO: 1924054 - RNA, 19 nt, Artificial Sequence
  Description of Artificial Sequence: Synthetic oligonucleotide
gccggaugagcugagcaaa

SEQ ID NO: 1924055 - RNA, 19 nt, Artificial Sequence
  Description of Artificial Sequence: Synthetic oligonucleotide
ccguguggccugucacucg

SEQ ID NO: 1924056 - RNA, 19 nt, Artificial Sequence
  Description of Artificial Sequence: Synthetic oligonucleotide
acagcccuugauggugcaa

SEQ ID NO: 1924057 - RNA, 19 nt, Artificial Sequence
  Description of Artificial Sequence: Synthetic oligonucleotide
gaacaccaggcgagccguc

SEQ ID NO: 1924058 - RNA, 19 nt, Artificial Sequence
  Description of Artificial Sequence: Synthetic oligonucleotide
cgucugguacacaugccga

SEQ ID NO: 1924059 - RNA, 19 nt, Artificial Sequence
  Description of Artificial Sequence: Synthetic oligonucleotide
ccuuccgucugguacacau

SEQ ID NO: 1924060 - RNA, 19 nt, Artificial Sequence
  Description of Artificial Sequence: Synthetic oligonucleotide
cccagcauacgaggcaguc

SEQ ID NO: 1924061 - RNA, 19 nt, Artificial Sequence
  Description of Artificial Sequence: Synthetic oligonucleotide
cguguggguaagcaaugca

SEQ ID NO: 1924062 - RNA, 19 nt, Artificial Sequence
  Description of Artificial Sequence: Synthetic oligonucleotide
agccccgucuggggaggag

SEQ ID NO: 1924063 - RNA, 19 nt, Artificial Sequence
  Description of Artificial Sequence: Synthetic oligonucleotide
ccaaccaaauuuggaccca

SEQ ID NO: 1924064 - RNA, 19 nt, Artificial Sequence
  Description of Artificial Sequence: Synthetic oligonucleotide
gccccgucuggggaggagc

SEQ ID NO: 1924065 - RNA, 19 nt, Artificial Sequence
  Description of Artificial Sequence: Synthetic oligonucleotide
ccagcauacgaggcaguca

SEQ ID NO: 1924066 - RNA, 19 nt, Artificial Sequence
  Description of Artificial Sequence: Synthetic oligonucleotide
ccaggcgagccgucugcac

SEQ ID NO: 1924067 - RNA, 19 nt, Artificial Sequence
  Description of Artificial Sequence: Synthetic oligonucleotide
gcccuugauggugcaacuc

SEQ ID NO: 1924068 - RNA, 19 nt, Artificial Sequence
  Description of Artificial Sequence: Synthetic oligonucleotide
gagcgcacuggaguguguu

SEQ ID NO: 1924069 - RNA, 19 nt, Artificial Sequence
  Description of Artificial Sequence: Synthetic oligonucleotide
ccggaacaccaggcgagcc

SEQ ID NO: 1924070 - RNA, 19 nt, Artificial Sequence
  Description of Artificial Sequence: Synthetic oligonucleotide
gggaagacugcaaccucgu

SEQ ID NO: 1924071 - RNA, 19 nt, Artificial Sequence
  Description of Artificial Sequence: Synthetic oligonucleotide
gcagccucucaccuuucgu

SEQ ID NO: 1924072 - RNA, 19 nt, Artificial Sequence
  Description of Artificial Sequence: Synthetic oligonucleotide
ccgagcgcacuggagugug

SEQ ID NO: 1924073 - RNA, 19 nt, Artificial Sequence
  Description of Artificial Sequence: Synthetic oligonucleotide
cgucugcacaaacgacuug

SEQ ID NO: 1924074 - RNA, 19 nt, Artificial Sequence
  Description of Artificial Sequence: Synthetic oligonucleotide
ccacggaugccuuccgucu

SEQ ID NO: 1924075 - RNA, 19 nt, Artificial Sequence
  Description of Artificial Sequence: Synthetic oligonucleotide
ccucgucuuaaugaccucu

SEQ ID NO: 1924076 - RNA, 19 nt, Artificial Sequence
  Description of Artificial Sequence: Synthetic oligonucleotide
caccguccgaagagcuagu

SEQ ID NO: 1924077 - RNA, 19 nt, Artificial Sequence
  Description of Artificial Sequence: Synthetic oligonucleotide
ccgucugcacaaacgacuu

SEQ ID NO: 1924078 - RNA, 19 nt, Artificial Sequence
  Description of Artificial Sequence: Synthetic oligonucleotide
gcggcugccaugaguccaa

SEQ ID NO: 1924079 - RNA, 19 nt, Artificial Sequence
  Description of Artificial Sequence: Synthetic oligonucleotide
gaggagccuaacggagcuu

SEQ ID NO: 1924080 - RNA, 19 nt, Artificial Sequence
  Description of Artificial Sequence: Synthetic oligonucleotide
cggaugagcugagcaaaga

SEQ ID NO: 1924081 - RNA, 19 nt, Artificial Sequence
  Description of Artificial Sequence: Synthetic oligonucleotide
cacagccguguggccuguc

SEQ ID NO: 1924082 - RNA, 19 nt, Artificial Sequence
  Description of Artificial Sequence: Synthetic oligonucleotide
ccauccaaauaggauucau

SEQ ID NO: 1924083 - RNA, 19 nt, Artificial Sequence
  Description of Artificial Sequence: Synthetic oligonucleotide
ccggagccguguccugaug

SEQ ID NO: 1924084 - RNA, 19 nt, Artificial Sequence
  Description of Artificial Sequence: Synthetic oligonucleotide
ccgucuggggaggagccua

SEQ ID NO: 1924085 - RNA, 19 nt, Artificial Sequence
  Description of Artificial Sequence: Synthetic oligonucleotide
ccgagaaaacgugcacagu

SEQ ID NO: 1924086 - RNA, 19 nt, Artificial Sequence
  Description of Artificial Sequence: Synthetic oligonucleotide
gccgagcgcacuggagugu

SEQ ID NO: 1924087 - RNA, 19 nt, Artificial Sequence
  Description of Artificial Sequence: Synthetic oligonucleotide
ggcgagccgucugcacaaa

SEQ ID NO: 1924088 - RNA, 19 nt, Artificial Sequence
  Description of Artificial Sequence: Synthetic oligonucleotide
ccuuucguucuagcugcau

SEQ ID NO: 1924089 - RNA, 19 nt, Artificial Sequence
  Description of Artificial Sequence: Synthetic oligonucleotide
cgugcacaguauugcuauu

SEQ ID NO: 1924090 - RNA, 19 nt, Artificial Sequence
  Description of Artificial Sequence: Synthetic oligonucleotide
cgagcgcacuggagugugu

SEQ ID NO: 1924091 - RNA, 19 nt, Artificial Sequence
  Description of Artificial Sequence: Synthetic oligonucleotide
aaaaccaguuuucagauac

SEQ ID NO: 1924092 - RNA, 19 nt, Artificial Sequence
  Description of Artificial Sequence: Synthetic oligonucleotide
uauauaauaacuaaacacu

SEQ ID NO: 1924093 - RNA, 19 nt, Artificial Sequence
  Description of Artificial Sequence: Synthetic oligonucleotide
aauaugauaaugcacagau

SEQ ID NO: 1924094 - RNA, 19 nt, Artificial Sequence
  Description of Artificial Sequence: Synthetic oligonucleotide
auaacuaaacacuagauga

SEQ ID NO: 1924095 - RNA, 19 nt, Artificial Sequence
  Description of Artificial Sequence: Synthetic oligonucleotide
aauuacaagaacccaagag

SEQ ID NO: 1924096 - RNA, 19 nt, Artificial Sequence
  Description of Artificial Sequence: Synthetic oligonucleotide
augauauaauuucagaugg

SEQ ID NO: 1924097 - RNA, 19 nt, Artificial Sequence
  Description of Artificial Sequence: Synthetic oligonucleotide
aauaacuaaacacuagaug

SEQ ID NO: 1924098 - RNA, 19 nt, Artificial Sequence
  Description of Artificial Sequence: Synthetic oligonucleotide
uuuucuaugagcuuuccag

SEQ ID NO: 1924099 - RNA, 19 nt, Artificial Sequence
  Description of Artificial Sequence: Synthetic oligonucleotide
ucuauuaacaacauauuaa

SEQ ID NO: 1924100 - RNA, 19 nt, Artificial Sequence
  Description of Artificial Sequence: Synthetic oligonucleotide
aaacacauuagcugucugc

SEQ ID NO: 1924101 - RNA, 19 nt, Artificial Sequence
  Description of Artificial Sequence: Synthetic oligonucleotide
auuaauauuuuacucacca

SEQ ID NO: 1924102 - RNA, 19 nt, Artificial Sequence
  Description of Artificial Sequence: Synthetic oligonucleotide
gaagcaaucaucuaauuuc

SEQ ID NO: 1924103 - RNA, 19 nt, Artificial Sequence
  Description of Artificial Sequence: Synthetic oligonucleotide
aaaggggugaguugcagac

SEQ ID NO: 1924104 - RNA, 19 nt, Artificial Sequence
  Description of Artificial Sequence: Synthetic oligonucleotide
aacagcuucccguagacag

SEQ ID NO: 1924105 - RNA, 19 nt, Artificial Sequence
  Description of Artificial Sequence: Synthetic oligonucleotide
uauaauaacuaaacacuag

SEQ ID NO: 1924106 - RNA, 19 nt, Artificial Sequence
  Description of Artificial Sequence: Synthetic oligonucleotide
caauaaauuacaagaaccc

SEQ ID NO: 1924107 - RNA, 19 nt, Artificial Sequence
  Description of Artificial Sequence: Synthetic oligonucleotide
uucucgaucagcuggacgg

SEQ ID NO: 1924108 - RNA, 19 nt, Artificial Sequence
  Description of Artificial Sequence: Synthetic oligonucleotide
aaaagaguaaauaugcacu

SEQ ID NO: 1924109 - RNA, 19 nt, Artificial Sequence
  Description of Artificial Sequence: Synthetic oligonucleotide
gaaaagaguaaauaugcac

SEQ ID NO: 1924110 - RNA, 19 nt, Artificial Sequence
  Description of Artificial Sequence: Synthetic oligonucleotide
gagaaaagaguaaauaugc

SEQ ID NO: 1924111 - RNA, 19 nt, Artificial Sequence
  Description of Artificial Sequence: Synthetic oligonucleotide
uucagaugggcacagaaug

SEQ ID NO: 1924112 - RNA, 19 nt, Artificial Sequence
  Description of Artificial Sequence: Synthetic oligonucleotide
aguaaauaugcacuauuuc

SEQ ID NO: 1924113 - RNA, 19 nt, Artificial Sequence
  Description of Artificial Sequence: Synthetic oligonucleotide
auaauaacuaaacacuaga

SEQ ID NO: 1924114 - RNA, 19 nt, Artificial Sequence
  Description of Artificial Sequence: Synthetic oligonucleotide
uuaugauauaauuucagau

SEQ ID NO: 1924115 - RNA, 19 nt, Artificial Sequence
  Description of Artificial Sequence: Synthetic oligonucleotide
cucaaaauuaguuugguca

SEQ ID NO: 1924116 - RNA, 19 nt, Artificial Sequence
  Description of Artificial Sequence: Synthetic oligonucleotide
auacacaaauaccauacuc

SEQ ID NO: 1924117 - RNA, 19 nt, Artificial Sequence
  Description of Artificial Sequence: Synthetic oligonucleotide
uacacaaauaccauacucu

SEQ ID NO: 1924118 - RNA, 19 nt, Artificial Sequence
  Description of Artificial Sequence: Synthetic oligonucleotide
acaaauaccauacucugca

SEQ ID NO: 1924119 - RNA, 19 nt, Artificial Sequence
  Description of Artificial Sequence: Synthetic oligonucleotide
uuaaauguguucuguauac

SEQ ID NO: 1924120 - RNA, 19 nt, Artificial Sequence
  Description of Artificial Sequence: Synthetic oligonucleotide
aauaccauacucugcauau

SEQ ID NO: 1924121 - RNA, 19 nt, Artificial Sequence
  Description of Artificial Sequence: Synthetic oligonucleotide
auaauuaucuuucuucaga

SEQ ID NO: 1924122 - RNA, 19 nt, Artificial Sequence
  Description of Artificial Sequence: Synthetic oligonucleotide
uuuccuagaaguucaacug

SEQ ID NO: 1924123 - RNA, 19 nt, Artificial Sequence
  Description of Artificial Sequence: Synthetic oligonucleotide
gauauaauuucagaugggc

SEQ ID NO: 1924124 - RNA, 19 nt, Artificial Sequence
  Description of Artificial Sequence: Synthetic oligonucleotide
aacuguacagccuuuucug

SEQ ID NO: 1924125 - RNA, 19 nt, Artificial Sequence
  Description of Artificial Sequence: Synthetic oligonucleotide
uuucauauuguccuugggu

SEQ ID NO: 1924126 - RNA, 19 nt, Artificial Sequence
  Description of Artificial Sequence: Synthetic oligonucleotide
ucaacaucaugccagcuug

SEQ ID NO: 1924127 - RNA, 19 nt, Artificial Sequence
  Description of Artificial Sequence: Synthetic oligonucleotide
aaauaugcacuauuuccug

SEQ ID NO: 1924128 - RNA, 19 nt, Artificial Sequence
  Description of Artificial Sequence: Synthetic oligonucleotide
ucuagcauauucaugcaga

SEQ ID NO: 1924129 - RNA, 19 nt, Artificial Sequence
  Description of Artificial Sequence: Synthetic oligonucleotide
aauaaauuacaagaaccca

SEQ ID NO: 1924130 - RNA, 19 nt, Artificial Sequence
  Description of Artificial Sequence: Synthetic oligonucleotide
acuauauaauaacuaaaca

SEQ ID NO: 1924131 - RNA, 19 nt, Artificial Sequence
  Description of Artificial Sequence: Synthetic oligonucleotide
uuaucuuucuucagaagca

SEQ ID NO: 1924132 - RNA, 19 nt, Artificial Sequence
  Description of Artificial Sequence: Synthetic oligonucleotide
uucagaagcaaucaucuaa

SEQ ID NO: 1924133 - RNA, 19 nt, Artificial Sequence
  Description of Artificial Sequence: Synthetic oligonucleotide
uugcuuaugauauaauuuc

SEQ ID NO: 1924134 - RNA, 19 nt, Artificial Sequence
  Description of Artificial Sequence: Synthetic oligonucleotide
aaucaucuaauuucuauua

SEQ ID NO: 1924135 - RNA, 19 nt, Artificial Sequence
  Description of Artificial Sequence: Synthetic oligonucleotide
auuagcugucugcugauac

SEQ ID NO: 1924136 - RNA, 19 nt, Artificial Sequence
  Description of Artificial Sequence: Synthetic oligonucleotide
agugcagccucaucaaacc

SEQ ID NO: 1924137 - RNA, 19 nt, Artificial Sequence
  Description of Artificial Sequence: Synthetic oligonucleotide
uuucuguauagacagugca

SEQ ID NO: 1924138 - RNA, 19 nt, Artificial Sequence
  Description of Artificial Sequence: Synthetic oligonucleotide
uucuauuaacaacauauua

SEQ ID NO: 1924139 - RNA, 19 nt, Artificial Sequence
  Description of Artificial Sequence: Synthetic oligonucleotide
caauauauuaaauguguuc

SEQ ID NO: 1924140 - RNA, 19 nt, Artificial Sequence
  Description of Artificial Sequence: Synthetic oligonucleotide
uuuugcuugcucaaaauua

SEQ ID NO: 1924141 - RNA, 19 nt, Artificial Sequence
  Description of Artificial Sequence: Synthetic oligonucleotide
agcauauucaugcagacuu

SEQ ID NO: 1924142 - RNA, 19 nt, Artificial Sequence
  Description of Artificial Sequence: Synthetic oligonucleotide
agcugcuuuuccuauauuc

SEQ ID NO: 1924143 - RNA, 19 nt, Artificial Sequence
  Description of Artificial Sequence: Synthetic oligonucleotide
aaagaguaaauaugcacua

SEQ ID NO: 1924144 - RNA, 19 nt, Artificial Sequence
  Description of Artificial Sequence: Synthetic oligonucleotide
uaagcuuaggcccagcuua

SEQ ID NO: 1924145 - RNA, 19 nt, Artificial Sequence
  Description of Artificial Sequence: Synthetic oligonucleotide
uugaaaaggggugaguugc

SEQ ID NO: 1924146 - RNA, 19 nt, Artificial Sequence
  Description of Artificial Sequence: Synthetic oligonucleotide
uaaugcacagauuccauac

SEQ ID NO: 1924147 - RNA, 19 nt, Artificial Sequence
  Description of Artificial Sequence: Synthetic oligonucleotide
uaauaacuaaacacuagau

SEQ ID NO: 1924148 - RNA, 19 nt, Artificial Sequence
  Description of Artificial Sequence: Synthetic oligonucleotide
ucaucuaauuucuauuaac

SEQ ID NO: 1924149 - RNA, 19 nt, Artificial Sequence
  Description of Artificial Sequence: Synthetic oligonucleotide
ccuaaucccaugaagaugg

SEQ ID NO: 1924150 - RNA, 19 nt, Artificial Sequence
  Description of Artificial Sequence: Synthetic oligonucleotide
uucuguauagacagugcag

SEQ ID NO: 1924151 - RNA, 19 nt, Artificial Sequence
  Description of Artificial Sequence: Synthetic oligonucleotide
uggaucuacauuuucuaug

SEQ ID NO: 1924152 - RNA, 19 nt, Artificial Sequence
  Description of Artificial Sequence: Synthetic oligonucleotide
ucuguauagacagugcagc

SEQ ID NO: 1924153 - RNA, 19 nt, Artificial Sequence
  Description of Artificial Sequence: Synthetic oligonucleotide
uguauacugacuucacuca

SEQ ID NO: 1924154 - RNA, 19 nt, Artificial Sequence
  Description of Artificial Sequence: Synthetic oligonucleotide
ucauuguccauguauuuga

SEQ ID NO: 1924155 - RNA, 19 nt, Artificial Sequence
  Description of Artificial Sequence: Synthetic oligonucleotide
gaccacuaagcuuaggccc

SEQ ID NO: 1924156 - RNA, 19 nt, Artificial Sequence
  Description of Artificial Sequence: Synthetic oligonucleotide
agagaaaagaguaaauaug

SEQ ID NO: 1924157 - RNA, 19 nt, Artificial Sequence
  Description of Artificial Sequence: Synthetic oligonucleotide
uaauuaucuuucuucagaa

SEQ ID NO: 1924158 - RNA, 19 nt, Artificial Sequence
  Description of Artificial Sequence: Synthetic oligonucleotide
auuuucaugggcaacagcu

SEQ ID NO: 1924159 - RNA, 19 nt, Artificial Sequence
  Description of Artificial Sequence: Synthetic oligonucleotide
uucucaucuccucugcagg

SEQ ID NO: 1924160 - RNA, 19 nt, Artificial Sequence
  Description of Artificial Sequence: Synthetic oligonucleotide
ugcugauacaacuguacag

SEQ ID NO: 1924161 - RNA, 19 nt, Artificial Sequence
  Description of Artificial Sequence: Synthetic oligonucleotide
uuuucauauuguccuuggg

SEQ ID NO: 1924162 - RNA, 19 nt, Artificial Sequence
  Description of Artificial Sequence: Synthetic oligonucleotide
ucaaaauuaguuuggucau

SEQ ID NO: 1924163 - RNA, 19 nt, Artificial Sequence
  Description of Artificial Sequence: Synthetic oligonucleotide
uuugaaaaggggugaguug

SEQ ID NO: 1924164 - RNA, 19 nt, Artificial Sequence
  Description of Artificial Sequence: Synthetic oligonucleotide
ucuuucuguauagacagug

SEQ ID NO: 1924165 - RNA, 19 nt, Artificial Sequence
  Description of Artificial Sequence: Synthetic oligonucleotide
cuguauacugacuucacuc

SEQ ID NO: 1924166 - RNA, 19 nt, Artificial Sequence
  Description of Artificial Sequence: Synthetic oligonucleotide
aaagggcccuguuauuuuc

SEQ ID NO: 1924167 - RNA, 19 nt, Artificial Sequence
  Description of Artificial Sequence: Synthetic oligonucleotide
uguauuugaaaagggguga

SEQ ID NO: 1924168 - RNA, 19 nt, Artificial Sequence
  Description of Artificial Sequence: Synthetic oligonucleotide
uucuagcauauucaugcag

SEQ ID NO: 1924169 - RNA, 19 nt, Artificial Sequence
  Description of Artificial Sequence: Synthetic oligonucleotide
aacacauuagcugucugcu

SEQ ID NO: 1924170 - RNA, 19 nt, Artificial Sequence
  Description of Artificial Sequence: Synthetic oligonucleotide
uucacucacuauauaauaa

SEQ ID NO: 1924171 - RNA, 19 nt, Artificial Sequence
  Description of Artificial Sequence: Synthetic oligonucleotide
aaacacuagaugauucuag

SEQ ID NO: 1924172 - RNA, 19 nt, Artificial Sequence
  Description of Artificial Sequence: Synthetic oligonucleotide
ucacucacuauauaauaac

SEQ ID NO: 1924173 - RNA, 19 nt, Artificial Sequence
  Description of Artificial Sequence: Synthetic oligonucleotide
ucugcugauacaacuguac

SEQ ID NO: 1924174 - RNA, 19 nt, Artificial Sequence
  Description of Artificial Sequence: Synthetic oligonucleotide
uuccuagaaguucaacugc

SEQ ID NO: 1924175 - RNA, 19 nt, Artificial Sequence
  Description of Artificial Sequence: Synthetic oligonucleotide
ugcuuaugauauaauuuca

SEQ ID NO: 1924176 - RNA, 19 nt, Artificial Sequence
  Description of Artificial Sequence: Synthetic oligonucleotide
uauucaugcagacuuucaa

SEQ ID NO: 1924177 - RNA, 19 nt, Artificial Sequence
  Description of Artificial Sequence: Synthetic oligonucleotide
uggggugccauucuccagg

SEQ ID NO: 1924178 - RNA, 19 nt, Artificial Sequence
  Description of Artificial Sequence: Synthetic oligonucleotide
cuaugagcuuuccagcucg

SEQ ID NO: 1924179 - RNA, 19 nt, Artificial Sequence
  Description of Artificial Sequence: Synthetic oligonucleotide
caucuaauuucuauuaaca

SEQ ID NO: 1924180 - RNA, 19 nt, Artificial Sequence
  Description of Artificial Sequence: Synthetic oligonucleotide
uuucaaugcaaugaaaauu

SEQ ID NO: 1924181 - RNA, 19 nt, Artificial Sequence
  Description of Artificial Sequence: Synthetic oligonucleotide
ucagguuuggccuggggug

SEQ ID NO: 1924182 - RNA, 19 nt, Artificial Sequence
  Description of Artificial Sequence: Synthetic oligonucleotide
caugaagauggcuugccag

SEQ ID NO: 1924183 - RNA, 19 nt, Artificial Sequence
  Description of Artificial Sequence: Synthetic oligonucleotide
cauaauuaucuuucuucag

SEQ ID NO: 1924184 - RNA, 19 nt, Artificial Sequence
  Description of Artificial Sequence: Synthetic oligonucleotide
acuaaacacuagaugauuc

SEQ ID NO: 1924185 - RNA, 19 nt, Artificial Sequence
  Description of Artificial Sequence: Synthetic oligonucleotide
caaaccuucguccucguac

SEQ ID NO: 1924186 - RNA, 19 nt, Artificial Sequence
  Description of Artificial Sequence: Synthetic oligonucleotide
augauaaugcacagauucc

SEQ ID NO: 1924187 - RNA, 19 nt, Artificial Sequence
  Description of Artificial Sequence: Synthetic oligonucleotide
agaagcggcacugucauag

SEQ ID NO: 1924188 - RNA, 19 nt, Artificial Sequence
  Description of Artificial Sequence: Synthetic oligonucleotide
caggguacuagcauaggcc

SEQ ID NO: 1924189 - RNA, 19 nt, Artificial Sequence
  Description of Artificial Sequence: Synthetic oligonucleotide
ucaauauauuaaauguguu

SEQ ID NO: 1924190 - RNA, 19 nt, Artificial Sequence
  Description of Artificial Sequence: Synthetic oligonucleotide
agaccucugacacuugauc

SEQ ID NO: 1924191 - RNA, 19 nt, Artificial Sequence
  Description of Artificial Sequence: Synthetic oligonucleotide
caucaugcuggcuuucucg

SEQ ID NO: 1924192 - RNA, 19 nt, Artificial Sequence
  Description of Artificial Sequence: Synthetic oligonucleotide
aaaccuucguccucguacu

SEQ ID NO: 1924193 - RNA, 19 nt, Artificial Sequence
  Description of Artificial Sequence: Synthetic oligonucleotide
acugacuucacucacuaua

SEQ ID NO: 1924194 - RNA, 19 nt, Artificial Sequence
  Description of Artificial Sequence: Synthetic oligonucleotide
acuagcauaggccuccuga

SEQ ID NO: 1924195 - RNA, 19 nt, Artificial Sequence
  Description of Artificial Sequence: Synthetic oligonucleotide
aucuaauuucuauuaacaa

SEQ ID NO: 1924196 - RNA, 19 nt, Artificial Sequence
  Description of Artificial Sequence: Synthetic oligonucleotide
aaauaccauacucugcaua

SEQ ID NO: 1924197 - RNA, 19 nt, Artificial Sequence
  Description of Artificial Sequence: Synthetic oligonucleotide
aaugcacagauuccauaca

SEQ ID NO: 1924198 - RNA, 19 nt, Artificial Sequence
  Description of Artificial Sequence: Synthetic oligonucleotide
aaaauuaguuuggucauuu

SEQ ID NO: 1924199 - RNA, 19 nt, Artificial Sequence
  Description of Artificial Sequence: Synthetic oligonucleotide
aagucaacagcugcuuuuc

SEQ ID NO: 1924200 - RNA, 19 nt, Artificial Sequence
  Description of Artificial Sequence: Synthetic oligonucleotide
aaaaggggugaguugcaga

SEQ ID NO: 1924201 - RNA, 19 nt, Artificial Sequence
  Description of Artificial Sequence: Synthetic oligonucleotide
aaauaugauaaugcacaga

SEQ ID NO: 1924202 - RNA, 19 nt, Artificial Sequence
  Description of Artificial Sequence: Synthetic oligonucleotide
ugaguugcagaccucugac

SEQ ID NO: 1924203 - RNA, 19 nt, Artificial Sequence
  Description of Artificial Sequence: Synthetic oligonucleotide
uuguccuuggguuuuauuu

SEQ ID NO: 1924204 - RNA, 19 nt, Artificial Sequence
  Description of Artificial Sequence: Synthetic oligonucleotide
aagaacccaagagaaaaga

SEQ ID NO: 1924205 - RNA, 19 nt, Artificial Sequence
  Description of Artificial Sequence: Synthetic oligonucleotide
aauuucuauuaacaacaua

SEQ ID NO: 1924206 - RNA, 19 nt, Artificial Sequence
  Description of Artificial Sequence: Synthetic oligonucleotide
ucuguauacugacuucacu

SEQ ID NO: 1924207 - RNA, 19 nt, Artificial Sequence
  Description of Artificial Sequence: Synthetic oligonucleotide
cuuucuguauagacagugc

SEQ ID NO: 1924208 - RNA, 19 nt, Artificial Sequence
  Description of Artificial Sequence: Synthetic oligonucleotide
ugcuuuuccuauauucaga

SEQ ID NO: 1924209 - RNA, 19 nt, Artificial Sequence
  Description of Artificial Sequence: Synthetic oligonucleotide
ucagauacuucucugccuu

SEQ ID NO: 1924210 - RNA, 19 nt, Artificial Sequence
  Description of Artificial Sequence: Synthetic oligonucleotide
gaguccuaaucccaugaag

SEQ ID NO: 1924211 - RNA, 19 nt, Artificial Sequence
  Description of Artificial Sequence: Synthetic oligonucleotide
uaggccuccugaauacucg

SEQ ID NO: 1924212 - RNA, 19 nt, Artificial Sequence
  Description of Artificial Sequence: Synthetic oligonucleotide
cugauacaacuguacagcc

SEQ ID NO: 1924213 - RNA, 19 nt, Artificial Sequence
  Description of Artificial Sequence: Synthetic oligonucleotide
acaagaacccaagagaaaa

SEQ ID NO: 1924214 - RNA, 19 nt, Artificial Sequence
  Description of Artificial Sequence: Synthetic oligonucleotide
ugcacuauuuccugccuug

SEQ ID NO: 1924215 - RNA, 19 nt, Artificial Sequence
  Description of Artificial Sequence: Synthetic oligonucleotide
ucagaugggcacagaauga

SEQ ID NO: 1924216 - RNA, 19 nt, Artificial Sequence
  Description of Artificial Sequence: Synthetic oligonucleotide
uauuuucaugggcaacagc

SEQ ID NO: 1924217 - RNA, 19 nt, Artificial Sequence
  Description of Artificial Sequence: Synthetic oligonucleotide
ugauacaacuguacagccu

SEQ ID NO: 1924218 - RNA, 19 nt, Artificial Sequence
  Description of Artificial Sequence: Synthetic oligonucleotide
caucaugccagcuugcuca

SEQ ID NO: 1924219 - RNA, 19 nt, Artificial Sequence
  Description of Artificial Sequence: Synthetic oligonucleotide
auguauuugaaaaggggug

SEQ ID NO: 1924220 - RNA, 19 nt, Artificial Sequence
  Description of Artificial Sequence: Synthetic oligonucleotide
guacuagcagucuggaggc

SEQ ID NO: 1924221 - RNA, 19 nt, Artificial Sequence
  Description of Artificial Sequence: Synthetic oligonucleotide
uccucagcaguugugcugg

SEQ ID NO: 1924222 - RNA, 19 nt, Artificial Sequence
  Description of Artificial Sequence: Synthetic oligonucleotide
acaacauauuaauauuuua

SEQ ID NO: 1924223 - RNA, 19 nt, Artificial Sequence
  Description of Artificial Sequence: Synthetic oligonucleotide
aaucccaugaagauggcuu

SEQ ID NO: 1924224 - RNA, 19 nt, Artificial Sequence
  Description of Artificial Sequence: Synthetic oligonucleotide
auuucagaugggcacagaa

SEQ ID NO: 1924225 - RNA, 19 nt, Artificial Sequence
  Description of Artificial Sequence: Synthetic oligonucleotide
ugucugcugauacaacugu

SEQ ID NO: 1924226 - RNA, 19 nt, Artificial Sequence
  Description of Artificial Sequence: Synthetic oligonucleotide
ucagaagcggcacugucau

SEQ ID NO: 1924227 - RNA, 19 nt, Artificial Sequence
  Description of Artificial Sequence: Synthetic oligonucleotide
agaguaaauaugcacuauu

SEQ ID NO: 1924228 - RNA, 19 nt, Artificial Sequence
  Description of Artificial Sequence: Synthetic oligonucleotide
cguacuagcagucuggagg

SEQ ID NO: 1924229 - RNA, 19 nt, Artificial Sequence
  Description of Artificial Sequence: Synthetic oligonucleotide
acuagaugauucuagcaua

SEQ ID NO: 1924230 - RNA, 19 nt, Artificial Sequence
  Description of Artificial Sequence: Synthetic oligonucleotide
aagcaaucaucuaauuucu

SEQ ID NO: 1924231 - RNA, 19 nt, Artificial Sequence
  Description of Artificial Sequence: Synthetic oligonucleotide
aggguacuagcauaggccu

SEQ ID NO: 1924232 - RNA, 19 nt, Artificial Sequence
  Description of Artificial Sequence: Synthetic oligonucleotide
aagcggcacugucauaguc

SEQ ID NO: 1924233 - RNA, 19 nt, Artificial Sequence
  Description of Artificial Sequence: Synthetic oligonucleotide
uucaacaucaugccagcuu

SEQ ID NO: 1924234 - RNA, 19 nt, Artificial Sequence
  Description of Artificial Sequence: Synthetic oligonucleotide
uguauagacagugcagccu

SEQ ID NO: 1924235 - RNA, 19 nt, Artificial Sequence
  Description of Artificial Sequence: Synthetic oligonucleotide
auucaugcagacuuucaau

SEQ ID NO: 1924236 - RNA, 19 nt, Artificial Sequence
  Description of Artificial Sequence: Synthetic oligonucleotide
ccauguauuugaaaagggg

SEQ ID NO: 1924237 - RNA, 19 nt, Artificial Sequence
  Description of Artificial Sequence: Synthetic oligonucleotide
auauaauuucagaugggca

SEQ ID NO: 1924238 - RNA, 19 nt, Artificial Sequence
  Description of Artificial Sequence: Synthetic oligonucleotide
cuguauagacagugcagcc

SEQ ID NO: 1924239 - RNA, 19 nt, Artificial Sequence
  Description of Artificial Sequence: Synthetic oligonucleotide
aucagguuuggccuggggu

SEQ ID NO: 1924240 - RNA, 19 nt, Artificial Sequence
  Description of Artificial Sequence: Synthetic oligonucleotide
caucaaaccuucguccucg

SEQ ID NO: 1924241 - RNA, 19 nt, Artificial Sequence
  Description of Artificial Sequence: Synthetic oligonucleotide
guauagacagugcagccuc

SEQ ID NO: 1924242 - RNA, 19 nt, Artificial Sequence
  Description of Artificial Sequence: Synthetic oligonucleotide
uuccuauauucagaagcgg

SEQ ID NO: 1924243 - RNA, 19 nt, Artificial Sequence
  Description of Artificial Sequence: Synthetic oligonucleotide
aaaagucaacagcugcuuu

SEQ ID NO: 1924244 - RNA, 19 nt, Artificial Sequence
  Description of Artificial Sequence: Synthetic oligonucleotide
caagaacccaagagaaaag

SEQ ID NO: 1924245 - RNA, 19 nt, Artificial Sequence
  Description of Artificial Sequence: Synthetic oligonucleotide
cauguauuugaaaaggggu

SEQ ID NO: 1924246 - RNA, 19 nt, Artificial Sequence
  Description of Artificial Sequence: Synthetic oligonucleotide
uaccauacucugcauauuu

SEQ ID NO: 1924247 - RNA, 19 nt, Artificial Sequence
  Description of Artificial Sequence: Synthetic oligonucleotide
agguacaucaugcuggcuu

SEQ ID NO: 1924248 - RNA, 19 nt, Artificial Sequence
  Description of Artificial Sequence: Synthetic oligonucleotide
cagcuuagcauagucauug

SEQ ID NO: 1924249 - RNA, 19 nt, Artificial Sequence
  Description of Artificial Sequence: Synthetic oligonucleotide
auaauuucagaugggcaca

SEQ ID NO: 1924250 - RNA, 19 nt, Artificial Sequence
  Description of Artificial Sequence: Synthetic oligonucleotide
uccauacacaaauaccaua

SEQ ID NO: 1924251 - RNA, 19 nt, Artificial Sequence
  Description of Artificial Sequence: Synthetic oligonucleotide
gaugggcacagaaugaguc

SEQ ID NO: 1924252 - RNA, 19 nt, Artificial Sequence
  Description of Artificial Sequence: Synthetic oligonucleotide
auuugaaaaggggugaguu

SEQ ID NO: 1924253 - RNA, 19 nt, Artificial Sequence
  Description of Artificial Sequence: Synthetic oligonucleotide
uuucuucagaagcaaucau

SEQ ID NO: 1924254 - RNA, 19 nt, Artificial Sequence
  Description of Artificial Sequence: Synthetic oligonucleotide
aacuaaacacuagaugauu

SEQ ID NO: 1924255 - RNA, 19 nt, Artificial Sequence
  Description of Artificial Sequence: Synthetic oligonucleotide
ucuaugagcuuuccagcuc

SEQ ID NO: 1924256 - RNA, 19 nt, Artificial Sequence
  Description of Artificial Sequence: Synthetic oligonucleotide
aaggggugaguugcagacc

SEQ ID NO: 1924257 - RNA, 19 nt, Artificial Sequence
  Description of Artificial Sequence: Synthetic oligonucleotide
acaucaugccagcuugcuc

SEQ ID NO: 1924258 - RNA, 19 nt, Artificial Sequence
  Description of Artificial Sequence: Synthetic oligonucleotide
cuugcucauaagcuuuggc

SEQ ID NO: 1924259 - RNA, 19 nt, Artificial Sequence
  Description of Artificial Sequence: Synthetic oligonucleotide
uccuaaucccaugaagaug

SEQ ID NO: 1924260 - RNA, 19 nt, Artificial Sequence
  Description of Artificial Sequence: Synthetic oligonucleotide
aagauggcuugccaggauu

SEQ ID NO: 1924261 - RNA, 19 nt, Artificial Sequence
  Description of Artificial Sequence: Synthetic oligonucleotide
uccucguacuagcagucug

SEQ ID NO: 1924262 - RNA, 19 nt, Artificial Sequence
  Description of Artificial Sequence: Synthetic oligonucleotide
uacaagaacccaagagaaa

SEQ ID NO: 1924263 - RNA, 19 nt, Artificial Sequence
  Description of Artificial Sequence: Synthetic oligonucleotide
uucuguauacugacuucac

SEQ ID NO: 1924264 - RNA, 19 nt, Artificial Sequence
  Description of Artificial Sequence: Synthetic oligonucleotide
aggggugaguugcagaccu

SEQ ID NO: 1924265 - RNA, 19 nt, Artificial Sequence
  Description of Artificial Sequence: Synthetic oligonucleotide
uguacagccuuuucuggau

SEQ ID NO: 1924266 - RNA, 19 nt, Artificial Sequence
  Description of Artificial Sequence: Synthetic oligonucleotide
gaucuacauuuucuaugag

SEQ ID NO: 1924267 - RNA, 19 nt, Artificial Sequence
  Description of Artificial Sequence: Synthetic oligonucleotide
ugaaaaggggugaguugca

SEQ ID NO: 1924268 - RNA, 19 nt, Artificial Sequence
  Description of Artificial Sequence: Synthetic oligonucleotide
agaaaagaguaaauaugca

SEQ ID NO: 1924269 - RNA, 19 nt, Artificial Sequence
  Description of Artificial Sequence: Synthetic oligonucleotide
aaauuaguuuggucauuuu

SEQ ID NO: 1924270 - RNA, 19 nt, Artificial Sequence
  Description of Artificial Sequence: Synthetic oligonucleotide
uaugcacuauuuccugccu

SEQ ID NO: 1924271 - RNA, 19 nt, Artificial Sequence
  Description of Artificial Sequence: Synthetic oligonucleotide
uguuauuuucaugggcaac

SEQ ID NO: 1924272 - RNA, 19 nt, Artificial Sequence
  Description of Artificial Sequence: Synthetic oligonucleotide
guauacugacuucacucac

SEQ ID NO: 1924273 - RNA, 19 nt, Artificial Sequence
  Description of Artificial Sequence: Synthetic oligonucleotide
guauuugaaaaggggugag

SEQ ID NO: 1924274 - RNA, 19 nt, Artificial Sequence
  Description of Artificial Sequence: Synthetic oligonucleotide
acuaagcuuaggcccagcu

SEQ ID NO: 1924275 - RNA, 19 nt, Artificial Sequence
  Description of Artificial Sequence: Synthetic oligonucleotide
ucguccucguacuagcagu

SEQ ID NO: 1924276 - RNA, 19 nt, Artificial Sequence
  Description of Artificial Sequence: Synthetic oligonucleotide
gucauuguccauguauuug

SEQ ID NO: 1924277 - RNA, 19 nt, Artificial Sequence
  Description of Artificial Sequence: Synthetic oligonucleotide
ucaggcaguuucugcaucu

SEQ ID NO: 1924278 - RNA, 19 nt, Artificial Sequence
  Description of Artificial Sequence: Synthetic oligonucleotide
aguucaacugccugccgga

SEQ ID NO: 1924279 - RNA, 19 nt, Artificial Sequence
  Description of Artificial Sequence: Synthetic oligonucleotide
aagaguaaauaugcacuau

SEQ ID NO: 1924280 - RNA, 19 nt, Artificial Sequence
  Description of Artificial Sequence: Synthetic oligonucleotide
cacauuagcugucugcuga

SEQ ID NO: 1924281 - RNA, 19 nt, Artificial Sequence
  Description of Artificial Sequence: Synthetic oligonucleotide
auaaugcacagauuccaua

SEQ ID NO: 1924282 - RNA, 19 nt, Artificial Sequence
  Description of Artificial Sequence: Synthetic oligonucleotide
aacaucaugccagcuugcu

SEQ ID NO: 1924283 - RNA, 19 nt, Artificial Sequence
  Description of Artificial Sequence: Synthetic oligonucleotide
uacagccuuuucuggaucu

SEQ ID NO: 1924284 - RNA, 19 nt, Artificial Sequence
  Description of Artificial Sequence: Synthetic oligonucleotide
gcuuaugauauaauuucag

SEQ ID NO: 1924285 - RNA, 19 nt, Artificial Sequence
  Description of Artificial Sequence: Synthetic oligonucleotide
uccucugcaggcaggguac

SEQ ID NO: 1924286 - RNA, 19 nt, Artificial Sequence
  Description of Artificial Sequence: Synthetic oligonucleotide
gaaguucaacugccugccg

SEQ ID NO: 1924287 - RNA, 19 nt, Artificial Sequence
  Description of Artificial Sequence: Synthetic oligonucleotide
cuugccaggauuuccaucu

SEQ ID NO: 1924288 - RNA, 19 nt, Artificial Sequence
  Description of Artificial Sequence: Synthetic oligonucleotide
uuaggcccagcuuagcaua

SEQ ID NO: 1924289 - RNA, 19 nt, Artificial Sequence
  Description of Artificial Sequence: Synthetic oligonucleotide
aggccuuuccuagaaguuc

SEQ ID NO: 1924290 - RNA, 19 nt, Artificial Sequence
  Description of Artificial Sequence: Synthetic oligonucleotide
auaagcuuuggcagcauga

SEQ ID NO: 1924291 - RNA, 19 nt, Artificial Sequence
  Description of Artificial Sequence: Synthetic oligonucleotide
uauuugaaaaggggugagu

SEQ ID NO: 1924292 - RNA, 19 nt, Artificial Sequence
  Description of Artificial Sequence: Synthetic oligonucleotide
cuugcuuaugauauaauuu

SEQ ID NO: 1924293 - RNA, 19 nt, Artificial Sequence
  Description of Artificial Sequence: Synthetic oligonucleotide
agcugcuguagucuggggu

SEQ ID NO: 1924294 - RNA, 19 nt, Artificial Sequence
  Description of Artificial Sequence: Synthetic oligonucleotide
ccucaucaaaccuucgucc

SEQ ID NO: 1924295 - RNA, 19 nt, Artificial Sequence
  Description of Artificial Sequence: Synthetic oligonucleotide
auacugacuucacucacua

SEQ ID NO: 1924296 - RNA, 19 nt, Artificial Sequence
  Description of Artificial Sequence: Synthetic oligonucleotide
uaucuuucuucagaagcaa

SEQ ID NO: 1924297 - RNA, 19 nt, Artificial Sequence
  Description of Artificial Sequence: Synthetic oligonucleotide
ugaagauggcuugccagga

SEQ ID NO: 1924298 - RNA, 19 nt, Artificial Sequence
  Description of Artificial Sequence: Synthetic oligonucleotide
uggguuuuauuuucauaau

SEQ ID NO: 1924299 - RNA, 19 nt, Artificial Sequence
  Description of Artificial Sequence: Synthetic oligonucleotide
ucugacacuugaucuuggu

SEQ ID NO: 1924300 - RNA, 19 nt, Artificial Sequence
  Description of Artificial Sequence: Synthetic oligonucleotide
guucuguauacugacuuca

SEQ ID NO: 1924301 - RNA, 19 nt, Artificial Sequence
  Description of Artificial Sequence: Synthetic oligonucleotide
cuuuccagcucgcuccaag

SEQ ID NO: 1924302 - RNA, 19 nt, Artificial Sequence
  Description of Artificial Sequence: Synthetic oligonucleotide
cuucacucacuauauaaua

SEQ ID NO: 1924303 - RNA, 19 nt, Artificial Sequence
  Description of Artificial Sequence: Synthetic oligonucleotide
ugaguccuaaucccaugaa

SEQ ID NO: 1924304 - RNA, 19 nt, Artificial Sequence
  Description of Artificial Sequence: Synthetic oligonucleotide
caugcagacuuucaaugca

SEQ ID NO: 1924305 - RNA, 19 nt, Artificial Sequence
  Description of Artificial Sequence: Synthetic oligonucleotide
cauaagcuuuggcagcaug

SEQ ID NO: 1924306 - RNA, 19 nt, Artificial Sequence
  Description of Artificial Sequence: Synthetic oligonucleotide
ugcagacuuucaaugcaau

SEQ ID NO: 1924307 - RNA, 19 nt, Artificial Sequence
  Description of Artificial Sequence: Synthetic oligonucleotide
gaacccaagagaaaagagu

SEQ ID NO: 1924308 - RNA, 19 nt, Artificial Sequence
  Description of Artificial Sequence: Synthetic oligonucleotide
auuguccauguauuugaaa

SEQ ID NO: 1924309 - RNA, 19 nt, Artificial Sequence
  Description of Artificial Sequence: Synthetic oligonucleotide
agucuggggugccauucuc

SEQ ID NO: 1924310 - RNA, 19 nt, Artificial Sequence
  Description of Artificial Sequence: Synthetic oligonucleotide
acucacuauauaauaacua

SEQ ID NO: 1924311 - RNA, 19 nt, Artificial Sequence
  Description of Artificial Sequence: Synthetic oligonucleotide
uaugagcuuuccagcucgc

SEQ ID NO: 1924312 - RNA, 19 nt, Artificial Sequence
  Description of Artificial Sequence: Synthetic oligonucleotide
gguacuagcauaggccucc

SEQ ID NO: 1924313 - RNA, 19 nt, Artificial Sequence
  Description of Artificial Sequence: Synthetic oligonucleotide
acacauuagcugucugcug

SEQ ID NO: 1924314 - RNA, 19 nt, Artificial Sequence
  Description of Artificial Sequence: Synthetic oligonucleotide
gaccucugacacuugaucu

SEQ ID NO: 1924315 - RNA, 19 nt, Artificial Sequence
  Description of Artificial Sequence: Synthetic oligonucleotide
ucgcuccaaggccauagcu

SEQ ID NO: 1924316 - RNA, 19 nt, Artificial Sequence
  Description of Artificial Sequence: Synthetic oligonucleotide
ucguacuagcagucuggag

SEQ ID NO: 1924317 - RNA, 19 nt, Artificial Sequence
  Description of Artificial Sequence: Synthetic oligonucleotide
gcugcuguagucuggggug

SEQ ID NO: 1924318 - RNA, 19 nt, Artificial Sequence
  Description of Artificial Sequence: Synthetic oligonucleotide
caguugugcuggcagcucc

SEQ ID NO: 1924319 - RNA, 19 nt, Artificial Sequence
  Description of Artificial Sequence: Synthetic oligonucleotide
gacggccucaggcaguuuc

SEQ ID NO: 1924320 - RNA, 19 nt, Artificial Sequence
  Description of Artificial Sequence: Synthetic oligonucleotide
uucccguagacaggcaucu

SEQ ID NO: 1924321 - RNA, 19 nt, Artificial Sequence
  Description of Artificial Sequence: Synthetic oligonucleotide
aagcuuaggcccagcuuag

SEQ ID NO: 1924322 - RNA, 19 nt, Artificial Sequence
  Description of Artificial Sequence: Synthetic oligonucleotide
uaaucccaugaagauggcu

SEQ ID NO: 1924323 - RNA, 19 nt, Artificial Sequence
  Description of Artificial Sequence: Synthetic oligonucleotide
ucgaucagcuggacggccu

SEQ ID NO: 1924324 - RNA, 19 nt, Artificial Sequence
  Description of Artificial Sequence: Synthetic oligonucleotide
aacagcugcuuuuccuaua

SEQ ID NO: 1924325 - RNA, 19 nt, Artificial Sequence
  Description of Artificial Sequence: Synthetic oligonucleotide
gcguuccucauuuucaaac

SEQ ID NO: 1924326 - RNA, 19 nt, Artificial Sequence
  Description of Artificial Sequence: Synthetic oligonucleotide
uugcagaccucugacacuu

SEQ ID NO: 1924327 - RNA, 19 nt, Artificial Sequence
  Description of Artificial Sequence: Synthetic oligonucleotide
uagcauauucaugcagacu

SEQ ID NO: 1924328 - RNA, 19 nt, Artificial Sequence
  Description of Artificial Sequence: Synthetic oligonucleotide
auauucaugcagacuuuca

SEQ ID NO: 1924329 - RNA, 19 nt, Artificial Sequence
  Description of Artificial Sequence: Synthetic oligonucleotide
uauucagaagcggcacugu

SEQ ID NO: 1924330 - RNA, 19 nt, Artificial Sequence
  Description of Artificial Sequence: Synthetic oligonucleotide
ugggcaacagcuucccgua

SEQ ID NO: 1924331 - RNA, 19 nt, Artificial Sequence
  Description of Artificial Sequence: Synthetic oligonucleotide
agcuggacggccucaggca

SEQ ID NO: 1924332 - RNA, 19 nt, Artificial Sequence
  Description of Artificial Sequence: Synthetic oligonucleotide
cuccucagcaguugugcug

SEQ ID NO: 1924333 - RNA, 19 nt, Artificial Sequence
  Description of Artificial Sequence: Synthetic oligonucleotide
cauuuucuaugagcuuucc

SEQ ID NO: 1924334 - RNA, 19 nt, Artificial Sequence
  Description of Artificial Sequence: Synthetic oligonucleotide
gugaguugcagaccucuga

SEQ ID NO: 1924335 - RNA, 19 nt, Artificial Sequence
  Description of Artificial Sequence: Synthetic oligonucleotide
cuucccguagacaggcauc

SEQ ID NO: 1924336 - RNA, 19 nt, Artificial Sequence
  Description of Artificial Sequence: Synthetic oligonucleotide
gcaggguacuagcauaggc

SEQ ID NO: 1924337 - RNA, 19 nt, Artificial Sequence
  Description of Artificial Sequence: Synthetic oligonucleotide
cuaaucccaugaagauggc

SEQ ID NO: 1924338 - RNA, 19 nt, Artificial Sequence
  Description of Artificial Sequence: Synthetic oligonucleotide
cuguacagccuuuucugga

SEQ ID NO: 1924339 - RNA, 19 nt, Artificial Sequence
  Description of Artificial Sequence: Synthetic oligonucleotide
uauuuccugccuugcuuau

SEQ ID NO: 1924340 - RNA, 19 nt, Artificial Sequence
  Description of Artificial Sequence: Synthetic oligonucleotide
ugccaggauuuccaucuuc

SEQ ID NO: 1924341 - RNA, 19 nt, Artificial Sequence
  Description of Artificial Sequence: Synthetic oligonucleotide
cacucacuauauaauaacu

SEQ ID NO: 1924342 - RNA, 19 nt, Artificial Sequence
  Description of Artificial Sequence: Synthetic oligonucleotide
cugcugauacaacuguaca

SEQ ID NO: 1924343 - RNA, 19 nt, Artificial Sequence
  Description of Artificial Sequence: Synthetic oligonucleotide
uagucuggggugccauucu

SEQ ID NO: 1924344 - RNA, 19 nt, Artificial Sequence
  Description of Artificial Sequence: Synthetic oligonucleotide
caugccagcuugcucauaa

SEQ ID NO: 1924345 - RNA, 19 nt, Artificial Sequence
  Description of Artificial Sequence: Synthetic oligonucleotide
cuagcauaggccuccugaa

SEQ ID NO: 1924346 - RNA, 19 nt, Artificial Sequence
  Description of Artificial Sequence: Synthetic oligonucleotide
cuccugaauacucgucuuc

SEQ ID NO: 1924347 - RNA, 19 nt, Artificial Sequence
  Description of Artificial Sequence: Synthetic oligonucleotide
ccucguacuagcagucugg

SEQ ID NO: 1924348 - RNA, 19 nt, Artificial Sequence
  Description of Artificial Sequence: Synthetic oligonucleotide
cuuggguuuuauuuucaua

SEQ ID NO: 1924349 - RNA, 19 nt, Artificial Sequence
  Description of Artificial Sequence: Synthetic oligonucleotide
acauuagcugucugcugau

SEQ ID NO: 1924350 - RNA, 19 nt, Artificial Sequence
  Description of Artificial Sequence: Synthetic oligonucleotide
gaguaaauaugcacuauuu

SEQ ID NO: 1924351 - RNA, 19 nt, Artificial Sequence
  Description of Artificial Sequence: Synthetic oligonucleotide
accacuaagcuuaggccca

SEQ ID NO: 1924352 - RNA, 19 nt, Artificial Sequence
  Description of Artificial Sequence: Synthetic oligonucleotide
caaucaucuaauuucuauu

SEQ ID NO: 1924353 - RNA, 19 nt, Artificial Sequence
  Description of Artificial Sequence: Synthetic oligonucleotide
agcuuagcauagucauugu

SEQ ID NO: 1924354 - RNA, 19 nt, Artificial Sequence
  Description of Artificial Sequence: Synthetic oligonucleotide
accuucguccucguacuag

SEQ ID NO: 1924355 - RNA, 19 nt, Artificial Sequence
  Description of Artificial Sequence: Synthetic oligonucleotide
ucucgaucagcuggacggc

SEQ ID NO: 1924356 - RNA, 19 nt, Artificial Sequence
  Description of Artificial Sequence: Synthetic oligonucleotide
ucccaugaagauggcuugc

SEQ ID NO: 1924357 - RNA, 19 nt, Artificial Sequence
  Description of Artificial Sequence: Synthetic oligonucleotide
agcggcacugucauagucu

SEQ ID NO: 1924358 - RNA, 19 nt, Artificial Sequence
  Description of Artificial Sequence: Synthetic oligonucleotide
cuguuauuuucaugggcaa

SEQ ID NO: 1924359 - RNA, 19 nt, Artificial Sequence
  Description of Artificial Sequence: Synthetic oligonucleotide
cucauaagcuuuggcagca

SEQ ID NO: 1924360 - RNA, 19 nt, Artificial Sequence
  Description of Artificial Sequence: Synthetic oligonucleotide
cuagaugauucuagcauau

SEQ ID NO: 1924361 - RNA, 19 nt, Artificial Sequence
  Description of Artificial Sequence: Synthetic oligonucleotide
caucagguuuggccugggg

SEQ ID NO: 1924362 - RNA, 19 nt, Artificial Sequence
  Description of Artificial Sequence: Synthetic oligonucleotide
cccuguuauuuucaugggc

SEQ ID NO: 1924363 - RNA, 19 nt, Artificial Sequence
  Description of Artificial Sequence: Synthetic oligonucleotide
gcucaaaauuaguuugguc

SEQ ID NO: 1924364 - RNA, 19 nt, Artificial Sequence
  Description of Artificial Sequence: Synthetic oligonucleotide
auuguccuuggguuuuauu

SEQ ID NO: 1924365 - RNA, 19 nt, Artificial Sequence
  Description of Artificial Sequence: Synthetic oligonucleotide
caugggcaacagcuucccg

SEQ ID NO: 1924366 - RNA, 19 nt, Artificial Sequence
  Description of Artificial Sequence: Synthetic oligonucleotide
guagucuggggugccauuc

SEQ ID NO: 1924367 - RNA, 19 nt, Artificial Sequence
  Description of Artificial Sequence: Synthetic oligonucleotide
gauaaugcacagauuccau

SEQ ID NO: 1924368 - RNA, 19 nt, Artificial Sequence
  Description of Artificial Sequence: Synthetic oligonucleotide
ccuucguccucguacuagc

SEQ ID NO: 1924369 - RNA, 19 nt, Artificial Sequence
  Description of Artificial Sequence: Synthetic oligonucleotide
augccagcuugcucauaag

SEQ ID NO: 1924370 - RNA, 19 nt, Artificial Sequence
  Description of Artificial Sequence: Synthetic oligonucleotide
aggccuccugaauacucgu

SEQ ID NO: 1924371 - RNA, 19 nt, Artificial Sequence
  Description of Artificial Sequence: Synthetic oligonucleotide
augcacuauuuccugccuu

SEQ ID NO: 1924372 - RNA, 19 nt, Artificial Sequence
  Description of Artificial Sequence: Synthetic oligonucleotide
cauuguccauguauuugaa

SEQ ID NO: 1924373 - RNA, 19 nt, Artificial Sequence
  Description of Artificial Sequence: Synthetic oligonucleotide
gcuggugauuucuucuuga

SEQ ID NO: 1924374 - RNA, 19 nt, Artificial Sequence
  Description of Artificial Sequence: Synthetic oligonucleotide
gcaacagcuucccguagac

SEQ ID NO: 1924375 - RNA, 19 nt, Artificial Sequence
  Description of Artificial Sequence: Synthetic oligonucleotide
cucgaucagcuggacggcc

SEQ ID NO: 1924376 - RNA, 19 nt, Artificial Sequence
  Description of Artificial Sequence: Synthetic oligonucleotide
gcccuguuauuuucauggg

SEQ ID NO: 1924377 - RNA, 19 nt, Artificial Sequence
  Description of Artificial Sequence: Synthetic oligonucleotide
uguagucuggggugccauu

SEQ ID NO: 1924378 - RNA, 19 nt, Artificial Sequence
  Description of Artificial Sequence: Synthetic oligonucleotide
auaugauaaugcacagauu

SEQ ID NO: 1924379 - RNA, 19 nt, Artificial Sequence
  Description of Artificial Sequence: Synthetic oligonucleotide
augcagacuuucaaugcaa

SEQ ID NO: 1924380 - RNA, 19 nt, Artificial Sequence
  Description of Artificial Sequence: Synthetic oligonucleotide
gcggcacugucauagucug

SEQ ID NO: 1924381 - RNA, 19 nt, Artificial Sequence
  Description of Artificial Sequence: Synthetic oligonucleotide
cuggggugccauucuccag

SEQ ID NO: 1924382 - RNA, 19 nt, Artificial Sequence
  Description of Artificial Sequence: Synthetic oligonucleotide
cagccucaucaaaccuucg

SEQ ID NO: 1924383 - RNA, 19 nt, Artificial Sequence
  Description of Artificial Sequence: Synthetic oligonucleotide
aucaaaccuucguccucgu

SEQ ID NO: 1924384 - RNA, 19 nt, Artificial Sequence
  Description of Artificial Sequence: Synthetic oligonucleotide
gcuuaggcccagcuuagca

SEQ ID NO: 1924385 - RNA, 19 nt, Artificial Sequence
  Description of Artificial Sequence: Synthetic oligonucleotide
aucaugccagcuugcucau

SEQ ID NO: 1924386 - RNA, 19 nt, Artificial Sequence
  Description of Artificial Sequence: Synthetic oligonucleotide
gaaugaguccuaaucccau

SEQ ID NO: 1924387 - RNA, 19 nt, Artificial Sequence
  Description of Artificial Sequence: Synthetic oligonucleotide
aaccuucguccucguacua

SEQ ID NO: 1924388 - RNA, 19 nt, Artificial Sequence
  Description of Artificial Sequence: Synthetic oligonucleotide
cuuaggcccagcuuagcau

SEQ ID NO: 1924389 - RNA, 19 nt, Artificial Sequence
  Description of Artificial Sequence: Synthetic oligonucleotide
caggcaggguacuagcaua

SEQ ID NO: 1924390 - RNA, 19 nt, Artificial Sequence
  Description of Artificial Sequence: Synthetic oligonucleotide
cuuucucgaucagcuggac

SEQ ID NO: 1924391 - RNA, 19 nt, Artificial Sequence
  Description of Artificial Sequence: Synthetic oligonucleotide
ccauagcugcuguagucug

SEQ ID NO: 1924392 - RNA, 19 nt, Artificial Sequence
  Description of Artificial Sequence: Synthetic oligonucleotide
uauuguccuuggguuuuau

SEQ ID NO: 1924393 - RNA, 19 nt, Artificial Sequence
  Description of Artificial Sequence: Synthetic oligonucleotide
aguugugcuggcagcucca

SEQ ID NO: 1924394 - RNA, 19 nt, Artificial Sequence
  Description of Artificial Sequence: Synthetic oligonucleotide
cccgggaccacuaagcuua

SEQ ID NO: 1924395 - RNA, 19 nt, Artificial Sequence
  Description of Artificial Sequence: Synthetic oligonucleotide
ggccuuuccuagaaguuca

SEQ ID NO: 1924396 - RNA, 19 nt, Artificial Sequence
  Description of Artificial Sequence: Synthetic oligonucleotide
cuggaucuacauuuucuau

SEQ ID NO: 1924397 - RNA, 19 nt, Artificial Sequence
  Description of Artificial Sequence: Synthetic oligonucleotide
gugccauucuccagguaca

SEQ ID NO: 1924398 - RNA, 19 nt, Artificial Sequence
  Description of Artificial Sequence: Synthetic oligonucleotide
auaccauacucugcauauu

SEQ ID NO: 1924399 - RNA, 19 nt, Artificial Sequence
  Description of Artificial Sequence: Synthetic oligonucleotide
gcucgcuccaaggccauag

SEQ ID NO: 1924400 - RNA, 19 nt, Artificial Sequence
  Description of Artificial Sequence: Synthetic oligonucleotide
cucguacuagcagucugga

SEQ ID NO: 1924401 - RNA, 19 nt, Artificial Sequence
  Description of Artificial Sequence: Synthetic oligonucleotide
cccaagagaaaagaguaaa

SEQ ID NO: 1924402 - RNA, 19 nt, Artificial Sequence
  Description of Artificial Sequence: Synthetic oligonucleotide
gaagauggcuugccaggau

SEQ ID NO: 1924403 - RNA, 19 nt, Artificial Sequence
  Description of Artificial Sequence: Synthetic oligonucleotide
cccaugaagauggcuugcc

SEQ ID NO: 1924404 - RNA, 19 nt, Artificial Sequence
  Description of Artificial Sequence: Synthetic oligonucleotide
caucuuuugcuugcucaaa

SEQ ID NO: 1924405 - RNA, 19 nt, Artificial Sequence
  Description of Artificial Sequence: Synthetic oligonucleotide
gcuugccaggauuuccauc

SEQ ID NO: 1924406 - RNA, 19 nt, Artificial Sequence
  Description of Artificial Sequence: Synthetic oligonucleotide
gaagcggcacugucauagu

SEQ ID NO: 1924407 - RNA, 19 nt, Artificial Sequence
  Description of Artificial Sequence: Synthetic oligonucleotide
cacuaagcuuaggcccagc

SEQ ID NO: 1924408 - RNA, 19 nt, Artificial Sequence
  Description of Artificial Sequence: Synthetic oligonucleotide
cuaagcuuaggcccagcuu

SEQ ID NO: 1924409 - RNA, 19 nt, Artificial Sequence
  Description of Artificial Sequence: Synthetic oligonucleotide
gguacaucaugcuggcuuu

SEQ ID NO: 1924410 - RNA, 19 nt, Artificial Sequence
  Description of Artificial Sequence: Synthetic oligonucleotide
caaauaccauacucugcau

SEQ ID NO: 1924411 - RNA, 19 nt, Artificial Sequence
  Description of Artificial Sequence: Synthetic oligonucleotide
guacaucaugcuggcuuuc

SEQ ID NO: 1924412 - RNA, 19 nt, Artificial Sequence
  Description of Artificial Sequence: Synthetic oligonucleotide
uggacggccucaggcaguu

SEQ ID NO: 1924413 - RNA, 19 nt, Artificial Sequence
  Description of Artificial Sequence: Synthetic oligonucleotide
gccuccugaauacucgucu

SEQ ID NO: 1924414 - RNA, 19 nt, Artificial Sequence
  Description of Artificial Sequence: Synthetic oligonucleotide
caggcaguuucugcaucuc

SEQ ID NO: 1924415 - RNA, 19 nt, Artificial Sequence
  Description of Artificial Sequence: Synthetic oligonucleotide
auauuguccuuggguuuua

SEQ ID NO: 1924416 - RNA, 19 nt, Artificial Sequence
  Description of Artificial Sequence: Synthetic oligonucleotide
gucugcugauacaacugua

SEQ ID NO: 1924417 - RNA, 19 nt, Artificial Sequence
  Description of Artificial Sequence: Synthetic oligonucleotide
cacuauuuccugccuugcu

SEQ ID NO: 1924418 - RNA, 19 nt, Artificial Sequence
  Description of Artificial Sequence: Synthetic oligonucleotide
acggccucaggcaguuucu

SEQ ID NO: 1924419 - RNA, 19 nt, Artificial Sequence
  Description of Artificial Sequence: Synthetic oligonucleotide
caacugccugccggaggcg

SEQ ID NO: 1924420 - RNA, 19 nt, Artificial Sequence
  Description of Artificial Sequence: Synthetic oligonucleotide
cagcuugcucauaagcuuu

SEQ ID NO: 1924421 - RNA, 19 nt, Artificial Sequence
  Description of Artificial Sequence: Synthetic oligonucleotide
cauagucauuguccaugua

SEQ ID NO: 1924422 - RNA, 19 nt, Artificial Sequence
  Description of Artificial Sequence: Synthetic oligonucleotide
auacaacuguacagccuuu

SEQ ID NO: 1924423 - RNA, 19 nt, Artificial Sequence
  Description of Artificial Sequence: Synthetic oligonucleotide
cccagcuuagcauagucau

SEQ ID NO: 1924424 - RNA, 19 nt, Artificial Sequence
  Description of Artificial Sequence: Synthetic oligonucleotide
ccaugaagauggcuugcca

SEQ ID NO: 1924425 - RNA, 19 nt, Artificial Sequence
  Description of Artificial Sequence: Synthetic oligonucleotide
gaggccuuuccuagaaguu

SEQ ID NO: 1924426 - RNA, 19 nt, Artificial Sequence
  Description of Artificial Sequence: Synthetic oligonucleotide
ggcacagaaugaguccuaa

SEQ ID NO: 1924427 - RNA, 19 nt, Artificial Sequence
  Description of Artificial Sequence: Synthetic oligonucleotide
acacuugaucuuggucuuu

SEQ ID NO: 1924428 - RNA, 19 nt, Artificial Sequence
  Description of Artificial Sequence: Synthetic oligonucleotide
cugccugccggaggcguuc

SEQ ID NO: 1924429 - RNA, 19 nt, Artificial Sequence
  Description of Artificial Sequence: Synthetic oligonucleotide
cguccucguacuagcaguc

SEQ ID NO: 1924430 - RNA, 19 nt, Artificial Sequence
  Description of Artificial Sequence: Synthetic oligonucleotide
caaggccauagcugcugua

SEQ ID NO: 1924431 - RNA, 19 nt, Artificial Sequence
  Description of Artificial Sequence: Synthetic oligonucleotide
cagaccucugacacuugau

SEQ ID NO: 1924432 - RNA, 19 nt, Artificial Sequence
  Description of Artificial Sequence: Synthetic oligonucleotide
cugccuugcuuaugauaua

SEQ ID NO: 1924433 - RNA, 19 nt, Artificial Sequence
  Description of Artificial Sequence: Synthetic oligonucleotide
ggguacuagcauaggccuc

SEQ ID NO: 1924434 - RNA, 19 nt, Artificial Sequence
  Description of Artificial Sequence: Synthetic oligonucleotide
cauuagcugucugcugaua

SEQ ID NO: 1924435 - RNA, 19 nt, Artificial Sequence
  Description of Artificial Sequence: Synthetic oligonucleotide
gggugaguugcagaccucu

SEQ ID NO: 1924436 - RNA, 19 nt, Artificial Sequence
  Description of Artificial Sequence: Synthetic oligonucleotide
ccuagaaguucaacugccu

SEQ ID NO: 1924437 - RNA, 19 nt, Artificial Sequence
  Description of Artificial Sequence: Synthetic oligonucleotide
ucaugccagcuugcucaua

SEQ ID NO: 1924438 - RNA, 19 nt, Artificial Sequence
  Description of Artificial Sequence: Synthetic oligonucleotide
cuagcagucuggaggccuu

SEQ ID NO: 1924439 - RNA, 19 nt, Artificial Sequence
  Description of Artificial Sequence: Synthetic oligonucleotide
cuucaacaucaugccagcu

SEQ ID NO: 1924440 - RNA, 19 nt, Artificial Sequence
  Description of Artificial Sequence: Synthetic oligonucleotide
cauaggccuccugaauacu

SEQ ID NO: 1924441 - RNA, 19 nt, Artificial Sequence
  Description of Artificial Sequence: Synthetic oligonucleotide
ccagcuugcucauaagcuu

SEQ ID NO: 1924442 - RNA, 19 nt, Artificial Sequence
  Description of Artificial Sequence: Synthetic oligonucleotide
cagguuuggccuggggugu

SEQ ID NO: 1924443 - RNA, 19 nt, Artificial Sequence
  Description of Artificial Sequence: Synthetic oligonucleotide
gcaguugugcuggcagcuc

SEQ ID NO: 1924444 - RNA, 19 nt, Artificial Sequence
  Description of Artificial Sequence: Synthetic oligonucleotide
ccugaauacucgucuuccu

SEQ ID NO: 1924445 - RNA, 19 nt, Artificial Sequence
  Description of Artificial Sequence: Synthetic oligonucleotide
cagcuccaucagguuuggc

SEQ ID NO: 1924446 - RNA, 19 nt, Artificial Sequence
  Description of Artificial Sequence: Synthetic oligonucleotide
ccacuaagcuuaggcccag

SEQ ID NO: 1924447 - RNA, 19 nt, Artificial Sequence
  Description of Artificial Sequence: Synthetic oligonucleotide
agcuucccguagacaggca

SEQ ID NO: 1924448 - RNA, 19 nt, Artificial Sequence
  Description of Artificial Sequence: Synthetic oligonucleotide
gccauucuccagguacauc

SEQ ID NO: 1924449 - RNA, 19 nt, Artificial Sequence
  Description of Artificial Sequence: Synthetic oligonucleotide
agguuuggccugggguguu

SEQ ID NO: 1924450 - RNA, 19 nt, Artificial Sequence
  Description of Artificial Sequence: Synthetic oligonucleotide
gcuguagucuggggugcca

SEQ ID NO: 1924451 - RNA, 19 nt, Artificial Sequence
  Description of Artificial Sequence: Synthetic oligonucleotide
ccaucagguuuggccuggg

SEQ ID NO: 1924452 - RNA, 19 nt, Artificial Sequence
  Description of Artificial Sequence: Synthetic oligonucleotide
guacuagcauaggccuccu

SEQ ID NO: 1924453 - RNA, 19 nt, Artificial Sequence
  Description of Artificial Sequence: Synthetic oligonucleotide
ccguagacaggcaucuuuu

SEQ ID NO: 1924454 - RNA, 19 nt, Artificial Sequence
  Description of Artificial Sequence: Synthetic oligonucleotide
gcacagaaugaguccuaau

SEQ ID NO: 1924455 - RNA, 19 nt, Artificial Sequence
  Description of Artificial Sequence: Synthetic oligonucleotide
cagaagcggcacugucaua

SEQ ID NO: 1924456 - RNA, 19 nt, Artificial Sequence
  Description of Artificial Sequence: Synthetic oligonucleotide
gcauauucaugcagacuuu

SEQ ID NO: 1924457 - RNA, 19 nt, Artificial Sequence
  Description of Artificial Sequence: Synthetic oligonucleotide
cugggguguugcuggugau

SEQ ID NO: 1924458 - RNA, 19 nt, Artificial Sequence
  Description of Artificial Sequence: Synthetic oligonucleotide
cccguagacaggcaucuuu

SEQ ID NO: 1924459 - RNA, 19 nt, Artificial Sequence
  Description of Artificial Sequence: Synthetic oligonucleotide
ggggugaguugcagaccuc

SEQ ID NO: 1924460 - RNA, 19 nt, Artificial Sequence
  Description of Artificial Sequence: Synthetic oligonucleotide
ccucauuuucaaacacauu

SEQ ID NO: 1924461 - RNA, 19 nt, Artificial Sequence
  Description of Artificial Sequence: Synthetic oligonucleotide
gccuuuccuagaaguucaa

SEQ ID NO: 1924462 - RNA, 19 nt, Artificial Sequence
  Description of Artificial Sequence: Synthetic oligonucleotide
cagguacaucaugcuggcu

SEQ ID NO: 1924463 - RNA, 19 nt, Artificial Sequence
  Description of Artificial Sequence: Synthetic oligonucleotide
ccggaggcguuccucauuu

SEQ ID NO: 1924464 - RNA, 19 nt, Artificial Sequence
  Description of Artificial Sequence: Synthetic oligonucleotide
cagcugcuuuuccuauauu

SEQ ID NO: 1924465 - RNA, 19 nt, Artificial Sequence
  Description of Artificial Sequence: Synthetic oligonucleotide
gcccgggaccacuaagcuu

SEQ ID NO: 1924466 - RNA, 19 nt, Artificial Sequence
  Description of Artificial Sequence: Synthetic oligonucleotide
gcuuuccagcucgcuccaa

SEQ ID NO: 1924467 - RNA, 19 nt, Artificial Sequence
  Description of Artificial Sequence: Synthetic oligonucleotide
ggccugggguguugcuggu

SEQ ID NO: 1924468 - RNA, 19 nt, Artificial Sequence
  Description of Artificial Sequence: Synthetic oligonucleotide
gccggaggcguuccucauu

SEQ ID NO: 1924469 - RNA, 19 nt, Artificial Sequence
  Description of Artificial Sequence: Synthetic oligonucleotide
cgcccgggaccacuaagcu

SEQ ID NO: 1924470 - RNA, 19 nt, Artificial Sequence
  Description of Artificial Sequence: Synthetic oligonucleotide
ggacggccucaggcaguuu

SEQ ID NO: 1924471 - RNA, 19 nt, Artificial Sequence
  Description of Artificial Sequence: Synthetic oligonucleotide
aauucuucgaucuuguugg

SEQ ID NO: 1924472 - RNA, 19 nt, Artificial Sequence
  Description of Artificial Sequence: Synthetic oligonucleotide
uuaucuagaaccuucagag

SEQ ID NO: 1924473 - RNA, 19 nt, Artificial Sequence
  Description of Artificial Sequence: Synthetic oligonucleotide
auaagcauugcucaaguac

SEQ ID NO: 1924474 - RNA, 19 nt, Artificial Sequence
  Description of Artificial Sequence: Synthetic oligonucleotide
uuuuauuaccgaaauacgc

SEQ ID NO: 1924475 - RNA, 19 nt, Artificial Sequence
  Description of Artificial Sequence: Synthetic oligonucleotide
ugagguauuggacucaggg

SEQ ID NO: 1924476 - RNA, 19 nt, Artificial Sequence
  Description of Artificial Sequence: Synthetic oligonucleotide
agaaaucuuacccuugucg

SEQ ID NO: 1924477 - RNA, 19 nt, Artificial Sequence
  Description of Artificial Sequence: Synthetic oligonucleotide
aaugugaagcuuuggcagc

SEQ ID NO: 1924478 - RNA, 19 nt, Artificial Sequence
  Description of Artificial Sequence: Synthetic oligonucleotide
aaaucuuacccuugucgcc

SEQ ID NO: 1924479 - RNA, 19 nt, Artificial Sequence
  Description of Artificial Sequence: Synthetic oligonucleotide
aauauguccagcccugagg

SEQ ID NO: 1924480 - RNA, 19 nt, Artificial Sequence
  Description of Artificial Sequence: Synthetic oligonucleotide
uuuauuaccgaaauacgcu

SEQ ID NO: 1924481 - RNA, 19 nt, Artificial Sequence
  Description of Artificial Sequence: Synthetic oligonucleotide
ucuagguugucauugagug

SEQ ID NO: 1924482 - RNA, 19 nt, Artificial Sequence
  Description of Artificial Sequence: Synthetic oligonucleotide
aauacgcuguccuacccac

SEQ ID NO: 1924483 - RNA, 19 nt, Artificial Sequence
  Description of Artificial Sequence: Synthetic oligonucleotide
gaaaucuuacccuugucgc

SEQ ID NO: 1924484 - RNA, 19 nt, Artificial Sequence
  Description of Artificial Sequence: Synthetic oligonucleotide
uguucuucggccauggcug

SEQ ID NO: 1924485 - RNA, 19 nt, Artificial Sequence
  Description of Artificial Sequence: Synthetic oligonucleotide
augucaaguaguuaucuag

SEQ ID NO: 1924486 - RNA, 19 nt, Artificial Sequence
  Description of Artificial Sequence: Synthetic oligonucleotide
ucugaacugucucuguccg

SEQ ID NO: 1924487 - RNA, 19 nt, Artificial Sequence
  Description of Artificial Sequence: Synthetic oligonucleotide
aucuagaaccuucagagcu

SEQ ID NO: 1924488 - RNA, 19 nt, Artificial Sequence
  Description of Artificial Sequence: Synthetic oligonucleotide
uuauuaccgaaauacgcug

SEQ ID NO: 1924489 - RNA, 19 nt, Artificial Sequence
  Description of Artificial Sequence: Synthetic oligonucleotide
cucauugccguccagaaac

SEQ ID NO: 1924490 - RNA, 19 nt, Artificial Sequence
  Description of Artificial Sequence: Synthetic oligonucleotide
accaugaacagccucuggg

SEQ ID NO: 1924491 - RNA, 19 nt, Artificial Sequence
  Description of Artificial Sequence: Synthetic oligonucleotide
aaccuucagagcuuucagg

SEQ ID NO: 1924492 - RNA, 19 nt, Artificial Sequence
  Description of Artificial Sequence: Synthetic oligonucleotide
uguacaaugugaagcuuug

SEQ ID NO: 1924493 - RNA, 19 nt, Artificial Sequence
  Description of Artificial Sequence: Synthetic oligonucleotide
ucuucgaucuuguuggugu

SEQ ID NO: 1924494 - RNA, 19 nt, Artificial Sequence
  Description of Artificial Sequence: Synthetic oligonucleotide
auuuuauuaccgaaauacg

SEQ ID NO: 1924495 - RNA, 19 nt, Artificial Sequence
  Description of Artificial Sequence: Synthetic oligonucleotide
ugucaaguaguuaucuaga

SEQ ID NO: 1924496 - RNA, 19 nt, Artificial Sequence
  Description of Artificial Sequence: Synthetic oligonucleotide
ucaaguaguuaucuagaac

SEQ ID NO: 1924497 - RNA, 19 nt, Artificial Sequence
  Description of Artificial Sequence: Synthetic oligonucleotide
uagguugucauugagugcu

SEQ ID NO: 1924498 - RNA, 19 nt, Artificial Sequence
  Description of Artificial Sequence: Synthetic oligonucleotide
ucuguauuuuauuaccgaa

SEQ ID NO: 1924499 - RNA, 19 nt, Artificial Sequence
  Description of Artificial Sequence: Synthetic oligonucleotide
uguggauugugucgcauug

SEQ ID NO: 1924500 - RNA, 19 nt, Artificial Sequence
  Description of Artificial Sequence: Synthetic oligonucleotide
uuuacacaccaccuguaca

SEQ ID NO: 1924501 - RNA, 19 nt, Artificial Sequence
  Description of Artificial Sequence: Synthetic oligonucleotide
uuacacaccaccuguacaa

SEQ ID NO: 1924502 - RNA, 19 nt, Artificial Sequence
  Description of Artificial Sequence: Synthetic oligonucleotide
uugaaggugacucccuuga

SEQ ID NO: 1924503 - RNA, 19 nt, Artificial Sequence
  Description of Artificial Sequence: Synthetic oligonucleotide
auuaccgaaauacgcuguc

SEQ ID NO: 1924504 - RNA, 19 nt, Artificial Sequence
  Description of Artificial Sequence: Synthetic oligonucleotide
ucuaucuccucgucguccg

SEQ ID NO: 1924505 - RNA, 19 nt, Artificial Sequence
  Description of Artificial Sequence: Synthetic oligonucleotide
aguaccgaugcacuccacg

SEQ ID NO: 1924506 - RNA, 19 nt, Artificial Sequence
  Description of Artificial Sequence: Synthetic oligonucleotide
uuuuacacaccaccuguac

SEQ ID NO: 1924507 - RNA, 19 nt, Artificial Sequence
  Description of Artificial Sequence: Synthetic oligonucleotide
auauguccagcccugaggu

SEQ ID NO: 1924508 - RNA, 19 nt, Artificial Sequence
  Description of Artificial Sequence: Synthetic oligonucleotide
uucuguauuuuauuaccga

SEQ ID NO: 1924509 - RNA, 19 nt, Artificial Sequence
  Description of Artificial Sequence: Synthetic oligonucleotide
aaauacgcuguccuaccca

SEQ ID NO: 1924510 - RNA, 19 nt, Artificial Sequence
  Description of Artificial Sequence: Synthetic oligonucleotide
uggguuugaguucuugaug

SEQ ID NO: 1924511 - RNA, 19 nt, Artificial Sequence
  Description of Artificial Sequence: Synthetic oligonucleotide
uguacuucggugccguaca

SEQ ID NO: 1924512 - RNA, 19 nt, Artificial Sequence
  Description of Artificial Sequence: Synthetic oligonucleotide
guuaucuagaaccuucaga

SEQ ID NO: 1924513 - RNA, 19 nt, Artificial Sequence
  Description of Artificial Sequence: Synthetic oligonucleotide
uggauugugucgcauugug

SEQ ID NO: 1924514 - RNA, 19 nt, Artificial Sequence
  Description of Artificial Sequence: Synthetic oligonucleotide
gugguagccucccagagcc

SEQ ID NO: 1924515 - RNA, 19 nt, Artificial Sequence
  Description of Artificial Sequence: Synthetic oligonucleotide
aacaguucgaccugagguu

SEQ ID NO: 1924516 - RNA, 19 nt, Artificial Sequence
  Description of Artificial Sequence: Synthetic oligonucleotide
aaugggaguuguccacccg

SEQ ID NO: 1924517 - RNA, 19 nt, Artificial Sequence
  Description of Artificial Sequence: Synthetic oligonucleotide
ucaaguaccgaugcacucc

SEQ ID NO: 1924518 - RNA, 19 nt, Artificial Sequence
  Description of Artificial Sequence: Synthetic oligonucleotide
uucccgagcauaagcauug

SEQ ID NO: 1924519 - RNA, 19 nt, Artificial Sequence
  Description of Artificial Sequence: Synthetic oligonucleotide
aaucuuacccuugucgccu

SEQ ID NO: 1924520 - RNA, 19 nt, Artificial Sequence
  Description of Artificial Sequence: Synthetic oligonucleotide
uguguguggauugugucgc

SEQ ID NO: 1924521 - RNA, 19 nt, Artificial Sequence
  Description of Artificial Sequence: Synthetic oligonucleotide
guaccgaugcacuccacgg

SEQ ID NO: 1924522 - RNA, 19 nt, Artificial Sequence
  Description of Artificial Sequence: Synthetic oligonucleotide
ucccagagccucuauggcg

SEQ ID NO: 1924523 - RNA, 19 nt, Artificial Sequence
  Description of Artificial Sequence: Synthetic oligonucleotide
uauuaccgaaauacgcugu

SEQ ID NO: 1924524 - RNA, 19 nt, Artificial Sequence
  Description of Artificial Sequence: Synthetic oligonucleotide
gugaaggagccucuaagag

SEQ ID NO: 1924525 - RNA, 19 nt, Artificial Sequence
  Description of Artificial Sequence: Synthetic oligonucleotide
agccuucacgaacaguucg

SEQ ID NO: 1924526 - RNA, 19 nt, Artificial Sequence
  Description of Artificial Sequence: Synthetic oligonucleotide
auggcgagcacagaguggg

SEQ ID NO: 1924527 - RNA, 19 nt, Artificial Sequence
  Description of Artificial Sequence: Synthetic oligonucleotide
guguguguggauugugucg

SEQ ID NO: 1924528 - RNA, 19 nt, Artificial Sequence
  Description of Artificial Sequence: Synthetic oligonucleotide
uaguuaucuagaaccuuca

SEQ ID NO: 1924529 - RNA, 19 nt, Artificial Sequence
  Description of Artificial Sequence: Synthetic oligonucleotide
cucuauggcgagcacagag

SEQ ID NO: 1924530 - RNA, 19 nt, Artificial Sequence
  Description of Artificial Sequence: Synthetic oligonucleotide
ucuauggcgagcacagagu

SEQ ID NO: 1924531 - RNA, 19 nt, Artificial Sequence
  Description of Artificial Sequence: Synthetic oligonucleotide
uaggccgaaaacuuggcaa

SEQ ID NO: 1924532 - RNA, 19 nt, Artificial Sequence
  Description of Artificial Sequence: Synthetic oligonucleotide
acuucggugccguacagca

SEQ ID NO: 1924533 - RNA, 19 nt, Artificial Sequence
  Description of Artificial Sequence: Synthetic oligonucleotide
uaccgaaauacgcuguccu

SEQ ID NO: 1924534 - RNA, 19 nt, Artificial Sequence
  Description of Artificial Sequence: Synthetic oligonucleotide
caccuguacaaugugaagc

SEQ ID NO: 1924535 - RNA, 19 nt, Artificial Sequence
  Description of Artificial Sequence: Synthetic oligonucleotide
augggaguuguccacccgg

SEQ ID NO: 1924536 - RNA, 19 nt, Artificial Sequence
  Description of Artificial Sequence: Synthetic oligonucleotide
uacgcuguccuacccaccc

SEQ ID NO: 1924537 - RNA, 19 nt, Artificial Sequence
  Description of Artificial Sequence: Synthetic oligonucleotide
uauggcgagcacagagugg

SEQ ID NO: 1924538 - RNA, 19 nt, Artificial Sequence
  Description of Artificial Sequence: Synthetic oligonucleotide
aguuaucuagaaccuucag

SEQ ID NO: 1924539 - RNA, 19 nt, Artificial Sequence
  Description of Artificial Sequence: Synthetic oligonucleotide
cgcaauagaaaucuuaccc

SEQ ID NO: 1924540 - RNA, 19 nt, Artificial Sequence
  Description of Artificial Sequence: Synthetic oligonucleotide
uccacuucuuccgggaggg

SEQ ID NO: 1924541 - RNA, 19 nt, Artificial Sequence
  Description of Artificial Sequence: Synthetic oligonucleotide
aagcauugcucaaguaccg

SEQ ID NO: 1924542 - RNA, 19 nt, Artificial Sequence
  Description of Artificial Sequence: Synthetic oligonucleotide
gaaauacgcuguccuaccc

SEQ ID NO: 1924543 - RNA, 19 nt, Artificial Sequence
  Description of Artificial Sequence: Synthetic oligonucleotide
uugugucgcauugugguag

SEQ ID NO: 1924544 - RNA, 19 nt, Artificial Sequence
  Description of Artificial Sequence: Synthetic oligonucleotide
uggaggcgaacucuucccg

SEQ ID NO: 1924545 - RNA, 19 nt, Artificial Sequence
  Description of Artificial Sequence: Synthetic oligonucleotide
uucgaccugagguuguucu

SEQ ID NO: 1924546 - RNA, 19 nt, Artificial Sequence
  Description of Artificial Sequence: Synthetic oligonucleotide
uugugguagccucccagag

SEQ ID NO: 1924547 - RNA, 19 nt, Artificial Sequence
  Description of Artificial Sequence: Synthetic oligonucleotide
agcuuuggguaccugggag

SEQ ID NO: 1924548 - RNA, 19 nt, Artificial Sequence
  Description of Artificial Sequence: Synthetic oligonucleotide
guaguuaucuagaaccuuc

SEQ ID NO: 1924549 - RNA, 19 nt, Artificial Sequence
  Description of Artificial Sequence: Synthetic oligonucleotide
cauugcucaaguaccgaug

SEQ ID NO: 1924550 - RNA, 19 nt, Artificial Sequence
  Description of Artificial Sequence: Synthetic oligonucleotide
agucgggauccucuccugc

SEQ ID NO: 1924551 - RNA, 19 nt, Artificial Sequence
  Description of Artificial Sequence: Synthetic oligonucleotide
ugccguacagcaggaaugg

SEQ ID NO: 1924552 - RNA, 19 nt, Artificial Sequence
  Description of Artificial Sequence: Synthetic oligonucleotide
gaccugagguuguucuucg

SEQ ID NO: 1924553 - RNA, 19 nt, Artificial Sequence
  Description of Artificial Sequence: Synthetic oligonucleotide
ugggaguuguccacccggg

SEQ ID NO: 1924554 - RNA, 19 nt, Artificial Sequence
  Description of Artificial Sequence: Synthetic oligonucleotide
cuauggcgagcacagagug

SEQ ID NO: 1924555 - RNA, 19 nt, Artificial Sequence
  Description of Artificial Sequence: Synthetic oligonucleotide
cagguuacagucagccagg

SEQ ID NO: 1924556 - RNA, 19 nt, Artificial Sequence
  Description of Artificial Sequence: Synthetic oligonucleotide
ucuaagaggugcucauuuc

SEQ ID NO: 1924557 - RNA, 19 nt, Artificial Sequence
  Description of Artificial Sequence: Synthetic oligonucleotide
ucgccuauccuuucccucc

SEQ ID NO: 1924558 - RNA, 19 nt, Artificial Sequence
  Description of Artificial Sequence: Synthetic oligonucleotide
aguuucugaacugucucug

SEQ ID NO: 1924559 - RNA, 19 nt, Artificial Sequence
  Description of Artificial Sequence: Synthetic oligonucleotide
agcauaagcauugcucaag

SEQ ID NO: 1924560 - RNA, 19 nt, Artificial Sequence
  Description of Artificial Sequence: Synthetic oligonucleotide
cauugugguagccucccag

SEQ ID NO: 1924561 - RNA, 19 nt, Artificial Sequence
  Description of Artificial Sequence: Synthetic oligonucleotide
gacguugaaggugacuccc

SEQ ID NO: 1924562 - RNA, 19 nt, Artificial Sequence
  Description of Artificial Sequence: Synthetic oligonucleotide
gaaggcgggucucacaguc

SEQ ID NO: 1924563 - RNA, 19 nt, Artificial Sequence
  Description of Artificial Sequence: Synthetic oligonucleotide
gaaugggaguuguccaccc

SEQ ID NO: 1924564 - RNA, 19 nt, Artificial Sequence
  Description of Artificial Sequence: Synthetic oligonucleotide
auugugguagccucccaga

SEQ ID NO: 1924565 - RNA, 19 nt, Artificial Sequence
  Description of Artificial Sequence: Synthetic oligonucleotide
cuagguugucauugagugc

SEQ ID NO: 1924566 - RNA, 19 nt, Artificial Sequence
  Description of Artificial Sequence: Synthetic oligonucleotide
gaggugcucauuucagggc

SEQ ID NO: 1924567 - RNA, 19 nt, Artificial Sequence
  Description of Artificial Sequence: Synthetic oligonucleotide
agcccugagguauuggacu

SEQ ID NO: 1924568 - RNA, 19 nt, Artificial Sequence
  Description of Artificial Sequence: Synthetic oligonucleotide
cuucacgaacaguucgacc

SEQ ID NO: 1924569 - RNA, 19 nt, Artificial Sequence
  Description of Artificial Sequence: Synthetic oligonucleotide
gaaggagccucuaagaggu

SEQ ID NO: 1924570 - RNA, 19 nt, Artificial Sequence
  Description of Artificial Sequence: Synthetic oligonucleotide
cuaagaggugcucauuuca

SEQ ID NO: 1924571 - RNA, 19 nt, Artificial Sequence
  Description of Artificial Sequence: Synthetic oligonucleotide
cagggugagcucauugccg

SEQ ID NO: 1924572 - RNA, 19 nt, Artificial Sequence
  Description of Artificial Sequence: Synthetic oligonucleotide
uccgauccgacccuacgcu

SEQ ID NO: 1924573 - RNA, 19 nt, Artificial Sequence
  Description of Artificial Sequence: Synthetic oligonucleotide
ucacgaacaguucgaccug

SEQ ID NO: 1924574 - RNA, 19 nt, Artificial Sequence
  Description of Artificial Sequence: Synthetic oligonucleotide
ucuagaaccuucagagcuu

SEQ ID NO: 1924575 - RNA, 19 nt, Artificial Sequence
  Description of Artificial Sequence: Synthetic oligonucleotide
gaggcgaacucuucccgag

SEQ ID NO: 1924576 - RNA, 19 nt, Artificial Sequence
  Description of Artificial Sequence: Synthetic oligonucleotide
aguccgauccgacccuacg

SEQ ID NO: 1924577 - RNA, 19 nt, Artificial Sequence
  Description of Artificial Sequence: Synthetic oligonucleotide
uugucauugagugcugggu

SEQ ID NO: 1924578 - RNA, 19 nt, Artificial Sequence
  Description of Artificial Sequence: Synthetic oligonucleotide
agcuuuggcagcagguuac

SEQ ID NO: 1924579 - RNA, 19 nt, Artificial Sequence
  Description of Artificial Sequence: Synthetic oligonucleotide
ucggccgcaaccccagucc

SEQ ID NO: 1924580 - RNA, 19 nt, Artificial Sequence
  Description of Artificial Sequence: Synthetic oligonucleotide
augaacagccucugggaga

SEQ ID NO: 1924581 - RNA, 19 nt, Artificial Sequence
  Description of Artificial Sequence: Synthetic oligonucleotide
agugcuggguuugaguucu

SEQ ID NO: 1924582 - RNA, 19 nt, Artificial Sequence
  Description of Artificial Sequence: Synthetic oligonucleotide
uugucgccuauccuuuccc

SEQ ID NO: 1924583 - RNA, 19 nt, Artificial Sequence
  Description of Artificial Sequence: Synthetic oligonucleotide
cuccgugcaccccacaccc

SEQ ID NO: 1924584 - RNA, 19 nt, Artificial Sequence
  Description of Artificial Sequence: Synthetic oligonucleotide
cuacgcucgcugcagcucg

SEQ ID NO: 1924585 - RNA, 19 nt, Artificial Sequence
  Description of Artificial Sequence: Synthetic oligonucleotide
aggcgggucucacagucgg

SEQ ID NO: 1924586 - RNA, 19 nt, Artificial Sequence
  Description of Artificial Sequence: Synthetic oligonucleotide
agccccacaccuguguacc

SEQ ID NO: 1924587 - RNA, 19 nt, Artificial Sequence
  Description of Artificial Sequence: Synthetic oligonucleotide
uuaccgaaauacgcugucc

SEQ ID NO: 1924588 - RNA, 19 nt, Artificial Sequence
  Description of Artificial Sequence: Synthetic oligonucleotide
acagucgggauccucuccu

SEQ ID NO: 1924589 - RNA, 19 nt, Artificial Sequence
  Description of Artificial Sequence: Synthetic oligonucleotide
uguguguacuucggugccg

SEQ ID NO: 1924590 - RNA, 19 nt, Artificial Sequence
  Description of Artificial Sequence: Synthetic oligonucleotide
cuugucgccuauccuuucc

SEQ ID NO: 1924591 - RNA, 19 nt, Artificial Sequence
  Description of Artificial Sequence: Synthetic oligonucleotide
ucauugagugcuggguuug

SEQ ID NO: 1924592 - RNA, 19 nt, Artificial Sequence
  Description of Artificial Sequence: Synthetic oligonucleotide
augcccucaucuucagcac

SEQ ID NO: 1924593 - RNA, 19 nt, Artificial Sequence
  Description of Artificial Sequence: Synthetic oligonucleotide
agggugagcucauugccgu

SEQ ID NO: 1924594 - RNA, 19 nt, Artificial Sequence
  Description of Artificial Sequence: Synthetic oligonucleotide
cucauuucagggccuuggc

SEQ ID NO: 1924595 - RNA, 19 nt, Artificial Sequence
  Description of Artificial Sequence: Synthetic oligonucleotide
aggcgaacucuucccgagc

SEQ ID NO: 1924596 - RNA, 19 nt, Artificial Sequence
  Description of Artificial Sequence: Synthetic oligonucleotide
uguguacccggguuuccug

SEQ ID NO: 1924597 - RNA, 19 nt, Artificial Sequence
  Description of Artificial Sequence: Synthetic oligonucleotide
uccacccgggcaaaguuuc

SEQ ID NO: 1924598 - RNA, 19 nt, Artificial Sequence
  Description of Artificial Sequence: Synthetic oligonucleotide
uaccgaugcacuccacgga

SEQ ID NO: 1924599 - RNA, 19 nt, Artificial Sequence
  Description of Artificial Sequence: Synthetic oligonucleotide
cuguguguacuucggugcc

SEQ ID NO: 1924600 - RNA, 19 nt, Artificial Sequence
  Description of Artificial Sequence: Synthetic oligonucleotide
acacaccaccuguacaaug

SEQ ID NO: 1924601 - RNA, 19 nt, Artificial Sequence
  Description of Artificial Sequence: Synthetic oligonucleotide
uuccccaccggcuccgugc

SEQ ID NO: 1924602 - RNA, 19 nt, Artificial Sequence
  Description of Artificial Sequence: Synthetic oligonucleotide
ugugucgcauugugguagc

SEQ ID NO: 1924603 - RNA, 19 nt, Artificial Sequence
  Description of Artificial Sequence: Synthetic oligonucleotide
acaguucgaccugagguug

SEQ ID NO: 1924604 - RNA, 19 nt, Artificial Sequence
  Description of Artificial Sequence: Synthetic oligonucleotide
ucgaucuuguuggugucug

SEQ ID NO: 1924605 - RNA, 19 nt, Artificial Sequence
  Description of Artificial Sequence: Synthetic oligonucleotide
gucgcauugugguagccuc

SEQ ID NO: 1924606 - RNA, 19 nt, Artificial Sequence
  Description of Artificial Sequence: Synthetic oligonucleotide
aacucuucccgagcauaag

SEQ ID NO: 1924607 - RNA, 19 nt, Artificial Sequence
  Description of Artificial Sequence: Synthetic oligonucleotide
gucaaguaguuaucuagaa

SEQ ID NO: 1924608 - RNA, 19 nt, Artificial Sequence
  Description of Artificial Sequence: Synthetic oligonucleotide
gggaaggcgggucucacag

SEQ ID NO: 1924609 - RNA, 19 nt, Artificial Sequence
  Description of Artificial Sequence: Synthetic oligonucleotide
ucuucccgagcauaagcau

SEQ ID NO: 1924610 - RNA, 19 nt, Artificial Sequence
  Description of Artificial Sequence: Synthetic oligonucleotide
guggaggcgaacucuuccc

SEQ ID NO: 1924611 - RNA, 19 nt, Artificial Sequence
  Description of Artificial Sequence: Synthetic oligonucleotide
aacgccucugggaugguga

SEQ ID NO: 1924612 - RNA, 19 nt, Artificial Sequence
  Description of Artificial Sequence: Synthetic oligonucleotide
ucauugccguccagaaacu

SEQ ID NO: 1924613 - RNA, 19 nt, Artificial Sequence
  Description of Artificial Sequence: Synthetic oligonucleotide
cuccucgucguccggacag

SEQ ID NO: 1924614 - RNA, 19 nt, Artificial Sequence
  Description of Artificial Sequence: Synthetic oligonucleotide
cccgcaauagaaaucuuac

SEQ ID NO: 1924615 - RNA, 19 nt, Artificial Sequence
  Description of Artificial Sequence: Synthetic oligonucleotide
ucgcauugugguagccucc

SEQ ID NO: 1924616 - RNA, 19 nt, Artificial Sequence
  Description of Artificial Sequence: Synthetic oligonucleotide
guacaaugugaagcuuugg

SEQ ID NO: 1924617 - RNA, 19 nt, Artificial Sequence
  Description of Artificial Sequence: Synthetic oligonucleotide
aggccgaaaacuuggcaaa

SEQ ID NO: 1924618 - RNA, 19 nt, Artificial Sequence
  Description of Artificial Sequence: Synthetic oligonucleotide
accgaugcacuccacggaa

SEQ ID NO: 1924619 - RNA, 19 nt, Artificial Sequence
  Description of Artificial Sequence: Synthetic oligonucleotide
ggugaaggagccucuaaga

SEQ ID NO: 1924620 - RNA, 19 nt, Artificial Sequence
  Description of Artificial Sequence: Synthetic oligonucleotide
ugcacuccacggaacgccu

SEQ ID NO: 1924621 - RNA, 19 nt, Artificial Sequence
  Description of Artificial Sequence: Synthetic oligonucleotide
agaaggggcaguucccaau

SEQ ID NO: 1924622 - RNA, 19 nt, Artificial Sequence
  Description of Artificial Sequence: Synthetic oligonucleotide
guccgauccgacccuacgc

SEQ ID NO: 1924623 - RNA, 19 nt, Artificial Sequence
  Description of Artificial Sequence: Synthetic oligonucleotide
aggagucccuucucuaggu

SEQ ID NO: 1924624 - RNA, 19 nt, Artificial Sequence
  Description of Artificial Sequence: Synthetic oligonucleotide
uugcucaaguaccgaugca

SEQ ID NO: 1924625 - RNA, 19 nt, Artificial Sequence
  Description of Artificial Sequence: Synthetic oligonucleotide
gcaauagaaaucuuacccu

SEQ ID NO: 1924626 - RNA, 19 nt, Artificial Sequence
  Description of Artificial Sequence: Synthetic oligonucleotide
ugcagcucggcuuccccac

SEQ ID NO: 1924627 - RNA, 19 nt, Artificial Sequence
  Description of Artificial Sequence: Synthetic oligonucleotide
ccgagcauaagcauugcuc

SEQ ID NO: 1924628 - RNA, 19 nt, Artificial Sequence
  Description of Artificial Sequence: Synthetic oligonucleotide
ugucgcauugugguagccu

SEQ ID NO: 1924629 - RNA, 19 nt, Artificial Sequence
  Description of Artificial Sequence: Synthetic oligonucleotide
uguccacccgggcaaaguu

SEQ ID NO: 1924630 - RNA, 19 nt, Artificial Sequence
  Description of Artificial Sequence: Synthetic oligonucleotide
gugccguacagcaggaaug

SEQ ID NO: 1924631 - RNA, 19 nt, Artificial Sequence
  Description of Artificial Sequence: Synthetic oligonucleotide
cagagcuuucaggaguccc

SEQ ID NO: 1924632 - RNA, 19 nt, Artificial Sequence
  Description of Artificial Sequence: Synthetic oligonucleotide
gacagguggaggcgaacuc

SEQ ID NO: 1924633 - RNA, 19 nt, Artificial Sequence
  Description of Artificial Sequence: Synthetic oligonucleotide
ugucgccuauccuuucccu

SEQ ID NO: 1924634 - RNA, 19 nt, Artificial Sequence
  Description of Artificial Sequence: Synthetic oligonucleotide
uccgacccuacgcucgcug

SEQ ID NO: 1924635 - RNA, 19 nt, Artificial Sequence
  Description of Artificial Sequence: Synthetic oligonucleotide
aaccccaguccgauccgac

SEQ ID NO: 1924636 - RNA, 19 nt, Artificial Sequence
  Description of Artificial Sequence: Synthetic oligonucleotide
gauccgacccuacgcucgc

SEQ ID NO: 1924637 - RNA, 19 nt, Artificial Sequence
  Description of Artificial Sequence: Synthetic oligonucleotide
aguaguuaucuagaaccuu

SEQ ID NO: 1924638 - RNA, 19 nt, Artificial Sequence
  Description of Artificial Sequence: Synthetic oligonucleotide
auugugucgcauuguggua

SEQ ID NO: 1924639 - RNA, 19 nt, Artificial Sequence
  Description of Artificial Sequence: Synthetic oligonucleotide
acgcuguccuacccacccc

SEQ ID NO: 1924640 - RNA, 19 nt, Artificial Sequence
  Description of Artificial Sequence: Synthetic oligonucleotide
uacccuugucgccuauccu

SEQ ID NO: 1924641 - RNA, 19 nt, Artificial Sequence
  Description of Artificial Sequence: Synthetic oligonucleotide
gcaaauauguccagcccug

SEQ ID NO: 1924642 - RNA, 19 nt, Artificial Sequence
  Description of Artificial Sequence: Synthetic oligonucleotide
acccuacgcucgcugcagc

SEQ ID NO: 1924643 - RNA, 19 nt, Artificial Sequence
  Description of Artificial Sequence: Synthetic oligonucleotide
guaggccgaaaacuuggca

SEQ ID NO: 1924644 - RNA, 19 nt, Artificial Sequence
  Description of Artificial Sequence: Synthetic oligonucleotide
ugggugaaggagccucuaa

SEQ ID NO: 1924645 - RNA, 19 nt, Artificial Sequence
  Description of Artificial Sequence: Synthetic oligonucleotide
uucgaucuuguuggugucu

SEQ ID NO: 1924646 - RNA, 19 nt, Artificial Sequence
  Description of Artificial Sequence: Synthetic oligonucleotide
caaguaccgaugcacucca

SEQ ID NO: 1924647 - RNA, 19 nt, Artificial Sequence
  Description of Artificial Sequence: Synthetic oligonucleotide
cugagguauuggacucagg

SEQ ID NO: 1924648 - RNA, 19 nt, Artificial Sequence
  Description of Artificial Sequence: Synthetic oligonucleotide
gcucauuucagggccuugg

SEQ ID NO: 1924649 - RNA, 19 nt, Artificial Sequence
  Description of Artificial Sequence: Synthetic oligonucleotide
uacuucggugccguacagc

SEQ ID NO: 1924650 - RNA, 19 nt, Artificial Sequence
  Description of Artificial Sequence: Synthetic oligonucleotide
agguuacagucagccaggg

SEQ ID NO: 1924651 - RNA, 19 nt, Artificial Sequence
  Description of Artificial Sequence: Synthetic oligonucleotide
cucccuugagccagagcac

SEQ ID NO: 1924652 - RNA, 19 nt, Artificial Sequence
  Description of Artificial Sequence: Synthetic oligonucleotide
uacgcucgcugcagcucgg

SEQ ID NO: 1924653 - RNA, 19 nt, Artificial Sequence
  Description of Artificial Sequence: Synthetic oligonucleotide
cuccacggaacgccucugg

SEQ ID NO: 1924654 - RNA, 19 nt, Artificial Sequence
  Description of Artificial Sequence: Synthetic oligonucleotide
uguugugguguguguggau

SEQ ID NO: 1924655 - RNA, 19 nt, Artificial Sequence
  Description of Artificial Sequence: Synthetic oligonucleotide
guucuucggccauggcugc

SEQ ID NO: 1924656 - RNA, 19 nt, Artificial Sequence
  Description of Artificial Sequence: Synthetic oligonucleotide
caccaugaacagccucugg

SEQ ID NO: 1924657 - RNA, 19 nt, Artificial Sequence
  Description of Artificial Sequence: Synthetic oligonucleotide
ggaguuguccacccgggca

SEQ ID NO: 1924658 - RNA, 19 nt, Artificial Sequence
  Description of Artificial Sequence: Synthetic oligonucleotide
accgaaauacgcuguccua

SEQ ID NO: 1924659 - RNA, 19 nt, Artificial Sequence
  Description of Artificial Sequence: Synthetic oligonucleotide
cuucggugccguacagcag

SEQ ID NO: 1924660 - RNA, 19 nt, Artificial Sequence
  Description of Artificial Sequence: Synthetic oligonucleotide
ccgcaauagaaaucuuacc

SEQ ID NO: 1924661 - RNA, 19 nt, Artificial Sequence
  Description of Artificial Sequence: Synthetic oligonucleotide
guacuucggugccguacag

SEQ ID NO: 1924662 - RNA, 19 nt, Artificial Sequence
  Description of Artificial Sequence: Synthetic oligonucleotide
ucagagcuuucaggagucc

SEQ ID NO: 1924663 - RNA, 19 nt, Artificial Sequence
  Description of Artificial Sequence: Synthetic oligonucleotide
cacaccaccuguacaaugu

SEQ ID NO: 1924664 - RNA, 19 nt, Artificial Sequence
  Description of Artificial Sequence: Synthetic oligonucleotide
gguugucauugagugcugg

SEQ ID NO: 1924665 - RNA, 19 nt, Artificial Sequence
  Description of Artificial Sequence: Synthetic oligonucleotide
ggaaugggaguuguccacc

SEQ ID NO: 1924666 - RNA, 19 nt, Artificial Sequence
  Description of Artificial Sequence: Synthetic oligonucleotide
gacccuacgcucgcugcag

SEQ ID NO: 1924667 - RNA, 19 nt, Artificial Sequence
  Description of Artificial Sequence: Synthetic oligonucleotide
gucgccuauccuuucccuc

SEQ ID NO: 1924668 - RNA, 19 nt, Artificial Sequence
  Description of Artificial Sequence: Synthetic oligonucleotide
gaacucuucccgagcauaa

SEQ ID NO: 1924669 - RNA, 19 nt, Artificial Sequence
  Description of Artificial Sequence: Synthetic oligonucleotide
gccucuauggcgagcacag

SEQ ID NO: 1924670 - RNA, 19 nt, Artificial Sequence
  Description of Artificial Sequence: Synthetic oligonucleotide
uucuucggccauggcugcg

SEQ ID NO: 1924671 - RNA, 19 nt, Artificial Sequence
  Description of Artificial Sequence: Synthetic oligonucleotide
cuugcucauaggccagcuc

SEQ ID NO: 1924672 - RNA, 19 nt, Artificial Sequence
  Description of Artificial Sequence: Synthetic oligonucleotide
uuuggguaccugggagggc

SEQ ID NO: 1924673 - RNA, 19 nt, Artificial Sequence
  Description of Artificial Sequence: Synthetic oligonucleotide
cgagcauaagcauugcuca

SEQ ID NO: 1924674 - RNA, 19 nt, Artificial Sequence
  Description of Artificial Sequence: Synthetic oligonucleotide
uguguggauugugucgcau

SEQ ID NO: 1924675 - RNA, 19 nt, Artificial Sequence
  Description of Artificial Sequence: Synthetic oligonucleotide
cuaucuccucgucguccgg

SEQ ID NO: 1924676 - RNA, 19 nt, Artificial Sequence
  Description of Artificial Sequence: Synthetic oligonucleotide
cgaaauacgcuguccuacc

SEQ ID NO: 1924677 - RNA, 19 nt, Artificial Sequence
  Description of Artificial Sequence: Synthetic oligonucleotide
agcauugcucaaguaccga

SEQ ID NO: 1924678 - RNA, 19 nt, Artificial Sequence
  Description of Artificial Sequence: Synthetic oligonucleotide
accggcuccgugcacccca

SEQ ID NO: 1924679 - RNA, 19 nt, Artificial Sequence
  Description of Artificial Sequence: Synthetic oligonucleotide
caccaccuguacaauguga

SEQ ID NO: 1924680 - RNA, 19 nt, Artificial Sequence
  Description of Artificial Sequence: Synthetic oligonucleotide
agccucuaagaggugcuca

SEQ ID NO: 1924681 - RNA, 19 nt, Artificial Sequence
  Description of Artificial Sequence: Synthetic oligonucleotide
gacucccuugagccagagc

SEQ ID NO: 1924682 - RNA, 19 nt, Artificial Sequence
  Description of Artificial Sequence: Synthetic oligonucleotide
agccucuauggcgagcaca

SEQ ID NO: 1924683 - RNA, 19 nt, Artificial Sequence
  Description of Artificial Sequence: Synthetic oligonucleotide
cagcucggcuuccccaccg

SEQ ID NO: 1924684 - RNA, 19 nt, Artificial Sequence
  Description of Artificial Sequence: Synthetic oligonucleotide
acccggguuuccugaccac

SEQ ID NO: 1924685 - RNA, 19 nt, Artificial Sequence
  Description of Artificial Sequence: Synthetic oligonucleotide
guguacccggguuuccuga

SEQ ID NO: 1924686 - RNA, 19 nt, Artificial Sequence
  Description of Artificial Sequence: Synthetic oligonucleotide
aggugacucccuugagcca

SEQ ID NO: 1924687 - RNA, 19 nt, Artificial Sequence
  Description of Artificial Sequence: Synthetic oligonucleotide
uccggacagguggaggcga

SEQ ID NO: 1924688 - RNA, 19 nt, Artificial Sequence
  Description of Artificial Sequence: Synthetic oligonucleotide
uccucgucguccggacagg

SEQ ID NO: 1924689 - RNA, 19 nt, Artificial Sequence
  Description of Artificial Sequence: Synthetic oligonucleotide
cuguacaaugugaagcuuu

SEQ ID NO: 1924690 - RNA, 19 nt, Artificial Sequence
  Description of Artificial Sequence: Synthetic oligonucleotide
cauaagcauugcucaagua

SEQ ID NO: 1924691 - RNA, 19 nt, Artificial Sequence
  Description of Artificial Sequence: Synthetic oligonucleotide
uacacaccaccuguacaau

SEQ ID NO: 1924692 - RNA, 19 nt, Artificial Sequence
  Description of Artificial Sequence: Synthetic oligonucleotide
acggaacgccucugggaug

SEQ ID NO: 1924693 - RNA, 19 nt, Artificial Sequence
  Description of Artificial Sequence: Synthetic oligonucleotide
guauuggacucaggguuca

SEQ ID NO: 1924694 - RNA, 19 nt, Artificial Sequence
  Description of Artificial Sequence: Synthetic oligonucleotide
ucgaccugagguuguucuu

SEQ ID NO: 1924695 - RNA, 19 nt, Artificial Sequence
  Description of Artificial Sequence: Synthetic oligonucleotide
cgcaaccccaguccgaucc

SEQ ID NO: 1924696 - RNA, 19 nt, Artificial Sequence
  Description of Artificial Sequence: Synthetic oligonucleotide
agggcacagcacagcuucc

SEQ ID NO: 1924697 - RNA, 19 nt, Artificial Sequence
  Description of Artificial Sequence: Synthetic oligonucleotide
uccgucuuuugguguccac

SEQ ID NO: 1924698 - RNA, 19 nt, Artificial Sequence
  Description of Artificial Sequence: Synthetic oligonucleotide
cucgucguccggacaggug

SEQ ID NO: 1924699 - RNA, 19 nt, Artificial Sequence
  Description of Artificial Sequence: Synthetic oligonucleotide
cgaugcacuccacggaacg

SEQ ID NO: 1924700 - RNA, 19 nt, Artificial Sequence
  Description of Artificial Sequence: Synthetic oligonucleotide
ccgucuuuugguguccacg

SEQ ID NO: 1924701 - RNA, 19 nt, Artificial Sequence
  Description of Artificial Sequence: Synthetic oligonucleotide
uccugcgggcuccgggcug

SEQ ID NO: 1924702 - RNA, 19 nt, Artificial Sequence
  Description of Artificial Sequence: Synthetic oligonucleotide
uguccagcccugagguauu

SEQ ID NO: 1924703 - RNA, 19 nt, Artificial Sequence
  Description of Artificial Sequence: Synthetic oligonucleotide
ccaccuguacaaugugaag

SEQ ID NO: 1924704 - RNA, 19 nt, Artificial Sequence
  Description of Artificial Sequence: Synthetic oligonucleotide
ucuuacccuugucgccuau

SEQ ID NO: 1924705 - RNA, 19 nt, Artificial Sequence
  Description of Artificial Sequence: Synthetic oligonucleotide
auggcugcgucggggacca

SEQ ID NO: 1924706 - RNA, 19 nt, Artificial Sequence
  Description of Artificial Sequence: Synthetic oligonucleotide
cgauccgacccuacgcucg

SEQ ID NO: 1924707 - RNA, 19 nt, Artificial Sequence
  Description of Artificial Sequence: Synthetic oligonucleotide
gaacgccucugggauggug

SEQ ID NO: 1924708 - RNA, 19 nt, Artificial Sequence
  Description of Artificial Sequence: Synthetic oligonucleotide
acgaacaguucgaccugag

SEQ ID NO: 1924709 - RNA, 19 nt, Artificial Sequence
  Description of Artificial Sequence: Synthetic oligonucleotide
ugacucccuugagccagag

SEQ ID NO: 1924710 - RNA, 19 nt, Artificial Sequence
  Description of Artificial Sequence: Synthetic oligonucleotide
uggguaccugggagggcac

SEQ ID NO: 1924711 - RNA, 19 nt, Artificial Sequence
  Description of Artificial Sequence: Synthetic oligonucleotide
caaauauguccagcccuga

SEQ ID NO: 1924712 - RNA, 19 nt, Artificial Sequence
  Description of Artificial Sequence: Synthetic oligonucleotide
caccccgcaauagaaaucu

SEQ ID NO: 1924713 - RNA, 19 nt, Artificial Sequence
  Description of Artificial Sequence: Synthetic oligonucleotide
cuuacccuugucgccuauc

SEQ ID NO: 1924714 - RNA, 19 nt, Artificial Sequence
  Description of Artificial Sequence: Synthetic oligonucleotide
ucccgagcauaagcauugc

SEQ ID NO: 1924715 - RNA, 19 nt, Artificial Sequence
  Description of Artificial Sequence: Synthetic oligonucleotide
gggaccaggaagcagccgu

SEQ ID NO: 1924716 - RNA, 19 nt, Artificial Sequence
  Description of Artificial Sequence: Synthetic oligonucleotide
cagucgggauccucuccug

SEQ ID NO: 1924717 - RNA, 19 nt, Artificial Sequence
  Description of Artificial Sequence: Synthetic oligonucleotide
gucggggaccaggaagcag

SEQ ID NO: 1924718 - RNA, 19 nt, Artificial Sequence
  Description of Artificial Sequence: Synthetic oligonucleotide
gcuccgugcaccccacacc

SEQ ID NO: 1924719 - RNA, 19 nt, Artificial Sequence
  Description of Artificial Sequence: Synthetic oligonucleotide
ccguacagcaggaauggga

SEQ ID NO: 1924720 - RNA, 19 nt, Artificial Sequence
  Description of Artificial Sequence: Synthetic oligonucleotide
cgaacaguucgaccugagg

SEQ ID NO: 1924721 - RNA, 19 nt, Artificial Sequence
  Description of Artificial Sequence: Synthetic oligonucleotide
gcaaccccaguccgauccg

SEQ ID NO: 1924722 - RNA, 19 nt, Artificial Sequence
  Description of Artificial Sequence: Synthetic oligonucleotide
ccgggcaaaguuucugaac

SEQ ID NO: 1924723 - RNA, 19 nt, Artificial Sequence
  Description of Artificial Sequence: Synthetic oligonucleotide
ggaugucaaguaguuaucu

SEQ ID NO: 1924724 - RNA, 19 nt, Artificial Sequence
  Description of Artificial Sequence: Synthetic oligonucleotide
ggaggcgaacucuucccga

SEQ ID NO: 1924725 - RNA, 19 nt, Artificial Sequence
  Description of Artificial Sequence: Synthetic oligonucleotide
ggcgagcacagagugggug

SEQ ID NO: 1924726 - RNA, 19 nt, Artificial Sequence
  Description of Artificial Sequence: Synthetic oligonucleotide
ccagaaacuuccucugcga

SEQ ID NO: 1924727 - RNA, 19 nt, Artificial Sequence
  Description of Artificial Sequence: Synthetic oligonucleotide
gggaguuguccacccgggc

SEQ ID NO: 1924728 - RNA, 19 nt, Artificial Sequence
  Description of Artificial Sequence: Synthetic oligonucleotide
ugguagccucccagagccu

SEQ ID NO: 1924729 - RNA, 19 nt, Artificial Sequence
  Description of Artificial Sequence: Synthetic oligonucleotide
gcgucggggaccaggaagc

SEQ ID NO: 1924730 - RNA, 19 nt, Artificial Sequence
  Description of Artificial Sequence: Synthetic oligonucleotide
aaggagccucuaagaggug

SEQ ID NO: 1924731 - RNA, 19 nt, Artificial Sequence
  Description of Artificial Sequence: Synthetic oligonucleotide
gggaugucaaguaguuauc

SEQ ID NO: 1924732 - RNA, 19 nt, Artificial Sequence
  Description of Artificial Sequence: Synthetic oligonucleotide
gcgagcacagaguggguga

SEQ ID NO: 1924733 - RNA, 19 nt, Artificial Sequence
  Description of Artificial Sequence: Synthetic oligonucleotide
uucccaaucuuggccccau

SEQ ID NO: 1924734 - RNA, 19 nt, Artificial Sequence
  Description of Artificial Sequence: Synthetic oligonucleotide
acgcucgcugcagcucggc

SEQ ID NO: 1924735 - RNA, 19 nt, Artificial Sequence
  Description of Artificial Sequence: Synthetic oligonucleotide
ggcuccgugcaccccacac

SEQ ID NO: 1924736 - RNA, 19 nt, Artificial Sequence
  Description of Artificial Sequence: Synthetic oligonucleotide
aucuuacccuugucgccua

SEQ ID NO: 1924737 - RNA, 19 nt, Artificial Sequence
  Description of Artificial Sequence: Synthetic oligonucleotide
acgccucugggauggugaa

SEQ ID NO: 1924738 - RNA, 19 nt, Artificial Sequence
  Description of Artificial Sequence: Synthetic oligonucleotide
ggagaaggggcaguuccca

SEQ ID NO: 1924739 - RNA, 19 nt, Artificial Sequence
  Description of Artificial Sequence: Synthetic oligonucleotide
cuucccgagcauaagcauu

SEQ ID NO: 1924740 - RNA, 19 nt, Artificial Sequence
  Description of Artificial Sequence: Synthetic oligonucleotide
ucccaaucuuggccccauc

SEQ ID NO: 1924741 - RNA, 19 nt, Artificial Sequence
  Description of Artificial Sequence: Synthetic oligonucleotide
uggcgagcacagagugggu

SEQ ID NO: 1924742 - RNA, 19 nt, Artificial Sequence
  Description of Artificial Sequence: Synthetic oligonucleotide
caguccgauccgacccuac

SEQ ID NO: 1924743 - RNA, 19 nt, Artificial Sequence
  Description of Artificial Sequence: Synthetic oligonucleotide
ccggguuuccugaccacug

SEQ ID NO: 1924744 - RNA, 19 nt, Artificial Sequence
  Description of Artificial Sequence: Synthetic oligonucleotide
ggcugcgucggggaccagg

SEQ ID NO: 1924745 - RNA, 19 nt, Artificial Sequence
  Description of Artificial Sequence: Synthetic oligonucleotide
gguagccucccagagccuc

SEQ ID NO: 1924746 - RNA, 19 nt, Artificial Sequence
  Description of Artificial Sequence: Synthetic oligonucleotide
cacgaacaguucgaccuga

SEQ ID NO: 1924747 - RNA, 19 nt, Artificial Sequence
  Description of Artificial Sequence: Synthetic oligonucleotide
caccccaccccgcaauaga

SEQ ID NO: 1924748 - RNA, 19 nt, Artificial Sequence
  Description of Artificial Sequence: Synthetic oligonucleotide
guguguggauugugucgca

SEQ ID NO: 1924749 - RNA, 19 nt, Artificial Sequence
  Description of Artificial Sequence: Synthetic oligonucleotide
agguugucauugagugcug

SEQ ID NO: 1924750 - RNA, 19 nt, Artificial Sequence
  Description of Artificial Sequence: Synthetic oligonucleotide
ggugccguacagcaggaau

SEQ ID NO: 1924751 - RNA, 19 nt, Artificial Sequence
  Description of Artificial Sequence: Synthetic oligonucleotide
aguucgaccugagguuguu

SEQ ID NO: 1924752 - RNA, 19 nt, Artificial Sequence
  Description of Artificial Sequence: Synthetic oligonucleotide
cggaacgccucugggaugg

SEQ ID NO: 1924753 - RNA, 19 nt, Artificial Sequence
  Description of Artificial Sequence: Synthetic oligonucleotide
ccgugcaccccacacccag

SEQ ID NO: 1924754 - RNA, 19 nt, Artificial Sequence
  Description of Artificial Sequence: Synthetic oligonucleotide
gucguccggacagguggag

SEQ ID NO: 1924755 - RNA, 19 nt, Artificial Sequence
  Description of Artificial Sequence: Synthetic oligonucleotide
cuucggccauggcugcguc

SEQ ID NO: 1924756 - RNA, 19 nt, Artificial Sequence
  Description of Artificial Sequence: Synthetic oligonucleotide
accccaccccgcaauagaa

SEQ ID NO: 1924757 - RNA, 19 nt, Artificial Sequence
  Description of Artificial Sequence: Synthetic oligonucleotide
cauugagugcuggguuuga

SEQ ID NO: 1924758 - RNA, 19 nt, Artificial Sequence
  Description of Artificial Sequence: Synthetic oligonucleotide
gugucgcauugugguagcc

SEQ ID NO: 1924759 - RNA, 19 nt, Artificial Sequence
  Description of Artificial Sequence: Synthetic oligonucleotide
gcauugcucaaguaccgau

SEQ ID NO: 1924760 - RNA, 19 nt, Artificial Sequence
  Description of Artificial Sequence: Synthetic oligonucleotide
ccgacccuacgcucgcugc

SEQ ID NO: 1924761 - RNA, 19 nt, Artificial Sequence
  Description of Artificial Sequence: Synthetic oligonucleotide
guucccaaucuuggcccca

SEQ ID NO: 1924762 - RNA, 19 nt, Artificial Sequence
  Description of Artificial Sequence: Synthetic oligonucleotide
ccguccagaaacuuccucu

SEQ ID NO: 1924763 - RNA, 19 nt, Artificial Sequence
  Description of Artificial Sequence: Synthetic oligonucleotide
gccuucacgaacaguucga

SEQ ID NO: 1924764 - RNA, 19 nt, Artificial Sequence
  Description of Artificial Sequence: Synthetic oligonucleotide
ccgaaaacuuggcaaauau

SEQ ID NO: 1924765 - RNA, 19 nt, Artificial Sequence
  Description of Artificial Sequence: Synthetic oligonucleotide
cuccgggcuggcccucggc

SEQ ID NO: 1924766 - RNA, 19 nt, Artificial Sequence
  Description of Artificial Sequence: Synthetic oligonucleotide
cucggcuuccccaccggcu

SEQ ID NO: 1924767 - RNA, 19 nt, Artificial Sequence
  Description of Artificial Sequence: Synthetic oligonucleotide
gguuuccugaccacuggcu

SEQ ID NO: 1924768 - RNA, 19 nt, Artificial Sequence
  Description of Artificial Sequence: Synthetic oligonucleotide
ccgggcuggcccucggccg

SEQ ID NO: 1924769 - RNA, 19 nt, Artificial Sequence
  Description of Artificial Sequence: Synthetic oligonucleotide
gccguacagcaggaauggg

SEQ ID NO: 1924770 - RNA, 19 nt, Artificial Sequence
  Description of Artificial Sequence: Synthetic oligonucleotide
cgcauugugguagccuccc

SEQ ID NO: 1924771 - RNA, 19 nt, Artificial Sequence
  Description of Artificial Sequence: Synthetic oligonucleotide
cacuccacggaacgccucu

SEQ ID NO: 1924772 - RNA, 19 nt, Artificial Sequence
  Description of Artificial Sequence: Synthetic oligonucleotide
gcgggucucacagucggga

SEQ ID NO: 1924773 - RNA, 19 nt, Artificial Sequence
  Description of Artificial Sequence: Synthetic oligonucleotide
ccccgcaauagaaaucuua

SEQ ID NO: 1924774 - RNA, 19 nt, Artificial Sequence
  Description of Artificial Sequence: Synthetic oligonucleotide
cccaccggcuccgugcacc

SEQ ID NO: 1924775 - RNA, 19 nt, Artificial Sequence
  Description of Artificial Sequence: Synthetic oligonucleotide
ccgauccgacccuacgcuc

SEQ ID NO: 1924776 - RNA, 19 nt, Artificial Sequence
  Description of Artificial Sequence: Synthetic oligonucleotide
guccgucuuuuggugucca

SEQ ID NO: 1924777 - RNA, 19 nt, Artificial Sequence
  Description of Artificial Sequence: Synthetic oligonucleotide
accccacacccagcuucuc

SEQ ID NO: 1924778 - RNA, 19 nt, Artificial Sequence
  Description of Artificial Sequence: Synthetic oligonucleotide
cgggauccucuccugcggg

SEQ ID NO: 1924779 - RNA, 19 nt, Artificial Sequence
  Description of Artificial Sequence: Synthetic oligonucleotide
gcugcgucggggaccagga

SEQ ID NO: 1924780 - RNA, 19 nt, Artificial Sequence
  Description of Artificial Sequence: Synthetic oligonucleotide
ccuugucgccuauccuuuc

SEQ ID NO: 1924781 - RNA, 19 nt, Artificial Sequence
  Description of Artificial Sequence: Synthetic oligonucleotide
caaccccaguccgauccga

SEQ ID NO: 1924782 - RNA, 19 nt, Artificial Sequence
  Description of Artificial Sequence: Synthetic oligonucleotide
ccuguguacccggguuucc

SEQ ID NO: 1924783 - RNA, 19 nt, Artificial Sequence
  Description of Artificial Sequence: Synthetic oligonucleotide
ggcgggucucacagucggg

SEQ ID NO: 1924784 - RNA, 19 nt, Artificial Sequence
  Description of Artificial Sequence: Synthetic oligonucleotide
ccaccggcuccgugcaccc

SEQ ID NO: 1924785 - RNA, 19 nt, Artificial Sequence
  Description of Artificial Sequence: Synthetic oligonucleotide
caguucgaccugagguugu

SEQ ID NO: 1924786 - RNA, 19 nt, Artificial Sequence
  Description of Artificial Sequence: Synthetic oligonucleotide
gggugagcucauugccguc

SEQ ID NO: 1924787 - RNA, 19 nt, Artificial Sequence
  Description of Artificial Sequence: Synthetic oligonucleotide
cugggauggugaagccucu

SEQ ID NO: 1924788 - RNA, 19 nt, Artificial Sequence
  Description of Artificial Sequence: Synthetic oligonucleotide
gccgaaaacuuggcaaaua

SEQ ID NO: 1924789 - RNA, 19 nt, Artificial Sequence
  Description of Artificial Sequence: Synthetic oligonucleotide
cuguguacccggguuuccu

SEQ ID NO: 1924790 - RNA, 19 nt, Artificial Sequence
  Description of Artificial Sequence: Synthetic oligonucleotide
gcauugugguagccuccca

SEQ ID NO: 1924791 - RNA, 19 nt, Artificial Sequence
  Description of Artificial Sequence: Synthetic oligonucleotide
gccccacaccuguguaccc

SEQ ID NO: 1924792 - RNA, 19 nt, Artificial Sequence
  Description of Artificial Sequence: Synthetic oligonucleotide
gccucuaagaggugcucau

SEQ ID NO: 1924793 - RNA, 19 nt, Artificial Sequence
  Description of Artificial Sequence: Synthetic oligonucleotide
gugacucccuugagccaga

SEQ ID NO: 1924794 - RNA, 19 nt, Artificial Sequence
  Description of Artificial Sequence: Synthetic oligonucleotide
auccgacccuacgcucgcu

SEQ ID NO: 1924795 - RNA, 19 nt, Artificial Sequence
  Description of Artificial Sequence: Synthetic oligonucleotide
gcuguccuacccaccccac

SEQ ID NO: 1924796 - RNA, 19 nt, Artificial Sequence
  Description of Artificial Sequence: Synthetic oligonucleotide
cccaccccgcaauagaaau

SEQ ID NO: 1924797 - RNA, 19 nt, Artificial Sequence
  Description of Artificial Sequence: Synthetic oligonucleotide
cccgggcaaaguuucugaa

SEQ ID NO: 1924798 - RNA, 19 nt, Artificial Sequence
  Description of Artificial Sequence: Synthetic oligonucleotide
cggccgcaaccccaguccg

SEQ ID NO: 1924799 - RNA, 19 nt, Artificial Sequence
  Description of Artificial Sequence: Synthetic oligonucleotide
cucugcgagaugcccucau

SEQ ID NO: 1924800 - RNA, 19 nt, Artificial Sequence
  Description of Artificial Sequence: Synthetic oligonucleotide
ggaaggcgggucucacagu

SEQ ID NO: 1924801 - RNA, 19 nt, Artificial Sequence
  Description of Artificial Sequence: Synthetic oligonucleotide
guccacccgggcaaaguuu

SEQ ID NO: 1924802 - RNA, 19 nt, Artificial Sequence
  Description of Artificial Sequence: Synthetic oligonucleotide
cauugccguccagaaacuu

SEQ ID NO: 1924803 - RNA, 19 nt, Artificial Sequence
  Description of Artificial Sequence: Synthetic oligonucleotide
ggagucccuucucuagguu

SEQ ID NO: 1924804 - RNA, 19 nt, Artificial Sequence
  Description of Artificial Sequence: Synthetic oligonucleotide
accccgcaauagaaaucuu

SEQ ID NO: 1924805 - RNA, 19 nt, Artificial Sequence
  Description of Artificial Sequence: Synthetic oligonucleotide
cgaacucuucccgagcaua

SEQ ID NO: 1924806 - RNA, 19 nt, Artificial Sequence
  Description of Artificial Sequence: Synthetic oligonucleotide
cugcgucggggaccaggaa

SEQ ID NO: 1924807 - RNA, 19 nt, Artificial Sequence
  Description of Artificial Sequence: Synthetic oligonucleotide
ggccgaaaacuuggcaaau

SEQ ID NO: 1924808 - RNA, 19 nt, Artificial Sequence
  Description of Artificial Sequence: Synthetic oligonucleotide
gcacuccacggaacgccuc

SEQ ID NO: 1924809 - RNA, 19 nt, Artificial Sequence
  Description of Artificial Sequence: Synthetic oligonucleotide
ccccaccccgcaauagaaa

SEQ ID NO: 1924810 - RNA, 19 nt, Artificial Sequence
  Description of Artificial Sequence: Synthetic oligonucleotide
ggccgcaaccccaguccga

SEQ ID NO: 1924811 - RNA, 19 nt, Artificial Sequence
  Description of Artificial Sequence: Synthetic oligonucleotide
ccggcuccgugcaccccac

SEQ ID NO: 1924812 - RNA, 19 nt, Artificial Sequence
  Description of Artificial Sequence: Synthetic oligonucleotide
ccgggaaggcgggucucac

SEQ ID NO: 1924813 - RNA, 19 nt, Artificial Sequence
  Description of Artificial Sequence: Synthetic oligonucleotide
cgacccuacgcucgcugca

SEQ ID NO: 1924814 - RNA, 19 nt, Artificial Sequence
  Description of Artificial Sequence: Synthetic oligonucleotide
cccgagcauaagcauugcu

SEQ ID NO: 1924815 - RNA, 19 nt, Artificial Sequence
  Description of Artificial Sequence: Synthetic oligonucleotide
cgucguccggacaggugga

SEQ ID NO: 1924816 - RNA, 19 nt, Artificial Sequence
  Description of Artificial Sequence: Synthetic oligonucleotide
gccgcaaccccaguccgau

SEQ ID NO: 1924817 - RNA, 19 nt, Artificial Sequence
  Description of Artificial Sequence: Synthetic oligonucleotide
gcuggcccucggccgcaac

SEQ ID NO: 1924818 - RNA, 19 nt, Artificial Sequence
  Description of Artificial Sequence: Synthetic oligonucleotide
ccuauccuuucccuccauu

SEQ ID NO: 1924819 - RNA, 19 nt, Artificial Sequence
  Description of Artificial Sequence: Synthetic oligonucleotide
ccggacagguggaggcgaa

SEQ ID NO: 1924820 - RNA, 19 nt, Artificial Sequence
  Description of Artificial Sequence: Synthetic oligonucleotide
cccuacgcucgcugcagcu

SEQ ID NO: 1924821 - RNA, 19 nt, Artificial Sequence
  Description of Artificial Sequence: Synthetic oligonucleotide
ccgcaaccccaguccgauc

SEQ ID NO: 1924822 - RNA, 19 nt, Artificial Sequence
  Description of Artificial Sequence: Synthetic oligonucleotide
uggcugcgucggggaccag

SEQ ID NO: 1924823 - RNA, 19 nt, Artificial Sequence
  Description of Artificial Sequence: Synthetic oligonucleotide
cgggaaggcgggucucaca

SEQ ID NO: 1924824 - RNA, 19 nt, Artificial Sequence
  Description of Artificial Sequence: Synthetic oligonucleotide
ccucuauggcgagcacaga

SEQ ID NO: 1924825 - RNA, 19 nt, Artificial Sequence
  Description of Artificial Sequence: Synthetic oligonucleotide
cccaguccgauccgacccu

SEQ ID NO: 1924826 - RNA, 19 nt, Artificial Sequence
  Description of Artificial Sequence: Synthetic oligonucleotide
cccggguuuccugaccacu

SEQ ID NO: 1924827 - RNA, 19 nt, Artificial Sequence
  Description of Artificial Sequence: Synthetic oligonucleotide
ccucugcgagaugcccuca

SEQ ID NO: 1924828 - RNA, 19 nt, Artificial Sequence
  Description of Artificial Sequence: Synthetic oligonucleotide
ccaguccgauccgacccua

SEQ ID NO: 1924829 - RNA, 19 nt, Artificial Sequence
  Description of Artificial Sequence: Synthetic oligonucleotide
ccucuaagaggugcucauu

SEQ ID NO: 1924830 - RNA, 19 nt, Artificial Sequence
  Description of Artificial Sequence: Synthetic oligonucleotide
ccccaccggcuccgugcac

SEQ ID NO: 1924831 - RNA, 19 nt, Artificial Sequence
  Description of Artificial Sequence: Synthetic oligonucleotide
ccucgucguccggacaggu

SEQ ID NO: 1924832 - RNA, 19 nt, Artificial Sequence
  Description of Artificial Sequence: Synthetic oligonucleotide
cgggucucacagucgggau

SEQ ID NO: 1924833 - RNA, 19 nt, Artificial Sequence
  Description of Artificial Sequence: Synthetic oligonucleotide
ggaacgccucugggauggu

SEQ ID NO: 1924834 - RNA, 19 nt, Artificial Sequence
  Description of Artificial Sequence: Synthetic oligonucleotide
ccucggccgcaaccccagu

SEQ ID NO: 1924835 - RNA, 19 nt, Artificial Sequence
  Description of Artificial Sequence: Synthetic oligonucleotide
cggcuccgugcaccccaca

SEQ ID NO: 1924836 - RNA, 19 nt, Artificial Sequence
  Description of Artificial Sequence: Synthetic oligonucleotide
aauuauuauacacacaccc

SEQ ID NO: 1924837 - RNA, 19 nt, Artificial Sequence
  Description of Artificial Sequence: Synthetic oligonucleotide
aggaguaauaaccaggugc

SEQ ID NO: 1924838 - RNA, 19 nt, Artificial Sequence
  Description of Artificial Sequence: Synthetic oligonucleotide
uuaacaaaaccuagaaugg

SEQ ID NO: 1924839 - RNA, 19 nt, Artificial Sequence
  Description of Artificial Sequence: Synthetic oligonucleotide
aaggacucaaauucuaucg

SEQ ID NO: 1924840 - RNA, 19 nt, Artificial Sequence
  Description of Artificial Sequence: Synthetic oligonucleotide
auuuccauauaucacuucc

SEQ ID NO: 1924841 - RNA, 19 nt, Artificial Sequence
  Description of Artificial Sequence: Synthetic oligonucleotide
aaugugcauaaacucaagc

SEQ ID NO: 1924842 - RNA, 19 nt, Artificial Sequence
  Description of Artificial Sequence: Synthetic oligonucleotide
uguggaauaagcauacagg

SEQ ID NO: 1924843 - RNA, 19 nt, Artificial Sequence
  Description of Artificial Sequence: Synthetic oligonucleotide
aaugauaguaccaucauug

SEQ ID NO: 1924844 - RNA, 19 nt, Artificial Sequence
  Description of Artificial Sequence: Synthetic oligonucleotide
uuauuaauuauuauacaca

SEQ ID NO: 1924845 - RNA, 19 nt, Artificial Sequence
  Description of Artificial Sequence: Synthetic oligonucleotide
aauuccacaauuucuccac

SEQ ID NO: 1924846 - RNA, 19 nt, Artificial Sequence
  Description of Artificial Sequence: Synthetic oligonucleotide
aauacacggaaucuguuuc

SEQ ID NO: 1924847 - RNA, 19 nt, Artificial Sequence
  Description of Artificial Sequence: Synthetic oligonucleotide
uauaaugauaguaccauca

SEQ ID NO: 1924848 - RNA, 19 nt, Artificial Sequence
  Description of Artificial Sequence: Synthetic oligonucleotide
uauuaauuauuauacacac

SEQ ID NO: 1924849 - RNA, 19 nt, Artificial Sequence
  Description of Artificial Sequence: Synthetic oligonucleotide
aauucuaucgccaccuucc

SEQ ID NO: 1924850 - RNA, 19 nt, Artificial Sequence
  Description of Artificial Sequence: Synthetic oligonucleotide
aguaagaaugugcauaaac

SEQ ID NO: 1924851 - RNA, 19 nt, Artificial Sequence
  Description of Artificial Sequence: Synthetic oligonucleotide
aaaauuacuccuucuucac

SEQ ID NO: 1924852 - RNA, 19 nt, Artificial Sequence
  Description of Artificial Sequence: Synthetic oligonucleotide
cuuagaaucacacaaauga

SEQ ID NO: 1924853 - RNA, 19 nt, Artificial Sequence
  Description of Artificial Sequence: Synthetic oligonucleotide
uguaauuuaacaaaaccua

SEQ ID NO: 1924854 - RNA, 19 nt, Artificial Sequence
  Description of Artificial Sequence: Synthetic oligonucleotide
aaucuugcuaauuauaaaa

SEQ ID NO: 1924855 - RNA, 19 nt, Artificial Sequence
  Description of Artificial Sequence: Synthetic oligonucleotide
gaaaguuuaacuucuucag

SEQ ID NO: 1924856 - RNA, 19 nt, Artificial Sequence
  Description of Artificial Sequence: Synthetic oligonucleotide
agacauuaucauuugacac

SEQ ID NO: 1924857 - RNA, 19 nt, Artificial Sequence
  Description of Artificial Sequence: Synthetic oligonucleotide
uauuucaagcgcaugaaug

SEQ ID NO: 1924858 - RNA, 19 nt, Artificial Sequence
  Description of Artificial Sequence: Synthetic oligonucleotide
guuaacucgaguaagaaug

SEQ ID NO: 1924859 - RNA, 19 nt, Artificial Sequence
  Description of Artificial Sequence: Synthetic oligonucleotide
ugaaaaguggagucaaggg

SEQ ID NO: 1924860 - RNA, 19 nt, Artificial Sequence
  Description of Artificial Sequence: Synthetic oligonucleotide
uaaauuuguaauuuccucu

SEQ ID NO: 1924861 - RNA, 19 nt, Artificial Sequence
  Description of Artificial Sequence: Synthetic oligonucleotide
uacaguuucagcauggcac

SEQ ID NO: 1924862 - RNA, 19 nt, Artificial Sequence
  Description of Artificial Sequence: Synthetic oligonucleotide
uuuuaauguguguagggag

SEQ ID NO: 1924863 - RNA, 19 nt, Artificial Sequence
  Description of Artificial Sequence: Synthetic oligonucleotide
gacauuaucauuugacacc

SEQ ID NO: 1924864 - RNA, 19 nt, Artificial Sequence
  Description of Artificial Sequence: Synthetic oligonucleotide
uuauaguaccaccaaaucu

SEQ ID NO: 1924865 - RNA, 19 nt, Artificial Sequence
  Description of Artificial Sequence: Synthetic oligonucleotide
uaagacauuaucauuugac

SEQ ID NO: 1924866 - RNA, 19 nt, Artificial Sequence
  Description of Artificial Sequence: Synthetic oligonucleotide
uuagacuucggcaauaguc

SEQ ID NO: 1924867 - RNA, 19 nt, Artificial Sequence
  Description of Artificial Sequence: Synthetic oligonucleotide
uauaguaccaccaaaucuu

SEQ ID NO: 1924868 - RNA, 19 nt, Artificial Sequence
  Description of Artificial Sequence: Synthetic oligonucleotide
aagaguuugggcuuuccag

SEQ ID NO: 1924869 - RNA, 19 nt, Artificial Sequence
  Description of Artificial Sequence: Synthetic oligonucleotide
aguccauugauuugcuucc

SEQ ID NO: 1924870 - RNA, 19 nt, Artificial Sequence
  Description of Artificial Sequence: Synthetic oligonucleotide
uuuuaauggauuuggaauc

SEQ ID NO: 1924871 - RNA, 19 nt, Artificial Sequence
  Description of Artificial Sequence: Synthetic oligonucleotide
aaguuuaacuucuucagaa

SEQ ID NO: 1924872 - RNA, 19 nt, Artificial Sequence
  Description of Artificial Sequence: Synthetic oligonucleotide
ucauauuucaagcgcauga

SEQ ID NO: 1924873 - RNA, 19 nt, Artificial Sequence
  Description of Artificial Sequence: Synthetic oligonucleotide
aaaugaaacugcuucuucu

SEQ ID NO: 1924874 - RNA, 19 nt, Artificial Sequence
  Description of Artificial Sequence: Synthetic oligonucleotide
uaauuuaacaaaaccuaga

SEQ ID NO: 1924875 - RNA, 19 nt, Artificial Sequence
  Description of Artificial Sequence: Synthetic oligonucleotide
auaguaccaucauugacac

SEQ ID NO: 1924876 - RNA, 19 nt, Artificial Sequence
  Description of Artificial Sequence: Synthetic oligonucleotide
acaccaaucauuuccuuac

SEQ ID NO: 1924877 - RNA, 19 nt, Artificial Sequence
  Description of Artificial Sequence: Synthetic oligonucleotide
aaugaaacugcuucuucug

SEQ ID NO: 1924878 - RNA, 19 nt, Artificial Sequence
  Description of Artificial Sequence: Synthetic oligonucleotide
cuauuguccagauacauuc

SEQ ID NO: 1924879 - RNA, 19 nt, Artificial Sequence
  Description of Artificial Sequence: Synthetic oligonucleotide
ggaauaagcauacaggaag

SEQ ID NO: 1924880 - RNA, 19 nt, Artificial Sequence
  Description of Artificial Sequence: Synthetic oligonucleotide
uccucuauaaugauaguac

SEQ ID NO: 1924881 - RNA, 19 nt, Artificial Sequence
  Description of Artificial Sequence: Synthetic oligonucleotide
uagacuucggcaauagucc

SEQ ID NO: 1924882 - RNA, 19 nt, Artificial Sequence
  Description of Artificial Sequence: Synthetic oligonucleotide
aacucgaguaagaaugugc

SEQ ID NO: 1924883 - RNA, 19 nt, Artificial Sequence
  Description of Artificial Sequence: Synthetic oligonucleotide
cuuacugauaaaaguacag

SEQ ID NO: 1924884 - RNA, 19 nt, Artificial Sequence
  Description of Artificial Sequence: Synthetic oligonucleotide
uuauuauacacacacccau

SEQ ID NO: 1924885 - RNA, 19 nt, Artificial Sequence
  Description of Artificial Sequence: Synthetic oligonucleotide
uaagaaugugcauaaacuc

SEQ ID NO: 1924886 - RNA, 19 nt, Artificial Sequence
  Description of Artificial Sequence: Synthetic oligonucleotide
gauaguaccaucauugaca

SEQ ID NO: 1924887 - RNA, 19 nt, Artificial Sequence
  Description of Artificial Sequence: Synthetic oligonucleotide
uuuccuuacugauaaaagu

SEQ ID NO: 1924888 - RNA, 19 nt, Artificial Sequence
  Description of Artificial Sequence: Synthetic oligonucleotide
uuugcuuccauguaugguc

SEQ ID NO: 1924889 - RNA, 19 nt, Artificial Sequence
  Description of Artificial Sequence: Synthetic oligonucleotide
acccauuucaggauaaucc

SEQ ID NO: 1924890 - RNA, 19 nt, Artificial Sequence
  Description of Artificial Sequence: Synthetic oligonucleotide
uuuaauguguguagggagu

SEQ ID NO: 1924891 - RNA, 19 nt, Artificial Sequence
  Description of Artificial Sequence: Synthetic oligonucleotide
aaauuuauaguaccaccaa

SEQ ID NO: 1924892 - RNA, 19 nt, Artificial Sequence
  Description of Artificial Sequence: Synthetic oligonucleotide
aguucuaagacauuaucau

SEQ ID NO: 1924893 - RNA, 19 nt, Artificial Sequence
  Description of Artificial Sequence: Synthetic oligonucleotide
aauuuauaguaccaccaaa

SEQ ID NO: 1924894 - RNA, 19 nt, Artificial Sequence
  Description of Artificial Sequence: Synthetic oligonucleotide
aagcgcaugaaugucuccc

SEQ ID NO: 1924895 - RNA, 19 nt, Artificial Sequence
  Description of Artificial Sequence: Synthetic oligonucleotide
uuuauaguaccaccaaauc

SEQ ID NO: 1924896 - RNA, 19 nt, Artificial Sequence
  Description of Artificial Sequence: Synthetic oligonucleotide
uguguagggaguauaaaau

SEQ ID NO: 1924897 - RNA, 19 nt, Artificial Sequence
  Description of Artificial Sequence: Synthetic oligonucleotide
cuuuuguuagcauggacac

SEQ ID NO: 1924898 - RNA, 19 nt, Artificial Sequence
  Description of Artificial Sequence: Synthetic oligonucleotide
uccacaaguaagaucauuc

SEQ ID NO: 1924899 - RNA, 19 nt, Artificial Sequence
  Description of Artificial Sequence: Synthetic oligonucleotide
gacuucauauuucaagcgc

SEQ ID NO: 1924900 - RNA, 19 nt, Artificial Sequence
  Description of Artificial Sequence: Synthetic oligonucleotide
uccaaaauaaagguccaag

SEQ ID NO: 1924901 - RNA, 19 nt, Artificial Sequence
  Description of Artificial Sequence: Synthetic oligonucleotide
auggcuuagaaucacacaa

SEQ ID NO: 1924902 - RNA, 19 nt, Artificial Sequence
  Description of Artificial Sequence: Synthetic oligonucleotide
uaaagguccaagcuuuuga

SEQ ID NO: 1924903 - RNA, 19 nt, Artificial Sequence
  Description of Artificial Sequence: Synthetic oligonucleotide
acuggaugaaccaggaccc

SEQ ID NO: 1924904 - RNA, 19 nt, Artificial Sequence
  Description of Artificial Sequence: Synthetic oligonucleotide
guaagaucauucuuauucc

SEQ ID NO: 1924905 - RNA, 19 nt, Artificial Sequence
  Description of Artificial Sequence: Synthetic oligonucleotide
auuucaagcgcaugaaugu

SEQ ID NO: 1924906 - RNA, 19 nt, Artificial Sequence
  Description of Artificial Sequence: Synthetic oligonucleotide
uugaauuucuccaggagua

SEQ ID NO: 1924907 - RNA, 19 nt, Artificial Sequence
  Description of Artificial Sequence: Synthetic oligonucleotide
uuuuguaacuauuguccag

SEQ ID NO: 1924908 - RNA, 19 nt, Artificial Sequence
  Description of Artificial Sequence: Synthetic oligonucleotide
cucugaaguaaguaguuag

SEQ ID NO: 1924909 - RNA, 19 nt, Artificial Sequence
  Description of Artificial Sequence: Synthetic oligonucleotide
aaagugacuggaugaacca

SEQ ID NO: 1924910 - RNA, 19 nt, Artificial Sequence
  Description of Artificial Sequence: Synthetic oligonucleotide
uguagggaguauaaaauua

SEQ ID NO: 1924911 - RNA, 19 nt, Artificial Sequence
  Description of Artificial Sequence: Synthetic oligonucleotide
augugcauaaacucaagcu

SEQ ID NO: 1924912 - RNA, 19 nt, Artificial Sequence
  Description of Artificial Sequence: Synthetic oligonucleotide
uacaccugaaaguuuaacu

SEQ ID NO: 1924913 - RNA, 19 nt, Artificial Sequence
  Description of Artificial Sequence: Synthetic oligonucleotide
ucaucaauuccacaauuuc

SEQ ID NO: 1924914 - RNA, 19 nt, Artificial Sequence
  Description of Artificial Sequence: Synthetic oligonucleotide
uuagaaucacacaaaugaa

SEQ ID NO: 1924915 - RNA, 19 nt, Artificial Sequence
  Description of Artificial Sequence: Synthetic oligonucleotide
ugauuugcuuccauguaug

SEQ ID NO: 1924916 - RNA, 19 nt, Artificial Sequence
  Description of Artificial Sequence: Synthetic oligonucleotide
caacaucaguaccagagcg

SEQ ID NO: 1924917 - RNA, 19 nt, Artificial Sequence
  Description of Artificial Sequence: Synthetic oligonucleotide
uccuuacugauaaaaguac

SEQ ID NO: 1924918 - RNA, 19 nt, Artificial Sequence
  Description of Artificial Sequence: Synthetic oligonucleotide
aaaucuugcuaauuauaaa

SEQ ID NO: 1924919 - RNA, 19 nt, Artificial Sequence
  Description of Artificial Sequence: Synthetic oligonucleotide
uuuguaacuauuguccaga

SEQ ID NO: 1924920 - RNA, 19 nt, Artificial Sequence
  Description of Artificial Sequence: Synthetic oligonucleotide
uccauuuuguaacuauugu

SEQ ID NO: 1924921 - RNA, 19 nt, Artificial Sequence
  Description of Artificial Sequence: Synthetic oligonucleotide
aaugaaugcuacugguggu

SEQ ID NO: 1924922 - RNA, 19 nt, Artificial Sequence
  Description of Artificial Sequence: Synthetic oligonucleotide
aaucuguuucuuugcauga

SEQ ID NO: 1924923 - RNA, 19 nt, Artificial Sequence
  Description of Artificial Sequence: Synthetic oligonucleotide
acucaaauucuaucgccac

SEQ ID NO: 1924924 - RNA, 19 nt, Artificial Sequence
  Description of Artificial Sequence: Synthetic oligonucleotide
uuugcaugaaaaguggagu

SEQ ID NO: 1924925 - RNA, 19 nt, Artificial Sequence
  Description of Artificial Sequence: Synthetic oligonucleotide
ggauaauccauuuuguaac

SEQ ID NO: 1924926 - RNA, 19 nt, Artificial Sequence
  Description of Artificial Sequence: Synthetic oligonucleotide
uacugauaaaaguacaguu

SEQ ID NO: 1924927 - RNA, 19 nt, Artificial Sequence
  Description of Artificial Sequence: Synthetic oligonucleotide
ucugaaguaaguaguuagu

SEQ ID NO: 1924928 - RNA, 19 nt, Artificial Sequence
  Description of Artificial Sequence: Synthetic oligonucleotide
ucuaucgccaccuuccggu

SEQ ID NO: 1924929 - RNA, 19 nt, Artificial Sequence
  Description of Artificial Sequence: Synthetic oligonucleotide
gcuguaauuuaacaaaacc

SEQ ID NO: 1924930 - RNA, 19 nt, Artificial Sequence
  Description of Artificial Sequence: Synthetic oligonucleotide
ucaaauucuaucgccaccu

SEQ ID NO: 1924931 - RNA, 19 nt, Artificial Sequence
  Description of Artificial Sequence: Synthetic oligonucleotide
uaaacucaagcuugugugc

SEQ ID NO: 1924932 - RNA, 19 nt, Artificial Sequence
  Description of Artificial Sequence: Synthetic oligonucleotide
ugauaguaccaucauugac

SEQ ID NO: 1924933 - RNA, 19 nt, Artificial Sequence
  Description of Artificial Sequence: Synthetic oligonucleotide
guggaauaagcauacagga

SEQ ID NO: 1924934 - RNA, 19 nt, Artificial Sequence
  Description of Artificial Sequence: Synthetic oligonucleotide
gaguccauugauuugcuuc

SEQ ID NO: 1924935 - RNA, 19 nt, Artificial Sequence
  Description of Artificial Sequence: Synthetic oligonucleotide
agggaguauaaaauuacac

SEQ ID NO: 1924936 - RNA, 19 nt, Artificial Sequence
  Description of Artificial Sequence: Synthetic oligonucleotide
acggaaucuguuucuuugc

SEQ ID NO: 1924937 - RNA, 19 nt, Artificial Sequence
  Description of Artificial Sequence: Synthetic oligonucleotide
uggucuuuacuucaaaauu

SEQ ID NO: 1924938 - RNA, 19 nt, Artificial Sequence
  Description of Artificial Sequence: Synthetic oligonucleotide
uccaguuagacuucggcaa

SEQ ID NO: 1924939 - RNA, 19 nt, Artificial Sequence
  Description of Artificial Sequence: Synthetic oligonucleotide
cuguggaauaagcauacag

SEQ ID NO: 1924940 - RNA, 19 nt, Artificial Sequence
  Description of Artificial Sequence: Synthetic oligonucleotide
uuuccauauaucacuucca

SEQ ID NO: 1924941 - RNA, 19 nt, Artificial Sequence
  Description of Artificial Sequence: Synthetic oligonucleotide
gaguauaaaauuacaccug

SEQ ID NO: 1924942 - RNA, 19 nt, Artificial Sequence
  Description of Artificial Sequence: Synthetic oligonucleotide
agacuucggcaauaguccc

SEQ ID NO: 1924943 - RNA, 19 nt, Artificial Sequence
  Description of Artificial Sequence: Synthetic oligonucleotide
uuaacucgaguaagaaugu

SEQ ID NO: 1924944 - RNA, 19 nt, Artificial Sequence
  Description of Artificial Sequence: Synthetic oligonucleotide
aauuacaccugaaaguuua

SEQ ID NO: 1924945 - RNA, 19 nt, Artificial Sequence
  Description of Artificial Sequence: Synthetic oligonucleotide
guuagcauggacacaauac

SEQ ID NO: 1924946 - RNA, 19 nt, Artificial Sequence
  Description of Artificial Sequence: Synthetic oligonucleotide
agaucauucuuauuccgga

SEQ ID NO: 1924947 - RNA, 19 nt, Artificial Sequence
  Description of Artificial Sequence: Synthetic oligonucleotide
uccauggucacuuuucuua

SEQ ID NO: 1924948 - RNA, 19 nt, Artificial Sequence
  Description of Artificial Sequence: Synthetic oligonucleotide
uuuaauggauuuggaaucu

SEQ ID NO: 1924949 - RNA, 19 nt, Artificial Sequence
  Description of Artificial Sequence: Synthetic oligonucleotide
uagggaguauaaaauuaca

SEQ ID NO: 1924950 - RNA, 19 nt, Artificial Sequence
  Description of Artificial Sequence: Synthetic oligonucleotide
ugaaguaaguaguuaguuu

SEQ ID NO: 1924951 - RNA, 19 nt, Artificial Sequence
  Description of Artificial Sequence: Synthetic oligonucleotide
acugguaucuucuggcaug

SEQ ID NO: 1924952 - RNA, 19 nt, Artificial Sequence
  Description of Artificial Sequence: Synthetic oligonucleotide
uuccaguuagacuucggca

SEQ ID NO: 1924953 - RNA, 19 nt, Artificial Sequence
  Description of Artificial Sequence: Synthetic oligonucleotide
auuauacacacacccauuu

SEQ ID NO: 1924954 - RNA, 19 nt, Artificial Sequence
  Description of Artificial Sequence: Synthetic oligonucleotide
uauuguccagauacauucc

SEQ ID NO: 1924955 - RNA, 19 nt, Artificial Sequence
  Description of Artificial Sequence: Synthetic oligonucleotide
gaaguaaguaguuaguuuu

SEQ ID NO: 1924956 - RNA, 19 nt, Artificial Sequence
  Description of Artificial Sequence: Synthetic oligonucleotide
uugacaccaaucauuuccu

SEQ ID NO: 1924957 - RNA, 19 nt, Artificial Sequence
  Description of Artificial Sequence: Synthetic oligonucleotide
gggagaaggacucaaauuc

SEQ ID NO: 1924958 - RNA, 19 nt, Artificial Sequence
  Description of Artificial Sequence: Synthetic oligonucleotide
agaguuugggcuuuccagu

SEQ ID NO: 1924959 - RNA, 19 nt, Artificial Sequence
  Description of Artificial Sequence: Synthetic oligonucleotide
uccccucugaaguaaguag

SEQ ID NO: 1924960 - RNA, 19 nt, Artificial Sequence
  Description of Artificial Sequence: Synthetic oligonucleotide
ucuuauuccggacuucaua

SEQ ID NO: 1924961 - RNA, 19 nt, Artificial Sequence
  Description of Artificial Sequence: Synthetic oligonucleotide
ggaguauaaaauuacaccu

SEQ ID NO: 1924962 - RNA, 19 nt, Artificial Sequence
  Description of Artificial Sequence: Synthetic oligonucleotide
uucaagcgcaugaaugucu

SEQ ID NO: 1924963 - RNA, 19 nt, Artificial Sequence
  Description of Artificial Sequence: Synthetic oligonucleotide
cauggcacaaagugacugg

SEQ ID NO: 1924964 - RNA, 19 nt, Artificial Sequence
  Description of Artificial Sequence: Synthetic oligonucleotide
auggucuuuacuucaaaau

SEQ ID NO: 1924965 - RNA, 19 nt, Artificial Sequence
  Description of Artificial Sequence: Synthetic oligonucleotide
gcauggacacaauacacgg

SEQ ID NO: 1924966 - RNA, 19 nt, Artificial Sequence
  Description of Artificial Sequence: Synthetic oligonucleotide
gaaugucucccugagguug

SEQ ID NO: 1924967 - RNA, 19 nt, Artificial Sequence
  Description of Artificial Sequence: Synthetic oligonucleotide
auauaucacuuccaaaaua

SEQ ID NO: 1924968 - RNA, 19 nt, Artificial Sequence
  Description of Artificial Sequence: Synthetic oligonucleotide
auaaugauaguaccaucau

SEQ ID NO: 1924969 - RNA, 19 nt, Artificial Sequence
  Description of Artificial Sequence: Synthetic oligonucleotide
aguccaguuccguaccacg

SEQ ID NO: 1924970 - RNA, 19 nt, Artificial Sequence
  Description of Artificial Sequence: Synthetic oligonucleotide
uugcaugaaaaguggaguc

SEQ ID NO: 1924971 - RNA, 19 nt, Artificial Sequence
  Description of Artificial Sequence: Synthetic oligonucleotide
gauuuggaaucuacugagg

SEQ ID NO: 1924972 - RNA, 19 nt, Artificial Sequence
  Description of Artificial Sequence: Synthetic oligonucleotide
aagguccaagcuuuugacu

SEQ ID NO: 1924973 - RNA, 19 nt, Artificial Sequence
  Description of Artificial Sequence: Synthetic oligonucleotide
agcauggacacaauacacg

SEQ ID NO: 1924974 - RNA, 19 nt, Artificial Sequence
  Description of Artificial Sequence: Synthetic oligonucleotide
ugcccauggauucaaguuc

SEQ ID NO: 1924975 - RNA, 19 nt, Artificial Sequence
  Description of Artificial Sequence: Synthetic oligonucleotide
cacggaaucuguuucuuug

SEQ ID NO: 1924976 - RNA, 19 nt, Artificial Sequence
  Description of Artificial Sequence: Synthetic oligonucleotide
caaguucuaagacauuauc

SEQ ID NO: 1924977 - RNA, 19 nt, Artificial Sequence
  Description of Artificial Sequence: Synthetic oligonucleotide
ucgaguaagaaugugcaua

SEQ ID NO: 1924978 - RNA, 19 nt, Artificial Sequence
  Description of Artificial Sequence: Synthetic oligonucleotide
ugcauaaacucaagcuugu

SEQ ID NO: 1924979 - RNA, 19 nt, Artificial Sequence
  Description of Artificial Sequence: Synthetic oligonucleotide
ccaaaauaaagguccaagc

SEQ ID NO: 1924980 - RNA, 19 nt, Artificial Sequence
  Description of Artificial Sequence: Synthetic oligonucleotide
guuugggcuuuccaguuag

SEQ ID NO: 1924981 - RNA, 19 nt, Artificial Sequence
  Description of Artificial Sequence: Synthetic oligonucleotide
aacuauuguccagauacau

SEQ ID NO: 1924982 - RNA, 19 nt, Artificial Sequence
  Description of Artificial Sequence: Synthetic oligonucleotide
cucuauaaugauaguacca

SEQ ID NO: 1924983 - RNA, 19 nt, Artificial Sequence
  Description of Artificial Sequence: Synthetic oligonucleotide
accaucauugacaccaauc

SEQ ID NO: 1924984 - RNA, 19 nt, Artificial Sequence
  Description of Artificial Sequence: Synthetic oligonucleotide
cugucugucucaaugccac

SEQ ID NO: 1924985 - RNA, 19 nt, Artificial Sequence
  Description of Artificial Sequence: Synthetic oligonucleotide
uucuuuuguuagcauggac

SEQ ID NO: 1924986 - RNA, 19 nt, Artificial Sequence
  Description of Artificial Sequence: Synthetic oligonucleotide
cuauaaugauaguaccauc

SEQ ID NO: 1924987 - RNA, 19 nt, Artificial Sequence
  Description of Artificial Sequence: Synthetic oligonucleotide
gaucauucuuauuccggac

SEQ ID NO: 1924988 - RNA, 19 nt, Artificial Sequence
  Description of Artificial Sequence: Synthetic oligonucleotide
ucauucuuauuccggacuu

SEQ ID NO: 1924989 - RNA, 19 nt, Artificial Sequence
  Description of Artificial Sequence: Synthetic oligonucleotide
cucaaauucuaucgccacc

SEQ ID NO: 1924990 - RNA, 19 nt, Artificial Sequence
  Description of Artificial Sequence: Synthetic oligonucleotide
auguauggucuuuacuuca

SEQ ID NO: 1924991 - RNA, 19 nt, Artificial Sequence
  Description of Artificial Sequence: Synthetic oligonucleotide
uccauguauggucuuuacu

SEQ ID NO: 1924992 - RNA, 19 nt, Artificial Sequence
  Description of Artificial Sequence: Synthetic oligonucleotide
gugcauaaacucaagcuug

SEQ ID NO: 1924993 - RNA, 19 nt, Artificial Sequence
  Description of Artificial Sequence: Synthetic oligonucleotide
auucuaucgccaccuuccg

SEQ ID NO: 1924994 - RNA, 19 nt, Artificial Sequence
  Description of Artificial Sequence: Synthetic oligonucleotide
uucuaucgccaccuuccgg

SEQ ID NO: 1924995 - RNA, 19 nt, Artificial Sequence
  Description of Artificial Sequence: Synthetic oligonucleotide
uaauaaccaggugcugugg

SEQ ID NO: 1924996 - RNA, 19 nt, Artificial Sequence
  Description of Artificial Sequence: Synthetic oligonucleotide
uguauggucuuuacuucaa

SEQ ID NO: 1924997 - RNA, 19 nt, Artificial Sequence
  Description of Artificial Sequence: Synthetic oligonucleotide
gauucaaguucuaagacau

SEQ ID NO: 1924998 - RNA, 19 nt, Artificial Sequence
  Description of Artificial Sequence: Synthetic oligonucleotide
ucggcaauaguccccucug

SEQ ID NO: 1924999 - RNA, 19 nt, Artificial Sequence
  Description of Artificial Sequence: Synthetic oligonucleotide
augauaguaccaucauuga

SEQ ID NO: 1925000 - RNA, 19 nt, Artificial Sequence
  Description of Artificial Sequence: Synthetic oligonucleotide
uccgguuaacucgaguaag

SEQ ID NO: 1925001 - RNA, 19 nt, Artificial Sequence
  Description of Artificial Sequence: Synthetic oligonucleotide
guagggaguauaaaauuac

SEQ ID NO: 1925002 - RNA, 19 nt, Artificial Sequence
  Description of Artificial Sequence: Synthetic oligonucleotide
aguuccguaccacggcagg

SEQ ID NO: 1925003 - RNA, 19 nt, Artificial Sequence
  Description of Artificial Sequence: Synthetic oligonucleotide
acaaagugacuggaugaac

SEQ ID NO: 1925004 - RNA, 19 nt, Artificial Sequence
  Description of Artificial Sequence: Synthetic oligonucleotide
uguuagcauggacacaaua

SEQ ID NO: 1925005 - RNA, 19 nt, Artificial Sequence
  Description of Artificial Sequence: Synthetic oligonucleotide
agucaagggagaaggacuc

SEQ ID NO: 1925006 - RNA, 19 nt, Artificial Sequence
  Description of Artificial Sequence: Synthetic oligonucleotide
uuucuccacaaguaagauc

SEQ ID NO: 1925007 - RNA, 19 nt, Artificial Sequence
  Description of Artificial Sequence: Synthetic oligonucleotide
uuccggacuucauauuuca

SEQ ID NO: 1925008 - RNA, 19 nt, Artificial Sequence
  Description of Artificial Sequence: Synthetic oligonucleotide
ugggcuuuccaguuagacu

SEQ ID NO: 1925009 - RNA, 19 nt, Artificial Sequence
  Description of Artificial Sequence: Synthetic oligonucleotide
auuugacaccaucauugcu

SEQ ID NO: 1925010 - RNA, 19 nt, Artificial Sequence
  Description of Artificial Sequence: Synthetic oligonucleotide
ucaagcgcaugaaugucuc

SEQ ID NO: 1925011 - RNA, 19 nt, Artificial Sequence
  Description of Artificial Sequence: Synthetic oligonucleotide
auuaauuauuauacacaca

SEQ ID NO: 1925012 - RNA, 19 nt, Artificial Sequence
  Description of Artificial Sequence: Synthetic oligonucleotide
uucggcaauaguccccucu

SEQ ID NO: 1925013 - RNA, 19 nt, Artificial Sequence
  Description of Artificial Sequence: Synthetic oligonucleotide
gaugaaccaggacccgucc

SEQ ID NO: 1925014 - RNA, 19 nt, Artificial Sequence
  Description of Artificial Sequence: Synthetic oligonucleotide
ccauauaucacuuccaaaa

SEQ ID NO: 1925015 - RNA, 19 nt, Artificial Sequence
  Description of Artificial Sequence: Synthetic oligonucleotide
auacaguuucagcauggca

SEQ ID NO: 1925016 - RNA, 19 nt, Artificial Sequence
  Description of Artificial Sequence: Synthetic oligonucleotide
caacaggcccaucuguucc

SEQ ID NO: 1925017 - RNA, 19 nt, Artificial Sequence
  Description of Artificial Sequence: Synthetic oligonucleotide
acacaauacacggaaucug

SEQ ID NO: 1925018 - RNA, 19 nt, Artificial Sequence
  Description of Artificial Sequence: Synthetic oligonucleotide
uaccaccaaaucuugcuaa

SEQ ID NO: 1925019 - RNA, 19 nt, Artificial Sequence
  Description of Artificial Sequence: Synthetic oligonucleotide
uucauauuucaagcgcaug

SEQ ID NO: 1925020 - RNA, 19 nt, Artificial Sequence
  Description of Artificial Sequence: Synthetic oligonucleotide
acucgaguaagaaugugca

SEQ ID NO: 1925021 - RNA, 19 nt, Artificial Sequence
  Description of Artificial Sequence: Synthetic oligonucleotide
gaagaguuugggcuuucca

SEQ ID NO: 1925022 - RNA, 19 nt, Artificial Sequence
  Description of Artificial Sequence: Synthetic oligonucleotide
ucugcccauggauucaagu

SEQ ID NO: 1925023 - RNA, 19 nt, Artificial Sequence
  Description of Artificial Sequence: Synthetic oligonucleotide
uuccgguuaacucgaguaa

SEQ ID NO: 1925024 - RNA, 19 nt, Artificial Sequence
  Description of Artificial Sequence: Synthetic oligonucleotide
ggacucaaauucuaucgcc

SEQ ID NO: 1925025 - RNA, 19 nt, Artificial Sequence
  Description of Artificial Sequence: Synthetic oligonucleotide
agagcgaggugucauucca

SEQ ID NO: 1925026 - RNA, 19 nt, Artificial Sequence
  Description of Artificial Sequence: Synthetic oligonucleotide
aauguguguagggaguaua

SEQ ID NO: 1925027 - RNA, 19 nt, Artificial Sequence
  Description of Artificial Sequence: Synthetic oligonucleotide
gaaucacacaaaugaaacu

SEQ ID NO: 1925028 - RNA, 19 nt, Artificial Sequence
  Description of Artificial Sequence: Synthetic oligonucleotide
agaaugugcauaaacucaa

SEQ ID NO: 1925029 - RNA, 19 nt, Artificial Sequence
  Description of Artificial Sequence: Synthetic oligonucleotide
aguuagacuucggcaauag

SEQ ID NO: 1925030 - RNA, 19 nt, Artificial Sequence
  Description of Artificial Sequence: Synthetic oligonucleotide
aauuucuccaggaguaaua

SEQ ID NO: 1925031 - RNA, 19 nt, Artificial Sequence
  Description of Artificial Sequence: Synthetic oligonucleotide
auacacggaaucuguuucu

SEQ ID NO: 1925032 - RNA, 19 nt, Artificial Sequence
  Description of Artificial Sequence: Synthetic oligonucleotide
uaguaccaccaaaucuugc

SEQ ID NO: 1925033 - RNA, 19 nt, Artificial Sequence
  Description of Artificial Sequence: Synthetic oligonucleotide
ggcacaaagugacuggaug

SEQ ID NO: 1925034 - RNA, 19 nt, Artificial Sequence
  Description of Artificial Sequence: Synthetic oligonucleotide
gacucaaauucuaucgcca

SEQ ID NO: 1925035 - RNA, 19 nt, Artificial Sequence
  Description of Artificial Sequence: Synthetic oligonucleotide
uuccagugcuuuuaugaaa

SEQ ID NO: 1925036 - RNA, 19 nt, Artificial Sequence
  Description of Artificial Sequence: Synthetic oligonucleotide
ccaccuuccgguuaacucg

SEQ ID NO: 1925037 - RNA, 19 nt, Artificial Sequence
  Description of Artificial Sequence: Synthetic oligonucleotide
ccucuauaaugauaguacc

SEQ ID NO: 1925038 - RNA, 19 nt, Artificial Sequence
  Description of Artificial Sequence: Synthetic oligonucleotide
gaaugugcauaaacucaag

SEQ ID NO: 1925039 - RNA, 19 nt, Artificial Sequence
  Description of Artificial Sequence: Synthetic oligonucleotide
agcuugugugcauacaguu

SEQ ID NO: 1925040 - RNA, 19 nt, Artificial Sequence
  Description of Artificial Sequence: Synthetic oligonucleotide
ucaacaggcccaucuguuc

SEQ ID NO: 1925041 - RNA, 19 nt, Artificial Sequence
  Description of Artificial Sequence: Synthetic oligonucleotide
cauuguucuccauggucac

SEQ ID NO: 1925042 - RNA, 19 nt, Artificial Sequence
  Description of Artificial Sequence: Synthetic oligonucleotide
cuuuccaguuagacuucgg

SEQ ID NO: 1925043 - RNA, 19 nt, Artificial Sequence
  Description of Artificial Sequence: Synthetic oligonucleotide
uuaauguguguagggagua

SEQ ID NO: 1925044 - RNA, 19 nt, Artificial Sequence
  Description of Artificial Sequence: Synthetic oligonucleotide
uuacaccugaaaguuuaac

SEQ ID NO: 1925045 - RNA, 19 nt, Artificial Sequence
  Description of Artificial Sequence: Synthetic oligonucleotide
uuuugacucugcccaugga

SEQ ID NO: 1925046 - RNA, 19 nt, Artificial Sequence
  Description of Artificial Sequence: Synthetic oligonucleotide
aguaccagagcgagguguc

SEQ ID NO: 1925047 - RNA, 19 nt, Artificial Sequence
  Description of Artificial Sequence: Synthetic oligonucleotide
auuccggacuucauauuuc

SEQ ID NO: 1925048 - RNA, 19 nt, Artificial Sequence
  Description of Artificial Sequence: Synthetic oligonucleotide
ggacacaauacacggaauc

SEQ ID NO: 1925049 - RNA, 19 nt, Artificial Sequence
  Description of Artificial Sequence: Synthetic oligonucleotide
uuucaagcgcaugaauguc

SEQ ID NO: 1925050 - RNA, 19 nt, Artificial Sequence
  Description of Artificial Sequence: Synthetic oligonucleotide
uaacucgaguaagaaugug

SEQ ID NO: 1925051 - RNA, 19 nt, Artificial Sequence
  Description of Artificial Sequence: Synthetic oligonucleotide
cuuccgguuaacucgagua

SEQ ID NO: 1925052 - RNA, 19 nt, Artificial Sequence
  Description of Artificial Sequence: Synthetic oligonucleotide
cauaaacucaagcuugugu

SEQ ID NO: 1925053 - RNA, 19 nt, Artificial Sequence
  Description of Artificial Sequence: Synthetic oligonucleotide
cuuccaaaauaaaggucca

SEQ ID NO: 1925054 - RNA, 19 nt, Artificial Sequence
  Description of Artificial Sequence: Synthetic oligonucleotide
aaugcuacuggugguccaa

SEQ ID NO: 1925055 - RNA, 19 nt, Artificial Sequence
  Description of Artificial Sequence: Synthetic oligonucleotide
cggacuucauauuucaagc

SEQ ID NO: 1925056 - RNA, 19 nt, Artificial Sequence
  Description of Artificial Sequence: Synthetic oligonucleotide
gucucccugagguuggcug

SEQ ID NO: 1925057 - RNA, 19 nt, Artificial Sequence
  Description of Artificial Sequence: Synthetic oligonucleotide
agcgaggugucauuccagu

SEQ ID NO: 1925058 - RNA, 19 nt, Artificial Sequence
  Description of Artificial Sequence: Synthetic oligonucleotide
gcuacuggugguccaaugc

SEQ ID NO: 1925059 - RNA, 19 nt, Artificial Sequence
  Description of Artificial Sequence: Synthetic oligonucleotide
auaguaccaccaaaucuug

SEQ ID NO: 1925060 - RNA, 19 nt, Artificial Sequence
  Description of Artificial Sequence: Synthetic oligonucleotide
auaaccaggugcuguggaa

SEQ ID NO: 1925061 - RNA, 19 nt, Artificial Sequence
  Description of Artificial Sequence: Synthetic oligonucleotide
ccggacuucauauuucaag

SEQ ID NO: 1925062 - RNA, 19 nt, Artificial Sequence
  Description of Artificial Sequence: Synthetic oligonucleotide
ucuggcaugccaugucauc

SEQ ID NO: 1925063 - RNA, 19 nt, Artificial Sequence
  Description of Artificial Sequence: Synthetic oligonucleotide
uuguaacuauuguccagau

SEQ ID NO: 1925064 - RNA, 19 nt, Artificial Sequence
  Description of Artificial Sequence: Synthetic oligonucleotide
cauuuccauauaucacuuc

SEQ ID NO: 1925065 - RNA, 19 nt, Artificial Sequence
  Description of Artificial Sequence: Synthetic oligonucleotide
cacaguccaguuccguacc

SEQ ID NO: 1925066 - RNA, 19 nt, Artificial Sequence
  Description of Artificial Sequence: Synthetic oligonucleotide
uaguccccucugaaguaag

SEQ ID NO: 1925067 - RNA, 19 nt, Artificial Sequence
  Description of Artificial Sequence: Synthetic oligonucleotide
uuccguaccacggcaggcc

SEQ ID NO: 1925068 - RNA, 19 nt, Artificial Sequence
  Description of Artificial Sequence: Synthetic oligonucleotide
aaccaggugcuguggaaua

SEQ ID NO: 1925069 - RNA, 19 nt, Artificial Sequence
  Description of Artificial Sequence: Synthetic oligonucleotide
ccaucauugacaccaauca

SEQ ID NO: 1925070 - RNA, 19 nt, Artificial Sequence
  Description of Artificial Sequence: Synthetic oligonucleotide
uguguguagggaguauaaa

SEQ ID NO: 1925071 - RNA, 19 nt, Artificial Sequence
  Description of Artificial Sequence: Synthetic oligonucleotide
ugcuacuggugguccaaug

SEQ ID NO: 1925072 - RNA, 19 nt, Artificial Sequence
  Description of Artificial Sequence: Synthetic oligonucleotide
uggaaucuacugagguuuc

SEQ ID NO: 1925073 - RNA, 19 nt, Artificial Sequence
  Description of Artificial Sequence: Synthetic oligonucleotide
caucaguaccagagcgagg

SEQ ID NO: 1925074 - RNA, 19 nt, Artificial Sequence
  Description of Artificial Sequence: Synthetic oligonucleotide
guccaguuccguaccacgg

SEQ ID NO: 1925075 - RNA, 19 nt, Artificial Sequence
  Description of Artificial Sequence: Synthetic oligonucleotide
gcaugaaugucucccugag

SEQ ID NO: 1925076 - RNA, 19 nt, Artificial Sequence
  Description of Artificial Sequence: Synthetic oligonucleotide
ugaagaguuugggcuuucc

SEQ ID NO: 1925077 - RNA, 19 nt, Artificial Sequence
  Description of Artificial Sequence: Synthetic oligonucleotide
uucuuauuccggacuucau

SEQ ID NO: 1925078 - RNA, 19 nt, Artificial Sequence
  Description of Artificial Sequence: Synthetic oligonucleotide
uacuggugguccaaugcuu

SEQ ID NO: 1925079 - RNA, 19 nt, Artificial Sequence
  Description of Artificial Sequence: Synthetic oligonucleotide
agcgcaugaaugucucccu

SEQ ID NO: 1925080 - RNA, 19 nt, Artificial Sequence
  Description of Artificial Sequence: Synthetic oligonucleotide
acuucggcaauaguccccu

SEQ ID NO: 1925081 - RNA, 19 nt, Artificial Sequence
  Description of Artificial Sequence: Synthetic oligonucleotide
auuacuccuucuucaccau

SEQ ID NO: 1925082 - RNA, 19 nt, Artificial Sequence
  Description of Artificial Sequence: Synthetic oligonucleotide
uggacacaauacacggaau

SEQ ID NO: 1925083 - RNA, 19 nt, Artificial Sequence
  Description of Artificial Sequence: Synthetic oligonucleotide
gcacaaagugacuggauga

SEQ ID NO: 1925084 - RNA, 19 nt, Artificial Sequence
  Description of Artificial Sequence: Synthetic oligonucleotide
gacuucggcaauagucccc

SEQ ID NO: 1925085 - RNA, 19 nt, Artificial Sequence
  Description of Artificial Sequence: Synthetic oligonucleotide
uuauuccggacuucauauu

SEQ ID NO: 1925086 - RNA, 19 nt, Artificial Sequence
  Description of Artificial Sequence: Synthetic oligonucleotide
ugcuuuuaugaaaguucuu

SEQ ID NO: 1925087 - RNA, 19 nt, Artificial Sequence
  Description of Artificial Sequence: Synthetic oligonucleotide
cacaauacacggaaucugu

SEQ ID NO: 1925088 - RNA, 19 nt, Artificial Sequence
  Description of Artificial Sequence: Synthetic oligonucleotide
cauauuucaagcgcaugaa

SEQ ID NO: 1925089 - RNA, 19 nt, Artificial Sequence
  Description of Artificial Sequence: Synthetic oligonucleotide
gaaugcuacugguggucca

SEQ ID NO: 1925090 - RNA, 19 nt, Artificial Sequence
  Description of Artificial Sequence: Synthetic oligonucleotide
uccguaccacggcaggccu

SEQ ID NO: 1925091 - RNA, 19 nt, Artificial Sequence
  Description of Artificial Sequence: Synthetic oligonucleotide
caagcgcaugaaugucucc

SEQ ID NO: 1925092 - RNA, 19 nt, Artificial Sequence
  Description of Artificial Sequence: Synthetic oligonucleotide
auggcacaaagugacugga

SEQ ID NO: 1925093 - RNA, 19 nt, Artificial Sequence
  Description of Artificial Sequence: Synthetic oligonucleotide
acuauuguccagauacauu

SEQ ID NO: 1925094 - RNA, 19 nt, Artificial Sequence
  Description of Artificial Sequence: Synthetic oligonucleotide
caaguaagaucauucuuau

SEQ ID NO: 1925095 - RNA, 19 nt, Artificial Sequence
  Description of Artificial Sequence: Synthetic oligonucleotide
cauauaucacuuccaaaau

SEQ ID NO: 1925096 - RNA, 19 nt, Artificial Sequence
  Description of Artificial Sequence: Synthetic oligonucleotide
ggaguaauaaccaggugcu

SEQ ID NO: 1925097 - RNA, 19 nt, Artificial Sequence
  Description of Artificial Sequence: Synthetic oligonucleotide
uccggacuucauauuucaa

SEQ ID NO: 1925098 - RNA, 19 nt, Artificial Sequence
  Description of Artificial Sequence: Synthetic oligonucleotide
cauugacaccaaucauuuc

SEQ ID NO: 1925099 - RNA, 19 nt, Artificial Sequence
  Description of Artificial Sequence: Synthetic oligonucleotide
caguuccguaccacggcag

SEQ ID NO: 1925100 - RNA, 19 nt, Artificial Sequence
  Description of Artificial Sequence: Synthetic oligonucleotide
aucgccaccuuccgguuaa

SEQ ID NO: 1925101 - RNA, 19 nt, Artificial Sequence
  Description of Artificial Sequence: Synthetic oligonucleotide
caaugccacaguccaguuc

SEQ ID NO: 1925102 - RNA, 19 nt, Artificial Sequence
  Description of Artificial Sequence: Synthetic oligonucleotide
auaauccauuuuguaacua

SEQ ID NO: 1925103 - RNA, 19 nt, Artificial Sequence
  Description of Artificial Sequence: Synthetic oligonucleotide
caggaguaauaaccaggug

SEQ ID NO: 1925104 - RNA, 19 nt, Artificial Sequence
  Description of Artificial Sequence: Synthetic oligonucleotide
ugucugucucaaugccaca

SEQ ID NO: 1925105 - RNA, 19 nt, Artificial Sequence
  Description of Artificial Sequence: Synthetic oligonucleotide
accaggacccguccuuuga

SEQ ID NO: 1925106 - RNA, 19 nt, Artificial Sequence
  Description of Artificial Sequence: Synthetic oligonucleotide
gugcuuuuaugaaaguucu

SEQ ID NO: 1925107 - RNA, 19 nt, Artificial Sequence
  Description of Artificial Sequence: Synthetic oligonucleotide
gagaaggacucaaauucua

SEQ ID NO: 1925108 - RNA, 19 nt, Artificial Sequence
  Description of Artificial Sequence: Synthetic oligonucleotide
ccauggcuuagaaucacac

SEQ ID NO: 1925109 - RNA, 19 nt, Artificial Sequence
  Description of Artificial Sequence: Synthetic oligonucleotide
aggacccguccuuugaauu

SEQ ID NO: 1925110 - RNA, 19 nt, Artificial Sequence
  Description of Artificial Sequence: Synthetic oligonucleotide
acacacccauuucaggaua

SEQ ID NO: 1925111 - RNA, 19 nt, Artificial Sequence
  Description of Artificial Sequence: Synthetic oligonucleotide
uaguaccaucauugacacc

SEQ ID NO: 1925112 - RNA, 19 nt, Artificial Sequence
  Description of Artificial Sequence: Synthetic oligonucleotide
uaauguguguagggaguau

SEQ ID NO: 1925113 - RNA, 19 nt, Artificial Sequence
  Description of Artificial Sequence: Synthetic oligonucleotide
guaccaccaaaucuugcua

SEQ ID NO: 1925114 - RNA, 19 nt, Artificial Sequence
  Description of Artificial Sequence: Synthetic oligonucleotide
cacccauuucaggauaauc

SEQ ID NO: 1925115 - RNA, 19 nt, Artificial Sequence
  Description of Artificial Sequence: Synthetic oligonucleotide
gagcgaggugucauuccag

SEQ ID NO: 1925116 - RNA, 19 nt, Artificial Sequence
  Description of Artificial Sequence: Synthetic oligonucleotide
guguagggaguauaaaauu

SEQ ID NO: 1925117 - RNA, 19 nt, Artificial Sequence
  Description of Artificial Sequence: Synthetic oligonucleotide
uuguuagcauggacacaau

SEQ ID NO: 1925118 - RNA, 19 nt, Artificial Sequence
  Description of Artificial Sequence: Synthetic oligonucleotide
cuggaugaaccaggacccg

SEQ ID NO: 1925119 - RNA, 19 nt, Artificial Sequence
  Description of Artificial Sequence: Synthetic oligonucleotide
augaagaguuugggcuuuc

SEQ ID NO: 1925120 - RNA, 19 nt, Artificial Sequence
  Description of Artificial Sequence: Synthetic oligonucleotide
guauggucuuuacuucaaa

SEQ ID NO: 1925121 - RNA, 19 nt, Artificial Sequence
  Description of Artificial Sequence: Synthetic oligonucleotide
uacacggaaucuguuucuu

SEQ ID NO: 1925122 - RNA, 19 nt, Artificial Sequence
  Description of Artificial Sequence: Synthetic oligonucleotide
guucuuuuguuagcaugga

SEQ ID NO: 1925123 - RNA, 19 nt, Artificial Sequence
  Description of Artificial Sequence: Synthetic oligonucleotide
ucuccacaaguaagaucau

SEQ ID NO: 1925124 - RNA, 19 nt, Artificial Sequence
  Description of Artificial Sequence: Synthetic oligonucleotide
aguuucagcauggcacaaa

SEQ ID NO: 1925125 - RNA, 19 nt, Artificial Sequence
  Description of Artificial Sequence: Synthetic oligonucleotide
ugacaccaaucauuuccuu

SEQ ID NO: 1925126 - RNA, 19 nt, Artificial Sequence
  Description of Artificial Sequence: Synthetic oligonucleotide
uaucgccaccuuccgguua

SEQ ID NO: 1925127 - RNA, 19 nt, Artificial Sequence
  Description of Artificial Sequence: Synthetic oligonucleotide
cacaaagugacuggaugaa

SEQ ID NO: 1925128 - RNA, 19 nt, Artificial Sequence
  Description of Artificial Sequence: Synthetic oligonucleotide
cauuccagaguccauugau

SEQ ID NO: 1925129 - RNA, 19 nt, Artificial Sequence
  Description of Artificial Sequence: Synthetic oligonucleotide
guuccguaccacggcaggc

SEQ ID NO: 1925130 - RNA, 19 nt, Artificial Sequence
  Description of Artificial Sequence: Synthetic oligonucleotide
acacggaaucuguuucuuu

SEQ ID NO: 1925131 - RNA, 19 nt, Artificial Sequence
  Description of Artificial Sequence: Synthetic oligonucleotide
gugacuggaugaaccagga

SEQ ID NO: 1925132 - RNA, 19 nt, Artificial Sequence
  Description of Artificial Sequence: Synthetic oligonucleotide
acaauacacggaaucuguu

SEQ ID NO: 1925133 - RNA, 19 nt, Artificial Sequence
  Description of Artificial Sequence: Synthetic oligonucleotide
uaccagagcgaggugucau

SEQ ID NO: 1925134 - RNA, 19 nt, Artificial Sequence
  Description of Artificial Sequence: Synthetic oligonucleotide
gcuuuccaguuagacuucg

SEQ ID NO: 1925135 - RNA, 19 nt, Artificial Sequence
  Description of Artificial Sequence: Synthetic oligonucleotide
cuacuggugguccaaugcu

SEQ ID NO: 1925136 - RNA, 19 nt, Artificial Sequence
  Description of Artificial Sequence: Synthetic oligonucleotide
augucucccugagguuggc

SEQ ID NO: 1925137 - RNA, 19 nt, Artificial Sequence
  Description of Artificial Sequence: Synthetic oligonucleotide
caccuuccgguuaacucga

SEQ ID NO: 1925138 - RNA, 19 nt, Artificial Sequence
  Description of Artificial Sequence: Synthetic oligonucleotide
caucaacaucaguaccaga

SEQ ID NO: 1925139 - RNA, 19 nt, Artificial Sequence
  Description of Artificial Sequence: Synthetic oligonucleotide
ggucuuuacuucaaaauuu

SEQ ID NO: 1925140 - RNA, 19 nt, Artificial Sequence
  Description of Artificial Sequence: Synthetic oligonucleotide
gaauuucuccaggaguaau

SEQ ID NO: 1925141 - RNA, 19 nt, Artificial Sequence
  Description of Artificial Sequence: Synthetic oligonucleotide
gguuaacucgaguaagaau

SEQ ID NO: 1925142 - RNA, 19 nt, Artificial Sequence
  Description of Artificial Sequence: Synthetic oligonucleotide
gucuuuacuucaaaauuuu

SEQ ID NO: 1925143 - RNA, 19 nt, Artificial Sequence
  Description of Artificial Sequence: Synthetic oligonucleotide
accauggcuuagaaucaca

SEQ ID NO: 1925144 - RNA, 19 nt, Artificial Sequence
  Description of Artificial Sequence: Synthetic oligonucleotide
gaguuugggcuuuccaguu

SEQ ID NO: 1925145 - RNA, 19 nt, Artificial Sequence
  Description of Artificial Sequence: Synthetic oligonucleotide
accagagcgaggugucauu

SEQ ID NO: 1925146 - RNA, 19 nt, Artificial Sequence
  Description of Artificial Sequence: Synthetic oligonucleotide
cacacccauuucaggauaa

SEQ ID NO: 1925147 - RNA, 19 nt, Artificial Sequence
  Description of Artificial Sequence: Synthetic oligonucleotide
guuagacuucggcaauagu

SEQ ID NO: 1925148 - RNA, 19 nt, Artificial Sequence
  Description of Artificial Sequence: Synthetic oligonucleotide
cugaaguaaguaguuaguu

SEQ ID NO: 1925149 - RNA, 19 nt, Artificial Sequence
  Description of Artificial Sequence: Synthetic oligonucleotide
caguccaguuccguaccac

SEQ ID NO: 1925150 - RNA, 19 nt, Artificial Sequence
  Description of Artificial Sequence: Synthetic oligonucleotide
gcgaggugucauuccagug

SEQ ID NO: 1925151 - RNA, 19 nt, Artificial Sequence
  Description of Artificial Sequence: Synthetic oligonucleotide
ccaggaguaauaaccaggu

SEQ ID NO: 1925152 - RNA, 19 nt, Artificial Sequence
  Description of Artificial Sequence: Synthetic oligonucleotide
ggaugaaccaggacccguc

SEQ ID NO: 1925153 - RNA, 19 nt, Artificial Sequence
  Description of Artificial Sequence: Synthetic oligonucleotide
gcauaaacucaagcuugug

SEQ ID NO: 1925154 - RNA, 19 nt, Artificial Sequence
  Description of Artificial Sequence: Synthetic oligonucleotide
ccaucauugcuguaauuua

SEQ ID NO: 1925155 - RNA, 19 nt, Artificial Sequence
  Description of Artificial Sequence: Synthetic oligonucleotide
gcuuuugacucugcccaug

SEQ ID NO: 1925156 - RNA, 19 nt, Artificial Sequence
  Description of Artificial Sequence: Synthetic oligonucleotide
ggagaaggacucaaauucu

SEQ ID NO: 1925157 - RNA, 19 nt, Artificial Sequence
  Description of Artificial Sequence: Synthetic oligonucleotide
gcgcaugaaugucucccug

SEQ ID NO: 1925158 - RNA, 19 nt, Artificial Sequence
  Description of Artificial Sequence: Synthetic oligonucleotide
ugcuuccauguauggucuu

SEQ ID NO: 1925159 - RNA, 19 nt, Artificial Sequence
  Description of Artificial Sequence: Synthetic oligonucleotide
ggaaucuguuucuuugcau

SEQ ID NO: 1925160 - RNA, 19 nt, Artificial Sequence
  Description of Artificial Sequence: Synthetic oligonucleotide
cacacacccauuucaggau

SEQ ID NO: 1925161 - RNA, 19 nt, Artificial Sequence
  Description of Artificial Sequence: Synthetic oligonucleotide
acucugcccauggauucaa

SEQ ID NO: 1925162 - RNA, 19 nt, Artificial Sequence
  Description of Artificial Sequence: Synthetic oligonucleotide
augccacaguccaguuccg

SEQ ID NO: 1925163 - RNA, 19 nt, Artificial Sequence
  Description of Artificial Sequence: Synthetic oligonucleotide
ggaaucuacugagguuuca

SEQ ID NO: 1925164 - RNA, 19 nt, Artificial Sequence
  Description of Artificial Sequence: Synthetic oligonucleotide
ccgguuaacucgaguaaga

SEQ ID NO: 1925165 - RNA, 19 nt, Artificial Sequence
  Description of Artificial Sequence: Synthetic oligonucleotide
acacccauuucaggauaau

SEQ ID NO: 1925166 - RNA, 19 nt, Artificial Sequence
  Description of Artificial Sequence: Synthetic oligonucleotide
cucgaguaagaaugugcau

SEQ ID NO: 1925167 - RNA, 19 nt, Artificial Sequence
  Description of Artificial Sequence: Synthetic oligonucleotide
guccccucugaaguaagua

SEQ ID NO: 1925168 - RNA, 19 nt, Artificial Sequence
  Description of Artificial Sequence: Synthetic oligonucleotide
gugguccaaugcuucauuu

SEQ ID NO: 1925169 - RNA, 19 nt, Artificial Sequence
  Description of Artificial Sequence: Synthetic oligonucleotide
guaccagagcgagguguca

SEQ ID NO: 1925170 - RNA, 19 nt, Artificial Sequence
  Description of Artificial Sequence: Synthetic oligonucleotide
ccaguuccguaccacggca

SEQ ID NO: 1925171 - RNA, 19 nt, Artificial Sequence
  Description of Artificial Sequence: Synthetic oligonucleotide
cacugguaucuucuggcau

SEQ ID NO: 1925172 - RNA, 19 nt, Artificial Sequence
  Description of Artificial Sequence: Synthetic oligonucleotide
cuucggcaauaguccccuc

SEQ ID NO: 1925173 - RNA, 19 nt, Artificial Sequence
  Description of Artificial Sequence: Synthetic oligonucleotide
guaccaucauugacaccaa

SEQ ID NO: 1925174 - RNA, 19 nt, Artificial Sequence
  Description of Artificial Sequence: Synthetic oligonucleotide
caguuagacuucggcaaua

SEQ ID NO: 1925175 - RNA, 19 nt, Artificial Sequence
  Description of Artificial Sequence: Synthetic oligonucleotide
ccccucugaaguaaguagu

SEQ ID NO: 1925176 - RNA, 19 nt, Artificial Sequence
  Description of Artificial Sequence: Synthetic oligonucleotide
accuuccgguuaacucgag

SEQ ID NO: 1925177 - RNA, 19 nt, Artificial Sequence
  Description of Artificial Sequence: Synthetic oligonucleotide
cgcaugaaugucucccuga

SEQ ID NO: 1925178 - RNA, 19 nt, Artificial Sequence
  Description of Artificial Sequence: Synthetic oligonucleotide
ggcuuuccaguuagacuuc

SEQ ID NO: 1925179 - RNA, 19 nt, Artificial Sequence
  Description of Artificial Sequence: Synthetic oligonucleotide
cggaaucuguuucuuugca

SEQ ID NO: 1925180 - RNA, 19 nt, Artificial Sequence
  Description of Artificial Sequence: Synthetic oligonucleotide
ccauuucaggauaauccau

SEQ ID NO: 1925181 - RNA, 19 nt, Artificial Sequence
  Description of Artificial Sequence: Synthetic oligonucleotide
caaauucuaucgccaccuu

SEQ ID NO: 1925182 - RNA, 19 nt, Artificial Sequence
  Description of Artificial Sequence: Synthetic oligonucleotide
ucccugagguuggcugcau

SEQ ID NO: 1925183 - RNA, 19 nt, Artificial Sequence
  Description of Artificial Sequence: Synthetic oligonucleotide
gcuguggaauaagcauaca

SEQ ID NO: 1925184 - RNA, 19 nt, Artificial Sequence
  Description of Artificial Sequence: Synthetic oligonucleotide
ccauggauucaaguucuaa

SEQ ID NO: 1925185 - RNA, 19 nt, Artificial Sequence
  Description of Artificial Sequence: Synthetic oligonucleotide
caggacccguccuuugaau

SEQ ID NO: 1925186 - RNA, 19 nt, Artificial Sequence
  Description of Artificial Sequence: Synthetic oligonucleotide
ccucugaaguaaguaguua

SEQ ID NO: 1925187 - RNA, 19 nt, Artificial Sequence
  Description of Artificial Sequence: Synthetic oligonucleotide
cuaucgccaccuuccgguu

SEQ ID NO: 1925188 - RNA, 19 nt, Artificial Sequence
  Description of Artificial Sequence: Synthetic oligonucleotide
ccguaccacggcaggccug

SEQ ID NO: 1925189 - RNA, 19 nt, Artificial Sequence
  Description of Artificial Sequence: Synthetic oligonucleotide
ucgccaccuuccgguuaac

SEQ ID NO: 1925190 - RNA, 19 nt, Artificial Sequence
  Description of Artificial Sequence: Synthetic oligonucleotide
ccaguuagacuucggcaau

SEQ ID NO: 1925191 - RNA, 19 nt, Artificial Sequence
  Description of Artificial Sequence: Synthetic oligonucleotide
cgguuaacucgaguaagaa

SEQ ID NO: 1925192 - RNA, 19 nt, Artificial Sequence
  Description of Artificial Sequence: Synthetic oligonucleotide
ccuuccgguuaacucgagu

SEQ ID NO: 1925193 - RNA, 19 nt, Artificial Sequence
  Description of Artificial Sequence: Synthetic oligonucleotide
cccauggauucaaguucua

SEQ ID NO: 1925194 - RNA, 19 nt, Artificial Sequence
  Description of Artificial Sequence: Synthetic oligonucleotide
guaccacggcaggccugaa

SEQ ID NO: 1925195 - RNA, 19 nt, Artificial Sequence
  Description of Artificial Sequence: Synthetic oligonucleotide
cgccaccuuccgguuaacu

SEQ ID NO: 1925196 - RNA, 19 nt, Artificial Sequence
  Description of Artificial Sequence: Synthetic oligonucleotide
aauagagcacaucugaggc

SEQ ID NO: 1925197 - RNA, 19 nt, Artificial Sequence
  Description of Artificial Sequence: Synthetic oligonucleotide
uucuuuagcaaacauaucc

SEQ ID NO: 1925198 - RNA, 19 nt, Artificial Sequence
  Description of Artificial Sequence: Synthetic oligonucleotide
aauuuuauguaucagaaua

SEQ ID NO: 1925199 - RNA, 19 nt, Artificial Sequence
  Description of Artificial Sequence: Synthetic oligonucleotide
aaaucaauuuacuaaaccu

SEQ ID NO: 1925200 - RNA, 19 nt, Artificial Sequence
  Description of Artificial Sequence: Synthetic oligonucleotide
aagaguauagcucagaaau

SEQ ID NO: 1925201 - RNA, 19 nt, Artificial Sequence
  Description of Artificial Sequence: Synthetic oligonucleotide
ucaaaaucauuuuggaggg

SEQ ID NO: 1925202 - RNA, 19 nt, Artificial Sequence
  Description of Artificial Sequence: Synthetic oligonucleotide
aaguguuccacucauaggu

SEQ ID NO: 1925203 - RNA, 19 nt, Artificial Sequence
  Description of Artificial Sequence: Synthetic oligonucleotide
uuaaguguuccacucauag

SEQ ID NO: 1925204 - RNA, 19 nt, Artificial Sequence
  Description of Artificial Sequence: Synthetic oligonucleotide
aucagaauaucuuaaacug

SEQ ID NO: 1925205 - RNA, 19 nt, Artificial Sequence
  Description of Artificial Sequence: Synthetic oligonucleotide
uuacauuuaggccagguga

SEQ ID NO: 1925206 - RNA, 19 nt, Artificial Sequence
  Description of Artificial Sequence: Synthetic oligonucleotide
cuagaaaauaucaaacccc

SEQ ID NO: 1925207 - RNA, 19 nt, Artificial Sequence
  Description of Artificial Sequence: Synthetic oligonucleotide
ucuaucauagugcacaacu

SEQ ID NO: 1925208 - RNA, 19 nt, Artificial Sequence
  Description of Artificial Sequence: Synthetic oligonucleotide
uauucuauacauuuugaca

SEQ ID NO: 1925209 - RNA, 19 nt, Artificial Sequence
  Description of Artificial Sequence: Synthetic oligonucleotide
auucuauacauuuugacaa

SEQ ID NO: 1925210 - RNA, 19 nt, Artificial Sequence
  Description of Artificial Sequence: Synthetic oligonucleotide
auuuacuaaaccugguuuc

SEQ ID NO: 1925211 - RNA, 19 nt, Artificial Sequence
  Description of Artificial Sequence: Synthetic oligonucleotide
uguguuucaaacuuccuug

SEQ ID NO: 1925212 - RNA, 19 nt, Artificial Sequence
  Description of Artificial Sequence: Synthetic oligonucleotide
aagaaugagaugaagaccu

SEQ ID NO: 1925213 - RNA, 19 nt, Artificial Sequence
  Description of Artificial Sequence: Synthetic oligonucleotide
gaucccaucaccucaaaag

SEQ ID NO: 1925214 - RNA, 19 nt, Artificial Sequence
  Description of Artificial Sequence: Synthetic oligonucleotide
ucaaagauauucuguagag

SEQ ID NO: 1925215 - RNA, 19 nt, Artificial Sequence
  Description of Artificial Sequence: Synthetic oligonucleotide
cugguuuccagaauuaucc

SEQ ID NO: 1925216 - RNA, 19 nt, Artificial Sequence
  Description of Artificial Sequence: Synthetic oligonucleotide
uuauuaacaucucuaacuc

SEQ ID NO: 1925217 - RNA, 19 nt, Artificial Sequence
  Description of Artificial Sequence: Synthetic oligonucleotide
aauuuacuaaaccugguuu

SEQ ID NO: 1925218 - RNA, 19 nt, Artificial Sequence
  Description of Artificial Sequence: Synthetic oligonucleotide
uuuauguaucagaauaucu

SEQ ID NO: 1925219 - RNA, 19 nt, Artificial Sequence
  Description of Artificial Sequence: Synthetic oligonucleotide
aaucaauuuacuaaaccug

SEQ ID NO: 1925220 - RNA, 19 nt, Artificial Sequence
  Description of Artificial Sequence: Synthetic oligonucleotide
acagcuuauaucuuucuuc

SEQ ID NO: 1925221 - RNA, 19 nt, Artificial Sequence
  Description of Artificial Sequence: Synthetic oligonucleotide
uguucuuuauucuauacau

SEQ ID NO: 1925222 - RNA, 19 nt, Artificial Sequence
  Description of Artificial Sequence: Synthetic oligonucleotide
aaaauacgaagcuucgugu

SEQ ID NO: 1925223 - RNA, 19 nt, Artificial Sequence
  Description of Artificial Sequence: Synthetic oligonucleotide
aauaucuuaaacuguucaa

SEQ ID NO: 1925224 - RNA, 19 nt, Artificial Sequence
  Description of Artificial Sequence: Synthetic oligonucleotide
ucguguuauaauuuuaugu

SEQ ID NO: 1925225 - RNA, 19 nt, Artificial Sequence
  Description of Artificial Sequence: Synthetic oligonucleotide
uguuauaauuuuauguauc

SEQ ID NO: 1925226 - RNA, 19 nt, Artificial Sequence
  Description of Artificial Sequence: Synthetic oligonucleotide
uccagaauuauccaaacuu

SEQ ID NO: 1925227 - RNA, 19 nt, Artificial Sequence
  Description of Artificial Sequence: Synthetic oligonucleotide
agugacuuagauuugcaug

SEQ ID NO: 1925228 - RNA, 19 nt, Artificial Sequence
  Description of Artificial Sequence: Synthetic oligonucleotide
aaguuuuaaucuccgaaga

SEQ ID NO: 1925229 - RNA, 19 nt, Artificial Sequence
  Description of Artificial Sequence: Synthetic oligonucleotide
aguauucucacucucaaaa

SEQ ID NO: 1925230 - RNA, 19 nt, Artificial Sequence
  Description of Artificial Sequence: Synthetic oligonucleotide
uugacaaguuuuaaucucc

SEQ ID NO: 1925231 - RNA, 19 nt, Artificial Sequence
  Description of Artificial Sequence: Synthetic oligonucleotide
caaguuuuaaucuccgaag

SEQ ID NO: 1925232 - RNA, 19 nt, Artificial Sequence
  Description of Artificial Sequence: Synthetic oligonucleotide
uuauguaucagaauaucuu

SEQ ID NO: 1925233 - RNA, 19 nt, Artificial Sequence
  Description of Artificial Sequence: Synthetic oligonucleotide
uuuaagucguuucaccaca

SEQ ID NO: 1925234 - RNA, 19 nt, Artificial Sequence
  Description of Artificial Sequence: Synthetic oligonucleotide
auaauuuuccuccuucucu

SEQ ID NO: 1925235 - RNA, 19 nt, Artificial Sequence
  Description of Artificial Sequence: Synthetic oligonucleotide
gaugguagaguaucacugg

SEQ ID NO: 1925236 - RNA, 19 nt, Artificial Sequence
  Description of Artificial Sequence: Synthetic oligonucleotide
uuuaguauucucacucuca

SEQ ID NO: 1925237 - RNA, 19 nt, Artificial Sequence
  Description of Artificial Sequence: Synthetic oligonucleotide
gugacuuagauuugcaugc

SEQ ID NO: 1925238 - RNA, 19 nt, Artificial Sequence
  Description of Artificial Sequence: Synthetic oligonucleotide
uccaaaauacgaagcuucg

SEQ ID NO: 1925239 - RNA, 19 nt, Artificial Sequence
  Description of Artificial Sequence: Synthetic oligonucleotide
uguagaggggccaagagua

SEQ ID NO: 1925240 - RNA, 19 nt, Artificial Sequence
  Description of Artificial Sequence: Synthetic oligonucleotide
aaaagccuagaaaauauca

SEQ ID NO: 1925241 - RNA, 19 nt, Artificial Sequence
  Description of Artificial Sequence: Synthetic oligonucleotide
aauuauccaaacuuccuuu

SEQ ID NO: 1925242 - RNA, 19 nt, Artificial Sequence
  Description of Artificial Sequence: Synthetic oligonucleotide
aucaauuuacuaaaccugg

SEQ ID NO: 1925243 - RNA, 19 nt, Artificial Sequence
  Description of Artificial Sequence: Synthetic oligonucleotide
aaaaucauuuuggagggca

SEQ ID NO: 1925244 - RNA, 19 nt, Artificial Sequence
  Description of Artificial Sequence: Synthetic oligonucleotide
gaguauagcucagaaauag

SEQ ID NO: 1925245 - RNA, 19 nt, Artificial Sequence
  Description of Artificial Sequence: Synthetic oligonucleotide
uccuaaaguauuuguuugg

SEQ ID NO: 1925246 - RNA, 19 nt, Artificial Sequence
  Description of Artificial Sequence: Synthetic oligonucleotide
gaauaucuuaaacuguuca

SEQ ID NO: 1925247 - RNA, 19 nt, Artificial Sequence
  Description of Artificial Sequence: Synthetic oligonucleotide
uuugcaugcauuugcauuc

SEQ ID NO: 1925248 - RNA, 19 nt, Artificial Sequence
  Description of Artificial Sequence: Synthetic oligonucleotide
caaaauacgaagcuucgug

SEQ ID NO: 1925249 - RNA, 19 nt, Artificial Sequence
  Description of Artificial Sequence: Synthetic oligonucleotide
gagguuuagacauugaaua

SEQ ID NO: 1925250 - RNA, 19 nt, Artificial Sequence
  Description of Artificial Sequence: Synthetic oligonucleotide
uaaucuccgaagaaguucu

SEQ ID NO: 1925251 - RNA, 19 nt, Artificial Sequence
  Description of Artificial Sequence: Synthetic oligonucleotide
ucuuaaacuguucaagaua

SEQ ID NO: 1925252 - RNA, 19 nt, Artificial Sequence
  Description of Artificial Sequence: Synthetic oligonucleotide
auaucuuaaacuguucaag

SEQ ID NO: 1925253 - RNA, 19 nt, Artificial Sequence
  Description of Artificial Sequence: Synthetic oligonucleotide
guaaagucgaugcugaauc

SEQ ID NO: 1925254 - RNA, 19 nt, Artificial Sequence
  Description of Artificial Sequence: Synthetic oligonucleotide
aacuguucaagauaccuuu

SEQ ID NO: 1925255 - RNA, 19 nt, Artificial Sequence
  Description of Artificial Sequence: Synthetic oligonucleotide
aaaauaucaaaccccugua

SEQ ID NO: 1925256 - RNA, 19 nt, Artificial Sequence
  Description of Artificial Sequence: Synthetic oligonucleotide
uuugccacaaaaucaauuu

SEQ ID NO: 1925257 - RNA, 19 nt, Artificial Sequence
  Description of Artificial Sequence: Synthetic oligonucleotide
aucccaucaccucaaaagg

SEQ ID NO: 1925258 - RNA, 19 nt, Artificial Sequence
  Description of Artificial Sequence: Synthetic oligonucleotide
ugacaaguuuuaaucuccg

SEQ ID NO: 1925259 - RNA, 19 nt, Artificial Sequence
  Description of Artificial Sequence: Synthetic oligonucleotide
uauacauuuugacaaguuu

SEQ ID NO: 1925260 - RNA, 19 nt, Artificial Sequence
  Description of Artificial Sequence: Synthetic oligonucleotide
agacaugacugccugcagc

SEQ ID NO: 1925261 - RNA, 19 nt, Artificial Sequence
  Description of Artificial Sequence: Synthetic oligonucleotide
cagaauuauccaaacuucc

SEQ ID NO: 1925262 - RNA, 19 nt, Artificial Sequence
  Description of Artificial Sequence: Synthetic oligonucleotide
uauguaucagaauaucuua

SEQ ID NO: 1925263 - RNA, 19 nt, Artificial Sequence
  Description of Artificial Sequence: Synthetic oligonucleotide
uauucucacucucaaaauc

SEQ ID NO: 1925264 - RNA, 19 nt, Artificial Sequence
  Description of Artificial Sequence: Synthetic oligonucleotide
uugaugaugcuccugguuc

SEQ ID NO: 1925265 - RNA, 19 nt, Artificial Sequence
  Description of Artificial Sequence: Synthetic oligonucleotide
acacucuuuucacauugcc

SEQ ID NO: 1925266 - RNA, 19 nt, Artificial Sequence
  Description of Artificial Sequence: Synthetic oligonucleotide
uucaaaacacucuuuucac

SEQ ID NO: 1925267 - RNA, 19 nt, Artificial Sequence
  Description of Artificial Sequence: Synthetic oligonucleotide
aucaaaccccuguaaauuc

SEQ ID NO: 1925268 - RNA, 19 nt, Artificial Sequence
  Description of Artificial Sequence: Synthetic oligonucleotide
agaggucucauaauuuucc

SEQ ID NO: 1925269 - RNA, 19 nt, Artificial Sequence
  Description of Artificial Sequence: Synthetic oligonucleotide
cuaaaguauuuguuugggg

SEQ ID NO: 1925270 - RNA, 19 nt, Artificial Sequence
  Description of Artificial Sequence: Synthetic oligonucleotide
uaaagucgggugaugguag

SEQ ID NO: 1925271 - RNA, 19 nt, Artificial Sequence
  Description of Artificial Sequence: Synthetic oligonucleotide
uuauaauuuuauguaucag

SEQ ID NO: 1925272 - RNA, 19 nt, Artificial Sequence
  Description of Artificial Sequence: Synthetic oligonucleotide
auagagcacaucugaggcc

SEQ ID NO: 1925273 - RNA, 19 nt, Artificial Sequence
  Description of Artificial Sequence: Synthetic oligonucleotide
ugagguuuagacauugaau

SEQ ID NO: 1925274 - RNA, 19 nt, Artificial Sequence
  Description of Artificial Sequence: Synthetic oligonucleotide
aacaucucuaacucagcca

SEQ ID NO: 1925275 - RNA, 19 nt, Artificial Sequence
  Description of Artificial Sequence: Synthetic oligonucleotide
uuuagcaaacauauccaaa

SEQ ID NO: 1925276 - RNA, 19 nt, Artificial Sequence
  Description of Artificial Sequence: Synthetic oligonucleotide
cagcuuauaucuuucuucc

SEQ ID NO: 1925277 - RNA, 19 nt, Artificial Sequence
  Description of Artificial Sequence: Synthetic oligonucleotide
acaaguuuuaaucuccgaa

SEQ ID NO: 1925278 - RNA, 19 nt, Artificial Sequence
  Description of Artificial Sequence: Synthetic oligonucleotide
ucaucuaccccguaguagu

SEQ ID NO: 1925279 - RNA, 19 nt, Artificial Sequence
  Description of Artificial Sequence: Synthetic oligonucleotide
uuucaaacuuccuuggaau

SEQ ID NO: 1925280 - RNA, 19 nt, Artificial Sequence
  Description of Artificial Sequence: Synthetic oligonucleotide
acuuuaagucguuucacca

SEQ ID NO: 1925281 - RNA, 19 nt, Artificial Sequence
  Description of Artificial Sequence: Synthetic oligonucleotide
uacuuuaagucguuucacc

SEQ ID NO: 1925282 - RNA, 19 nt, Artificial Sequence
  Description of Artificial Sequence: Synthetic oligonucleotide
caagauaccuuucucuaag

SEQ ID NO: 1925283 - RNA, 19 nt, Artificial Sequence
  Description of Artificial Sequence: Synthetic oligonucleotide
uuuacuaaaccugguuucc

SEQ ID NO: 1925284 - RNA, 19 nt, Artificial Sequence
  Description of Artificial Sequence: Synthetic oligonucleotide
ggucucauaauuuuccucc

SEQ ID NO: 1925285 - RNA, 19 nt, Artificial Sequence
  Description of Artificial Sequence: Synthetic oligonucleotide
uuaguauucucacucucaa

SEQ ID NO: 1925286 - RNA, 19 nt, Artificial Sequence
  Description of Artificial Sequence: Synthetic oligonucleotide
uggaauucggaacagcuuu

SEQ ID NO: 1925287 - RNA, 19 nt, Artificial Sequence
  Description of Artificial Sequence: Synthetic oligonucleotide
ccuagaaaauaucaaaccc

SEQ ID NO: 1925288 - RNA, 19 nt, Artificial Sequence
  Description of Artificial Sequence: Synthetic oligonucleotide
aaugagaugaagaccuugu

SEQ ID NO: 1925289 - RNA, 19 nt, Artificial Sequence
  Description of Artificial Sequence: Synthetic oligonucleotide
cucuaacucagccagguug

SEQ ID NO: 1925290 - RNA, 19 nt, Artificial Sequence
  Description of Artificial Sequence: Synthetic oligonucleotide
cauucucaaagauauucug

SEQ ID NO: 1925291 - RNA, 19 nt, Artificial Sequence
  Description of Artificial Sequence: Synthetic oligonucleotide
aguaccaagugacuuagau

SEQ ID NO: 1925292 - RNA, 19 nt, Artificial Sequence
  Description of Artificial Sequence: Synthetic oligonucleotide
uauuaacaucucuaacuca

SEQ ID NO: 1925293 - RNA, 19 nt, Artificial Sequence
  Description of Artificial Sequence: Synthetic oligonucleotide
ucuuuaaguguuccacuca

SEQ ID NO: 1925294 - RNA, 19 nt, Artificial Sequence
  Description of Artificial Sequence: Synthetic oligonucleotide
gaaauagagcacaucugag

SEQ ID NO: 1925295 - RNA, 19 nt, Artificial Sequence
  Description of Artificial Sequence: Synthetic oligonucleotide
aaauacgaagcuucguguu

SEQ ID NO: 1925296 - RNA, 19 nt, Artificial Sequence
  Description of Artificial Sequence: Synthetic oligonucleotide
cuuccuuggaauucggaac

SEQ ID NO: 1925297 - RNA, 19 nt, Artificial Sequence
  Description of Artificial Sequence: Synthetic oligonucleotide
uccaaacuuccuuuuaaac

SEQ ID NO: 1925298 - RNA, 19 nt, Artificial Sequence
  Description of Artificial Sequence: Synthetic oligonucleotide
ugagaugaagaccuuguuu

SEQ ID NO: 1925299 - RNA, 19 nt, Artificial Sequence
  Description of Artificial Sequence: Synthetic oligonucleotide
gguagaguaucacuggucc

SEQ ID NO: 1925300 - RNA, 19 nt, Artificial Sequence
  Description of Artificial Sequence: Synthetic oligonucleotide
ucauagugcacaacuuucu

SEQ ID NO: 1925301 - RNA, 19 nt, Artificial Sequence
  Description of Artificial Sequence: Synthetic oligonucleotide
ucaauuuacuaaaccuggu

SEQ ID NO: 1925302 - RNA, 19 nt, Artificial Sequence
  Description of Artificial Sequence: Synthetic oligonucleotide
ucacuucuaucauagugca

SEQ ID NO: 1925303 - RNA, 19 nt, Artificial Sequence
  Description of Artificial Sequence: Synthetic oligonucleotide
uuuuauguaucagaauauc

SEQ ID NO: 1925304 - RNA, 19 nt, Artificial Sequence
  Description of Artificial Sequence: Synthetic oligonucleotide
uucguguuauaauuuuaug

SEQ ID NO: 1925305 - RNA, 19 nt, Artificial Sequence
  Description of Artificial Sequence: Synthetic oligonucleotide
uuaaucuccgaagaaguuc

SEQ ID NO: 1925306 - RNA, 19 nt, Artificial Sequence
  Description of Artificial Sequence: Synthetic oligonucleotide
uaucauagugcacaacuuu

SEQ ID NO: 1925307 - RNA, 19 nt, Artificial Sequence
  Description of Artificial Sequence: Synthetic oligonucleotide
aaaucauuuuggagggcac

SEQ ID NO: 1925308 - RNA, 19 nt, Artificial Sequence
  Description of Artificial Sequence: Synthetic oligonucleotide
cuuuaagucguuucaccac

SEQ ID NO: 1925309 - RNA, 19 nt, Artificial Sequence
  Description of Artificial Sequence: Synthetic oligonucleotide
uucaagauaccuuucucua

SEQ ID NO: 1925310 - RNA, 19 nt, Artificial Sequence
  Description of Artificial Sequence: Synthetic oligonucleotide
uacuaaaccugguuuccag

SEQ ID NO: 1925311 - RNA, 19 nt, Artificial Sequence
  Description of Artificial Sequence: Synthetic oligonucleotide
uucuuuaaguguuccacuc

SEQ ID NO: 1925312 - RNA, 19 nt, Artificial Sequence
  Description of Artificial Sequence: Synthetic oligonucleotide
uucucuugaaccugcuuug

SEQ ID NO: 1925313 - RNA, 19 nt, Artificial Sequence
  Description of Artificial Sequence: Synthetic oligonucleotide
ucauaauuuuccuccuucu

SEQ ID NO: 1925314 - RNA, 19 nt, Artificial Sequence
  Description of Artificial Sequence: Synthetic oligonucleotide
gcaaacauauccaaaauac

SEQ ID NO: 1925315 - RNA, 19 nt, Artificial Sequence
  Description of Artificial Sequence: Synthetic oligonucleotide
uagaguaucacuggucccc

SEQ ID NO: 1925316 - RNA, 19 nt, Artificial Sequence
  Description of Artificial Sequence: Synthetic oligonucleotide
uuuucagacgcacugucuu

SEQ ID NO: 1925317 - RNA, 19 nt, Artificial Sequence
  Description of Artificial Sequence: Synthetic oligonucleotide
ugucagguaaagucgggug

SEQ ID NO: 1925318 - RNA, 19 nt, Artificial Sequence
  Description of Artificial Sequence: Synthetic oligonucleotide
caaacuuccuuggaauucg

SEQ ID NO: 1925319 - RNA, 19 nt, Artificial Sequence
  Description of Artificial Sequence: Synthetic oligonucleotide
aagaggucucauaauuuuc

SEQ ID NO: 1925320 - RNA, 19 nt, Artificial Sequence
  Description of Artificial Sequence: Synthetic oligonucleotide
agucguuucaccacacuac

SEQ ID NO: 1925321 - RNA, 19 nt, Artificial Sequence
  Description of Artificial Sequence: Synthetic oligonucleotide
uagagcacaucugaggccc

SEQ ID NO: 1925322 - RNA, 19 nt, Artificial Sequence
  Description of Artificial Sequence: Synthetic oligonucleotide
aucauagugcacaacuuuc

SEQ ID NO: 1925323 - RNA, 19 nt, Artificial Sequence
  Description of Artificial Sequence: Synthetic oligonucleotide
ugucuuuguguuucaaacu

SEQ ID NO: 1925324 - RNA, 19 nt, Artificial Sequence
  Description of Artificial Sequence: Synthetic oligonucleotide
guuacauuuaggccaggug

SEQ ID NO: 1925325 - RNA, 19 nt, Artificial Sequence
  Description of Artificial Sequence: Synthetic oligonucleotide
aaccccuguaaauucuucu

SEQ ID NO: 1925326 - RNA, 19 nt, Artificial Sequence
  Description of Artificial Sequence: Synthetic oligonucleotide
ucuuuaguauucucacucu

SEQ ID NO: 1925327 - RNA, 19 nt, Artificial Sequence
  Description of Artificial Sequence: Synthetic oligonucleotide
aauacgaagcuucguguua

SEQ ID NO: 1925328 - RNA, 19 nt, Artificial Sequence
  Description of Artificial Sequence: Synthetic oligonucleotide
auagguugucuuccuaaag

SEQ ID NO: 1925329 - RNA, 19 nt, Artificial Sequence
  Description of Artificial Sequence: Synthetic oligonucleotide
guguuucaaacuuccuugg

SEQ ID NO: 1925330 - RNA, 19 nt, Artificial Sequence
  Description of Artificial Sequence: Synthetic oligonucleotide
caaagauauucuguagagg

SEQ ID NO: 1925331 - RNA, 19 nt, Artificial Sequence
  Description of Artificial Sequence: Synthetic oligonucleotide
aaagucgaugcugaaucug

SEQ ID NO: 1925332 - RNA, 19 nt, Artificial Sequence
  Description of Artificial Sequence: Synthetic oligonucleotide
caccucaaaaggaggaggg

SEQ ID NO: 1925333 - RNA, 19 nt, Artificial Sequence
  Description of Artificial Sequence: Synthetic oligonucleotide
aagucguuucaccacacua

SEQ ID NO: 1925334 - RNA, 19 nt, Artificial Sequence
  Description of Artificial Sequence: Synthetic oligonucleotide
cacaacuuucucaucuacc

SEQ ID NO: 1925335 - RNA, 19 nt, Artificial Sequence
  Description of Artificial Sequence: Synthetic oligonucleotide
ucaaaccccuguaaauucu

SEQ ID NO: 1925336 - RNA, 19 nt, Artificial Sequence
  Description of Artificial Sequence: Synthetic oligonucleotide
aaguauuuguuugggguga

SEQ ID NO: 1925337 - RNA, 19 nt, Artificial Sequence
  Description of Artificial Sequence: Synthetic oligonucleotide
gcagguuacauuuaggcca

SEQ ID NO: 1925338 - RNA, 19 nt, Artificial Sequence
  Description of Artificial Sequence: Synthetic oligonucleotide
ucauagguugucuuccuaa

SEQ ID NO: 1925339 - RNA, 19 nt, Artificial Sequence
  Description of Artificial Sequence: Synthetic oligonucleotide
aggucucauaauuuuccuc

SEQ ID NO: 1925340 - RNA, 19 nt, Artificial Sequence
  Description of Artificial Sequence: Synthetic oligonucleotide
aucuuaaacuguucaagau

SEQ ID NO: 1925341 - RNA, 19 nt, Artificial Sequence
  Description of Artificial Sequence: Synthetic oligonucleotide
uguuucaaacuuccuugga

SEQ ID NO: 1925342 - RNA, 19 nt, Artificial Sequence
  Description of Artificial Sequence: Synthetic oligonucleotide
ucagacaugacugccugca

SEQ ID NO: 1925343 - RNA, 19 nt, Artificial Sequence
  Description of Artificial Sequence: Synthetic oligonucleotide
gaccuuguuuucuuuaauc

SEQ ID NO: 1925344 - RNA, 19 nt, Artificial Sequence
  Description of Artificial Sequence: Synthetic oligonucleotide
agcaaacauauccaaaaua

SEQ ID NO: 1925345 - RNA, 19 nt, Artificial Sequence
  Description of Artificial Sequence: Synthetic oligonucleotide
uuucuuuaguauucucacu

SEQ ID NO: 1925346 - RNA, 19 nt, Artificial Sequence
  Description of Artificial Sequence: Synthetic oligonucleotide
aagugacuuagauuugcau

SEQ ID NO: 1925347 - RNA, 19 nt, Artificial Sequence
  Description of Artificial Sequence: Synthetic oligonucleotide
ugcuuugccaauuuugcuu

SEQ ID NO: 1925348 - RNA, 19 nt, Artificial Sequence
  Description of Artificial Sequence: Synthetic oligonucleotide
ucuauacauuuugacaagu

SEQ ID NO: 1925349 - RNA, 19 nt, Artificial Sequence
  Description of Artificial Sequence: Synthetic oligonucleotide
cagcucauacaguagcugc

SEQ ID NO: 1925350 - RNA, 19 nt, Artificial Sequence
  Description of Artificial Sequence: Synthetic oligonucleotide
cagaaauagagcacaucug

SEQ ID NO: 1925351 - RNA, 19 nt, Artificial Sequence
  Description of Artificial Sequence: Synthetic oligonucleotide
guaguagucgaugagcuca

SEQ ID NO: 1925352 - RNA, 19 nt, Artificial Sequence
  Description of Artificial Sequence: Synthetic oligonucleotide
cacucucaaaaucauuuug

SEQ ID NO: 1925353 - RNA, 19 nt, Artificial Sequence
  Description of Artificial Sequence: Synthetic oligonucleotide
gccuagaaaauaucaaacc

SEQ ID NO: 1925354 - RNA, 19 nt, Artificial Sequence
  Description of Artificial Sequence: Synthetic oligonucleotide
gagugucagguaaagucgg

SEQ ID NO: 1925355 - RNA, 19 nt, Artificial Sequence
  Description of Artificial Sequence: Synthetic oligonucleotide
agguaaagucgggugaugg

SEQ ID NO: 1925356 - RNA, 19 nt, Artificial Sequence
  Description of Artificial Sequence: Synthetic oligonucleotide
ucaagauaccuuucucuaa

SEQ ID NO: 1925357 - RNA, 19 nt, Artificial Sequence
  Description of Artificial Sequence: Synthetic oligonucleotide
ucccaucaccucaaaagga

SEQ ID NO: 1925358 - RNA, 19 nt, Artificial Sequence
  Description of Artificial Sequence: Synthetic oligonucleotide
cauaauuuuccuccuucuc

SEQ ID NO: 1925359 - RNA, 19 nt, Artificial Sequence
  Description of Artificial Sequence: Synthetic oligonucleotide
uucccuucaaaacacucuu

SEQ ID NO: 1925360 - RNA, 19 nt, Artificial Sequence
  Description of Artificial Sequence: Synthetic oligonucleotide
agcucagugaggcugaguu

SEQ ID NO: 1925361 - RNA, 19 nt, Artificial Sequence
  Description of Artificial Sequence: Synthetic oligonucleotide
uaucaaaccccuguaaauu

SEQ ID NO: 1925362 - RNA, 19 nt, Artificial Sequence
  Description of Artificial Sequence: Synthetic oligonucleotide
agaauaucuuaaacuguuc

SEQ ID NO: 1925363 - RNA, 19 nt, Artificial Sequence
  Description of Artificial Sequence: Synthetic oligonucleotide
aaucauuuuggagggcacu

SEQ ID NO: 1925364 - RNA, 19 nt, Artificial Sequence
  Description of Artificial Sequence: Synthetic oligonucleotide
auuugcauucucugagcug

SEQ ID NO: 1925365 - RNA, 19 nt, Artificial Sequence
  Description of Artificial Sequence: Synthetic oligonucleotide
ucaaacuuccuuggaauuc

SEQ ID NO: 1925366 - RNA, 19 nt, Artificial Sequence
  Description of Artificial Sequence: Synthetic oligonucleotide
uaaagucgaugcugaaucu

SEQ ID NO: 1925367 - RNA, 19 nt, Artificial Sequence
  Description of Artificial Sequence: Synthetic oligonucleotide
uggaggacccaguaccaag

SEQ ID NO: 1925368 - RNA, 19 nt, Artificial Sequence
  Description of Artificial Sequence: Synthetic oligonucleotide
uuuguuuggggugauggua

SEQ ID NO: 1925369 - RNA, 19 nt, Artificial Sequence
  Description of Artificial Sequence: Synthetic oligonucleotide
ccuucucuacuuuaagucg

SEQ ID NO: 1925370 - RNA, 19 nt, Artificial Sequence
  Description of Artificial Sequence: Synthetic oligonucleotide
gaagcuucguguuauaauu

SEQ ID NO: 1925371 - RNA, 19 nt, Artificial Sequence
  Description of Artificial Sequence: Synthetic oligonucleotide
agaauuauccaaacuuccu

SEQ ID NO: 1925372 - RNA, 19 nt, Artificial Sequence
  Description of Artificial Sequence: Synthetic oligonucleotide
agguuuagacauugaauaa

SEQ ID NO: 1925373 - RNA, 19 nt, Artificial Sequence
  Description of Artificial Sequence: Synthetic oligonucleotide
agacgcacugucuuugugu

SEQ ID NO: 1925374 - RNA, 19 nt, Artificial Sequence
  Description of Artificial Sequence: Synthetic oligonucleotide
uuaagucguuucaccacac

SEQ ID NO: 1925375 - RNA, 19 nt, Artificial Sequence
  Description of Artificial Sequence: Synthetic oligonucleotide
uuauaucuuucuucccuuc

SEQ ID NO: 1925376 - RNA, 19 nt, Artificial Sequence
  Description of Artificial Sequence: Synthetic oligonucleotide
guagucgaugagcucagug

SEQ ID NO: 1925377 - RNA, 19 nt, Artificial Sequence
  Description of Artificial Sequence: Synthetic oligonucleotide
acuaaaccugguuuccaga

SEQ ID NO: 1925378 - RNA, 19 nt, Artificial Sequence
  Description of Artificial Sequence: Synthetic oligonucleotide
uaguagucgaugagcucag

SEQ ID NO: 1925379 - RNA, 19 nt, Artificial Sequence
  Description of Artificial Sequence: Synthetic oligonucleotide
agcucagaaauagagcaca

SEQ ID NO: 1925380 - RNA, 19 nt, Artificial Sequence
  Description of Artificial Sequence: Synthetic oligonucleotide
auuauccaaacuuccuuuu

SEQ ID NO: 1925381 - RNA, 19 nt, Artificial Sequence
  Description of Artificial Sequence: Synthetic oligonucleotide
caacuuucucaucuacccc

SEQ ID NO: 1925382 - RNA, 19 nt, Artificial Sequence
  Description of Artificial Sequence: Synthetic oligonucleotide
aagucgaugcugaaucuga

SEQ ID NO: 1925383 - RNA, 19 nt, Artificial Sequence
  Description of Artificial Sequence: Synthetic oligonucleotide
augguagaguaucacuggu

SEQ ID NO: 1925384 - RNA, 19 nt, Artificial Sequence
  Description of Artificial Sequence: Synthetic oligonucleotide
gggcagguuacauuuaggc

SEQ ID NO: 1925385 - RNA, 19 nt, Artificial Sequence
  Description of Artificial Sequence: Synthetic oligonucleotide
uucaaacuuccuuggaauu

SEQ ID NO: 1925386 - RNA, 19 nt, Artificial Sequence
  Description of Artificial Sequence: Synthetic oligonucleotide
cucucaaaaucauuuugga

SEQ ID NO: 1925387 - RNA, 19 nt, Artificial Sequence
  Description of Artificial Sequence: Synthetic oligonucleotide
ucugaagaggucucauaau

SEQ ID NO: 1925388 - RNA, 19 nt, Artificial Sequence
  Description of Artificial Sequence: Synthetic oligonucleotide
ucuaccccguaguagucga

SEQ ID NO: 1925389 - RNA, 19 nt, Artificial Sequence
  Description of Artificial Sequence: Synthetic oligonucleotide
acuuccgccacuucuuuau

SEQ ID NO: 1925390 - RNA, 19 nt, Artificial Sequence
  Description of Artificial Sequence: Synthetic oligonucleotide
augcuccugguucugaaga

SEQ ID NO: 1925391 - RNA, 19 nt, Artificial Sequence
  Description of Artificial Sequence: Synthetic oligonucleotide
aguaucacugguccccgga

SEQ ID NO: 1925392 - RNA, 19 nt, Artificial Sequence
  Description of Artificial Sequence: Synthetic oligonucleotide
guucaagauaccuuucucu

SEQ ID NO: 1925393 - RNA, 19 nt, Artificial Sequence
  Description of Artificial Sequence: Synthetic oligonucleotide
cauagugcacaacuuucuc

SEQ ID NO: 1925394 - RNA, 19 nt, Artificial Sequence
  Description of Artificial Sequence: Synthetic oligonucleotide
uucagacgcacugucuuug

SEQ ID NO: 1925395 - RNA, 19 nt, Artificial Sequence
  Description of Artificial Sequence: Synthetic oligonucleotide
guagaguaucacugguccc

SEQ ID NO: 1925396 - RNA, 19 nt, Artificial Sequence
  Description of Artificial Sequence: Synthetic oligonucleotide
uucucacucucaaaaucau

SEQ ID NO: 1925397 - RNA, 19 nt, Artificial Sequence
  Description of Artificial Sequence: Synthetic oligonucleotide
ccugcuuugccaauuuugc

SEQ ID NO: 1925398 - RNA, 19 nt, Artificial Sequence
  Description of Artificial Sequence: Synthetic oligonucleotide
ucguccuccucagacauga

SEQ ID NO: 1925399 - RNA, 19 nt, Artificial Sequence
  Description of Artificial Sequence: Synthetic oligonucleotide
uccucagacaugacugccu

SEQ ID NO: 1925400 - RNA, 19 nt, Artificial Sequence
  Description of Artificial Sequence: Synthetic oligonucleotide
ggcagguuacauuuaggcc

SEQ ID NO: 1925401 - RNA, 19 nt, Artificial Sequence
  Description of Artificial Sequence: Synthetic oligonucleotide
uuuaaguguuccacucaua

SEQ ID NO: 1925402 - RNA, 19 nt, Artificial Sequence
  Description of Artificial Sequence: Synthetic oligonucleotide
cuacuuuaagucguuucac

SEQ ID NO: 1925403 - RNA, 19 nt, Artificial Sequence
  Description of Artificial Sequence: Synthetic oligonucleotide
agguugucuuccuaaagua

SEQ ID NO: 1925404 - RNA, 19 nt, Artificial Sequence
  Description of Artificial Sequence: Synthetic oligonucleotide
ccagaauuauccaaacuuc

SEQ ID NO: 1925405 - RNA, 19 nt, Artificial Sequence
  Description of Artificial Sequence: Synthetic oligonucleotide
uaaaccugguuuccagaau

SEQ ID NO: 1925406 - RNA, 19 nt, Artificial Sequence
  Description of Artificial Sequence: Synthetic oligonucleotide
ugucuuccuaaaguauuug

SEQ ID NO: 1925407 - RNA, 19 nt, Artificial Sequence
  Description of Artificial Sequence: Synthetic oligonucleotide
acugucuuuguguuucaaa

SEQ ID NO: 1925408 - RNA, 19 nt, Artificial Sequence
  Description of Artificial Sequence: Synthetic oligonucleotide
uccgccacuucuuuauuaa

SEQ ID NO: 1925409 - RNA, 19 nt, Artificial Sequence
  Description of Artificial Sequence: Synthetic oligonucleotide
uaagucguuucaccacacu

SEQ ID NO: 1925410 - RNA, 19 nt, Artificial Sequence
  Description of Artificial Sequence: Synthetic oligonucleotide
uuacuaaaccugguuucca

SEQ ID NO: 1925411 - RNA, 19 nt, Artificial Sequence
  Description of Artificial Sequence: Synthetic oligonucleotide
aaacuuccuuggaauucgg

SEQ ID NO: 1925412 - RNA, 19 nt, Artificial Sequence
  Description of Artificial Sequence: Synthetic oligonucleotide
auccaaacuuccuuuuaaa

SEQ ID NO: 1925413 - RNA, 19 nt, Artificial Sequence
  Description of Artificial Sequence: Synthetic oligonucleotide
cucaucuaccccguaguag

SEQ ID NO: 1925414 - RNA, 19 nt, Artificial Sequence
  Description of Artificial Sequence: Synthetic oligonucleotide
gucagguaaagucggguga

SEQ ID NO: 1925415 - RNA, 19 nt, Artificial Sequence
  Description of Artificial Sequence: Synthetic oligonucleotide
gacaaguuuuaaucuccga

SEQ ID NO: 1925416 - RNA, 19 nt, Artificial Sequence
  Description of Artificial Sequence: Synthetic oligonucleotide
caucaccucaaaaggagga

SEQ ID NO: 1925417 - RNA, 19 nt, Artificial Sequence
  Description of Artificial Sequence: Synthetic oligonucleotide
acauugaauaaaauacuuu

SEQ ID NO: 1925418 - RNA, 19 nt, Artificial Sequence
  Description of Artificial Sequence: Synthetic oligonucleotide
ucuuuugaugaugcuccug

SEQ ID NO: 1925419 - RNA, 19 nt, Artificial Sequence
  Description of Artificial Sequence: Synthetic oligonucleotide
uccgaagaaguucuuccuu

SEQ ID NO: 1925420 - RNA, 19 nt, Artificial Sequence
  Description of Artificial Sequence: Synthetic oligonucleotide
aucaccucaaaaggaggag

SEQ ID NO: 1925421 - RNA, 19 nt, Artificial Sequence
  Description of Artificial Sequence: Synthetic oligonucleotide
agaguaucacugguccccg

SEQ ID NO: 1925422 - RNA, 19 nt, Artificial Sequence
  Description of Artificial Sequence: Synthetic oligonucleotide
ucacucucaaaaucauuuu

SEQ ID NO: 1925423 - RNA, 19 nt, Artificial Sequence
  Description of Artificial Sequence: Synthetic oligonucleotide
ccuaaaguauuuguuuggg

SEQ ID NO: 1925424 - RNA, 19 nt, Artificial Sequence
  Description of Artificial Sequence: Synthetic oligonucleotide
guaucacugguccccggag

SEQ ID NO: 1925425 - RNA, 19 nt, Artificial Sequence
  Description of Artificial Sequence: Synthetic oligonucleotide
ugaucccaucaccucaaaa

SEQ ID NO: 1925426 - RNA, 19 nt, Artificial Sequence
  Description of Artificial Sequence: Synthetic oligonucleotide
cagguaaagucgaugcuga

SEQ ID NO: 1925427 - RNA, 19 nt, Artificial Sequence
  Description of Artificial Sequence: Synthetic oligonucleotide
cacucuuuucacauugcca

SEQ ID NO: 1925428 - RNA, 19 nt, Artificial Sequence
  Description of Artificial Sequence: Synthetic oligonucleotide
acuguucaagauaccuuuc

SEQ ID NO: 1925429 - RNA, 19 nt, Artificial Sequence
  Description of Artificial Sequence: Synthetic oligonucleotide
agcuucguguuauaauuuu

SEQ ID NO: 1925430 - RNA, 19 nt, Artificial Sequence
  Description of Artificial Sequence: Synthetic oligonucleotide
aucuaccccguaguagucg

SEQ ID NO: 1925431 - RNA, 19 nt, Artificial Sequence
  Description of Artificial Sequence: Synthetic oligonucleotide
agaggggccaagaguauag

SEQ ID NO: 1925432 - RNA, 19 nt, Artificial Sequence
  Description of Artificial Sequence: Synthetic oligonucleotide
cucaggaggggcagguuac

SEQ ID NO: 1925433 - RNA, 19 nt, Artificial Sequence
  Description of Artificial Sequence: Synthetic oligonucleotide
caucucuaacucagccagg

SEQ ID NO: 1925434 - RNA, 19 nt, Artificial Sequence
  Description of Artificial Sequence: Synthetic oligonucleotide
ucagguaaagucgggugau

SEQ ID NO: 1925435 - RNA, 19 nt, Artificial Sequence
  Description of Artificial Sequence: Synthetic oligonucleotide
ucucuugaaccugcuuugc

SEQ ID NO: 1925436 - RNA, 19 nt, Artificial Sequence
  Description of Artificial Sequence: Synthetic oligonucleotide
ucucacucucaaaaucauu

SEQ ID NO: 1925437 - RNA, 19 nt, Artificial Sequence
  Description of Artificial Sequence: Synthetic oligonucleotide
guguuauaauuuuauguau

SEQ ID NO: 1925438 - RNA, 19 nt, Artificial Sequence
  Description of Artificial Sequence: Synthetic oligonucleotide
ucucaucuaccccguagua

SEQ ID NO: 1925439 - RNA, 19 nt, Artificial Sequence
  Description of Artificial Sequence: Synthetic oligonucleotide
uccccggagugucagguaa

SEQ ID NO: 1925440 - RNA, 19 nt, Artificial Sequence
  Description of Artificial Sequence: Synthetic oligonucleotide
cccaucaccucaaaaggag

SEQ ID NO: 1925441 - RNA, 19 nt, Artificial Sequence
  Description of Artificial Sequence: Synthetic oligonucleotide
uucuguagaggggccaaga

SEQ ID NO: 1925442 - RNA, 19 nt, Artificial Sequence
  Description of Artificial Sequence: Synthetic oligonucleotide
ugacuuagauuugcaugca

SEQ ID NO: 1925443 - RNA, 19 nt, Artificial Sequence
  Description of Artificial Sequence: Synthetic oligonucleotide
aguauagcucagaaauaga

SEQ ID NO: 1925444 - RNA, 19 nt, Artificial Sequence
  Description of Artificial Sequence: Synthetic oligonucleotide
uauucuguagaggggccaa

SEQ ID NO: 1925445 - RNA, 19 nt, Artificial Sequence
  Description of Artificial Sequence: Synthetic oligonucleotide
cuugaaccugcuuugccaa

SEQ ID NO: 1925446 - RNA, 19 nt, Artificial Sequence
  Description of Artificial Sequence: Synthetic oligonucleotide
gaggacccaguaccaagug

SEQ ID NO: 1925447 - RNA, 19 nt, Artificial Sequence
  Description of Artificial Sequence: Synthetic oligonucleotide
caagaguauagcucagaaa

SEQ ID NO: 1925448 - RNA, 19 nt, Artificial Sequence
  Description of Artificial Sequence: Synthetic oligonucleotide
auuuaggccaggugagguu

SEQ ID NO: 1925449 - RNA, 19 nt, Artificial Sequence
  Description of Artificial Sequence: Synthetic oligonucleotide
aggacccaguaccaaguga

SEQ ID NO: 1925450 - RNA, 19 nt, Artificial Sequence
  Description of Artificial Sequence: Synthetic oligonucleotide
cauuuugacaaguuuuaau

SEQ ID NO: 1925451 - RNA, 19 nt, Artificial Sequence
  Description of Artificial Sequence: Synthetic oligonucleotide
ugaggcugaguuucucguc

SEQ ID NO: 1925452 - RNA, 19 nt, Artificial Sequence
  Description of Artificial Sequence: Synthetic oligonucleotide
aggugagguuuagacauug

SEQ ID NO: 1925453 - RNA, 19 nt, Artificial Sequence
  Description of Artificial Sequence: Synthetic oligonucleotide
caugacugccugcagcuca

SEQ ID NO: 1925454 - RNA, 19 nt, Artificial Sequence
  Description of Artificial Sequence: Synthetic oligonucleotide
agaccuuguuuucuuuaau

SEQ ID NO: 1925455 - RNA, 19 nt, Artificial Sequence
  Description of Artificial Sequence: Synthetic oligonucleotide
gaguaucacugguccccgg

SEQ ID NO: 1925456 - RNA, 19 nt, Artificial Sequence
  Description of Artificial Sequence: Synthetic oligonucleotide
gacugccugcagcucauac

SEQ ID NO: 1925457 - RNA, 19 nt, Artificial Sequence
  Description of Artificial Sequence: Synthetic oligonucleotide
auacgaagcuucguguuau

SEQ ID NO: 1925458 - RNA, 19 nt, Artificial Sequence
  Description of Artificial Sequence: Synthetic oligonucleotide
caagugacuuagauuugca

SEQ ID NO: 1925459 - RNA, 19 nt, Artificial Sequence
  Description of Artificial Sequence: Synthetic oligonucleotide
gggccaagaguauagcuca

SEQ ID NO: 1925460 - RNA, 19 nt, Artificial Sequence
  Description of Artificial Sequence: Synthetic oligonucleotide
auauucuguagaggggcca

SEQ ID NO: 1925461 - RNA, 19 nt, Artificial Sequence
  Description of Artificial Sequence: Synthetic oligonucleotide
uuucagacgcacugucuuu

SEQ ID NO: 1925462 - RNA, 19 nt, Artificial Sequence
  Description of Artificial Sequence: Synthetic oligonucleotide
augagaugaagaccuuguu

SEQ ID NO: 1925463 - RNA, 19 nt, Artificial Sequence
  Description of Artificial Sequence: Synthetic oligonucleotide
uucucuacuuuaagucguu

SEQ ID NO: 1925464 - RNA, 19 nt, Artificial Sequence
  Description of Artificial Sequence: Synthetic oligonucleotide
guaaagucgggugauggua

SEQ ID NO: 1925465 - RNA, 19 nt, Artificial Sequence
  Description of Artificial Sequence: Synthetic oligonucleotide
gagugucagguaaagucga

SEQ ID NO: 1925466 - RNA, 19 nt, Artificial Sequence
  Description of Artificial Sequence: Synthetic oligonucleotide
cuucucuacuuuaagucgu

SEQ ID NO: 1925467 - RNA, 19 nt, Artificial Sequence
  Description of Artificial Sequence: Synthetic oligonucleotide
uaccccguaguagucgaug

SEQ ID NO: 1925468 - RNA, 19 nt, Artificial Sequence
  Description of Artificial Sequence: Synthetic oligonucleotide
cauagguugucuuccuaaa

SEQ ID NO: 1925469 - RNA, 19 nt, Artificial Sequence
  Description of Artificial Sequence: Synthetic oligonucleotide
accccuguaaauucuucuu

SEQ ID NO: 1925470 - RNA, 19 nt, Artificial Sequence
  Description of Artificial Sequence: Synthetic oligonucleotide
ucagacgcacugucuuugu

SEQ ID NO: 1925471 - RNA, 19 nt, Artificial Sequence
  Description of Artificial Sequence: Synthetic oligonucleotide
gguuuagacauugaauaaa

SEQ ID NO: 1925472 - RNA, 19 nt, Artificial Sequence
  Description of Artificial Sequence: Synthetic oligonucleotide
ggacccaguaccaagugac

SEQ ID NO: 1925473 - RNA, 19 nt, Artificial Sequence
  Description of Artificial Sequence: Synthetic oligonucleotide
gcuuauaucuuucuucccu

SEQ ID NO: 1925474 - RNA, 19 nt, Artificial Sequence
  Description of Artificial Sequence: Synthetic oligonucleotide
cggagugucagguaaaguc

SEQ ID NO: 1925475 - RNA, 19 nt, Artificial Sequence
  Description of Artificial Sequence: Synthetic oligonucleotide
caaaaucauuuuggagggc

SEQ ID NO: 1925476 - RNA, 19 nt, Artificial Sequence
  Description of Artificial Sequence: Synthetic oligonucleotide
acacugaauauaaacucuu

SEQ ID NO: 1925477 - RNA, 19 nt, Artificial Sequence
  Description of Artificial Sequence: Synthetic oligonucleotide
accccguaguagucgauga

SEQ ID NO: 1925478 - RNA, 19 nt, Artificial Sequence
  Description of Artificial Sequence: Synthetic oligonucleotide
gcauuugcauucucugagc

SEQ ID NO: 1925479 - RNA, 19 nt, Artificial Sequence
  Description of Artificial Sequence: Synthetic oligonucleotide
cguguuauaauuuuaugua

SEQ ID NO: 1925480 - RNA, 19 nt, Artificial Sequence
  Description of Artificial Sequence: Synthetic oligonucleotide
ccaucaccucaaaaggagg

SEQ ID NO: 1925481 - RNA, 19 nt, Artificial Sequence
  Description of Artificial Sequence: Synthetic oligonucleotide
uaccuuucucuaagccaca

SEQ ID NO: 1925482 - RNA, 19 nt, Artificial Sequence
  Description of Artificial Sequence: Synthetic oligonucleotide
gugucagguaaagucgaug

SEQ ID NO: 1925483 - RNA, 19 nt, Artificial Sequence
  Description of Artificial Sequence: Synthetic oligonucleotide
aagcuucguguuauaauuu

SEQ ID NO: 1925484 - RNA, 19 nt, Artificial Sequence
  Description of Artificial Sequence: Synthetic oligonucleotide
uucuaucauagugcacaac

SEQ ID NO: 1925485 - RNA, 19 nt, Artificial Sequence
  Description of Artificial Sequence: Synthetic oligonucleotide
uuccgccacuucuuuauua

SEQ ID NO: 1925486 - RNA, 19 nt, Artificial Sequence
  Description of Artificial Sequence: Synthetic oligonucleotide
ccaagugacuuagauuugc

SEQ ID NO: 1925487 - RNA, 19 nt, Artificial Sequence
  Description of Artificial Sequence: Synthetic oligonucleotide
ucgggugaugguagaguau

SEQ ID NO: 1925488 - RNA, 19 nt, Artificial Sequence
  Description of Artificial Sequence: Synthetic oligonucleotide
ugaaccugcuuugccaauu

SEQ ID NO: 1925489 - RNA, 19 nt, Artificial Sequence
  Description of Artificial Sequence: Synthetic oligonucleotide
gucuuccuaaaguauuugu

SEQ ID NO: 1925490 - RNA, 19 nt, Artificial Sequence
  Description of Artificial Sequence: Synthetic oligonucleotide
cuuuaaguguuccacucau

SEQ ID NO: 1925491 - RNA, 19 nt, Artificial Sequence
  Description of Artificial Sequence: Synthetic oligonucleotide
cacuucuaucauagugcac

SEQ ID NO: 1925492 - RNA, 19 nt, Artificial Sequence
  Description of Artificial Sequence: Synthetic oligonucleotide
aaccugcuuugccaauuuu

SEQ ID NO: 1925493 - RNA, 19 nt, Artificial Sequence
  Description of Artificial Sequence: Synthetic oligonucleotide
agguuguucuuuauucuau

SEQ ID NO: 1925494 - RNA, 19 nt, Artificial Sequence
  Description of Artificial Sequence: Synthetic oligonucleotide
agucgggugaugguagagu

SEQ ID NO: 1925495 - RNA, 19 nt, Artificial Sequence
  Description of Artificial Sequence: Synthetic oligonucleotide
ucccuucaaaacacucuuu

SEQ ID NO: 1925496 - RNA, 19 nt, Artificial Sequence
  Description of Artificial Sequence: Synthetic oligonucleotide
gcaugaucccaucaccuca

SEQ ID NO: 1925497 - RNA, 19 nt, Artificial Sequence
  Description of Artificial Sequence: Synthetic oligonucleotide
caugaucccaucaccucaa

SEQ ID NO: 1925498 - RNA, 19 nt, Artificial Sequence
  Description of Artificial Sequence: Synthetic oligonucleotide
ccugguuuccagaauuauc

SEQ ID NO: 1925499 - RNA, 19 nt, Artificial Sequence
  Description of Artificial Sequence: Synthetic oligonucleotide
cagguuguucuuuauucua

SEQ ID NO: 1925500 - RNA, 19 nt, Artificial Sequence
  Description of Artificial Sequence: Synthetic oligonucleotide
cugaagaggucucauaauu

SEQ ID NO: 1925501 - RNA, 19 nt, Artificial Sequence
  Description of Artificial Sequence: Synthetic oligonucleotide
cuucuaucauagugcacaa

SEQ ID NO: 1925502 - RNA, 19 nt, Artificial Sequence
  Description of Artificial Sequence: Synthetic oligonucleotide
agaguauagcucagaaaua

SEQ ID NO: 1925503 - RNA, 19 nt, Artificial Sequence
  Description of Artificial Sequence: Synthetic oligonucleotide
gucgggugaugguagagua

SEQ ID NO: 1925504 - RNA, 19 nt, Artificial Sequence
  Description of Artificial Sequence: Synthetic oligonucleotide
ucugaggcccugggcauga

SEQ ID NO: 1925505 - RNA, 19 nt, Artificial Sequence
  Description of Artificial Sequence: Synthetic oligonucleotide
ggugaugguagaguaucac

SEQ ID NO: 1925506 - RNA, 19 nt, Artificial Sequence
  Description of Artificial Sequence: Synthetic oligonucleotide
ccgaagaaguucuuccuuc

SEQ ID NO: 1925507 - RNA, 19 nt, Artificial Sequence
  Description of Artificial Sequence: Synthetic oligonucleotide
caucuaccccguaguaguc

SEQ ID NO: 1925508 - RNA, 19 nt, Artificial Sequence
  Description of Artificial Sequence: Synthetic oligonucleotide
cuuauaucuuucuucccuu

SEQ ID NO: 1925509 - RNA, 19 nt, Artificial Sequence
  Description of Artificial Sequence: Synthetic oligonucleotide
caauuuacuaaaccugguu

SEQ ID NO: 1925510 - RNA, 19 nt, Artificial Sequence
  Description of Artificial Sequence: Synthetic oligonucleotide
uugaaccugcuuugccaau

SEQ ID NO: 1925511 - RNA, 19 nt, Artificial Sequence
  Description of Artificial Sequence: Synthetic oligonucleotide
ggggugaugguagaguauc

SEQ ID NO: 1925512 - RNA, 19 nt, Artificial Sequence
  Description of Artificial Sequence: Synthetic oligonucleotide
uuaggccaggugagguuua

SEQ ID NO: 1925513 - RNA, 19 nt, Artificial Sequence
  Description of Artificial Sequence: Synthetic oligonucleotide
gaggggccaagaguauagc

SEQ ID NO: 1925514 - RNA, 19 nt, Artificial Sequence
  Description of Artificial Sequence: Synthetic oligonucleotide
gcacaacuuucucaucuac

SEQ ID NO: 1925515 - RNA, 19 nt, Artificial Sequence
  Description of Artificial Sequence: Synthetic oligonucleotide
aggaggggcagguuacauu

SEQ ID NO: 1925516 - RNA, 19 nt, Artificial Sequence
  Description of Artificial Sequence: Synthetic oligonucleotide
cuauacauuuugacaaguu

SEQ ID NO: 1925517 - RNA, 19 nt, Artificial Sequence
  Description of Artificial Sequence: Synthetic oligonucleotide
acgaagcuucguguuauaa

SEQ ID NO: 1925518 - RNA, 19 nt, Artificial Sequence
  Description of Artificial Sequence: Synthetic oligonucleotide
uagaggggccaagaguaua

SEQ ID NO: 1925519 - RNA, 19 nt, Artificial Sequence
  Description of Artificial Sequence: Synthetic oligonucleotide
cagacgcacugucuuugug

SEQ ID NO: 1925520 - RNA, 19 nt, Artificial Sequence
  Description of Artificial Sequence: Synthetic oligonucleotide
guaccaagugacuuagauu

SEQ ID NO: 1925521 - RNA, 19 nt, Artificial Sequence
  Description of Artificial Sequence: Synthetic oligonucleotide
cccguaguagucgaugagc

SEQ ID NO: 1925522 - RNA, 19 nt, Artificial Sequence
  Description of Artificial Sequence: Synthetic oligonucleotide
accaagugacuuagauuug

SEQ ID NO: 1925523 - RNA, 19 nt, Artificial Sequence
  Description of Artificial Sequence: Synthetic oligonucleotide
gcuccugguucugaagagg

SEQ ID NO: 1925524 - RNA, 19 nt, Artificial Sequence
  Description of Artificial Sequence: Synthetic oligonucleotide
cauacaguagcugcuggcu

SEQ ID NO: 1925525 - RNA, 19 nt, Artificial Sequence
  Description of Artificial Sequence: Synthetic oligonucleotide
aguauuuguuuggggugau

SEQ ID NO: 1925526 - RNA, 19 nt, Artificial Sequence
  Description of Artificial Sequence: Synthetic oligonucleotide
ucucuacuuuaagucguuu

SEQ ID NO: 1925527 - RNA, 19 nt, Artificial Sequence
  Description of Artificial Sequence: Synthetic oligonucleotide
gugaggcugaguuucucgu

SEQ ID NO: 1925528 - RNA, 19 nt, Artificial Sequence
  Description of Artificial Sequence: Synthetic oligonucleotide
gucagguaaagucgaugcu

SEQ ID NO: 1925529 - RNA, 19 nt, Artificial Sequence
  Description of Artificial Sequence: Synthetic oligonucleotide
gacuuagauuugcaugcau

SEQ ID NO: 1925530 - RNA, 19 nt, Artificial Sequence
  Description of Artificial Sequence: Synthetic oligonucleotide
ccaggugagguuuagacau

SEQ ID NO: 1925531 - RNA, 19 nt, Artificial Sequence
  Description of Artificial Sequence: Synthetic oligonucleotide
cuaucauagugcacaacuu

SEQ ID NO: 1925532 - RNA, 19 nt, Artificial Sequence
  Description of Artificial Sequence: Synthetic oligonucleotide
acccaguaccaagugacuu

SEQ ID NO: 1925533 - RNA, 19 nt, Artificial Sequence
  Description of Artificial Sequence: Synthetic oligonucleotide
ugguccccggagugucagg

SEQ ID NO: 1925534 - RNA, 19 nt, Artificial Sequence
  Description of Artificial Sequence: Synthetic oligonucleotide
cuccugguucugaagaggu

SEQ ID NO: 1925535 - RNA, 19 nt, Artificial Sequence
  Description of Artificial Sequence: Synthetic oligonucleotide
uacgaagcuucguguuaua

SEQ ID NO: 1925536 - RNA, 19 nt, Artificial Sequence
  Description of Artificial Sequence: Synthetic oligonucleotide
ucacugguccccggagugu

SEQ ID NO: 1925537 - RNA, 19 nt, Artificial Sequence
  Description of Artificial Sequence: Synthetic oligonucleotide
ggaggggcagguuacauuu

SEQ ID NO: 1925538 - RNA, 19 nt, Artificial Sequence
  Description of Artificial Sequence: Synthetic oligonucleotide
ccccuguaaauucuucuuc

SEQ ID NO: 1925539 - RNA, 19 nt, Artificial Sequence
  Description of Artificial Sequence: Synthetic oligonucleotide
cauuuaggccaggugaggu

SEQ ID NO: 1925540 - RNA, 19 nt, Artificial Sequence
  Description of Artificial Sequence: Synthetic oligonucleotide
gguaaagucgggugauggu

SEQ ID NO: 1925541 - RNA, 19 nt, Artificial Sequence
  Description of Artificial Sequence: Synthetic oligonucleotide
guuccacucauagguuguc

SEQ ID NO: 1925542 - RNA, 19 nt, Artificial Sequence
  Description of Artificial Sequence: Synthetic oligonucleotide
accuuucucuaagccacaa

SEQ ID NO: 1925543 - RNA, 19 nt, Artificial Sequence
  Description of Artificial Sequence: Synthetic oligonucleotide
cugguccccggagugucag

SEQ ID NO: 1925544 - RNA, 19 nt, Artificial Sequence
  Description of Artificial Sequence: Synthetic oligonucleotide
agugucagguaaagucgau

SEQ ID NO: 1925545 - RNA, 19 nt, Artificial Sequence
  Description of Artificial Sequence: Synthetic oligonucleotide
cucguccuccucagacaug

SEQ ID NO: 1925546 - RNA, 19 nt, Artificial Sequence
  Description of Artificial Sequence: Synthetic oligonucleotide
augaucccaucaccucaaa

SEQ ID NO: 1925547 - RNA, 19 nt, Artificial Sequence
  Description of Artificial Sequence: Synthetic oligonucleotide
cugcuuugccaauuuugcu

SEQ ID NO: 1925548 - RNA, 19 nt, Artificial Sequence
  Description of Artificial Sequence: Synthetic oligonucleotide
agaaugagaugaagaccuu

SEQ ID NO: 1925549 - RNA, 19 nt, Artificial Sequence
  Description of Artificial Sequence: Synthetic oligonucleotide
guagcugcuggcugcacuu

SEQ ID NO: 1925550 - RNA, 19 nt, Artificial Sequence
  Description of Artificial Sequence: Synthetic oligonucleotide
cacugguccccggaguguc

SEQ ID NO: 1925551 - RNA, 19 nt, Artificial Sequence
  Description of Artificial Sequence: Synthetic oligonucleotide
ccuuggaauucggaacagc

SEQ ID NO: 1925552 - RNA, 19 nt, Artificial Sequence
  Description of Artificial Sequence: Synthetic oligonucleotide
aaucuccgaagaaguucuu

SEQ ID NO: 1925553 - RNA, 19 nt, Artificial Sequence
  Description of Artificial Sequence: Synthetic oligonucleotide
gaaccugcuuugccaauuu

SEQ ID NO: 1925554 - RNA, 19 nt, Artificial Sequence
  Description of Artificial Sequence: Synthetic oligonucleotide
cguuucaccacacuacaaa

SEQ ID NO: 1925555 - RNA, 19 nt, Artificial Sequence
  Description of Artificial Sequence: Synthetic oligonucleotide
aguagucgaugagcucagu

SEQ ID NO: 1925556 - RNA, 19 nt, Artificial Sequence
  Description of Artificial Sequence: Synthetic oligonucleotide
gcuuugccaauuuugcuuu

SEQ ID NO: 1925557 - RNA, 19 nt, Artificial Sequence
  Description of Artificial Sequence: Synthetic oligonucleotide
agguuacauuuaggccagg

SEQ ID NO: 1925558 - RNA, 19 nt, Artificial Sequence
  Description of Artificial Sequence: Synthetic oligonucleotide
gguaaagucgaugcugaau

SEQ ID NO: 1925559 - RNA, 19 nt, Artificial Sequence
  Description of Artificial Sequence: Synthetic oligonucleotide
gcacuggaggacccaguac

SEQ ID NO: 1925560 - RNA, 19 nt, Artificial Sequence
  Description of Artificial Sequence: Synthetic oligonucleotide
gugucagguaaagucgggu

SEQ ID NO: 1925561 - RNA, 19 nt, Artificial Sequence
  Description of Artificial Sequence: Synthetic oligonucleotide
cgggugaugguagaguauc

SEQ ID NO: 1925562 - RNA, 19 nt, Artificial Sequence
  Description of Artificial Sequence: Synthetic oligonucleotide
caguaccaagugacuuaga

SEQ ID NO: 1925563 - RNA, 19 nt, Artificial Sequence
  Description of Artificial Sequence: Synthetic oligonucleotide
ggugagguuuagacauuga

SEQ ID NO: 1925564 - RNA, 19 nt, Artificial Sequence
  Description of Artificial Sequence: Synthetic oligonucleotide
ccccguaguagucgaugag

SEQ ID NO: 1925565 - RNA, 19 nt, Artificial Sequence
  Description of Artificial Sequence: Synthetic oligonucleotide
gacccaguaccaagugacu

SEQ ID NO: 1925566 - RNA, 19 nt, Artificial Sequence
  Description of Artificial Sequence: Synthetic oligonucleotide
ggccaagaguauagcucag

SEQ ID NO: 1925567 - RNA, 19 nt, Artificial Sequence
  Description of Artificial Sequence: Synthetic oligonucleotide
gcaugcauuugcauucucu

SEQ ID NO: 1925568 - RNA, 19 nt, Artificial Sequence
  Description of Artificial Sequence: Synthetic oligonucleotide
ccguaguagucgaugagcu

SEQ ID NO: 1925569 - RNA, 19 nt, Artificial Sequence
  Description of Artificial Sequence: Synthetic oligonucleotide
ccgccacuucuuuauuaac

SEQ ID NO: 1925570 - RNA, 19 nt, Artificial Sequence
  Description of Artificial Sequence: Synthetic oligonucleotide
cccaguaccaagugacuua

SEQ ID NO: 1925571 - RNA, 19 nt, Artificial Sequence
  Description of Artificial Sequence: Synthetic oligonucleotide
gccaagaguauagcucaga

SEQ ID NO: 1925572 - RNA, 19 nt, Artificial Sequence
  Description of Artificial Sequence: Synthetic oligonucleotide
gggugaugguagaguauca

SEQ ID NO: 1925573 - RNA, 19 nt, Artificial Sequence
  Description of Artificial Sequence: Synthetic oligonucleotide
agagcacaucugaggcccu

SEQ ID NO: 1925574 - RNA, 19 nt, Artificial Sequence
  Description of Artificial Sequence: Synthetic oligonucleotide
ggaggacccaguaccaagu

SEQ ID NO: 1925575 - RNA, 19 nt, Artificial Sequence
  Description of Artificial Sequence: Synthetic oligonucleotide
cacuuccgccacuucuuua

SEQ ID NO: 1925576 - RNA, 19 nt, Artificial Sequence
  Description of Artificial Sequence: Synthetic oligonucleotide
gggcaugaucccaucaccu

SEQ ID NO: 1925577 - RNA, 19 nt, Artificial Sequence
  Description of Artificial Sequence: Synthetic oligonucleotide
cuggaggacccaguaccaa

SEQ ID NO: 1925578 - RNA, 19 nt, Artificial Sequence
  Description of Artificial Sequence: Synthetic oligonucleotide
gaggggcagguuacauuua

SEQ ID NO: 1925579 - RNA, 19 nt, Artificial Sequence
  Description of Artificial Sequence: Synthetic oligonucleotide
ugacugccugcagcucaua

SEQ ID NO: 1925580 - RNA, 19 nt, Artificial Sequence
  Description of Artificial Sequence: Synthetic oligonucleotide
guagaggggccaagaguau

SEQ ID NO: 1925581 - RNA, 19 nt, Artificial Sequence
  Description of Artificial Sequence: Synthetic oligonucleotide
cuuugccaauuuugcuuuu

SEQ ID NO: 1925582 - RNA, 19 nt, Artificial Sequence
  Description of Artificial Sequence: Synthetic oligonucleotide
ccaaaauacgaagcuucgu

SEQ ID NO: 1925583 - RNA, 19 nt, Artificial Sequence
  Description of Artificial Sequence: Synthetic oligonucleotide
guccccggagugucaggua

SEQ ID NO: 1925584 - RNA, 19 nt, Artificial Sequence
  Description of Artificial Sequence: Synthetic oligonucleotide
cgaagcuucguguuauaau

SEQ ID NO: 1925585 - RNA, 19 nt, Artificial Sequence
  Description of Artificial Sequence: Synthetic oligonucleotide
gguccccggagugucaggu

SEQ ID NO: 1925586 - RNA, 19 nt, Artificial Sequence
  Description of Artificial Sequence: Synthetic oligonucleotide
gagcucagugaggcugagu

SEQ ID NO: 1925587 - RNA, 19 nt, Artificial Sequence
  Description of Artificial Sequence: Synthetic oligonucleotide
caggugagguuuagacauu

SEQ ID NO: 1925588 - RNA, 19 nt, Artificial Sequence
  Description of Artificial Sequence: Synthetic oligonucleotide
gcucagaaauagagcacau

SEQ ID NO: 1925589 - RNA, 19 nt, Artificial Sequence
  Description of Artificial Sequence: Synthetic oligonucleotide
cuuccgccacuucuuuauu

SEQ ID NO: 1925590 - RNA, 19 nt, Artificial Sequence
  Description of Artificial Sequence: Synthetic oligonucleotide
cuaccccguaguagucgau

SEQ ID NO: 1925591 - RNA, 19 nt, Artificial Sequence
  Description of Artificial Sequence: Synthetic oligonucleotide
gcacuuccgccacuucuuu

SEQ ID NO: 1925592 - RNA, 19 nt, Artificial Sequence
  Description of Artificial Sequence: Synthetic oligonucleotide
ccccggagugucagguaaa

SEQ ID NO: 1925593 - RNA, 19 nt, Artificial Sequence
  Description of Artificial Sequence: Synthetic oligonucleotide
ccggagugucagguaaagu

SEQ ID NO: 1925594 - RNA, 19 nt, Artificial Sequence
  Description of Artificial Sequence: Synthetic oligonucleotide
cugaggcccugggcaugau

SEQ ID NO: 1925595 - RNA, 19 nt, Artificial Sequence
  Description of Artificial Sequence: Synthetic oligonucleotide
uuuagauuagaaaacauga

SEQ ID NO: 1925596 - RNA, 19 nt, Artificial Sequence
  Description of Artificial Sequence: Synthetic oligonucleotide
ugugauaauguauaggacg

SEQ ID NO: 1925597 - RNA, 19 nt, Artificial Sequence
  Description of Artificial Sequence: Synthetic oligonucleotide
uugauaaacaucaaauaag

SEQ ID NO: 1925598 - RNA, 19 nt, Artificial Sequence
  Description of Artificial Sequence: Synthetic oligonucleotide
aaauaagauucaaaguucc

SEQ ID NO: 1925599 - RNA, 19 nt, Artificial Sequence
  Description of Artificial Sequence: Synthetic oligonucleotide
aacacauuggaucuugauc

SEQ ID NO: 1925600 - RNA, 19 nt, Artificial Sequence
  Description of Artificial Sequence: Synthetic oligonucleotide
ugauaaacaucaaauaaga

SEQ ID NO: 1925601 - RNA, 19 nt, Artificial Sequence
  Description of Artificial Sequence: Synthetic oligonucleotide
agugugauaauguauagga

SEQ ID NO: 1925602 - RNA, 19 nt, Artificial Sequence
  Description of Artificial Sequence: Synthetic oligonucleotide
aaacaggacguuuugaacu

SEQ ID NO: 1925603 - RNA, 19 nt, Artificial Sequence
  Description of Artificial Sequence: Synthetic oligonucleotide
uguccuuuaagccagcagc

SEQ ID NO: 1925604 - RNA, 19 nt, Artificial Sequence
  Description of Artificial Sequence: Synthetic oligonucleotide
aagcacauggcaucuaaac

SEQ ID NO: 1925605 - RNA, 19 nt, Artificial Sequence
  Description of Artificial Sequence: Synthetic oligonucleotide
aguggaucaaugcuggccc

SEQ ID NO: 1925606 - RNA, 19 nt, Artificial Sequence
  Description of Artificial Sequence: Synthetic oligonucleotide
auguauaggacgaugaugg

SEQ ID NO: 1925607 - RNA, 19 nt, Artificial Sequence
  Description of Artificial Sequence: Synthetic oligonucleotide
aagacaagcacaaacuuag

SEQ ID NO: 1925608 - RNA, 19 nt, Artificial Sequence
  Description of Artificial Sequence: Synthetic oligonucleotide
ucuguagauagugaggugg

SEQ ID NO: 1925609 - RNA, 19 nt, Artificial Sequence
  Description of Artificial Sequence: Synthetic oligonucleotide
agaucugagaauuaaggug

SEQ ID NO: 1925610 - RNA, 19 nt, Artificial Sequence
  Description of Artificial Sequence: Synthetic oligonucleotide
gauaagagugauaaauggg

SEQ ID NO: 1925611 - RNA, 19 nt, Artificial Sequence
  Description of Artificial Sequence: Synthetic oligonucleotide
aaacaugacauuaaaggug

SEQ ID NO: 1925612 - RNA, 19 nt, Artificial Sequence
  Description of Artificial Sequence: Synthetic oligonucleotide
gggaauauaaaucagugug

SEQ ID NO: 1925613 - RNA, 19 nt, Artificial Sequence
  Description of Artificial Sequence: Synthetic oligonucleotide
aaagguguguuuuacuaga

SEQ ID NO: 1925614 - RNA, 19 nt, Artificial Sequence
  Description of Artificial Sequence: Synthetic oligonucleotide
uguucuuauuccagaaccg

SEQ ID NO: 1925615 - RNA, 19 nt, Artificial Sequence
  Description of Artificial Sequence: Synthetic oligonucleotide
ugauagaccugggagaucg

SEQ ID NO: 1925616 - RNA, 19 nt, Artificial Sequence
  Description of Artificial Sequence: Synthetic oligonucleotide
uccacuuaaggccacacca

SEQ ID NO: 1925617 - RNA, 19 nt, Artificial Sequence
  Description of Artificial Sequence: Synthetic oligonucleotide
uaaaucagugugauaaugu

SEQ ID NO: 1925618 - RNA, 19 nt, Artificial Sequence
  Description of Artificial Sequence: Synthetic oligonucleotide
acuacuacaggucuucaag

SEQ ID NO: 1925619 - RNA, 19 nt, Artificial Sequence
  Description of Artificial Sequence: Synthetic oligonucleotide
uuuuaaucauuuccaaaga

SEQ ID NO: 1925620 - RNA, 19 nt, Artificial Sequence
  Description of Artificial Sequence: Synthetic oligonucleotide
uauaggacgaugaugggaa

SEQ ID NO: 1925621 - RNA, 19 nt, Artificial Sequence
  Description of Artificial Sequence: Synthetic oligonucleotide
aagauucaaaguucccagg

SEQ ID NO: 1925622 - RNA, 19 nt, Artificial Sequence
  Description of Artificial Sequence: Synthetic oligonucleotide
aacaggacguuuugaacuc

SEQ ID NO: 1925623 - RNA, 19 nt, Artificial Sequence
  Description of Artificial Sequence: Synthetic oligonucleotide
uggcaaauggacauuacca

SEQ ID NO: 1925624 - RNA, 19 nt, Artificial Sequence
  Description of Artificial Sequence: Synthetic oligonucleotide
aauguauaggacgaugaug

SEQ ID NO: 1925625 - RNA, 19 nt, Artificial Sequence
  Description of Artificial Sequence: Synthetic oligonucleotide
uuuucuacuacuacagguc

SEQ ID NO: 1925626 - RNA, 19 nt, Artificial Sequence
  Description of Artificial Sequence: Synthetic oligonucleotide
ugaccaaugaaccgaacug

SEQ ID NO: 1925627 - RNA, 19 nt, Artificial Sequence
  Description of Artificial Sequence: Synthetic oligonucleotide
uuuaaucauuuccaaagaa

SEQ ID NO: 1925628 - RNA, 19 nt, Artificial Sequence
  Description of Artificial Sequence: Synthetic oligonucleotide
ugaaaugagaaguauuuua

SEQ ID NO: 1925629 - RNA, 19 nt, Artificial Sequence
  Description of Artificial Sequence: Synthetic oligonucleotide
auggcaucuaaacaaauca

SEQ ID NO: 1925630 - RNA, 19 nt, Artificial Sequence
  Description of Artificial Sequence: Synthetic oligonucleotide
auucaaaguucccaggaag

SEQ ID NO: 1925631 - RNA, 19 nt, Artificial Sequence
  Description of Artificial Sequence: Synthetic oligonucleotide
aggagucgaaagcugaccc

SEQ ID NO: 1925632 - RNA, 19 nt, Artificial Sequence
  Description of Artificial Sequence: Synthetic oligonucleotide
agaucgacaggccuuuccc

SEQ ID NO: 1925633 - RNA, 19 nt, Artificial Sequence
  Description of Artificial Sequence: Synthetic oligonucleotide
cauaucaagugucggaucc

SEQ ID NO: 1925634 - RNA, 19 nt, Artificial Sequence
  Description of Artificial Sequence: Synthetic oligonucleotide
ucaaauguggauugggagu

SEQ ID NO: 1925635 - RNA, 19 nt, Artificial Sequence
  Description of Artificial Sequence: Synthetic oligonucleotide
agacugauagaccugggag

SEQ ID NO: 1925636 - RNA, 19 nt, Artificial Sequence
  Description of Artificial Sequence: Synthetic oligonucleotide
accgaacuguccuuuaagc

SEQ ID NO: 1925637 - RNA, 19 nt, Artificial Sequence
  Description of Artificial Sequence: Synthetic oligonucleotide
guguucuuauuccagaacc

SEQ ID NO: 1925638 - RNA, 19 nt, Artificial Sequence
  Description of Artificial Sequence: Synthetic oligonucleotide
uucccuaggucccauauca

SEQ ID NO: 1925639 - RNA, 19 nt, Artificial Sequence
  Description of Artificial Sequence: Synthetic oligonucleotide
acagaucugagaauuaagg

SEQ ID NO: 1925640 - RNA, 19 nt, Artificial Sequence
  Description of Artificial Sequence: Synthetic oligonucleotide
uacaugagagggaagacaa

SEQ ID NO: 1925641 - RNA, 19 nt, Artificial Sequence
  Description of Artificial Sequence: Synthetic oligonucleotide
aacgugucucagcaagagc

SEQ ID NO: 1925642 - RNA, 19 nt, Artificial Sequence
  Description of Artificial Sequence: Synthetic oligonucleotide
agcaagaaggagucgaaag

SEQ ID NO: 1925643 - RNA, 19 nt, Artificial Sequence
  Description of Artificial Sequence: Synthetic oligonucleotide
aaacuuagcugaguggauc

SEQ ID NO: 1925644 - RNA, 19 nt, Artificial Sequence
  Description of Artificial Sequence: Synthetic oligonucleotide
uccaucuauaucuuuuccc

SEQ ID NO: 1925645 - RNA, 19 nt, Artificial Sequence
  Description of Artificial Sequence: Synthetic oligonucleotide
aauuaaggugggcucggag

SEQ ID NO: 1925646 - RNA, 19 nt, Artificial Sequence
  Description of Artificial Sequence: Synthetic oligonucleotide
ugucucagcaagaaggagu

SEQ ID NO: 1925647 - RNA, 19 nt, Artificial Sequence
  Description of Artificial Sequence: Synthetic oligonucleotide
aauuucagcucuucacaug

SEQ ID NO: 1925648 - RNA, 19 nt, Artificial Sequence
  Description of Artificial Sequence: Synthetic oligonucleotide
aaugggaauauaaaucagu

SEQ ID NO: 1925649 - RNA, 19 nt, Artificial Sequence
  Description of Artificial Sequence: Synthetic oligonucleotide
accaucuguagauagugag

SEQ ID NO: 1925650 - RNA, 19 nt, Artificial Sequence
  Description of Artificial Sequence: Synthetic oligonucleotide
auaagagugauaaauggga

SEQ ID NO: 1925651 - RNA, 19 nt, Artificial Sequence
  Description of Artificial Sequence: Synthetic oligonucleotide
uggcaucuaaacaaaucag

SEQ ID NO: 1925652 - RNA, 19 nt, Artificial Sequence
  Description of Artificial Sequence: Synthetic oligonucleotide
gauaauguauaggacgaug

SEQ ID NO: 1925653 - RNA, 19 nt, Artificial Sequence
  Description of Artificial Sequence: Synthetic oligonucleotide
aaaucagugugauaaugua

SEQ ID NO: 1925654 - RNA, 19 nt, Artificial Sequence
  Description of Artificial Sequence: Synthetic oligonucleotide
uguguuuuacuagaaguga

SEQ ID NO: 1925655 - RNA, 19 nt, Artificial Sequence
  Description of Artificial Sequence: Synthetic oligonucleotide
uuucuacuacuacaggucu

SEQ ID NO: 1925656 - RNA, 19 nt, Artificial Sequence
  Description of Artificial Sequence: Synthetic oligonucleotide
aaggagucgaaagcugacc

SEQ ID NO: 1925657 - RNA, 19 nt, Artificial Sequence
  Description of Artificial Sequence: Synthetic oligonucleotide
uucaacgagugguacauga

SEQ ID NO: 1925658 - RNA, 19 nt, Artificial Sequence
  Description of Artificial Sequence: Synthetic oligonucleotide
aagucaaauguggauuggg

SEQ ID NO: 1925659 - RNA, 19 nt, Artificial Sequence
  Description of Artificial Sequence: Synthetic oligonucleotide
aacgagugguacaugagag

SEQ ID NO: 1925660 - RNA, 19 nt, Artificial Sequence
  Description of Artificial Sequence: Synthetic oligonucleotide
aacuuagcugaguggauca

SEQ ID NO: 1925661 - RNA, 19 nt, Artificial Sequence
  Description of Artificial Sequence: Synthetic oligonucleotide
aaacaaaucaggggaaccu

SEQ ID NO: 1925662 - RNA, 19 nt, Artificial Sequence
  Description of Artificial Sequence: Synthetic oligonucleotide
acgugucucagcaagagcg

SEQ ID NO: 1925663 - RNA, 19 nt, Artificial Sequence
  Description of Artificial Sequence: Synthetic oligonucleotide
cuuaaggccacaccagugc

SEQ ID NO: 1925664 - RNA, 19 nt, Artificial Sequence
  Description of Artificial Sequence: Synthetic oligonucleotide
uccucauccaucaaagcuc

SEQ ID NO: 1925665 - RNA, 19 nt, Artificial Sequence
  Description of Artificial Sequence: Synthetic oligonucleotide
uguuuuacuagaagugaaa

SEQ ID NO: 1925666 - RNA, 19 nt, Artificial Sequence
  Description of Artificial Sequence: Synthetic oligonucleotide
ugagaaguauuuuaaucau

SEQ ID NO: 1925667 - RNA, 19 nt, Artificial Sequence
  Description of Artificial Sequence: Synthetic oligonucleotide
auaagauucaaaguuccca

SEQ ID NO: 1925668 - RNA, 19 nt, Artificial Sequence
  Description of Artificial Sequence: Synthetic oligonucleotide
acugugugggcgcuaaagg

SEQ ID NO: 1925669 - RNA, 19 nt, Artificial Sequence
  Description of Artificial Sequence: Synthetic oligonucleotide
gacauuaccaugggaagag

SEQ ID NO: 1925670 - RNA, 19 nt, Artificial Sequence
  Description of Artificial Sequence: Synthetic oligonucleotide
gaggcaaugacggccaacg

SEQ ID NO: 1925671 - RNA, 19 nt, Artificial Sequence
  Description of Artificial Sequence: Synthetic oligonucleotide
aaccgaacuguccuuuaag

SEQ ID NO: 1925672 - RNA, 19 nt, Artificial Sequence
  Description of Artificial Sequence: Synthetic oligonucleotide
cugagcugaccaaugaacc

SEQ ID NO: 1925673 - RNA, 19 nt, Artificial Sequence
  Description of Artificial Sequence: Synthetic oligonucleotide
acaaacuuagcugagugga

SEQ ID NO: 1925674 - RNA, 19 nt, Artificial Sequence
  Description of Artificial Sequence: Synthetic oligonucleotide
gagaauuaaggugggcucg

SEQ ID NO: 1925675 - RNA, 19 nt, Artificial Sequence
  Description of Artificial Sequence: Synthetic oligonucleotide
uggacauuaccaugggaag

SEQ ID NO: 1925676 - RNA, 19 nt, Artificial Sequence
  Description of Artificial Sequence: Synthetic oligonucleotide
agaccccuccacuuaaggc

SEQ ID NO: 1925677 - RNA, 19 nt, Artificial Sequence
  Description of Artificial Sequence: Synthetic oligonucleotide
agaccugggagaucgacag

SEQ ID NO: 1925678 - RNA, 19 nt, Artificial Sequence
  Description of Artificial Sequence: Synthetic oligonucleotide
agauucaaaguucccagga

SEQ ID NO: 1925679 - RNA, 19 nt, Artificial Sequence
  Description of Artificial Sequence: Synthetic oligonucleotide
aucaggggaaccuugguga

SEQ ID NO: 1925680 - RNA, 19 nt, Artificial Sequence
  Description of Artificial Sequence: Synthetic oligonucleotide
ugaugggaauuucagcucu

SEQ ID NO: 1925681 - RNA, 19 nt, Artificial Sequence
  Description of Artificial Sequence: Synthetic oligonucleotide
uaagagugauaaaugggaa

SEQ ID NO: 1925682 - RNA, 19 nt, Artificial Sequence
  Description of Artificial Sequence: Synthetic oligonucleotide
cauuggaucuugaucuucc

SEQ ID NO: 1925683 - RNA, 19 nt, Artificial Sequence
  Description of Artificial Sequence: Synthetic oligonucleotide
ugaacucguguucuuauuc

SEQ ID NO: 1925684 - RNA, 19 nt, Artificial Sequence
  Description of Artificial Sequence: Synthetic oligonucleotide
gaugguacaagaauuuaga

SEQ ID NO: 1925685 - RNA, 19 nt, Artificial Sequence
  Description of Artificial Sequence: Synthetic oligonucleotide
aaaugggaauauaaaucag

SEQ ID NO: 1925686 - RNA, 19 nt, Artificial Sequence
  Description of Artificial Sequence: Synthetic oligonucleotide
ugagaauuaaggugggcuc

SEQ ID NO: 1925687 - RNA, 19 nt, Artificial Sequence
  Description of Artificial Sequence: Synthetic oligonucleotide
ucagugugauaauguauag

SEQ ID NO: 1925688 - RNA, 19 nt, Artificial Sequence
  Description of Artificial Sequence: Synthetic oligonucleotide
aaagucaaauguggauugg

SEQ ID NO: 1925689 - RNA, 19 nt, Artificial Sequence
  Description of Artificial Sequence: Synthetic oligonucleotide
gaaacaggacguuuugaac

SEQ ID NO: 1925690 - RNA, 19 nt, Artificial Sequence
  Description of Artificial Sequence: Synthetic oligonucleotide
gaacucguguucuuauucc

SEQ ID NO: 1925691 - RNA, 19 nt, Artificial Sequence
  Description of Artificial Sequence: Synthetic oligonucleotide
auaaaucagugugauaaug

SEQ ID NO: 1925692 - RNA, 19 nt, Artificial Sequence
  Description of Artificial Sequence: Synthetic oligonucleotide
gguggggagaaacaggacg

SEQ ID NO: 1925693 - RNA, 19 nt, Artificial Sequence
  Description of Artificial Sequence: Synthetic oligonucleotide
acguuuugaacucguguuc

SEQ ID NO: 1925694 - RNA, 19 nt, Artificial Sequence
  Description of Artificial Sequence: Synthetic oligonucleotide
ucaaagucaaauguggauu

SEQ ID NO: 1925695 - RNA, 19 nt, Artificial Sequence
  Description of Artificial Sequence: Synthetic oligonucleotide
cuacuacaggucuucaagc

SEQ ID NO: 1925696 - RNA, 19 nt, Artificial Sequence
  Description of Artificial Sequence: Synthetic oligonucleotide
ugguacaagaauuuagauu

SEQ ID NO: 1925697 - RNA, 19 nt, Artificial Sequence
  Description of Artificial Sequence: Synthetic oligonucleotide
caaaucaggggaaccuugg

SEQ ID NO: 1925698 - RNA, 19 nt, Artificial Sequence
  Description of Artificial Sequence: Synthetic oligonucleotide
agauccaacucgcucuuuc

SEQ ID NO: 1925699 - RNA, 19 nt, Artificial Sequence
  Description of Artificial Sequence: Synthetic oligonucleotide
ucaacgagugguacaugag

SEQ ID NO: 1925700 - RNA, 19 nt, Artificial Sequence
  Description of Artificial Sequence: Synthetic oligonucleotide
aucaaagucaaauguggau

SEQ ID NO: 1925701 - RNA, 19 nt, Artificial Sequence
  Description of Artificial Sequence: Synthetic oligonucleotide
caagcacaaacuuagcuga

SEQ ID NO: 1925702 - RNA, 19 nt, Artificial Sequence
  Description of Artificial Sequence: Synthetic oligonucleotide
aauauaaaucagugugaua

SEQ ID NO: 1925703 - RNA, 19 nt, Artificial Sequence
  Description of Artificial Sequence: Synthetic oligonucleotide
aacucguguucuuauucca

SEQ ID NO: 1925704 - RNA, 19 nt, Artificial Sequence
  Description of Artificial Sequence: Synthetic oligonucleotide
uuccaaagaagaugguaca

SEQ ID NO: 1925705 - RNA, 19 nt, Artificial Sequence
  Description of Artificial Sequence: Synthetic oligonucleotide
uguauaggacgaugauggg

SEQ ID NO: 1925706 - RNA, 19 nt, Artificial Sequence
  Description of Artificial Sequence: Synthetic oligonucleotide
agcgcagccaucuugaguu

SEQ ID NO: 1925707 - RNA, 19 nt, Artificial Sequence
  Description of Artificial Sequence: Synthetic oligonucleotide
auaauguauaggacgauga

SEQ ID NO: 1925708 - RNA, 19 nt, Artificial Sequence
  Description of Artificial Sequence: Synthetic oligonucleotide
caaagaagaugguacaaga

SEQ ID NO: 1925709 - RNA, 19 nt, Artificial Sequence
  Description of Artificial Sequence: Synthetic oligonucleotide
aggaacagcauuucugaga

SEQ ID NO: 1925710 - RNA, 19 nt, Artificial Sequence
  Description of Artificial Sequence: Synthetic oligonucleotide
uguuuccacugucucagca

SEQ ID NO: 1925711 - RNA, 19 nt, Artificial Sequence
  Description of Artificial Sequence: Synthetic oligonucleotide
gaucccauucaacgagugg

SEQ ID NO: 1925712 - RNA, 19 nt, Artificial Sequence
  Description of Artificial Sequence: Synthetic oligonucleotide
ugguacaugagagggaaga

SEQ ID NO: 1925713 - RNA, 19 nt, Artificial Sequence
  Description of Artificial Sequence: Synthetic oligonucleotide
agaugguacaagaauuuag

SEQ ID NO: 1925714 - RNA, 19 nt, Artificial Sequence
  Description of Artificial Sequence: Synthetic oligonucleotide
ugagacagaucugagaauu

SEQ ID NO: 1925715 - RNA, 19 nt, Artificial Sequence
  Description of Artificial Sequence: Synthetic oligonucleotide
gaacuguccuuuaagccag

SEQ ID NO: 1925716 - RNA, 19 nt, Artificial Sequence
  Description of Artificial Sequence: Synthetic oligonucleotide
cuucacauggcugccagcc

SEQ ID NO: 1925717 - RNA, 19 nt, Artificial Sequence
  Description of Artificial Sequence: Synthetic oligonucleotide
aaaggcccugagcugacca

SEQ ID NO: 1925718 - RNA, 19 nt, Artificial Sequence
  Description of Artificial Sequence: Synthetic oligonucleotide
gacugauagaccugggaga

SEQ ID NO: 1925719 - RNA, 19 nt, Artificial Sequence
  Description of Artificial Sequence: Synthetic oligonucleotide
aaagaagaugguacaagaa

SEQ ID NO: 1925720 - RNA, 19 nt, Artificial Sequence
  Description of Artificial Sequence: Synthetic oligonucleotide
cugugugggcgcuaaaggc

SEQ ID NO: 1925721 - RNA, 19 nt, Artificial Sequence
  Description of Artificial Sequence: Synthetic oligonucleotide
aauguggauugggaguaag

SEQ ID NO: 1925722 - RNA, 19 nt, Artificial Sequence
  Description of Artificial Sequence: Synthetic oligonucleotide
uuugaacucguguucuuau

SEQ ID NO: 1925723 - RNA, 19 nt, Artificial Sequence
  Description of Artificial Sequence: Synthetic oligonucleotide
uucugagacagaucugaga

SEQ ID NO: 1925724 - RNA, 19 nt, Artificial Sequence
  Description of Artificial Sequence: Synthetic oligonucleotide
guguguuuuacuagaagug

SEQ ID NO: 1925725 - RNA, 19 nt, Artificial Sequence
  Description of Artificial Sequence: Synthetic oligonucleotide
acgagugguacaugagagg

SEQ ID NO: 1925726 - RNA, 19 nt, Artificial Sequence
  Description of Artificial Sequence: Synthetic oligonucleotide
aaucagugugauaauguau

SEQ ID NO: 1925727 - RNA, 19 nt, Artificial Sequence
  Description of Artificial Sequence: Synthetic oligonucleotide
auaucaagugucggauccc

SEQ ID NO: 1925728 - RNA, 19 nt, Artificial Sequence
  Description of Artificial Sequence: Synthetic oligonucleotide
auggacauuaccaugggaa

SEQ ID NO: 1925729 - RNA, 19 nt, Artificial Sequence
  Description of Artificial Sequence: Synthetic oligonucleotide
ucccauaucaagugucgga

SEQ ID NO: 1925730 - RNA, 19 nt, Artificial Sequence
  Description of Artificial Sequence: Synthetic oligonucleotide
ucuacuacuacaggucuuc

SEQ ID NO: 1925731 - RNA, 19 nt, Artificial Sequence
  Description of Artificial Sequence: Synthetic oligonucleotide
aucccauucaacgaguggu

SEQ ID NO: 1925732 - RNA, 19 nt, Artificial Sequence
  Description of Artificial Sequence: Synthetic oligonucleotide
acagggacuugauaaacau

SEQ ID NO: 1925733 - RNA, 19 nt, Artificial Sequence
  Description of Artificial Sequence: Synthetic oligonucleotide
agcaagcaucaagacagcc

SEQ ID NO: 1925734 - RNA, 19 nt, Artificial Sequence
  Description of Artificial Sequence: Synthetic oligonucleotide
gugauaauguauaggacga

SEQ ID NO: 1925735 - RNA, 19 nt, Artificial Sequence
  Description of Artificial Sequence: Synthetic oligonucleotide
cuuuaagccagcagcccac

SEQ ID NO: 1925736 - RNA, 19 nt, Artificial Sequence
  Description of Artificial Sequence: Synthetic oligonucleotide
ugggaauuucagcucuuca

SEQ ID NO: 1925737 - RNA, 19 nt, Artificial Sequence
  Description of Artificial Sequence: Synthetic oligonucleotide
gaguggaucaaugcuggcc

SEQ ID NO: 1925738 - RNA, 19 nt, Artificial Sequence
  Description of Artificial Sequence: Synthetic oligonucleotide
augacggccaacgugucuc

SEQ ID NO: 1925739 - RNA, 19 nt, Artificial Sequence
  Description of Artificial Sequence: Synthetic oligonucleotide
uguagauagugaggugggg

SEQ ID NO: 1925740 - RNA, 19 nt, Artificial Sequence
  Description of Artificial Sequence: Synthetic oligonucleotide
agaccaucuguagauagug

SEQ ID NO: 1925741 - RNA, 19 nt, Artificial Sequence
  Description of Artificial Sequence: Synthetic oligonucleotide
aagagagaccccuccacuu

SEQ ID NO: 1925742 - RNA, 19 nt, Artificial Sequence
  Description of Artificial Sequence: Synthetic oligonucleotide
guucuuauuccagaaccgc

SEQ ID NO: 1925743 - RNA, 19 nt, Artificial Sequence
  Description of Artificial Sequence: Synthetic oligonucleotide
aaugacggccaacgugucu

SEQ ID NO: 1925744 - RNA, 19 nt, Artificial Sequence
  Description of Artificial Sequence: Synthetic oligonucleotide
agaauuaaggugggcucgg

SEQ ID NO: 1925745 - RNA, 19 nt, Artificial Sequence
  Description of Artificial Sequence: Synthetic oligonucleotide
acacagggacuugauaaac

SEQ ID NO: 1925746 - RNA, 19 nt, Artificial Sequence
  Description of Artificial Sequence: Synthetic oligonucleotide
aagaaggagucgaaagcug

SEQ ID NO: 1925747 - RNA, 19 nt, Artificial Sequence
  Description of Artificial Sequence: Synthetic oligonucleotide
uucaagccucucuacugag

SEQ ID NO: 1925748 - RNA, 19 nt, Artificial Sequence
  Description of Artificial Sequence: Synthetic oligonucleotide
uccaccucucuucucucag

SEQ ID NO: 1925749 - RNA, 19 nt, Artificial Sequence
  Description of Artificial Sequence: Synthetic oligonucleotide
gcaagaaggagucgaaagc

SEQ ID NO: 1925750 - RNA, 19 nt, Artificial Sequence
  Description of Artificial Sequence: Synthetic oligonucleotide
aaugaaccgaacuguccuu

SEQ ID NO: 1925751 - RNA, 19 nt, Artificial Sequence
  Description of Artificial Sequence: Synthetic oligonucleotide
ucaagccucucuacugagc

SEQ ID NO: 1925752 - RNA, 19 nt, Artificial Sequence
  Description of Artificial Sequence: Synthetic oligonucleotide
cuaaacaaaucaggggaac

SEQ ID NO: 1925753 - RNA, 19 nt, Artificial Sequence
  Description of Artificial Sequence: Synthetic oligonucleotide
cagugugauaauguauagg

SEQ ID NO: 1925754 - RNA, 19 nt, Artificial Sequence
  Description of Artificial Sequence: Synthetic oligonucleotide
auagaccugggagaucgac

SEQ ID NO: 1925755 - RNA, 19 nt, Artificial Sequence
  Description of Artificial Sequence: Synthetic oligonucleotide
gagaucgacaggccuuucc

SEQ ID NO: 1925756 - RNA, 19 nt, Artificial Sequence
  Description of Artificial Sequence: Synthetic oligonucleotide
acgaugaugggaauuucag

SEQ ID NO: 1925757 - RNA, 19 nt, Artificial Sequence
  Description of Artificial Sequence: Synthetic oligonucleotide
acggccaacgugucucagc

SEQ ID NO: 1925758 - RNA, 19 nt, Artificial Sequence
  Description of Artificial Sequence: Synthetic oligonucleotide
caagugucggaucccauuc

SEQ ID NO: 1925759 - RNA, 19 nt, Artificial Sequence
  Description of Artificial Sequence: Synthetic oligonucleotide
agcaugagcuccccagauc

SEQ ID NO: 1925760 - RNA, 19 nt, Artificial Sequence
  Description of Artificial Sequence: Synthetic oligonucleotide
aagccucucuacugagcuc

SEQ ID NO: 1925761 - RNA, 19 nt, Artificial Sequence
  Description of Artificial Sequence: Synthetic oligonucleotide
auuuccaaagaagauggua

SEQ ID NO: 1925762 - RNA, 19 nt, Artificial Sequence
  Description of Artificial Sequence: Synthetic oligonucleotide
gggaguaagggcuccaggc

SEQ ID NO: 1925763 - RNA, 19 nt, Artificial Sequence
  Description of Artificial Sequence: Synthetic oligonucleotide
caaaguucccaggaagcag

SEQ ID NO: 1925764 - RNA, 19 nt, Artificial Sequence
  Description of Artificial Sequence: Synthetic oligonucleotide
uccagaaccgcuccaucuc

SEQ ID NO: 1925765 - RNA, 19 nt, Artificial Sequence
  Description of Artificial Sequence: Synthetic oligonucleotide
aagugucggaucccauuca

SEQ ID NO: 1925766 - RNA, 19 nt, Artificial Sequence
  Description of Artificial Sequence: Synthetic oligonucleotide
uucccaagcaugagcuccc

SEQ ID NO: 1925767 - RNA, 19 nt, Artificial Sequence
  Description of Artificial Sequence: Synthetic oligonucleotide
ucaagacagccacuccaga

SEQ ID NO: 1925768 - RNA, 19 nt, Artificial Sequence
  Description of Artificial Sequence: Synthetic oligonucleotide
uaucaagugucggauccca

SEQ ID NO: 1925769 - RNA, 19 nt, Artificial Sequence
  Description of Artificial Sequence: Synthetic oligonucleotide
cuggggauaagagugauaa

SEQ ID NO: 1925770 - RNA, 19 nt, Artificial Sequence
  Description of Artificial Sequence: Synthetic oligonucleotide
aagcaugagcuccccagau

SEQ ID NO: 1925771 - RNA, 19 nt, Artificial Sequence
  Description of Artificial Sequence: Synthetic oligonucleotide
ugacuggggauaagaguga

SEQ ID NO: 1925772 - RNA, 19 nt, Artificial Sequence
  Description of Artificial Sequence: Synthetic oligonucleotide
uccaucaaagcuccaucua

SEQ ID NO: 1925773 - RNA, 19 nt, Artificial Sequence
  Description of Artificial Sequence: Synthetic oligonucleotide
aagagcgcagccaucuuga

SEQ ID NO: 1925774 - RNA, 19 nt, Artificial Sequence
  Description of Artificial Sequence: Synthetic oligonucleotide
cucggaggcaaugacggcc

SEQ ID NO: 1925775 - RNA, 19 nt, Artificial Sequence
  Description of Artificial Sequence: Synthetic oligonucleotide
ucggaggcaaugacggcca

SEQ ID NO: 1925776 - RNA, 19 nt, Artificial Sequence
  Description of Artificial Sequence: Synthetic oligonucleotide
aagaugguacaagaauuua

SEQ ID NO: 1925777 - RNA, 19 nt, Artificial Sequence
  Description of Artificial Sequence: Synthetic oligonucleotide
gaagacaagcacaaacuua

SEQ ID NO: 1925778 - RNA, 19 nt, Artificial Sequence
  Description of Artificial Sequence: Synthetic oligonucleotide
cuuccucauccaucaaagc

SEQ ID NO: 1925779 - RNA, 19 nt, Artificial Sequence
  Description of Artificial Sequence: Synthetic oligonucleotide
ucguguucuuauuccagaa

SEQ ID NO: 1925780 - RNA, 19 nt, Artificial Sequence
  Description of Artificial Sequence: Synthetic oligonucleotide
gguguguuuuacuagaagu

SEQ ID NO: 1925781 - RNA, 19 nt, Artificial Sequence
  Description of Artificial Sequence: Synthetic oligonucleotide
uuucagcucuucacauggc

SEQ ID NO: 1925782 - RNA, 19 nt, Artificial Sequence
  Description of Artificial Sequence: Synthetic oligonucleotide
acugauagaccugggagau

SEQ ID NO: 1925783 - RNA, 19 nt, Artificial Sequence
  Description of Artificial Sequence: Synthetic oligonucleotide
ucaagugucggaucccauu

SEQ ID NO: 1925784 - RNA, 19 nt, Artificial Sequence
  Description of Artificial Sequence: Synthetic oligonucleotide
uccaaagaagaugguacaa

SEQ ID NO: 1925785 - RNA, 19 nt, Artificial Sequence
  Description of Artificial Sequence: Synthetic oligonucleotide
caagagcgcagccaucuug

SEQ ID NO: 1925786 - RNA, 19 nt, Artificial Sequence
  Description of Artificial Sequence: Synthetic oligonucleotide
acaucaaauaagauucaaa

SEQ ID NO: 1925787 - RNA, 19 nt, Artificial Sequence
  Description of Artificial Sequence: Synthetic oligonucleotide
gccaacgugucucagcaag

SEQ ID NO: 1925788 - RNA, 19 nt, Artificial Sequence
  Description of Artificial Sequence: Synthetic oligonucleotide
ggcaaugacggccaacgug

SEQ ID NO: 1925789 - RNA, 19 nt, Artificial Sequence
  Description of Artificial Sequence: Synthetic oligonucleotide
caccucucuucucucaggc

SEQ ID NO: 1925790 - RNA, 19 nt, Artificial Sequence
  Description of Artificial Sequence: Synthetic oligonucleotide
gugagguggggagaaacag

SEQ ID NO: 1925791 - RNA, 19 nt, Artificial Sequence
  Description of Artificial Sequence: Synthetic oligonucleotide
cuccccagauccaacucgc

SEQ ID NO: 1925792 - RNA, 19 nt, Artificial Sequence
  Description of Artificial Sequence: Synthetic oligonucleotide
ccaucuguagauagugagg

SEQ ID NO: 1925793 - RNA, 19 nt, Artificial Sequence
  Description of Artificial Sequence: Synthetic oligonucleotide
uuuugaacucguguucuua

SEQ ID NO: 1925794 - RNA, 19 nt, Artificial Sequence
  Description of Artificial Sequence: Synthetic oligonucleotide
uacuacuacaggucuucaa

SEQ ID NO: 1925795 - RNA, 19 nt, Artificial Sequence
  Description of Artificial Sequence: Synthetic oligonucleotide
auuggaucuugaucuuccu

SEQ ID NO: 1925796 - RNA, 19 nt, Artificial Sequence
  Description of Artificial Sequence: Synthetic oligonucleotide
gacguuuugaacucguguu

SEQ ID NO: 1925797 - RNA, 19 nt, Artificial Sequence
  Description of Artificial Sequence: Synthetic oligonucleotide
guauaggacgaugauggga

SEQ ID NO: 1925798 - RNA, 19 nt, Artificial Sequence
  Description of Artificial Sequence: Synthetic oligonucleotide
agacaagcacaaacuuagc

SEQ ID NO: 1925799 - RNA, 19 nt, Artificial Sequence
  Description of Artificial Sequence: Synthetic oligonucleotide
ggaauauaaaucaguguga

SEQ ID NO: 1925800 - RNA, 19 nt, Artificial Sequence
  Description of Artificial Sequence: Synthetic oligonucleotide
agucaaauguggauuggga

SEQ ID NO: 1925801 - RNA, 19 nt, Artificial Sequence
  Description of Artificial Sequence: Synthetic oligonucleotide
guccuuuaagccagcagcc

SEQ ID NO: 1925802 - RNA, 19 nt, Artificial Sequence
  Description of Artificial Sequence: Synthetic oligonucleotide
guagauagugaggugggga

SEQ ID NO: 1925803 - RNA, 19 nt, Artificial Sequence
  Description of Artificial Sequence: Synthetic oligonucleotide
aucuguagauagugaggug

SEQ ID NO: 1925804 - RNA, 19 nt, Artificial Sequence
  Description of Artificial Sequence: Synthetic oligonucleotide
ucugagaauuaaggugggc

SEQ ID NO: 1925805 - RNA, 19 nt, Artificial Sequence
  Description of Artificial Sequence: Synthetic oligonucleotide
uccuuuaagccagcagccc

SEQ ID NO: 1925806 - RNA, 19 nt, Artificial Sequence
  Description of Artificial Sequence: Synthetic oligonucleotide
ggcucggaggcaaugacgg

SEQ ID NO: 1925807 - RNA, 19 nt, Artificial Sequence
  Description of Artificial Sequence: Synthetic oligonucleotide
agcaagagcgcagccaucu

SEQ ID NO: 1925808 - RNA, 19 nt, Artificial Sequence
  Description of Artificial Sequence: Synthetic oligonucleotide
agcugggcagagccauucc

SEQ ID NO: 1925809 - RNA, 19 nt, Artificial Sequence
  Description of Artificial Sequence: Synthetic oligonucleotide
gacgaugaugggaauuuca

SEQ ID NO: 1925810 - RNA, 19 nt, Artificial Sequence
  Description of Artificial Sequence: Synthetic oligonucleotide
uuucccuaggucccauauc

SEQ ID NO: 1925811 - RNA, 19 nt, Artificial Sequence
  Description of Artificial Sequence: Synthetic oligonucleotide
auguggauugggaguaagg

SEQ ID NO: 1925812 - RNA, 19 nt, Artificial Sequence
  Description of Artificial Sequence: Synthetic oligonucleotide
aggggaaccuuggugacug

SEQ ID NO: 1925813 - RNA, 19 nt, Artificial Sequence
  Description of Artificial Sequence: Synthetic oligonucleotide
gacauuaaagguguguuuu

SEQ ID NO: 1925814 - RNA, 19 nt, Artificial Sequence
  Description of Artificial Sequence: Synthetic oligonucleotide
gauagugagguggggagaa

SEQ ID NO: 1925815 - RNA, 19 nt, Artificial Sequence
  Description of Artificial Sequence: Synthetic oligonucleotide
uagugagguggggagaaac

SEQ ID NO: 1925816 - RNA, 19 nt, Artificial Sequence
  Description of Artificial Sequence: Synthetic oligonucleotide
ugggagaucgacaggccuu

SEQ ID NO: 1925817 - RNA, 19 nt, Artificial Sequence
  Description of Artificial Sequence: Synthetic oligonucleotide
gagucgaaagcugacccuc

SEQ ID NO: 1925818 - RNA, 19 nt, Artificial Sequence
  Description of Artificial Sequence: Synthetic oligonucleotide
aagcacaaacuuagcugag

SEQ ID NO: 1925819 - RNA, 19 nt, Artificial Sequence
  Description of Artificial Sequence: Synthetic oligonucleotide
gaaggagucgaaagcugac

SEQ ID NO: 1925820 - RNA, 19 nt, Artificial Sequence
  Description of Artificial Sequence: Synthetic oligonucleotide
guacaagaauuuagauuag

SEQ ID NO: 1925821 - RNA, 19 nt, Artificial Sequence
  Description of Artificial Sequence: Synthetic oligonucleotide
caacgagugguacaugaga

SEQ ID NO: 1925822 - RNA, 19 nt, Artificial Sequence
  Description of Artificial Sequence: Synthetic oligonucleotide
ccugagcugaccaaugaac

SEQ ID NO: 1925823 - RNA, 19 nt, Artificial Sequence
  Description of Artificial Sequence: Synthetic oligonucleotide
guacaugagagggaagaca

SEQ ID NO: 1925824 - RNA, 19 nt, Artificial Sequence
  Description of Artificial Sequence: Synthetic oligonucleotide
augggaauuucagcucuuc

SEQ ID NO: 1925825 - RNA, 19 nt, Artificial Sequence
  Description of Artificial Sequence: Synthetic oligonucleotide
ucucagcaagagcgcagcc

SEQ ID NO: 1925826 - RNA, 19 nt, Artificial Sequence
  Description of Artificial Sequence: Synthetic oligonucleotide
gucucagcaagaaggaguc

SEQ ID NO: 1925827 - RNA, 19 nt, Artificial Sequence
  Description of Artificial Sequence: Synthetic oligonucleotide
caacgugucucagcaagag

SEQ ID NO: 1925828 - RNA, 19 nt, Artificial Sequence
  Description of Artificial Sequence: Synthetic oligonucleotide
agugucggaucccauucaa

SEQ ID NO: 1925829 - RNA, 19 nt, Artificial Sequence
  Description of Artificial Sequence: Synthetic oligonucleotide
ccaucuauaucuuuuccca

SEQ ID NO: 1925830 - RNA, 19 nt, Artificial Sequence
  Description of Artificial Sequence: Synthetic oligonucleotide
cuucaagccucucuacuga

SEQ ID NO: 1925831 - RNA, 19 nt, Artificial Sequence
  Description of Artificial Sequence: Synthetic oligonucleotide
cuccacuuaaggccacacc

SEQ ID NO: 1925832 - RNA, 19 nt, Artificial Sequence
  Description of Artificial Sequence: Synthetic oligonucleotide
aucugagaauuaagguggg

SEQ ID NO: 1925833 - RNA, 19 nt, Artificial Sequence
  Description of Artificial Sequence: Synthetic oligonucleotide
uucuacuacuacaggucuu

SEQ ID NO: 1925834 - RNA, 19 nt, Artificial Sequence
  Description of Artificial Sequence: Synthetic oligonucleotide
ugaguggaucaaugcuggc

SEQ ID NO: 1925835 - RNA, 19 nt, Artificial Sequence
  Description of Artificial Sequence: Synthetic oligonucleotide
cacugugugggcgcuaaag

SEQ ID NO: 1925836 - RNA, 19 nt, Artificial Sequence
  Description of Artificial Sequence: Synthetic oligonucleotide
agugccacgguggcaaaug

SEQ ID NO: 1925837 - RNA, 19 nt, Artificial Sequence
  Description of Artificial Sequence: Synthetic oligonucleotide
augagagggaagacaagca

SEQ ID NO: 1925838 - RNA, 19 nt, Artificial Sequence
  Description of Artificial Sequence: Synthetic oligonucleotide
ucuucacauggcugccagc

SEQ ID NO: 1925839 - RNA, 19 nt, Artificial Sequence
  Description of Artificial Sequence: Synthetic oligonucleotide
ggucccauaucaagugucg

SEQ ID NO: 1925840 - RNA, 19 nt, Artificial Sequence
  Description of Artificial Sequence: Synthetic oligonucleotide
gucgaaagcugacccucag

SEQ ID NO: 1925841 - RNA, 19 nt, Artificial Sequence
  Description of Artificial Sequence: Synthetic oligonucleotide
ucucagcaagaaggagucg

SEQ ID NO: 1925842 - RNA, 19 nt, Artificial Sequence
  Description of Artificial Sequence: Synthetic oligonucleotide
ggaaccuuggugacugggg

SEQ ID NO: 1925843 - RNA, 19 nt, Artificial Sequence
  Description of Artificial Sequence: Synthetic oligonucleotide
acaggacguuuugaacucg

SEQ ID NO: 1925844 - RNA, 19 nt, Artificial Sequence
  Description of Artificial Sequence: Synthetic oligonucleotide
uugggaguaagggcuccag

SEQ ID NO: 1925845 - RNA, 19 nt, Artificial Sequence
  Description of Artificial Sequence: Synthetic oligonucleotide
ugauaauguauaggacgau

SEQ ID NO: 1925846 - RNA, 19 nt, Artificial Sequence
  Description of Artificial Sequence: Synthetic oligonucleotide
uuuaagccagcagcccaca

SEQ ID NO: 1925847 - RNA, 19 nt, Artificial Sequence
  Description of Artificial Sequence: Synthetic oligonucleotide
gucccauaucaagugucgg

SEQ ID NO: 1925848 - RNA, 19 nt, Artificial Sequence
  Description of Artificial Sequence: Synthetic oligonucleotide
uugaacucguguucuuauu

SEQ ID NO: 1925849 - RNA, 19 nt, Artificial Sequence
  Description of Artificial Sequence: Synthetic oligonucleotide
agagagaccccuccacuua

SEQ ID NO: 1925850 - RNA, 19 nt, Artificial Sequence
  Description of Artificial Sequence: Synthetic oligonucleotide
caucuguagauagugaggu

SEQ ID NO: 1925851 - RNA, 19 nt, Artificial Sequence
  Description of Artificial Sequence: Synthetic oligonucleotide
aucgacaggccuuucccua

SEQ ID NO: 1925852 - RNA, 19 nt, Artificial Sequence
  Description of Artificial Sequence: Synthetic oligonucleotide
ccucuagcugggcagagcc

SEQ ID NO: 1925853 - RNA, 19 nt, Artificial Sequence
  Description of Artificial Sequence: Synthetic oligonucleotide
aggacgaugaugggaauuu

SEQ ID NO: 1925854 - RNA, 19 nt, Artificial Sequence
  Description of Artificial Sequence: Synthetic oligonucleotide
guguuuuacuagaagugaa

SEQ ID NO: 1925855 - RNA, 19 nt, Artificial Sequence
  Description of Artificial Sequence: Synthetic oligonucleotide
agcacaaacuuagcugagu

SEQ ID NO: 1925856 - RNA, 19 nt, Artificial Sequence
  Description of Artificial Sequence: Synthetic oligonucleotide
caaauguggauugggagua

SEQ ID NO: 1925857 - RNA, 19 nt, Artificial Sequence
  Description of Artificial Sequence: Synthetic oligonucleotide
cugagaauuaaggugggcu

SEQ ID NO: 1925858 - RNA, 19 nt, Artificial Sequence
  Description of Artificial Sequence: Synthetic oligonucleotide
gaccugggagaucgacagg

SEQ ID NO: 1925859 - RNA, 19 nt, Artificial Sequence
  Description of Artificial Sequence: Synthetic oligonucleotide
gaaccgaacuguccuuuaa

SEQ ID NO: 1925860 - RNA, 19 nt, Artificial Sequence
  Description of Artificial Sequence: Synthetic oligonucleotide
ugaaccgaacuguccuuua

SEQ ID NO: 1925861 - RNA, 19 nt, Artificial Sequence
  Description of Artificial Sequence: Synthetic oligonucleotide
ggcgcuaaaggcccugagc

SEQ ID NO: 1925862 - RNA, 19 nt, Artificial Sequence
  Description of Artificial Sequence: Synthetic oligonucleotide
ugguucccaaaggaacagc

SEQ ID NO: 1925863 - RNA, 19 nt, Artificial Sequence
  Description of Artificial Sequence: Synthetic oligonucleotide
agagcgcagccaucuugag

SEQ ID NO: 1925864 - RNA, 19 nt, Artificial Sequence
  Description of Artificial Sequence: Synthetic oligonucleotide
ggggauaagagugauaaau

SEQ ID NO: 1925865 - RNA, 19 nt, Artificial Sequence
  Description of Artificial Sequence: Synthetic oligonucleotide
gauccaacucgcucuuucu

SEQ ID NO: 1925866 - RNA, 19 nt, Artificial Sequence
  Description of Artificial Sequence: Synthetic oligonucleotide
aagagaccaucuguagaua

SEQ ID NO: 1925867 - RNA, 19 nt, Artificial Sequence
  Description of Artificial Sequence: Synthetic oligonucleotide
uggggauaagagugauaaa

SEQ ID NO: 1925868 - RNA, 19 nt, Artificial Sequence
  Description of Artificial Sequence: Synthetic oligonucleotide
ccacuuaaggccacaccag

SEQ ID NO: 1925869 - RNA, 19 nt, Artificial Sequence
  Description of Artificial Sequence: Synthetic oligonucleotide
aaauguggauugggaguaa

SEQ ID NO: 1925870 - RNA, 19 nt, Artificial Sequence
  Description of Artificial Sequence: Synthetic oligonucleotide
gaucugaagcacauggcau

SEQ ID NO: 1925871 - RNA, 19 nt, Artificial Sequence
  Description of Artificial Sequence: Synthetic oligonucleotide
cgaacuguccuuuaagcca

SEQ ID NO: 1925872 - RNA, 19 nt, Artificial Sequence
  Description of Artificial Sequence: Synthetic oligonucleotide
ggcugccagcccuacagag

SEQ ID NO: 1925873 - RNA, 19 nt, Artificial Sequence
  Description of Artificial Sequence: Synthetic oligonucleotide
gcuaaaggcccugagcuga

SEQ ID NO: 1925874 - RNA, 19 nt, Artificial Sequence
  Description of Artificial Sequence: Synthetic oligonucleotide
caagcaugagcuccccaga

SEQ ID NO: 1925875 - RNA, 19 nt, Artificial Sequence
  Description of Artificial Sequence: Synthetic oligonucleotide
ucccuaggucccauaucaa

SEQ ID NO: 1925876 - RNA, 19 nt, Artificial Sequence
  Description of Artificial Sequence: Synthetic oligonucleotide
cgaugaugggaauuucagc

SEQ ID NO: 1925877 - RNA, 19 nt, Artificial Sequence
  Description of Artificial Sequence: Synthetic oligonucleotide
aagcugacccucagcacaa

SEQ ID NO: 1925878 - RNA, 19 nt, Artificial Sequence
  Description of Artificial Sequence: Synthetic oligonucleotide
auaggacgaugaugggaau

SEQ ID NO: 1925879 - RNA, 19 nt, Artificial Sequence
  Description of Artificial Sequence: Synthetic oligonucleotide
ugacggccaacgugucuca

SEQ ID NO: 1925880 - RNA, 19 nt, Artificial Sequence
  Description of Artificial Sequence: Synthetic oligonucleotide
gguacaugagagggaagac

SEQ ID NO: 1925881 - RNA, 19 nt, Artificial Sequence
  Description of Artificial Sequence: Synthetic oligonucleotide
gcaagcaucaagacagcca

SEQ ID NO: 1925882 - RNA, 19 nt, Artificial Sequence
  Description of Artificial Sequence: Synthetic oligonucleotide
ggcaaauggacauuaccau

SEQ ID NO: 1925883 - RNA, 19 nt, Artificial Sequence
  Description of Artificial Sequence: Synthetic oligonucleotide
gaagcacauggcaucuaaa

SEQ ID NO: 1925884 - RNA, 19 nt, Artificial Sequence
  Description of Artificial Sequence: Synthetic oligonucleotide
gcagcccacaggcaguggc

SEQ ID NO: 1925885 - RNA, 19 nt, Artificial Sequence
  Description of Artificial Sequence: Synthetic oligonucleotide
ggacauuaccaugggaaga

SEQ ID NO: 1925886 - RNA, 19 nt, Artificial Sequence
  Description of Artificial Sequence: Synthetic oligonucleotide
auucaacgagugguacaug

SEQ ID NO: 1925887 - RNA, 19 nt, Artificial Sequence
  Description of Artificial Sequence: Synthetic oligonucleotide
cauucaacgagugguacau

SEQ ID NO: 1925888 - RNA, 19 nt, Artificial Sequence
  Description of Artificial Sequence: Synthetic oligonucleotide
ggucuucaagccucucuac

SEQ ID NO: 1925889 - RNA, 19 nt, Artificial Sequence
  Description of Artificial Sequence: Synthetic oligonucleotide
gcaaugacggccaacgugu

SEQ ID NO: 1925890 - RNA, 19 nt, Artificial Sequence
  Description of Artificial Sequence: Synthetic oligonucleotide
gaauuaaggugggcucgga

SEQ ID NO: 1925891 - RNA, 19 nt, Artificial Sequence
  Description of Artificial Sequence: Synthetic oligonucleotide
gcgcuaaaggcccugagcu

SEQ ID NO: 1925892 - RNA, 19 nt, Artificial Sequence
  Description of Artificial Sequence: Synthetic oligonucleotide
aggcaaugacggccaacgu

SEQ ID NO: 1925893 - RNA, 19 nt, Artificial Sequence
  Description of Artificial Sequence: Synthetic oligonucleotide
caaugacggccaacguguc

SEQ ID NO: 1925894 - RNA, 19 nt, Artificial Sequence
  Description of Artificial Sequence: Synthetic oligonucleotide
ugugggcgcuaaaggcccu

SEQ ID NO: 1925895 - RNA, 19 nt, Artificial Sequence
  Description of Artificial Sequence: Synthetic oligonucleotide
ggacguuuugaacucgugu

SEQ ID NO: 1925896 - RNA, 19 nt, Artificial Sequence
  Description of Artificial Sequence: Synthetic oligonucleotide
gagaaguauuuuaaucauu

SEQ ID NO: 1925897 - RNA, 19 nt, Artificial Sequence
  Description of Artificial Sequence: Synthetic oligonucleotide
acauggcaucuaaacaaau

SEQ ID NO: 1925898 - RNA, 19 nt, Artificial Sequence
  Description of Artificial Sequence: Synthetic oligonucleotide
aggacguuuugaacucgug

SEQ ID NO: 1925899 - RNA, 19 nt, Artificial Sequence
  Description of Artificial Sequence: Synthetic oligonucleotide
guggggagaaacaggacgu

SEQ ID NO: 1925900 - RNA, 19 nt, Artificial Sequence
  Description of Artificial Sequence: Synthetic oligonucleotide
cacgguggcaaauggacau

SEQ ID NO: 1925901 - RNA, 19 nt, Artificial Sequence
  Description of Artificial Sequence: Synthetic oligonucleotide
cuuggugacuggggauaag

SEQ ID NO: 1925902 - RNA, 19 nt, Artificial Sequence
  Description of Artificial Sequence: Synthetic oligonucleotide
ccacuccagacugauagac

SEQ ID NO: 1925903 - RNA, 19 nt, Artificial Sequence
  Description of Artificial Sequence: Synthetic oligonucleotide
agucgaaagcugacccuca

SEQ ID NO: 1925904 - RNA, 19 nt, Artificial Sequence
  Description of Artificial Sequence: Synthetic oligonucleotide
gagaccaucuguagauagu

SEQ ID NO: 1925905 - RNA, 19 nt, Artificial Sequence
  Description of Artificial Sequence: Synthetic oligonucleotide
accccuccacuuaaggcca

SEQ ID NO: 1925906 - RNA, 19 nt, Artificial Sequence
  Description of Artificial Sequence: Synthetic oligonucleotide
agcacaaaucaaagucaaa

SEQ ID NO: 1925907 - RNA, 19 nt, Artificial Sequence
  Description of Artificial Sequence: Synthetic oligonucleotide
ucccucuagcugggcagag

SEQ ID NO: 1925908 - RNA, 19 nt, Artificial Sequence
  Description of Artificial Sequence: Synthetic oligonucleotide
ccauaucaagugucggauc

SEQ ID NO: 1925909 - RNA, 19 nt, Artificial Sequence
  Description of Artificial Sequence: Synthetic oligonucleotide
cacuuaaggccacaccagu

SEQ ID NO: 1925910 - RNA, 19 nt, Artificial Sequence
  Description of Artificial Sequence: Synthetic oligonucleotide
acuuagcugaguggaucaa

SEQ ID NO: 1925911 - RNA, 19 nt, Artificial Sequence
  Description of Artificial Sequence: Synthetic oligonucleotide
gugguacaugagagggaag

SEQ ID NO: 1925912 - RNA, 19 nt, Artificial Sequence
  Description of Artificial Sequence: Synthetic oligonucleotide
ggaucccauucaacgagug

SEQ ID NO: 1925913 - RNA, 19 nt, Artificial Sequence
  Description of Artificial Sequence: Synthetic oligonucleotide
gugucggaucccauucaac

SEQ ID NO: 1925914 - RNA, 19 nt, Artificial Sequence
  Description of Artificial Sequence: Synthetic oligonucleotide
cguguucuuauuccagaac

SEQ ID NO: 1925915 - RNA, 19 nt, Artificial Sequence
  Description of Artificial Sequence: Synthetic oligonucleotide
agcagugccgacaggccaa

SEQ ID NO: 1925916 - RNA, 19 nt, Artificial Sequence
  Description of Artificial Sequence: Synthetic oligonucleotide
cuuucccuaggucccauau

SEQ ID NO: 1925917 - RNA, 19 nt, Artificial Sequence
  Description of Artificial Sequence: Synthetic oligonucleotide
gacggccaacgugucucag

SEQ ID NO: 1925918 - RNA, 19 nt, Artificial Sequence
  Description of Artificial Sequence: Synthetic oligonucleotide
gagcgcagccaucuugagu

SEQ ID NO: 1925919 - RNA, 19 nt, Artificial Sequence
  Description of Artificial Sequence: Synthetic oligonucleotide
ccauucaacgagugguaca

SEQ ID NO: 1925920 - RNA, 19 nt, Artificial Sequence
  Description of Artificial Sequence: Synthetic oligonucleotide
ccugggagaucgacaggcc

SEQ ID NO: 1925921 - RNA, 19 nt, Artificial Sequence
  Description of Artificial Sequence: Synthetic oligonucleotide
ccaccucucuucucucagg

SEQ ID NO: 1925922 - RNA, 19 nt, Artificial Sequence
  Description of Artificial Sequence: Synthetic oligonucleotide
ccuaggucccauaucaagu

SEQ ID NO: 1925923 - RNA, 19 nt, Artificial Sequence
  Description of Artificial Sequence: Synthetic oligonucleotide
uggggagaaacaggacguu

SEQ ID NO: 1925924 - RNA, 19 nt, Artificial Sequence
  Description of Artificial Sequence: Synthetic oligonucleotide
cucuagcugggcagagcca

SEQ ID NO: 1925925 - RNA, 19 nt, Artificial Sequence
  Description of Artificial Sequence: Synthetic oligonucleotide
ugggcgcuaaaggcccuga

SEQ ID NO: 1925926 - RNA, 19 nt, Artificial Sequence
  Description of Artificial Sequence: Synthetic oligonucleotide
ugccagcccuacagaggac

SEQ ID NO: 1925927 - RNA, 19 nt, Artificial Sequence
  Description of Artificial Sequence: Synthetic oligonucleotide
guaagggcuccaggcccag

SEQ ID NO: 1925928 - RNA, 19 nt, Artificial Sequence
  Description of Artificial Sequence: Synthetic oligonucleotide
cuacuacuacaggucuuca

SEQ ID NO: 1925929 - RNA, 19 nt, Artificial Sequence
  Description of Artificial Sequence: Synthetic oligonucleotide
gguggcaaauggacauuac

SEQ ID NO: 1925930 - RNA, 19 nt, Artificial Sequence
  Description of Artificial Sequence: Synthetic oligonucleotide
aggcccugagcugaccaau

SEQ ID NO: 1925931 - RNA, 19 nt, Artificial Sequence
  Description of Artificial Sequence: Synthetic oligonucleotide
aucaagugucggaucccau

SEQ ID NO: 1925932 - RNA, 19 nt, Artificial Sequence
  Description of Artificial Sequence: Synthetic oligonucleotide
cccagauccaacucgcucu

SEQ ID NO: 1925933 - RNA, 19 nt, Artificial Sequence
  Description of Artificial Sequence: Synthetic oligonucleotide
auagugagguggggagaaa

SEQ ID NO: 1925934 - RNA, 19 nt, Artificial Sequence
  Description of Artificial Sequence: Synthetic oligonucleotide
cccauucaacgagugguac

SEQ ID NO: 1925935 - RNA, 19 nt, Artificial Sequence
  Description of Artificial Sequence: Synthetic oligonucleotide
ggagucgaaagcugacccu

SEQ ID NO: 1925936 - RNA, 19 nt, Artificial Sequence
  Description of Artificial Sequence: Synthetic oligonucleotide
acuggggauaagagugaua

SEQ ID NO: 1925937 - RNA, 19 nt, Artificial Sequence
  Description of Artificial Sequence: Synthetic oligonucleotide
gggcgcuaaaggcccugag

SEQ ID NO: 1925938 - RNA, 19 nt, Artificial Sequence
  Description of Artificial Sequence: Synthetic oligonucleotide
cuuagcugaguggaucaau

SEQ ID NO: 1925939 - RNA, 19 nt, Artificial Sequence
  Description of Artificial Sequence: Synthetic oligonucleotide
cacacugugugggcgcuaa

SEQ ID NO: 1925940 - RNA, 19 nt, Artificial Sequence
  Description of Artificial Sequence: Synthetic oligonucleotide
gacuggggauaagagugau

SEQ ID NO: 1925941 - RNA, 19 nt, Artificial Sequence
  Description of Artificial Sequence: Synthetic oligonucleotide
gcucggaggcaaugacggc

SEQ ID NO: 1925942 - RNA, 19 nt, Artificial Sequence
  Description of Artificial Sequence: Synthetic oligonucleotide
ggggaaccuuggugacugg

SEQ ID NO: 1925943 - RNA, 19 nt, Artificial Sequence
  Description of Artificial Sequence: Synthetic oligonucleotide
ccaacgugucucagcaaga

SEQ ID NO: 1925944 - RNA, 19 nt, Artificial Sequence
  Description of Artificial Sequence: Synthetic oligonucleotide
ccaucaaagcuccaucuau

SEQ ID NO: 1925945 - RNA, 19 nt, Artificial Sequence
  Description of Artificial Sequence: Synthetic oligonucleotide
ggacgaugaugggaauuuc

SEQ ID NO: 1925946 - RNA, 19 nt, Artificial Sequence
  Description of Artificial Sequence: Synthetic oligonucleotide
acgguggcaaauggacauu

SEQ ID NO: 1925947 - RNA, 19 nt, Artificial Sequence
  Description of Artificial Sequence: Synthetic oligonucleotide
gugggcgcuaaaggcccug

SEQ ID NO: 1925948 - RNA, 19 nt, Artificial Sequence
  Description of Artificial Sequence: Synthetic oligonucleotide
gcccugagcugaccaauga

SEQ ID NO: 1925949 - RNA, 19 nt, Artificial Sequence
  Description of Artificial Sequence: Synthetic oligonucleotide
cgcuaaaggcccugagcug

SEQ ID NO: 1925950 - RNA, 19 nt, Artificial Sequence
  Description of Artificial Sequence: Synthetic oligonucleotide
ggcccugagcugaccaaug

SEQ ID NO: 1925951 - RNA, 19 nt, Artificial Sequence
  Description of Artificial Sequence: Synthetic oligonucleotide
gaugggaauuucagcucuu

SEQ ID NO: 1925952 - RNA, 19 nt, Artificial Sequence
  Description of Artificial Sequence: Synthetic oligonucleotide
cacauuggaucuugaucuu

SEQ ID NO: 1925953 - RNA, 19 nt, Artificial Sequence
  Description of Artificial Sequence: Synthetic oligonucleotide
cacauggcugccagcccua

SEQ ID NO: 1925954 - RNA, 19 nt, Artificial Sequence
  Description of Artificial Sequence: Synthetic oligonucleotide
ccaucuugaguuccggccu

SEQ ID NO: 1925955 - RNA, 19 nt, Artificial Sequence
  Description of Artificial Sequence: Synthetic oligonucleotide
gggagaaacaggacguuuu

SEQ ID NO: 1925956 - RNA, 19 nt, Artificial Sequence
  Description of Artificial Sequence: Synthetic oligonucleotide
gcccacaggcaguggcacc

SEQ ID NO: 1925957 - RNA, 19 nt, Artificial Sequence
  Description of Artificial Sequence: Synthetic oligonucleotide
ccacaccagugccacggug

SEQ ID NO: 1925958 - RNA, 19 nt, Artificial Sequence
  Description of Artificial Sequence: Synthetic oligonucleotide
cccugagcugaccaaugaa

SEQ ID NO: 1925959 - RNA, 19 nt, Artificial Sequence
  Description of Artificial Sequence: Synthetic oligonucleotide
cccauaucaagugucggau

SEQ ID NO: 1925960 - RNA, 19 nt, Artificial Sequence
  Description of Artificial Sequence: Synthetic oligonucleotide
agcugacccucagcacaaa

SEQ ID NO: 1925961 - RNA, 19 nt, Artificial Sequence
  Description of Artificial Sequence: Synthetic oligonucleotide
ccucucuacugagcuccag

SEQ ID NO: 1925962 - RNA, 19 nt, Artificial Sequence
  Description of Artificial Sequence: Synthetic oligonucleotide
gcugacccucagcacaaau

SEQ ID NO: 1925963 - RNA, 19 nt, Artificial Sequence
  Description of Artificial Sequence: Synthetic oligonucleotide
cagaaccgcuccaucucuu

SEQ ID NO: 1925964 - RNA, 19 nt, Artificial Sequence
  Description of Artificial Sequence: Synthetic oligonucleotide
gcuccaggcccagggaaaa

SEQ ID NO: 1925965 - RNA, 19 nt, Artificial Sequence
  Description of Artificial Sequence: Synthetic oligonucleotide
ggagaucgacaggccuuuc

SEQ ID NO: 1925966 - RNA, 19 nt, Artificial Sequence
  Description of Artificial Sequence: Synthetic oligonucleotide
ggggagaaacaggacguuu

SEQ ID NO: 1925967 - RNA, 19 nt, Artificial Sequence
  Description of Artificial Sequence: Synthetic oligonucleotide
caggggaaccuuggugacu

SEQ ID NO: 1925968 - RNA, 19 nt, Artificial Sequence
  Description of Artificial Sequence: Synthetic oligonucleotide
gggagaucgacaggccuuu

SEQ ID NO: 1925969 - RNA, 19 nt, Artificial Sequence
  Description of Artificial Sequence: Synthetic oligonucleotide
ccccuccacuuaaggccac

SEQ ID NO: 1925970 - RNA, 19 nt, Artificial Sequence
  Description of Artificial Sequence: Synthetic oligonucleotide
gcagugccgacaggccaaa

SEQ ID NO: 1925971 - RNA, 19 nt, Artificial Sequence
  Description of Artificial Sequence: Synthetic oligonucleotide
gccucucuacugagcucca

SEQ ID NO: 1925972 - RNA, 19 nt, Artificial Sequence
  Description of Artificial Sequence: Synthetic oligonucleotide
ccagauccaacucgcucuu

SEQ ID NO: 1925973 - RNA, 19 nt, Artificial Sequence
  Description of Artificial Sequence: Synthetic oligonucleotide
cggaucccauucaacgagu

SEQ ID NO: 1925974 - RNA, 19 nt, Artificial Sequence
  Description of Artificial Sequence: Synthetic oligonucleotide
gcaagagcgcagccaucuu

SEQ ID NO: 1925975 - RNA, 19 nt, Artificial Sequence
  Description of Artificial Sequence: Synthetic oligonucleotide
cagugccgacaggccaaaa

SEQ ID NO: 1925976 - RNA, 19 nt, Artificial Sequence
  Description of Artificial Sequence: Synthetic oligonucleotide
cccuccacuuaaggccaca

SEQ ID NO: 1925977 - RNA, 19 nt, Artificial Sequence
  Description of Artificial Sequence: Synthetic oligonucleotide
cagauccaacucgcucuuu

SEQ ID NO: 1925978 - RNA, 19 nt, Artificial Sequence
  Description of Artificial Sequence: Synthetic oligonucleotide
gcacacugugugggcgcua

SEQ ID NO: 1925979 - RNA, 19 nt, Artificial Sequence
  Description of Artificial Sequence: Synthetic oligonucleotide
ucuuuaucaacucugaacg

SEQ ID NO: 1925980 - RNA, 19 nt, Artificial Sequence
  Description of Artificial Sequence: Synthetic oligonucleotide
aagaacauagaucacaaca

SEQ ID NO: 1925981 - RNA, 19 nt, Artificial Sequence
  Description of Artificial Sequence: Synthetic oligonucleotide
accagauucacaaugaucc

SEQ ID NO: 1925982 - RNA, 19 nt, Artificial Sequence
  Description of Artificial Sequence: Synthetic oligonucleotide
agaccaaucauccugaaag

SEQ ID NO: 1925983 - RNA, 19 nt, Artificial Sequence
  Description of Artificial Sequence: Synthetic oligonucleotide
uguaauuaugucuucaucu

SEQ ID NO: 1925984 - RNA, 19 nt, Artificial Sequence
  Description of Artificial Sequence: Synthetic oligonucleotide
acaacaauguuccacacag

SEQ ID NO: 1925985 - RNA, 19 nt, Artificial Sequence
  Description of Artificial Sequence: Synthetic oligonucleotide
uuggauuccuuuaucaggg

SEQ ID NO: 1925986 - RNA, 19 nt, Artificial Sequence
  Description of Artificial Sequence: Synthetic oligonucleotide
cauugcguaggaaagaugg

SEQ ID NO: 1925987 - RNA, 19 nt, Artificial Sequence
  Description of Artificial Sequence: Synthetic oligonucleotide
uauuagagcagcaaaguac

SEQ ID NO: 1925988 - RNA, 19 nt, Artificial Sequence
  Description of Artificial Sequence: Synthetic oligonucleotide
ugagguuuuagcaaaguca

SEQ ID NO: 1925989 - RNA, 19 nt, Artificial Sequence
  Description of Artificial Sequence: Synthetic oligonucleotide
uccacaaauacuuugcuga

SEQ ID NO: 1925990 - RNA, 19 nt, Artificial Sequence
  Description of Artificial Sequence: Synthetic oligonucleotide
uuuucauugcguaggaaag

SEQ ID NO: 1925991 - RNA, 19 nt, Artificial Sequence
  Description of Artificial Sequence: Synthetic oligonucleotide
acucugaacgaucugcugc

SEQ ID NO: 1925992 - RNA, 19 nt, Artificial Sequence
  Description of Artificial Sequence: Synthetic oligonucleotide
uuuacugcagugaaggagu

SEQ ID NO: 1925993 - RNA, 19 nt, Artificial Sequence
  Description of Artificial Sequence: Synthetic oligonucleotide
ggaaagauggacuagauga

SEQ ID NO: 1925994 - RNA, 19 nt, Artificial Sequence
  Description of Artificial Sequence: Synthetic oligonucleotide
cuuacuaacaaugggcucg

SEQ ID NO: 1925995 - RNA, 19 nt, Artificial Sequence
  Description of Artificial Sequence: Synthetic oligonucleotide
gaaaacagaccaaucaucc

SEQ ID NO: 1925996 - RNA, 19 nt, Artificial Sequence
  Description of Artificial Sequence: Synthetic oligonucleotide
agucaguccugucaaacgc

SEQ ID NO: 1925997 - RNA, 19 nt, Artificial Sequence
  Description of Artificial Sequence: Synthetic oligonucleotide
agaugauggcuuuucagcg

SEQ ID NO: 1925998 - RNA, 19 nt, Artificial Sequence
  Description of Artificial Sequence: Synthetic oligonucleotide
ugaaaccguacuuagggcc

SEQ ID NO: 1925999 - RNA, 19 nt, Artificial Sequence
  Description of Artificial Sequence: Synthetic oligonucleotide
agaagcuaaagcuguuggc

SEQ ID NO: 1926000 - RNA, 19 nt, Artificial Sequence
  Description of Artificial Sequence: Synthetic oligonucleotide
cuuccaaagaagcaguagc

SEQ ID NO: 1926001 - RNA, 19 nt, Artificial Sequence
  Description of Artificial Sequence: Synthetic oligonucleotide
uguuccacacagcacagcc

SEQ ID NO: 1926002 - RNA, 19 nt, Artificial Sequence
  Description of Artificial Sequence: Synthetic oligonucleotide
gagguuuuagcaaagucag

SEQ ID NO: 1926003 - RNA, 19 nt, Artificial Sequence
  Description of Artificial Sequence: Synthetic oligonucleotide
aagcuaaagcuguuggcuc

SEQ ID NO: 1926004 - RNA, 19 nt, Artificial Sequence
  Description of Artificial Sequence: Synthetic oligonucleotide
ucaucuucuaccccuaacu

SEQ ID NO: 1926005 - RNA, 19 nt, Artificial Sequence
  Description of Artificial Sequence: Synthetic oligonucleotide
auagaucacaacaauguuc

SEQ ID NO: 1926006 - RNA, 19 nt, Artificial Sequence
  Description of Artificial Sequence: Synthetic oligonucleotide
auuuucauugcguaggaaa

SEQ ID NO: 1926007 - RNA, 19 nt, Artificial Sequence
  Description of Artificial Sequence: Synthetic oligonucleotide
ucuguggucuuuaucaacu

SEQ ID NO: 1926008 - RNA, 19 nt, Artificial Sequence
  Description of Artificial Sequence: Synthetic oligonucleotide
gaaaggguaugccaagugc

SEQ ID NO: 1926009 - RNA, 19 nt, Artificial Sequence
  Description of Artificial Sequence: Synthetic oligonucleotide
accacuuacuaacaauggg

SEQ ID NO: 1926010 - RNA, 19 nt, Artificial Sequence
  Description of Artificial Sequence: Synthetic oligonucleotide
aaagguggauccuaucacu

SEQ ID NO: 1926011 - RNA, 19 nt, Artificial Sequence
  Description of Artificial Sequence: Synthetic oligonucleotide
agcuaaagcuguuggcucc

SEQ ID NO: 1926012 - RNA, 19 nt, Artificial Sequence
  Description of Artificial Sequence: Synthetic oligonucleotide
ucuccgaccacuuacuaac

SEQ ID NO: 1926013 - RNA, 19 nt, Artificial Sequence
  Description of Artificial Sequence: Synthetic oligonucleotide
ucugcugcgugaaaucucc

SEQ ID NO: 1926014 - RNA, 19 nt, Artificial Sequence
  Description of Artificial Sequence: Synthetic oligonucleotide
agcacagccagccaagaag

SEQ ID NO: 1926015 - RNA, 19 nt, Artificial Sequence
  Description of Artificial Sequence: Synthetic oligonucleotide
agauggacuagaugauggc

SEQ ID NO: 1926016 - RNA, 19 nt, Artificial Sequence
  Description of Artificial Sequence: Synthetic oligonucleotide
agagcagcaaaguacaaaa

SEQ ID NO: 1926017 - RNA, 19 nt, Artificial Sequence
  Description of Artificial Sequence: Synthetic oligonucleotide
gauccuaucacuugucauc

SEQ ID NO: 1926018 - RNA, 19 nt, Artificial Sequence
  Description of Artificial Sequence: Synthetic oligonucleotide
uaaagguggauccuaucac

SEQ ID NO: 1926019 - RNA, 19 nt, Artificial Sequence
  Description of Artificial Sequence: Synthetic oligonucleotide
uaugccaagugcuuguacu

SEQ ID NO: 1926020 - RNA, 19 nt, Artificial Sequence
  Description of Artificial Sequence: Synthetic oligonucleotide
aaaacagaccaaucauccu

SEQ ID NO: 1926021 - RNA, 19 nt, Artificial Sequence
  Description of Artificial Sequence: Synthetic oligonucleotide
acauagaucacaacaaugu

SEQ ID NO: 1926022 - RNA, 19 nt, Artificial Sequence
  Description of Artificial Sequence: Synthetic oligonucleotide
cauccugaaagcucggugc

SEQ ID NO: 1926023 - RNA, 19 nt, Artificial Sequence
  Description of Artificial Sequence: Synthetic oligonucleotide
aacauuagcucuucacuaa

SEQ ID NO: 1926024 - RNA, 19 nt, Artificial Sequence
  Description of Artificial Sequence: Synthetic oligonucleotide
caguauuagagcagcaaag

SEQ ID NO: 1926025 - RNA, 19 nt, Artificial Sequence
  Description of Artificial Sequence: Synthetic oligonucleotide
uccaucgacacaucuaugu

SEQ ID NO: 1926026 - RNA, 19 nt, Artificial Sequence
  Description of Artificial Sequence: Synthetic oligonucleotide
aucagcauacuguagcucu

SEQ ID NO: 1926027 - RNA, 19 nt, Artificial Sequence
  Description of Artificial Sequence: Synthetic oligonucleotide
cuaagauccacggauggcc

SEQ ID NO: 1926028 - RNA, 19 nt, Artificial Sequence
  Description of Artificial Sequence: Synthetic oligonucleotide
uuccggauagcuacugagg

SEQ ID NO: 1926029 - RNA, 19 nt, Artificial Sequence
  Description of Artificial Sequence: Synthetic oligonucleotide
aagccgugagaaaacagac

SEQ ID NO: 1926030 - RNA, 19 nt, Artificial Sequence
  Description of Artificial Sequence: Synthetic oligonucleotide
uguccaucgacacaucuau

SEQ ID NO: 1926031 - RNA, 19 nt, Artificial Sequence
  Description of Artificial Sequence: Synthetic oligonucleotide
uccuuuaucaggguacucc

SEQ ID NO: 1926032 - RNA, 19 nt, Artificial Sequence
  Description of Artificial Sequence: Synthetic oligonucleotide
aguggggaaaugcaggucu

SEQ ID NO: 1926033 - RNA, 19 nt, Artificial Sequence
  Description of Artificial Sequence: Synthetic oligonucleotide
gaaugacugccucugccgg

SEQ ID NO: 1926034 - RNA, 19 nt, Artificial Sequence
  Description of Artificial Sequence: Synthetic oligonucleotide
agcgaaggaagucuccaac

SEQ ID NO: 1926035 - RNA, 19 nt, Artificial Sequence
  Description of Artificial Sequence: Synthetic oligonucleotide
aaagauggacuagaugaug

SEQ ID NO: 1926036 - RNA, 19 nt, Artificial Sequence
  Description of Artificial Sequence: Synthetic oligonucleotide
uaucaacucugaacgaucu

SEQ ID NO: 1926037 - RNA, 19 nt, Artificial Sequence
  Description of Artificial Sequence: Synthetic oligonucleotide
uuuucagcgaaggaagucu

SEQ ID NO: 1926038 - RNA, 19 nt, Artificial Sequence
  Description of Artificial Sequence: Synthetic oligonucleotide
gguuggagaggucagacag

SEQ ID NO: 1926039 - RNA, 19 nt, Artificial Sequence
  Description of Artificial Sequence: Synthetic oligonucleotide
uuaucaacucugaacgauc

SEQ ID NO: 1926040 - RNA, 19 nt, Artificial Sequence
  Description of Artificial Sequence: Synthetic oligonucleotide
uccugucaaacgcugaaac

SEQ ID NO: 1926041 - RNA, 19 nt, Artificial Sequence
  Description of Artificial Sequence: Synthetic oligonucleotide
cuuuacugcagugaaggag

SEQ ID NO: 1926042 - RNA, 19 nt, Artificial Sequence
  Description of Artificial Sequence: Synthetic oligonucleotide
aaaggguaugccaagugcu

SEQ ID NO: 1926043 - RNA, 19 nt, Artificial Sequence
  Description of Artificial Sequence: Synthetic oligonucleotide
acuuacuaacaaugggcuc

SEQ ID NO: 1926044 - RNA, 19 nt, Artificial Sequence
  Description of Artificial Sequence: Synthetic oligonucleotide
gauuccuuuaucaggguac

SEQ ID NO: 1926045 - RNA, 19 nt, Artificial Sequence
  Description of Artificial Sequence: Synthetic oligonucleotide
ucauccugaaagcucggug

SEQ ID NO: 1926046 - RNA, 19 nt, Artificial Sequence
  Description of Artificial Sequence: Synthetic oligonucleotide
aaugauccauggcuggaga

SEQ ID NO: 1926047 - RNA, 19 nt, Artificial Sequence
  Description of Artificial Sequence: Synthetic oligonucleotide
auuagagcagcaaaguaca

SEQ ID NO: 1926048 - RNA, 19 nt, Artificial Sequence
  Description of Artificial Sequence: Synthetic oligonucleotide
gauggcuuuucagcgaagg

SEQ ID NO: 1926049 - RNA, 19 nt, Artificial Sequence
  Description of Artificial Sequence: Synthetic oligonucleotide
uaacagacggugcguaaag

SEQ ID NO: 1926050 - RNA, 19 nt, Artificial Sequence
  Description of Artificial Sequence: Synthetic oligonucleotide
acaguauuagagcagcaaa

SEQ ID NO: 1926051 - RNA, 19 nt, Artificial Sequence
  Description of Artificial Sequence: Synthetic oligonucleotide
uccggauagcuacugaggu

SEQ ID NO: 1926052 - RNA, 19 nt, Artificial Sequence
  Description of Artificial Sequence: Synthetic oligonucleotide
ugcguaggaaagauggacu

SEQ ID NO: 1926053 - RNA, 19 nt, Artificial Sequence
  Description of Artificial Sequence: Synthetic oligonucleotide
gguggcuccacauugacac

SEQ ID NO: 1926054 - RNA, 19 nt, Artificial Sequence
  Description of Artificial Sequence: Synthetic oligonucleotide
ugaacgaucugcugcguga

SEQ ID NO: 1926055 - RNA, 19 nt, Artificial Sequence
  Description of Artificial Sequence: Synthetic oligonucleotide
aguauuagagcagcaaagu

SEQ ID NO: 1926056 - RNA, 19 nt, Artificial Sequence
  Description of Artificial Sequence: Synthetic oligonucleotide
acugaaagcgccacauccc

SEQ ID NO: 1926057 - RNA, 19 nt, Artificial Sequence
  Description of Artificial Sequence: Synthetic oligonucleotide
acuaagauccacggauggc

SEQ ID NO: 1926058 - RNA, 19 nt, Artificial Sequence
  Description of Artificial Sequence: Synthetic oligonucleotide
caagaguggggaaaugcag

SEQ ID NO: 1926059 - RNA, 19 nt, Artificial Sequence
  Description of Artificial Sequence: Synthetic oligonucleotide
gaucacaacaauguuccac

SEQ ID NO: 1926060 - RNA, 19 nt, Artificial Sequence
  Description of Artificial Sequence: Synthetic oligonucleotide
guacuuagggccaaaagca

SEQ ID NO: 1926061 - RNA, 19 nt, Artificial Sequence
  Description of Artificial Sequence: Synthetic oligonucleotide
acuaugaggaugcuuggau

SEQ ID NO: 1926062 - RNA, 19 nt, Artificial Sequence
  Description of Artificial Sequence: Synthetic oligonucleotide
ugacaggcuggcuaauucc

SEQ ID NO: 1926063 - RNA, 19 nt, Artificial Sequence
  Description of Artificial Sequence: Synthetic oligonucleotide
cugaaagcgccacaucccg

SEQ ID NO: 1926064 - RNA, 19 nt, Artificial Sequence
  Description of Artificial Sequence: Synthetic oligonucleotide
gaccacuuacuaacaaugg

SEQ ID NO: 1926065 - RNA, 19 nt, Artificial Sequence
  Description of Artificial Sequence: Synthetic oligonucleotide
uccacggauggccuguaag

SEQ ID NO: 1926066 - RNA, 19 nt, Artificial Sequence
  Description of Artificial Sequence: Synthetic oligonucleotide
guuccggauagcuacugag

SEQ ID NO: 1926067 - RNA, 19 nt, Artificial Sequence
  Description of Artificial Sequence: Synthetic oligonucleotide
gaacauuagcucuucacua

SEQ ID NO: 1926068 - RNA, 19 nt, Artificial Sequence
  Description of Artificial Sequence: Synthetic oligonucleotide
cagagccuuccaaagaagc

SEQ ID NO: 1926069 - RNA, 19 nt, Artificial Sequence
  Description of Artificial Sequence: Synthetic oligonucleotide
gaccaaucauccugaaagc

SEQ ID NO: 1926070 - RNA, 19 nt, Artificial Sequence
  Description of Artificial Sequence: Synthetic oligonucleotide
ugcugcgugaaaucuccgg

SEQ ID NO: 1926071 - RNA, 19 nt, Artificial Sequence
  Description of Artificial Sequence: Synthetic oligonucleotide
ucacuugucaucugcugac

SEQ ID NO: 1926072 - RNA, 19 nt, Artificial Sequence
  Description of Artificial Sequence: Synthetic oligonucleotide
uaccccuaacucaucagca

SEQ ID NO: 1926073 - RNA, 19 nt, Artificial Sequence
  Description of Artificial Sequence: Synthetic oligonucleotide
ucaaacgcugaaaccguac

SEQ ID NO: 1926074 - RNA, 19 nt, Artificial Sequence
  Description of Artificial Sequence: Synthetic oligonucleotide
ccacuuacuaacaaugggc

SEQ ID NO: 1926075 - RNA, 19 nt, Artificial Sequence
  Description of Artificial Sequence: Synthetic oligonucleotide
cacuaagauccacggaugg

SEQ ID NO: 1926076 - RNA, 19 nt, Artificial Sequence
  Description of Artificial Sequence: Synthetic oligonucleotide
uacuccucaacaucagaga

SEQ ID NO: 1926077 - RNA, 19 nt, Artificial Sequence
  Description of Artificial Sequence: Synthetic oligonucleotide
auagcuacugagguuuuag

SEQ ID NO: 1926078 - RNA, 19 nt, Artificial Sequence
  Description of Artificial Sequence: Synthetic oligonucleotide
agaacauagaucacaacaa

SEQ ID NO: 1926079 - RNA, 19 nt, Artificial Sequence
  Description of Artificial Sequence: Synthetic oligonucleotide
guacuccucaacaucagag

SEQ ID NO: 1926080 - RNA, 19 nt, Artificial Sequence
  Description of Artificial Sequence: Synthetic oligonucleotide
aggaaagauggacuagaug

SEQ ID NO: 1926081 - RNA, 19 nt, Artificial Sequence
  Description of Artificial Sequence: Synthetic oligonucleotide
guuggcacuaugaggaugc

SEQ ID NO: 1926082 - RNA, 19 nt, Artificial Sequence
  Description of Artificial Sequence: Synthetic oligonucleotide
cuaccccuaacucaucagc

SEQ ID NO: 1926083 - RNA, 19 nt, Artificial Sequence
  Description of Artificial Sequence: Synthetic oligonucleotide
ggugcguaaagguggaucc

SEQ ID NO: 1926084 - RNA, 19 nt, Artificial Sequence
  Description of Artificial Sequence: Synthetic oligonucleotide
aacagacggugcguaaagg

SEQ ID NO: 1926085 - RNA, 19 nt, Artificial Sequence
  Description of Artificial Sequence: Synthetic oligonucleotide
acagacggugcguaaaggu

SEQ ID NO: 1926086 - RNA, 19 nt, Artificial Sequence
  Description of Artificial Sequence: Synthetic oligonucleotide
gaaaccgcuccucaauuuc

SEQ ID NO: 1926087 - RNA, 19 nt, Artificial Sequence
  Description of Artificial Sequence: Synthetic oligonucleotide
cucaauuucugcugcccag

SEQ ID NO: 1926088 - RNA, 19 nt, Artificial Sequence
  Description of Artificial Sequence: Synthetic oligonucleotide
ggcacuaugaggaugcuug

SEQ ID NO: 1926089 - RNA, 19 nt, Artificial Sequence
  Description of Artificial Sequence: Synthetic oligonucleotide
ugaaggaguuggcacuaug

SEQ ID NO: 1926090 - RNA, 19 nt, Artificial Sequence
  Description of Artificial Sequence: Synthetic oligonucleotide
gccaggauaauccaaccag

SEQ ID NO: 1926091 - RNA, 19 nt, Artificial Sequence
  Description of Artificial Sequence: Synthetic oligonucleotide
gaagccgugagaaaacaga

SEQ ID NO: 1926092 - RNA, 19 nt, Artificial Sequence
  Description of Artificial Sequence: Synthetic oligonucleotide
agacggugcguaaaggugg

SEQ ID NO: 1926093 - RNA, 19 nt, Artificial Sequence
  Description of Artificial Sequence: Synthetic oligonucleotide
cugaaaccguacuuagggc

SEQ ID NO: 1926094 - RNA, 19 nt, Artificial Sequence
  Description of Artificial Sequence: Synthetic oligonucleotide
aacagaccaaucauccuga

SEQ ID NO: 1926095 - RNA, 19 nt, Artificial Sequence
  Description of Artificial Sequence: Synthetic oligonucleotide
ucccauuaacagacggugc

SEQ ID NO: 1926096 - RNA, 19 nt, Artificial Sequence
  Description of Artificial Sequence: Synthetic oligonucleotide
cccgcaagaacauagauca

SEQ ID NO: 1926097 - RNA, 19 nt, Artificial Sequence
  Description of Artificial Sequence: Synthetic oligonucleotide
ggaguuggcacuaugagga

SEQ ID NO: 1926098 - RNA, 19 nt, Artificial Sequence
  Description of Artificial Sequence: Synthetic oligonucleotide
uugcguaggaaagauggac

SEQ ID NO: 1926099 - RNA, 19 nt, Artificial Sequence
  Description of Artificial Sequence: Synthetic oligonucleotide
agauucacaaugauccaug

SEQ ID NO: 1926100 - RNA, 19 nt, Artificial Sequence
  Description of Artificial Sequence: Synthetic oligonucleotide
uuucauugcguaggaaaga

SEQ ID NO: 1926101 - RNA, 19 nt, Artificial Sequence
  Description of Artificial Sequence: Synthetic oligonucleotide
ucauugcguaggaaagaug

SEQ ID NO: 1926102 - RNA, 19 nt, Artificial Sequence
  Description of Artificial Sequence: Synthetic oligonucleotide
aaacgcugaaaccguacuu

SEQ ID NO: 1926103 - RNA, 19 nt, Artificial Sequence
  Description of Artificial Sequence: Synthetic oligonucleotide
caagaagccgugagaaaac

SEQ ID NO: 1926104 - RNA, 19 nt, Artificial Sequence
  Description of Artificial Sequence: Synthetic oligonucleotide
aacgcugaaaccguacuua

SEQ ID NO: 1926105 - RNA, 19 nt, Artificial Sequence
  Description of Artificial Sequence: Synthetic oligonucleotide
aaugacugccucugccggu

SEQ ID NO: 1926106 - RNA, 19 nt, Artificial Sequence
  Description of Artificial Sequence: Synthetic oligonucleotide
ugacucagagacaguauua

SEQ ID NO: 1926107 - RNA, 19 nt, Artificial Sequence
  Description of Artificial Sequence: Synthetic oligonucleotide
ucagcauacuguagcucug

SEQ ID NO: 1926108 - RNA, 19 nt, Artificial Sequence
  Description of Artificial Sequence: Synthetic oligonucleotide
gagaaaacagaccaaucau

SEQ ID NO: 1926109 - RNA, 19 nt, Artificial Sequence
  Description of Artificial Sequence: Synthetic oligonucleotide
agcgccacaucccgggugg

SEQ ID NO: 1926110 - RNA, 19 nt, Artificial Sequence
  Description of Artificial Sequence: Synthetic oligonucleotide
gaagcuaaagcuguuggcu

SEQ ID NO: 1926111 - RNA, 19 nt, Artificial Sequence
  Description of Artificial Sequence: Synthetic oligonucleotide
uucauugcguaggaaagau

SEQ ID NO: 1926112 - RNA, 19 nt, Artificial Sequence
  Description of Artificial Sequence: Synthetic oligonucleotide
cuggagugcugcucuaggg

SEQ ID NO: 1926113 - RNA, 19 nt, Artificial Sequence
  Description of Artificial Sequence: Synthetic oligonucleotide
ugaacaggagccucuggau

SEQ ID NO: 1926114 - RNA, 19 nt, Artificial Sequence
  Description of Artificial Sequence: Synthetic oligonucleotide
cugagguuuuagcaaaguc

SEQ ID NO: 1926115 - RNA, 19 nt, Artificial Sequence
  Description of Artificial Sequence: Synthetic oligonucleotide
uucuuggccuuccuucgug

SEQ ID NO: 1926116 - RNA, 19 nt, Artificial Sequence
  Description of Artificial Sequence: Synthetic oligonucleotide
cagacggugcguaaaggug

SEQ ID NO: 1926117 - RNA, 19 nt, Artificial Sequence
  Description of Artificial Sequence: Synthetic oligonucleotide
uuucagcgaaggaagucuc

SEQ ID NO: 1926118 - RNA, 19 nt, Artificial Sequence
  Description of Artificial Sequence: Synthetic oligonucleotide
caaauacuuugcugacagg

SEQ ID NO: 1926119 - RNA, 19 nt, Artificial Sequence
  Description of Artificial Sequence: Synthetic oligonucleotide
aagaagccgugagaaaaca

SEQ ID NO: 1926120 - RNA, 19 nt, Artificial Sequence
  Description of Artificial Sequence: Synthetic oligonucleotide
aggucuuuacugcagugaa

SEQ ID NO: 1926121 - RNA, 19 nt, Artificial Sequence
  Description of Artificial Sequence: Synthetic oligonucleotide
uagcuacugagguuuuagc

SEQ ID NO: 1926122 - RNA, 19 nt, Artificial Sequence
  Description of Artificial Sequence: Synthetic oligonucleotide
uuaacagacggugcguaaa

SEQ ID NO: 1926123 - RNA, 19 nt, Artificial Sequence
  Description of Artificial Sequence: Synthetic oligonucleotide
ucuuuacugcagugaagga

SEQ ID NO: 1926124 - RNA, 19 nt, Artificial Sequence
  Description of Artificial Sequence: Synthetic oligonucleotide
acgcugaaaccguacuuag

SEQ ID NO: 1926125 - RNA, 19 nt, Artificial Sequence
  Description of Artificial Sequence: Synthetic oligonucleotide
aagauccacggauggccug

SEQ ID NO: 1926126 - RNA, 19 nt, Artificial Sequence
  Description of Artificial Sequence: Synthetic oligonucleotide
aggauaauccaaccagaaa

SEQ ID NO: 1926127 - RNA, 19 nt, Artificial Sequence
  Description of Artificial Sequence: Synthetic oligonucleotide
gacaggcuggcuaauuccc

SEQ ID NO: 1926128 - RNA, 19 nt, Artificial Sequence
  Description of Artificial Sequence: Synthetic oligonucleotide
augcuuggauuccuuuauc

SEQ ID NO: 1926129 - RNA, 19 nt, Artificial Sequence
  Description of Artificial Sequence: Synthetic oligonucleotide
uaggaaagauggacuagau

SEQ ID NO: 1926130 - RNA, 19 nt, Artificial Sequence
  Description of Artificial Sequence: Synthetic oligonucleotide
uaucaggguacuccucaac

SEQ ID NO: 1926131 - RNA, 19 nt, Artificial Sequence
  Description of Artificial Sequence: Synthetic oligonucleotide
caccauuuucauugcguag

SEQ ID NO: 1926132 - RNA, 19 nt, Artificial Sequence
  Description of Artificial Sequence: Synthetic oligonucleotide
ugccgguggcuccacauug

SEQ ID NO: 1926133 - RNA, 19 nt, Artificial Sequence
  Description of Artificial Sequence: Synthetic oligonucleotide
cccauuaacagacggugcg

SEQ ID NO: 1926134 - RNA, 19 nt, Artificial Sequence
  Description of Artificial Sequence: Synthetic oligonucleotide
uggcuaauucccgugggug

SEQ ID NO: 1926135 - RNA, 19 nt, Artificial Sequence
  Description of Artificial Sequence: Synthetic oligonucleotide
guaggaaagauggacuaga

SEQ ID NO: 1926136 - RNA, 19 nt, Artificial Sequence
  Description of Artificial Sequence: Synthetic oligonucleotide
acaccauuuucauugcgua

SEQ ID NO: 1926137 - RNA, 19 nt, Artificial Sequence
  Description of Artificial Sequence: Synthetic oligonucleotide
uacgcugcucaucuguaau

SEQ ID NO: 1926138 - RNA, 19 nt, Artificial Sequence
  Description of Artificial Sequence: Synthetic oligonucleotide
cuggaaaggguaugccaag

SEQ ID NO: 1926139 - RNA, 19 nt, Artificial Sequence
  Description of Artificial Sequence: Synthetic oligonucleotide
ucucccgcaagaacauaga

SEQ ID NO: 1926140 - RNA, 19 nt, Artificial Sequence
  Description of Artificial Sequence: Synthetic oligonucleotide
gaaagcucggugcacugaa

SEQ ID NO: 1926141 - RNA, 19 nt, Artificial Sequence
  Description of Artificial Sequence: Synthetic oligonucleotide
aucucccgcaagaacauag

SEQ ID NO: 1926142 - RNA, 19 nt, Artificial Sequence
  Description of Artificial Sequence: Synthetic oligonucleotide
auuaacagacggugcguaa

SEQ ID NO: 1926143 - RNA, 19 nt, Artificial Sequence
  Description of Artificial Sequence: Synthetic oligonucleotide
ucgugguuuuggaaugacu

SEQ ID NO: 1926144 - RNA, 19 nt, Artificial Sequence
  Description of Artificial Sequence: Synthetic oligonucleotide
ucggugcacugaaagcgcc

SEQ ID NO: 1926145 - RNA, 19 nt, Artificial Sequence
  Description of Artificial Sequence: Synthetic oligonucleotide
agccaggauaauccaacca

SEQ ID NO: 1926146 - RNA, 19 nt, Artificial Sequence
  Description of Artificial Sequence: Synthetic oligonucleotide
ugcacugaaagcgccacau

SEQ ID NO: 1926147 - RNA, 19 nt, Artificial Sequence
  Description of Artificial Sequence: Synthetic oligonucleotide
guauuagagcagcaaagua

SEQ ID NO: 1926148 - RNA, 19 nt, Artificial Sequence
  Description of Artificial Sequence: Synthetic oligonucleotide
aaucauccugaaagcucgg

SEQ ID NO: 1926149 - RNA, 19 nt, Artificial Sequence
  Description of Artificial Sequence: Synthetic oligonucleotide
accaaucauccugaaagcu

SEQ ID NO: 1926150 - RNA, 19 nt, Artificial Sequence
  Description of Artificial Sequence: Synthetic oligonucleotide
agguggauccuaucacuug

SEQ ID NO: 1926151 - RNA, 19 nt, Artificial Sequence
  Description of Artificial Sequence: Synthetic oligonucleotide
guuuuggaaugacugccuc

SEQ ID NO: 1926152 - RNA, 19 nt, Artificial Sequence
  Description of Artificial Sequence: Synthetic oligonucleotide
auccugaaagcucggugca

SEQ ID NO: 1926153 - RNA, 19 nt, Artificial Sequence
  Description of Artificial Sequence: Synthetic oligonucleotide
aguccugucaaacgcugaa

SEQ ID NO: 1926154 - RNA, 19 nt, Artificial Sequence
  Description of Artificial Sequence: Synthetic oligonucleotide
aucaacucugaacgaucug

SEQ ID NO: 1926155 - RNA, 19 nt, Artificial Sequence
  Description of Artificial Sequence: Synthetic oligonucleotide
aaaccgcuccucaauuucu

SEQ ID NO: 1926156 - RNA, 19 nt, Artificial Sequence
  Description of Artificial Sequence: Synthetic oligonucleotide
cuuuaucaacucugaacga

SEQ ID NO: 1926157 - RNA, 19 nt, Artificial Sequence
  Description of Artificial Sequence: Synthetic oligonucleotide
cuacugagguuuuagcaaa

SEQ ID NO: 1926158 - RNA, 19 nt, Artificial Sequence
  Description of Artificial Sequence: Synthetic oligonucleotide
ugcucuccgaccacuuacu

SEQ ID NO: 1926159 - RNA, 19 nt, Artificial Sequence
  Description of Artificial Sequence: Synthetic oligonucleotide
cuggauacuccuugagauc

SEQ ID NO: 1926160 - RNA, 19 nt, Artificial Sequence
  Description of Artificial Sequence: Synthetic oligonucleotide
gaugcuuggauuccuuuau

SEQ ID NO: 1926161 - RNA, 19 nt, Artificial Sequence
  Description of Artificial Sequence: Synthetic oligonucleotide
ugauccauggcuggagaaa

SEQ ID NO: 1926162 - RNA, 19 nt, Artificial Sequence
  Description of Artificial Sequence: Synthetic oligonucleotide
gaaaggggccaccaccaga

SEQ ID NO: 1926163 - RNA, 19 nt, Artificial Sequence
  Description of Artificial Sequence: Synthetic oligonucleotide
gacuagaugauggcuuuuc

SEQ ID NO: 1926164 - RNA, 19 nt, Artificial Sequence
  Description of Artificial Sequence: Synthetic oligonucleotide
cuuuucagcgaaggaaguc

SEQ ID NO: 1926165 - RNA, 19 nt, Artificial Sequence
  Description of Artificial Sequence: Synthetic oligonucleotide
uuaucaggguacuccucaa

SEQ ID NO: 1926166 - RNA, 19 nt, Artificial Sequence
  Description of Artificial Sequence: Synthetic oligonucleotide
uccgaccacuuacuaacaa

SEQ ID NO: 1926167 - RNA, 19 nt, Artificial Sequence
  Description of Artificial Sequence: Synthetic oligonucleotide
cacuuacuaacaaugggcu

SEQ ID NO: 1926168 - RNA, 19 nt, Artificial Sequence
  Description of Artificial Sequence: Synthetic oligonucleotide
agaagguuggagaggucag

SEQ ID NO: 1926169 - RNA, 19 nt, Artificial Sequence
  Description of Artificial Sequence: Synthetic oligonucleotide
uugagaucugcagcuggug

SEQ ID NO: 1926170 - RNA, 19 nt, Artificial Sequence
  Description of Artificial Sequence: Synthetic oligonucleotide
cuggcugcguuuucuuggc

SEQ ID NO: 1926171 - RNA, 19 nt, Artificial Sequence
  Description of Artificial Sequence: Synthetic oligonucleotide
auuccuuuaucaggguacu

SEQ ID NO: 1926172 - RNA, 19 nt, Artificial Sequence
  Description of Artificial Sequence: Synthetic oligonucleotide
aaaagaagcuaaagcuguu

SEQ ID NO: 1926173 - RNA, 19 nt, Artificial Sequence
  Description of Artificial Sequence: Synthetic oligonucleotide
ugcgugaaaucuccggcuu

SEQ ID NO: 1926174 - RNA, 19 nt, Artificial Sequence
  Description of Artificial Sequence: Synthetic oligonucleotide
agccaagaagccgugagaa

SEQ ID NO: 1926175 - RNA, 19 nt, Artificial Sequence
  Description of Artificial Sequence: Synthetic oligonucleotide
aaguuccggauagcuacug

SEQ ID NO: 1926176 - RNA, 19 nt, Artificial Sequence
  Description of Artificial Sequence: Synthetic oligonucleotide
aaaguuccggauagcuacu

SEQ ID NO: 1926177 - RNA, 19 nt, Artificial Sequence
  Description of Artificial Sequence: Synthetic oligonucleotide
caggguacuccucaacauc

SEQ ID NO: 1926178 - RNA, 19 nt, Artificial Sequence
  Description of Artificial Sequence: Synthetic oligonucleotide
ggcucccauuaacagacgg

SEQ ID NO: 1926179 - RNA, 19 nt, Artificial Sequence
  Description of Artificial Sequence: Synthetic oligonucleotide
gcuacugagguuuuagcaa

SEQ ID NO: 1926180 - RNA, 19 nt, Artificial Sequence
  Description of Artificial Sequence: Synthetic oligonucleotide
ugauggcuuuucagcgaag

SEQ ID NO: 1926181 - RNA, 19 nt, Artificial Sequence
  Description of Artificial Sequence: Synthetic oligonucleotide
gcugcgugaaaucuccggc

SEQ ID NO: 1926182 - RNA, 19 nt, Artificial Sequence
  Description of Artificial Sequence: Synthetic oligonucleotide
cauuagcucuucacuaaga

SEQ ID NO: 1926183 - RNA, 19 nt, Artificial Sequence
  Description of Artificial Sequence: Synthetic oligonucleotide
uggagaaaccgcuccucaa

SEQ ID NO: 1926184 - RNA, 19 nt, Artificial Sequence
  Description of Artificial Sequence: Synthetic oligonucleotide
agaaaccgcuccucaauuu

SEQ ID NO: 1926185 - RNA, 19 nt, Artificial Sequence
  Description of Artificial Sequence: Synthetic oligonucleotide
ggcuaauucccgugggugc

SEQ ID NO: 1926186 - RNA, 19 nt, Artificial Sequence
  Description of Artificial Sequence: Synthetic oligonucleotide
uggaaaggguaugccaagu

SEQ ID NO: 1926187 - RNA, 19 nt, Artificial Sequence
  Description of Artificial Sequence: Synthetic oligonucleotide
caggauaauccaaccagaa

SEQ ID NO: 1926188 - RNA, 19 nt, Artificial Sequence
  Description of Artificial Sequence: Synthetic oligonucleotide
agugcugcucuaggguacg

SEQ ID NO: 1926189 - RNA, 19 nt, Artificial Sequence
  Description of Artificial Sequence: Synthetic oligonucleotide
uggcuucauguccaucgac

SEQ ID NO: 1926190 - RNA, 19 nt, Artificial Sequence
  Description of Artificial Sequence: Synthetic oligonucleotide
ugaaagcucggugcacuga

SEQ ID NO: 1926191 - RNA, 19 nt, Artificial Sequence
  Description of Artificial Sequence: Synthetic oligonucleotide
aguuccggauagcuacuga

SEQ ID NO: 1926192 - RNA, 19 nt, Artificial Sequence
  Description of Artificial Sequence: Synthetic oligonucleotide
auccauggcuggagaaacc

SEQ ID NO: 1926193 - RNA, 19 nt, Artificial Sequence
  Description of Artificial Sequence: Synthetic oligonucleotide
agcauacuguagcucugcu

SEQ ID NO: 1926194 - RNA, 19 nt, Artificial Sequence
  Description of Artificial Sequence: Synthetic oligonucleotide
acaaugauccauggcugga

SEQ ID NO: 1926195 - RNA, 19 nt, Artificial Sequence
  Description of Artificial Sequence: Synthetic oligonucleotide
cugaaagcucggugcacug

SEQ ID NO: 1926196 - RNA, 19 nt, Artificial Sequence
  Description of Artificial Sequence: Synthetic oligonucleotide
cugaacgaucugcugcgug

SEQ ID NO: 1926197 - RNA, 19 nt, Artificial Sequence
  Description of Artificial Sequence: Synthetic oligonucleotide
aggguaugccaagugcuug

SEQ ID NO: 1926198 - RNA, 19 nt, Artificial Sequence
  Description of Artificial Sequence: Synthetic oligonucleotide
aaccgcuccucaauuucug

SEQ ID NO: 1926199 - RNA, 19 nt, Artificial Sequence
  Description of Artificial Sequence: Synthetic oligonucleotide
gaggucagacagcucaucu

SEQ ID NO: 1926200 - RNA, 19 nt, Artificial Sequence
  Description of Artificial Sequence: Synthetic oligonucleotide
cgaccacuuacuaacaaug

SEQ ID NO: 1926201 - RNA, 19 nt, Artificial Sequence
  Description of Artificial Sequence: Synthetic oligonucleotide
cacggauggccuguaagac

SEQ ID NO: 1926202 - RNA, 19 nt, Artificial Sequence
  Description of Artificial Sequence: Synthetic oligonucleotide
ugcguaaagguggauccua

SEQ ID NO: 1926203 - RNA, 19 nt, Artificial Sequence
  Description of Artificial Sequence: Synthetic oligonucleotide
gugagaaaacagaccaauc

SEQ ID NO: 1926204 - RNA, 19 nt, Artificial Sequence
  Description of Artificial Sequence: Synthetic oligonucleotide
ucugccgguggcuccacau

SEQ ID NO: 1926205 - RNA, 19 nt, Artificial Sequence
  Description of Artificial Sequence: Synthetic oligonucleotide
ucuaggguacgcugcucau

SEQ ID NO: 1926206 - RNA, 19 nt, Artificial Sequence
  Description of Artificial Sequence: Synthetic oligonucleotide
cuuccuucgugguuuugga

SEQ ID NO: 1926207 - RNA, 19 nt, Artificial Sequence
  Description of Artificial Sequence: Synthetic oligonucleotide
cucuaggguacgcugcuca

SEQ ID NO: 1926208 - RNA, 19 nt, Artificial Sequence
  Description of Artificial Sequence: Synthetic oligonucleotide
ugacugccucugccggugg

SEQ ID NO: 1926209 - RNA, 19 nt, Artificial Sequence
  Description of Artificial Sequence: Synthetic oligonucleotide
agaucacaacaauguucca

SEQ ID NO: 1926210 - RNA, 19 nt, Artificial Sequence
  Description of Artificial Sequence: Synthetic oligonucleotide
aaggguaugccaagugcuu

SEQ ID NO: 1926211 - RNA, 19 nt, Artificial Sequence
  Description of Artificial Sequence: Synthetic oligonucleotide
ggcuggcuaauucccgugg

SEQ ID NO: 1926212 - RNA, 19 nt, Artificial Sequence
  Description of Artificial Sequence: Synthetic oligonucleotide
gcuggcuaauucccguggg

SEQ ID NO: 1926213 - RNA, 19 nt, Artificial Sequence
  Description of Artificial Sequence: Synthetic oligonucleotide
aacgaucugcugcgugaaa

SEQ ID NO: 1926214 - RNA, 19 nt, Artificial Sequence
  Description of Artificial Sequence: Synthetic oligonucleotide
uucugcugcccagaggcuc

SEQ ID NO: 1926215 - RNA, 19 nt, Artificial Sequence
  Description of Artificial Sequence: Synthetic oligonucleotide
uucgugguuuuggaaugac

SEQ ID NO: 1926216 - RNA, 19 nt, Artificial Sequence
  Description of Artificial Sequence: Synthetic oligonucleotide
cuucacuaagauccacgga

SEQ ID NO: 1926217 - RNA, 19 nt, Artificial Sequence
  Description of Artificial Sequence: Synthetic oligonucleotide
cagcauacuguagcucugc

SEQ ID NO: 1926218 - RNA, 19 nt, Artificial Sequence
  Description of Artificial Sequence: Synthetic oligonucleotide
gaagguuggagaggucaga

SEQ ID NO: 1926219 - RNA, 19 nt, Artificial Sequence
  Description of Artificial Sequence: Synthetic oligonucleotide
augacugccucugccggug

SEQ ID NO: 1926220 - RNA, 19 nt, Artificial Sequence
  Description of Artificial Sequence: Synthetic oligonucleotide
ggcagagccuuccaaagaa

SEQ ID NO: 1926221 - RNA, 19 nt, Artificial Sequence
  Description of Artificial Sequence: Synthetic oligonucleotide
auugcguaggaaagaugga

SEQ ID NO: 1926222 - RNA, 19 nt, Artificial Sequence
  Description of Artificial Sequence: Synthetic oligonucleotide
uacugcagugaaggaguug

SEQ ID NO: 1926223 - RNA, 19 nt, Artificial Sequence
  Description of Artificial Sequence: Synthetic oligonucleotide
cugcagugaaggaguuggc

SEQ ID NO: 1926224 - RNA, 19 nt, Artificial Sequence
  Description of Artificial Sequence: Synthetic oligonucleotide
gagugcugcucuaggguac

SEQ ID NO: 1926225 - RNA, 19 nt, Artificial Sequence
  Description of Artificial Sequence: Synthetic oligonucleotide
agauccacggauggccugu

SEQ ID NO: 1926226 - RNA, 19 nt, Artificial Sequence
  Description of Artificial Sequence: Synthetic oligonucleotide
cugugaaccuggagugcug

SEQ ID NO: 1926227 - RNA, 19 nt, Artificial Sequence
  Description of Artificial Sequence: Synthetic oligonucleotide
ccacaaauacuuugcugac

SEQ ID NO: 1926228 - RNA, 19 nt, Artificial Sequence
  Description of Artificial Sequence: Synthetic oligonucleotide
gaucugcugcgugaaaucu

SEQ ID NO: 1926229 - RNA, 19 nt, Artificial Sequence
  Description of Artificial Sequence: Synthetic oligonucleotide
gucagacagcucaucuccc

SEQ ID NO: 1926230 - RNA, 19 nt, Artificial Sequence
  Description of Artificial Sequence: Synthetic oligonucleotide
aucauccugaaagcucggu

SEQ ID NO: 1926231 - RNA, 19 nt, Artificial Sequence
  Description of Artificial Sequence: Synthetic oligonucleotide
cugcugcgugaaaucuccg

SEQ ID NO: 1926232 - RNA, 19 nt, Artificial Sequence
  Description of Artificial Sequence: Synthetic oligonucleotide
ucauguccaucgacacauc

SEQ ID NO: 1926233 - RNA, 19 nt, Artificial Sequence
  Description of Artificial Sequence: Synthetic oligonucleotide
gguggauccuaucacuugu

SEQ ID NO: 1926234 - RNA, 19 nt, Artificial Sequence
  Description of Artificial Sequence: Synthetic oligonucleotide
ugcugcucuaggguacgcu

SEQ ID NO: 1926235 - RNA, 19 nt, Artificial Sequence
  Description of Artificial Sequence: Synthetic oligonucleotide
cucuccgaccacuuacuaa

SEQ ID NO: 1926236 - RNA, 19 nt, Artificial Sequence
  Description of Artificial Sequence: Synthetic oligonucleotide
ucugaacgaucugcugcgu

SEQ ID NO: 1926237 - RNA, 19 nt, Artificial Sequence
  Description of Artificial Sequence: Synthetic oligonucleotide
ccacauugacaccauuuuc

SEQ ID NO: 1926238 - RNA, 19 nt, Artificial Sequence
  Description of Artificial Sequence: Synthetic oligonucleotide
acgcugcucaucuguaauu

SEQ ID NO: 1926239 - RNA, 19 nt, Artificial Sequence
  Description of Artificial Sequence: Synthetic oligonucleotide
caaacgcugaaaccguacu

SEQ ID NO: 1926240 - RNA, 19 nt, Artificial Sequence
  Description of Artificial Sequence: Synthetic oligonucleotide
acagaccaaucauccugaa

SEQ ID NO: 1926241 - RNA, 19 nt, Artificial Sequence
  Description of Artificial Sequence: Synthetic oligonucleotide
cuaggguacgcugcucauc

SEQ ID NO: 1926242 - RNA, 19 nt, Artificial Sequence
  Description of Artificial Sequence: Synthetic oligonucleotide
cagcucaucucccgcaaga

SEQ ID NO: 1926243 - RNA, 19 nt, Artificial Sequence
  Description of Artificial Sequence: Synthetic oligonucleotide
caucgacacaucuauguuu

SEQ ID NO: 1926244 - RNA, 19 nt, Artificial Sequence
  Description of Artificial Sequence: Synthetic oligonucleotide
ucgacacaucuauguuuuc

SEQ ID NO: 1926245 - RNA, 19 nt, Artificial Sequence
  Description of Artificial Sequence: Synthetic oligonucleotide
gagaaaccgcuccucaauu

SEQ ID NO: 1926246 - RNA, 19 nt, Artificial Sequence
  Description of Artificial Sequence: Synthetic oligonucleotide
ccuuccaaagaagcaguag

SEQ ID NO: 1926247 - RNA, 19 nt, Artificial Sequence
  Description of Artificial Sequence: Synthetic oligonucleotide
gaacgaucugcugcgugaa

SEQ ID NO: 1926248 - RNA, 19 nt, Artificial Sequence
  Description of Artificial Sequence: Synthetic oligonucleotide
caacucugaacgaucugcu

SEQ ID NO: 1926249 - RNA, 19 nt, Artificial Sequence
  Description of Artificial Sequence: Synthetic oligonucleotide
aaagcucggugcacugaaa

SEQ ID NO: 1926250 - RNA, 19 nt, Artificial Sequence
  Description of Artificial Sequence: Synthetic oligonucleotide
ccaggauaauccaaccaga

SEQ ID NO: 1926251 - RNA, 19 nt, Artificial Sequence
  Description of Artificial Sequence: Synthetic oligonucleotide
cauuaacagacggugcgua

SEQ ID NO: 1926252 - RNA, 19 nt, Artificial Sequence
  Description of Artificial Sequence: Synthetic oligonucleotide
cuaauucccgugggugcug

SEQ ID NO: 1926253 - RNA, 19 nt, Artificial Sequence
  Description of Artificial Sequence: Synthetic oligonucleotide
ccaagaagccgugagaaaa

SEQ ID NO: 1926254 - RNA, 19 nt, Artificial Sequence
  Description of Artificial Sequence: Synthetic oligonucleotide
gucuccaacucaggaggug

SEQ ID NO: 1926255 - RNA, 19 nt, Artificial Sequence
  Description of Artificial Sequence: Synthetic oligonucleotide
ggaugcuuggauuccuuua

SEQ ID NO: 1926256 - RNA, 19 nt, Artificial Sequence
  Description of Artificial Sequence: Synthetic oligonucleotide
cuucuaccccuaacucauc

SEQ ID NO: 1926257 - RNA, 19 nt, Artificial Sequence
  Description of Artificial Sequence: Synthetic oligonucleotide
auguccaucgacacaucua

SEQ ID NO: 1926258 - RNA, 19 nt, Artificial Sequence
  Description of Artificial Sequence: Synthetic oligonucleotide
ggauuccuuuaucagggua

SEQ ID NO: 1926259 - RNA, 19 nt, Artificial Sequence
  Description of Artificial Sequence: Synthetic oligonucleotide
uuccuuuaucaggguacuc

SEQ ID NO: 1926260 - RNA, 19 nt, Artificial Sequence
  Description of Artificial Sequence: Synthetic oligonucleotide
ccguacuuagggccaaaag

SEQ ID NO: 1926261 - RNA, 19 nt, Artificial Sequence
  Description of Artificial Sequence: Synthetic oligonucleotide
gacggugcguaaaggugga

SEQ ID NO: 1926262 - RNA, 19 nt, Artificial Sequence
  Description of Artificial Sequence: Synthetic oligonucleotide
cccgggugguccaggaugg

SEQ ID NO: 1926263 - RNA, 19 nt, Artificial Sequence
  Description of Artificial Sequence: Synthetic oligonucleotide
cuaugaggaugcuuggauu

SEQ ID NO: 1926264 - RNA, 19 nt, Artificial Sequence
  Description of Artificial Sequence: Synthetic oligonucleotide
ggagugcugcucuagggua

SEQ ID NO: 1926265 - RNA, 19 nt, Artificial Sequence
  Description of Artificial Sequence: Synthetic oligonucleotide
gauagcuacugagguuuua

SEQ ID NO: 1926266 - RNA, 19 nt, Artificial Sequence
  Description of Artificial Sequence: Synthetic oligonucleotide
aacucaggagguggccuua

SEQ ID NO: 1926267 - RNA, 19 nt, Artificial Sequence
  Description of Artificial Sequence: Synthetic oligonucleotide
agcucaucucccgcaagaa

SEQ ID NO: 1926268 - RNA, 19 nt, Artificial Sequence
  Description of Artificial Sequence: Synthetic oligonucleotide
agucuccaacucaggaggu

SEQ ID NO: 1926269 - RNA, 19 nt, Artificial Sequence
  Description of Artificial Sequence: Synthetic oligonucleotide
augggcucggcagagccuu

SEQ ID NO: 1926270 - RNA, 19 nt, Artificial Sequence
  Description of Artificial Sequence: Synthetic oligonucleotide
ggugcacugaaagcgccac

SEQ ID NO: 1926271 - RNA, 19 nt, Artificial Sequence
  Description of Artificial Sequence: Synthetic oligonucleotide
cagaccaaucauccugaaa

SEQ ID NO: 1926272 - RNA, 19 nt, Artificial Sequence
  Description of Artificial Sequence: Synthetic oligonucleotide
cacuaugaggaugcuugga

SEQ ID NO: 1926273 - RNA, 19 nt, Artificial Sequence
  Description of Artificial Sequence: Synthetic oligonucleotide
gcguaggaaagauggacua

SEQ ID NO: 1926274 - RNA, 19 nt, Artificial Sequence
  Description of Artificial Sequence: Synthetic oligonucleotide
acaucccgggugguccagg

SEQ ID NO: 1926275 - RNA, 19 nt, Artificial Sequence
  Description of Artificial Sequence: Synthetic oligonucleotide
aggguacgcugcucaucug

SEQ ID NO: 1926276 - RNA, 19 nt, Artificial Sequence
  Description of Artificial Sequence: Synthetic oligonucleotide
cccgugggugcugugaacc

SEQ ID NO: 1926277 - RNA, 19 nt, Artificial Sequence
  Description of Artificial Sequence: Synthetic oligonucleotide
ggcucacugcucuccgacc

SEQ ID NO: 1926278 - RNA, 19 nt, Artificial Sequence
  Description of Artificial Sequence: Synthetic oligonucleotide
cuucgugguuuuggaauga

SEQ ID NO: 1926279 - RNA, 19 nt, Artificial Sequence
  Description of Artificial Sequence: Synthetic oligonucleotide
ccacggauggccuguaaga

SEQ ID NO: 1926280 - RNA, 19 nt, Artificial Sequence
  Description of Artificial Sequence: Synthetic oligonucleotide
cuccgaccacuuacuaaca

SEQ ID NO: 1926281 - RNA, 19 nt, Artificial Sequence
  Description of Artificial Sequence: Synthetic oligonucleotide
ggagaaaccgcuccucaau

SEQ ID NO: 1926282 - RNA, 19 nt, Artificial Sequence
  Description of Artificial Sequence: Synthetic oligonucleotide
caguccugucaaacgcuga

SEQ ID NO: 1926283 - RNA, 19 nt, Artificial Sequence
  Description of Artificial Sequence: Synthetic oligonucleotide
gcucuggaaaggguaugcc

SEQ ID NO: 1926284 - RNA, 19 nt, Artificial Sequence
  Description of Artificial Sequence: Synthetic oligonucleotide
cucaggagguggccuuauc

SEQ ID NO: 1926285 - RNA, 19 nt, Artificial Sequence
  Description of Artificial Sequence: Synthetic oligonucleotide
gcgaaggaagucuccaacu

SEQ ID NO: 1926286 - RNA, 19 nt, Artificial Sequence
  Description of Artificial Sequence: Synthetic oligonucleotide
cagauucacaaugauccau

SEQ ID NO: 1926287 - RNA, 19 nt, Artificial Sequence
  Description of Artificial Sequence: Synthetic oligonucleotide
ggauccuaucacuugucau

SEQ ID NO: 1926288 - RNA, 19 nt, Artificial Sequence
  Description of Artificial Sequence: Synthetic oligonucleotide
ggguacuccucaacaucag

SEQ ID NO: 1926289 - RNA, 19 nt, Artificial Sequence
  Description of Artificial Sequence: Synthetic oligonucleotide
cguaggaaagauggacuag

SEQ ID NO: 1926290 - RNA, 19 nt, Artificial Sequence
  Description of Artificial Sequence: Synthetic oligonucleotide
ggaggcucuggaaagggua

SEQ ID NO: 1926291 - RNA, 19 nt, Artificial Sequence
  Description of Artificial Sequence: Synthetic oligonucleotide
cagcgaaggaagucuccaa

SEQ ID NO: 1926292 - RNA, 19 nt, Artificial Sequence
  Description of Artificial Sequence: Synthetic oligonucleotide
uguuggcuccaagggccaa

SEQ ID NO: 1926293 - RNA, 19 nt, Artificial Sequence
  Description of Artificial Sequence: Synthetic oligonucleotide
caucccgggugguccagga

SEQ ID NO: 1926294 - RNA, 19 nt, Artificial Sequence
  Description of Artificial Sequence: Synthetic oligonucleotide
aggcucccauuaacagacg

SEQ ID NO: 1926295 - RNA, 19 nt, Artificial Sequence
  Description of Artificial Sequence: Synthetic oligonucleotide
cggauggccuguaagacaa

SEQ ID NO: 1926296 - RNA, 19 nt, Artificial Sequence
  Description of Artificial Sequence: Synthetic oligonucleotide
ggguacgcugcucaucugu

SEQ ID NO: 1926297 - RNA, 19 nt, Artificial Sequence
  Description of Artificial Sequence: Synthetic oligonucleotide
cgaucugcugcgugaaauc

SEQ ID NO: 1926298 - RNA, 19 nt, Artificial Sequence
  Description of Artificial Sequence: Synthetic oligonucleotide
cuggcuaauucccgugggu

SEQ ID NO: 1926299 - RNA, 19 nt, Artificial Sequence
  Description of Artificial Sequence: Synthetic oligonucleotide
cguaaagguggauccuauc

SEQ ID NO: 1926300 - RNA, 19 nt, Artificial Sequence
  Description of Artificial Sequence: Synthetic oligonucleotide
ggguaugccaagugcuugu

SEQ ID NO: 1926301 - RNA, 19 nt, Artificial Sequence
  Description of Artificial Sequence: Synthetic oligonucleotide
auccacggauggccuguaa

SEQ ID NO: 1926302 - RNA, 19 nt, Artificial Sequence
  Description of Artificial Sequence: Synthetic oligonucleotide
gcuaaagcuguuggcucca

SEQ ID NO: 1926303 - RNA, 19 nt, Artificial Sequence
  Description of Artificial Sequence: Synthetic oligonucleotide
cuuggccuuccuucguggu

SEQ ID NO: 1926304 - RNA, 19 nt, Artificial Sequence
  Description of Artificial Sequence: Synthetic oligonucleotide
aucccgggugguccaggau

SEQ ID NO: 1926305 - RNA, 19 nt, Artificial Sequence
  Description of Artificial Sequence: Synthetic oligonucleotide
cucccgcaagaacauagau

SEQ ID NO: 1926306 - RNA, 19 nt, Artificial Sequence
  Description of Artificial Sequence: Synthetic oligonucleotide
gccaagaagccgugagaaa

SEQ ID NO: 1926307 - RNA, 19 nt, Artificial Sequence
  Description of Artificial Sequence: Synthetic oligonucleotide
cacaucccgggugguccag

SEQ ID NO: 1926308 - RNA, 19 nt, Artificial Sequence
  Description of Artificial Sequence: Synthetic oligonucleotide
ugcugacaggcuggcuaau

SEQ ID NO: 1926309 - RNA, 19 nt, Artificial Sequence
  Description of Artificial Sequence: Synthetic oligonucleotide
gcuaauucccgugggugcu

SEQ ID NO: 1926310 - RNA, 19 nt, Artificial Sequence
  Description of Artificial Sequence: Synthetic oligonucleotide
agccagccaagaagccgug

SEQ ID NO: 1926311 - RNA, 19 nt, Artificial Sequence
  Description of Artificial Sequence: Synthetic oligonucleotide
ccgcaagaacauagaucac

SEQ ID NO: 1926312 - RNA, 19 nt, Artificial Sequence
  Description of Artificial Sequence: Synthetic oligonucleotide
ccgguggcuccacauugac

SEQ ID NO: 1926313 - RNA, 19 nt, Artificial Sequence
  Description of Artificial Sequence: Synthetic oligonucleotide
gugcugcucuaggguacgc

SEQ ID NO: 1926314 - RNA, 19 nt, Artificial Sequence
  Description of Artificial Sequence: Synthetic oligonucleotide
gagguggccuuaucuucuu

SEQ ID NO: 1926315 - RNA, 19 nt, Artificial Sequence
  Description of Artificial Sequence: Synthetic oligonucleotide
caacucaggagguggccuu

SEQ ID NO: 1926316 - RNA, 19 nt, Artificial Sequence
  Description of Artificial Sequence: Synthetic oligonucleotide
gguaugccaagugcuugua

SEQ ID NO: 1926317 - RNA, 19 nt, Artificial Sequence
  Description of Artificial Sequence: Synthetic oligonucleotide
gugcguaaagguggauccu

SEQ ID NO: 1926318 - RNA, 19 nt, Artificial Sequence
  Description of Artificial Sequence: Synthetic oligonucleotide
ccccuaacucaucagcaua

SEQ ID NO: 1926319 - RNA, 19 nt, Artificial Sequence
  Description of Artificial Sequence: Synthetic oligonucleotide
gcucccauuaacagacggu

SEQ ID NO: 1926320 - RNA, 19 nt, Artificial Sequence
  Description of Artificial Sequence: Synthetic oligonucleotide
gaggaugcuuggauuccuu

SEQ ID NO: 1926321 - RNA, 19 nt, Artificial Sequence
  Description of Artificial Sequence: Synthetic oligonucleotide
cggugcguaaagguggauc

SEQ ID NO: 1926322 - RNA, 19 nt, Artificial Sequence
  Description of Artificial Sequence: Synthetic oligonucleotide
gauccacggauggccugua

SEQ ID NO: 1926323 - RNA, 19 nt, Artificial Sequence
  Description of Artificial Sequence: Synthetic oligonucleotide
gcugcucaucuguaauuau

SEQ ID NO: 1926324 - RNA, 19 nt, Artificial Sequence
  Description of Artificial Sequence: Synthetic oligonucleotide
cacuugucaucugcugacu

SEQ ID NO: 1926325 - RNA, 19 nt, Artificial Sequence
  Description of Artificial Sequence: Synthetic oligonucleotide
ccgugagaaaacagaccaa

SEQ ID NO: 1926326 - RNA, 19 nt, Artificial Sequence
  Description of Artificial Sequence: Synthetic oligonucleotide
gcucggcagagccuuccaa

SEQ ID NO: 1926327 - RNA, 19 nt, Artificial Sequence
  Description of Artificial Sequence: Synthetic oligonucleotide
gcucuccgaccacuuacua

SEQ ID NO: 1926328 - RNA, 19 nt, Artificial Sequence
  Description of Artificial Sequence: Synthetic oligonucleotide
ccgaccacuuacuaacaau

SEQ ID NO: 1926329 - RNA, 19 nt, Artificial Sequence
  Description of Artificial Sequence: Synthetic oligonucleotide
ccugaaagcucggugcacu

SEQ ID NO: 1926330 - RNA, 19 nt, Artificial Sequence
  Description of Artificial Sequence: Synthetic oligonucleotide
acggugcguaaagguggau

SEQ ID NO: 1926331 - RNA, 19 nt, Artificial Sequence
  Description of Artificial Sequence: Synthetic oligonucleotide
caucucccgcaagaacaua

SEQ ID NO: 1926332 - RNA, 19 nt, Artificial Sequence
  Description of Artificial Sequence: Synthetic oligonucleotide
gcugacucagagacaguau

SEQ ID NO: 1926333 - RNA, 19 nt, Artificial Sequence
  Description of Artificial Sequence: Synthetic oligonucleotide
guagcucugcuggcugcgu

SEQ ID NO: 1926334 - RNA, 19 nt, Artificial Sequence
  Description of Artificial Sequence: Synthetic oligonucleotide
gccuuccaaagaagcagua

SEQ ID NO: 1926335 - RNA, 19 nt, Artificial Sequence
  Description of Artificial Sequence: Synthetic oligonucleotide
cucugccgguggcuccaca

SEQ ID NO: 1926336 - RNA, 19 nt, Artificial Sequence
  Description of Artificial Sequence: Synthetic oligonucleotide
ccauuaacagacggugcgu

SEQ ID NO: 1926337 - RNA, 19 nt, Artificial Sequence
  Description of Artificial Sequence: Synthetic oligonucleotide
cggauagcuacugagguuu

SEQ ID NO: 1926338 - RNA, 19 nt, Artificial Sequence
  Description of Artificial Sequence: Synthetic oligonucleotide
ccaucgacacaucuauguu

SEQ ID NO: 1926339 - RNA, 19 nt, Artificial Sequence
  Description of Artificial Sequence: Synthetic oligonucleotide
gccgguggcuccacauuga

SEQ ID NO: 1926340 - RNA, 19 nt, Artificial Sequence
  Description of Artificial Sequence: Synthetic oligonucleotide
ccacaucccggguggucca

SEQ ID NO: 1926341 - RNA, 19 nt, Artificial Sequence
  Description of Artificial Sequence: Synthetic oligonucleotide
ccaacucaggagguggccu

SEQ ID NO: 1926342 - RNA, 19 nt, Artificial Sequence
  Description of Artificial Sequence: Synthetic oligonucleotide
gcguaaagguggauccuau

SEQ ID NO: 1926343 - RNA, 19 nt, Artificial Sequence
  Description of Artificial Sequence: Synthetic oligonucleotide
cgcugcucaucuguaauua

SEQ ID NO: 1926344 - RNA, 19 nt, Artificial Sequence
  Description of Artificial Sequence: Synthetic oligonucleotide
cugccgguggcuccacauu

SEQ ID NO: 1926345 - RNA, 19 nt, Artificial Sequence
  Description of Artificial Sequence: Synthetic oligonucleotide
cggugcacugaaagcgcca

SEQ ID NO: 1926346 - RNA, 19 nt, Artificial Sequence
  Description of Artificial Sequence: Synthetic oligonucleotide
gcguuuucuuggccuuccu

SEQ ID NO: 1926347 - RNA, 19 nt, Artificial Sequence
  Description of Artificial Sequence: Synthetic oligonucleotide
ccggauagcuacugagguu

SEQ ID NO: 1926348 - RNA, 19 nt, Artificial Sequence
  Description of Artificial Sequence: Synthetic oligonucleotide
ggauagcuacugagguuuu

SEQ ID NO: 1926349 - RNA, 19 nt, Artificial Sequence
  Description of Artificial Sequence: Synthetic oligonucleotide
cgugaaaucuccggcuuuu

SEQ ID NO: 1926350 - RNA, 19 nt, Artificial Sequence
  Description of Artificial Sequence: Synthetic oligonucleotide
ggccuuccuucgugguuuu

SEQ ID NO: 1926351 - RNA, 19 nt, Artificial Sequence
  Description of Artificial Sequence: Synthetic oligonucleotide
aauaauggcucucagaguc

SEQ ID NO: 1926352 - RNA, 19 nt, Artificial Sequence
  Description of Artificial Sequence: Synthetic oligonucleotide
acuugaaggaaauaggggc

SEQ ID NO: 1926353 - RNA, 19 nt, Artificial Sequence
  Description of Artificial Sequence: Synthetic oligonucleotide
guuacauuccacuugaagg

SEQ ID NO: 1926354 - RNA, 19 nt, Artificial Sequence
  Description of Artificial Sequence: Synthetic oligonucleotide
gaagaaagagcccagaccc

SEQ ID NO: 1926355 - RNA, 19 nt, Artificial Sequence
  Description of Artificial Sequence: Synthetic oligonucleotide
uuugcucuagcucagagcc

SEQ ID NO: 1926356 - RNA, 19 nt, Artificial Sequence
  Description of Artificial Sequence: Synthetic oligonucleotide
acuuuaggaagaaagagcc

SEQ ID NO: 1926357 - RNA, 19 nt, Artificial Sequence
  Description of Artificial Sequence: Synthetic oligonucleotide
uauuaaauagagaucgugu

SEQ ID NO: 1926358 - RNA, 19 nt, Artificial Sequence
  Description of Artificial Sequence: Synthetic oligonucleotide
uuaucuaggacucauuuuc

SEQ ID NO: 1926359 - RNA, 19 nt, Artificial Sequence
  Description of Artificial Sequence: Synthetic oligonucleotide
agaacaucgguucagcauc

SEQ ID NO: 1926360 - RNA, 19 nt, Artificial Sequence
  Description of Artificial Sequence: Synthetic oligonucleotide
ugcagucccacauacaggg

SEQ ID NO: 1926361 - RNA, 19 nt, Artificial Sequence
  Description of Artificial Sequence: Synthetic oligonucleotide
ucuaugcagagaaaugggg

SEQ ID NO: 1926362 - RNA, 19 nt, Artificial Sequence
  Description of Artificial Sequence: Synthetic oligonucleotide
agauuggagacacuugccc

SEQ ID NO: 1926363 - RNA, 19 nt, Artificial Sequence
  Description of Artificial Sequence: Synthetic oligonucleotide
ugggcuaugauggauaagg

SEQ ID NO: 1926364 - RNA, 19 nt, Artificial Sequence
  Description of Artificial Sequence: Synthetic oligonucleotide
uguuguuacauucaacagu

SEQ ID NO: 1926365 - RNA, 19 nt, Artificial Sequence
  Description of Artificial Sequence: Synthetic oligonucleotide
uccacuugaaggaaauagg

SEQ ID NO: 1926366 - RNA, 19 nt, Artificial Sequence
  Description of Artificial Sequence: Synthetic oligonucleotide
cuggauauagcgaauguag

SEQ ID NO: 1926367 - RNA, 19 nt, Artificial Sequence
  Description of Artificial Sequence: Synthetic oligonucleotide
uguuacauuccacuugaag

SEQ ID NO: 1926368 - RNA, 19 nt, Artificial Sequence
  Description of Artificial Sequence: Synthetic oligonucleotide
cuaggacucauuuucagag

SEQ ID NO: 1926369 - RNA, 19 nt, Artificial Sequence
  Description of Artificial Sequence: Synthetic oligonucleotide
uggugagauguaauaaugg

SEQ ID NO: 1926370 - RNA, 19 nt, Artificial Sequence
  Description of Artificial Sequence: Synthetic oligonucleotide
uggauauagcgaauguagg

SEQ ID NO: 1926371 - RNA, 19 nt, Artificial Sequence
  Description of Artificial Sequence: Synthetic oligonucleotide
aacucugaaaacagggucg

SEQ ID NO: 1926372 - RNA, 19 nt, Artificial Sequence
  Description of Artificial Sequence: Synthetic oligonucleotide
uuauuaaauagagaucgug

SEQ ID NO: 1926373 - RNA, 19 nt, Artificial Sequence
  Description of Artificial Sequence: Synthetic oligonucleotide
uuuaggaucagugacuccu

SEQ ID NO: 1926374 - RNA, 19 nt, Artificial Sequence
  Description of Artificial Sequence: Synthetic oligonucleotide
ugauggauaaggcaggguc

SEQ ID NO: 1926375 - RNA, 19 nt, Artificial Sequence
  Description of Artificial Sequence: Synthetic oligonucleotide
uuacauucaacagugggca

SEQ ID NO: 1926376 - RNA, 19 nt, Artificial Sequence
  Description of Artificial Sequence: Synthetic oligonucleotide
aauaggggcguggugaggg

SEQ ID NO: 1926377 - RNA, 19 nt, Artificial Sequence
  Description of Artificial Sequence: Synthetic oligonucleotide
ugugaagucaaggcaaggg

SEQ ID NO: 1926378 - RNA, 19 nt, Artificial Sequence
  Description of Artificial Sequence: Synthetic oligonucleotide
gauauagcgaauguaggug

SEQ ID NO: 1926379 - RNA, 19 nt, Artificial Sequence
  Description of Artificial Sequence: Synthetic oligonucleotide
uuaaauagagaucguguua

SEQ ID NO: 1926380 - RNA, 19 nt, Artificial Sequence
  Description of Artificial Sequence: Synthetic oligonucleotide
gaaggggcaguccuuaucc

SEQ ID NO: 1926381 - RNA, 19 nt, Artificial Sequence
  Description of Artificial Sequence: Synthetic oligonucleotide
uagagaucguguuacauuc

SEQ ID NO: 1926382 - RNA, 19 nt, Artificial Sequence
  Description of Artificial Sequence: Synthetic oligonucleotide
aauuuuaggaucagugacu

SEQ ID NO: 1926383 - RNA, 19 nt, Artificial Sequence
  Description of Artificial Sequence: Synthetic oligonucleotide
agccuugcuggauauagcg

SEQ ID NO: 1926384 - RNA, 19 nt, Artificial Sequence
  Description of Artificial Sequence: Synthetic oligonucleotide
uucagcauccugccgaacc

SEQ ID NO: 1926385 - RNA, 19 nt, Artificial Sequence
  Description of Artificial Sequence: Synthetic oligonucleotide
aacagggucguauccaccu

SEQ ID NO: 1926386 - RNA, 19 nt, Artificial Sequence
  Description of Artificial Sequence: Synthetic oligonucleotide
acuuuguggcaguuguccc

SEQ ID NO: 1926387 - RNA, 19 nt, Artificial Sequence
  Description of Artificial Sequence: Synthetic oligonucleotide
ucugccaugcucagauugg

SEQ ID NO: 1926388 - RNA, 19 nt, Artificial Sequence
  Description of Artificial Sequence: Synthetic oligonucleotide
guuacauucaacagugggc

SEQ ID NO: 1926389 - RNA, 19 nt, Artificial Sequence
  Description of Artificial Sequence: Synthetic oligonucleotide
cuaugauggauaaggcagg

SEQ ID NO: 1926390 - RNA, 19 nt, Artificial Sequence
  Description of Artificial Sequence: Synthetic oligonucleotide
uaaucucccagaacaucgg

SEQ ID NO: 1926391 - RNA, 19 nt, Artificial Sequence
  Description of Artificial Sequence: Synthetic oligonucleotide
acauucaacagugggcacc

SEQ ID NO: 1926392 - RNA, 19 nt, Artificial Sequence
  Description of Artificial Sequence: Synthetic oligonucleotide
cucuaugcagagaaauggg

SEQ ID NO: 1926393 - RNA, 19 nt, Artificial Sequence
  Description of Artificial Sequence: Synthetic oligonucleotide
gaacucugaaaacaggguc

SEQ ID NO: 1926394 - RNA, 19 nt, Artificial Sequence
  Description of Artificial Sequence: Synthetic oligonucleotide
uacacccuuucuaggaagg

SEQ ID NO: 1926395 - RNA, 19 nt, Artificial Sequence
  Description of Artificial Sequence: Synthetic oligonucleotide
cuugggaacagggugagag

SEQ ID NO: 1926396 - RNA, 19 nt, Artificial Sequence
  Description of Artificial Sequence: Synthetic oligonucleotide
auucgguggugacagguac

SEQ ID NO: 1926397 - RNA, 19 nt, Artificial Sequence
  Description of Artificial Sequence: Synthetic oligonucleotide
auauagcgaauguagguga

SEQ ID NO: 1926398 - RNA, 19 nt, Artificial Sequence
  Description of Artificial Sequence: Synthetic oligonucleotide
gcuaugauggauaaggcag

SEQ ID NO: 1926399 - RNA, 19 nt, Artificial Sequence
  Description of Artificial Sequence: Synthetic oligonucleotide
ugcccuaggccucuugugg

SEQ ID NO: 1926400 - RNA, 19 nt, Artificial Sequence
  Description of Artificial Sequence: Synthetic oligonucleotide
uguuugcucuagcucagag

SEQ ID NO: 1926401 - RNA, 19 nt, Artificial Sequence
  Description of Artificial Sequence: Synthetic oligonucleotide
ucguguuacauuccacuug

SEQ ID NO: 1926402 - RNA, 19 nt, Artificial Sequence
  Description of Artificial Sequence: Synthetic oligonucleotide
ucuggagcaaucugaggcc

SEQ ID NO: 1926403 - RNA, 19 nt, Artificial Sequence
  Description of Artificial Sequence: Synthetic oligonucleotide
ucuaggacucauuuucaga

SEQ ID NO: 1926404 - RNA, 19 nt, Artificial Sequence
  Description of Artificial Sequence: Synthetic oligonucleotide
uaggugaugcccuccaagc

SEQ ID NO: 1926405 - RNA, 19 nt, Artificial Sequence
  Description of Artificial Sequence: Synthetic oligonucleotide
ggugagauguaauaauggc

SEQ ID NO: 1926406 - RNA, 19 nt, Artificial Sequence
  Description of Artificial Sequence: Synthetic oligonucleotide
uggauggcugcccacaacu

SEQ ID NO: 1926407 - RNA, 19 nt, Artificial Sequence
  Description of Artificial Sequence: Synthetic oligonucleotide
uaugauggauaaggcaggg

SEQ ID NO: 1926408 - RNA, 19 nt, Artificial Sequence
  Description of Artificial Sequence: Synthetic oligonucleotide
aggugaugcccuccaagcc

SEQ ID NO: 1926409 - RNA, 19 nt, Artificial Sequence
  Description of Artificial Sequence: Synthetic oligonucleotide
gauggauaaggcagggucc

SEQ ID NO: 1926410 - RNA, 19 nt, Artificial Sequence
  Description of Artificial Sequence: Synthetic oligonucleotide
aagaaagagcccagacccc

SEQ ID NO: 1926411 - RNA, 19 nt, Artificial Sequence
  Description of Artificial Sequence: Synthetic oligonucleotide
uaucuaggacucauuuuca

SEQ ID NO: 1926412 - RNA, 19 nt, Artificial Sequence
  Description of Artificial Sequence: Synthetic oligonucleotide
caaucugaggccacuuggg

SEQ ID NO: 1926413 - RNA, 19 nt, Artificial Sequence
  Description of Artificial Sequence: Synthetic oligonucleotide
aauagagaucguguuacau

SEQ ID NO: 1926414 - RNA, 19 nt, Artificial Sequence
  Description of Artificial Sequence: Synthetic oligonucleotide
aaauagagaucguguuaca

SEQ ID NO: 1926415 - RNA, 19 nt, Artificial Sequence
  Description of Artificial Sequence: Synthetic oligonucleotide
ucugaaaacagggucguau

SEQ ID NO: 1926416 - RNA, 19 nt, Artificial Sequence
  Description of Artificial Sequence: Synthetic oligonucleotide
cuuccgaagccucauaauc

SEQ ID NO: 1926417 - RNA, 19 nt, Artificial Sequence
  Description of Artificial Sequence: Synthetic oligonucleotide
acccuuucuaggaaggggc

SEQ ID NO: 1926418 - RNA, 19 nt, Artificial Sequence
  Description of Artificial Sequence: Synthetic oligonucleotide
accccuggcaauuuuagga

SEQ ID NO: 1926419 - RNA, 19 nt, Artificial Sequence
  Description of Artificial Sequence: Synthetic oligonucleotide
acagguacgggccaaucca

SEQ ID NO: 1926420 - RNA, 19 nt, Artificial Sequence
  Description of Artificial Sequence: Synthetic oligonucleotide
acauacagggucccuguag

SEQ ID NO: 1926421 - RNA, 19 nt, Artificial Sequence
  Description of Artificial Sequence: Synthetic oligonucleotide
uguaggugaagaaguugca

SEQ ID NO: 1926422 - RNA, 19 nt, Artificial Sequence
  Description of Artificial Sequence: Synthetic oligonucleotide
cuuuaggaagaaagagccc

SEQ ID NO: 1926423 - RNA, 19 nt, Artificial Sequence
  Description of Artificial Sequence: Synthetic oligonucleotide
gauguaauaauggcucuca

SEQ ID NO: 1926424 - RNA, 19 nt, Artificial Sequence
  Description of Artificial Sequence: Synthetic oligonucleotide
agugacauccccuuccgaa

SEQ ID NO: 1926425 - RNA, 19 nt, Artificial Sequence
  Description of Artificial Sequence: Synthetic oligonucleotide
aacaaagccuuccuuuauu

SEQ ID NO: 1926426 - RNA, 19 nt, Artificial Sequence
  Description of Artificial Sequence: Synthetic oligonucleotide
uuggcuagugacauccccu

SEQ ID NO: 1926427 - RNA, 19 nt, Artificial Sequence
  Description of Artificial Sequence: Synthetic oligonucleotide
aucuaggacucauuuucag

SEQ ID NO: 1926428 - RNA, 19 nt, Artificial Sequence
  Description of Artificial Sequence: Synthetic oligonucleotide
gucguauccaccuccuugc

SEQ ID NO: 1926429 - RNA, 19 nt, Artificial Sequence
  Description of Artificial Sequence: Synthetic oligonucleotide
auagagaucguguuacauu

SEQ ID NO: 1926430 - RNA, 19 nt, Artificial Sequence
  Description of Artificial Sequence: Synthetic oligonucleotide
uucgguggugacagguacg

SEQ ID NO: 1926431 - RNA, 19 nt, Artificial Sequence
  Description of Artificial Sequence: Synthetic oligonucleotide
gaaggaaauaggggcgugg

SEQ ID NO: 1926432 - RNA, 19 nt, Artificial Sequence
  Description of Artificial Sequence: Synthetic oligonucleotide
ggcaauuuuaggaucagug

SEQ ID NO: 1926433 - RNA, 19 nt, Artificial Sequence
  Description of Artificial Sequence: Synthetic oligonucleotide
aagaaguugcacacugcag

SEQ ID NO: 1926434 - RNA, 19 nt, Artificial Sequence
  Description of Artificial Sequence: Synthetic oligonucleotide
uaauaauggcucucagagu

SEQ ID NO: 1926435 - RNA, 19 nt, Artificial Sequence
  Description of Artificial Sequence: Synthetic oligonucleotide
uggggauaugcccugcugu

SEQ ID NO: 1926436 - RNA, 19 nt, Artificial Sequence
  Description of Artificial Sequence: Synthetic oligonucleotide
cucagaguccccgaggcgg

SEQ ID NO: 1926437 - RNA, 19 nt, Artificial Sequence
  Description of Artificial Sequence: Synthetic oligonucleotide
ucagcauccugccgaacca

SEQ ID NO: 1926438 - RNA, 19 nt, Artificial Sequence
  Description of Artificial Sequence: Synthetic oligonucleotide
gacagguacgggccaaucc

SEQ ID NO: 1926439 - RNA, 19 nt, Artificial Sequence
  Description of Artificial Sequence: Synthetic oligonucleotide
guugaaguagggagggagg

SEQ ID NO: 1926440 - RNA, 19 nt, Artificial Sequence
  Description of Artificial Sequence: Synthetic oligonucleotide
aaucucccagaacaucggu

SEQ ID NO: 1926441 - RNA, 19 nt, Artificial Sequence
  Description of Artificial Sequence: Synthetic oligonucleotide
aucagugacuccuggagau

SEQ ID NO: 1926442 - RNA, 19 nt, Artificial Sequence
  Description of Artificial Sequence: Synthetic oligonucleotide
uuaggaucagugacuccug

SEQ ID NO: 1926443 - RNA, 19 nt, Artificial Sequence
  Description of Artificial Sequence: Synthetic oligonucleotide
gaggccucuaugcagagaa

SEQ ID NO: 1926444 - RNA, 19 nt, Artificial Sequence
  Description of Artificial Sequence: Synthetic oligonucleotide
agagcugagagcuccugca

SEQ ID NO: 1926445 - RNA, 19 nt, Artificial Sequence
  Description of Artificial Sequence: Synthetic oligonucleotide
uauccaggguaggugaugc

SEQ ID NO: 1926446 - RNA, 19 nt, Artificial Sequence
  Description of Artificial Sequence: Synthetic oligonucleotide
cuagugacauccccuuccg

SEQ ID NO: 1926447 - RNA, 19 nt, Artificial Sequence
  Description of Artificial Sequence: Synthetic oligonucleotide
cauccugccgaaccaagcc

SEQ ID NO: 1926448 - RNA, 19 nt, Artificial Sequence
  Description of Artificial Sequence: Synthetic oligonucleotide
ggaucagugacuccuggag

SEQ ID NO: 1926449 - RNA, 19 nt, Artificial Sequence
  Description of Artificial Sequence: Synthetic oligonucleotide
aguugucccucugccaugc

SEQ ID NO: 1926450 - RNA, 19 nt, Artificial Sequence
  Description of Artificial Sequence: Synthetic oligonucleotide
caagugcaguuccuggugg

SEQ ID NO: 1926451 - RNA, 19 nt, Artificial Sequence
  Description of Artificial Sequence: Synthetic oligonucleotide
cuugcccuaccucuggagc

SEQ ID NO: 1926452 - RNA, 19 nt, Artificial Sequence
  Description of Artificial Sequence: Synthetic oligonucleotide
cacaacuacauccugaggu

SEQ ID NO: 1926453 - RNA, 19 nt, Artificial Sequence
  Description of Artificial Sequence: Synthetic oligonucleotide
ugaaguagggagggagggg

SEQ ID NO: 1926454 - RNA, 19 nt, Artificial Sequence
  Description of Artificial Sequence: Synthetic oligonucleotide
acaggcucgauggugagug

SEQ ID NO: 1926455 - RNA, 19 nt, Artificial Sequence
  Description of Artificial Sequence: Synthetic oligonucleotide
cuuggcuagugacaucccc

SEQ ID NO: 1926456 - RNA, 19 nt, Artificial Sequence
  Description of Artificial Sequence: Synthetic oligonucleotide
uagcgaauguaggugaaga

SEQ ID NO: 1926457 - RNA, 19 nt, Artificial Sequence
  Description of Artificial Sequence: Synthetic oligonucleotide
gcacacuuuaggaagaaag

SEQ ID NO: 1926458 - RNA, 19 nt, Artificial Sequence
  Description of Artificial Sequence: Synthetic oligonucleotide
cucucagaguccccgaggc

SEQ ID NO: 1926459 - RNA, 19 nt, Artificial Sequence
  Description of Artificial Sequence: Synthetic oligonucleotide
cugaaaacagggucguauc

SEQ ID NO: 1926460 - RNA, 19 nt, Artificial Sequence
  Description of Artificial Sequence: Synthetic oligonucleotide
gaaaacagggucguaucca

SEQ ID NO: 1926461 - RNA, 19 nt, Artificial Sequence
  Description of Artificial Sequence: Synthetic oligonucleotide
gaucguguuacauuccacu

SEQ ID NO: 1926462 - RNA, 19 nt, Artificial Sequence
  Description of Artificial Sequence: Synthetic oligonucleotide
uauagcgaauguaggugaa

SEQ ID NO: 1926463 - RNA, 19 nt, Artificial Sequence
  Description of Artificial Sequence: Synthetic oligonucleotide
cucugccaugcucagauug

SEQ ID NO: 1926464 - RNA, 19 nt, Artificial Sequence
  Description of Artificial Sequence: Synthetic oligonucleotide
gagaucguguuacauucca

SEQ ID NO: 1926465 - RNA, 19 nt, Artificial Sequence
  Description of Artificial Sequence: Synthetic oligonucleotide
cugugaagccacaggcucg

SEQ ID NO: 1926466 - RNA, 19 nt, Artificial Sequence
  Description of Artificial Sequence: Synthetic oligonucleotide
aaggaaauaggggcguggu

SEQ ID NO: 1926467 - RNA, 19 nt, Artificial Sequence
  Description of Artificial Sequence: Synthetic oligonucleotide
agggcacacguguugaugu

SEQ ID NO: 1926468 - RNA, 19 nt, Artificial Sequence
  Description of Artificial Sequence: Synthetic oligonucleotide
caguccuuauccaggguag

SEQ ID NO: 1926469 - RNA, 19 nt, Artificial Sequence
  Description of Artificial Sequence: Synthetic oligonucleotide
ugcuggauauagcgaaugu

SEQ ID NO: 1926470 - RNA, 19 nt, Artificial Sequence
  Description of Artificial Sequence: Synthetic oligonucleotide
acaacuacauccugagguu

SEQ ID NO: 1926471 - RNA, 19 nt, Artificial Sequence
  Description of Artificial Sequence: Synthetic oligonucleotide
ccuacuucaggccuggggc

SEQ ID NO: 1926472 - RNA, 19 nt, Artificial Sequence
  Description of Artificial Sequence: Synthetic oligonucleotide
gauuucuugucugucuguc

SEQ ID NO: 1926473 - RNA, 19 nt, Artificial Sequence
  Description of Artificial Sequence: Synthetic oligonucleotide
gaucagugacuccuggaga

SEQ ID NO: 1926474 - RNA, 19 nt, Artificial Sequence
  Description of Artificial Sequence: Synthetic oligonucleotide
ggauaugcccugcuguggg

SEQ ID NO: 1926475 - RNA, 19 nt, Artificial Sequence
  Description of Artificial Sequence: Synthetic oligonucleotide
aauccacucagggcacacg

SEQ ID NO: 1926476 - RNA, 19 nt, Artificial Sequence
  Description of Artificial Sequence: Synthetic oligonucleotide
uccgaagccucauaaucuc

SEQ ID NO: 1926477 - RNA, 19 nt, Artificial Sequence
  Description of Artificial Sequence: Synthetic oligonucleotide
guacacccuuucuaggaag

SEQ ID NO: 1926478 - RNA, 19 nt, Artificial Sequence
  Description of Artificial Sequence: Synthetic oligonucleotide
uccuuauccaggguaggug

SEQ ID NO: 1926479 - RNA, 19 nt, Artificial Sequence
  Description of Artificial Sequence: Synthetic oligonucleotide
agccucauaaucucccaga

SEQ ID NO: 1926480 - RNA, 19 nt, Artificial Sequence
  Description of Artificial Sequence: Synthetic oligonucleotide
auacagggucccuguaguc

SEQ ID NO: 1926481 - RNA, 19 nt, Artificial Sequence
  Description of Artificial Sequence: Synthetic oligonucleotide
agagaucguguuacauucc

SEQ ID NO: 1926482 - RNA, 19 nt, Artificial Sequence
  Description of Artificial Sequence: Synthetic oligonucleotide
auaaggcaggguccagauc

SEQ ID NO: 1926483 - RNA, 19 nt, Artificial Sequence
  Description of Artificial Sequence: Synthetic oligonucleotide
gaccccuggcaauuuuagg

SEQ ID NO: 1926484 - RNA, 19 nt, Artificial Sequence
  Description of Artificial Sequence: Synthetic oligonucleotide
uugaaggaaauaggggcgu

SEQ ID NO: 1926485 - RNA, 19 nt, Artificial Sequence
  Description of Artificial Sequence: Synthetic oligonucleotide
gcuagugacauccccuucc

SEQ ID NO: 1926486 - RNA, 19 nt, Artificial Sequence
  Description of Artificial Sequence: Synthetic oligonucleotide
auggugaguguguuguccu

SEQ ID NO: 1926487 - RNA, 19 nt, Artificial Sequence
  Description of Artificial Sequence: Synthetic oligonucleotide
gguugaaguagggagggag

SEQ ID NO: 1926488 - RNA, 19 nt, Artificial Sequence
  Description of Artificial Sequence: Synthetic oligonucleotide
ugccaugcucagauuggag

SEQ ID NO: 1926489 - RNA, 19 nt, Artificial Sequence
  Description of Artificial Sequence: Synthetic oligonucleotide
uugcccuaccucuggagca

SEQ ID NO: 1926490 - RNA, 19 nt, Artificial Sequence
  Description of Artificial Sequence: Synthetic oligonucleotide
guugauguuguuacauuca

SEQ ID NO: 1926491 - RNA, 19 nt, Artificial Sequence
  Description of Artificial Sequence: Synthetic oligonucleotide
ggccaauccacucagggca

SEQ ID NO: 1926492 - RNA, 19 nt, Artificial Sequence
  Description of Artificial Sequence: Synthetic oligonucleotide
ccuuuauuaaauagagauc

SEQ ID NO: 1926493 - RNA, 19 nt, Artificial Sequence
  Description of Artificial Sequence: Synthetic oligonucleotide
auggcucucagaguccccg

SEQ ID NO: 1926494 - RNA, 19 nt, Artificial Sequence
  Description of Artificial Sequence: Synthetic oligonucleotide
uugcuggauauagcgaaug

SEQ ID NO: 1926495 - RNA, 19 nt, Artificial Sequence
  Description of Artificial Sequence: Synthetic oligonucleotide
gauuggagacacuugcccu

SEQ ID NO: 1926496 - RNA, 19 nt, Artificial Sequence
  Description of Artificial Sequence: Synthetic oligonucleotide
ggaaauaggggcgugguga

SEQ ID NO: 1926497 - RNA, 19 nt, Artificial Sequence
  Description of Artificial Sequence: Synthetic oligonucleotide
uacagggucccuguagucu

SEQ ID NO: 1926498 - RNA, 19 nt, Artificial Sequence
  Description of Artificial Sequence: Synthetic oligonucleotide
ucgguucagcauccugccg

SEQ ID NO: 1926499 - RNA, 19 nt, Artificial Sequence
  Description of Artificial Sequence: Synthetic oligonucleotide
agaaagagcccagaccccu

SEQ ID NO: 1926500 - RNA, 19 nt, Artificial Sequence
  Description of Artificial Sequence: Synthetic oligonucleotide
ggucguauccaccuccuug

SEQ ID NO: 1926501 - RNA, 19 nt, Artificial Sequence
  Description of Artificial Sequence: Synthetic oligonucleotide
acuugcccuaccucuggag

SEQ ID NO: 1926502 - RNA, 19 nt, Artificial Sequence
  Description of Artificial Sequence: Synthetic oligonucleotide
uggcccgggaugaugguga

SEQ ID NO: 1926503 - RNA, 19 nt, Artificial Sequence
  Description of Artificial Sequence: Synthetic oligonucleotide
aucguguuacauuccacuu

SEQ ID NO: 1926504 - RNA, 19 nt, Artificial Sequence
  Description of Artificial Sequence: Synthetic oligonucleotide
ugccaucuuugucuggggu

SEQ ID NO: 1926505 - RNA, 19 nt, Artificial Sequence
  Description of Artificial Sequence: Synthetic oligonucleotide
aaccaagccuugcuggaua

SEQ ID NO: 1926506 - RNA, 19 nt, Artificial Sequence
  Description of Artificial Sequence: Synthetic oligonucleotide
agaucguguuacauuccac

SEQ ID NO: 1926507 - RNA, 19 nt, Artificial Sequence
  Description of Artificial Sequence: Synthetic oligonucleotide
acucagggcacacguguug

SEQ ID NO: 1926508 - RNA, 19 nt, Artificial Sequence
  Description of Artificial Sequence: Synthetic oligonucleotide
gcgaauguaggugaagaag

SEQ ID NO: 1926509 - RNA, 19 nt, Artificial Sequence
  Description of Artificial Sequence: Synthetic oligonucleotide
uuauccaggguaggugaug

SEQ ID NO: 1926510 - RNA, 19 nt, Artificial Sequence
  Description of Artificial Sequence: Synthetic oligonucleotide
guaggugaagaaguugcac

SEQ ID NO: 1926511 - RNA, 19 nt, Artificial Sequence
  Description of Artificial Sequence: Synthetic oligonucleotide
uugggaacagggugagaga

SEQ ID NO: 1926512 - RNA, 19 nt, Artificial Sequence
  Description of Artificial Sequence: Synthetic oligonucleotide
aggaaauaggggcguggug

SEQ ID NO: 1926513 - RNA, 19 nt, Artificial Sequence
  Description of Artificial Sequence: Synthetic oligonucleotide
agggcccacauccucccgg

SEQ ID NO: 1926514 - RNA, 19 nt, Artificial Sequence
  Description of Artificial Sequence: Synthetic oligonucleotide
acaucgguucagcauccug

SEQ ID NO: 1926515 - RNA, 19 nt, Artificial Sequence
  Description of Artificial Sequence: Synthetic oligonucleotide
auagcgaauguaggugaag

SEQ ID NO: 1926516 - RNA, 19 nt, Artificial Sequence
  Description of Artificial Sequence: Synthetic oligonucleotide
cacccuuucuaggaagggg

SEQ ID NO: 1926517 - RNA, 19 nt, Artificial Sequence
  Description of Artificial Sequence: Synthetic oligonucleotide
agcgaauguaggugaagaa

SEQ ID NO: 1926518 - RNA, 19 nt, Artificial Sequence
  Description of Artificial Sequence: Synthetic oligonucleotide
cagggucguauccaccucc

SEQ ID NO: 1926519 - RNA, 19 nt, Artificial Sequence
  Description of Artificial Sequence: Synthetic oligonucleotide
gagacacuugcccuaccuc

SEQ ID NO: 1926520 - RNA, 19 nt, Artificial Sequence
  Description of Artificial Sequence: Synthetic oligonucleotide
gaacaucgguucagcaucc

SEQ ID NO: 1926521 - RNA, 19 nt, Artificial Sequence
  Description of Artificial Sequence: Synthetic oligonucleotide
uuuguggcaguugucccuc

SEQ ID NO: 1926522 - RNA, 19 nt, Artificial Sequence
  Description of Artificial Sequence: Synthetic oligonucleotide
ugauccuggcccgggauga

SEQ ID NO: 1926523 - RNA, 19 nt, Artificial Sequence
  Description of Artificial Sequence: Synthetic oligonucleotide
cagggugagagauggccac

SEQ ID NO: 1926524 - RNA, 19 nt, Artificial Sequence
  Description of Artificial Sequence: Synthetic oligonucleotide
acagggucguauccaccuc

SEQ ID NO: 1926525 - RNA, 19 nt, Artificial Sequence
  Description of Artificial Sequence: Synthetic oligonucleotide
uccacucagggcacacgug

SEQ ID NO: 1926526 - RNA, 19 nt, Artificial Sequence
  Description of Artificial Sequence: Synthetic oligonucleotide
ucguauccaccuccuugcc

SEQ ID NO: 1926527 - RNA, 19 nt, Artificial Sequence
  Description of Artificial Sequence: Synthetic oligonucleotide
cuaccucuggagcaaucug

SEQ ID NO: 1926528 - RNA, 19 nt, Artificial Sequence
  Description of Artificial Sequence: Synthetic oligonucleotide
ggcuaugauggauaaggca

SEQ ID NO: 1926529 - RNA, 19 nt, Artificial Sequence
  Description of Artificial Sequence: Synthetic oligonucleotide
ugcucuagcucagagccua

SEQ ID NO: 1926530 - RNA, 19 nt, Artificial Sequence
  Description of Artificial Sequence: Synthetic oligonucleotide
ucccagaacaucgguucag

SEQ ID NO: 1926531 - RNA, 19 nt, Artificial Sequence
  Description of Artificial Sequence: Synthetic oligonucleotide
gaugggguugaaguaggga

SEQ ID NO: 1926532 - RNA, 19 nt, Artificial Sequence
  Description of Artificial Sequence: Synthetic oligonucleotide
aguccuuauccaggguagg

SEQ ID NO: 1926533 - RNA, 19 nt, Artificial Sequence
  Description of Artificial Sequence: Synthetic oligonucleotide
cagagcugagagcuccugc

SEQ ID NO: 1926534 - RNA, 19 nt, Artificial Sequence
  Description of Artificial Sequence: Synthetic oligonucleotide
auccugccgaaccaagccu

SEQ ID NO: 1926535 - RNA, 19 nt, Artificial Sequence
  Description of Artificial Sequence: Synthetic oligonucleotide
aagccaagcuuggcuagug

SEQ ID NO: 1926536 - RNA, 19 nt, Artificial Sequence
  Description of Artificial Sequence: Synthetic oligonucleotide
gagauguaauaauggcucu

SEQ ID NO: 1926537 - RNA, 19 nt, Artificial Sequence
  Description of Artificial Sequence: Synthetic oligonucleotide
gugagauguaauaauggcu

SEQ ID NO: 1926538 - RNA, 19 nt, Artificial Sequence
  Description of Artificial Sequence: Synthetic oligonucleotide
ccucuugugggaagaagcc

SEQ ID NO: 1926539 - RNA, 19 nt, Artificial Sequence
  Description of Artificial Sequence: Synthetic oligonucleotide
gauaaggcaggguccagau

SEQ ID NO: 1926540 - RNA, 19 nt, Artificial Sequence
  Description of Artificial Sequence: Synthetic oligonucleotide
ggauauagcgaauguaggu

SEQ ID NO: 1926541 - RNA, 19 nt, Artificial Sequence
  Description of Artificial Sequence: Synthetic oligonucleotide
aagggcccacauccucccg

SEQ ID NO: 1926542 - RNA, 19 nt, Artificial Sequence
  Description of Artificial Sequence: Synthetic oligonucleotide
cccacaacuacauccugag

SEQ ID NO: 1926543 - RNA, 19 nt, Artificial Sequence
  Description of Artificial Sequence: Synthetic oligonucleotide
caccagagcugagagcucc

SEQ ID NO: 1926544 - RNA, 19 nt, Artificial Sequence
  Description of Artificial Sequence: Synthetic oligonucleotide
gucccaaggcagcuguuug

SEQ ID NO: 1926545 - RNA, 19 nt, Artificial Sequence
  Description of Artificial Sequence: Synthetic oligonucleotide
acacccuuucuaggaaggg

SEQ ID NO: 1926546 - RNA, 19 nt, Artificial Sequence
  Description of Artificial Sequence: Synthetic oligonucleotide
gaggggaacaggagaggcc

SEQ ID NO: 1926547 - RNA, 19 nt, Artificial Sequence
  Description of Artificial Sequence: Synthetic oligonucleotide
aggguaggugaugcccucc

SEQ ID NO: 1926548 - RNA, 19 nt, Artificial Sequence
  Description of Artificial Sequence: Synthetic oligonucleotide
cacugcagugauccuggcc

SEQ ID NO: 1926549 - RNA, 19 nt, Artificial Sequence
  Description of Artificial Sequence: Synthetic oligonucleotide
cugcagugauccuggcccg

SEQ ID NO: 1926550 - RNA, 19 nt, Artificial Sequence
  Description of Artificial Sequence: Synthetic oligonucleotide
ccgaaccaagccuugcugg

SEQ ID NO: 1926551 - RNA, 19 nt, Artificial Sequence
  Description of Artificial Sequence: Synthetic oligonucleotide
uuucuaggaaggggcaguc

SEQ ID NO: 1926552 - RNA, 19 nt, Artificial Sequence
  Description of Artificial Sequence: Synthetic oligonucleotide
gacucauuuucagagcacu

SEQ ID NO: 1926553 - RNA, 19 nt, Artificial Sequence
  Description of Artificial Sequence: Synthetic oligonucleotide
augcccuaggccucuugug

SEQ ID NO: 1926554 - RNA, 19 nt, Artificial Sequence
  Description of Artificial Sequence: Synthetic oligonucleotide
cagcuguuugcucuagcuc

SEQ ID NO: 1926555 - RNA, 19 nt, Artificial Sequence
  Description of Artificial Sequence: Synthetic oligonucleotide
uucuaggaaggggcagucc

SEQ ID NO: 1926556 - RNA, 19 nt, Artificial Sequence
  Description of Artificial Sequence: Synthetic oligonucleotide
ugaguguguuguccuccac

SEQ ID NO: 1926557 - RNA, 19 nt, Artificial Sequence
  Description of Artificial Sequence: Synthetic oligonucleotide
uggggccaugcccuaggcc

SEQ ID NO: 1926558 - RNA, 19 nt, Artificial Sequence
  Description of Artificial Sequence: Synthetic oligonucleotide
agaccccuggcaauuuuag

SEQ ID NO: 1926559 - RNA, 19 nt, Artificial Sequence
  Description of Artificial Sequence: Synthetic oligonucleotide
uggagcaaucugaggccac

SEQ ID NO: 1926560 - RNA, 19 nt, Artificial Sequence
  Description of Artificial Sequence: Synthetic oligonucleotide
cagguacgggccaauccac

SEQ ID NO: 1926561 - RNA, 19 nt, Artificial Sequence
  Description of Artificial Sequence: Synthetic oligonucleotide
uagugacauccccuuccga

SEQ ID NO: 1926562 - RNA, 19 nt, Artificial Sequence
  Description of Artificial Sequence: Synthetic oligonucleotide
gccuacuucaggccugggg

SEQ ID NO: 1926563 - RNA, 19 nt, Artificial Sequence
  Description of Artificial Sequence: Synthetic oligonucleotide
ucuugucugucugucccaa

SEQ ID NO: 1926564 - RNA, 19 nt, Artificial Sequence
  Description of Artificial Sequence: Synthetic oligonucleotide
ggggauaugcccugcugug

SEQ ID NO: 1926565 - RNA, 19 nt, Artificial Sequence
  Description of Artificial Sequence: Synthetic oligonucleotide
cagggcucuguccuuucag

SEQ ID NO: 1926566 - RNA, 19 nt, Artificial Sequence
  Description of Artificial Sequence: Synthetic oligonucleotide
aggcggauucgguggugac

SEQ ID NO: 1926567 - RNA, 19 nt, Artificial Sequence
  Description of Artificial Sequence: Synthetic oligonucleotide
uuggagacacuugcccuac

SEQ ID NO: 1926568 - RNA, 19 nt, Artificial Sequence
  Description of Artificial Sequence: Synthetic oligonucleotide
gagccuacuucaggccugg

SEQ ID NO: 1926569 - RNA, 19 nt, Artificial Sequence
  Description of Artificial Sequence: Synthetic oligonucleotide
gcggauucgguggugacag

SEQ ID NO: 1926570 - RNA, 19 nt, Artificial Sequence
  Description of Artificial Sequence: Synthetic oligonucleotide
uggcuagugacauccccuu

SEQ ID NO: 1926571 - RNA, 19 nt, Artificial Sequence
  Description of Artificial Sequence: Synthetic oligonucleotide
cccgguacacccuuucuag

SEQ ID NO: 1926572 - RNA, 19 nt, Artificial Sequence
  Description of Artificial Sequence: Synthetic oligonucleotide
guggggauaugcccugcug

SEQ ID NO: 1926573 - RNA, 19 nt, Artificial Sequence
  Description of Artificial Sequence: Synthetic oligonucleotide
ugcagugauccuggcccgg

SEQ ID NO: 1926574 - RNA, 19 nt, Artificial Sequence
  Description of Artificial Sequence: Synthetic oligonucleotide
gccaugcucagauuggaga

SEQ ID NO: 1926575 - RNA, 19 nt, Artificial Sequence
  Description of Artificial Sequence: Synthetic oligonucleotide
gaaagagcccagaccccug

SEQ ID NO: 1926576 - RNA, 19 nt, Artificial Sequence
  Description of Artificial Sequence: Synthetic oligonucleotide
caacuacauccugagguuc

SEQ ID NO: 1926577 - RNA, 19 nt, Artificial Sequence
  Description of Artificial Sequence: Synthetic oligonucleotide
ucaaggcaagggcccacau

SEQ ID NO: 1926578 - RNA, 19 nt, Artificial Sequence
  Description of Artificial Sequence: Synthetic oligonucleotide
acagggugagagauggcca

SEQ ID NO: 1926579 - RNA, 19 nt, Artificial Sequence
  Description of Artificial Sequence: Synthetic oligonucleotide
acguguugauguuguuaca

SEQ ID NO: 1926580 - RNA, 19 nt, Artificial Sequence
  Description of Artificial Sequence: Synthetic oligonucleotide
ugcaguuccuggugggcua

SEQ ID NO: 1926581 - RNA, 19 nt, Artificial Sequence
  Description of Artificial Sequence: Synthetic oligonucleotide
agaugggguugaaguaggg

SEQ ID NO: 1926582 - RNA, 19 nt, Artificial Sequence
  Description of Artificial Sequence: Synthetic oligonucleotide
caaggcaagggcccacauc

SEQ ID NO: 1926583 - RNA, 19 nt, Artificial Sequence
  Description of Artificial Sequence: Synthetic oligonucleotide
guuaucuaggacucauuuu

SEQ ID NO: 1926584 - RNA, 19 nt, Artificial Sequence
  Description of Artificial Sequence: Synthetic oligonucleotide
accaagccuugcuggauau

SEQ ID NO: 1926585 - RNA, 19 nt, Artificial Sequence
  Description of Artificial Sequence: Synthetic oligonucleotide
acacguguugauguuguua

SEQ ID NO: 1926586 - RNA, 19 nt, Artificial Sequence
  Description of Artificial Sequence: Synthetic oligonucleotide
ggugaguguguuguccucc

SEQ ID NO: 1926587 - RNA, 19 nt, Artificial Sequence
  Description of Artificial Sequence: Synthetic oligonucleotide
ggaggggaacaggagaggc

SEQ ID NO: 1926588 - RNA, 19 nt, Artificial Sequence
  Description of Artificial Sequence: Synthetic oligonucleotide
ggggcaguccuuauccagg

SEQ ID NO: 1926589 - RNA, 19 nt, Artificial Sequence
  Description of Artificial Sequence: Synthetic oligonucleotide
gaguccccgaggcggauuc

SEQ ID NO: 1926590 - RNA, 19 nt, Artificial Sequence
  Description of Artificial Sequence: Synthetic oligonucleotide
agugacuccuggagauggg

SEQ ID NO: 1926591 - RNA, 19 nt, Artificial Sequence
  Description of Artificial Sequence: Synthetic oligonucleotide
cauacagggucccuguagu

SEQ ID NO: 1926592 - RNA, 19 nt, Artificial Sequence
  Description of Artificial Sequence: Synthetic oligonucleotide
gcucucagaguccccgagg

SEQ ID NO: 1926593 - RNA, 19 nt, Artificial Sequence
  Description of Artificial Sequence: Synthetic oligonucleotide
gaugauggugagauguaau

SEQ ID NO: 1926594 - RNA, 19 nt, Artificial Sequence
  Description of Artificial Sequence: Synthetic oligonucleotide
ggggcgguuaucuaggacu

SEQ ID NO: 1926595 - RNA, 19 nt, Artificial Sequence
  Description of Artificial Sequence: Synthetic oligonucleotide
gggccaauccacucagggc

SEQ ID NO: 1926596 - RNA, 19 nt, Artificial Sequence
  Description of Artificial Sequence: Synthetic oligonucleotide
uuccccugguggcacacuu

SEQ ID NO: 1926597 - RNA, 19 nt, Artificial Sequence
  Description of Artificial Sequence: Synthetic oligonucleotide
uggugaguguguuguccuc

SEQ ID NO: 1926598 - RNA, 19 nt, Artificial Sequence
  Description of Artificial Sequence: Synthetic oligonucleotide
gugaguguguuguccucca

SEQ ID NO: 1926599 - RNA, 19 nt, Artificial Sequence
  Description of Artificial Sequence: Synthetic oligonucleotide
agagccuacuucaggccug

SEQ ID NO: 1926600 - RNA, 19 nt, Artificial Sequence
  Description of Artificial Sequence: Synthetic oligonucleotide
uggauaaggcaggguccag

SEQ ID NO: 1926601 - RNA, 19 nt, Artificial Sequence
  Description of Artificial Sequence: Synthetic oligonucleotide
gggauaugcccugcugugg

SEQ ID NO: 1926602 - RNA, 19 nt, Artificial Sequence
  Description of Artificial Sequence: Synthetic oligonucleotide
aacaucgguucagcauccu

SEQ ID NO: 1926603 - RNA, 19 nt, Artificial Sequence
  Description of Artificial Sequence: Synthetic oligonucleotide
ccuggcaauuuuaggauca

SEQ ID NO: 1926604 - RNA, 19 nt, Artificial Sequence
  Description of Artificial Sequence: Synthetic oligonucleotide
gguuaucuaggacucauuu

SEQ ID NO: 1926605 - RNA, 19 nt, Artificial Sequence
  Description of Artificial Sequence: Synthetic oligonucleotide
gcccuaggccucuuguggg

SEQ ID NO: 1926606 - RNA, 19 nt, Artificial Sequence
  Description of Artificial Sequence: Synthetic oligonucleotide
ccuuauccaggguagguga

SEQ ID NO: 1926607 - RNA, 19 nt, Artificial Sequence
  Description of Artificial Sequence: Synthetic oligonucleotide
augauggauaaggcagggu

SEQ ID NO: 1926608 - RNA, 19 nt, Artificial Sequence
  Description of Artificial Sequence: Synthetic oligonucleotide
gugggaagaagccaagcuu

SEQ ID NO: 1926609 - RNA, 19 nt, Artificial Sequence
  Description of Artificial Sequence: Synthetic oligonucleotide
agcauccugccgaaccaag

SEQ ID NO: 1926610 - RNA, 19 nt, Artificial Sequence
  Description of Artificial Sequence: Synthetic oligonucleotide
cagaacaucgguucagcau

SEQ ID NO: 1926611 - RNA, 19 nt, Artificial Sequence
  Description of Artificial Sequence: Synthetic oligonucleotide
gguacgggccaauccacuc

SEQ ID NO: 1926612 - RNA, 19 nt, Artificial Sequence
  Description of Artificial Sequence: Synthetic oligonucleotide
ccaagugcaguuccuggug

SEQ ID NO: 1926613 - RNA, 19 nt, Artificial Sequence
  Description of Artificial Sequence: Synthetic oligonucleotide
guggccugcccacuccaug

SEQ ID NO: 1926614 - RNA, 19 nt, Artificial Sequence
  Description of Artificial Sequence: Synthetic oligonucleotide
ggugaugcccuccaagccu

SEQ ID NO: 1926615 - RNA, 19 nt, Artificial Sequence
  Description of Artificial Sequence: Synthetic oligonucleotide
ugcucagauuggagacacu

SEQ ID NO: 1926616 - RNA, 19 nt, Artificial Sequence
  Description of Artificial Sequence: Synthetic oligonucleotide
gugagggauauguccaggu

SEQ ID NO: 1926617 - RNA, 19 nt, Artificial Sequence
  Description of Artificial Sequence: Synthetic oligonucleotide
ggugagagauggccacaag

SEQ ID NO: 1926618 - RNA, 19 nt, Artificial Sequence
  Description of Artificial Sequence: Synthetic oligonucleotide
gccgaaccaagccuugcug

SEQ ID NO: 1926619 - RNA, 19 nt, Artificial Sequence
  Description of Artificial Sequence: Synthetic oligonucleotide
gguacacccuuucuaggaa

SEQ ID NO: 1926620 - RNA, 19 nt, Artificial Sequence
  Description of Artificial Sequence: Synthetic oligonucleotide
cguguuacauuccacuuga

SEQ ID NO: 1926621 - RNA, 19 nt, Artificial Sequence
  Description of Artificial Sequence: Synthetic oligonucleotide
ucagggcacacguguugau

SEQ ID NO: 1926622 - RNA, 19 nt, Artificial Sequence
  Description of Artificial Sequence: Synthetic oligonucleotide
auaggggcguggugaggga

SEQ ID NO: 1926623 - RNA, 19 nt, Artificial Sequence
  Description of Artificial Sequence: Synthetic oligonucleotide
gcaguccuuauccagggua

SEQ ID NO: 1926624 - RNA, 19 nt, Artificial Sequence
  Description of Artificial Sequence: Synthetic oligonucleotide
augcccuccaagccuggaa

SEQ ID NO: 1926625 - RNA, 19 nt, Artificial Sequence
  Description of Artificial Sequence: Synthetic oligonucleotide
gccucuaugcagagaaaug

SEQ ID NO: 1926626 - RNA, 19 nt, Artificial Sequence
  Description of Artificial Sequence: Synthetic oligonucleotide
ccccaagugcaguuccugg

SEQ ID NO: 1926627 - RNA, 19 nt, Artificial Sequence
  Description of Artificial Sequence: Synthetic oligonucleotide
guccccgaggcggauucgg

SEQ ID NO: 1926628 - RNA, 19 nt, Artificial Sequence
  Description of Artificial Sequence: Synthetic oligonucleotide
uccccgaggcggauucggu

SEQ ID NO: 1926629 - RNA, 19 nt, Artificial Sequence
  Description of Artificial Sequence: Synthetic oligonucleotide
ggcucucagaguccccgag

SEQ ID NO: 1926630 - RNA, 19 nt, Artificial Sequence
  Description of Artificial Sequence: Synthetic oligonucleotide
ugaggccacuugggaacag

SEQ ID NO: 1926631 - RNA, 19 nt, Artificial Sequence
  Description of Artificial Sequence: Synthetic oligonucleotide
aaguagggagggaggggaa

SEQ ID NO: 1926632 - RNA, 19 nt, Artificial Sequence
  Description of Artificial Sequence: Synthetic oligonucleotide
acucauuuucagagcacuu

SEQ ID NO: 1926633 - RNA, 19 nt, Artificial Sequence
  Description of Artificial Sequence: Synthetic oligonucleotide
cgaauguaggugaagaagu

SEQ ID NO: 1926634 - RNA, 19 nt, Artificial Sequence
  Description of Artificial Sequence: Synthetic oligonucleotide
gaacagggugagagauggc

SEQ ID NO: 1926635 - RNA, 19 nt, Artificial Sequence
  Description of Artificial Sequence: Synthetic oligonucleotide
uggcacacuuuaggaagaa

SEQ ID NO: 1926636 - RNA, 19 nt, Artificial Sequence
  Description of Artificial Sequence: Synthetic oligonucleotide
gcaagggcccacauccucc

SEQ ID NO: 1926637 - RNA, 19 nt, Artificial Sequence
  Description of Artificial Sequence: Synthetic oligonucleotide
gcuguuugcucuagcucag

SEQ ID NO: 1926638 - RNA, 19 nt, Artificial Sequence
  Description of Artificial Sequence: Synthetic oligonucleotide
guggcacacuuuaggaaga

SEQ ID NO: 1926639 - RNA, 19 nt, Artificial Sequence
  Description of Artificial Sequence: Synthetic oligonucleotide
gcucaagcuggcuccagga

SEQ ID NO: 1926640 - RNA, 19 nt, Artificial Sequence
  Description of Artificial Sequence: Synthetic oligonucleotide
gggcuaugauggauaaggc

SEQ ID NO: 1926641 - RNA, 19 nt, Artificial Sequence
  Description of Artificial Sequence: Synthetic oligonucleotide
ccgguacacccuuucuagg

SEQ ID NO: 1926642 - RNA, 19 nt, Artificial Sequence
  Description of Artificial Sequence: Synthetic oligonucleotide
caagcuuggcuagugacau

SEQ ID NO: 1926643 - RNA, 19 nt, Artificial Sequence
  Description of Artificial Sequence: Synthetic oligonucleotide
ggcacacguguugauguug

SEQ ID NO: 1926644 - RNA, 19 nt, Artificial Sequence
  Description of Artificial Sequence: Synthetic oligonucleotide
ggugggcuaugauggauaa

SEQ ID NO: 1926645 - RNA, 19 nt, Artificial Sequence
  Description of Artificial Sequence: Synthetic oligonucleotide
cucccagaacaucgguuca

SEQ ID NO: 1926646 - RNA, 19 nt, Artificial Sequence
  Description of Artificial Sequence: Synthetic oligonucleotide
ucccuguagucuggauggc

SEQ ID NO: 1926647 - RNA, 19 nt, Artificial Sequence
  Description of Artificial Sequence: Synthetic oligonucleotide
ccacaacuacauccugagg

SEQ ID NO: 1926648 - RNA, 19 nt, Artificial Sequence
  Description of Artificial Sequence: Synthetic oligonucleotide
gugggcuaugauggauaag

SEQ ID NO: 1926649 - RNA, 19 nt, Artificial Sequence
  Description of Artificial Sequence: Synthetic oligonucleotide
aggaaggggcaguccuuau

SEQ ID NO: 1926650 - RNA, 19 nt, Artificial Sequence
  Description of Artificial Sequence: Synthetic oligonucleotide
cugccgaaccaagccuugc

SEQ ID NO: 1926651 - RNA, 19 nt, Artificial Sequence
  Description of Artificial Sequence: Synthetic oligonucleotide
ggaacucugaaaacagggu

SEQ ID NO: 1926652 - RNA, 19 nt, Artificial Sequence
  Description of Artificial Sequence: Synthetic oligonucleotide
guguugauguuguuacauu

SEQ ID NO: 1926653 - RNA, 19 nt, Artificial Sequence
  Description of Artificial Sequence: Synthetic oligonucleotide
ccuuucuaggaaggggcag

SEQ ID NO: 1926654 - RNA, 19 nt, Artificial Sequence
  Description of Artificial Sequence: Synthetic oligonucleotide
ggaugauggugagauguaa

SEQ ID NO: 1926655 - RNA, 19 nt, Artificial Sequence
  Description of Artificial Sequence: Synthetic oligonucleotide
agguacgggccaauccacu

SEQ ID NO: 1926656 - RNA, 19 nt, Artificial Sequence
  Description of Artificial Sequence: Synthetic oligonucleotide
ggcaguugucccucugcca

SEQ ID NO: 1926657 - RNA, 19 nt, Artificial Sequence
  Description of Artificial Sequence: Synthetic oligonucleotide
ggagacacuugcccuaccu

SEQ ID NO: 1926658 - RNA, 19 nt, Artificial Sequence
  Description of Artificial Sequence: Synthetic oligonucleotide
cuggcccgggaugauggug

SEQ ID NO: 1926659 - RNA, 19 nt, Artificial Sequence
  Description of Artificial Sequence: Synthetic oligonucleotide
uccccugguggcacacuuu

SEQ ID NO: 1926660 - RNA, 19 nt, Artificial Sequence
  Description of Artificial Sequence: Synthetic oligonucleotide
gucccacauacaggguccc

SEQ ID NO: 1926661 - RNA, 19 nt, Artificial Sequence
  Description of Artificial Sequence: Synthetic oligonucleotide
gcauccugccgaaccaagc

SEQ ID NO: 1926662 - RNA, 19 nt, Artificial Sequence
  Description of Artificial Sequence: Synthetic oligonucleotide
uggcucaagcuggcuccag

SEQ ID NO: 1926663 - RNA, 19 nt, Artificial Sequence
  Description of Artificial Sequence: Synthetic oligonucleotide
cagaccccuggcaauuuua

SEQ ID NO: 1926664 - RNA, 19 nt, Artificial Sequence
  Description of Artificial Sequence: Synthetic oligonucleotide
caugcccuaggccucuugu

SEQ ID NO: 1926665 - RNA, 19 nt, Artificial Sequence
  Description of Artificial Sequence: Synthetic oligonucleotide
ggcguggugagggauaugu

SEQ ID NO: 1926666 - RNA, 19 nt, Artificial Sequence
  Description of Artificial Sequence: Synthetic oligonucleotide
gcagugauccuggcccggg

SEQ ID NO: 1926667 - RNA, 19 nt, Artificial Sequence
  Description of Artificial Sequence: Synthetic oligonucleotide
cccuggcaauuuuaggauc

SEQ ID NO: 1926668 - RNA, 19 nt, Artificial Sequence
  Description of Artificial Sequence: Synthetic oligonucleotide
auccuggcccgggaugaug

SEQ ID NO: 1926669 - RNA, 19 nt, Artificial Sequence
  Description of Artificial Sequence: Synthetic oligonucleotide
cagcagcccgcaccagagc

SEQ ID NO: 1926670 - RNA, 19 nt, Artificial Sequence
  Description of Artificial Sequence: Synthetic oligonucleotide
uaggggcguggugagggau

SEQ ID NO: 1926671 - RNA, 19 nt, Artificial Sequence
  Description of Artificial Sequence: Synthetic oligonucleotide
ucccacauacagggucccu

SEQ ID NO: 1926672 - RNA, 19 nt, Artificial Sequence
  Description of Artificial Sequence: Synthetic oligonucleotide
gggaacagggugagagaug

SEQ ID NO: 1926673 - RNA, 19 nt, Artificial Sequence
  Description of Artificial Sequence: Synthetic oligonucleotide
gaagccaagcuuggcuagu

SEQ ID NO: 1926674 - RNA, 19 nt, Artificial Sequence
  Description of Artificial Sequence: Synthetic oligonucleotide
auccucccgguacacccuu

SEQ ID NO: 1926675 - RNA, 19 nt, Artificial Sequence
  Description of Artificial Sequence: Synthetic oligonucleotide
caacaaagccuuccuuuau

SEQ ID NO: 1926676 - RNA, 19 nt, Artificial Sequence
  Description of Artificial Sequence: Synthetic oligonucleotide
gggcgguuaucuaggacuc

SEQ ID NO: 1926677 - RNA, 19 nt, Artificial Sequence
  Description of Artificial Sequence: Synthetic oligonucleotide
ggauucgguggugacaggu

SEQ ID NO: 1926678 - RNA, 19 nt, Artificial Sequence
  Description of Artificial Sequence: Synthetic oligonucleotide
guccuuauccaggguaggu

SEQ ID NO: 1926679 - RNA, 19 nt, Artificial Sequence
  Description of Artificial Sequence: Synthetic oligonucleotide
ggcuagugacauccccuuc

SEQ ID NO: 1926680 - RNA, 19 nt, Artificial Sequence
  Description of Artificial Sequence: Synthetic oligonucleotide
acuugggaacagggugaga

SEQ ID NO: 1926681 - RNA, 19 nt, Artificial Sequence
  Description of Artificial Sequence: Synthetic oligonucleotide
acgggccaauccacucagg

SEQ ID NO: 1926682 - RNA, 19 nt, Artificial Sequence
  Description of Artificial Sequence: Synthetic oligonucleotide
guuccuggugggcuaugau

SEQ ID NO: 1926683 - RNA, 19 nt, Artificial Sequence
  Description of Artificial Sequence: Synthetic oligonucleotide
gguaggugaugcccuccaa

SEQ ID NO: 1926684 - RNA, 19 nt, Artificial Sequence
  Description of Artificial Sequence: Synthetic oligonucleotide
uccucccgguacacccuuu

SEQ ID NO: 1926685 - RNA, 19 nt, Artificial Sequence
  Description of Artificial Sequence: Synthetic oligonucleotide
ggcggauucgguggugaca

SEQ ID NO: 1926686 - RNA, 19 nt, Artificial Sequence
  Description of Artificial Sequence: Synthetic oligonucleotide
cccuuucuaggaaggggca

SEQ ID NO: 1926687 - RNA, 19 nt, Artificial Sequence
  Description of Artificial Sequence: Synthetic oligonucleotide
ggccucuaugcagagaaau

SEQ ID NO: 1926688 - RNA, 19 nt, Artificial Sequence
  Description of Artificial Sequence: Synthetic oligonucleotide
gccuugcuggauauagcga

SEQ ID NO: 1926689 - RNA, 19 nt, Artificial Sequence
  Description of Artificial Sequence: Synthetic oligonucleotide
ccacaggcucgauggugag

SEQ ID NO: 1926690 - RNA, 19 nt, Artificial Sequence
  Description of Artificial Sequence: Synthetic oligonucleotide
ccccgaggcggauucggug

SEQ ID NO: 1926691 - RNA, 19 nt, Artificial Sequence
  Description of Artificial Sequence: Synthetic oligonucleotide
aggcaagggcccacauccu

SEQ ID NO: 1926692 - RNA, 19 nt, Artificial Sequence
  Description of Artificial Sequence: Synthetic oligonucleotide
agaguccccgaggcggauu

SEQ ID NO: 1926693 - RNA, 19 nt, Artificial Sequence
  Description of Artificial Sequence: Synthetic oligonucleotide
ggugacagguacgggccaa

SEQ ID NO: 1926694 - RNA, 19 nt, Artificial Sequence
  Description of Artificial Sequence: Synthetic oligonucleotide
gggaugauggugagaugua

SEQ ID NO: 1926695 - RNA, 19 nt, Artificial Sequence
  Description of Artificial Sequence: Synthetic oligonucleotide
aggggcguggugagggaua

SEQ ID NO: 1926696 - RNA, 19 nt, Artificial Sequence
  Description of Artificial Sequence: Synthetic oligonucleotide
ccucccgguacacccuuuc

SEQ ID NO: 1926697 - RNA, 19 nt, Artificial Sequence
  Description of Artificial Sequence: Synthetic oligonucleotide
ggagcaaucugaggccacu

SEQ ID NO: 1926698 - RNA, 19 nt, Artificial Sequence
  Description of Artificial Sequence: Synthetic oligonucleotide
gcacacguguugauguugu

SEQ ID NO: 1926699 - RNA, 19 nt, Artificial Sequence
  Description of Artificial Sequence: Synthetic oligonucleotide
cccucugccaugcucagau

SEQ ID NO: 1926700 - RNA, 19 nt, Artificial Sequence
  Description of Artificial Sequence: Synthetic oligonucleotide
cagcauccugccgaaccaa

SEQ ID NO: 1926701 - RNA, 19 nt, Artificial Sequence
  Description of Artificial Sequence: Synthetic oligonucleotide
gguggggauaugcccugcu

SEQ ID NO: 1926702 - RNA, 19 nt, Artificial Sequence
  Description of Artificial Sequence: Synthetic oligonucleotide
ccagagcugagagcuccug

SEQ ID NO: 1926703 - RNA, 19 nt, Artificial Sequence
  Description of Artificial Sequence: Synthetic oligonucleotide
cacagugggcagagucugu

SEQ ID NO: 1926704 - RNA, 19 nt, Artificial Sequence
  Description of Artificial Sequence: Synthetic oligonucleotide
cccaagugcaguuccuggu

SEQ ID NO: 1926705 - RNA, 19 nt, Artificial Sequence
  Description of Artificial Sequence: Synthetic oligonucleotide
cucccgguacacccuuucu

SEQ ID NO: 1926706 - RNA, 19 nt, Artificial Sequence
  Description of Artificial Sequence: Synthetic oligonucleotide
cccgggaugauggugagau

SEQ ID NO: 1926707 - RNA, 19 nt, Artificial Sequence
  Description of Artificial Sequence: Synthetic oligonucleotide
cguauccaccuccuugcca

SEQ ID NO: 1926708 - RNA, 19 nt, Artificial Sequence
  Description of Artificial Sequence: Synthetic oligonucleotide
cucugaaaacagggucgua

SEQ ID NO: 1926709 - RNA, 19 nt, Artificial Sequence
  Description of Artificial Sequence: Synthetic oligonucleotide
ggcgguuaucuaggacuca

SEQ ID NO: 1926710 - RNA, 19 nt, Artificial Sequence
  Description of Artificial Sequence: Synthetic oligonucleotide
cccuaccucuggagcaauc

SEQ ID NO: 1926711 - RNA, 19 nt, Artificial Sequence
  Description of Artificial Sequence: Synthetic oligonucleotide
gcgguuaucuaggacucau

SEQ ID NO: 1926712 - RNA, 19 nt, Artificial Sequence
  Description of Artificial Sequence: Synthetic oligonucleotide
auucaacagugggcaccuu

SEQ ID NO: 1926713 - RNA, 19 nt, Artificial Sequence
  Description of Artificial Sequence: Synthetic oligonucleotide
cccuaggccucuuguggga

SEQ ID NO: 1926714 - RNA, 19 nt, Artificial Sequence
  Description of Artificial Sequence: Synthetic oligonucleotide
ccgggaugauggugagaug

SEQ ID NO: 1926715 - RNA, 19 nt, Artificial Sequence
  Description of Artificial Sequence: Synthetic oligonucleotide
ccuaccucuggagcaaucu

SEQ ID NO: 1926716 - RNA, 19 nt, Artificial Sequence
  Description of Artificial Sequence: Synthetic oligonucleotide
ccccuggcaauuuuaggau

SEQ ID NO: 1926717 - RNA, 19 nt, Artificial Sequence
  Description of Artificial Sequence: Synthetic oligonucleotide
ccaugcccuaggccucuug

SEQ ID NO: 1926718 - RNA, 19 nt, Artificial Sequence
  Description of Artificial Sequence: Synthetic oligonucleotide
gcguggugagggauauguc

SEQ ID NO: 1926719 - RNA, 19 nt, Artificial Sequence
  Description of Artificial Sequence: Synthetic oligonucleotide
gcucuagcucagagccuac

SEQ ID NO: 1926720 - RNA, 19 nt, Artificial Sequence
  Description of Artificial Sequence: Synthetic oligonucleotide
gggccaugcccuaggccuc

SEQ ID NO: 1926721 - RNA, 19 nt, Artificial Sequence
  Description of Artificial Sequence: Synthetic oligonucleotide
ccuuccgaagccucauaau

SEQ ID NO: 1926722 - RNA, 19 nt, Artificial Sequence
  Description of Artificial Sequence: Synthetic oligonucleotide
gcuggugacccagggcucu

SEQ ID NO: 1926723 - RNA, 19 nt, Artificial Sequence
  Description of Artificial Sequence: Synthetic oligonucleotide
cggauucgguggugacagg

SEQ ID NO: 1926724 - RNA, 19 nt, Artificial Sequence
  Description of Artificial Sequence: Synthetic oligonucleotide
gacccagggcucuguccuu

SEQ ID NO: 1926725 - RNA, 19 nt, Artificial Sequence
  Description of Artificial Sequence: Synthetic oligonucleotide
cacacguguugauguuguu

SEQ ID NO: 1926726 - RNA, 19 nt, Artificial Sequence
  Description of Artificial Sequence: Synthetic oligonucleotide
gugacagguacgggccaau

SEQ ID NO: 1926727 - RNA, 19 nt, Artificial Sequence
  Description of Artificial Sequence: Synthetic oligonucleotide
cacaggcucgauggugagu

SEQ ID NO: 1926728 - RNA, 19 nt, Artificial Sequence
  Description of Artificial Sequence: Synthetic oligonucleotide
gccuggggccaugcccuag

SEQ ID NO: 1926729 - RNA, 19 nt, Artificial Sequence
  Description of Artificial Sequence: Synthetic oligonucleotide
caggcucgauggugagugu

SEQ ID NO: 1926730 - RNA, 19 nt, Artificial Sequence
  Description of Artificial Sequence: Synthetic oligonucleotide
ccuaggccucuugugggaa

SEQ ID NO: 1926731 - RNA, 19 nt, Artificial Sequence
  Description of Artificial Sequence: Synthetic oligonucleotide
ccaauccacucagggcaca

SEQ ID NO: 1926732 - RNA, 19 nt, Artificial Sequence
  Description of Artificial Sequence: Synthetic oligonucleotide
guuccccugguggcacacu

SEQ ID NO: 1926733 - RNA, 19 nt, Artificial Sequence
  Description of Artificial Sequence: Synthetic oligonucleotide
gggcguggugagggauaug

SEQ ID NO: 1926734 - RNA, 19 nt, Artificial Sequence
  Description of Artificial Sequence: Synthetic oligonucleotide
ggggcguggugagggauau

SEQ ID NO: 1926735 - RNA, 19 nt, Artificial Sequence
  Description of Artificial Sequence: Synthetic oligonucleotide
ggcccacauccucccggua

SEQ ID NO: 1926736 - RNA, 19 nt, Artificial Sequence
  Description of Artificial Sequence: Synthetic oligonucleotide
cgaggcggauucgguggug

SEQ ID NO: 1926737 - RNA, 19 nt, Artificial Sequence
  Description of Artificial Sequence: Synthetic oligonucleotide
gggucguauccaccuccuu

SEQ ID NO: 1926738 - RNA, 19 nt, Artificial Sequence
  Description of Artificial Sequence: Synthetic oligonucleotide
ggccaugcccuaggccucu

SEQ ID NO: 1926739 - RNA, 19 nt, Artificial Sequence
  Description of Artificial Sequence: Synthetic oligonucleotide
ccaagccuugcuggauaua

SEQ ID NO: 1926740 - RNA, 19 nt, Artificial Sequence
  Description of Artificial Sequence: Synthetic oligonucleotide
ggccuggggccaugcccua

SEQ ID NO: 1926741 - RNA, 19 nt, Artificial Sequence
  Description of Artificial Sequence: Synthetic oligonucleotide
ccgaggcggauucgguggu

SEQ ID NO: 1926742 - RNA, 19 nt, Artificial Sequence
  Description of Artificial Sequence: Synthetic oligonucleotide
ccagaccccuggcaauuuu

SEQ ID NO: 1926743 - RNA, 19 nt, Artificial Sequence
  Description of Artificial Sequence: Synthetic oligonucleotide
cagaguccccgaggcggau

SEQ ID NO: 1926744 - RNA, 19 nt, Artificial Sequence
  Description of Artificial Sequence: Synthetic oligonucleotide
ccccuuccgaagccucaua

SEQ ID NO: 1926745 - RNA, 19 nt, Artificial Sequence
  Description of Artificial Sequence: Synthetic oligonucleotide
cgguuaucuaggacucauu

SEQ ID NO: 1926746 - RNA, 19 nt, Artificial Sequence
  Description of Artificial Sequence: Synthetic oligonucleotide
ccuggcccgggaugauggu

SEQ ID NO: 1926747 - RNA, 19 nt, Artificial Sequence
  Description of Artificial Sequence: Synthetic oligonucleotide
gcccuaccucuggagcaau

SEQ ID NO: 1926748 - RNA, 19 nt, Artificial Sequence
  Description of Artificial Sequence: Synthetic oligonucleotide
cccagaccccuggcaauuu

SEQ ID NO: 1926749 - RNA, 19 nt, Artificial Sequence
  Description of Artificial Sequence: Synthetic oligonucleotide
gccaugcccuaggccucuu

SEQ ID NO: 1926750 - RNA, 19 nt, Artificial Sequence
  Description of Artificial Sequence: Synthetic oligonucleotide
acuaccacccauuacaggc

SEQ ID NO: 1926751 - RNA, 19 nt, Artificial Sequence
  Description of Artificial Sequence: Synthetic oligonucleotide
uaguacuucacaaagagcu

SEQ ID NO: 1926752 - RNA, 19 nt, Artificial Sequence
  Description of Artificial Sequence: Synthetic oligonucleotide
uggguugacaaucugagcc

SEQ ID NO: 1926753 - RNA, 19 nt, Artificial Sequence
  Description of Artificial Sequence: Synthetic oligonucleotide
uuucuuuauuagcucaucg

SEQ ID NO: 1926754 - RNA, 19 nt, Artificial Sequence
  Description of Artificial Sequence: Synthetic oligonucleotide
caacaaacaagcaaugggg

SEQ ID NO: 1926755 - RNA, 19 nt, Artificial Sequence
  Description of Artificial Sequence: Synthetic oligonucleotide
cucauugagauucaugucc

SEQ ID NO: 1926756 - RNA, 19 nt, Artificial Sequence
  Description of Artificial Sequence: Synthetic oligonucleotide
acuuucaaaaccugugugg

SEQ ID NO: 1926757 - RNA, 19 nt, Artificial Sequence
  Description of Artificial Sequence: Synthetic oligonucleotide
augauaguacuucacaaag

SEQ ID NO: 1926758 - RNA, 19 nt, Artificial Sequence
  Description of Artificial Sequence: Synthetic oligonucleotide
uggcuaacagcaaagaucu

SEQ ID NO: 1926759 - RNA, 19 nt, Artificial Sequence
  Description of Artificial Sequence: Synthetic oligonucleotide
uugagagcaaggcaugugg

SEQ ID NO: 1926760 - RNA, 19 nt, Artificial Sequence
  Description of Artificial Sequence: Synthetic oligonucleotide
uaaugggacucgaugaggg

SEQ ID NO: 1926761 - RNA, 19 nt, Artificial Sequence
  Description of Artificial Sequence: Synthetic oligonucleotide
ucagguguaacccuguuuc

SEQ ID NO: 1926762 - RNA, 19 nt, Artificial Sequence
  Description of Artificial Sequence: Synthetic oligonucleotide
accaacuguuccuucaccc

SEQ ID NO: 1926763 - RNA, 19 nt, Artificial Sequence
  Description of Artificial Sequence: Synthetic oligonucleotide
gaugcauggucucaggggc

SEQ ID NO: 1926764 - RNA, 19 nt, Artificial Sequence
  Description of Artificial Sequence: Synthetic oligonucleotide
agcccaauuggcuaacagc

SEQ ID NO: 1926765 - RNA, 19 nt, Artificial Sequence
  Description of Artificial Sequence: Synthetic oligonucleotide
uggccuugcacucacagug

SEQ ID NO: 1926766 - RNA, 19 nt, Artificial Sequence
  Description of Artificial Sequence: Synthetic oligonucleotide
acugugagagcuuccgggc

SEQ ID NO: 1926767 - RNA, 19 nt, Artificial Sequence
  Description of Artificial Sequence: Synthetic oligonucleotide
gacugugagagcuuccggg

SEQ ID NO: 1926768 - RNA, 19 nt, Artificial Sequence
  Description of Artificial Sequence: Synthetic oligonucleotide
uucaaaaccugugugggcc

SEQ ID NO: 1926769 - RNA, 19 nt, Artificial Sequence
  Description of Artificial Sequence: Synthetic oligonucleotide
aaccaacuguuccuucacc

SEQ ID NO: 1926770 - RNA, 19 nt, Artificial Sequence
  Description of Artificial Sequence: Synthetic oligonucleotide
uucuuuauuagcucaucga

SEQ ID NO: 1926771 - RNA, 19 nt, Artificial Sequence
  Description of Artificial Sequence: Synthetic oligonucleotide
gcaacaaacaagcaauggg

SEQ ID NO: 1926772 - RNA, 19 nt, Artificial Sequence
  Description of Artificial Sequence: Synthetic oligonucleotide
agaucuggagcacagccag

SEQ ID NO: 1926773 - RNA, 19 nt, Artificial Sequence
  Description of Artificial Sequence: Synthetic oligonucleotide
auuacaggcagcgcaaagg

SEQ ID NO: 1926774 - RNA, 19 nt, Artificial Sequence
  Description of Artificial Sequence: Synthetic oligonucleotide
ucauucacgggccaugcac

SEQ ID NO: 1926775 - RNA, 19 nt, Artificial Sequence
  Description of Artificial Sequence: Synthetic oligonucleotide
aggacugagggaucuggcc

SEQ ID NO: 1926776 - RNA, 19 nt, Artificial Sequence
  Description of Artificial Sequence: Synthetic oligonucleotide
acaagacucaucccagagg

SEQ ID NO: 1926777 - RNA, 19 nt, Artificial Sequence
  Description of Artificial Sequence: Synthetic oligonucleotide
uuucaguugcucaaccaac

SEQ ID NO: 1926778 - RNA, 19 nt, Artificial Sequence
  Description of Artificial Sequence: Synthetic oligonucleotide
gacaagacucaucccagag

SEQ ID NO: 1926779 - RNA, 19 nt, Artificial Sequence
  Description of Artificial Sequence: Synthetic oligonucleotide
  modified_base (7)..(7): a, c, u, g, unknown or other
ucuaccncuugagagcaag

SEQ ID NO: 1926780 - RNA, 19 nt, Artificial Sequence
  Description of Artificial Sequence: Synthetic oligonucleotide
aagccguuuccugacuucc

SEQ ID NO: 1926781 - RNA, 19 nt, Artificial Sequence
  Description of Artificial Sequence: Synthetic oligonucleotide
agugaugacauggucaugu

SEQ ID NO: 1926782 - RNA, 19 nt, Artificial Sequence
  Description of Artificial Sequence: Synthetic oligonucleotide
ugcacggccauucuuggca

SEQ ID NO: 1926783 - RNA, 19 nt, Artificial Sequence
  Description of Artificial Sequence: Synthetic oligonucleotide
ugagggcacuuucaaaacc

SEQ ID NO: 1926784 - RNA, 19 nt, Artificial Sequence
  Description of Artificial Sequence: Synthetic oligonucleotide
caugacaagacucauccca

SEQ ID NO: 1926785 - RNA, 19 nt, Artificial Sequence
  Description of Artificial Sequence: Synthetic oligonucleotide
gagagcaaggcaugugggg

SEQ ID NO: 1926786 - RNA, 19 nt, Artificial Sequence
  Description of Artificial Sequence: Synthetic oligonucleotide
ucucucaucaaaaggcauc

SEQ ID NO: 1926787 - RNA, 19 nt, Artificial Sequence
  Description of Artificial Sequence: Synthetic oligonucleotide
aaagccuucagccguccga

SEQ ID NO: 1926788 - RNA, 19 nt, Artificial Sequence
  Description of Artificial Sequence: Synthetic oligonucleotide
gcugaugaacaucucaagg

SEQ ID NO: 1926789 - RNA, 19 nt, Artificial Sequence
  Description of Artificial Sequence: Synthetic oligonucleotide
uucaguugcucaaccaacu

SEQ ID NO: 1926790 - RNA, 19 nt, Artificial Sequence
  Description of Artificial Sequence: Synthetic oligonucleotide
ucaaccaacuguuccuuca

SEQ ID NO: 1926791 - RNA, 19 nt, Artificial Sequence
  Description of Artificial Sequence: Synthetic oligonucleotide
caaucugagccacugcugc

SEQ ID NO: 1926792 - RNA, 19 nt, Artificial Sequence
  Description of Artificial Sequence: Synthetic oligonucleotide
gagggaucuggccuugugg

SEQ ID NO: 1926793 - RNA, 19 nt, Artificial Sequence
  Description of Artificial Sequence: Synthetic oligonucleotide
guugagggcacuuucaaaa

SEQ ID NO: 1926794 - RNA, 19 nt, Artificial Sequence
  Description of Artificial Sequence: Synthetic oligonucleotide
uaugcacggccauucuugg

SEQ ID NO: 1926795 - RNA, 19 nt, Artificial Sequence
  Description of Artificial Sequence: Synthetic oligonucleotide
gccaugacaagacucaucc

SEQ ID NO: 1926796 - RNA, 19 nt, Artificial Sequence
  Description of Artificial Sequence: Synthetic oligonucleotide
aggcguugcucauucacgg

SEQ ID NO: 1926797 - RNA, 19 nt, Artificial Sequence
  Description of Artificial Sequence: Synthetic oligonucleotide
uuucaaaaccugugugggc

SEQ ID NO: 1926798 - RNA, 19 nt, Artificial Sequence
  Description of Artificial Sequence: Synthetic oligonucleotide
ucacgggccaugcacacca

SEQ ID NO: 1926799 - RNA, 19 nt, Artificial Sequence
  Description of Artificial Sequence: Synthetic oligonucleotide
agguguaacccuguuuccc

SEQ ID NO: 1926800 - RNA, 19 nt, Artificial Sequence
  Description of Artificial Sequence: Synthetic oligonucleotide
guuccuucacccgagcugg

SEQ ID NO: 1926801 - RNA, 19 nt, Artificial Sequence
  Description of Artificial Sequence: Synthetic oligonucleotide
cuugaggcugcugaggcgg

SEQ ID NO: 1926802 - RNA, 19 nt, Artificial Sequence
  Description of Artificial Sequence: Synthetic oligonucleotide
cucaucgaugaucaccugc

SEQ ID NO: 1926803 - RNA, 19 nt, Artificial Sequence
  Description of Artificial Sequence: Synthetic oligonucleotide
gcuacugucagcaacagca

SEQ ID NO: 1926804 - RNA, 19 nt, Artificial Sequence
  Description of Artificial Sequence: Synthetic oligonucleotide
aaggucucggaucuggguu

SEQ ID NO: 1926805 - RNA, 19 nt, Artificial Sequence
  Description of Artificial Sequence: Synthetic oligonucleotide
ucaaggucucggaucuggg

SEQ ID NO: 1926806 - RNA, 19 nt, Artificial Sequence
  Description of Artificial Sequence: Synthetic oligonucleotide
ugcauccacacgcuggcgc

SEQ ID NO: 1926807 - RNA, 19 nt, Artificial Sequence
  Description of Artificial Sequence: Synthetic oligonucleotide
aaggacugagggaucuggc

SEQ ID NO: 1926808 - RNA, 19 nt, Artificial Sequence
  Description of Artificial Sequence: Synthetic oligonucleotide
ugacuugcagaugagguuc

SEQ ID NO: 1926809 - RNA, 19 nt, Artificial Sequence
  Description of Artificial Sequence: Synthetic oligonucleotide
cacagccaugguuagcucg

SEQ ID NO: 1926810 - RNA, 19 nt, Artificial Sequence
  Description of Artificial Sequence: Synthetic oligonucleotide
gaacaucucaaggucucgg

SEQ ID NO: 1926811 - RNA, 19 nt, Artificial Sequence
  Description of Artificial Sequence: Synthetic oligonucleotide
ugcucaaccaacuguuccu

SEQ ID NO: 1926812 - RNA, 19 nt, Artificial Sequence
  Description of Artificial Sequence: Synthetic oligonucleotide
  modified_base (4)..(4): a, c, u, g, unknown or other
accncuugagagcaaggca

SEQ ID NO: 1926813 - RNA, 19 nt, Artificial Sequence
  Description of Artificial Sequence: Synthetic oligonucleotide
uggcguagaggccaugggc

SEQ ID NO: 1926814 - RNA, 19 nt, Artificial Sequence
  Description of Artificial Sequence: Synthetic oligonucleotide
uuggcaugauaguacuuca

SEQ ID NO: 1926815 - RNA, 19 nt, Artificial Sequence
  Description of Artificial Sequence: Synthetic oligonucleotide
acccauuacaggcagcgca

SEQ ID NO: 1926816 - RNA, 19 nt, Artificial Sequence
  Description of Artificial Sequence: Synthetic oligonucleotide
ugugagagcuuccgggcug

SEQ ID NO: 1926817 - RNA, 19 nt, Artificial Sequence
  Description of Artificial Sequence: Synthetic oligonucleotide
uagcucaucgaugaucacc

SEQ ID NO: 1926818 - RNA, 19 nt, Artificial Sequence
  Description of Artificial Sequence: Synthetic oligonucleotide
agcugaugaacaucucaag

SEQ ID NO: 1926819 - RNA, 19 nt, Artificial Sequence
  Description of Artificial Sequence: Synthetic oligonucleotide
auguucuugagcuggcgca

SEQ ID NO: 1926820 - RNA, 19 nt, Artificial Sequence
  Description of Artificial Sequence: Synthetic oligonucleotide
cacuuucaaaaccugugug

SEQ ID NO: 1926821 - RNA, 19 nt, Artificial Sequence
  Description of Artificial Sequence: Synthetic oligonucleotide
uucccggacucucuucacg

SEQ ID NO: 1926822 - RNA, 19 nt, Artificial Sequence
  Description of Artificial Sequence: Synthetic oligonucleotide
ugucaguuccuuccgcaca

SEQ ID NO: 1926823 - RNA, 19 nt, Artificial Sequence
  Description of Artificial Sequence: Synthetic oligonucleotide
gagaaggcuggcaacaaac

SEQ ID NO: 1926824 - RNA, 19 nt, Artificial Sequence
  Description of Artificial Sequence: Synthetic oligonucleotide
uuggccgaagugaugacau

SEQ ID NO: 1926825 - RNA, 19 nt, Artificial Sequence
  Description of Artificial Sequence: Synthetic oligonucleotide
caaugcuacugucagcaac

SEQ ID NO: 1926826 - RNA, 19 nt, Artificial Sequence
  Description of Artificial Sequence: Synthetic oligonucleotide
  modified_base (5)..(5): a, c, u, g, unknown or other
uaccncuugagagcaaggc

SEQ ID NO: 1926827 - RNA, 19 nt, Artificial Sequence
  Description of Artificial Sequence: Synthetic oligonucleotide
cuggggaguccacauaugc

SEQ ID NO: 1926828 - RNA, 19 nt, Artificial Sequence
  Description of Artificial Sequence: Synthetic oligonucleotide
aucgaugaucaccugcugu

SEQ ID NO: 1926829 - RNA, 19 nt, Artificial Sequence
  Description of Artificial Sequence: Synthetic oligonucleotide
gguguaacccuguuucccg

SEQ ID NO: 1926830 - RNA, 19 nt, Artificial Sequence
  Description of Artificial Sequence: Synthetic oligonucleotide
augagggagccugacuugc

SEQ ID NO: 1926831 - RNA, 19 nt, Artificial Sequence
  Description of Artificial Sequence: Synthetic oligonucleotide
auucacgggccaugcacac

SEQ ID NO: 1926832 - RNA, 19 nt, Artificial Sequence
  Description of Artificial Sequence: Synthetic oligonucleotide
cuugaaagggucaaugcua

SEQ ID NO: 1926833 - RNA, 19 nt, Artificial Sequence
  Description of Artificial Sequence: Synthetic oligonucleotide
augaacaucucaaggucuc

SEQ ID NO: 1926834 - RNA, 19 nt, Artificial Sequence
  Description of Artificial Sequence: Synthetic oligonucleotide
aaugggacucgaugaggga

SEQ ID NO: 1926835 - RNA, 19 nt, Artificial Sequence
  Description of Artificial Sequence: Synthetic oligonucleotide
guaaugggacucgaugagg

SEQ ID NO: 1926836 - RNA, 19 nt, Artificial Sequence
  Description of Artificial Sequence: Synthetic oligonucleotide
auaugcacggccauucuug

SEQ ID NO: 1926837 - RNA, 19 nt, Artificial Sequence
  Description of Artificial Sequence: Synthetic oligonucleotide
guuagcucguccuugccuc

SEQ ID NO: 1926838 - RNA, 19 nt, Artificial Sequence
  Description of Artificial Sequence: Synthetic oligonucleotide
ugggacucgaugagggagc

SEQ ID NO: 1926839 - RNA, 19 nt, Artificial Sequence
  Description of Artificial Sequence: Synthetic oligonucleotide
uuguggcacagcccaauug

SEQ ID NO: 1926840 - RNA, 19 nt, Artificial Sequence
  Description of Artificial Sequence: Synthetic oligonucleotide
uucuggugaagccguuucc

SEQ ID NO: 1926841 - RNA, 19 nt, Artificial Sequence
  Description of Artificial Sequence: Synthetic oligonucleotide
caggcguugcucauucacg

SEQ ID NO: 1926842 - RNA, 19 nt, Artificial Sequence
  Description of Artificial Sequence: Synthetic oligonucleotide
aaucugagccacugcugca

SEQ ID NO: 1926843 - RNA, 19 nt, Artificial Sequence
  Description of Artificial Sequence: Synthetic oligonucleotide
uggggaguccacauaugca

SEQ ID NO: 1926844 - RNA, 19 nt, Artificial Sequence
  Description of Artificial Sequence: Synthetic oligonucleotide
caucucaaggucucggauc

SEQ ID NO: 1926845 - RNA, 19 nt, Artificial Sequence
  Description of Artificial Sequence: Synthetic oligonucleotide
aguacuucacaaagagcuc

SEQ ID NO: 1926846 - RNA, 19 nt, Artificial Sequence
  Description of Artificial Sequence: Synthetic oligonucleotide
uaccacccauuacaggcag

SEQ ID NO: 1926847 - RNA, 19 nt, Artificial Sequence
  Description of Artificial Sequence: Synthetic oligonucleotide
caugugggguccaagguca

SEQ ID NO: 1926848 - RNA, 19 nt, Artificial Sequence
  Description of Artificial Sequence: Synthetic oligonucleotide
caucaaaaggcauccuuga

SEQ ID NO: 1926849 - RNA, 19 nt, Artificial Sequence
  Description of Artificial Sequence: Synthetic oligonucleotide
ucgcuugaaagggucaaug

SEQ ID NO: 1926850 - RNA, 19 nt, Artificial Sequence
  Description of Artificial Sequence: Synthetic oligonucleotide
cugaugaacaucucaaggu

SEQ ID NO: 1926851 - RNA, 19 nt, Artificial Sequence
  Description of Artificial Sequence: Synthetic oligonucleotide
cacuggucgcuugaaaggg

SEQ ID NO: 1926852 - RNA, 19 nt, Artificial Sequence
  Description of Artificial Sequence: Synthetic oligonucleotide
caaggacugagggaucugg

SEQ ID NO: 1926853 - RNA, 19 nt, Artificial Sequence
  Description of Artificial Sequence: Synthetic oligonucleotide
  modified_base (6)..(6): a, c, u, g, unknown or other
cuaccncuugagagcaagg

SEQ ID NO: 1926854 - RNA, 19 nt, Artificial Sequence
  Description of Artificial Sequence: Synthetic oligonucleotide
augacaagacucaucccag

SEQ ID NO: 1926855 - RNA, 19 nt, Artificial Sequence
  Description of Artificial Sequence: Synthetic oligonucleotide
caguuucuuuauuagcuca

SEQ ID NO: 1926856 - RNA, 19 nt, Artificial Sequence
  Description of Artificial Sequence: Synthetic oligonucleotide
agcgcaaaggacugugaga

SEQ ID NO: 1926857 - RNA, 19 nt, Artificial Sequence
  Description of Artificial Sequence: Synthetic oligonucleotide
gccacugucaguuccuucc

SEQ ID NO: 1926858 - RNA, 19 nt, Artificial Sequence
  Description of Artificial Sequence: Synthetic oligonucleotide
ugcagaugagguucaccca

SEQ ID NO: 1926859 - RNA, 19 nt, Artificial Sequence
  Description of Artificial Sequence: Synthetic oligonucleotide
ggaguccacauaugcacgg

SEQ ID NO: 1926860 - RNA, 19 nt, Artificial Sequence
  Description of Artificial Sequence: Synthetic oligonucleotide
ucagccguccgagucagca

SEQ ID NO: 1926861 - RNA, 19 nt, Artificial Sequence
  Description of Artificial Sequence: Synthetic oligonucleotide
uggcaugauaguacuucac

SEQ ID NO: 1926862 - RNA, 19 nt, Artificial Sequence
  Description of Artificial Sequence: Synthetic oligonucleotide
agagcaaggcauguggggu

SEQ ID NO: 1926863 - RNA, 19 nt, Artificial Sequence
  Description of Artificial Sequence: Synthetic oligonucleotide
uugccuccuagagagaggu

SEQ ID NO: 1926864 - RNA, 19 nt, Artificial Sequence
  Description of Artificial Sequence: Synthetic oligonucleotide
gucagcaacagcacuacca

SEQ ID NO: 1926865 - RNA, 19 nt, Artificial Sequence
  Description of Artificial Sequence: Synthetic oligonucleotide
aacuguuccuucacccgag

SEQ ID NO: 1926866 - RNA, 19 nt, Artificial Sequence
  Description of Artificial Sequence: Synthetic oligonucleotide
gcgcaaaggacugugagag

SEQ ID NO: 1926867 - RNA, 19 nt, Artificial Sequence
  Description of Artificial Sequence: Synthetic oligonucleotide
aaaccugugugggccaugu

SEQ ID NO: 1926868 - RNA, 19 nt, Artificial Sequence
  Description of Artificial Sequence: Synthetic oligonucleotide
ucccucacggccacuguca

SEQ ID NO: 1926869 - RNA, 19 nt, Artificial Sequence
  Description of Artificial Sequence: Synthetic oligonucleotide
cuugccuccuagagagagg

SEQ ID NO: 1926870 - RNA, 19 nt, Artificial Sequence
  Description of Artificial Sequence: Synthetic oligonucleotide
gccauucuuggcaugauag

SEQ ID NO: 1926871 - RNA, 19 nt, Artificial Sequence
  Description of Artificial Sequence: Synthetic oligonucleotide
guguaacccuguuucccgg

SEQ ID NO: 1926872 - RNA, 19 nt, Artificial Sequence
  Description of Artificial Sequence: Synthetic oligonucleotide
ugacaagacucaucccaga

SEQ ID NO: 1926873 - RNA, 19 nt, Artificial Sequence
  Description of Artificial Sequence: Synthetic oligonucleotide
ccuuuguuuugccagcucc

SEQ ID NO: 1926874 - RNA, 19 nt, Artificial Sequence
  Description of Artificial Sequence: Synthetic oligonucleotide
cuggcaacaaacaagcaau

SEQ ID NO: 1926875 - RNA, 19 nt, Artificial Sequence
  Description of Artificial Sequence: Synthetic oligonucleotide
augacauggucauguggcu

SEQ ID NO: 1926876 - RNA, 19 nt, Artificial Sequence
  Description of Artificial Sequence: Synthetic oligonucleotide
uguaacccuguuucccgga

SEQ ID NO: 1926877 - RNA, 19 nt, Artificial Sequence
  Description of Artificial Sequence: Synthetic oligonucleotide
  modified_base (2)..(2): a, c, u, g, unknown or other
cncuugagagcaaggcaug

SEQ ID NO: 1926878 - RNA, 19 nt, Artificial Sequence
  Description of Artificial Sequence: Synthetic oligonucleotide
augcacggccauucuuggc

SEQ ID NO: 1926879 - RNA, 19 nt, Artificial Sequence
  Description of Artificial Sequence: Synthetic oligonucleotide
gguuuucaguugcucaacc

SEQ ID NO: 1926880 - RNA, 19 nt, Artificial Sequence
  Description of Artificial Sequence: Synthetic oligonucleotide
uccucgguugacagggaac

SEQ ID NO: 1926881 - RNA, 19 nt, Artificial Sequence
  Description of Artificial Sequence: Synthetic oligonucleotide
uccacauaugcacggccau

SEQ ID NO: 1926882 - RNA, 19 nt, Artificial Sequence
  Description of Artificial Sequence: Synthetic oligonucleotide
ugucagcaacagcacuacc

SEQ ID NO: 1926883 - RNA, 19 nt, Artificial Sequence
  Description of Artificial Sequence: Synthetic oligonucleotide
cagcgcaaaggacugugag

SEQ ID NO: 1926884 - RNA, 19 nt, Artificial Sequence
  Description of Artificial Sequence: Synthetic oligonucleotide
ugccacaaggacugaggga

SEQ ID NO: 1926885 - RNA, 19 nt, Artificial Sequence
  Description of Artificial Sequence: Synthetic oligonucleotide
ugcacucacaguguccacu

SEQ ID NO: 1926886 - RNA, 19 nt, Artificial Sequence
  Description of Artificial Sequence: Synthetic oligonucleotide
uuauuagcucaucgaugau

SEQ ID NO: 1926887 - RNA, 19 nt, Artificial Sequence
  Description of Artificial Sequence: Synthetic oligonucleotide
ggccgaagugaugacaugg

SEQ ID NO: 1926888 - RNA, 19 nt, Artificial Sequence
  Description of Artificial Sequence: Synthetic oligonucleotide
cuugcagaugagguucacc

SEQ ID NO: 1926889 - RNA, 19 nt, Artificial Sequence
  Description of Artificial Sequence: Synthetic oligonucleotide
cacauaugcacggccauuc

SEQ ID NO: 1926890 - RNA, 19 nt, Artificial Sequence
  Description of Artificial Sequence: Synthetic oligonucleotide
cuucacccgagcuggguug

SEQ ID NO: 1926891 - RNA, 19 nt, Artificial Sequence
  Description of Artificial Sequence: Synthetic oligonucleotide
cugccuuuguuuugccagc

SEQ ID NO: 1926892 - RNA, 19 nt, Artificial Sequence
  Description of Artificial Sequence: Synthetic oligonucleotide
caaguugagggcacuuuca

SEQ ID NO: 1926893 - RNA, 19 nt, Artificial Sequence
  Description of Artificial Sequence: Synthetic oligonucleotide
ucccggacucucuucacgu

SEQ ID NO: 1926894 - RNA, 19 nt, Artificial Sequence
  Description of Artificial Sequence: Synthetic oligonucleotide
cuggguuuucaguugcuca

SEQ ID NO: 1926895 - RNA, 19 nt, Artificial Sequence
  Description of Artificial Sequence: Synthetic oligonucleotide
ugaagccguuuccugacuu

SEQ ID NO: 1926896 - RNA, 19 nt, Artificial Sequence
  Description of Artificial Sequence: Synthetic oligonucleotide
caugguuagcucguccuug

SEQ ID NO: 1926897 - RNA, 19 nt, Artificial Sequence
  Description of Artificial Sequence: Synthetic oligonucleotide
ucgaugagggagccugacu

SEQ ID NO: 1926898 - RNA, 19 nt, Artificial Sequence
  Description of Artificial Sequence: Synthetic oligonucleotide
aguugagggcacuuucaaa

SEQ ID NO: 1926899 - RNA, 19 nt, Artificial Sequence
  Description of Artificial Sequence: Synthetic oligonucleotide
uuagcucguccuugccucc

SEQ ID NO: 1926900 - RNA, 19 nt, Artificial Sequence
  Description of Artificial Sequence: Synthetic oligonucleotide
ccacuugucugcauggggc

SEQ ID NO: 1926901 - RNA, 19 nt, Artificial Sequence
  Description of Artificial Sequence: Synthetic oligonucleotide
caaccaacuguuccuucac

SEQ ID NO: 1926902 - RNA, 19 nt, Artificial Sequence
  Description of Artificial Sequence: Synthetic oligonucleotide
uaacccuguuucccggacu

SEQ ID NO: 1926903 - RNA, 19 nt, Artificial Sequence
  Description of Artificial Sequence: Synthetic oligonucleotide
agccguccgagucagcacu

SEQ ID NO: 1926904 - RNA, 19 nt, Artificial Sequence
  Description of Artificial Sequence: Synthetic oligonucleotide
gaagccguuuccugacuuc

SEQ ID NO: 1926905 - RNA, 19 nt, Artificial Sequence
  Description of Artificial Sequence: Synthetic oligonucleotide
gggaugcauggucucaggg

SEQ ID NO: 1926906 - RNA, 19 nt, Artificial Sequence
  Description of Artificial Sequence: Synthetic oligonucleotide
cuggugaagccguuuccug

SEQ ID NO: 1926907 - RNA, 19 nt, Artificial Sequence
  Description of Artificial Sequence: Synthetic oligonucleotide
uggucgcuugaaaggguca

SEQ ID NO: 1926908 - RNA, 19 nt, Artificial Sequence
  Description of Artificial Sequence: Synthetic oligonucleotide
cuggucgcuugaaaggguc

SEQ ID NO: 1926909 - RNA, 19 nt, Artificial Sequence
  Description of Artificial Sequence: Synthetic oligonucleotide
cugucaguuccuuccgcac

SEQ ID NO: 1926910 - RNA, 19 nt, Artificial Sequence
  Description of Artificial Sequence: Synthetic oligonucleotide
aggguucucucucaucaaa

SEQ ID NO: 1926911 - RNA, 19 nt, Artificial Sequence
  Description of Artificial Sequence: Synthetic oligonucleotide
aaggcaugugggguccaag

SEQ ID NO: 1926912 - RNA, 19 nt, Artificial Sequence
  Description of Artificial Sequence: Synthetic oligonucleotide
cugauguccucauugagau

SEQ ID NO: 1926913 - RNA, 19 nt, Artificial Sequence
  Description of Artificial Sequence: Synthetic oligonucleotide
acauaugcacggccauucu

SEQ ID NO: 1926914 - RNA, 19 nt, Artificial Sequence
  Description of Artificial Sequence: Synthetic oligonucleotide
ucucggaucuggguuuuca

SEQ ID NO: 1926915 - RNA, 19 nt, Artificial Sequence
  Description of Artificial Sequence: Synthetic oligonucleotide
gcuggcaacaaacaagcaa

SEQ ID NO: 1926916 - RNA, 19 nt, Artificial Sequence
  Description of Artificial Sequence: Synthetic oligonucleotide
cauucacgggccaugcaca

SEQ ID NO: 1926917 - RNA, 19 nt, Artificial Sequence
  Description of Artificial Sequence: Synthetic oligonucleotide
ugguuagcucguccuugcc

SEQ ID NO: 1926918 - RNA, 19 nt, Artificial Sequence
  Description of Artificial Sequence: Synthetic oligonucleotide
aacagcacuaccacccauu

SEQ ID NO: 1926919 - RNA, 19 nt, Artificial Sequence
  Description of Artificial Sequence: Synthetic oligonucleotide
guggcguagaggccauggg

SEQ ID NO: 1926920 - RNA, 19 nt, Artificial Sequence
  Description of Artificial Sequence: Synthetic oligonucleotide
aagacucaucccagaggag

SEQ ID NO: 1926921 - RNA, 19 nt, Artificial Sequence
  Description of Artificial Sequence: Synthetic oligonucleotide
ggaucuggguuuucaguug

SEQ ID NO: 1926922 - RNA, 19 nt, Artificial Sequence
  Description of Artificial Sequence: Synthetic oligonucleotide
gugaugacauggucaugug

SEQ ID NO: 1926923 - RNA, 19 nt, Artificial Sequence
  Description of Artificial Sequence: Synthetic oligonucleotide
guuuccugacuucccgcug

SEQ ID NO: 1926924 - RNA, 19 nt, Artificial Sequence
  Description of Artificial Sequence: Synthetic oligonucleotide
ugagggagccugacuugca

SEQ ID NO: 1926925 - RNA, 19 nt, Artificial Sequence
  Description of Artificial Sequence: Synthetic oligonucleotide
cauucuuggcaugauagua

SEQ ID NO: 1926926 - RNA, 19 nt, Artificial Sequence
  Description of Artificial Sequence: Synthetic oligonucleotide
agaaggcuggcaacaaaca

SEQ ID NO: 1926927 - RNA, 19 nt, Artificial Sequence
  Description of Artificial Sequence: Synthetic oligonucleotide
aucagguguaacccuguuu

SEQ ID NO: 1926928 - RNA, 19 nt, Artificial Sequence
  Description of Artificial Sequence: Synthetic oligonucleotide
cauguagcuccagggcugg

SEQ ID NO: 1926929 - RNA, 19 nt, Artificial Sequence
  Description of Artificial Sequence: Synthetic oligonucleotide
gagcaaggcaugugggguc

SEQ ID NO: 1926930 - RNA, 19 nt, Artificial Sequence
  Description of Artificial Sequence: Synthetic oligonucleotide
uggucauguggcugguagu

SEQ ID NO: 1926931 - RNA, 19 nt, Artificial Sequence
  Description of Artificial Sequence: Synthetic oligonucleotide
ggugaagccguuuccugac

SEQ ID NO: 1926932 - RNA, 19 nt, Artificial Sequence
  Description of Artificial Sequence: Synthetic oligonucleotide
gccuccuagagagaggucc

SEQ ID NO: 1926933 - RNA, 19 nt, Artificial Sequence
  Description of Artificial Sequence: Synthetic oligonucleotide
cagcccaauuggcuaacag

SEQ ID NO: 1926934 - RNA, 19 nt, Artificial Sequence
  Description of Artificial Sequence: Synthetic oligonucleotide
gcccaauuggcuaacagca

SEQ ID NO: 1926935 - RNA, 19 nt, Artificial Sequence
  Description of Artificial Sequence: Synthetic oligonucleotide
ggcguagaggccaugggcc

SEQ ID NO: 1926936 - RNA, 19 nt, Artificial Sequence
  Description of Artificial Sequence: Synthetic oligonucleotide
ggcgcaucagguguaaccc

SEQ ID NO: 1926937 - RNA, 19 nt, Artificial Sequence
  Description of Artificial Sequence: Synthetic oligonucleotide
acagcacuaccacccauua

SEQ ID NO: 1926938 - RNA, 19 nt, Artificial Sequence
  Description of Artificial Sequence: Synthetic oligonucleotide
uguuucccggacucucuuc

SEQ ID NO: 1926939 - RNA, 19 nt, Artificial Sequence
  Description of Artificial Sequence: Synthetic oligonucleotide
caacuguuccuucacccga

SEQ ID NO: 1926940 - RNA, 19 nt, Artificial Sequence
  Description of Artificial Sequence: Synthetic oligonucleotide
ucaaugcuacugucagcaa

SEQ ID NO: 1926941 - RNA, 19 nt, Artificial Sequence
  Description of Artificial Sequence: Synthetic oligonucleotide
cugaggagaaggcuggcaa

SEQ ID NO: 1926942 - RNA, 19 nt, Artificial Sequence
  Description of Artificial Sequence: Synthetic oligonucleotide
gccguuuccugacuucccg

SEQ ID NO: 1926943 - RNA, 19 nt, Artificial Sequence
  Description of Artificial Sequence: Synthetic oligonucleotide
cugucagcaacagcacuac

SEQ ID NO: 1926944 - RNA, 19 nt, Artificial Sequence
  Description of Artificial Sequence: Synthetic oligonucleotide
gcguugcucauucacgggc

SEQ ID NO: 1926945 - RNA, 19 nt, Artificial Sequence
  Description of Artificial Sequence: Synthetic oligonucleotide
agggagccugacuugcaga

SEQ ID NO: 1926946 - RNA, 19 nt, Artificial Sequence
  Description of Artificial Sequence: Synthetic oligonucleotide
uuagcucaucgaugaucac

SEQ ID NO: 1926947 - RNA, 19 nt, Artificial Sequence
  Description of Artificial Sequence: Synthetic oligonucleotide
augcacaccaaagccuuca

SEQ ID NO: 1926948 - RNA, 19 nt, Artificial Sequence
  Description of Artificial Sequence: Synthetic oligonucleotide
caaagccuucagccguccg

SEQ ID NO: 1926949 - RNA, 19 nt, Artificial Sequence
  Description of Artificial Sequence: Synthetic oligonucleotide
cuaccacccauuacaggca

SEQ ID NO: 1926950 - RNA, 19 nt, Artificial Sequence
  Description of Artificial Sequence: Synthetic oligonucleotide
gagggcacuuucaaaaccu

SEQ ID NO: 1926951 - RNA, 19 nt, Artificial Sequence
  Description of Artificial Sequence: Synthetic oligonucleotide
agcuccagggcugguaaug

SEQ ID NO: 1926952 - RNA, 19 nt, Artificial Sequence
  Description of Artificial Sequence: Synthetic oligonucleotide
guagcuccagggcugguaa

SEQ ID NO: 1926953 - RNA, 19 nt, Artificial Sequence
  Description of Artificial Sequence: Synthetic oligonucleotide
gguggcguagaggccaugg

SEQ ID NO: 1926954 - RNA, 19 nt, Artificial Sequence
  Description of Artificial Sequence: Synthetic oligonucleotide
cacugucaguuccuuccgc

SEQ ID NO: 1926955 - RNA, 19 nt, Artificial Sequence
  Description of Artificial Sequence: Synthetic oligonucleotide
acccgagcuggguugacaa

SEQ ID NO: 1926956 - RNA, 19 nt, Artificial Sequence
  Description of Artificial Sequence: Synthetic oligonucleotide
gcaaguugagggcacuuuc

SEQ ID NO: 1926957 - RNA, 19 nt, Artificial Sequence
  Description of Artificial Sequence: Synthetic oligonucleotide
acagccaugguuagcucgu

SEQ ID NO: 1926958 - RNA, 19 nt, Artificial Sequence
  Description of Artificial Sequence: Synthetic oligonucleotide
agccguuuccugacuuccc

SEQ ID NO: 1926959 - RNA, 19 nt, Artificial Sequence
  Description of Artificial Sequence: Synthetic oligonucleotide
gagagcuuccgggcugggg

SEQ ID NO: 1926960 - RNA, 19 nt, Artificial Sequence
  Description of Artificial Sequence: Synthetic oligonucleotide
ggccauguagcuccagggc

SEQ ID NO: 1926961 - RNA, 19 nt, Artificial Sequence
  Description of Artificial Sequence: Synthetic oligonucleotide
cuggcgcaccgccaagucc

SEQ ID NO: 1926962 - RNA, 19 nt, Artificial Sequence
  Description of Artificial Sequence: Synthetic oligonucleotide
caucgaugaucaccugcug

SEQ ID NO: 1926963 - RNA, 19 nt, Artificial Sequence
  Description of Artificial Sequence: Synthetic oligonucleotide
ugagcaaguugagggcacu

SEQ ID NO: 1926964 - RNA, 19 nt, Artificial Sequence
  Description of Artificial Sequence: Synthetic oligonucleotide
ggacugugagagcuuccgg

SEQ ID NO: 1926965 - RNA, 19 nt, Artificial Sequence
  Description of Artificial Sequence: Synthetic oligonucleotide
cuugucugcauggggcuuc

SEQ ID NO: 1926966 - RNA, 19 nt, Artificial Sequence
  Description of Artificial Sequence: Synthetic oligonucleotide
cuucagccguccgagucag

SEQ ID NO: 1926967 - RNA, 19 nt, Artificial Sequence
  Description of Artificial Sequence: Synthetic oligonucleotide
ccacccauuacaggcagcg

SEQ ID NO: 1926968 - RNA, 19 nt, Artificial Sequence
  Description of Artificial Sequence: Synthetic oligonucleotide
cagggaugcauggucucag

SEQ ID NO: 1926969 - RNA, 19 nt, Artificial Sequence
  Description of Artificial Sequence: Synthetic oligonucleotide
cgaagugaugacaugguca

SEQ ID NO: 1926970 - RNA, 19 nt, Artificial Sequence
  Description of Artificial Sequence: Synthetic oligonucleotide
ugcauggggcuucccacuu

SEQ ID NO: 1926971 - RNA, 19 nt, Artificial Sequence
  Description of Artificial Sequence: Synthetic oligonucleotide
aggucucggaucuggguuu

SEQ ID NO: 1926972 - RNA, 19 nt, Artificial Sequence
  Description of Artificial Sequence: Synthetic oligonucleotide
uguagcuccagggcuggua

SEQ ID NO: 1926973 - RNA, 19 nt, Artificial Sequence
  Description of Artificial Sequence: Synthetic oligonucleotide
aguuccuuccgcacagcca

SEQ ID NO: 1926974 - RNA, 19 nt, Artificial Sequence
  Description of Artificial Sequence: Synthetic oligonucleotide
ugccuuuguuuugccagcu

SEQ ID NO: 1926975 - RNA, 19 nt, Artificial Sequence
  Description of Artificial Sequence: Synthetic oligonucleotide
ggcguugcucauucacggg

SEQ ID NO: 1926976 - RNA, 19 nt, Artificial Sequence
  Description of Artificial Sequence: Synthetic oligonucleotide
ggucaaugcuacugucagc

SEQ ID NO: 1926977 - RNA, 19 nt, Artificial Sequence
  Description of Artificial Sequence: Synthetic oligonucleotide
agggaacugauguccucau

SEQ ID NO: 1926978 - RNA, 19 nt, Artificial Sequence
  Description of Artificial Sequence: Synthetic oligonucleotide
cugccgguucuggugaagc

SEQ ID NO: 1926979 - RNA, 19 nt, Artificial Sequence
  Description of Artificial Sequence: Synthetic oligonucleotide
ggucucaggggcugaggag

SEQ ID NO: 1926980 - RNA, 19 nt, Artificial Sequence
  Description of Artificial Sequence: Synthetic oligonucleotide
gaucuggccuuguggcaca

SEQ ID NO: 1926981 - RNA, 19 nt, Artificial Sequence
  Description of Artificial Sequence: Synthetic oligonucleotide
guuggccgaagugaugaca

SEQ ID NO: 1926982 - RNA, 19 nt, Artificial Sequence
  Description of Artificial Sequence: Synthetic oligonucleotide
ugguagucucugucugccu

SEQ ID NO: 1926983 - RNA, 19 nt, Artificial Sequence
  Description of Artificial Sequence: Synthetic oligonucleotide
agucagcacuggucgcuug

SEQ ID NO: 1926984 - RNA, 19 nt, Artificial Sequence
  Description of Artificial Sequence: Synthetic oligonucleotide
augcuacugucagcaacag

SEQ ID NO: 1926985 - RNA, 19 nt, Artificial Sequence
  Description of Artificial Sequence: Synthetic oligonucleotide
auggucucaggggcugagg

SEQ ID NO: 1926986 - RNA, 19 nt, Artificial Sequence
  Description of Artificial Sequence: Synthetic oligonucleotide
guugcucauucacgggcca

SEQ ID NO: 1926987 - RNA, 19 nt, Artificial Sequence
  Description of Artificial Sequence: Synthetic oligonucleotide
uucacgggccaugcacacc

SEQ ID NO: 1926988 - RNA, 19 nt, Artificial Sequence
  Description of Artificial Sequence: Synthetic oligonucleotide
cacaaagagcucccaggga

SEQ ID NO: 1926989 - RNA, 19 nt, Artificial Sequence
  Description of Artificial Sequence: Synthetic oligonucleotide
ggucauguggcugguaguc

SEQ ID NO: 1926990 - RNA, 19 nt, Artificial Sequence
  Description of Artificial Sequence: Synthetic oligonucleotide
gccaugggccagcaggucc

SEQ ID NO: 1926991 - RNA, 19 nt, Artificial Sequence
  Description of Artificial Sequence: Synthetic oligonucleotide
gaucuggagcacagccagc

SEQ ID NO: 1926992 - RNA, 19 nt, Artificial Sequence
  Description of Artificial Sequence: Synthetic oligonucleotide
uucacccgagcuggguuga

SEQ ID NO: 1926993 - RNA, 19 nt, Artificial Sequence
  Description of Artificial Sequence: Synthetic oligonucleotide
guugcucaaccaacuguuc

SEQ ID NO: 1926994 - RNA, 19 nt, Artificial Sequence
  Description of Artificial Sequence: Synthetic oligonucleotide
aggcggcugagcaaguuga

SEQ ID NO: 1926995 - RNA, 19 nt, Artificial Sequence
  Description of Artificial Sequence: Synthetic oligonucleotide
accacccauuacaggcagc

SEQ ID NO: 1926996 - RNA, 19 nt, Artificial Sequence
  Description of Artificial Sequence: Synthetic oligonucleotide
ggaucuggccuuguggcac

SEQ ID NO: 1926997 - RNA, 19 nt, Artificial Sequence
  Description of Artificial Sequence: Synthetic oligonucleotide
acucaucccagaggaggug

SEQ ID NO: 1926998 - RNA, 19 nt, Artificial Sequence
  Description of Artificial Sequence: Synthetic oligonucleotide
agggcacuuucaaaaccug

SEQ ID NO: 1926999 - RNA, 19 nt, Artificial Sequence
  Description of Artificial Sequence: Synthetic oligonucleotide
uugucugcauggggcuucc

SEQ ID NO: 1927000 - RNA, 19 nt, Artificial Sequence
  Description of Artificial Sequence: Synthetic oligonucleotide
ccaggcguugcucauucac

SEQ ID NO: 1927001 - RNA, 19 nt, Artificial Sequence
  Description of Artificial Sequence: Synthetic oligonucleotide
cugcugaggcggcugagca

SEQ ID NO: 1927002 - RNA, 19 nt, Artificial Sequence
  Description of Artificial Sequence: Synthetic oligonucleotide
cagcacuaccacccauuac

SEQ ID NO: 1927003 - RNA, 19 nt, Artificial Sequence
  Description of Artificial Sequence: Synthetic oligonucleotide
cgccaaguccacaggaagg

SEQ ID NO: 1927004 - RNA, 19 nt, Artificial Sequence
  Description of Artificial Sequence: Synthetic oligonucleotide
aagagcucccagggaugca

SEQ ID NO: 1927005 - RNA, 19 nt, Artificial Sequence
  Description of Artificial Sequence: Synthetic oligonucleotide
uccuugccuccuagagaga

SEQ ID NO: 1927006 - RNA, 19 nt, Artificial Sequence
  Description of Artificial Sequence: Synthetic oligonucleotide
acugagggaucuggccuug

SEQ ID NO: 1927007 - RNA, 19 nt, Artificial Sequence
  Description of Artificial Sequence: Synthetic oligonucleotide
acuggucgcuugaaagggu

SEQ ID NO: 1927008 - RNA, 19 nt, Artificial Sequence
  Description of Artificial Sequence: Synthetic oligonucleotide
gacucaucccagaggaggu

SEQ ID NO: 1927009 - RNA, 19 nt, Artificial Sequence
  Description of Artificial Sequence: Synthetic oligonucleotide
caccaaagccuucagccgu

SEQ ID NO: 1927010 - RNA, 19 nt, Artificial Sequence
  Description of Artificial Sequence: Synthetic oligonucleotide
cguugcucauucacgggcc

SEQ ID NO: 1927011 - RNA, 19 nt, Artificial Sequence
  Description of Artificial Sequence: Synthetic oligonucleotide
ccaugacaagacucauccc

SEQ ID NO: 1927012 - RNA, 19 nt, Artificial Sequence
  Description of Artificial Sequence: Synthetic oligonucleotide
ccacugucaguuccuuccg

SEQ ID NO: 1927013 - RNA, 19 nt, Artificial Sequence
  Description of Artificial Sequence: Synthetic oligonucleotide
ugagagcuuccgggcuggg

SEQ ID NO: 1927014 - RNA, 19 nt, Artificial Sequence
  Description of Artificial Sequence: Synthetic oligonucleotide
cacucacaguguccacuug

SEQ ID NO: 1927015 - RNA, 19 nt, Artificial Sequence
  Description of Artificial Sequence: Synthetic oligonucleotide
ccgccaaguccacaggaag

SEQ ID NO: 1927016 - RNA, 19 nt, Artificial Sequence
  Description of Artificial Sequence: Synthetic oligonucleotide
gccacaaggacugagggau

SEQ ID NO: 1927017 - RNA, 19 nt, Artificial Sequence
  Description of Artificial Sequence: Synthetic oligonucleotide
caccgccaaguccacagga

SEQ ID NO: 1927018 - RNA, 19 nt, Artificial Sequence
  Description of Artificial Sequence: Synthetic oligonucleotide
uccuggagguuggccgaag

SEQ ID NO: 1927019 - RNA, 19 nt, Artificial Sequence
  Description of Artificial Sequence: Synthetic oligonucleotide
cagccguccgagucagcac

SEQ ID NO: 1927020 - RNA, 19 nt, Artificial Sequence
  Description of Artificial Sequence: Synthetic oligonucleotide
cacccauuacaggcagcgc

SEQ ID NO: 1927021 - RNA, 19 nt, Artificial Sequence
  Description of Artificial Sequence: Synthetic oligonucleotide
cugacuugcagaugagguu

SEQ ID NO: 1927022 - RNA, 19 nt, Artificial Sequence
  Description of Artificial Sequence: Synthetic oligonucleotide
gagguucacccaggacacc

SEQ ID NO: 1927023 - RNA, 19 nt, Artificial Sequence
  Description of Artificial Sequence: Synthetic oligonucleotide
uugcucauucacgggccau

SEQ ID NO: 1927024 - RNA, 19 nt, Artificial Sequence
  Description of Artificial Sequence: Synthetic oligonucleotide
gccuucagccguccgaguc

SEQ ID NO: 1927025 - RNA, 19 nt, Artificial Sequence
  Description of Artificial Sequence: Synthetic oligonucleotide
ccgaagugaugacaugguc

SEQ ID NO: 1927026 - RNA, 19 nt, Artificial Sequence
  Description of Artificial Sequence: Synthetic oligonucleotide
  modified_base (3)..(3): a, c, u, g, unknown or other
ccncuugagagcaaggcau

SEQ ID NO: 1927027 - RNA, 19 nt, Artificial Sequence
  Description of Artificial Sequence: Synthetic oligonucleotide
cucacggccacugucaguu

SEQ ID NO: 1927028 - RNA, 19 nt, Artificial Sequence
  Description of Artificial Sequence: Synthetic oligonucleotide
agcgcucggcgcaucaggu

SEQ ID NO: 1927029 - RNA, 19 nt, Artificial Sequence
  Description of Artificial Sequence: Synthetic oligonucleotide
ggguccaaggucaggguuc

SEQ ID NO: 1927030 - RNA, 19 nt, Artificial Sequence
  Description of Artificial Sequence: Synthetic oligonucleotide
cgcaucagguguaacccug

SEQ ID NO: 1927031 - RNA, 19 nt, Artificial Sequence
  Description of Artificial Sequence: Synthetic oligonucleotide
ggguuuucaguugcucaac

SEQ ID NO: 1927032 - RNA, 19 nt, Artificial Sequence
  Description of Artificial Sequence: Synthetic oligonucleotide
cggcgcaucagguguaacc

SEQ ID NO: 1927033 - RNA, 19 nt, Artificial Sequence
  Description of Artificial Sequence: Synthetic oligonucleotide
caaggucucggaucugggu

SEQ ID NO: 1927034 - RNA, 19 nt, Artificial Sequence
  Description of Artificial Sequence: Synthetic oligonucleotide
uucagccguccgagucagc

SEQ ID NO: 1927035 - RNA, 19 nt, Artificial Sequence
  Description of Artificial Sequence: Synthetic oligonucleotide
ugccuccuagagagagguc

SEQ ID NO: 1927036 - RNA, 19 nt, Artificial Sequence
  Description of Artificial Sequence: Synthetic oligonucleotide
ccguuuccugacuucccgc

SEQ ID NO: 1927037 - RNA, 19 nt, Artificial Sequence
  Description of Artificial Sequence: Synthetic oligonucleotide
gguucacccaggacaccag

SEQ ID NO: 1927038 - RNA, 19 nt, Artificial Sequence
  Description of Artificial Sequence: Synthetic oligonucleotide
cacggccauucuuggcaug

SEQ ID NO: 1927039 - RNA, 19 nt, Artificial Sequence
  Description of Artificial Sequence: Synthetic oligonucleotide
acgggccaugcacaccaaa

SEQ ID NO: 1927040 - RNA, 19 nt, Artificial Sequence
  Description of Artificial Sequence: Synthetic oligonucleotide
uagcucguccuugccuccu

SEQ ID NO: 1927041 - RNA, 19 nt, Artificial Sequence
  Description of Artificial Sequence: Synthetic oligonucleotide
acagcccaauuggcuaaca

SEQ ID NO: 1927042 - RNA, 19 nt, Artificial Sequence
  Description of Artificial Sequence: Synthetic oligonucleotide
gcaccgccaaguccacagg

SEQ ID NO: 1927043 - RNA, 19 nt, Artificial Sequence
  Description of Artificial Sequence: Synthetic oligonucleotide
cucguccuugccuccuaga

SEQ ID NO: 1927044 - RNA, 19 nt, Artificial Sequence
  Description of Artificial Sequence: Synthetic oligonucleotide
ccgagcuggguugacaauc

SEQ ID NO: 1927045 - RNA, 19 nt, Artificial Sequence
  Description of Artificial Sequence: Synthetic oligonucleotide
accgccaaguccacaggaa

SEQ ID NO: 1927046 - RNA, 19 nt, Artificial Sequence
  Description of Artificial Sequence: Synthetic oligonucleotide
ugaggcggcugagcaaguu

SEQ ID NO: 1927047 - RNA, 19 nt, Artificial Sequence
  Description of Artificial Sequence: Synthetic oligonucleotide
gggaucuggccuuguggca

SEQ ID NO: 1927048 - RNA, 19 nt, Artificial Sequence
  Description of Artificial Sequence: Synthetic oligonucleotide
agcuggcgcaccgccaagu

SEQ ID NO: 1927049 - RNA, 19 nt, Artificial Sequence
  Description of Artificial Sequence: Synthetic oligonucleotide
gguuggccgaagugaugac

SEQ ID NO: 1927050 - RNA, 19 nt, Artificial Sequence
  Description of Artificial Sequence: Synthetic oligonucleotide
gggacucgaugagggagcc

SEQ ID NO: 1927051 - RNA, 19 nt, Artificial Sequence
  Description of Artificial Sequence: Synthetic oligonucleotide
cauaugcacggccauucuu

SEQ ID NO: 1927052 - RNA, 19 nt, Artificial Sequence
  Description of Artificial Sequence: Synthetic oligonucleotide
ucacggccacugucaguuc

SEQ ID NO: 1927053 - RNA, 19 nt, Artificial Sequence
  Description of Artificial Sequence: Synthetic oligonucleotide
gccuugcacucacaguguc

SEQ ID NO: 1927054 - RNA, 19 nt, Artificial Sequence
  Description of Artificial Sequence: Synthetic oligonucleotide
aucuggccuuguggcacag

SEQ ID NO: 1927055 - RNA, 19 nt, Artificial Sequence
  Description of Artificial Sequence: Synthetic oligonucleotide
gcguagaggccaugggcca

SEQ ID NO: 1927056 - RNA, 19 nt, Artificial Sequence
  Description of Artificial Sequence: Synthetic oligonucleotide
ggcuggggaguccacauau

SEQ ID NO: 1927057 - RNA, 19 nt, Artificial Sequence
  Description of Artificial Sequence: Synthetic oligonucleotide
cugugagagcuuccgggcu

SEQ ID NO: 1927058 - RNA, 19 nt, Artificial Sequence
  Description of Artificial Sequence: Synthetic oligonucleotide
cccauuacaggcagcgcaa

SEQ ID NO: 1927059 - RNA, 19 nt, Artificial Sequence
  Description of Artificial Sequence: Synthetic oligonucleotide
uccgggcuggggaguccac

SEQ ID NO: 1927060 - RNA, 19 nt, Artificial Sequence
  Description of Artificial Sequence: Synthetic oligonucleotide
ugucugcauggggcuuccc

SEQ ID NO: 1927061 - RNA, 19 nt, Artificial Sequence
  Description of Artificial Sequence: Synthetic oligonucleotide
ccuucagccguccgaguca

SEQ ID NO: 1927062 - RNA, 19 nt, Artificial Sequence
  Description of Artificial Sequence: Synthetic oligonucleotide
cuguuccuucacccgagcu

SEQ ID NO: 1927063 - RNA, 19 nt, Artificial Sequence
  Description of Artificial Sequence: Synthetic oligonucleotide
cuuccgggcuggggagucc

SEQ ID NO: 1927064 - RNA, 19 nt, Artificial Sequence
  Description of Artificial Sequence: Synthetic oligonucleotide
ccgagucagcacuggucgc

SEQ ID NO: 1927065 - RNA, 19 nt, Artificial Sequence
  Description of Artificial Sequence: Synthetic oligonucleotide
cacccaggacaccaggcgu

SEQ ID NO: 1927066 - RNA, 19 nt, Artificial Sequence
  Description of Artificial Sequence: Synthetic oligonucleotide
ggucgcuugaaagggucaa

SEQ ID NO: 1927067 - RNA, 19 nt, Artificial Sequence
  Description of Artificial Sequence: Synthetic oligonucleotide
gucauguggcugguagucu

SEQ ID NO: 1927068 - RNA, 19 nt, Artificial Sequence
  Description of Artificial Sequence: Synthetic oligonucleotide
cugcauggggcuucccacu

SEQ ID NO: 1927069 - RNA, 19 nt, Artificial Sequence
  Description of Artificial Sequence: Synthetic oligonucleotide
cacgcuggcgcagcuccuc

SEQ ID NO: 1927070 - RNA, 19 nt, Artificial Sequence
  Description of Artificial Sequence: Synthetic oligonucleotide
ucggcgcaucagguguaac

SEQ ID NO: 1927071 - RNA, 19 nt, Artificial Sequence
  Description of Artificial Sequence: Synthetic oligonucleotide
agcucguccuugccuccua

SEQ ID NO: 1927072 - RNA, 19 nt, Artificial Sequence
  Description of Artificial Sequence: Synthetic oligonucleotide
gccaugcacaccaaagccu

SEQ ID NO: 1927073 - RNA, 19 nt, Artificial Sequence
  Description of Artificial Sequence: Synthetic oligonucleotide
ggcggcugagcaaguugag

SEQ ID NO: 1927074 - RNA, 19 nt, Artificial Sequence
  Description of Artificial Sequence: Synthetic oligonucleotide
ggcgcagcuccucgguuga

SEQ ID NO: 1927075 - RNA, 19 nt, Artificial Sequence
  Description of Artificial Sequence: Synthetic oligonucleotide
caaaggacugugagagcuu

SEQ ID NO: 1927076 - RNA, 19 nt, Artificial Sequence
  Description of Artificial Sequence: Synthetic oligonucleotide
ggccauucuuggcaugaua

SEQ ID NO: 1927077 - RNA, 19 nt, Artificial Sequence
  Description of Artificial Sequence: Synthetic oligonucleotide
cugacuucccgcuggccuu

SEQ ID NO: 1927078 - RNA, 19 nt, Artificial Sequence
  Description of Artificial Sequence: Synthetic oligonucleotide
cccagggaugcauggucuc

SEQ ID NO: 1927079 - RNA, 19 nt, Artificial Sequence
  Description of Artificial Sequence: Synthetic oligonucleotide
ggccacugucaguuccuuc

SEQ ID NO: 1927080 - RNA, 19 nt, Artificial Sequence
  Description of Artificial Sequence: Synthetic oligonucleotide
ccacaaggacugagggauc

SEQ ID NO: 1927081 - RNA, 19 nt, Artificial Sequence
  Description of Artificial Sequence: Synthetic oligonucleotide
ggagguuggccgaagugau

SEQ ID NO: 1927082 - RNA, 19 nt, Artificial Sequence
  Description of Artificial Sequence: Synthetic oligonucleotide
ccaaagccuucagccgucc

SEQ ID NO: 1927083 - RNA, 19 nt, Artificial Sequence
  Description of Artificial Sequence: Synthetic oligonucleotide
cuuguggcacagcccaauu

SEQ ID NO: 1927084 - RNA, 19 nt, Artificial Sequence
  Description of Artificial Sequence: Synthetic oligonucleotide
cauguccaguuucuuuauu

SEQ ID NO: 1927085 - RNA, 19 nt, Artificial Sequence
  Description of Artificial Sequence: Synthetic oligonucleotide
ggcuaacagcaaagaucug

SEQ ID NO: 1927086 - RNA, 19 nt, Artificial Sequence
  Description of Artificial Sequence: Synthetic oligonucleotide
cagccaugguuagcucguc

SEQ ID NO: 1927087 - RNA, 19 nt, Artificial Sequence
  Description of Artificial Sequence: Synthetic oligonucleotide
gcugccgguucuggugaag

SEQ ID NO: 1927088 - RNA, 19 nt, Artificial Sequence
  Description of Artificial Sequence: Synthetic oligonucleotide
cacccgagcuggguugaca

SEQ ID NO: 1927089 - RNA, 19 nt, Artificial Sequence
  Description of Artificial Sequence: Synthetic oligonucleotide
auguagcuccagggcuggu

SEQ ID NO: 1927090 - RNA, 19 nt, Artificial Sequence
  Description of Artificial Sequence: Synthetic oligonucleotide
caacagcacuaccacccau

SEQ ID NO: 1927091 - RNA, 19 nt, Artificial Sequence
  Description of Artificial Sequence: Synthetic oligonucleotide
gcagcgcaaaggacuguga

SEQ ID NO: 1927092 - RNA, 19 nt, Artificial Sequence
  Description of Artificial Sequence: Synthetic oligonucleotide
ccucgguugacagggaacu

SEQ ID NO: 1927093 - RNA, 19 nt, Artificial Sequence
  Description of Artificial Sequence: Synthetic oligonucleotide
gagcaaguugagggcacuu

SEQ ID NO: 1927094 - RNA, 19 nt, Artificial Sequence
  Description of Artificial Sequence: Synthetic oligonucleotide
ggcuggcaacaaacaagca

SEQ ID NO: 1927095 - RNA, 19 nt, Artificial Sequence
  Description of Artificial Sequence: Synthetic oligonucleotide
ggcugguaaugggacucga

SEQ ID NO: 1927096 - RNA, 19 nt, Artificial Sequence
  Description of Artificial Sequence: Synthetic oligonucleotide
cccggacucucuucacguc

SEQ ID NO: 1927097 - RNA, 19 nt, Artificial Sequence
  Description of Artificial Sequence: Synthetic oligonucleotide
gccgaagugaugacauggu

SEQ ID NO: 1927098 - RNA, 19 nt, Artificial Sequence
  Description of Artificial Sequence: Synthetic oligonucleotide
gucgcuugaaagggucaau

SEQ ID NO: 1927099 - RNA, 19 nt, Artificial Sequence
  Description of Artificial Sequence: Synthetic oligonucleotide
caucagguguaacccuguu

SEQ ID NO: 1927100 - RNA, 19 nt, Artificial Sequence
  Description of Artificial Sequence: Synthetic oligonucleotide
cgaugagggagccugacuu

SEQ ID NO: 1927101 - RNA, 19 nt, Artificial Sequence
  Description of Artificial Sequence: Synthetic oligonucleotide
agccagcgcucggcgcauc

SEQ ID NO: 1927102 - RNA, 19 nt, Artificial Sequence
  Description of Artificial Sequence: Synthetic oligonucleotide
gagucagcacuggucgcuu

SEQ ID NO: 1927103 - RNA, 19 nt, Artificial Sequence
  Description of Artificial Sequence: Synthetic oligonucleotide
acacgcuggcgcagcuccu

SEQ ID NO: 1927104 - RNA, 19 nt, Artificial Sequence
  Description of Artificial Sequence: Synthetic oligonucleotide
gggguccaaggucaggguu

SEQ ID NO: 1927105 - RNA, 19 nt, Artificial Sequence
  Description of Artificial Sequence: Synthetic oligonucleotide
agguggcguagaggccaug

SEQ ID NO: 1927106 - RNA, 19 nt, Artificial Sequence
  Description of Artificial Sequence: Synthetic oligonucleotide
ccuccuagagagagguccu

SEQ ID NO: 1927107 - RNA, 19 nt, Artificial Sequence
  Description of Artificial Sequence: Synthetic oligonucleotide
gccguccgagucagcacug

SEQ ID NO: 1927108 - RNA, 19 nt, Artificial Sequence
  Description of Artificial Sequence: Synthetic oligonucleotide
ccgguucuggugaagccgu

SEQ ID NO: 1927109 - RNA, 19 nt, Artificial Sequence
  Description of Artificial Sequence: Synthetic oligonucleotide
ccaggacaccaggcguugc

SEQ ID NO: 1927110 - RNA, 19 nt, Artificial Sequence
  Description of Artificial Sequence: Synthetic oligonucleotide
cucggcgcaucagguguaa

SEQ ID NO: 1927111 - RNA, 19 nt, Artificial Sequence
  Description of Artificial Sequence: Synthetic oligonucleotide
ccggacucucuucacgucu

SEQ ID NO: 1927112 - RNA, 19 nt, Artificial Sequence
  Description of Artificial Sequence: Synthetic oligonucleotide
cauggucauguggcuggua

SEQ ID NO: 1927113 - RNA, 19 nt, Artificial Sequence
  Description of Artificial Sequence: Synthetic oligonucleotide
guccuggagguuggccgaa

SEQ ID NO: 1927114 - RNA, 19 nt, Artificial Sequence
  Description of Artificial Sequence: Synthetic oligonucleotide
ccgcuggccuugcacucac

SEQ ID NO: 1927115 - RNA, 19 nt, Artificial Sequence
  Description of Artificial Sequence: Synthetic oligonucleotide
gcaucagguguaacccugu

SEQ ID NO: 1927116 - RNA, 19 nt, Artificial Sequence
  Description of Artificial Sequence: Synthetic oligonucleotide
cgagcuggguugacaaucu

SEQ ID NO: 1927117 - RNA, 19 nt, Artificial Sequence
  Description of Artificial Sequence: Synthetic oligonucleotide
gcugguaaugggacucgau

SEQ ID NO: 1927118 - RNA, 19 nt, Artificial Sequence
  Description of Artificial Sequence: Synthetic oligonucleotide
gagguggcguagaggccau

SEQ ID NO: 1927119 - RNA, 19 nt, Artificial Sequence
  Description of Artificial Sequence: Synthetic oligonucleotide
cacgggccaugcacaccaa

SEQ ID NO: 1927120 - RNA, 19 nt, Artificial Sequence
  Description of Artificial Sequence: Synthetic oligonucleotide
ggccuugcacucacagugu

SEQ ID NO: 1927121 - RNA, 19 nt, Artificial Sequence
  Description of Artificial Sequence: Synthetic oligonucleotide
gggcuucccacuucaucuu

SEQ ID NO: 1927122 - RNA, 19 nt, Artificial Sequence
  Description of Artificial Sequence: Synthetic oligonucleotide
cugaggcggcugagcaagu

SEQ ID NO: 1927123 - RNA, 19 nt, Artificial Sequence
  Description of Artificial Sequence: Synthetic oligonucleotide
gcacggccauucuuggcau

SEQ ID NO: 1927124 - RNA, 19 nt, Artificial Sequence
  Description of Artificial Sequence: Synthetic oligonucleotide
cgcucggcgcaucaggugu

SEQ ID NO: 1927125 - RNA, 19 nt, Artificial Sequence
  Description of Artificial Sequence: Synthetic oligonucleotide
ggcgcaccgccaaguccac

SEQ ID NO: 1927126 - RNA, 19 nt, Artificial Sequence
  Description of Artificial Sequence: Synthetic oligonucleotide
ccaaguccacaggaaggcu

SEQ ID NO: 1927127 - RNA, 19 nt, Artificial Sequence
  Description of Artificial Sequence: Synthetic oligonucleotide
ccuucacccgagcuggguu

SEQ ID NO: 1927128 - RNA, 19 nt, Artificial Sequence
  Description of Artificial Sequence: Synthetic oligonucleotide
cgguugacagggaacugau

SEQ ID NO: 1927129 - RNA, 19 nt, Artificial Sequence
  Description of Artificial Sequence: Synthetic oligonucleotide
gggccaugacaagacucau

SEQ ID NO: 1927130 - RNA, 19 nt, Artificial Sequence
  Description of Artificial Sequence: Synthetic oligonucleotide
cugagggaucuggccuugu

SEQ ID NO: 1927131 - RNA, 19 nt, Artificial Sequence
  Description of Artificial Sequence: Synthetic oligonucleotide
cgaugaucaccugcugucu

SEQ ID NO: 1927132 - RNA, 19 nt, Artificial Sequence
  Description of Artificial Sequence: Synthetic oligonucleotide
gcucggcgcaucaggugua

SEQ ID NO: 1927133 - RNA, 19 nt, Artificial Sequence
  Description of Artificial Sequence: Synthetic oligonucleotide
ccuuguggcacagcccaau

SEQ ID NO: 1927134 - RNA, 19 nt, Artificial Sequence
  Description of Artificial Sequence: Synthetic oligonucleotide
ggucucggaucuggguuuu

SEQ ID NO: 1927135 - RNA, 19 nt, Artificial Sequence
  Description of Artificial Sequence: Synthetic oligonucleotide
ccgggcuggggaguccaca

SEQ ID NO: 1927136 - RNA, 19 nt, Artificial Sequence
  Description of Artificial Sequence: Synthetic oligonucleotide
ggacucgaugagggagccu

SEQ ID NO: 1927137 - RNA, 19 nt, Artificial Sequence
  Description of Artificial Sequence: Synthetic oligonucleotide
ccacauaugcacggccauu

SEQ ID NO: 1927138 - RNA, 19 nt, Artificial Sequence
  Description of Artificial Sequence: Synthetic oligonucleotide
gcgcagcuccucgguugac

SEQ ID NO: 1927139 - RNA, 19 nt, Artificial Sequence
  Description of Artificial Sequence: Synthetic oligonucleotide
gcgcaccgccaaguccaca

SEQ ID NO: 1927140 - RNA, 19 nt, Artificial Sequence
  Description of Artificial Sequence: Synthetic oligonucleotide
cccgagcuggguugacaau

SEQ ID NO: 1927141 - RNA, 19 nt, Artificial Sequence
  Description of Artificial Sequence: Synthetic oligonucleotide
cagccagcgcucggcgcau

SEQ ID NO: 1927142 - RNA, 19 nt, Artificial Sequence
  Description of Artificial Sequence: Synthetic oligonucleotide
cgguucuggugaagccguu

SEQ ID NO: 1927143 - RNA, 19 nt, Artificial Sequence
  Description of Artificial Sequence: Synthetic oligonucleotide
cggccacugucaguuccuu

SEQ ID NO: 1927144 - RNA, 19 nt, Artificial Sequence
  Description of Artificial Sequence: Synthetic oligonucleotide
gauauucugacccaggucc

SEQ ID NO: 1927145 - RNA, 19 nt, Artificial Sequence
  Description of Artificial Sequence: Synthetic oligonucleotide
uguagauuuugccacaagg

SEQ ID NO: 1927146 - RNA, 19 nt, Artificial Sequence
  Description of Artificial Sequence: Synthetic oligonucleotide
aaaaggucggacucguucc

SEQ ID NO: 1927147 - RNA, 19 nt, Artificial Sequence
  Description of Artificial Sequence: Synthetic oligonucleotide
ucucgugcuauuaacaccg

SEQ ID NO: 1927148 - RNA, 19 nt, Artificial Sequence
  Description of Artificial Sequence: Synthetic oligonucleotide
gaacaaagcagucaucugg

SEQ ID NO: 1927149 - RNA, 19 nt, Artificial Sequence
  Description of Artificial Sequence: Synthetic oligonucleotide
aauugcuugaagaugggac

SEQ ID NO: 1927150 - RNA, 19 nt, Artificial Sequence
  Description of Artificial Sequence: Synthetic oligonucleotide
uuacguuccaggauguugg

SEQ ID NO: 1927151 - RNA, 19 nt, Artificial Sequence
  Description of Artificial Sequence: Synthetic oligonucleotide
agugauaauuuccaccugg

SEQ ID NO: 1927152 - RNA, 19 nt, Artificial Sequence
  Description of Artificial Sequence: Synthetic oligonucleotide
uagauuuugccacaaggcc

SEQ ID NO: 1927153 - RNA, 19 nt, Artificial Sequence
  Description of Artificial Sequence: Synthetic oligonucleotide
auuguguagcacuagguag

SEQ ID NO: 1927154 - RNA, 19 nt, Artificial Sequence
  Description of Artificial Sequence: Synthetic oligonucleotide
uuguguagcacuagguagg

SEQ ID NO: 1927155 - RNA, 19 nt, Artificial Sequence
  Description of Artificial Sequence: Synthetic oligonucleotide
ugguagagcuucuugacgg

SEQ ID NO: 1927156 - RNA, 19 nt, Artificial Sequence
  Description of Artificial Sequence: Synthetic oligonucleotide
ucaaacucuucucagcuug

SEQ ID NO: 1927157 - RNA, 19 nt, Artificial Sequence
  Description of Artificial Sequence: Synthetic oligonucleotide
uggacuuuccaccacacca

SEQ ID NO: 1927158 - RNA, 19 nt, Artificial Sequence
  Description of Artificial Sequence: Synthetic oligonucleotide
guucccuugaaccucacgg

SEQ ID NO: 1927159 - RNA, 19 nt, Artificial Sequence
  Description of Artificial Sequence: Synthetic oligonucleotide
aauaucucauccgagagau

SEQ ID NO: 1927160 - RNA, 19 nt, Artificial Sequence
  Description of Artificial Sequence: Synthetic oligonucleotide
uuuucagaccucuccacgg

SEQ ID NO: 1927161 - RNA, 19 nt, Artificial Sequence
  Description of Artificial Sequence: Synthetic oligonucleotide
uccaucagugauaauuucc

SEQ ID NO: 1927162 - RNA, 19 nt, Artificial Sequence
  Description of Artificial Sequence: Synthetic oligonucleotide
cuuguuacguuccaggaug

SEQ ID NO: 1927163 - RNA, 19 nt, Artificial Sequence
  Description of Artificial Sequence: Synthetic oligonucleotide
acagguguaaaugggagac

SEQ ID NO: 1927164 - RNA, 19 nt, Artificial Sequence
  Description of Artificial Sequence: Synthetic oligonucleotide
aaaggucggacucguuccc

SEQ ID NO: 1927165 - RNA, 19 nt, Artificial Sequence
  Description of Artificial Sequence: Synthetic oligonucleotide
caucagagaccuuauacag

SEQ ID NO: 1927166 - RNA, 19 nt, Artificial Sequence
  Description of Artificial Sequence: Synthetic oligonucleotide
aggauguuggacuuuccac

SEQ ID NO: 1927167 - RNA, 19 nt, Artificial Sequence
  Description of Artificial Sequence: Synthetic oligonucleotide
gaaguagcucaugaaaagg

SEQ ID NO: 1927168 - RNA, 19 nt, Artificial Sequence
  Description of Artificial Sequence: Synthetic oligonucleotide
gaugucuugugaaaugcgg

SEQ ID NO: 1927169 - RNA, 19 nt, Artificial Sequence
  Description of Artificial Sequence: Synthetic oligonucleotide
uagcucaugaaaaggucgg

SEQ ID NO: 1927170 - RNA, 19 nt, Artificial Sequence
  Description of Artificial Sequence: Synthetic oligonucleotide
ucucaaacucuucucagcu

SEQ ID NO: 1927171 - RNA, 19 nt, Artificial Sequence
  Description of Artificial Sequence: Synthetic oligonucleotide
ugaaaugcggacuccacac

SEQ ID NO: 1927172 - RNA, 19 nt, Artificial Sequence
  Description of Artificial Sequence: Synthetic oligonucleotide
uguagcacuagguaggaau

SEQ ID NO: 1927173 - RNA, 19 nt, Artificial Sequence
  Description of Artificial Sequence: Synthetic oligonucleotide
uauacagggccgcagcuug

SEQ ID NO: 1927174 - RNA, 19 nt, Artificial Sequence
  Description of Artificial Sequence: Synthetic oligonucleotide
cuuuccaccacaccaggcg

SEQ ID NO: 1927175 - RNA, 19 nt, Artificial Sequence
  Description of Artificial Sequence: Synthetic oligonucleotide
ucaugaaaaggucggacuc

SEQ ID NO: 1927176 - RNA, 19 nt, Artificial Sequence
  Description of Artificial Sequence: Synthetic oligonucleotide
uguugaggugcacagccag

SEQ ID NO: 1927177 - RNA, 19 nt, Artificial Sequence
  Description of Artificial Sequence: Synthetic oligonucleotide
aaaugcggacuccacacca

SEQ ID NO: 1927178 - RNA, 19 nt, Artificial Sequence
  Description of Artificial Sequence: Synthetic oligonucleotide
ucugggaucagcaguucag

SEQ ID NO: 1927179 - RNA, 19 nt, Artificial Sequence
  Description of Artificial Sequence: Synthetic oligonucleotide
auugcuugaagaugggacu

SEQ ID NO: 1927180 - RNA, 19 nt, Artificial Sequence
  Description of Artificial Sequence: Synthetic oligonucleotide
gguacuugaggccacgugg

SEQ ID NO: 1927181 - RNA, 19 nt, Artificial Sequence
  Description of Artificial Sequence: Synthetic oligonucleotide
ggaucagcaguucagaggc

SEQ ID NO: 1927182 - RNA, 19 nt, Artificial Sequence
  Description of Artificial Sequence: Synthetic oligonucleotide
uucucauuagcuuuucguc

SEQ ID NO: 1927183 - RNA, 19 nt, Artificial Sequence
  Description of Artificial Sequence: Synthetic oligonucleotide
gaaaaggucggacucguuc

SEQ ID NO: 1927184 - RNA, 19 nt, Artificial Sequence
  Description of Artificial Sequence: Synthetic oligonucleotide
ucauccgagagaugaagcc

SEQ ID NO: 1927185 - RNA, 19 nt, Artificial Sequence
  Description of Artificial Sequence: Synthetic oligonucleotide
cucauuagcuuuucguccc

SEQ ID NO: 1927186 - RNA, 19 nt, Artificial Sequence
  Description of Artificial Sequence: Synthetic oligonucleotide
uuagcuuuucgucccuucc

SEQ ID NO: 1927187 - RNA, 19 nt, Artificial Sequence
  Description of Artificial Sequence: Synthetic oligonucleotide
guagauuuugccacaaggc

SEQ ID NO: 1927188 - RNA, 19 nt, Artificial Sequence
  Description of Artificial Sequence: Synthetic oligonucleotide
uaaaugggagaccucuucu

SEQ ID NO: 1927189 - RNA, 19 nt, Artificial Sequence
  Description of Artificial Sequence: Synthetic oligonucleotide
ugauaauuuccaccugggc

SEQ ID NO: 1927190 - RNA, 19 nt, Artificial Sequence
  Description of Artificial Sequence: Synthetic oligonucleotide
uuucagaccucuccacggg

SEQ ID NO: 1927191 - RNA, 19 nt, Artificial Sequence
  Description of Artificial Sequence: Synthetic oligonucleotide
gaugauugcuggccuaucc

SEQ ID NO: 1927192 - RNA, 19 nt, Artificial Sequence
  Description of Artificial Sequence: Synthetic oligonucleotide
guagcucaugaaaaggucg

SEQ ID NO: 1927193 - RNA, 19 nt, Artificial Sequence
  Description of Artificial Sequence: Synthetic oligonucleotide
ugggaaguagcucaugaaa

SEQ ID NO: 1927194 - RNA, 19 nt, Artificial Sequence
  Description of Artificial Sequence: Synthetic oligonucleotide
agaaucuccaccugagugu

SEQ ID NO: 1927195 - RNA, 19 nt, Artificial Sequence
  Description of Artificial Sequence: Synthetic oligonucleotide
ucuugugaaaugcggacuc

SEQ ID NO: 1927196 - RNA, 19 nt, Artificial Sequence
  Description of Artificial Sequence: Synthetic oligonucleotide
guacaugcuguuuucagac

SEQ ID NO: 1927197 - RNA, 19 nt, Artificial Sequence
  Description of Artificial Sequence: Synthetic oligonucleotide
uauguguaggccugggucu

SEQ ID NO: 1927198 - RNA, 19 nt, Artificial Sequence
  Description of Artificial Sequence: Synthetic oligonucleotide
ggcgaagauauucugaccc

SEQ ID NO: 1927199 - RNA, 19 nt, Artificial Sequence
  Description of Artificial Sequence: Synthetic oligonucleotide
agagcuucuugacggcugc

SEQ ID NO: 1927200 - RNA, 19 nt, Artificial Sequence
  Description of Artificial Sequence: Synthetic oligonucleotide
gaagaagaugccaugguuc

SEQ ID NO: 1927201 - RNA, 19 nt, Artificial Sequence
  Description of Artificial Sequence: Synthetic oligonucleotide
uuccagauguagauuuugc

SEQ ID NO: 1927202 - RNA, 19 nt, Artificial Sequence
  Description of Artificial Sequence: Synthetic oligonucleotide
gaguacaugcuguuuucag

SEQ ID NO: 1927203 - RNA, 19 nt, Artificial Sequence
  Description of Artificial Sequence: Synthetic oligonucleotide
acaggcgcccugcucaucc

SEQ ID NO: 1927204 - RNA, 19 nt, Artificial Sequence
  Description of Artificial Sequence: Synthetic oligonucleotide
uucucucgugcuauuaaca

SEQ ID NO: 1927205 - RNA, 19 nt, Artificial Sequence
  Description of Artificial Sequence: Synthetic oligonucleotide
agccaccuuggucagauuc

SEQ ID NO: 1927206 - RNA, 19 nt, Artificial Sequence
  Description of Artificial Sequence: Synthetic oligonucleotide
auugcuggccuauccacag

SEQ ID NO: 1927207 - RNA, 19 nt, Artificial Sequence
  Description of Artificial Sequence: Synthetic oligonucleotide
ugucuugugaaaugcggac

SEQ ID NO: 1927208 - RNA, 19 nt, Artificial Sequence
  Description of Artificial Sequence: Synthetic oligonucleotide
cagaaucuccaccugagug

SEQ ID NO: 1927209 - RNA, 19 nt, Artificial Sequence
  Description of Artificial Sequence: Synthetic oligonucleotide
aggcugggaaugaagagcc

SEQ ID NO: 1927210 - RNA, 19 nt, Artificial Sequence
  Description of Artificial Sequence: Synthetic oligonucleotide
ucucucgugcuauuaacac

SEQ ID NO: 1927211 - RNA, 19 nt, Artificial Sequence
  Description of Artificial Sequence: Synthetic oligonucleotide
ggauguuggacuuuccacc

SEQ ID NO: 1927212 - RNA, 19 nt, Artificial Sequence
  Description of Artificial Sequence: Synthetic oligonucleotide
ggaauaucucauccgagag

SEQ ID NO: 1927213 - RNA, 19 nt, Artificial Sequence
  Description of Artificial Sequence: Synthetic oligonucleotide
agcacuagguaggaauccc

SEQ ID NO: 1927214 - RNA, 19 nt, Artificial Sequence
  Description of Artificial Sequence: Synthetic oligonucleotide
gauguuggacuuuccacca

SEQ ID NO: 1927215 - RNA, 19 nt, Artificial Sequence
  Description of Artificial Sequence: Synthetic oligonucleotide
ucggauguucuucuucccc

SEQ ID NO: 1927216 - RNA, 19 nt, Artificial Sequence
  Description of Artificial Sequence: Synthetic oligonucleotide
gaugaagcaguccccggug

SEQ ID NO: 1927217 - RNA, 19 nt, Artificial Sequence
  Description of Artificial Sequence: Synthetic oligonucleotide
gagaccuuauacagggccg

SEQ ID NO: 1927218 - RNA, 19 nt, Artificial Sequence
  Description of Artificial Sequence: Synthetic oligonucleotide
caggcgaagauauucugac

SEQ ID NO: 1927219 - RNA, 19 nt, Artificial Sequence
  Description of Artificial Sequence: Synthetic oligonucleotide
cuuccccuuaaccugguag

SEQ ID NO: 1927220 - RNA, 19 nt, Artificial Sequence
  Description of Artificial Sequence: Synthetic oligonucleotide
aggcgaagauauucugacc

SEQ ID NO: 1927221 - RNA, 19 nt, Artificial Sequence
  Description of Artificial Sequence: Synthetic oligonucleotide
ugggccauuguguagcacu

SEQ ID NO: 1927222 - RNA, 19 nt, Artificial Sequence
  Description of Artificial Sequence: Synthetic oligonucleotide
gaugggacucucucggccc

SEQ ID NO: 1927223 - RNA, 19 nt, Artificial Sequence
  Description of Artificial Sequence: Synthetic oligonucleotide
acaccaggcgaagauauuc

SEQ ID NO: 1927224 - RNA, 19 nt, Artificial Sequence
  Description of Artificial Sequence: Synthetic oligonucleotide
gaauaucucauccgagaga

SEQ ID NO: 1927225 - RNA, 19 nt, Artificial Sequence
  Description of Artificial Sequence: Synthetic oligonucleotide
uguuuucagaccucuccac

SEQ ID NO: 1927226 - RNA, 19 nt, Artificial Sequence
  Description of Artificial Sequence: Synthetic oligonucleotide
cacggugcugcacaggccg

SEQ ID NO: 1927227 - RNA, 19 nt, Artificial Sequence
  Description of Artificial Sequence: Synthetic oligonucleotide
uuccccuuaaccugguaga

SEQ ID NO: 1927228 - RNA, 19 nt, Artificial Sequence
  Description of Artificial Sequence: Synthetic oligonucleotide
cucauccgagagaugaagc

SEQ ID NO: 1927229 - RNA, 19 nt, Artificial Sequence
  Description of Artificial Sequence: Synthetic oligonucleotide
ucucauccgagagaugaag

SEQ ID NO: 1927230 - RNA, 19 nt, Artificial Sequence
  Description of Artificial Sequence: Synthetic oligonucleotide
gaggcugggaaugaagagc

SEQ ID NO: 1927231 - RNA, 19 nt, Artificial Sequence
  Description of Artificial Sequence: Synthetic oligonucleotide
aaccucacggugcugcaca

SEQ ID NO: 1927232 - RNA, 19 nt, Artificial Sequence
  Description of Artificial Sequence: Synthetic oligonucleotide
ucccuugaaccucacggug

SEQ ID NO: 1927233 - RNA, 19 nt, Artificial Sequence
  Description of Artificial Sequence: Synthetic oligonucleotide
agcuuuucgucccuuccag

SEQ ID NO: 1927234 - RNA, 19 nt, Artificial Sequence
  Description of Artificial Sequence: Synthetic oligonucleotide
uuuccaccacaccaggcga

SEQ ID NO: 1927235 - RNA, 19 nt, Artificial Sequence
  Description of Artificial Sequence: Synthetic oligonucleotide
uugaaccucacggugcugc

SEQ ID NO: 1927236 - RNA, 19 nt, Artificial Sequence
  Description of Artificial Sequence: Synthetic oligonucleotide
ggaaugggugaguacaugc

SEQ ID NO: 1927237 - RNA, 19 nt, Artificial Sequence
  Description of Artificial Sequence: Synthetic oligonucleotide
aacccucauuuccaguucu

SEQ ID NO: 1927238 - RNA, 19 nt, Artificial Sequence
  Description of Artificial Sequence: Synthetic oligonucleotide
cucucgugcuauuaacacc

SEQ ID NO: 1927239 - RNA, 19 nt, Artificial Sequence
  Description of Artificial Sequence: Synthetic oligonucleotide
guuguccagaacaaagcag

SEQ ID NO: 1927240 - RNA, 19 nt, Artificial Sequence
  Description of Artificial Sequence: Synthetic oligonucleotide
cugguagagcuucuugacg

SEQ ID NO: 1927241 - RNA, 19 nt, Artificial Sequence
  Description of Artificial Sequence: Synthetic oligonucleotide
ugugaaaugcggacuccac

SEQ ID NO: 1927242 - RNA, 19 nt, Artificial Sequence
  Description of Artificial Sequence: Synthetic oligonucleotide
gugauaauuuccaccuggg

SEQ ID NO: 1927243 - RNA, 19 nt, Artificial Sequence
  Description of Artificial Sequence: Synthetic oligonucleotide
ugggaucagcaguucagag

SEQ ID NO: 1927244 - RNA, 19 nt, Artificial Sequence
  Description of Artificial Sequence: Synthetic oligonucleotide
uggggcagaaucuccaccu

SEQ ID NO: 1927245 - RNA, 19 nt, Artificial Sequence
  Description of Artificial Sequence: Synthetic oligonucleotide
augcggacuccacaccacc

SEQ ID NO: 1927246 - RNA, 19 nt, Artificial Sequence
  Description of Artificial Sequence: Synthetic oligonucleotide
uucuugacggcugcugggg

SEQ ID NO: 1927247 - RNA, 19 nt, Artificial Sequence
  Description of Artificial Sequence: Synthetic oligonucleotide
cugggucuuggacugaggc

SEQ ID NO: 1927248 - RNA, 19 nt, Artificial Sequence
  Description of Artificial Sequence: Synthetic oligonucleotide
gaaaugcggacuccacacc

SEQ ID NO: 1927249 - RNA, 19 nt, Artificial Sequence
  Description of Artificial Sequence: Synthetic oligonucleotide
ggcaucagagaccuuauac

SEQ ID NO: 1927250 - RNA, 19 nt, Artificial Sequence
  Description of Artificial Sequence: Synthetic oligonucleotide
guuacguuccaggauguug

SEQ ID NO: 1927251 - RNA, 19 nt, Artificial Sequence
  Description of Artificial Sequence: Synthetic oligonucleotide
aagaugccaugguucucuc

SEQ ID NO: 1927252 - RNA, 19 nt, Artificial Sequence
  Description of Artificial Sequence: Synthetic oligonucleotide
guaaaugggagaccucuuc

SEQ ID NO: 1927253 - RNA, 19 nt, Artificial Sequence
  Description of Artificial Sequence: Synthetic oligonucleotide
aaugcggacuccacaccac

SEQ ID NO: 1927254 - RNA, 19 nt, Artificial Sequence
  Description of Artificial Sequence: Synthetic oligonucleotide
aggcccguuguccagaaca

SEQ ID NO: 1927255 - RNA, 19 nt, Artificial Sequence
  Description of Artificial Sequence: Synthetic oligonucleotide
gaaccugaaucaucucggc

SEQ ID NO: 1927256 - RNA, 19 nt, Artificial Sequence
  Description of Artificial Sequence: Synthetic oligonucleotide
gagaugaagccaucggcca

SEQ ID NO: 1927257 - RNA, 19 nt, Artificial Sequence
  Description of Artificial Sequence: Synthetic oligonucleotide
ucagaccucuccacggggc

SEQ ID NO: 1927258 - RNA, 19 nt, Artificial Sequence
  Description of Artificial Sequence: Synthetic oligonucleotide
gcuguuuucagaccucucc

SEQ ID NO: 1927259 - RNA, 19 nt, Artificial Sequence
  Description of Artificial Sequence: Synthetic oligonucleotide
cuuaaccugguagagcuuc

SEQ ID NO: 1927260 - RNA, 19 nt, Artificial Sequence
  Description of Artificial Sequence: Synthetic oligonucleotide
ggacucguucccuugaacc

SEQ ID NO: 1927261 - RNA, 19 nt, Artificial Sequence
  Description of Artificial Sequence: Synthetic oligonucleotide
ugcuauuaacaccggcuuc

SEQ ID NO: 1927262 - RNA, 19 nt, Artificial Sequence
  Description of Artificial Sequence: Synthetic oligonucleotide
agguguaaaugggagaccu

SEQ ID NO: 1927263 - RNA, 19 nt, Artificial Sequence
  Description of Artificial Sequence: Synthetic oligonucleotide
agauguagauuuugccaca

SEQ ID NO: 1927264 - RNA, 19 nt, Artificial Sequence
  Description of Artificial Sequence: Synthetic oligonucleotide
uacaugcuguuuucagacc

SEQ ID NO: 1927265 - RNA, 19 nt, Artificial Sequence
  Description of Artificial Sequence: Synthetic oligonucleotide
guacuugaggccacguggg

SEQ ID NO: 1927266 - RNA, 19 nt, Artificial Sequence
  Description of Artificial Sequence: Synthetic oligonucleotide
ggcaccaacccucauuucc

SEQ ID NO: 1927267 - RNA, 19 nt, Artificial Sequence
  Description of Artificial Sequence: Synthetic oligonucleotide
aguggcucggauguucuuc

SEQ ID NO: 1927268 - RNA, 19 nt, Artificial Sequence
  Description of Artificial Sequence: Synthetic oligonucleotide
uggucagauucaucugucc

SEQ ID NO: 1927269 - RNA, 19 nt, Artificial Sequence
  Description of Artificial Sequence: Synthetic oligonucleotide
uugaggugcacagccagca

SEQ ID NO: 1927270 - RNA, 19 nt, Artificial Sequence
  Description of Artificial Sequence: Synthetic oligonucleotide
ugguacuugaggccacgug

SEQ ID NO: 1927271 - RNA, 19 nt, Artificial Sequence
  Description of Artificial Sequence: Synthetic oligonucleotide
gacucucucggcccugggg

SEQ ID NO: 1927272 - RNA, 19 nt, Artificial Sequence
  Description of Artificial Sequence: Synthetic oligonucleotide
guaggaauccccagagaag

SEQ ID NO: 1927273 - RNA, 19 nt, Artificial Sequence
  Description of Artificial Sequence: Synthetic oligonucleotide
uucccuugaaccucacggu

SEQ ID NO: 1927274 - RNA, 19 nt, Artificial Sequence
  Description of Artificial Sequence: Synthetic oligonucleotide
cucgcugucccugauggcc

SEQ ID NO: 1927275 - RNA, 19 nt, Artificial Sequence
  Description of Artificial Sequence: Synthetic oligonucleotide
ucgugcuauuaacaccggc

SEQ ID NO: 1927276 - RNA, 19 nt, Artificial Sequence
  Description of Artificial Sequence: Synthetic oligonucleotide
gaauccccagagaagaaga

SEQ ID NO: 1927277 - RNA, 19 nt, Artificial Sequence
  Description of Artificial Sequence: Synthetic oligonucleotide
aagcagucaucugggauca

SEQ ID NO: 1927278 - RNA, 19 nt, Artificial Sequence
  Description of Artificial Sequence: Synthetic oligonucleotide
uugacggcugcuggggugg

SEQ ID NO: 1927279 - RNA, 19 nt, Artificial Sequence
  Description of Artificial Sequence: Synthetic oligonucleotide
guucucucgugcuauuaac

SEQ ID NO: 1927280 - RNA, 19 nt, Artificial Sequence
  Description of Artificial Sequence: Synthetic oligonucleotide
caucagugauaauuuccac

SEQ ID NO: 1927281 - RNA, 19 nt, Artificial Sequence
  Description of Artificial Sequence: Synthetic oligonucleotide
uuaaccugguagagcuucu

SEQ ID NO: 1927282 - RNA, 19 nt, Artificial Sequence
  Description of Artificial Sequence: Synthetic oligonucleotide
uugugaaaugcggacucca

SEQ ID NO: 1927283 - RNA, 19 nt, Artificial Sequence
  Description of Artificial Sequence: Synthetic oligonucleotide
uucagaggcaaaggggcug

SEQ ID NO: 1927284 - RNA, 19 nt, Artificial Sequence
  Description of Artificial Sequence: Synthetic oligonucleotide
acgccauauguguaggccu

SEQ ID NO: 1927285 - RNA, 19 nt, Artificial Sequence
  Description of Artificial Sequence: Synthetic oligonucleotide
uuguuacguuccaggaugu

SEQ ID NO: 1927286 - RNA, 19 nt, Artificial Sequence
  Description of Artificial Sequence: Synthetic oligonucleotide
uguaaaugggagaccucuu

SEQ ID NO: 1927287 - RNA, 19 nt, Artificial Sequence
  Description of Artificial Sequence: Synthetic oligonucleotide
cacgccauauguguaggcc

SEQ ID NO: 1927288 - RNA, 19 nt, Artificial Sequence
  Description of Artificial Sequence: Synthetic oligonucleotide
acucguucccuugaaccuc

SEQ ID NO: 1927289 - RNA, 19 nt, Artificial Sequence
  Description of Artificial Sequence: Synthetic oligonucleotide
gcaucagagaccuuauaca

SEQ ID NO: 1927290 - RNA, 19 nt, Artificial Sequence
  Description of Artificial Sequence: Synthetic oligonucleotide
uagcacuagguaggaaucc

SEQ ID NO: 1927291 - RNA, 19 nt, Artificial Sequence
  Description of Artificial Sequence: Synthetic oligonucleotide
ucaucuguccaguggcauc

SEQ ID NO: 1927292 - RNA, 19 nt, Artificial Sequence
  Description of Artificial Sequence: Synthetic oligonucleotide
uuaacaccggcuucagcuu

SEQ ID NO: 1927293 - RNA, 19 nt, Artificial Sequence
  Description of Artificial Sequence: Synthetic oligonucleotide
gugaaaugcggacuccaca

SEQ ID NO: 1927294 - RNA, 19 nt, Artificial Sequence
  Description of Artificial Sequence: Synthetic oligonucleotide
uguguagcacuagguagga

SEQ ID NO: 1927295 - RNA, 19 nt, Artificial Sequence
  Description of Artificial Sequence: Synthetic oligonucleotide
uauucugacccagguccag

SEQ ID NO: 1927296 - RNA, 19 nt, Artificial Sequence
  Description of Artificial Sequence: Synthetic oligonucleotide
gggaauaucucauccgaga

SEQ ID NO: 1927297 - RNA, 19 nt, Artificial Sequence
  Description of Artificial Sequence: Synthetic oligonucleotide
uaacaccggcuucagcuuc

SEQ ID NO: 1927298 - RNA, 19 nt, Artificial Sequence
  Description of Artificial Sequence: Synthetic oligonucleotide
uccccgguguugaagcugu

SEQ ID NO: 1927299 - RNA, 19 nt, Artificial Sequence
  Description of Artificial Sequence: Synthetic oligonucleotide
cuguuuucagaccucucca

SEQ ID NO: 1927300 - RNA, 19 nt, Artificial Sequence
  Description of Artificial Sequence: Synthetic oligonucleotide
uccccuuaaccugguagag

SEQ ID NO: 1927301 - RNA, 19 nt, Artificial Sequence
  Description of Artificial Sequence: Synthetic oligonucleotide
caucccgggaugauugcug

SEQ ID NO: 1927302 - RNA, 19 nt, Artificial Sequence
  Description of Artificial Sequence: Synthetic oligonucleotide
cuugugaaaugcggacucc

SEQ ID NO: 1927303 - RNA, 19 nt, Artificial Sequence
  Description of Artificial Sequence: Synthetic oligonucleotide
gugaguacaugcuguuuuc

SEQ ID NO: 1927304 - RNA, 19 nt, Artificial Sequence
  Description of Artificial Sequence: Synthetic oligonucleotide
gaaggcaggagaggagggc

SEQ ID NO: 1927305 - RNA, 19 nt, Artificial Sequence
  Description of Artificial Sequence: Synthetic oligonucleotide
uugcuugaagaugggacuc

SEQ ID NO: 1927306 - RNA, 19 nt, Artificial Sequence
  Description of Artificial Sequence: Synthetic oligonucleotide
gaggccacgugggaaguag

SEQ ID NO: 1927307 - RNA, 19 nt, Artificial Sequence
  Description of Artificial Sequence: Synthetic oligonucleotide
augucuugugaaaugcgga

SEQ ID NO: 1927308 - RNA, 19 nt, Artificial Sequence
  Description of Artificial Sequence: Synthetic oligonucleotide
augaaaaggucggacucgu

SEQ ID NO: 1927309 - RNA, 19 nt, Artificial Sequence
  Description of Artificial Sequence: Synthetic oligonucleotide
gaauugcuugaagauggga

SEQ ID NO: 1927310 - RNA, 19 nt, Artificial Sequence
  Description of Artificial Sequence: Synthetic oligonucleotide
guagcacuagguaggaauc

SEQ ID NO: 1927311 - RNA, 19 nt, Artificial Sequence
  Description of Artificial Sequence: Synthetic oligonucleotide
cuugacggcugcuggggug

SEQ ID NO: 1927312 - RNA, 19 nt, Artificial Sequence
  Description of Artificial Sequence: Synthetic oligonucleotide
cucaggguugcccuccuuc

SEQ ID NO: 1927313 - RNA, 19 nt, Artificial Sequence
  Description of Artificial Sequence: Synthetic oligonucleotide
uggccuauccacaggugua

SEQ ID NO: 1927314 - RNA, 19 nt, Artificial Sequence
  Description of Artificial Sequence: Synthetic oligonucleotide
ucucggcuggcuccucucc

SEQ ID NO: 1927315 - RNA, 19 nt, Artificial Sequence
  Description of Artificial Sequence: Synthetic oligonucleotide
ucgcugucccugauggcca

SEQ ID NO: 1927316 - RNA, 19 nt, Artificial Sequence
  Description of Artificial Sequence: Synthetic oligonucleotide
cucaugaaaaggucggacu

SEQ ID NO: 1927317 - RNA, 19 nt, Artificial Sequence
  Description of Artificial Sequence: Synthetic oligonucleotide
ggaugucuugugaaaugcg

SEQ ID NO: 1927318 - RNA, 19 nt, Artificial Sequence
  Description of Artificial Sequence: Synthetic oligonucleotide
ugaaccucacggugcugca

SEQ ID NO: 1927319 - RNA, 19 nt, Artificial Sequence
  Description of Artificial Sequence: Synthetic oligonucleotide
cagaacaaagcagucaucu

SEQ ID NO: 1927320 - RNA, 19 nt, Artificial Sequence
  Description of Artificial Sequence: Synthetic oligonucleotide
uccacacgccauaugugua

SEQ ID NO: 1927321 - RNA, 19 nt, Artificial Sequence
  Description of Artificial Sequence: Synthetic oligonucleotide
cuauuaacaccggcuucag

SEQ ID NO: 1927322 - RNA, 19 nt, Artificial Sequence
  Description of Artificial Sequence: Synthetic oligonucleotide
ucuugacggcugcuggggu

SEQ ID NO: 1927323 - RNA, 19 nt, Artificial Sequence
  Description of Artificial Sequence: Synthetic oligonucleotide
gcuauuaacaccggcuuca

SEQ ID NO: 1927324 - RNA, 19 nt, Artificial Sequence
  Description of Artificial Sequence: Synthetic oligonucleotide
aaggcccguuguccagaac

SEQ ID NO: 1927325 - RNA, 19 nt, Artificial Sequence
  Description of Artificial Sequence: Synthetic oligonucleotide
ggaauccccagagaagaag

SEQ ID NO: 1927326 - RNA, 19 nt, Artificial Sequence
  Description of Artificial Sequence: Synthetic oligonucleotide
gacucguucccuugaaccu

SEQ ID NO: 1927327 - RNA, 19 nt, Artificial Sequence
  Description of Artificial Sequence: Synthetic oligonucleotide
gauugcuggccuauccaca

SEQ ID NO: 1927328 - RNA, 19 nt, Artificial Sequence
  Description of Artificial Sequence: Synthetic oligonucleotide
ugucccagcucagugcccu

SEQ ID NO: 1927329 - RNA, 19 nt, Artificial Sequence
  Description of Artificial Sequence: Synthetic oligonucleotide
ggucccuugccuuguuacg

SEQ ID NO: 1927330 - RNA, 19 nt, Artificial Sequence
  Description of Artificial Sequence: Synthetic oligonucleotide
cacuagguaggaaucccca

SEQ ID NO: 1927331 - RNA, 19 nt, Artificial Sequence
  Description of Artificial Sequence: Synthetic oligonucleotide
ucacggugcugcacaggcc

SEQ ID NO: 1927332 - RNA, 19 nt, Artificial Sequence
  Description of Artificial Sequence: Synthetic oligonucleotide
gggccuuuucuucucaaac

SEQ ID NO: 1927333 - RNA, 19 nt, Artificial Sequence
  Description of Artificial Sequence: Synthetic oligonucleotide
cuuggacugaggcugggaa

SEQ ID NO: 1927334 - RNA, 19 nt, Artificial Sequence
  Description of Artificial Sequence: Synthetic oligonucleotide
uucaucuguccaguggcau

SEQ ID NO: 1927335 - RNA, 19 nt, Artificial Sequence
  Description of Artificial Sequence: Synthetic oligonucleotide
ggacuuuccaccacaccag

SEQ ID NO: 1927336 - RNA, 19 nt, Artificial Sequence
  Description of Artificial Sequence: Synthetic oligonucleotide
cacagguguaaaugggaga

SEQ ID NO: 1927337 - RNA, 19 nt, Artificial Sequence
  Description of Artificial Sequence: Synthetic oligonucleotide
cagauucaucuguccagug

SEQ ID NO: 1927338 - RNA, 19 nt, Artificial Sequence
  Description of Artificial Sequence: Synthetic oligonucleotide
caggauguuggacuuucca

SEQ ID NO: 1927339 - RNA, 19 nt, Artificial Sequence
  Description of Artificial Sequence: Synthetic oligonucleotide
accuuauacagggccgcag

SEQ ID NO: 1927340 - RNA, 19 nt, Artificial Sequence
  Description of Artificial Sequence: Synthetic oligonucleotide
cacacgccauauguguagg

SEQ ID NO: 1927341 - RNA, 19 nt, Artificial Sequence
  Description of Artificial Sequence: Synthetic oligonucleotide
uuccaccacaccaggcgaa

SEQ ID NO: 1927342 - RNA, 19 nt, Artificial Sequence
  Description of Artificial Sequence: Synthetic oligonucleotide
ucgucccuuccagauguag

SEQ ID NO: 1927343 - RNA, 19 nt, Artificial Sequence
  Description of Artificial Sequence: Synthetic oligonucleotide
cucgugcuauuaacaccgg

SEQ ID NO: 1927344 - RNA, 19 nt, Artificial Sequence
  Description of Artificial Sequence: Synthetic oligonucleotide
uuauacagggccgcagcuu

SEQ ID NO: 1927345 - RNA, 19 nt, Artificial Sequence
  Description of Artificial Sequence: Synthetic oligonucleotide
cucaucccgggaugauugc

SEQ ID NO: 1927346 - RNA, 19 nt, Artificial Sequence
  Description of Artificial Sequence: Synthetic oligonucleotide
caccaacccucauuuccag

SEQ ID NO: 1927347 - RNA, 19 nt, Artificial Sequence
  Description of Artificial Sequence: Synthetic oligonucleotide
cuuggagggcugccugccg

SEQ ID NO: 1927348 - RNA, 19 nt, Artificial Sequence
  Description of Artificial Sequence: Synthetic oligonucleotide
cagagaccuuauacagggc

SEQ ID NO: 1927349 - RNA, 19 nt, Artificial Sequence
  Description of Artificial Sequence: Synthetic oligonucleotide
aggaaugggugaguacaug

SEQ ID NO: 1927350 - RNA, 19 nt, Artificial Sequence
  Description of Artificial Sequence: Synthetic oligonucleotide
uugccacaaggcccguugu

SEQ ID NO: 1927351 - RNA, 19 nt, Artificial Sequence
  Description of Artificial Sequence: Synthetic oligonucleotide
caggccggugguagaaggc

SEQ ID NO: 1927352 - RNA, 19 nt, Artificial Sequence
  Description of Artificial Sequence: Synthetic oligonucleotide
agguaggaauccccagaga

SEQ ID NO: 1927353 - RNA, 19 nt, Artificial Sequence
  Description of Artificial Sequence: Synthetic oligonucleotide
caucuguccaguggcauca

SEQ ID NO: 1927354 - RNA, 19 nt, Artificial Sequence
  Description of Artificial Sequence: Synthetic oligonucleotide
ucaucccgggaugauugcu

SEQ ID NO: 1927355 - RNA, 19 nt, Artificial Sequence
  Description of Artificial Sequence: Synthetic oligonucleotide
augcuguuuucagaccucu

SEQ ID NO: 1927356 - RNA, 19 nt, Artificial Sequence
  Description of Artificial Sequence: Synthetic oligonucleotide
gcugggaaugaagagccgc

SEQ ID NO: 1927357 - RNA, 19 nt, Artificial Sequence
  Description of Artificial Sequence: Synthetic oligonucleotide
augccaugguucucucgug

SEQ ID NO: 1927358 - RNA, 19 nt, Artificial Sequence
  Description of Artificial Sequence: Synthetic oligonucleotide
guugaggugcacagccagc

SEQ ID NO: 1927359 - RNA, 19 nt, Artificial Sequence
  Description of Artificial Sequence: Synthetic oligonucleotide
gcaggccggugguagaagg

SEQ ID NO: 1927360 - RNA, 19 nt, Artificial Sequence
  Description of Artificial Sequence: Synthetic oligonucleotide
ucggccacuuggagggcug

SEQ ID NO: 1927361 - RNA, 19 nt, Artificial Sequence
  Description of Artificial Sequence: Synthetic oligonucleotide
gggaaguagcucaugaaaa

SEQ ID NO: 1927362 - RNA, 19 nt, Artificial Sequence
  Description of Artificial Sequence: Synthetic oligonucleotide
cuuuucgucccuuccagau

SEQ ID NO: 1927363 - RNA, 19 nt, Artificial Sequence
  Description of Artificial Sequence: Synthetic oligonucleotide
ucggacucguucccuugaa

SEQ ID NO: 1927364 - RNA, 19 nt, Artificial Sequence
  Description of Artificial Sequence: Synthetic oligonucleotide
aaggucggacucguucccu

SEQ ID NO: 1927365 - RNA, 19 nt, Artificial Sequence
  Description of Artificial Sequence: Synthetic oligonucleotide
aggcgcccugcucaucccg

SEQ ID NO: 1927366 - RNA, 19 nt, Artificial Sequence
  Description of Artificial Sequence: Synthetic oligonucleotide
gugggaaguagcucaugaa

SEQ ID NO: 1927367 - RNA, 19 nt, Artificial Sequence
  Description of Artificial Sequence: Synthetic oligonucleotide
uccgagagaugaagccauc

SEQ ID NO: 1927368 - RNA, 19 nt, Artificial Sequence
  Description of Artificial Sequence: Synthetic oligonucleotide
ggagucagccaccuugguc

SEQ ID NO: 1927369 - RNA, 19 nt, Artificial Sequence
  Description of Artificial Sequence: Synthetic oligonucleotide
accucacggugcugcacag

SEQ ID NO: 1927370 - RNA, 19 nt, Artificial Sequence
  Description of Artificial Sequence: Synthetic oligonucleotide
cuccacacgccauaugugu

SEQ ID NO: 1927371 - RNA, 19 nt, Artificial Sequence
  Description of Artificial Sequence: Synthetic oligonucleotide
caggguugcccuccuucag

SEQ ID NO: 1927372 - RNA, 19 nt, Artificial Sequence
  Description of Artificial Sequence: Synthetic oligonucleotide
ccacacgccauauguguag

SEQ ID NO: 1927373 - RNA, 19 nt, Artificial Sequence
  Description of Artificial Sequence: Synthetic oligonucleotide
gucuggucagcugugaggu

SEQ ID NO: 1927374 - RNA, 19 nt, Artificial Sequence
  Description of Artificial Sequence: Synthetic oligonucleotide
agcuucuccacacgccaua

SEQ ID NO: 1927375 - RNA, 19 nt, Artificial Sequence
  Description of Artificial Sequence: Synthetic oligonucleotide
ggggaauaucucauccgag

SEQ ID NO: 1927376 - RNA, 19 nt, Artificial Sequence
  Description of Artificial Sequence: Synthetic oligonucleotide
agcucaugaaaaggucgga

SEQ ID NO: 1927377 - RNA, 19 nt, Artificial Sequence
  Description of Artificial Sequence: Synthetic oligonucleotide
agggccgcagcuugggcau

SEQ ID NO: 1927378 - RNA, 19 nt, Artificial Sequence
  Description of Artificial Sequence: Synthetic oligonucleotide
uggcaucagagaccuuaua

SEQ ID NO: 1927379 - RNA, 19 nt, Artificial Sequence
  Description of Artificial Sequence: Synthetic oligonucleotide
aucaucucggcuggcuccu

SEQ ID NO: 1927380 - RNA, 19 nt, Artificial Sequence
  Description of Artificial Sequence: Synthetic oligonucleotide
gucccuuccagauguagau

SEQ ID NO: 1927381 - RNA, 19 nt, Artificial Sequence
  Description of Artificial Sequence: Synthetic oligonucleotide
ggugaguacaugcuguuuu

SEQ ID NO: 1927382 - RNA, 19 nt, Artificial Sequence
  Description of Artificial Sequence: Synthetic oligonucleotide
cuuauacagggccgcagcu

SEQ ID NO: 1927383 - RNA, 19 nt, Artificial Sequence
  Description of Artificial Sequence: Synthetic oligonucleotide
ucccgggaugauugcuggc

SEQ ID NO: 1927384 - RNA, 19 nt, Artificial Sequence
  Description of Artificial Sequence: Synthetic oligonucleotide
aggccggugguagaaggca

SEQ ID NO: 1927385 - RNA, 19 nt, Artificial Sequence
  Description of Artificial Sequence: Synthetic oligonucleotide
gguucucucgugcuauuaa

SEQ ID NO: 1927386 - RNA, 19 nt, Artificial Sequence
  Description of Artificial Sequence: Synthetic oligonucleotide
ucccuugccuuguuacguu

SEQ ID NO: 1927387 - RNA, 19 nt, Artificial Sequence
  Description of Artificial Sequence: Synthetic oligonucleotide
uguguaggccugggucuug

SEQ ID NO: 1927388 - RNA, 19 nt, Artificial Sequence
  Description of Artificial Sequence: Synthetic oligonucleotide
gugcuauuaacaccggcuu

SEQ ID NO: 1927389 - RNA, 19 nt, Artificial Sequence
  Description of Artificial Sequence: Synthetic oligonucleotide
agagccgcucugaggaaug

SEQ ID NO: 1927390 - RNA, 19 nt, Artificial Sequence
  Description of Artificial Sequence: Synthetic oligonucleotide
caccuuccugguacuugag

SEQ ID NO: 1927391 - RNA, 19 nt, Artificial Sequence
  Description of Artificial Sequence: Synthetic oligonucleotide
ccucauuuccaguucuuga

SEQ ID NO: 1927392 - RNA, 19 nt, Artificial Sequence
  Description of Artificial Sequence: Synthetic oligonucleotide
ccacgugggaaguagcuca

SEQ ID NO: 1927393 - RNA, 19 nt, Artificial Sequence
  Description of Artificial Sequence: Synthetic oligonucleotide
gcgaagauauucugaccca

SEQ ID NO: 1927394 - RNA, 19 nt, Artificial Sequence
  Description of Artificial Sequence: Synthetic oligonucleotide
gaaccucacggugcugcac

SEQ ID NO: 1927395 - RNA, 19 nt, Artificial Sequence
  Description of Artificial Sequence: Synthetic oligonucleotide
acaaggcccguuguccaga

SEQ ID NO: 1927396 - RNA, 19 nt, Artificial Sequence
  Description of Artificial Sequence: Synthetic oligonucleotide
ccgagagaugaagccaucg

SEQ ID NO: 1927397 - RNA, 19 nt, Artificial Sequence
  Description of Artificial Sequence: Synthetic oligonucleotide
ugguucucucgugcuauua

SEQ ID NO: 1927398 - RNA, 19 nt, Artificial Sequence
  Description of Artificial Sequence: Synthetic oligonucleotide
cgcucgcugucccugaugg

SEQ ID NO: 1927399 - RNA, 19 nt, Artificial Sequence
  Description of Artificial Sequence: Synthetic oligonucleotide
ucggcuggcuccucuccau

SEQ ID NO: 1927400 - RNA, 19 nt, Artificial Sequence
  Description of Artificial Sequence: Synthetic oligonucleotide
cuggccuauccacaggugu

SEQ ID NO: 1927401 - RNA, 19 nt, Artificial Sequence
  Description of Artificial Sequence: Synthetic oligonucleotide
gucggacucguucccuuga

SEQ ID NO: 1927402 - RNA, 19 nt, Artificial Sequence
  Description of Artificial Sequence: Synthetic oligonucleotide
cugggaucagcaguucaga

SEQ ID NO: 1927403 - RNA, 19 nt, Artificial Sequence
  Description of Artificial Sequence: Synthetic oligonucleotide
gcaaaggggcuggagucag

SEQ ID NO: 1927404 - RNA, 19 nt, Artificial Sequence
  Description of Artificial Sequence: Synthetic oligonucleotide
gggcuaggggcaccaaccc

SEQ ID NO: 1927405 - RNA, 19 nt, Artificial Sequence
  Description of Artificial Sequence: Synthetic oligonucleotide
cccuuaaccugguagagcu

SEQ ID NO: 1927406 - RNA, 19 nt, Artificial Sequence
  Description of Artificial Sequence: Synthetic oligonucleotide
gcacuagguaggaaucccc

SEQ ID NO: 1927407 - RNA, 19 nt, Artificial Sequence
  Description of Artificial Sequence: Synthetic oligonucleotide
ggucuuggacugaggcugg

SEQ ID NO: 1927408 - RNA, 19 nt, Artificial Sequence
  Description of Artificial Sequence: Synthetic oligonucleotide
acggugcugcacaggccgc

SEQ ID NO: 1927409 - RNA, 19 nt, Artificial Sequence
  Description of Artificial Sequence: Synthetic oligonucleotide
uaaccugguagagcuucuu

SEQ ID NO: 1927410 - RNA, 19 nt, Artificial Sequence
  Description of Artificial Sequence: Synthetic oligonucleotide
gaaucuccaccugaguguu

SEQ ID NO: 1927411 - RNA, 19 nt, Artificial Sequence
  Description of Artificial Sequence: Synthetic oligonucleotide
gaccuuauacagggccgca

SEQ ID NO: 1927412 - RNA, 19 nt, Artificial Sequence
  Description of Artificial Sequence: Synthetic oligonucleotide
uguuacguuccaggauguu

SEQ ID NO: 1927413 - RNA, 19 nt, Artificial Sequence
  Description of Artificial Sequence: Synthetic oligonucleotide
gcauuggucuggucagcug

SEQ ID NO: 1927414 - RNA, 19 nt, Artificial Sequence
  Description of Artificial Sequence: Synthetic oligonucleotide
ggagaccucuucugggcca

SEQ ID NO: 1927415 - RNA, 19 nt, Artificial Sequence
  Description of Artificial Sequence: Synthetic oligonucleotide
guggcucggauguucuucu

SEQ ID NO: 1927416 - RNA, 19 nt, Artificial Sequence
  Description of Artificial Sequence: Synthetic oligonucleotide
ggucggacucguucccuug

SEQ ID NO: 1927417 - RNA, 19 nt, Artificial Sequence
  Description of Artificial Sequence: Synthetic oligonucleotide
ccaggcgaagauauucuga

SEQ ID NO: 1927418 - RNA, 19 nt, Artificial Sequence
  Description of Artificial Sequence: Synthetic oligonucleotide
cccgggaugauugcuggcc

SEQ ID NO: 1927419 - RNA, 19 nt, Artificial Sequence
  Description of Artificial Sequence: Synthetic oligonucleotide
cacggggccuuuucuucuc

SEQ ID NO: 1927420 - RNA, 19 nt, Artificial Sequence
  Description of Artificial Sequence: Synthetic oligonucleotide
cauauguguaggccugggu

SEQ ID NO: 1927421 - RNA, 19 nt, Artificial Sequence
  Description of Artificial Sequence: Synthetic oligonucleotide
aggucggacucguucccuu

SEQ ID NO: 1927422 - RNA, 19 nt, Artificial Sequence
  Description of Artificial Sequence: Synthetic oligonucleotide
ggaugaagcaguccccggu

SEQ ID NO: 1927423 - RNA, 19 nt, Artificial Sequence
  Description of Artificial Sequence: Synthetic oligonucleotide
cguuguccagaacaaagca

SEQ ID NO: 1927424 - RNA, 19 nt, Artificial Sequence
  Description of Artificial Sequence: Synthetic oligonucleotide
caccaggcgaagauauucu

SEQ ID NO: 1927425 - RNA, 19 nt, Artificial Sequence
  Description of Artificial Sequence: Synthetic oligonucleotide
guccccgguguugaagcug

SEQ ID NO: 1927426 - RNA, 19 nt, Artificial Sequence
  Description of Artificial Sequence: Synthetic oligonucleotide
gccgcuccuucucauuagc

SEQ ID NO: 1927427 - RNA, 19 nt, Artificial Sequence
  Description of Artificial Sequence: Synthetic oligonucleotide
ggcaggagaggagggcuag

SEQ ID NO: 1927428 - RNA, 19 nt, Artificial Sequence
  Description of Artificial Sequence: Synthetic oligonucleotide
aucggccacuuggagggcu

SEQ ID NO: 1927429 - RNA, 19 nt, Artificial Sequence
  Description of Artificial Sequence: Synthetic oligonucleotide
ccagaacaaagcagucauc

SEQ ID NO: 1927430 - RNA, 19 nt, Artificial Sequence
  Description of Artificial Sequence: Synthetic oligonucleotide
gggaaugaagagccgcucu

SEQ ID NO: 1927431 - RNA, 19 nt, Artificial Sequence
  Description of Artificial Sequence: Synthetic oligonucleotide
aucucauccgagagaugaa

SEQ ID NO: 1927432 - RNA, 19 nt, Artificial Sequence
  Description of Artificial Sequence: Synthetic oligonucleotide
agaccucuccacggggccu

SEQ ID NO: 1927433 - RNA, 19 nt, Artificial Sequence
  Description of Artificial Sequence: Synthetic oligonucleotide
cuugaaccucacggugcug

SEQ ID NO: 1927434 - RNA, 19 nt, Artificial Sequence
  Description of Artificial Sequence: Synthetic oligonucleotide
ccgcucugaggaaugggug

SEQ ID NO: 1927435 - RNA, 19 nt, Artificial Sequence
  Description of Artificial Sequence: Synthetic oligonucleotide
cccaaggaugucuugugaa

SEQ ID NO: 1927436 - RNA, 19 nt, Artificial Sequence
  Description of Artificial Sequence: Synthetic oligonucleotide
cgugcuauuaacaccggcu

SEQ ID NO: 1927437 - RNA, 19 nt, Artificial Sequence
  Description of Artificial Sequence: Synthetic oligonucleotide
gccggugguagaaggcagg

SEQ ID NO: 1927438 - RNA, 19 nt, Artificial Sequence
  Description of Artificial Sequence: Synthetic oligonucleotide
auguguaggccugggucuu

SEQ ID NO: 1927439 - RNA, 19 nt, Artificial Sequence
  Description of Artificial Sequence: Synthetic oligonucleotide
ucguucccuugaaccucac

SEQ ID NO: 1927440 - RNA, 19 nt, Artificial Sequence
  Description of Artificial Sequence: Synthetic oligonucleotide
caucugggaucagcaguuc

SEQ ID NO: 1927441 - RNA, 19 nt, Artificial Sequence
  Description of Artificial Sequence: Synthetic oligonucleotide
caggcgcccugcucauccc

SEQ ID NO: 1927442 - RNA, 19 nt, Artificial Sequence
  Description of Artificial Sequence: Synthetic oligonucleotide
aggaauccccagagaagaa

SEQ ID NO: 1927443 - RNA, 19 nt, Artificial Sequence
  Description of Artificial Sequence: Synthetic oligonucleotide
caccggcuucagcuucucc

SEQ ID NO: 1927444 - RNA, 19 nt, Artificial Sequence
  Description of Artificial Sequence: Synthetic oligonucleotide
gaggaaugggugaguacau

SEQ ID NO: 1927445 - RNA, 19 nt, Artificial Sequence
  Description of Artificial Sequence: Synthetic oligonucleotide
acgugggaaguagcucaug

SEQ ID NO: 1927446 - RNA, 19 nt, Artificial Sequence
  Description of Artificial Sequence: Synthetic oligonucleotide
gcuuuucgucccuuccaga

SEQ ID NO: 1927447 - RNA, 19 nt, Artificial Sequence
  Description of Artificial Sequence: Synthetic oligonucleotide
gucccuugccuuguuacgu

SEQ ID NO: 1927448 - RNA, 19 nt, Artificial Sequence
  Description of Artificial Sequence: Synthetic oligonucleotide
cucggcuggcuccucucca

SEQ ID NO: 1927449 - RNA, 19 nt, Artificial Sequence
  Description of Artificial Sequence: Synthetic oligonucleotide
cgugggaaguagcucauga

SEQ ID NO: 1927450 - RNA, 19 nt, Artificial Sequence
  Description of Artificial Sequence: Synthetic oligonucleotide
cugccgcuccuucucauua

SEQ ID NO: 1927451 - RNA, 19 nt, Artificial Sequence
  Description of Artificial Sequence: Synthetic oligonucleotide
cguuccaggauguuggacu

SEQ ID NO: 1927452 - RNA, 19 nt, Artificial Sequence
  Description of Artificial Sequence: Synthetic oligonucleotide
ccccuuaaccugguagagc

SEQ ID NO: 1927453 - RNA, 19 nt, Artificial Sequence
  Description of Artificial Sequence: Synthetic oligonucleotide
gggacucucucggcccugg

SEQ ID NO: 1927454 - RNA, 19 nt, Artificial Sequence
  Description of Artificial Sequence: Synthetic oligonucleotide
ggggcaccaacccucauuu

SEQ ID NO: 1927455 - RNA, 19 nt, Artificial Sequence
  Description of Artificial Sequence: Synthetic oligonucleotide
cccgguguugaagcugucc

SEQ ID NO: 1927456 - RNA, 19 nt, Artificial Sequence
  Description of Artificial Sequence: Synthetic oligonucleotide
ccauuguguagcacuaggu

SEQ ID NO: 1927457 - RNA, 19 nt, Artificial Sequence
  Description of Artificial Sequence: Synthetic oligonucleotide
uaggggcaccaacccucau

SEQ ID NO: 1927458 - RNA, 19 nt, Artificial Sequence
  Description of Artificial Sequence: Synthetic oligonucleotide
ggcgcccugcucaucccgg

SEQ ID NO: 1927459 - RNA, 19 nt, Artificial Sequence
  Description of Artificial Sequence: Synthetic oligonucleotide
caaggcccguuguccagaa

SEQ ID NO: 1927460 - RNA, 19 nt, Artificial Sequence
  Description of Artificial Sequence: Synthetic oligonucleotide
ggggccuuuucuucucaaa

SEQ ID NO: 1927461 - RNA, 19 nt, Artificial Sequence
  Description of Artificial Sequence: Synthetic oligonucleotide
cugggccauuguguagcac

SEQ ID NO: 1927462 - RNA, 19 nt, Artificial Sequence
  Description of Artificial Sequence: Synthetic oligonucleotide
cguucccuugaaccucacg

SEQ ID NO: 1927463 - RNA, 19 nt, Artificial Sequence
  Description of Artificial Sequence: Synthetic oligonucleotide
gcuuggggcccagaaccug

SEQ ID NO: 1927464 - RNA, 19 nt, Artificial Sequence
  Description of Artificial Sequence: Synthetic oligonucleotide
ugacggcugcugggguggc

SEQ ID NO: 1927465 - RNA, 19 nt, Artificial Sequence
  Description of Artificial Sequence: Synthetic oligonucleotide
ucucaguggcucggauguu

SEQ ID NO: 1927466 - RNA, 19 nt, Artificial Sequence
  Description of Artificial Sequence: Synthetic oligonucleotide
gccacgugggaaguagcuc

SEQ ID NO: 1927467 - RNA, 19 nt, Artificial Sequence
  Description of Artificial Sequence: Synthetic oligonucleotide
ggccuauccacagguguaa

SEQ ID NO: 1927468 - RNA, 19 nt, Artificial Sequence
  Description of Artificial Sequence: Synthetic oligonucleotide
ccaacccucauuuccaguu

SEQ ID NO: 1927469 - RNA, 19 nt, Artificial Sequence
  Description of Artificial Sequence: Synthetic oligonucleotide
cgucccuuccagauguaga

SEQ ID NO: 1927470 - RNA, 19 nt, Artificial Sequence
  Description of Artificial Sequence: Synthetic oligonucleotide
gggcauuggucuggucagc

SEQ ID NO: 1927471 - RNA, 19 nt, Artificial Sequence
  Description of Artificial Sequence: Synthetic oligonucleotide
ggacugaggcugggaauga

SEQ ID NO: 1927472 - RNA, 19 nt, Artificial Sequence
  Description of Artificial Sequence: Synthetic oligonucleotide
ggcauuggucuggucagcu

SEQ ID NO: 1927473 - RNA, 19 nt, Artificial Sequence
  Description of Artificial Sequence: Synthetic oligonucleotide
ccccaaggaugucuuguga

SEQ ID NO: 1927474 - RNA, 19 nt, Artificial Sequence
  Description of Artificial Sequence: Synthetic oligonucleotide
cacgugggaaguagcucau

SEQ ID NO: 1927475 - RNA, 19 nt, Artificial Sequence
  Description of Artificial Sequence: Synthetic oligonucleotide
ccucacggugcugcacagg

SEQ ID NO: 1927476 - RNA, 19 nt, Artificial Sequence
  Description of Artificial Sequence: Synthetic oligonucleotide
ccuuguuacguuccaggau

SEQ ID NO: 1927477 - RNA, 19 nt, Artificial Sequence
  Description of Artificial Sequence: Synthetic oligonucleotide
ggcuaggggcaccaacccu

SEQ ID NO: 1927478 - RNA, 19 nt, Artificial Sequence
  Description of Artificial Sequence: Synthetic oligonucleotide
caucucggcuggcuccucu

SEQ ID NO: 1927479 - RNA, 19 nt, Artificial Sequence
  Description of Artificial Sequence: Synthetic oligonucleotide
cuccacggggccuuuucuu

SEQ ID NO: 1927480 - RNA, 19 nt, Artificial Sequence
  Description of Artificial Sequence: Synthetic oligonucleotide
cggacucguucccuugaac

SEQ ID NO: 1927481 - RNA, 19 nt, Artificial Sequence
  Description of Artificial Sequence: Synthetic oligonucleotide
ucucggcccuggggcagaa

SEQ ID NO: 1927482 - RNA, 19 nt, Artificial Sequence
  Description of Artificial Sequence: Synthetic oligonucleotide
ccuauccacagguguaaau

SEQ ID NO: 1927483 - RNA, 19 nt, Artificial Sequence
  Description of Artificial Sequence: Synthetic oligonucleotide
cgguguugaagcuguccca

SEQ ID NO: 1927484 - RNA, 19 nt, Artificial Sequence
  Description of Artificial Sequence: Synthetic oligonucleotide
gggaugauugcuggccuau

SEQ ID NO: 1927485 - RNA, 19 nt, Artificial Sequence
  Description of Artificial Sequence: Synthetic oligonucleotide
ggaggguguugaggugcac

SEQ ID NO: 1927486 - RNA, 19 nt, Artificial Sequence
  Description of Artificial Sequence: Synthetic oligonucleotide
cacaggcgcccugcucauc

SEQ ID NO: 1927487 - RNA, 19 nt, Artificial Sequence
  Description of Artificial Sequence: Synthetic oligonucleotide
ccggugguagaaggcagga

SEQ ID NO: 1927488 - RNA, 19 nt, Artificial Sequence
  Description of Artificial Sequence: Synthetic oligonucleotide
ccgcucgcugucccugaug

SEQ ID NO: 1927489 - RNA, 19 nt, Artificial Sequence
  Description of Artificial Sequence: Synthetic oligonucleotide
gcggacuccacaccaccuu

SEQ ID NO: 1927490 - RNA, 19 nt, Artificial Sequence
  Description of Artificial Sequence: Synthetic oligonucleotide
gcccguuguccagaacaaa

SEQ ID NO: 1927491 - RNA, 19 nt, Artificial Sequence
  Description of Artificial Sequence: Synthetic oligonucleotide
ccacggggccuuuucuucu

SEQ ID NO: 1927492 - RNA, 19 nt, Artificial Sequence
  Description of Artificial Sequence: Synthetic oligonucleotide
ggcuuggggcccagaaccu

SEQ ID NO: 1927493 - RNA, 19 nt, Artificial Sequence
  Description of Artificial Sequence: Synthetic oligonucleotide
ccuuccagauguagauuuu

SEQ ID NO: 1927494 - RNA, 19 nt, Artificial Sequence
  Description of Artificial Sequence: Synthetic oligonucleotide
gggugaguacaugcuguuu

SEQ ID NO: 1927495 - RNA, 19 nt, Artificial Sequence
  Description of Artificial Sequence: Synthetic oligonucleotide
cugcucaucccgggaugau

SEQ ID NO: 1927496 - RNA, 19 nt, Artificial Sequence
  Description of Artificial Sequence: Synthetic oligonucleotide
cgggaugauugcuggccua

SEQ ID NO: 1927497 - RNA, 19 nt, Artificial Sequence
  Description of Artificial Sequence: Synthetic oligonucleotide
ccuuaaccugguagagcuu

SEQ ID NO: 1927498 - RNA, 19 nt, Artificial Sequence
  Description of Artificial Sequence: Synthetic oligonucleotide
gcccucucaguggcucgga

SEQ ID NO: 1927499 - RNA, 19 nt, Artificial Sequence
  Description of Artificial Sequence: Synthetic oligonucleotide
ggagggcuaggggcaccaa

SEQ ID NO: 1927500 - RNA, 19 nt, Artificial Sequence
  Description of Artificial Sequence: Synthetic oligonucleotide
ccccgguguugaagcuguc

SEQ ID NO: 1927501 - RNA, 19 nt, Artificial Sequence
  Description of Artificial Sequence: Synthetic oligonucleotide
ggccugggucuuggacuga

SEQ ID NO: 1927502 - RNA, 19 nt, Artificial Sequence
  Description of Artificial Sequence: Synthetic oligonucleotide
ccgcagcuugggcauuggu

SEQ ID NO: 1927503 - RNA, 19 nt, Artificial Sequence
  Description of Artificial Sequence: Synthetic oligonucleotide
gccgcucgcugucccugau

SEQ ID NO: 1927504 - RNA, 19 nt, Artificial Sequence
  Description of Artificial Sequence: Synthetic oligonucleotide
gccgcuccccaaggagggu

SEQ ID NO: 1927505 - RNA, 19 nt, Artificial Sequence
  Description of Artificial Sequence: Synthetic oligonucleotide
cucggcccuggggcagaau

SEQ ID NO: 1927506 - RNA, 19 nt, Artificial Sequence
  Description of Artificial Sequence: Synthetic oligonucleotide
ccaggucccuugccuuguu

SEQ ID NO: 1927507 - RNA, 19 nt, Artificial Sequence
  Description of Artificial Sequence: Synthetic oligonucleotide
ccucuccaucagugauaau

SEQ ID NO: 1927508 - RNA, 19 nt, Artificial Sequence
  Description of Artificial Sequence: Synthetic oligonucleotide
uuuuaugacagcaccaagg

SEQ ID NO: 1927509 - RNA, 19 nt, Artificial Sequence
  Description of Artificial Sequence: Synthetic oligonucleotide
auuuuacacacacacacac

SEQ ID NO: 1927510 - RNA, 19 nt, Artificial Sequence
  Description of Artificial Sequence: Synthetic oligonucleotide
aucuugauggcaucuagcc

SEQ ID NO: 1927511 - RNA, 19 nt, Artificial Sequence
  Description of Artificial Sequence: Synthetic oligonucleotide
uuuacacacacacacacac

SEQ ID NO: 1927512 - RNA, 19 nt, Artificial Sequence
  Description of Artificial Sequence: Synthetic oligonucleotide
uuacucaugucccaguagg

SEQ ID NO: 1927513 - RNA, 19 nt, Artificial Sequence
  Description of Artificial Sequence: Synthetic oligonucleotide
uguauuuccccauuccugg

SEQ ID NO: 1927514 - RNA, 19 nt, Artificial Sequence
  Description of Artificial Sequence: Synthetic oligonucleotide
guauuuuacacacacacac

SEQ ID NO: 1927515 - RNA, 19 nt, Artificial Sequence
  Description of Artificial Sequence: Synthetic oligonucleotide
uauaauccgggacugugcg

SEQ ID NO: 1927516 - RNA, 19 nt, Artificial Sequence
  Description of Artificial Sequence: Synthetic oligonucleotide
acuuccguaggcuauggcc

SEQ ID NO: 1927517 - RNA, 19 nt, Artificial Sequence
  Description of Artificial Sequence: Synthetic oligonucleotide
auuugggagaacuuggguc

SEQ ID NO: 1927518 - RNA, 19 nt, Artificial Sequence
  Description of Artificial Sequence: Synthetic oligonucleotide
ugaagguaguauaauccgg

SEQ ID NO: 1927519 - RNA, 19 nt, Artificial Sequence
  Description of Artificial Sequence: Synthetic oligonucleotide
aaggaugcgaacccagcac

SEQ ID NO: 1927520 - RNA, 19 nt, Artificial Sequence
  Description of Artificial Sequence: Synthetic oligonucleotide
aucuuauugccuuuauuuc

SEQ ID NO: 1927521 - RNA, 19 nt, Artificial Sequence
  Description of Artificial Sequence: Synthetic oligonucleotide
gauaagcuugucuagugug

SEQ ID NO: 1927522 - RNA, 19 nt, Artificial Sequence
  Description of Artificial Sequence: Synthetic oligonucleotide
ucuuggauacugcugagga

SEQ ID NO: 1927523 - RNA, 19 nt, Artificial Sequence
  Description of Artificial Sequence: Synthetic oligonucleotide
auggcaucuagccagucac

SEQ ID NO: 1927524 - RNA, 19 nt, Artificial Sequence
  Description of Artificial Sequence: Synthetic oligonucleotide
uacacacacacacacacac

SEQ ID NO: 1927525 - RNA, 19 nt, Artificial Sequence
  Description of Artificial Sequence: Synthetic oligonucleotide
gaagguaguauaauccggg

SEQ ID NO: 1927526 - RNA, 19 nt, Artificial Sequence
  Description of Artificial Sequence: Synthetic oligonucleotide
cuuauugccuuuauuucgc

SEQ ID NO: 1927527 - RNA, 19 nt, Artificial Sequence
  Description of Artificial Sequence: Synthetic oligonucleotide
uuugggagaacuugggucu

SEQ ID NO: 1927528 - RNA, 19 nt, Artificial Sequence
  Description of Artificial Sequence: Synthetic oligonucleotide
aguccccucauccacuucc

SEQ ID NO: 1927529 - RNA, 19 nt, Artificial Sequence
  Description of Artificial Sequence: Synthetic oligonucleotide
ucaugucccaguagggucg

SEQ ID NO: 1927530 - RNA, 19 nt, Artificial Sequence
  Description of Artificial Sequence: Synthetic oligonucleotide
ugaagauuccccacuggag

SEQ ID NO: 1927531 - RNA, 19 nt, Artificial Sequence
  Description of Artificial Sequence: Synthetic oligonucleotide
cuuuauuucgcugucugcc

SEQ ID NO: 1927532 - RNA, 19 nt, Artificial Sequence
  Description of Artificial Sequence: Synthetic oligonucleotide
aggucaaaggaugcgaacc

SEQ ID NO: 1927533 - RNA, 19 nt, Artificial Sequence
  Description of Artificial Sequence: Synthetic oligonucleotide
aagauuccccacuggagag

SEQ ID NO: 1927534 - RNA, 19 nt, Artificial Sequence
  Description of Artificial Sequence: Synthetic oligonucleotide
auugccuuuauuucgcugu

SEQ ID NO: 1927535 - RNA, 19 nt, Artificial Sequence
  Description of Artificial Sequence: Synthetic oligonucleotide
auagggaucuuccucccac

SEQ ID NO: 1927536 - RNA, 19 nt, Artificial Sequence
  Description of Artificial Sequence: Synthetic oligonucleotide
aguguguugacaauuuggg

SEQ ID NO: 1927537 - RNA, 19 nt, Artificial Sequence
  Description of Artificial Sequence: Synthetic oligonucleotide
uacggcauugaugacaucc

SEQ ID NO: 1927538 - RNA, 19 nt, Artificial Sequence
  Description of Artificial Sequence: Synthetic oligonucleotide
uauuuuacacacacacaca

SEQ ID NO: 1927539 - RNA, 19 nt, Artificial Sequence
  Description of Artificial Sequence: Synthetic oligonucleotide
aaaggaugcgaacccagca

SEQ ID NO: 1927540 - RNA, 19 nt, Artificial Sequence
  Description of Artificial Sequence: Synthetic oligonucleotide
aauacucccugcuuaccug

SEQ ID NO: 1927541 - RNA, 19 nt, Artificial Sequence
  Description of Artificial Sequence: Synthetic oligonucleotide
acuauugaagcacagccaa

SEQ ID NO: 1927542 - RNA, 19 nt, Artificial Sequence
  Description of Artificial Sequence: Synthetic oligonucleotide
agguaguauaauccgggac

SEQ ID NO: 1927543 - RNA, 19 nt, Artificial Sequence
  Description of Artificial Sequence: Synthetic oligonucleotide
acacucaugcucucugugc

SEQ ID NO: 1927544 - RNA, 19 nt, Artificial Sequence
  Description of Artificial Sequence: Synthetic oligonucleotide
gacaauuugggagaacuug

SEQ ID NO: 1927545 - RNA, 19 nt, Artificial Sequence
  Description of Artificial Sequence: Synthetic oligonucleotide
ucaaaggaugcgaacccag

SEQ ID NO: 1927546 - RNA, 19 nt, Artificial Sequence
  Description of Artificial Sequence: Synthetic oligonucleotide
uuuauuucgcugucugccc

SEQ ID NO: 1927547 - RNA, 19 nt, Artificial Sequence
  Description of Artificial Sequence: Synthetic oligonucleotide
agccgcaugucuuggauac

SEQ ID NO: 1927548 - RNA, 19 nt, Artificial Sequence
  Description of Artificial Sequence: Synthetic oligonucleotide
uaggcuauggccucugggc

SEQ ID NO: 1927549 - RNA, 19 nt, Artificial Sequence
  Description of Artificial Sequence: Synthetic oligonucleotide
ugugaagauuccccacugg

SEQ ID NO: 1927550 - RNA, 19 nt, Artificial Sequence
  Description of Artificial Sequence: Synthetic oligonucleotide
gaagauuccccacuggaga

SEQ ID NO: 1927551 - RNA, 19 nt, Artificial Sequence
  Description of Artificial Sequence: Synthetic oligonucleotide
uagccagucacccacugug

SEQ ID NO: 1927552 - RNA, 19 nt, Artificial Sequence
  Description of Artificial Sequence: Synthetic oligonucleotide
acaauuugggagaacuugg

SEQ ID NO: 1927553 - RNA, 19 nt, Artificial Sequence
  Description of Artificial Sequence: Synthetic oligonucleotide
uuuuacacacacacacaca

SEQ ID NO: 1927554 - RNA, 19 nt, Artificial Sequence
  Description of Artificial Sequence: Synthetic oligonucleotide
guaccagcuggcuucaggg

SEQ ID NO: 1927555 - RNA, 19 nt, Artificial Sequence
  Description of Artificial Sequence: Synthetic oligonucleotide
uucaucugcagccgcaugu

SEQ ID NO: 1927556 - RNA, 19 nt, Artificial Sequence
  Description of Artificial Sequence: Synthetic oligonucleotide
agcacugacaaagcucucc

SEQ ID NO: 1927557 - RNA, 19 nt, Artificial Sequence
  Description of Artificial Sequence: Synthetic oligonucleotide
cacacacacacacacacac

SEQ ID NO: 1927558 - RNA, 19 nt, Artificial Sequence
  Description of Artificial Sequence: Synthetic oligonucleotide
uacucaugucccaguaggg

SEQ ID NO: 1927559 - RNA, 19 nt, Artificial Sequence
  Description of Artificial Sequence: Synthetic oligonucleotide
uuaugacagcaccaagggc

SEQ ID NO: 1927560 - RNA, 19 nt, Artificial Sequence
  Description of Artificial Sequence: Synthetic oligonucleotide
ucgcugucugcccagcugg

SEQ ID NO: 1927561 - RNA, 19 nt, Artificial Sequence
  Description of Artificial Sequence: Synthetic oligonucleotide
aaagcucuccuuauaccuc

SEQ ID NO: 1927562 - RNA, 19 nt, Artificial Sequence
  Description of Artificial Sequence: Synthetic oligonucleotide
uuauaccuccccaucuuga

SEQ ID NO: 1927563 - RNA, 19 nt, Artificial Sequence
  Description of Artificial Sequence: Synthetic oligonucleotide
ucugaguugugaagauucc

SEQ ID NO: 1927564 - RNA, 19 nt, Artificial Sequence
  Description of Artificial Sequence: Synthetic oligonucleotide
aagguaguauaauccggga

SEQ ID NO: 1927565 - RNA, 19 nt, Artificial Sequence
  Description of Artificial Sequence: Synthetic oligonucleotide
ugugcaaacuggagguacc

SEQ ID NO: 1927566 - RNA, 19 nt, Artificial Sequence
  Description of Artificial Sequence: Synthetic oligonucleotide
agaggugaacuuccguagg

SEQ ID NO: 1927567 - RNA, 19 nt, Artificial Sequence
  Description of Artificial Sequence: Synthetic oligonucleotide
accuccacuauugaagcac

SEQ ID NO: 1927568 - RNA, 19 nt, Artificial Sequence
  Description of Artificial Sequence: Synthetic oligonucleotide
ggugaagguaguauaaucc

SEQ ID NO: 1927569 - RNA, 19 nt, Artificial Sequence
  Description of Artificial Sequence: Synthetic oligonucleotide
cuguauuuccccauuccug

SEQ ID NO: 1927570 - RNA, 19 nt, Artificial Sequence
  Description of Artificial Sequence: Synthetic oligonucleotide
gacaauuccauagcuccag

SEQ ID NO: 1927571 - RNA, 19 nt, Artificial Sequence
  Description of Artificial Sequence: Synthetic oligonucleotide
uuauuucgcugucugccca

SEQ ID NO: 1927572 - RNA, 19 nt, Artificial Sequence
  Description of Artificial Sequence: Synthetic oligonucleotide
auacucccugcuuaccugg

SEQ ID NO: 1927573 - RNA, 19 nt, Artificial Sequence
  Description of Artificial Sequence: Synthetic oligonucleotide
uccuuauaccuccccaucu

SEQ ID NO: 1927574 - RNA, 19 nt, Artificial Sequence
  Description of Artificial Sequence: Synthetic oligonucleotide
uagcucaugacuucccaca

SEQ ID NO: 1927575 - RNA, 19 nt, Artificial Sequence
  Description of Artificial Sequence: Synthetic oligonucleotide
aguauaauccgggacugug

SEQ ID NO: 1927576 - RNA, 19 nt, Artificial Sequence
  Description of Artificial Sequence: Synthetic oligonucleotide
cacacacacacaucucugg

SEQ ID NO: 1927577 - RNA, 19 nt, Artificial Sequence
  Description of Artificial Sequence: Synthetic oligonucleotide
caugucuuggauacugcug

SEQ ID NO: 1927578 - RNA, 19 nt, Artificial Sequence
  Description of Artificial Sequence: Synthetic oligonucleotide
aggaccuccacuauugaag

SEQ ID NO: 1927579 - RNA, 19 nt, Artificial Sequence
  Description of Artificial Sequence: Synthetic oligonucleotide
uugcggauaagcuugucua

SEQ ID NO: 1927580 - RNA, 19 nt, Artificial Sequence
  Description of Artificial Sequence: Synthetic oligonucleotide
uggugaagguaguauaauc

SEQ ID NO: 1927581 - RNA, 19 nt, Artificial Sequence
  Description of Artificial Sequence: Synthetic oligonucleotide
guagucuugcucuacggca

SEQ ID NO: 1927582 - RNA, 19 nt, Artificial Sequence
  Description of Artificial Sequence: Synthetic oligonucleotide
ugcggauaagcuugucuag

SEQ ID NO: 1927583 - RNA, 19 nt, Artificial Sequence
  Description of Artificial Sequence: Synthetic oligonucleotide
ugccccguauuuuacacac

SEQ ID NO: 1927584 - RNA, 19 nt, Artificial Sequence
  Description of Artificial Sequence: Synthetic oligonucleotide
ccacuauugaagcacagcc

SEQ ID NO: 1927585 - RNA, 19 nt, Artificial Sequence
  Description of Artificial Sequence: Synthetic oligonucleotide
cagaggugaacuuccguag

SEQ ID NO: 1927586 - RNA, 19 nt, Artificial Sequence
  Description of Artificial Sequence: Synthetic oligonucleotide
cuuuuaugacagcaccaag

SEQ ID NO: 1927587 - RNA, 19 nt, Artificial Sequence
  Description of Artificial Sequence: Synthetic oligonucleotide
cucaugacuucccacauga

SEQ ID NO: 1927588 - RNA, 19 nt, Artificial Sequence
  Description of Artificial Sequence: Synthetic oligonucleotide
aggcuauggccucugggcg

SEQ ID NO: 1927589 - RNA, 19 nt, Artificial Sequence
  Description of Artificial Sequence: Synthetic oligonucleotide
ccguauuuuacacacacac

SEQ ID NO: 1927590 - RNA, 19 nt, Artificial Sequence
  Description of Artificial Sequence: Synthetic oligonucleotide
gaggugaacuuccguaggc

SEQ ID NO: 1927591 - RNA, 19 nt, Artificial Sequence
  Description of Artificial Sequence: Synthetic oligonucleotide
uuacacacacacacacaca

SEQ ID NO: 1927592 - RNA, 19 nt, Artificial Sequence
  Description of Artificial Sequence: Synthetic oligonucleotide
acagccaaaucugaguugu

SEQ ID NO: 1927593 - RNA, 19 nt, Artificial Sequence
  Description of Artificial Sequence: Synthetic oligonucleotide
guuacucaugucccaguag

SEQ ID NO: 1927594 - RNA, 19 nt, Artificial Sequence
  Description of Artificial Sequence: Synthetic oligonucleotide
caaaucugaguugugaaga

SEQ ID NO: 1927595 - RNA, 19 nt, Artificial Sequence
  Description of Artificial Sequence: Synthetic oligonucleotide
ugugccccguauuuuacac

SEQ ID NO: 1927596 - RNA, 19 nt, Artificial Sequence
  Description of Artificial Sequence: Synthetic oligonucleotide
caaaggaugcgaacccagc

SEQ ID NO: 1927597 - RNA, 19 nt, Artificial Sequence
  Description of Artificial Sequence: Synthetic oligonucleotide
guguugacaauuugggaga

SEQ ID NO: 1927598 - RNA, 19 nt, Artificial Sequence
  Description of Artificial Sequence: Synthetic oligonucleotide
augacauccugguuacuca

SEQ ID NO: 1927599 - RNA, 19 nt, Artificial Sequence
  Description of Artificial Sequence: Synthetic oligonucleotide
uccacuauugaagcacagc

SEQ ID NO: 1927600 - RNA, 19 nt, Artificial Sequence
  Description of Artificial Sequence: Synthetic oligonucleotide
augcgaacccagcacugac

SEQ ID NO: 1927601 - RNA, 19 nt, Artificial Sequence
  Description of Artificial Sequence: Synthetic oligonucleotide
agcguugcggauaagcuug

SEQ ID NO: 1927602 - RNA, 19 nt, Artificial Sequence
  Description of Artificial Sequence: Synthetic oligonucleotide
cuuauaccuccccaucuug

SEQ ID NO: 1927603 - RNA, 19 nt, Artificial Sequence
  Description of Artificial Sequence: Synthetic oligonucleotide
cacccaacaguccagcaug

SEQ ID NO: 1927604 - RNA, 19 nt, Artificial Sequence
  Description of Artificial Sequence: Synthetic oligonucleotide
aacccagcacugacaaagc

SEQ ID NO: 1927605 - RNA, 19 nt, Artificial Sequence
  Description of Artificial Sequence: Synthetic oligonucleotide
uggccugccaaggugaccc

SEQ ID NO: 1927606 - RNA, 19 nt, Artificial Sequence
  Description of Artificial Sequence: Synthetic oligonucleotide
cagcuggcccacuacaggg

SEQ ID NO: 1927607 - RNA, 19 nt, Artificial Sequence
  Description of Artificial Sequence: Synthetic oligonucleotide
auaauccgggacugugcgg

SEQ ID NO: 1927608 - RNA, 19 nt, Artificial Sequence
  Description of Artificial Sequence: Synthetic oligonucleotide
aagucccugugcaaacugg

SEQ ID NO: 1927609 - RNA, 19 nt, Artificial Sequence
  Description of Artificial Sequence: Synthetic oligonucleotide
gagcagcagaccugcacgg

SEQ ID NO: 1927610 - RNA, 19 nt, Artificial Sequence
  Description of Artificial Sequence: Synthetic oligonucleotide
uggauacugcugaggaucu

SEQ ID NO: 1927611 - RNA, 19 nt, Artificial Sequence
  Description of Artificial Sequence: Synthetic oligonucleotide
uauuucgcugucugcccag

SEQ ID NO: 1927612 - RNA, 19 nt, Artificial Sequence
  Description of Artificial Sequence: Synthetic oligonucleotide
uggggcacuguauuucccc

SEQ ID NO: 1927613 - RNA, 19 nt, Artificial Sequence
  Description of Artificial Sequence: Synthetic oligonucleotide
uagggaucuuccucccacg

SEQ ID NO: 1927614 - RNA, 19 nt, Artificial Sequence
  Description of Artificial Sequence: Synthetic oligonucleotide
gauacugcugaggaucuuc

SEQ ID NO: 1927615 - RNA, 19 nt, Artificial Sequence
  Description of Artificial Sequence: Synthetic oligonucleotide
acccgacccuaccaggacc

SEQ ID NO: 1927616 - RNA, 19 nt, Artificial Sequence
  Description of Artificial Sequence: Synthetic oligonucleotide
ugagguuccggucccgcac

SEQ ID NO: 1927617 - RNA, 19 nt, Artificial Sequence
  Description of Artificial Sequence: Synthetic oligonucleotide
caacaguccagcaugagcu

SEQ ID NO: 1927618 - RNA, 19 nt, Artificial Sequence
  Description of Artificial Sequence: Synthetic oligonucleotide
aggaugcgaacccagcacu

SEQ ID NO: 1927619 - RNA, 19 nt, Artificial Sequence
  Description of Artificial Sequence: Synthetic oligonucleotide
aucuuccucccacgggagc

SEQ ID NO: 1927620 - RNA, 19 nt, Artificial Sequence
  Description of Artificial Sequence: Synthetic oligonucleotide
uucgcugucugcccagcug

SEQ ID NO: 1927621 - RNA, 19 nt, Artificial Sequence
  Description of Artificial Sequence: Synthetic oligonucleotide
gguaguauaauccgggacu

SEQ ID NO: 1927622 - RNA, 19 nt, Artificial Sequence
  Description of Artificial Sequence: Synthetic oligonucleotide
gaccuugaggcuggcagcg

SEQ ID NO: 1927623 - RNA, 19 nt, Artificial Sequence
  Description of Artificial Sequence: Synthetic oligonucleotide
ucuagccagucacccacug

SEQ ID NO: 1927624 - RNA, 19 nt, Artificial Sequence
  Description of Artificial Sequence: Synthetic oligonucleotide
acagggccaagcuuguaca

SEQ ID NO: 1927625 - RNA, 19 nt, Artificial Sequence
  Description of Artificial Sequence: Synthetic oligonucleotide
gauggcaucuagccaguca

SEQ ID NO: 1927626 - RNA, 19 nt, Artificial Sequence
  Description of Artificial Sequence: Synthetic oligonucleotide
ugaacuuccguaggcuaug

SEQ ID NO: 1927627 - RNA, 19 nt, Artificial Sequence
  Description of Artificial Sequence: Synthetic oligonucleotide
agggcaggacccucagccc

SEQ ID NO: 1927628 - RNA, 19 nt, Artificial Sequence
  Description of Artificial Sequence: Synthetic oligonucleotide
cugaguugugaagauuccc

SEQ ID NO: 1927629 - RNA, 19 nt, Artificial Sequence
  Description of Artificial Sequence: Synthetic oligonucleotide
gcaaacuggagguaccagc

SEQ ID NO: 1927630 - RNA, 19 nt, Artificial Sequence
  Description of Artificial Sequence: Synthetic oligonucleotide
ggcucugugagucagucuc

SEQ ID NO: 1927631 - RNA, 19 nt, Artificial Sequence
  Description of Artificial Sequence: Synthetic oligonucleotide
guauaauccgggacugugc

SEQ ID NO: 1927632 - RNA, 19 nt, Artificial Sequence
  Description of Artificial Sequence: Synthetic oligonucleotide
ucccgcacccaacagucca

SEQ ID NO: 1927633 - RNA, 19 nt, Artificial Sequence
  Description of Artificial Sequence: Synthetic oligonucleotide
agauuccccacuggagagc

SEQ ID NO: 1927634 - RNA, 19 nt, Artificial Sequence
  Description of Artificial Sequence: Synthetic oligonucleotide
cagcggauagggaucuucc

SEQ ID NO: 1927635 - RNA, 19 nt, Artificial Sequence
  Description of Artificial Sequence: Synthetic oligonucleotide
uuauugccuuuauuucgcu

SEQ ID NO: 1927636 - RNA, 19 nt, Artificial Sequence
  Description of Artificial Sequence: Synthetic oligonucleotide
caaagcucuccuuauaccu

SEQ ID NO: 1927637 - RNA, 19 nt, Artificial Sequence
  Description of Artificial Sequence: Synthetic oligonucleotide
gguagucuugcucuacggc

SEQ ID NO: 1927638 - RNA, 19 nt, Artificial Sequence
  Description of Artificial Sequence: Synthetic oligonucleotide
gaauacucccugcuuaccu

SEQ ID NO: 1927639 - RNA, 19 nt, Artificial Sequence
  Description of Artificial Sequence: Synthetic oligonucleotide
auaccuccccaucuugaug

SEQ ID NO: 1927640 - RNA, 19 nt, Artificial Sequence
  Description of Artificial Sequence: Synthetic oligonucleotide
auaagcuugucuagugugu

SEQ ID NO: 1927641 - RNA, 19 nt, Artificial Sequence
  Description of Artificial Sequence: Synthetic oligonucleotide
aauccgggacugugcgguc

SEQ ID NO: 1927642 - RNA, 19 nt, Artificial Sequence
  Description of Artificial Sequence: Synthetic oligonucleotide
ggagguaccagcuggcuuc

SEQ ID NO: 1927643 - RNA, 19 nt, Artificial Sequence
  Description of Artificial Sequence: Synthetic oligonucleotide
cacuauugaagcacagcca

SEQ ID NO: 1927644 - RNA, 19 nt, Artificial Sequence
  Description of Artificial Sequence: Synthetic oligonucleotide
aggacccucagccccaaca

SEQ ID NO: 1927645 - RNA, 19 nt, Artificial Sequence
  Description of Artificial Sequence: Synthetic oligonucleotide
guagggucgcucuccguag

SEQ ID NO: 1927646 - RNA, 19 nt, Artificial Sequence
  Description of Artificial Sequence: Synthetic oligonucleotide
cacacacacacacacaucu

SEQ ID NO: 1927647 - RNA, 19 nt, Artificial Sequence
  Description of Artificial Sequence: Synthetic oligonucleotide
guagcucaugacuucccac

SEQ ID NO: 1927648 - RNA, 19 nt, Artificial Sequence
  Description of Artificial Sequence: Synthetic oligonucleotide
ugacaaagcucuccuuaua

SEQ ID NO: 1927649 - RNA, 19 nt, Artificial Sequence
  Description of Artificial Sequence: Synthetic oligonucleotide
ugcaaacuggagguaccag

SEQ ID NO: 1927650 - RNA, 19 nt, Artificial Sequence
  Description of Artificial Sequence: Synthetic oligonucleotide
uuccccacuggagagcagc

SEQ ID NO: 1927651 - RNA, 19 nt, Artificial Sequence
  Description of Artificial Sequence: Synthetic oligonucleotide
cuucugguggccugccaag

SEQ ID NO: 1927652 - RNA, 19 nt, Artificial Sequence
  Description of Artificial Sequence: Synthetic oligonucleotide
gguaccagcuggcuucagg

SEQ ID NO: 1927653 - RNA, 19 nt, Artificial Sequence
  Description of Artificial Sequence: Synthetic oligonucleotide
ugacauccugguuacucau

SEQ ID NO: 1927654 - RNA, 19 nt, Artificial Sequence
  Description of Artificial Sequence: Synthetic oligonucleotide
uucaggguggggcacugua

SEQ ID NO: 1927655 - RNA, 19 nt, Artificial Sequence
  Description of Artificial Sequence: Synthetic oligonucleotide
aaucugaguugugaagauu

SEQ ID NO: 1927656 - RNA, 19 nt, Artificial Sequence
  Description of Artificial Sequence: Synthetic oligonucleotide
acuguggugaagguaguau

SEQ ID NO: 1927657 - RNA, 19 nt, Artificial Sequence
  Description of Artificial Sequence: Synthetic oligonucleotide
auuucgcugucugcccagc

SEQ ID NO: 1927658 - RNA, 19 nt, Artificial Sequence
  Description of Artificial Sequence: Synthetic oligonucleotide
acucaugucccaguagggu

SEQ ID NO: 1927659 - RNA, 19 nt, Artificial Sequence
  Description of Artificial Sequence: Synthetic oligonucleotide
uugccuuuauuucgcuguc

SEQ ID NO: 1927660 - RNA, 19 nt, Artificial Sequence
  Description of Artificial Sequence: Synthetic oligonucleotide
ggaucuuccucccacggga

SEQ ID NO: 1927661 - RNA, 19 nt, Artificial Sequence
  Description of Artificial Sequence: Synthetic oligonucleotide
caggucaaaggaugcgaac

SEQ ID NO: 1927662 - RNA, 19 nt, Artificial Sequence
  Description of Artificial Sequence: Synthetic oligonucleotide
cacagccaaaucugaguug

SEQ ID NO: 1927663 - RNA, 19 nt, Artificial Sequence
  Description of Artificial Sequence: Synthetic oligonucleotide
cagccaagcaugugccccg

SEQ ID NO: 1927664 - RNA, 19 nt, Artificial Sequence
  Description of Artificial Sequence: Synthetic oligonucleotide
cucaugcucucugugcagc

SEQ ID NO: 1927665 - RNA, 19 nt, Artificial Sequence
  Description of Artificial Sequence: Synthetic oligonucleotide
uccggucccgcacccaaca

SEQ ID NO: 1927666 - RNA, 19 nt, Artificial Sequence
  Description of Artificial Sequence: Synthetic oligonucleotide
cugccugcccuuuuaugac

SEQ ID NO: 1927667 - RNA, 19 nt, Artificial Sequence
  Description of Artificial Sequence: Synthetic oligonucleotide
ccaacaguccagcaugagc

SEQ ID NO: 1927668 - RNA, 19 nt, Artificial Sequence
  Description of Artificial Sequence: Synthetic oligonucleotide
ucaugacuucccacaugac

SEQ ID NO: 1927669 - RNA, 19 nt, Artificial Sequence
  Description of Artificial Sequence: Synthetic oligonucleotide
gagguuccggucccgcacc

SEQ ID NO: 1927670 - RNA, 19 nt, Artificial Sequence
  Description of Artificial Sequence: Synthetic oligonucleotide
gauuccccacuggagagca

SEQ ID NO: 1927671 - RNA, 19 nt, Artificial Sequence
  Description of Artificial Sequence: Synthetic oligonucleotide
caaacuggagguaccagcu

SEQ ID NO: 1927672 - RNA, 19 nt, Artificial Sequence
  Description of Artificial Sequence: Synthetic oligonucleotide
accaggucaaaggaugcga

SEQ ID NO: 1927673 - RNA, 19 nt, Artificial Sequence
  Description of Artificial Sequence: Synthetic oligonucleotide
uguugacaauuugggagaa

SEQ ID NO: 1927674 - RNA, 19 nt, Artificial Sequence
  Description of Artificial Sequence: Synthetic oligonucleotide
cuccacuauugaagcacag

SEQ ID NO: 1927675 - RNA, 19 nt, Artificial Sequence
  Description of Artificial Sequence: Synthetic oligonucleotide
uguacacacucaugcucuc

SEQ ID NO: 1927676 - RNA, 19 nt, Artificial Sequence
  Description of Artificial Sequence: Synthetic oligonucleotide
uuuccccauuccuggaguc

SEQ ID NO: 1927677 - RNA, 19 nt, Artificial Sequence
  Description of Artificial Sequence: Synthetic oligonucleotide
ugucuaguguguugacaau

SEQ ID NO: 1927678 - RNA, 19 nt, Artificial Sequence
  Description of Artificial Sequence: Synthetic oligonucleotide
agcggauagggaucuuccu

SEQ ID NO: 1927679 - RNA, 19 nt, Artificial Sequence
  Description of Artificial Sequence: Synthetic oligonucleotide
cuccuuauaccuccccauc

SEQ ID NO: 1927680 - RNA, 19 nt, Artificial Sequence
  Description of Artificial Sequence: Synthetic oligonucleotide
uaagcuugucuaguguguu

SEQ ID NO: 1927681 - RNA, 19 nt, Artificial Sequence
  Description of Artificial Sequence: Synthetic oligonucleotide
ucaggguggggcacuguau

SEQ ID NO: 1927682 - RNA, 19 nt, Artificial Sequence
  Description of Artificial Sequence: Synthetic oligonucleotide
ugccugcccuuuuaugaca

SEQ ID NO: 1927683 - RNA, 19 nt, Artificial Sequence
  Description of Artificial Sequence: Synthetic oligonucleotide
ucuugcucuacggcauuga

SEQ ID NO: 1927684 - RNA, 19 nt, Artificial Sequence
  Description of Artificial Sequence: Synthetic oligonucleotide
agguuccggucccgcaccc

SEQ ID NO: 1927685 - RNA, 19 nt, Artificial Sequence
  Description of Artificial Sequence: Synthetic oligonucleotide
cuuccguaggcuauggccu

SEQ ID NO: 1927686 - RNA, 19 nt, Artificial Sequence
  Description of Artificial Sequence: Synthetic oligonucleotide
gaucuuccucccacgggag

SEQ ID NO: 1927687 - RNA, 19 nt, Artificial Sequence
  Description of Artificial Sequence: Synthetic oligonucleotide
uccugccugcccuuuuaug

SEQ ID NO: 1927688 - RNA, 19 nt, Artificial Sequence
  Description of Artificial Sequence: Synthetic oligonucleotide
acacacacacacaucucug

SEQ ID NO: 1927689 - RNA, 19 nt, Artificial Sequence
  Description of Artificial Sequence: Synthetic oligonucleotide
agcucaugacuucccacau

SEQ ID NO: 1927690 - RNA, 19 nt, Artificial Sequence
  Description of Artificial Sequence: Synthetic oligonucleotide
uucuaucuuauugccuuua

SEQ ID NO: 1927691 - RNA, 19 nt, Artificial Sequence
  Description of Artificial Sequence: Synthetic oligonucleotide
cucuacggcauugaugaca

SEQ ID NO: 1927692 - RNA, 19 nt, Artificial Sequence
  Description of Artificial Sequence: Synthetic oligonucleotide
uggagguaccagcuggcuu

SEQ ID NO: 1927693 - RNA, 19 nt, Artificial Sequence
  Description of Artificial Sequence: Synthetic oligonucleotide
ugaggaacccaggcuuacc

SEQ ID NO: 1927694 - RNA, 19 nt, Artificial Sequence
  Description of Artificial Sequence: Synthetic oligonucleotide
guugcggauaagcuugucu

SEQ ID NO: 1927695 - RNA, 19 nt, Artificial Sequence
  Description of Artificial Sequence: Synthetic oligonucleotide
gguggggcacuguauuucc

SEQ ID NO: 1927696 - RNA, 19 nt, Artificial Sequence
  Description of Artificial Sequence: Synthetic oligonucleotide
gacauccugguuacucaug

SEQ ID NO: 1927697 - RNA, 19 nt, Artificial Sequence
  Description of Artificial Sequence: Synthetic oligonucleotide
uuucgcugucugcccagcu

SEQ ID NO: 1927698 - RNA, 19 nt, Artificial Sequence
  Description of Artificial Sequence: Synthetic oligonucleotide
uuccccauuccuggagucc

SEQ ID NO: 1927699 - RNA, 19 nt, Artificial Sequence
  Description of Artificial Sequence: Synthetic oligonucleotide
acccagcacugacaaagcu

SEQ ID NO: 1927700 - RNA, 19 nt, Artificial Sequence
  Description of Artificial Sequence: Synthetic oligonucleotide
augugccccguauuuuaca

SEQ ID NO: 1927701 - RNA, 19 nt, Artificial Sequence
  Description of Artificial Sequence: Synthetic oligonucleotide
acacacacacacacacauc

SEQ ID NO: 1927702 - RNA, 19 nt, Artificial Sequence
  Description of Artificial Sequence: Synthetic oligonucleotide
cugguggccugccaaggug

SEQ ID NO: 1927703 - RNA, 19 nt, Artificial Sequence
  Description of Artificial Sequence: Synthetic oligonucleotide
acacacacacacacaucuc

SEQ ID NO: 1927704 - RNA, 19 nt, Artificial Sequence
  Description of Artificial Sequence: Synthetic oligonucleotide
ggcuauggccucugggcgg

SEQ ID NO: 1927705 - RNA, 19 nt, Artificial Sequence
  Description of Artificial Sequence: Synthetic oligonucleotide
caaccgguagucuugcucu

SEQ ID NO: 1927706 - RNA, 19 nt, Artificial Sequence
  Description of Artificial Sequence: Synthetic oligonucleotide
agugucugguucaucugca

SEQ ID NO: 1927707 - RNA, 19 nt, Artificial Sequence
  Description of Artificial Sequence: Synthetic oligonucleotide
cuugucuaguguguugaca

SEQ ID NO: 1927708 - RNA, 19 nt, Artificial Sequence
  Description of Artificial Sequence: Synthetic oligonucleotide
gggaucuuccucccacggg

SEQ ID NO: 1927709 - RNA, 19 nt, Artificial Sequence
  Description of Artificial Sequence: Synthetic oligonucleotide
caccaggucaaaggaugcg

SEQ ID NO: 1927710 - RNA, 19 nt, Artificial Sequence
  Description of Artificial Sequence: Synthetic oligonucleotide
aggugaacuuccguaggcu

SEQ ID NO: 1927711 - RNA, 19 nt, Artificial Sequence
  Description of Artificial Sequence: Synthetic oligonucleotide
uaccagcuggcuucagggu

SEQ ID NO: 1927712 - RNA, 19 nt, Artificial Sequence
  Description of Artificial Sequence: Synthetic oligonucleotide
gaugcgaacccagcacuga

SEQ ID NO: 1927713 - RNA, 19 nt, Artificial Sequence
  Description of Artificial Sequence: Synthetic oligonucleotide
acugugcgguccaggaggg

SEQ ID NO: 1927714 - RNA, 19 nt, Artificial Sequence
  Description of Artificial Sequence: Synthetic oligonucleotide
accgguagucuugcucuac

SEQ ID NO: 1927715 - RNA, 19 nt, Artificial Sequence
  Description of Artificial Sequence: Synthetic oligonucleotide
cacaucucuggcucuguga

SEQ ID NO: 1927716 - RNA, 19 nt, Artificial Sequence
  Description of Artificial Sequence: Synthetic oligonucleotide
ggcgaugaccuugaggcug

SEQ ID NO: 1927717 - RNA, 19 nt, Artificial Sequence
  Description of Artificial Sequence: Synthetic oligonucleotide
ccccguauuuuacacacac

SEQ ID NO: 1927718 - RNA, 19 nt, Artificial Sequence
  Description of Artificial Sequence: Synthetic oligonucleotide
cacacacacacacacacau

SEQ ID NO: 1927719 - RNA, 19 nt, Artificial Sequence
  Description of Artificial Sequence: Synthetic oligonucleotide
acccucagccccaacaagu

SEQ ID NO: 1927720 - RNA, 19 nt, Artificial Sequence
  Description of Artificial Sequence: Synthetic oligonucleotide
cacacacacacacaucucu

SEQ ID NO: 1927721 - RNA, 19 nt, Artificial Sequence
  Description of Artificial Sequence: Synthetic oligonucleotide
uuccguaggcuauggccuc

SEQ ID NO: 1927722 - RNA, 19 nt, Artificial Sequence
  Description of Artificial Sequence: Synthetic oligonucleotide
cugggacaugccagagggg

SEQ ID NO: 1927723 - RNA, 19 nt, Artificial Sequence
  Description of Artificial Sequence: Synthetic oligonucleotide
uaguauaauccgggacugu

SEQ ID NO: 1927724 - RNA, 19 nt, Artificial Sequence
  Description of Artificial Sequence: Synthetic oligonucleotide
guauuuccccauuccugga

SEQ ID NO: 1927725 - RNA, 19 nt, Artificial Sequence
  Description of Artificial Sequence: Synthetic oligonucleotide
gccaccaggucaaaggaug

SEQ ID NO: 1927726 - RNA, 19 nt, Artificial Sequence
  Description of Artificial Sequence: Synthetic oligonucleotide
ggauagggaucuuccuccc

SEQ ID NO: 1927727 - RNA, 19 nt, Artificial Sequence
  Description of Artificial Sequence: Synthetic oligonucleotide
cucuccguagcucaugacu

SEQ ID NO: 1927728 - RNA, 19 nt, Artificial Sequence
  Description of Artificial Sequence: Synthetic oligonucleotide
cagacaucacuggcagagg

SEQ ID NO: 1927729 - RNA, 19 nt, Artificial Sequence
  Description of Artificial Sequence: Synthetic oligonucleotide
ggcacuggcgaugaccuug

SEQ ID NO: 1927730 - RNA, 19 nt, Artificial Sequence
  Description of Artificial Sequence: Synthetic oligonucleotide
cagggccaagcuuguacac

SEQ ID NO: 1927731 - RNA, 19 nt, Artificial Sequence
  Description of Artificial Sequence: Synthetic oligonucleotide
cucugggcggguccagcgg

SEQ ID NO: 1927732 - RNA, 19 nt, Artificial Sequence
  Description of Artificial Sequence: Synthetic oligonucleotide
cuccguagcucaugacuuc

SEQ ID NO: 1927733 - RNA, 19 nt, Artificial Sequence
  Description of Artificial Sequence: Synthetic oligonucleotide
agcucuccuuauaccuccc

SEQ ID NO: 1927734 - RNA, 19 nt, Artificial Sequence
  Description of Artificial Sequence: Synthetic oligonucleotide
agucccugugcaaacugga

SEQ ID NO: 1927735 - RNA, 19 nt, Artificial Sequence
  Description of Artificial Sequence: Synthetic oligonucleotide
gcagaggugaacuuccgua

SEQ ID NO: 1927736 - RNA, 19 nt, Artificial Sequence
  Description of Artificial Sequence: Synthetic oligonucleotide
ugccuuuauuucgcugucu

SEQ ID NO: 1927737 - RNA, 19 nt, Artificial Sequence
  Description of Artificial Sequence: Synthetic oligonucleotide
acggcauugaugacauccu

SEQ ID NO: 1927738 - RNA, 19 nt, Artificial Sequence
  Description of Artificial Sequence: Synthetic oligonucleotide
ugucccaguagggucgcuc

SEQ ID NO: 1927739 - RNA, 19 nt, Artificial Sequence
  Description of Artificial Sequence: Synthetic oligonucleotide
cucuggcucugugagucag

SEQ ID NO: 1927740 - RNA, 19 nt, Artificial Sequence
  Description of Artificial Sequence: Synthetic oligonucleotide
cauccugguuacucauguc

SEQ ID NO: 1927741 - RNA, 19 nt, Artificial Sequence
  Description of Artificial Sequence: Synthetic oligonucleotide
gccaagcuuguacacacuc

SEQ ID NO: 1927742 - RNA, 19 nt, Artificial Sequence
  Description of Artificial Sequence: Synthetic oligonucleotide
gcaaccgguagucuugcuc

SEQ ID NO: 1927743 - RNA, 19 nt, Artificial Sequence
  Description of Artificial Sequence: Synthetic oligonucleotide
gccaaaucugaguugugaa

SEQ ID NO: 1927744 - RNA, 19 nt, Artificial Sequence
  Description of Artificial Sequence: Synthetic oligonucleotide
uggcgaugaccuugaggcu

SEQ ID NO: 1927745 - RNA, 19 nt, Artificial Sequence
  Description of Artificial Sequence: Synthetic oligonucleotide
cagaccugcacgggcagug

SEQ ID NO: 1927746 - RNA, 19 nt, Artificial Sequence
  Description of Artificial Sequence: Synthetic oligonucleotide
uggcaaccgguagucuugc

SEQ ID NO: 1927747 - RNA, 19 nt, Artificial Sequence
  Description of Artificial Sequence: Synthetic oligonucleotide
agggccaagcuuguacaca

SEQ ID NO: 1927748 - RNA, 19 nt, Artificial Sequence
  Description of Artificial Sequence: Synthetic oligonucleotide
aaccgguagucuugcucua

SEQ ID NO: 1927749 - RNA, 19 nt, Artificial Sequence
  Description of Artificial Sequence: Synthetic oligonucleotide
ggggagggaauacucccug

SEQ ID NO: 1927750 - RNA, 19 nt, Artificial Sequence
  Description of Artificial Sequence: Synthetic oligonucleotide
cuggcucugugagucaguc

SEQ ID NO: 1927751 - RNA, 19 nt, Artificial Sequence
  Description of Artificial Sequence: Synthetic oligonucleotide
acccuaccaggaccuccac

SEQ ID NO: 1927752 - RNA, 19 nt, Artificial Sequence
  Description of Artificial Sequence: Synthetic oligonucleotide
guugacaauuugggagaac

SEQ ID NO: 1927753 - RNA, 19 nt, Artificial Sequence
  Description of Artificial Sequence: Synthetic oligonucleotide
acacacacacacacacaca

SEQ ID NO: 1927754 - RNA, 19 nt, Artificial Sequence
  Description of Artificial Sequence: Synthetic oligonucleotide
ggaucuucuucugguggcc

SEQ ID NO: 1927755 - RNA, 19 nt, Artificial Sequence
  Description of Artificial Sequence: Synthetic oligonucleotide
ggugaacuuccguaggcua

SEQ ID NO: 1927756 - RNA, 19 nt, Artificial Sequence
  Description of Artificial Sequence: Synthetic oligonucleotide
cugaggaacccaggcuuac

SEQ ID NO: 1927757 - RNA, 19 nt, Artificial Sequence
  Description of Artificial Sequence: Synthetic oligonucleotide
ggucugagguuccgguccc

SEQ ID NO: 1927758 - RNA, 19 nt, Artificial Sequence
  Description of Artificial Sequence: Synthetic oligonucleotide
caugucccaguagggucgc

SEQ ID NO: 1927759 - RNA, 19 nt, Artificial Sequence
  Description of Artificial Sequence: Synthetic oligonucleotide
gucuugcucuacggcauug

SEQ ID NO: 1927760 - RNA, 19 nt, Artificial Sequence
  Description of Artificial Sequence: Synthetic oligonucleotide
agucuugcucuacggcauu

SEQ ID NO: 1927761 - RNA, 19 nt, Artificial Sequence
  Description of Artificial Sequence: Synthetic oligonucleotide
cagaccccugccagggcug

SEQ ID NO: 1927762 - RNA, 19 nt, Artificial Sequence
  Description of Artificial Sequence: Synthetic oligonucleotide
ccgguagucuugcucuacg

SEQ ID NO: 1927763 - RNA, 19 nt, Artificial Sequence
  Description of Artificial Sequence: Synthetic oligonucleotide
cguauuuuacacacacaca

SEQ ID NO: 1927764 - RNA, 19 nt, Artificial Sequence
  Description of Artificial Sequence: Synthetic oligonucleotide
caggaccuccacuauugaa

SEQ ID NO: 1927765 - RNA, 19 nt, Artificial Sequence
  Description of Artificial Sequence: Synthetic oligonucleotide
gcuauggccucugggcggg

SEQ ID NO: 1927766 - RNA, 19 nt, Artificial Sequence
  Description of Artificial Sequence: Synthetic oligonucleotide
gugcaaacuggagguacca

SEQ ID NO: 1927767 - RNA, 19 nt, Artificial Sequence
  Description of Artificial Sequence: Synthetic oligonucleotide
aggguggggcacuguauuu

SEQ ID NO: 1927768 - RNA, 19 nt, Artificial Sequence
  Description of Artificial Sequence: Synthetic oligonucleotide
cugacaaagcucuccuuau

SEQ ID NO: 1927769 - RNA, 19 nt, Artificial Sequence
  Description of Artificial Sequence: Synthetic oligonucleotide
gcucaugacuucccacaug

SEQ ID NO: 1927770 - RNA, 19 nt, Artificial Sequence
  Description of Artificial Sequence: Synthetic oligonucleotide
uuccggucccgcacccaac

SEQ ID NO: 1927771 - RNA, 19 nt, Artificial Sequence
  Description of Artificial Sequence: Synthetic oligonucleotide
gcgaugaccuugaggcugg

SEQ ID NO: 1927772 - RNA, 19 nt, Artificial Sequence
  Description of Artificial Sequence: Synthetic oligonucleotide
cuggcccacuacagggcac

SEQ ID NO: 1927773 - RNA, 19 nt, Artificial Sequence
  Description of Artificial Sequence: Synthetic oligonucleotide
cggauaagcuugucuagug

SEQ ID NO: 1927774 - RNA, 19 nt, Artificial Sequence
  Description of Artificial Sequence: Synthetic oligonucleotide
cacccgacccuaccaggac

SEQ ID NO: 1927775 - RNA, 19 nt, Artificial Sequence
  Description of Artificial Sequence: Synthetic oligonucleotide
gugccccguauuuuacaca

SEQ ID NO: 1927776 - RNA, 19 nt, Artificial Sequence
  Description of Artificial Sequence: Synthetic oligonucleotide
guuccggucccgcacccaa

SEQ ID NO: 1927777 - RNA, 19 nt, Artificial Sequence
  Description of Artificial Sequence: Synthetic oligonucleotide
accugcacgggcagugucu

SEQ ID NO: 1927778 - RNA, 19 nt, Artificial Sequence
  Description of Artificial Sequence: Synthetic oligonucleotide
cugcacgggcagugucugg

SEQ ID NO: 1927779 - RNA, 19 nt, Artificial Sequence
  Description of Artificial Sequence: Synthetic oligonucleotide
gagggaauacucccugcuu

SEQ ID NO: 1927780 - RNA, 19 nt, Artificial Sequence
  Description of Artificial Sequence: Synthetic oligonucleotide
cuaucuuauugccuuuauu

SEQ ID NO: 1927781 - RNA, 19 nt, Artificial Sequence
  Description of Artificial Sequence: Synthetic oligonucleotide
uccguaggcuauggccucu

SEQ ID NO: 1927782 - RNA, 19 nt, Artificial Sequence
  Description of Artificial Sequence: Synthetic oligonucleotide
ggcaagggcugcuccucag

SEQ ID NO: 1927783 - RNA, 19 nt, Artificial Sequence
  Description of Artificial Sequence: Synthetic oligonucleotide
gcggguccagcggauaggg

SEQ ID NO: 1927784 - RNA, 19 nt, Artificial Sequence
  Description of Artificial Sequence: Synthetic oligonucleotide
ggagggaauacucccugcu

SEQ ID NO: 1927785 - RNA, 19 nt, Artificial Sequence
  Description of Artificial Sequence: Synthetic oligonucleotide
cuggcagcguugcggauaa

SEQ ID NO: 1927786 - RNA, 19 nt, Artificial Sequence
  Description of Artificial Sequence: Synthetic oligonucleotide
gucagucucugggaggcaa

SEQ ID NO: 1927787 - RNA, 19 nt, Artificial Sequence
  Description of Artificial Sequence: Synthetic oligonucleotide
ccuuuuaugacagcaccaa

SEQ ID NO: 1927788 - RNA, 19 nt, Artificial Sequence
  Description of Artificial Sequence: Synthetic oligonucleotide
cuuggauacugcugaggau

SEQ ID NO: 1927789 - RNA, 19 nt, Artificial Sequence
  Description of Artificial Sequence: Synthetic oligonucleotide
gcuuguacacacucaugcu

SEQ ID NO: 1927790 - RNA, 19 nt, Artificial Sequence
  Description of Artificial Sequence: Synthetic oligonucleotide
ccucugggcggguccagcg

SEQ ID NO: 1927791 - RNA, 19 nt, Artificial Sequence
  Description of Artificial Sequence: Synthetic oligonucleotide
gcuugucuaguguguugac

SEQ ID NO: 1927792 - RNA, 19 nt, Artificial Sequence
  Description of Artificial Sequence: Synthetic oligonucleotide
ugcgguccaggaggggcug

SEQ ID NO: 1927793 - RNA, 19 nt, Artificial Sequence
  Description of Artificial Sequence: Synthetic oligonucleotide
guggggcacuguauuuccc

SEQ ID NO: 1927794 - RNA, 19 nt, Artificial Sequence
  Description of Artificial Sequence: Synthetic oligonucleotide
ggacccucagccccaacaa

SEQ ID NO: 1927795 - RNA, 19 nt, Artificial Sequence
  Description of Artificial Sequence: Synthetic oligonucleotide
ugauggcaucuagccaguc

SEQ ID NO: 1927796 - RNA, 19 nt, Artificial Sequence
  Description of Artificial Sequence: Synthetic oligonucleotide
ggguccagcggauagggau

SEQ ID NO: 1927797 - RNA, 19 nt, Artificial Sequence
  Description of Artificial Sequence: Synthetic oligonucleotide
gccugcccuuuuaugacag

SEQ ID NO: 1927798 - RNA, 19 nt, Artificial Sequence
  Description of Artificial Sequence: Synthetic oligonucleotide
gggcggguccagcggauag

SEQ ID NO: 1927799 - RNA, 19 nt, Artificial Sequence
  Description of Artificial Sequence: Synthetic oligonucleotide
gucugagguuccggucccg

SEQ ID NO: 1927800 - RNA, 19 nt, Artificial Sequence
  Description of Artificial Sequence: Synthetic oligonucleotide
gcaugucuuggauacugcu

SEQ ID NO: 1927801 - RNA, 19 nt, Artificial Sequence
  Description of Artificial Sequence: Synthetic oligonucleotide
acccaacaguccagcauga

SEQ ID NO: 1927802 - RNA, 19 nt, Artificial Sequence
  Description of Artificial Sequence: Synthetic oligonucleotide
ccgcaugucuuggauacug

SEQ ID NO: 1927803 - RNA, 19 nt, Artificial Sequence
  Description of Artificial Sequence: Synthetic oligonucleotide
uauggccucugggcggguc

SEQ ID NO: 1927804 - RNA, 19 nt, Artificial Sequence
  Description of Artificial Sequence: Synthetic oligonucleotide
cccacccgacccuaccagg

SEQ ID NO: 1927805 - RNA, 19 nt, Artificial Sequence
  Description of Artificial Sequence: Synthetic oligonucleotide
gguccagcggauagggauc

SEQ ID NO: 1927806 - RNA, 19 nt, Artificial Sequence
  Description of Artificial Sequence: Synthetic oligonucleotide
gugaacuuccguaggcuau

SEQ ID NO: 1927807 - RNA, 19 nt, Artificial Sequence
  Description of Artificial Sequence: Synthetic oligonucleotide
aucuagccagucacccacu

SEQ ID NO: 1927808 - RNA, 19 nt, Artificial Sequence
  Description of Artificial Sequence: Synthetic oligonucleotide
gucacccacuguggugaag

SEQ ID NO: 1927809 - RNA, 19 nt, Artificial Sequence
  Description of Artificial Sequence: Synthetic oligonucleotide
cccucagccccaacaaguc

SEQ ID NO: 1927810 - RNA, 19 nt, Artificial Sequence
  Description of Artificial Sequence: Synthetic oligonucleotide
gaguccccucauccacuuc

SEQ ID NO: 1927811 - RNA, 19 nt, Artificial Sequence
  Description of Artificial Sequence: Synthetic oligonucleotide
agaccugcacgggcagugu

SEQ ID NO: 1927812 - RNA, 19 nt, Artificial Sequence
  Description of Artificial Sequence: Synthetic oligonucleotide
ggcggguccagcggauagg

SEQ ID NO: 1927813 - RNA, 19 nt, Artificial Sequence
  Description of Artificial Sequence: Synthetic oligonucleotide
cuugcucuacggcauugau

SEQ ID NO: 1927814 - RNA, 19 nt, Artificial Sequence
  Description of Artificial Sequence: Synthetic oligonucleotide
ccuccacuauugaagcaca

SEQ ID NO: 1927815 - RNA, 19 nt, Artificial Sequence
  Description of Artificial Sequence: Synthetic oligonucleotide
cccacgggagcucguguag

SEQ ID NO: 1927816 - RNA, 19 nt, Artificial Sequence
  Description of Artificial Sequence: Synthetic oligonucleotide
gguggcaaccgguagucuu

SEQ ID NO: 1927817 - RNA, 19 nt, Artificial Sequence
  Description of Artificial Sequence: Synthetic oligonucleotide
cuagccagucacccacugu

SEQ ID NO: 1927818 - RNA, 19 nt, Artificial Sequence
  Description of Artificial Sequence: Synthetic oligonucleotide
gccugaggaacccaggcuu

SEQ ID NO: 1927819 - RNA, 19 nt, Artificial Sequence
  Description of Artificial Sequence: Synthetic oligonucleotide
ccaacaagucccugugcaa

SEQ ID NO: 1927820 - RNA, 19 nt, Artificial Sequence
  Description of Artificial Sequence: Synthetic oligonucleotide
ccagcggauagggaucuuc

SEQ ID NO: 1927821 - RNA, 19 nt, Artificial Sequence
  Description of Artificial Sequence: Synthetic oligonucleotide
ccugcccuuuuaugacagc

SEQ ID NO: 1927822 - RNA, 19 nt, Artificial Sequence
  Description of Artificial Sequence: Synthetic oligonucleotide
cccguauuuuacacacaca

SEQ ID NO: 1927823 - RNA, 19 nt, Artificial Sequence
  Description of Artificial Sequence: Synthetic oligonucleotide
cagcguugcggauaagcuu

SEQ ID NO: 1927824 - RNA, 19 nt, Artificial Sequence
  Description of Artificial Sequence: Synthetic oligonucleotide
cugugcgguccaggagggg

SEQ ID NO: 1927825 - RNA, 19 nt, Artificial Sequence
  Description of Artificial Sequence: Synthetic oligonucleotide
cuacggcauugaugacauc

SEQ ID NO: 1927826 - RNA, 19 nt, Artificial Sequence
  Description of Artificial Sequence: Synthetic oligonucleotide
cacuggcgaugaccuugag

SEQ ID NO: 1927827 - RNA, 19 nt, Artificial Sequence
  Description of Artificial Sequence: Synthetic oligonucleotide
gucccgcacccaacagucc

SEQ ID NO: 1927828 - RNA, 19 nt, Artificial Sequence
  Description of Artificial Sequence: Synthetic oligonucleotide
cagccgcaugucuuggaua

SEQ ID NO: 1927829 - RNA, 19 nt, Artificial Sequence
  Description of Artificial Sequence: Synthetic oligonucleotide
ccacgggagcucguguagg

SEQ ID NO: 1927830 - RNA, 19 nt, Artificial Sequence
  Description of Artificial Sequence: Synthetic oligonucleotide
gcagcguugcggauaagcu

SEQ ID NO: 1927831 - RNA, 19 nt, Artificial Sequence
  Description of Artificial Sequence: Synthetic oligonucleotide
cacgggagcucguguaggu

SEQ ID NO: 1927832 - RNA, 19 nt, Artificial Sequence
  Description of Artificial Sequence: Synthetic oligonucleotide
accuugaggcuggcagcgu

SEQ ID NO: 1927833 - RNA, 19 nt, Artificial Sequence
  Description of Artificial Sequence: Synthetic oligonucleotide
caucucuggcucugugagu

SEQ ID NO: 1927834 - RNA, 19 nt, Artificial Sequence
  Description of Artificial Sequence: Synthetic oligonucleotide
cccugcuuaccuggugggg

SEQ ID NO: 1927835 - RNA, 19 nt, Artificial Sequence
  Description of Artificial Sequence: Synthetic oligonucleotide
caggguggggcacuguauu

SEQ ID NO: 1927836 - RNA, 19 nt, Artificial Sequence
  Description of Artificial Sequence: Synthetic oligonucleotide
ccccacccgacccuaccag

SEQ ID NO: 1927837 - RNA, 19 nt, Artificial Sequence
  Description of Artificial Sequence: Synthetic oligonucleotide
gcacccaacaguccagcau

SEQ ID NO: 1927838 - RNA, 19 nt, Artificial Sequence
  Description of Artificial Sequence: Synthetic oligonucleotide
ccacccgacccuaccagga

SEQ ID NO: 1927839 - RNA, 19 nt, Artificial Sequence
  Description of Artificial Sequence: Synthetic oligonucleotide
gcggauaagcuugucuagu

SEQ ID NO: 1927840 - RNA, 19 nt, Artificial Sequence
  Description of Artificial Sequence: Synthetic oligonucleotide
cacuguggugaagguagua

SEQ ID NO: 1927841 - RNA, 19 nt, Artificial Sequence
  Description of Artificial Sequence: Synthetic oligonucleotide
gggcugggacaugccagag

SEQ ID NO: 1927842 - RNA, 19 nt, Artificial Sequence
  Description of Artificial Sequence: Synthetic oligonucleotide
gcucuacggcauugaugac

SEQ ID NO: 1927843 - RNA, 19 nt, Artificial Sequence
  Description of Artificial Sequence: Synthetic oligonucleotide
cguaggcuauggccucugg

SEQ ID NO: 1927844 - RNA, 19 nt, Artificial Sequence
  Description of Artificial Sequence: Synthetic oligonucleotide
ggcacuguauuuccccauu

SEQ ID NO: 1927845 - RNA, 19 nt, Artificial Sequence
  Description of Artificial Sequence: Synthetic oligonucleotide
ugggcggguccagcggaua

SEQ ID NO: 1927846 - RNA, 19 nt, Artificial Sequence
  Description of Artificial Sequence: Synthetic oligonucleotide
cuaccaggaccuccacuau

SEQ ID NO: 1927847 - RNA, 19 nt, Artificial Sequence
  Description of Artificial Sequence: Synthetic oligonucleotide
cccgauccuuagcagaucu

SEQ ID NO: 1927848 - RNA, 19 nt, Artificial Sequence
  Description of Artificial Sequence: Synthetic oligonucleotide
gcacuggcgaugaccuuga

SEQ ID NO: 1927849 - RNA, 19 nt, Artificial Sequence
  Description of Artificial Sequence: Synthetic oligonucleotide
ggccugccaaggugacccc

SEQ ID NO: 1927850 - RNA, 19 nt, Artificial Sequence
  Description of Artificial Sequence: Synthetic oligonucleotide
ggcaggacccucagcccca

SEQ ID NO: 1927851 - RNA, 19 nt, Artificial Sequence
  Description of Artificial Sequence: Synthetic oligonucleotide
cuggagguaccagcuggcu

SEQ ID NO: 1927852 - RNA, 19 nt, Artificial Sequence
  Description of Artificial Sequence: Synthetic oligonucleotide
ccgcacccaacaguccagc

SEQ ID NO: 1927853 - RNA, 19 nt, Artificial Sequence
  Description of Artificial Sequence: Synthetic oligonucleotide
gggucgcucuccguagcuc

SEQ ID NO: 1927854 - RNA, 19 nt, Artificial Sequence
  Description of Artificial Sequence: Synthetic oligonucleotide
ggcccacuacagggcacag

SEQ ID NO: 1927855 - RNA, 19 nt, Artificial Sequence
  Description of Artificial Sequence: Synthetic oligonucleotide
ccuuauaccuccccaucuu

SEQ ID NO: 1927856 - RNA, 19 nt, Artificial Sequence
  Description of Artificial Sequence: Synthetic oligonucleotide
ccggucccgcacccaacag

SEQ ID NO: 1927857 - RNA, 19 nt, Artificial Sequence
  Description of Artificial Sequence: Synthetic oligonucleotide
ccaagcaugugccccguau

SEQ ID NO: 1927858 - RNA, 19 nt, Artificial Sequence
  Description of Artificial Sequence: Synthetic oligonucleotide
augucccaguagggucgcu

SEQ ID NO: 1927859 - RNA, 19 nt, Artificial Sequence
  Description of Artificial Sequence: Synthetic oligonucleotide
ccucccacgggagcucgug

SEQ ID NO: 1927860 - RNA, 19 nt, Artificial Sequence
  Description of Artificial Sequence: Synthetic oligonucleotide
ggaguccccucauccacuu

SEQ ID NO: 1927861 - RNA, 19 nt, Artificial Sequence
  Description of Artificial Sequence: Synthetic oligonucleotide
cucccacgggagcucgugu

SEQ ID NO: 1927862 - RNA, 19 nt, Artificial Sequence
  Description of Artificial Sequence: Synthetic oligonucleotide
cgcucuccguagcucauga

SEQ ID NO: 1927863 - RNA, 19 nt, Artificial Sequence
  Description of Artificial Sequence: Synthetic oligonucleotide
cccgacccuaccaggaccu

SEQ ID NO: 1927864 - RNA, 19 nt, Artificial Sequence
  Description of Artificial Sequence: Synthetic oligonucleotide
gguuccggucccgcaccca

SEQ ID NO: 1927865 - RNA, 19 nt, Artificial Sequence
  Description of Artificial Sequence: Synthetic oligonucleotide
ccguaggcuauggccucug

SEQ ID NO: 1927866 - RNA, 19 nt, Artificial Sequence
  Description of Artificial Sequence: Synthetic oligonucleotide
gccccguauuuuacacaca

SEQ ID NO: 1927867 - RNA, 19 nt, Artificial Sequence
  Description of Artificial Sequence: Synthetic oligonucleotide
ggcacagggccaagcuugu

SEQ ID NO: 1927868 - RNA, 19 nt, Artificial Sequence
  Description of Artificial Sequence: Synthetic oligonucleotide
ggcaaccgguagucuugcu

SEQ ID NO: 1927869 - RNA, 19 nt, Artificial Sequence
  Description of Artificial Sequence: Synthetic oligonucleotide
cgcacccaacaguccagca

SEQ ID NO: 1927870 - RNA, 19 nt, Artificial Sequence
  Description of Artificial Sequence: Synthetic oligonucleotide
ccuccccaucuugauggca

SEQ ID NO: 1927871 - RNA, 19 nt, Artificial Sequence
  Description of Artificial Sequence: Synthetic oligonucleotide
cugggcggguccagcggau

SEQ ID NO: 1927872 - RNA, 19 nt, Artificial Sequence
  Description of Artificial Sequence: Synthetic oligonucleotide
ccccgauccuuagcagauc

SEQ ID NO: 1927873 - RNA, 19 nt, Artificial Sequence
  Description of Artificial Sequence: Synthetic oligonucleotide
ggccaagcuuguacacacu

SEQ ID NO: 1927874 - RNA, 19 nt, Artificial Sequence
  Description of Artificial Sequence: Synthetic oligonucleotide
cccuaccaggaccuccacu

SEQ ID NO: 1927875 - RNA, 19 nt, Artificial Sequence
  Description of Artificial Sequence: Synthetic oligonucleotide
cguugcggauaagcuuguc

SEQ ID NO: 1927876 - RNA, 19 nt, Artificial Sequence
  Description of Artificial Sequence: Synthetic oligonucleotide
gccaagcaugugccccgua

SEQ ID NO: 1927877 - RNA, 19 nt, Artificial Sequence
  Description of Artificial Sequence: Synthetic oligonucleotide
gcagaccugcacgggcagu

SEQ ID NO: 1927878 - RNA, 19 nt, Artificial Sequence
  Description of Artificial Sequence: Synthetic oligonucleotide
gcguugcggauaagcuugu

SEQ ID NO: 1927879 - RNA, 19 nt, Artificial Sequence
  Description of Artificial Sequence: Synthetic oligonucleotide
gcaggacccucagccccaa

SEQ ID NO: 1927880 - RNA, 19 nt, Artificial Sequence
  Description of Artificial Sequence: Synthetic oligonucleotide
ccgacccuaccaggaccuc

SEQ ID NO: 1927881 - RNA, 19 nt, Artificial Sequence
  Description of Artificial Sequence: Synthetic oligonucleotide
gcacagggccaagcuugua

SEQ ID NO: 1927882 - RNA, 19 nt, Artificial Sequence
  Description of Artificial Sequence: Synthetic oligonucleotide
gccgcaugucuuggauacu

SEQ ID NO: 1927883 - RNA, 19 nt, Artificial Sequence
  Description of Artificial Sequence: Synthetic oligonucleotide
ccgauccuuagcagaucuu

SEQ ID NO: 1927884 - RNA, 19 nt, Artificial Sequence
  Description of Artificial Sequence: Synthetic oligonucleotide
cggguccagcggauaggga

SEQ ID NO: 1927885 - RNA, 19 nt, Artificial Sequence
  Description of Artificial Sequence: Synthetic oligonucleotide
cuauggccucugggcgggu

SEQ ID NO: 1927886 - RNA, 19 nt, Artificial Sequence
  Description of Artificial Sequence: Synthetic oligonucleotide
agucaauaaaaucaauugc

SEQ ID NO: 1927887 - RNA, 19 nt, Artificial Sequence
  Description of Artificial Sequence: Synthetic oligonucleotide
aaggauuucaacugggcca

SEQ ID NO: 1927888 - RNA, 19 nt, Artificial Sequence
  Description of Artificial Sequence: Synthetic oligonucleotide
agguacgccaugcagaugg

SEQ ID NO: 1927889 - RNA, 19 nt, Artificial Sequence
  Description of Artificial Sequence: Synthetic oligonucleotide
ggauauugcgaguagaagg

SEQ ID NO: 1927890 - RNA, 19 nt, Artificial Sequence
  Description of Artificial Sequence: Synthetic oligonucleotide
cagucaauaaaaucaauug

SEQ ID NO: 1927891 - RNA, 19 nt, Artificial Sequence
  Description of Artificial Sequence: Synthetic oligonucleotide
aaggaaguagacccgcggg

SEQ ID NO: 1927892 - RNA, 19 nt, Artificial Sequence
  Description of Artificial Sequence: Synthetic oligonucleotide
auaaagccaaaguugggag

SEQ ID NO: 1927893 - RNA, 19 nt, Artificial Sequence
  Description of Artificial Sequence: Synthetic oligonucleotide
uacgccaugcagauggugg

SEQ ID NO: 1927894 - RNA, 19 nt, Artificial Sequence
  Description of Artificial Sequence: Synthetic oligonucleotide
gacgcagucaauaaaauca

SEQ ID NO: 1927895 - RNA, 19 nt, Artificial Sequence
  Description of Artificial Sequence: Synthetic oligonucleotide
guagugaacgugcaguagg

SEQ ID NO: 1927896 - RNA, 19 nt, Artificial Sequence
  Description of Artificial Sequence: Synthetic oligonucleotide
augguaggcacuuccaagg

SEQ ID NO: 1927897 - RNA, 19 nt, Artificial Sequence
  Description of Artificial Sequence: Synthetic oligonucleotide
ccuuuaaggaaguagaccc

SEQ ID NO: 1927898 - RNA, 19 nt, Artificial Sequence
  Description of Artificial Sequence: Synthetic oligonucleotide
gaaggauuucaacugggcc

SEQ ID NO: 1927899 - RNA, 19 nt, Artificial Sequence
  Description of Artificial Sequence: Synthetic oligonucleotide
uaaggaaguagacccgcgg

SEQ ID NO: 1927900 - RNA, 19 nt, Artificial Sequence
  Description of Artificial Sequence: Synthetic oligonucleotide
agaaacauucagcagggcu

SEQ ID NO: 1927901 - RNA, 19 nt, Artificial Sequence
  Description of Artificial Sequence: Synthetic oligonucleotide
agcacugagguagugaacg

SEQ ID NO: 1927902 - RNA, 19 nt, Artificial Sequence
  Description of Artificial Sequence: Synthetic oligonucleotide
agcgaagugagcacgacgc

SEQ ID NO: 1927903 - RNA, 19 nt, Artificial Sequence
  Description of Artificial Sequence: Synthetic oligonucleotide
uggacuaggaccuugccuc

SEQ ID NO: 1927904 - RNA, 19 nt, Artificial Sequence
  Description of Artificial Sequence: Synthetic oligonucleotide
ugaacgugcaguagggagc

SEQ ID NO: 1927905 - RNA, 19 nt, Artificial Sequence
  Description of Artificial Sequence: Synthetic oligonucleotide
gcgagaaacauucagcagg

SEQ ID NO: 1927906 - RNA, 19 nt, Artificial Sequence
  Description of Artificial Sequence: Synthetic oligonucleotide
cuaagaaccggcuuuccac

SEQ ID NO: 1927907 - RNA, 19 nt, Artificial Sequence
  Description of Artificial Sequence: Synthetic oligonucleotide
gcuaaugucagcugugugg

SEQ ID NO: 1927908 - RNA, 19 nt, Artificial Sequence
  Description of Artificial Sequence: Synthetic oligonucleotide
aggaaguagacccgcgggc

SEQ ID NO: 1927909 - RNA, 19 nt, Artificial Sequence
  Description of Artificial Sequence: Synthetic oligonucleotide
uagugaacgugcaguaggg

SEQ ID NO: 1927910 - RNA, 19 nt, Artificial Sequence
  Description of Artificial Sequence: Synthetic oligonucleotide
ucguaagcuggucugcagg

SEQ ID NO: 1927911 - RNA, 19 nt, Artificial Sequence
  Description of Artificial Sequence: Synthetic oligonucleotide
accgaguugagguugacgu

SEQ ID NO: 1927912 - RNA, 19 nt, Artificial Sequence
  Description of Artificial Sequence: Synthetic oligonucleotide
ugucccauaaagccaaagu

SEQ ID NO: 1927913 - RNA, 19 nt, Artificial Sequence
  Description of Artificial Sequence: Synthetic oligonucleotide
uauugcgaguagaaggucu

SEQ ID NO: 1927914 - RNA, 19 nt, Artificial Sequence
  Description of Artificial Sequence: Synthetic oligonucleotide
uugacguugagcgagccgc

SEQ ID NO: 1927915 - RNA, 19 nt, Artificial Sequence
  Description of Artificial Sequence: Synthetic oligonucleotide
uuuaaggaaguagacccgc

SEQ ID NO: 1927916 - RNA, 19 nt, Artificial Sequence
  Description of Artificial Sequence: Synthetic oligonucleotide
gcaggugacacuaagaacc

SEQ ID NO: 1927917 - RNA, 19 nt, Artificial Sequence
  Description of Artificial Sequence: Synthetic oligonucleotide
cuaaugucagcuguguggc

SEQ ID NO: 1927918 - RNA, 19 nt, Artificial Sequence
  Description of Artificial Sequence: Synthetic oligonucleotide
auuuugcgcagcuggcgcc

SEQ ID NO: 1927919 - RNA, 19 nt, Artificial Sequence
  Description of Artificial Sequence: Synthetic oligonucleotide
ugugaugugcagguuggcg

SEQ ID NO: 1927920 - RNA, 19 nt, Artificial Sequence
  Description of Artificial Sequence: Synthetic oligonucleotide
uugacguagucgaaggccu

SEQ ID NO: 1927921 - RNA, 19 nt, Artificial Sequence
  Description of Artificial Sequence: Synthetic oligonucleotide
gaagugagcacgacgcgcg

SEQ ID NO: 1927922 - RNA, 19 nt, Artificial Sequence
  Description of Artificial Sequence: Synthetic oligonucleotide
gugaacgugcaguagggag

SEQ ID NO: 1927923 - RNA, 19 nt, Artificial Sequence
  Description of Artificial Sequence: Synthetic oligonucleotide
uugcggagcauuuugcgca

SEQ ID NO: 1927924 - RNA, 19 nt, Artificial Sequence
  Description of Artificial Sequence: Synthetic oligonucleotide
uccggcgagaaacauucag

SEQ ID NO: 1927925 - RNA, 19 nt, Artificial Sequence
  Description of Artificial Sequence: Synthetic oligonucleotide
uggugggugaccucgagac

SEQ ID NO: 1927926 - RNA, 19 nt, Artificial Sequence
  Description of Artificial Sequence: Synthetic oligonucleotide
aggauuucaacugggccac

SEQ ID NO: 1927927 - RNA, 19 nt, Artificial Sequence
  Description of Artificial Sequence: Synthetic oligonucleotide
aggaacucgcacuuggaug

SEQ ID NO: 1927928 - RNA, 19 nt, Artificial Sequence
  Description of Artificial Sequence: Synthetic oligonucleotide
uuucaacugggccacccug

SEQ ID NO: 1927929 - RNA, 19 nt, Artificial Sequence
  Description of Artificial Sequence: Synthetic oligonucleotide
ucuccuguggaacaggcuu

SEQ ID NO: 1927930 - RNA, 19 nt, Artificial Sequence
  Description of Artificial Sequence: Synthetic oligonucleotide
ggaacucgcacuuggaugc

SEQ ID NO: 1927931 - RNA, 19 nt, Artificial Sequence
  Description of Artificial Sequence: Synthetic oligonucleotide
aauggucuguaaacguggg

SEQ ID NO: 1927932 - RNA, 19 nt, Artificial Sequence
  Description of Artificial Sequence: Synthetic oligonucleotide
guaaacguggggcuggcug

SEQ ID NO: 1927933 - RNA, 19 nt, Artificial Sequence
  Description of Artificial Sequence: Synthetic oligonucleotide
uaaacguggggcuggcugc

SEQ ID NO: 1927934 - RNA, 19 nt, Artificial Sequence
  Description of Artificial Sequence: Synthetic oligonucleotide
uaaagccaaaguugggaga

SEQ ID NO: 1927935 - RNA, 19 nt, Artificial Sequence
  Description of Artificial Sequence: Synthetic oligonucleotide
ggagagaucacgcuccucc

SEQ ID NO: 1927936 - RNA, 19 nt, Artificial Sequence
  Description of Artificial Sequence: Synthetic oligonucleotide
cucagacucauacugaaga

SEQ ID NO: 1927937 - RNA, 19 nt, Artificial Sequence
  Description of Artificial Sequence: Synthetic oligonucleotide
agugggagcuaaugucagc

SEQ ID NO: 1927938 - RNA, 19 nt, Artificial Sequence
  Description of Artificial Sequence: Synthetic oligonucleotide
cuugcggagcauuuugcgc

SEQ ID NO: 1927939 - RNA, 19 nt, Artificial Sequence
  Description of Artificial Sequence: Synthetic oligonucleotide
aguggacuaggaccuugcc

SEQ ID NO: 1927940 - RNA, 19 nt, Artificial Sequence
  Description of Artificial Sequence: Synthetic oligonucleotide
cauacugaagaagcugucc

SEQ ID NO: 1927941 - RNA, 19 nt, Artificial Sequence
  Description of Artificial Sequence: Synthetic oligonucleotide
ccacuuguaguguaggugg

SEQ ID NO: 1927942 - RNA, 19 nt, Artificial Sequence
  Description of Artificial Sequence: Synthetic oligonucleotide
aagugagcacgacgcgcgc

SEQ ID NO: 1927943 - RNA, 19 nt, Artificial Sequence
  Description of Artificial Sequence: Synthetic oligonucleotide
gaaguagacccgcgggccg

SEQ ID NO: 1927944 - RNA, 19 nt, Artificial Sequence
  Description of Artificial Sequence: Synthetic oligonucleotide
cagcacucaggauauugcg

SEQ ID NO: 1927945 - RNA, 19 nt, Artificial Sequence
  Description of Artificial Sequence: Synthetic oligonucleotide
cauuuugcgcagcuggcgc

SEQ ID NO: 1927946 - RNA, 19 nt, Artificial Sequence
  Description of Artificial Sequence: Synthetic oligonucleotide
gaacucugcgacugugggg

SEQ ID NO: 1927947 - RNA, 19 nt, Artificial Sequence
  Description of Artificial Sequence: Synthetic oligonucleotide
ugcgugucagggcucagug

SEQ ID NO: 1927948 - RNA, 19 nt, Artificial Sequence
  Description of Artificial Sequence: Synthetic oligonucleotide
ucagacucauacugaagaa

SEQ ID NO: 1927949 - RNA, 19 nt, Artificial Sequence
  Description of Artificial Sequence: Synthetic oligonucleotide
ugacgcagucaauaaaauc

SEQ ID NO: 1927950 - RNA, 19 nt, Artificial Sequence
  Description of Artificial Sequence: Synthetic oligonucleotide
uuggcgaggaacucgcacu

SEQ ID NO: 1927951 - RNA, 19 nt, Artificial Sequence
  Description of Artificial Sequence: Synthetic oligonucleotide
ggaagguaggaucucagac

SEQ ID NO: 1927952 - RNA, 19 nt, Artificial Sequence
  Description of Artificial Sequence: Synthetic oligonucleotide
caggugacacuaagaaccg

SEQ ID NO: 1927953 - RNA, 19 nt, Artificial Sequence
  Description of Artificial Sequence: Synthetic oligonucleotide
gauccacuuguaguguagg

SEQ ID NO: 1927954 - RNA, 19 nt, Artificial Sequence
  Description of Artificial Sequence: Synthetic oligonucleotide
gaaccggcuuuccacacug

SEQ ID NO: 1927955 - RNA, 19 nt, Artificial Sequence
  Description of Artificial Sequence: Synthetic oligonucleotide
accucgagaccccagccuc

SEQ ID NO: 1927956 - RNA, 19 nt, Artificial Sequence
  Description of Artificial Sequence: Synthetic oligonucleotide
aagccucagagguccggcg

SEQ ID NO: 1927957 - RNA, 19 nt, Artificial Sequence
  Description of Artificial Sequence: Synthetic oligonucleotide
gauauugcgaguagaaggu

SEQ ID NO: 1927958 - RNA, 19 nt, Artificial Sequence
  Description of Artificial Sequence: Synthetic oligonucleotide
ugagguacgccaugcagau

SEQ ID NO: 1927959 - RNA, 19 nt, Artificial Sequence
  Description of Artificial Sequence: Synthetic oligonucleotide
cauaaagccaaaguuggga

SEQ ID NO: 1927960 - RNA, 19 nt, Artificial Sequence
  Description of Artificial Sequence: Synthetic oligonucleotide
agagaucacgcuccuccuc

SEQ ID NO: 1927961 - RNA, 19 nt, Artificial Sequence
  Description of Artificial Sequence: Synthetic oligonucleotide
guugggagagaucacgcuc

SEQ ID NO: 1927962 - RNA, 19 nt, Artificial Sequence
  Description of Artificial Sequence: Synthetic oligonucleotide
ucuugaaagugggagcuaa

SEQ ID NO: 1927963 - RNA, 19 nt, Artificial Sequence
  Description of Artificial Sequence: Synthetic oligonucleotide
agucgagcaccacgcagcg

SEQ ID NO: 1927964 - RNA, 19 nt, Artificial Sequence
  Description of Artificial Sequence: Synthetic oligonucleotide
ucaggauauugcgaguaga

SEQ ID NO: 1927965 - RNA, 19 nt, Artificial Sequence
  Description of Artificial Sequence: Synthetic oligonucleotide
cagacucauacugaagaag

SEQ ID NO: 1927966 - RNA, 19 nt, Artificial Sequence
  Description of Artificial Sequence: Synthetic oligonucleotide
aggauauugcgaguagaag

SEQ ID NO: 1927967 - RNA, 19 nt, Artificial Sequence
  Description of Artificial Sequence: Synthetic oligonucleotide
gauuucaacugggccaccc

SEQ ID NO: 1927968 - RNA, 19 nt, Artificial Sequence
  Description of Artificial Sequence: Synthetic oligonucleotide
cucgcacuuggaugcaugg

SEQ ID NO: 1927969 - RNA, 19 nt, Artificial Sequence
  Description of Artificial Sequence: Synthetic oligonucleotide
gcacucaggauauugcgag

SEQ ID NO: 1927970 - RNA, 19 nt, Artificial Sequence
  Description of Artificial Sequence: Synthetic oligonucleotide
acggggauccacuuguagu

SEQ ID NO: 1927971 - RNA, 19 nt, Artificial Sequence
  Description of Artificial Sequence: Synthetic oligonucleotide
gaacgugcaguagggagcc

SEQ ID NO: 1927972 - RNA, 19 nt, Artificial Sequence
  Description of Artificial Sequence: Synthetic oligonucleotide
aucucagacucauacugaa

SEQ ID NO: 1927973 - RNA, 19 nt, Artificial Sequence
  Description of Artificial Sequence: Synthetic oligonucleotide
auugcgaguagaaggucuc

SEQ ID NO: 1927974 - RNA, 19 nt, Artificial Sequence
  Description of Artificial Sequence: Synthetic oligonucleotide
uuccaagguagaggaaggg

SEQ ID NO: 1927975 - RNA, 19 nt, Artificial Sequence
  Description of Artificial Sequence: Synthetic oligonucleotide
uccaagguagaggaaggga

SEQ ID NO: 1927976 - RNA, 19 nt, Artificial Sequence
  Description of Artificial Sequence: Synthetic oligonucleotide
ugacguugagcgagccgcg

SEQ ID NO: 1927977 - RNA, 19 nt, Artificial Sequence
  Description of Artificial Sequence: Synthetic oligonucleotide
cagagguccggcgagaaac

SEQ ID NO: 1927978 - RNA, 19 nt, Artificial Sequence
  Description of Artificial Sequence: Synthetic oligonucleotide
cacccuggucguaagcugg

SEQ ID NO: 1927979 - RNA, 19 nt, Artificial Sequence
  Description of Artificial Sequence: Synthetic oligonucleotide
cuuguaguguaggugggug

SEQ ID NO: 1927980 - RNA, 19 nt, Artificial Sequence
  Description of Artificial Sequence: Synthetic oligonucleotide
acacuaagaaccggcuuuc

SEQ ID NO: 1927981 - RNA, 19 nt, Artificial Sequence
  Description of Artificial Sequence: Synthetic oligonucleotide
guugacguugagcgagccg

SEQ ID NO: 1927982 - RNA, 19 nt, Artificial Sequence
  Description of Artificial Sequence: Synthetic oligonucleotide
guaaauggucuguaaacgu

SEQ ID NO: 1927983 - RNA, 19 nt, Artificial Sequence
  Description of Artificial Sequence: Synthetic oligonucleotide
aagugggagcuaaugucag

SEQ ID NO: 1927984 - RNA, 19 nt, Artificial Sequence
  Description of Artificial Sequence: Synthetic oligonucleotide
ugaccucgagaccccagcc

SEQ ID NO: 1927985 - RNA, 19 nt, Artificial Sequence
  Description of Artificial Sequence: Synthetic oligonucleotide
gcucagugucuguaaaugg

SEQ ID NO: 1927986 - RNA, 19 nt, Artificial Sequence
  Description of Artificial Sequence: Synthetic oligonucleotide
cuggucguaagcuggucug

SEQ ID NO: 1927987 - RNA, 19 nt, Artificial Sequence
  Description of Artificial Sequence: Synthetic oligonucleotide
aggcggaacugcuuggucu

SEQ ID NO: 1927988 - RNA, 19 nt, Artificial Sequence
  Description of Artificial Sequence: Synthetic oligonucleotide
agguuggcgaggaacucgc

SEQ ID NO: 1927989 - RNA, 19 nt, Artificial Sequence
  Description of Artificial Sequence: Synthetic oligonucleotide
cacuuggaugcaugguagg

SEQ ID NO: 1927990 - RNA, 19 nt, Artificial Sequence
  Description of Artificial Sequence: Synthetic oligonucleotide
auauugcgaguagaagguc

SEQ ID NO: 1927991 - RNA, 19 nt, Artificial Sequence
  Description of Artificial Sequence: Synthetic oligonucleotide
aaguagacccgcgggccgg

SEQ ID NO: 1927992 - RNA, 19 nt, Artificial Sequence
  Description of Artificial Sequence: Synthetic oligonucleotide
ggugacacuaagaaccggc

SEQ ID NO: 1927993 - RNA, 19 nt, Artificial Sequence
  Description of Artificial Sequence: Synthetic oligonucleotide
agccgcgcacgcucgacgc

SEQ ID NO: 1927994 - RNA, 19 nt, Artificial Sequence
  Description of Artificial Sequence: Synthetic oligonucleotide
agcuaaugucagcugugug

SEQ ID NO: 1927995 - RNA, 19 nt, Artificial Sequence
  Description of Artificial Sequence: Synthetic oligonucleotide
ugguaggcacuuccaaggu

SEQ ID NO: 1927996 - RNA, 19 nt, Artificial Sequence
  Description of Artificial Sequence: Synthetic oligonucleotide
cucaggauauugcgaguag

SEQ ID NO: 1927997 - RNA, 19 nt, Artificial Sequence
  Description of Artificial Sequence: Synthetic oligonucleotide
gacacuaagaaccggcuuu

SEQ ID NO: 1927998 - RNA, 19 nt, Artificial Sequence
  Description of Artificial Sequence: Synthetic oligonucleotide
gugagcacgacgcgcgcgg

SEQ ID NO: 1927999 - RNA, 19 nt, Artificial Sequence
  Description of Artificial Sequence: Synthetic oligonucleotide
ugcaguagggagccugcgu

SEQ ID NO: 1928000 - RNA, 19 nt, Artificial Sequence
  Description of Artificial Sequence: Synthetic oligonucleotide
ugacacuaagaaccggcuu

SEQ ID NO: 1928001 - RNA, 19 nt, Artificial Sequence
  Description of Artificial Sequence: Synthetic oligonucleotide
ucaacugggccacccuggu

SEQ ID NO: 1928002 - RNA, 19 nt, Artificial Sequence
  Description of Artificial Sequence: Synthetic oligonucleotide
cucauacugaagaagcugu

SEQ ID NO: 1928003 - RNA, 19 nt, Artificial Sequence
  Description of Artificial Sequence: Synthetic oligonucleotide
gauggugggugaccucgag

SEQ ID NO: 1928004 - RNA, 19 nt, Artificial Sequence
  Description of Artificial Sequence: Synthetic oligonucleotide
cagcgaagugagcacgacg

SEQ ID NO: 1928005 - RNA, 19 nt, Artificial Sequence
  Description of Artificial Sequence: Synthetic oligonucleotide
guuggcgaggaacucgcac

SEQ ID NO: 1928006 - RNA, 19 nt, Artificial Sequence
  Description of Artificial Sequence: Synthetic oligonucleotide
uggucugcaggugacacua

SEQ ID NO: 1928007 - RNA, 19 nt, Artificial Sequence
  Description of Artificial Sequence: Synthetic oligonucleotide
ugaggaugccucucucacu

SEQ ID NO: 1928008 - RNA, 19 nt, Artificial Sequence
  Description of Artificial Sequence: Synthetic oligonucleotide
ugcggagcauuuugcgcag

SEQ ID NO: 1928009 - RNA, 19 nt, Artificial Sequence
  Description of Artificial Sequence: Synthetic oligonucleotide
auccacuuguaguguaggu

SEQ ID NO: 1928010 - RNA, 19 nt, Artificial Sequence
  Description of Artificial Sequence: Synthetic oligonucleotide
caggauauugcgaguagaa

SEQ ID NO: 1928011 - RNA, 19 nt, Artificial Sequence
  Description of Artificial Sequence: Synthetic oligonucleotide
gcugcccugguccagcacg

SEQ ID NO: 1928012 - RNA, 19 nt, Artificial Sequence
  Description of Artificial Sequence: Synthetic oligonucleotide
cuccuugcggagcauuuug

SEQ ID NO: 1928013 - RNA, 19 nt, Artificial Sequence
  Description of Artificial Sequence: Synthetic oligonucleotide
caguggacuaggaccuugc

SEQ ID NO: 1928014 - RNA, 19 nt, Artificial Sequence
  Description of Artificial Sequence: Synthetic oligonucleotide
cagguuggcgaggaacucg

SEQ ID NO: 1928015 - RNA, 19 nt, Artificial Sequence
  Description of Artificial Sequence: Synthetic oligonucleotide
uucccugacgcagucaaua

SEQ ID NO: 1928016 - RNA, 19 nt, Artificial Sequence
  Description of Artificial Sequence: Synthetic oligonucleotide
gugaccucgagaccccagc

SEQ ID NO: 1928017 - RNA, 19 nt, Artificial Sequence
  Description of Artificial Sequence: Synthetic oligonucleotide
gcacuuccaagguagagga

SEQ ID NO: 1928018 - RNA, 19 nt, Artificial Sequence
  Description of Artificial Sequence: Synthetic oligonucleotide
uugagcgagccgcgcacgc

SEQ ID NO: 1928019 - RNA, 19 nt, Artificial Sequence
  Description of Artificial Sequence: Synthetic oligonucleotide
uuuugcgcagcuggcgccc

SEQ ID NO: 1928020 - RNA, 19 nt, Artificial Sequence
  Description of Artificial Sequence: Synthetic oligonucleotide
gcaguagggagccugcgug

SEQ ID NO: 1928021 - RNA, 19 nt, Artificial Sequence
  Description of Artificial Sequence: Synthetic oligonucleotide
uagggagccugcgugucag

SEQ ID NO: 1928022 - RNA, 19 nt, Artificial Sequence
  Description of Artificial Sequence: Synthetic oligonucleotide
gucguaagcuggucugcag

SEQ ID NO: 1928023 - RNA, 19 nt, Artificial Sequence
  Description of Artificial Sequence: Synthetic oligonucleotide
ucggccuccuugcggagca

SEQ ID NO: 1928024 - RNA, 19 nt, Artificial Sequence
  Description of Artificial Sequence: Synthetic oligonucleotide
acguagcgcgccgacaccg

SEQ ID NO: 1928025 - RNA, 19 nt, Artificial Sequence
  Description of Artificial Sequence: Synthetic oligonucleotide
gcgaggaacucgcacuugg

SEQ ID NO: 1928026 - RNA, 19 nt, Artificial Sequence
  Description of Artificial Sequence: Synthetic oligonucleotide
ggcgagaaacauucagcag

SEQ ID NO: 1928027 - RNA, 19 nt, Artificial Sequence
  Description of Artificial Sequence: Synthetic oligonucleotide
ucgagcgacgugaccuuca

SEQ ID NO: 1928028 - RNA, 19 nt, Artificial Sequence
  Description of Artificial Sequence: Synthetic oligonucleotide
agguagugaacgugcagua

SEQ ID NO: 1928029 - RNA, 19 nt, Artificial Sequence
  Description of Artificial Sequence: Synthetic oligonucleotide
gagaucacgcuccuccucu

SEQ ID NO: 1928030 - RNA, 19 nt, Artificial Sequence
  Description of Artificial Sequence: Synthetic oligonucleotide
cuaggaccuugccuccucc

SEQ ID NO: 1928031 - RNA, 19 nt, Artificial Sequence
  Description of Artificial Sequence: Synthetic oligonucleotide
aggacguggcuguggccac

SEQ ID NO: 1928032 - RNA, 19 nt, Artificial Sequence
  Description of Artificial Sequence: Synthetic oligonucleotide
agaaccggcuuuccacacu

SEQ ID NO: 1928033 - RNA, 19 nt, Artificial Sequence
  Description of Artificial Sequence: Synthetic oligonucleotide
agugagcacgacgcgcgcg

SEQ ID NO: 1928034 - RNA, 19 nt, Artificial Sequence
  Description of Artificial Sequence: Synthetic oligonucleotide
cucgacgcggcgaaggcca

SEQ ID NO: 1928035 - RNA, 19 nt, Artificial Sequence
  Description of Artificial Sequence: Synthetic oligonucleotide
ugucuguaaauggucugua

SEQ ID NO: 1928036 - RNA, 19 nt, Artificial Sequence
  Description of Artificial Sequence: Synthetic oligonucleotide
ccauaaagccaaaguuggg

SEQ ID NO: 1928037 - RNA, 19 nt, Artificial Sequence
  Description of Artificial Sequence: Synthetic oligonucleotide
ucccugacgcagucaauaa

SEQ ID NO: 1928038 - RNA, 19 nt, Artificial Sequence
  Description of Artificial Sequence: Synthetic oligonucleotide
ggguguggaagguaggauc

SEQ ID NO: 1928039 - RNA, 19 nt, Artificial Sequence
  Description of Artificial Sequence: Synthetic oligonucleotide
uaggcacuuccaagguaga

SEQ ID NO: 1928040 - RNA, 19 nt, Artificial Sequence
  Description of Artificial Sequence: Synthetic oligonucleotide
gguccggcgagaaacauuc

SEQ ID NO: 1928041 - RNA, 19 nt, Artificial Sequence
  Description of Artificial Sequence: Synthetic oligonucleotide
ggaaguagacccgcgggcc

SEQ ID NO: 1928042 - RNA, 19 nt, Artificial Sequence
  Description of Artificial Sequence: Synthetic oligonucleotide
uaaugucagcuguguggcu

SEQ ID NO: 1928043 - RNA, 19 nt, Artificial Sequence
  Description of Artificial Sequence: Synthetic oligonucleotide
cacggggauccacuuguag

SEQ ID NO: 1928044 - RNA, 19 nt, Artificial Sequence
  Description of Artificial Sequence: Synthetic oligonucleotide
cuguggaacaggcuucaca

SEQ ID NO: 1928045 - RNA, 19 nt, Artificial Sequence
  Description of Artificial Sequence: Synthetic oligonucleotide
cagcagcgaagugagcacg

SEQ ID NO: 1928046 - RNA, 19 nt, Artificial Sequence
  Description of Artificial Sequence: Synthetic oligonucleotide
cacugagguagugaacgug

SEQ ID NO: 1928047 - RNA, 19 nt, Artificial Sequence
  Description of Artificial Sequence: Synthetic oligonucleotide
ccggcgagaaacauucagc

SEQ ID NO: 1928048 - RNA, 19 nt, Artificial Sequence
  Description of Artificial Sequence: Synthetic oligonucleotide
uggucguaagcuggucugc

SEQ ID NO: 1928049 - RNA, 19 nt, Artificial Sequence
  Description of Artificial Sequence: Synthetic oligonucleotide
guagcgcgccgacaccgcg

SEQ ID NO: 1928050 - RNA, 19 nt, Artificial Sequence
  Description of Artificial Sequence: Synthetic oligonucleotide
uggaugcaugguaggcacu

SEQ ID NO: 1928051 - RNA, 19 nt, Artificial Sequence
  Description of Artificial Sequence: Synthetic oligonucleotide
agguugacguugagcgagc

SEQ ID NO: 1928052 - RNA, 19 nt, Artificial Sequence
  Description of Artificial Sequence: Synthetic oligonucleotide
acaguggacuaggaccuug

SEQ ID NO: 1928053 - RNA, 19 nt, Artificial Sequence
  Description of Artificial Sequence: Synthetic oligonucleotide
gguagugaacgugcaguag

SEQ ID NO: 1928054 - RNA, 19 nt, Artificial Sequence
  Description of Artificial Sequence: Synthetic oligonucleotide
gcauuuugcgcagcuggcg

SEQ ID NO: 1928055 - RNA, 19 nt, Artificial Sequence
  Description of Artificial Sequence: Synthetic oligonucleotide
ugcgaguagaaggucucau

SEQ ID NO: 1928056 - RNA, 19 nt, Artificial Sequence
  Description of Artificial Sequence: Synthetic oligonucleotide
acuuguaguguaggugggu

SEQ ID NO: 1928057 - RNA, 19 nt, Artificial Sequence
  Description of Artificial Sequence: Synthetic oligonucleotide
uggcgaggaacucgcacuu

SEQ ID NO: 1928058 - RNA, 19 nt, Artificial Sequence
  Description of Artificial Sequence: Synthetic oligonucleotide
ucagagguccggcgagaaa

SEQ ID NO: 1928059 - RNA, 19 nt, Artificial Sequence
  Description of Artificial Sequence: Synthetic oligonucleotide
ucaggcggaacugcuuggu

SEQ ID NO: 1928060 - RNA, 19 nt, Artificial Sequence
  Description of Artificial Sequence: Synthetic oligonucleotide
uaggaccuugccuccuccu

SEQ ID NO: 1928061 - RNA, 19 nt, Artificial Sequence
  Description of Artificial Sequence: Synthetic oligonucleotide
aggcacuuccaagguagag

SEQ ID NO: 1928062 - RNA, 19 nt, Artificial Sequence
  Description of Artificial Sequence: Synthetic oligonucleotide
caugcagauggugggugac

SEQ ID NO: 1928063 - RNA, 19 nt, Artificial Sequence
  Description of Artificial Sequence: Synthetic oligonucleotide
ccugacgcagucaauaaaa

SEQ ID NO: 1928064 - RNA, 19 nt, Artificial Sequence
  Description of Artificial Sequence: Synthetic oligonucleotide
acgugcaguagggagccug

SEQ ID NO: 1928065 - RNA, 19 nt, Artificial Sequence
  Description of Artificial Sequence: Synthetic oligonucleotide
acgcagucaauaaaaucaa

SEQ ID NO: 1928066 - RNA, 19 nt, Artificial Sequence
  Description of Artificial Sequence: Synthetic oligonucleotide
agugaacgugcaguaggga

SEQ ID NO: 1928067 - RNA, 19 nt, Artificial Sequence
  Description of Artificial Sequence: Synthetic oligonucleotide
gagccugcgugucagggcu

SEQ ID NO: 1928068 - RNA, 19 nt, Artificial Sequence
  Description of Artificial Sequence: Synthetic oligonucleotide
guaagcuggucugcaggug

SEQ ID NO: 1928069 - RNA, 19 nt, Artificial Sequence
  Description of Artificial Sequence: Synthetic oligonucleotide
acguugagcgagccgcgca

SEQ ID NO: 1928070 - RNA, 19 nt, Artificial Sequence
  Description of Artificial Sequence: Synthetic oligonucleotide
aguagacccgcgggccggc

SEQ ID NO: 1928071 - RNA, 19 nt, Artificial Sequence
  Description of Artificial Sequence: Synthetic oligonucleotide
ggagcuaaugucagcugug

SEQ ID NO: 1928072 - RNA, 19 nt, Artificial Sequence
  Description of Artificial Sequence: Synthetic oligonucleotide
gacaccgcgccgccccggg

SEQ ID NO: 1928073 - RNA, 19 nt, Artificial Sequence
  Description of Artificial Sequence: Synthetic oligonucleotide
uugcgaguagaaggucuca

SEQ ID NO: 1928074 - RNA, 19 nt, Artificial Sequence
  Description of Artificial Sequence: Synthetic oligonucleotide
caggacguggcuguggcca

SEQ ID NO: 1928075 - RNA, 19 nt, Artificial Sequence
  Description of Artificial Sequence: Synthetic oligonucleotide
acucugcgacuguggggcg

SEQ ID NO: 1928076 - RNA, 19 nt, Artificial Sequence
  Description of Artificial Sequence: Synthetic oligonucleotide
agcacgaccacggccgcca

SEQ ID NO: 1928077 - RNA, 19 nt, Artificial Sequence
  Description of Artificial Sequence: Synthetic oligonucleotide
acgcucgacgcggcgaagg

SEQ ID NO: 1928078 - RNA, 19 nt, Artificial Sequence
  Description of Artificial Sequence: Synthetic oligonucleotide
cacuaagaaccggcuuucc

SEQ ID NO: 1928079 - RNA, 19 nt, Artificial Sequence
  Description of Artificial Sequence: Synthetic oligonucleotide
guggacuaggaccuugccu

SEQ ID NO: 1928080 - RNA, 19 nt, Artificial Sequence
  Description of Artificial Sequence: Synthetic oligonucleotide
gagcgagccgcgcacgcuc

SEQ ID NO: 1928081 - RNA, 19 nt, Artificial Sequence
  Description of Artificial Sequence: Synthetic oligonucleotide
ggauccacuuguaguguag

SEQ ID NO: 1928082 - RNA, 19 nt, Artificial Sequence
  Description of Artificial Sequence: Synthetic oligonucleotide
uggguguggaagguaggau

SEQ ID NO: 1928083 - RNA, 19 nt, Artificial Sequence
  Description of Artificial Sequence: Synthetic oligonucleotide
cagcacugagguagugaac

SEQ ID NO: 1928084 - RNA, 19 nt, Artificial Sequence
  Description of Artificial Sequence: Synthetic oligonucleotide
gacguggcuguggccacag

SEQ ID NO: 1928085 - RNA, 19 nt, Artificial Sequence
  Description of Artificial Sequence: Synthetic oligonucleotide
cacaagccucagagguccg

SEQ ID NO: 1928086 - RNA, 19 nt, Artificial Sequence
  Description of Artificial Sequence: Synthetic oligonucleotide
gcuugacguagucgaaggc

SEQ ID NO: 1928087 - RNA, 19 nt, Artificial Sequence
  Description of Artificial Sequence: Synthetic oligonucleotide
gacguugagcgagccgcgc

SEQ ID NO: 1928088 - RNA, 19 nt, Artificial Sequence
  Description of Artificial Sequence: Synthetic oligonucleotide
gcacguagcgcgccgacac

SEQ ID NO: 1928089 - RNA, 19 nt, Artificial Sequence
  Description of Artificial Sequence: Synthetic oligonucleotide
gcgaagugagcacgacgcg

SEQ ID NO: 1928090 - RNA, 19 nt, Artificial Sequence
  Description of Artificial Sequence: Synthetic oligonucleotide
ucgcacuuggaugcauggu

SEQ ID NO: 1928091 - RNA, 19 nt, Artificial Sequence
  Description of Artificial Sequence: Synthetic oligonucleotide
caccaccgaguugagguug

SEQ ID NO: 1928092 - RNA, 19 nt, Artificial Sequence
  Description of Artificial Sequence: Synthetic oligonucleotide
gaugcaugguaggcacuuc

SEQ ID NO: 1928093 - RNA, 19 nt, Artificial Sequence
  Description of Artificial Sequence: Synthetic oligonucleotide
acucgcacuuggaugcaug

SEQ ID NO: 1928094 - RNA, 19 nt, Artificial Sequence
  Description of Artificial Sequence: Synthetic oligonucleotide
ccggcagucgagcaccacg

SEQ ID NO: 1928095 - RNA, 19 nt, Artificial Sequence
  Description of Artificial Sequence: Synthetic oligonucleotide
gagagaucacgcuccuccu

SEQ ID NO: 1928096 - RNA, 19 nt, Artificial Sequence
  Description of Artificial Sequence: Synthetic oligonucleotide
ggacuaggaccuugccucc

SEQ ID NO: 1928097 - RNA, 19 nt, Artificial Sequence
  Description of Artificial Sequence: Synthetic oligonucleotide
uguaaacguggggcuggcu

SEQ ID NO: 1928098 - RNA, 19 nt, Artificial Sequence
  Description of Artificial Sequence: Synthetic oligonucleotide
uagggccggcagucgagca

SEQ ID NO: 1928099 - RNA, 19 nt, Artificial Sequence
  Description of Artificial Sequence: Synthetic oligonucleotide
ccccuuuaaggaaguagac

SEQ ID NO: 1928100 - RNA, 19 nt, Artificial Sequence
  Description of Artificial Sequence: Synthetic oligonucleotide
uucuugaaagugggagcua

SEQ ID NO: 1928101 - RNA, 19 nt, Artificial Sequence
  Description of Artificial Sequence: Synthetic oligonucleotide
cggggauccacuuguagug

SEQ ID NO: 1928102 - RNA, 19 nt, Artificial Sequence
  Description of Artificial Sequence: Synthetic oligonucleotide
ggagccugcgugucagggc

SEQ ID NO: 1928103 - RNA, 19 nt, Artificial Sequence
  Description of Artificial Sequence: Synthetic oligonucleotide
aacucgcacuuggaugcau

SEQ ID NO: 1928104 - RNA, 19 nt, Artificial Sequence
  Description of Artificial Sequence: Synthetic oligonucleotide
cuguaaacguggggcuggc

SEQ ID NO: 1928105 - RNA, 19 nt, Artificial Sequence
  Description of Artificial Sequence: Synthetic oligonucleotide
cucugcgacuguggggcgg

SEQ ID NO: 1928106 - RNA, 19 nt, Artificial Sequence
  Description of Artificial Sequence: Synthetic oligonucleotide
ugggccacccuggucguaa

SEQ ID NO: 1928107 - RNA, 19 nt, Artificial Sequence
  Description of Artificial Sequence: Synthetic oligonucleotide
cacguagcgcgccgacacc

SEQ ID NO: 1928108 - RNA, 19 nt, Artificial Sequence
  Description of Artificial Sequence: Synthetic oligonucleotide
ggaccuugccuccuccuuc

SEQ ID NO: 1928109 - RNA, 19 nt, Artificial Sequence
  Description of Artificial Sequence: Synthetic oligonucleotide
agggagccugcgugucagg

SEQ ID NO: 1928110 - RNA, 19 nt, Artificial Sequence
  Description of Artificial Sequence: Synthetic oligonucleotide
agagguccggcgagaaaca

SEQ ID NO: 1928111 - RNA, 19 nt, Artificial Sequence
  Description of Artificial Sequence: Synthetic oligonucleotide
guacgccaugcagauggug

SEQ ID NO: 1928112 - RNA, 19 nt, Artificial Sequence
  Description of Artificial Sequence: Synthetic oligonucleotide
caccacgcagcgcgccucg

SEQ ID NO: 1928113 - RNA, 19 nt, Artificial Sequence
  Description of Artificial Sequence: Synthetic oligonucleotide
gagcuaaugucagcugugu

SEQ ID NO: 1928114 - RNA, 19 nt, Artificial Sequence
  Description of Artificial Sequence: Synthetic oligonucleotide
agcagcgaagugagcacga

SEQ ID NO: 1928115 - RNA, 19 nt, Artificial Sequence
  Description of Artificial Sequence: Synthetic oligonucleotide
ugagcgagccgcgcacgcu

SEQ ID NO: 1928116 - RNA, 19 nt, Artificial Sequence
  Description of Artificial Sequence: Synthetic oligonucleotide
gaccucgagaccccagccu

SEQ ID NO: 1928117 - RNA, 19 nt, Artificial Sequence
  Description of Artificial Sequence: Synthetic oligonucleotide
ugcgacuguggggcgggug

SEQ ID NO: 1928118 - RNA, 19 nt, Artificial Sequence
  Description of Artificial Sequence: Synthetic oligonucleotide
caggcggaacugcuugguc

SEQ ID NO: 1928119 - RNA, 19 nt, Artificial Sequence
  Description of Artificial Sequence: Synthetic oligonucleotide
ggucuguaaacguggggcu

SEQ ID NO: 1928120 - RNA, 19 nt, Artificial Sequence
  Description of Artificial Sequence: Synthetic oligonucleotide
cucgagaccccagccucac

SEQ ID NO: 1928121 - RNA, 19 nt, Artificial Sequence
  Description of Artificial Sequence: Synthetic oligonucleotide
ggcuucacauccacacagc

SEQ ID NO: 1928122 - RNA, 19 nt, Artificial Sequence
  Description of Artificial Sequence: Synthetic oligonucleotide
gcagcuggcgcccgucgag

SEQ ID NO: 1928123 - RNA, 19 nt, Artificial Sequence
  Description of Artificial Sequence: Synthetic oligonucleotide
cagguagggccggcagucg

SEQ ID NO: 1928124 - RNA, 19 nt, Artificial Sequence
  Description of Artificial Sequence: Synthetic oligonucleotide
guaguguagguggguggca

SEQ ID NO: 1928125 - RNA, 19 nt, Artificial Sequence
  Description of Artificial Sequence: Synthetic oligonucleotide
gugacacuaagaaccggcu

SEQ ID NO: 1928126 - RNA, 19 nt, Artificial Sequence
  Description of Artificial Sequence: Synthetic oligonucleotide
cgaagugagcacgacgcgc

SEQ ID NO: 1928127 - RNA, 19 nt, Artificial Sequence
  Description of Artificial Sequence: Synthetic oligonucleotide
cugacgcagucaauaaaau

SEQ ID NO: 1928128 - RNA, 19 nt, Artificial Sequence
  Description of Artificial Sequence: Synthetic oligonucleotide
ucgcgcagcuucugccagu

SEQ ID NO: 1928129 - RNA, 19 nt, Artificial Sequence
  Description of Artificial Sequence: Synthetic oligonucleotide
gcaugguaggcacuuccaa

SEQ ID NO: 1928130 - RNA, 19 nt, Artificial Sequence
  Description of Artificial Sequence: Synthetic oligonucleotide
cggcgagaaacauucagca

SEQ ID NO: 1928131 - RNA, 19 nt, Artificial Sequence
  Description of Artificial Sequence: Synthetic oligonucleotide
agcgagccgcgcacgcucg

SEQ ID NO: 1928132 - RNA, 19 nt, Artificial Sequence
  Description of Artificial Sequence: Synthetic oligonucleotide
agggcuccuguggaacucu

SEQ ID NO: 1928133 - RNA, 19 nt, Artificial Sequence
  Description of Artificial Sequence: Synthetic oligonucleotide
gagcaccacgcagcgcgcc

SEQ ID NO: 1928134 - RNA, 19 nt, Artificial Sequence
  Description of Artificial Sequence: Synthetic oligonucleotide
agcacguagcgcgccgaca

SEQ ID NO: 1928135 - RNA, 19 nt, Artificial Sequence
  Description of Artificial Sequence: Synthetic oligonucleotide
gguaggcacuuccaaggua

SEQ ID NO: 1928136 - RNA, 19 nt, Artificial Sequence
  Description of Artificial Sequence: Synthetic oligonucleotide
gguaggaucucagacucau

SEQ ID NO: 1928137 - RNA, 19 nt, Artificial Sequence
  Description of Artificial Sequence: Synthetic oligonucleotide
acguggcuguggccacagg

SEQ ID NO: 1928138 - RNA, 19 nt, Artificial Sequence
  Description of Artificial Sequence: Synthetic oligonucleotide
cgcggcgaaggccagguag

SEQ ID NO: 1928139 - RNA, 19 nt, Artificial Sequence
  Description of Artificial Sequence: Synthetic oligonucleotide
gaacucgcacuuggaugca

SEQ ID NO: 1928140 - RNA, 19 nt, Artificial Sequence
  Description of Artificial Sequence: Synthetic oligonucleotide
gguugacguugagcgagcc

SEQ ID NO: 1928141 - RNA, 19 nt, Artificial Sequence
  Description of Artificial Sequence: Synthetic oligonucleotide
gcuuuccacacuggcugag

SEQ ID NO: 1928142 - RNA, 19 nt, Artificial Sequence
  Description of Artificial Sequence: Synthetic oligonucleotide
cggcagucgagcaccacgc

SEQ ID NO: 1928143 - RNA, 19 nt, Artificial Sequence
  Description of Artificial Sequence: Synthetic oligonucleotide
gcccugguccagcacgacc

SEQ ID NO: 1928144 - RNA, 19 nt, Artificial Sequence
  Description of Artificial Sequence: Synthetic oligonucleotide
cagcuggcgcccgucgagc

SEQ ID NO: 1928145 - RNA, 19 nt, Artificial Sequence
  Description of Artificial Sequence: Synthetic oligonucleotide
ccacccuggucguaagcug

SEQ ID NO: 1928146 - RNA, 19 nt, Artificial Sequence
  Description of Artificial Sequence: Synthetic oligonucleotide
cagcacguagcgcgccgac

SEQ ID NO: 1928147 - RNA, 19 nt, Artificial Sequence
  Description of Artificial Sequence: Synthetic oligonucleotide
uggcgcccgucgagcgacg

SEQ ID NO: 1928148 - RNA, 19 nt, Artificial Sequence
  Description of Artificial Sequence: Synthetic oligonucleotide
agguaggaucucagacuca

SEQ ID NO: 1928149 - RNA, 19 nt, Artificial Sequence
  Description of Artificial Sequence: Synthetic oligonucleotide
guguggaagguaggaucuc

SEQ ID NO: 1928150 - RNA, 19 nt, Artificial Sequence
  Description of Artificial Sequence: Synthetic oligonucleotide
ggucguaagcuggucugca

SEQ ID NO: 1928151 - RNA, 19 nt, Artificial Sequence
  Description of Artificial Sequence: Synthetic oligonucleotide
gcgaguagaaggucucaua

SEQ ID NO: 1928152 - RNA, 19 nt, Artificial Sequence
  Description of Artificial Sequence: Synthetic oligonucleotide
aacgugcaguagggagccu

SEQ ID NO: 1928153 - RNA, 19 nt, Artificial Sequence
  Description of Artificial Sequence: Synthetic oligonucleotide
acgcuccuccucugcuuga

SEQ ID NO: 1928154 - RNA, 19 nt, Artificial Sequence
  Description of Artificial Sequence: Synthetic oligonucleotide
acgcgcgcggcgcucuccu

SEQ ID NO: 1928155 - RNA, 19 nt, Artificial Sequence
  Description of Artificial Sequence: Synthetic oligonucleotide
guagacccgcgggccggcg

SEQ ID NO: 1928156 - RNA, 19 nt, Artificial Sequence
  Description of Artificial Sequence: Synthetic oligonucleotide
gacgcggcgaaggccaggu

SEQ ID NO: 1928157 - RNA, 19 nt, Artificial Sequence
  Description of Artificial Sequence: Synthetic oligonucleotide
gggauccacuuguagugua

SEQ ID NO: 1928158 - RNA, 19 nt, Artificial Sequence
  Description of Artificial Sequence: Synthetic oligonucleotide
cgccucgucgggcagcacg

SEQ ID NO: 1928159 - RNA, 19 nt, Artificial Sequence
  Description of Artificial Sequence: Synthetic oligonucleotide
gcgcgcgccgccucgucgg

SEQ ID NO: 1928160 - RNA, 19 nt, Artificial Sequence
  Description of Artificial Sequence: Synthetic oligonucleotide
cacucaggauauugcgagu

SEQ ID NO: 1928161 - RNA, 19 nt, Artificial Sequence
  Description of Artificial Sequence: Synthetic oligonucleotide
acccuggucguaagcuggu

SEQ ID NO: 1928162 - RNA, 19 nt, Artificial Sequence
  Description of Artificial Sequence: Synthetic oligonucleotide
agguccggcgagaaacauu

SEQ ID NO: 1928163 - RNA, 19 nt, Artificial Sequence
  Description of Artificial Sequence: Synthetic oligonucleotide
ggccacccuggucguaagc

SEQ ID NO: 1928164 - RNA, 19 nt, Artificial Sequence
  Description of Artificial Sequence: Synthetic oligonucleotide
ggggcgggugggcacuggc

SEQ ID NO: 1928165 - RNA, 19 nt, Artificial Sequence
  Description of Artificial Sequence: Synthetic oligonucleotide
guaggaucucagacucaua

SEQ ID NO: 1928166 - RNA, 19 nt, Artificial Sequence
  Description of Artificial Sequence: Synthetic oligonucleotide
gcucgacgcggcgaaggcc

SEQ ID NO: 1928167 - RNA, 19 nt, Artificial Sequence
  Description of Artificial Sequence: Synthetic oligonucleotide
cagcacgaccacggccgcc

SEQ ID NO: 1928168 - RNA, 19 nt, Artificial Sequence
  Description of Artificial Sequence: Synthetic oligonucleotide
ggcgaggaacucgcacuug

SEQ ID NO: 1928169 - RNA, 19 nt, Artificial Sequence
  Description of Artificial Sequence: Synthetic oligonucleotide
ggauuucaacugggccacc

SEQ ID NO: 1928170 - RNA, 19 nt, Artificial Sequence
  Description of Artificial Sequence: Synthetic oligonucleotide
gcagcgaagugagcacgac

SEQ ID NO: 1928171 - RNA, 19 nt, Artificial Sequence
  Description of Artificial Sequence: Synthetic oligonucleotide
gggccacccuggucguaag

SEQ ID NO: 1928172 - RNA, 19 nt, Artificial Sequence
  Description of Artificial Sequence: Synthetic oligonucleotide
cacgcucgacgcggcgaag

SEQ ID NO: 1928173 - RNA, 19 nt, Artificial Sequence
  Description of Artificial Sequence: Synthetic oligonucleotide
acgacgcgcgcggcgcucu

SEQ ID NO: 1928174 - RNA, 19 nt, Artificial Sequence
  Description of Artificial Sequence: Synthetic oligonucleotide
ccgcgcacgcucgacgcgg

SEQ ID NO: 1928175 - RNA, 19 nt, Artificial Sequence
  Description of Artificial Sequence: Synthetic oligonucleotide
ccuggucguaagcuggucu

SEQ ID NO: 1928176 - RNA, 19 nt, Artificial Sequence
  Description of Artificial Sequence: Synthetic oligonucleotide
gcacugagguagugaacgu

SEQ ID NO: 1928177 - RNA, 19 nt, Artificial Sequence
  Description of Artificial Sequence: Synthetic oligonucleotide
ccagcacgaccacggccgc

SEQ ID NO: 1928178 - RNA, 19 nt, Artificial Sequence
  Description of Artificial Sequence: Synthetic oligonucleotide
cguagcgcgccgacaccgc

SEQ ID NO: 1928179 - RNA, 19 nt, Artificial Sequence
  Description of Artificial Sequence: Synthetic oligonucleotide
cccugacgcagucaauaaa

SEQ ID NO: 1928180 - RNA, 19 nt, Artificial Sequence
  Description of Artificial Sequence: Synthetic oligonucleotide
gcgccucggccuccuugcg

SEQ ID NO: 1928181 - RNA, 19 nt, Artificial Sequence
  Description of Artificial Sequence: Synthetic oligonucleotide
gcacgcucgacgcggcgaa

SEQ ID NO: 1928182 - RNA, 19 nt, Artificial Sequence
  Description of Artificial Sequence: Synthetic oligonucleotide
cccgucgagcgacgugacc

SEQ ID NO: 1928183 - RNA, 19 nt, Artificial Sequence
  Description of Artificial Sequence: Synthetic oligonucleotide
gcgcacgcucgacgcggcg

SEQ ID NO: 1928184 - RNA, 19 nt, Artificial Sequence
  Description of Artificial Sequence: Synthetic oligonucleotide
ccucgagaccccagccuca

SEQ ID NO: 1928185 - RNA, 19 nt, Artificial Sequence
  Description of Artificial Sequence: Synthetic oligonucleotide
cugccuccccuuggcagga

SEQ ID NO: 1928186 - RNA, 19 nt, Artificial Sequence
  Description of Artificial Sequence: Synthetic oligonucleotide
cgcucgacgcggcgaaggc

SEQ ID NO: 1928187 - RNA, 19 nt, Artificial Sequence
  Description of Artificial Sequence: Synthetic oligonucleotide
ccgucgagcgacgugaccu

SEQ ID NO: 1928188 - RNA, 19 nt, Artificial Sequence
  Description of Artificial Sequence: Synthetic oligonucleotide
guccggcgagaaacauuca

SEQ ID NO: 1928189 - RNA, 19 nt, Artificial Sequence
  Description of Artificial Sequence: Synthetic oligonucleotide
cacgacgcgcgcggcgcuc

SEQ ID NO: 1928190 - RNA, 19 nt, Artificial Sequence
  Description of Artificial Sequence: Synthetic oligonucleotide
gggagagaucacgcuccuc

SEQ ID NO: 1928191 - RNA, 19 nt, Artificial Sequence
  Description of Artificial Sequence: Synthetic oligonucleotide
cgccucggccuccuugcgg

SEQ ID NO: 1928192 - RNA, 19 nt, Artificial Sequence
  Description of Artificial Sequence: Synthetic oligonucleotide
cgagcaccacgcagcgcgc

SEQ ID NO: 1928193 - RNA, 19 nt, Artificial Sequence
  Description of Artificial Sequence: Synthetic oligonucleotide
gguuggcgaggaacucgca

SEQ ID NO: 1928194 - RNA, 19 nt, Artificial Sequence
  Description of Artificial Sequence: Synthetic oligonucleotide
gcagcacguagcgcgccga

SEQ ID NO: 1928195 - RNA, 19 nt, Artificial Sequence
  Description of Artificial Sequence: Synthetic oligonucleotide
gccugcgugucagggcuca

SEQ ID NO: 1928196 - RNA, 19 nt, Artificial Sequence
  Description of Artificial Sequence: Synthetic oligonucleotide
cugcgugucagggcucagu

SEQ ID NO: 1928197 - RNA, 19 nt, Artificial Sequence
  Description of Artificial Sequence: Synthetic oligonucleotide
gcgugucagggcucagugu

SEQ ID NO: 1928198 - RNA, 19 nt, Artificial Sequence
  Description of Artificial Sequence: Synthetic oligonucleotide
gcgcccgucgagcgacgug

SEQ ID NO: 1928199 - RNA, 19 nt, Artificial Sequence
  Description of Artificial Sequence: Synthetic oligonucleotide
acgcggcgaaggccaggua

SEQ ID NO: 1928200 - RNA, 19 nt, Artificial Sequence
  Description of Artificial Sequence: Synthetic oligonucleotide
ccgacaccgcgccgccccg

SEQ ID NO: 1928201 - RNA, 19 nt, Artificial Sequence
  Description of Artificial Sequence: Synthetic oligonucleotide
gcgccgacaccgcgccgcc

SEQ ID NO: 1928202 - RNA, 19 nt, Artificial Sequence
  Description of Artificial Sequence: Synthetic oligonucleotide
ggacguggcuguggccaca

SEQ ID NO: 1928203 - RNA, 19 nt, Artificial Sequence
  Description of Artificial Sequence: Synthetic oligonucleotide
gcaccacgcagcgcgccuc

SEQ ID NO: 1928204 - RNA, 19 nt, Artificial Sequence
  Description of Artificial Sequence: Synthetic oligonucleotide
ccacagggcuccuguggaa

SEQ ID NO: 1928205 - RNA, 19 nt, Artificial Sequence
  Description of Artificial Sequence: Synthetic oligonucleotide
cgcccgucgagcgacguga

SEQ ID NO: 1928206 - RNA, 19 nt, Artificial Sequence
  Description of Artificial Sequence: Synthetic oligonucleotide
gcaccaccgaguugagguu

SEQ ID NO: 1928207 - RNA, 19 nt, Artificial Sequence
  Description of Artificial Sequence: Synthetic oligonucleotide
cccuggucguaagcugguc

SEQ ID NO: 1928208 - RNA, 19 nt, Artificial Sequence
  Description of Artificial Sequence: Synthetic oligonucleotide
gguacgccaugcagauggu

SEQ ID NO: 1928209 - RNA, 19 nt, Artificial Sequence
  Description of Artificial Sequence: Synthetic oligonucleotide
gcugucccauaaagccaaa

SEQ ID NO: 1928210 - RNA, 19 nt, Artificial Sequence
  Description of Artificial Sequence: Synthetic oligonucleotide
ccugcgugucagggcucag

SEQ ID NO: 1928211 - RNA, 19 nt, Artificial Sequence
  Description of Artificial Sequence: Synthetic oligonucleotide
gcccgucgagcgacgugac

SEQ ID NO: 1928212 - RNA, 19 nt, Artificial Sequence
  Description of Artificial Sequence: Synthetic oligonucleotide
gcgcucuccucgcgcagcu

SEQ ID NO: 1928213 - RNA, 19 nt, Artificial Sequence
  Description of Artificial Sequence: Synthetic oligonucleotide
ccgaguugagguugacguu

SEQ ID NO: 1928214 - RNA, 19 nt, Artificial Sequence
  Description of Artificial Sequence: Synthetic oligonucleotide
ggccuccuucaggcggaac

SEQ ID NO: 1928215 - RNA, 19 nt, Artificial Sequence
  Description of Artificial Sequence: Synthetic oligonucleotide
cggagcauuuugcgcagcu

SEQ ID NO: 1928216 - RNA, 19 nt, Artificial Sequence
  Description of Artificial Sequence: Synthetic oligonucleotide
gcgagccgcgcacgcucga

SEQ ID NO: 1928217 - RNA, 19 nt, Artificial Sequence
  Description of Artificial Sequence: Synthetic oligonucleotide
gccggcagucgagcaccac

SEQ ID NO: 1928218 - RNA, 19 nt, Artificial Sequence
  Description of Artificial Sequence: Synthetic oligonucleotide
cgcgccgccucgucgggca

SEQ ID NO: 1928219 - RNA, 19 nt, Artificial Sequence
  Description of Artificial Sequence: Synthetic oligonucleotide
ccacggggauccacuugua

SEQ ID NO: 1928220 - RNA, 19 nt, Artificial Sequence
  Description of Artificial Sequence: Synthetic oligonucleotide
cggcgcucuccucgcgcag

SEQ ID NO: 1928221 - RNA, 19 nt, Artificial Sequence
  Description of Artificial Sequence: Synthetic oligonucleotide
ggccggcagucgagcacca

SEQ ID NO: 1928222 - RNA, 19 nt, Artificial Sequence
  Description of Artificial Sequence: Synthetic oligonucleotide
cgcgcgccgccucgucggg

SEQ ID NO: 1928223 - RNA, 19 nt, Artificial Sequence
  Description of Artificial Sequence: Synthetic oligonucleotide
cgcacgcucgacgcggcga

SEQ ID NO: 1928224 - RNA, 19 nt, Artificial Sequence
  Description of Artificial Sequence: Synthetic oligonucleotide
cgaccacggccgccacgcc

SEQ ID NO: 1928225 - RNA, 19 nt, Artificial Sequence
  Description of Artificial Sequence: Synthetic oligonucleotide
gggcgcgcgccgccucguc

SEQ ID NO: 1928226 - RNA, 19 nt, Artificial Sequence
  Description of Artificial Sequence: Synthetic oligonucleotide
gcgcgccgccucgucgggc

SEQ ID NO: 1928227 - RNA, 19 nt, Artificial Sequence
  Description of Artificial Sequence: Synthetic oligonucleotide
gcacgacgcgcgcggcgcu

SEQ ID NO: 1928228 - RNA, 19 nt, Artificial Sequence
  Description of Artificial Sequence: Synthetic oligonucleotide
cgagcgacgugaccuucau

SEQ ID NO: 1928229 - RNA, 19 nt, Artificial Sequence
  Description of Artificial Sequence: Synthetic oligonucleotide
ggcgcccgucgagcgacgu

SEQ ID NO: 1928230 - RNA, 19 nt, Artificial Sequence
  Description of Artificial Sequence: Synthetic oligonucleotide
cgucgagcgacgugaccuu

SEQ ID NO: 1928231 - RNA, 19 nt, Artificial Sequence
  Description of Artificial Sequence: Synthetic oligonucleotide
cgccaugcagauggugggu

SEQ ID NO: 1928232 - RNA, 19 nt, Artificial Sequence
  Description of Artificial Sequence: Synthetic oligonucleotide
cgccgacaccgcgccgccc

SEQ ID NO: 1928233 - RNA, 19 nt, Artificial Sequence
  Description of Artificial Sequence: Synthetic oligonucleotide
cgacgcgcgcggcgcucuc

SEQ ID NO: 1928234 - RNA, 19 nt, Artificial Sequence
  Description of Artificial Sequence: Synthetic oligonucleotide
gcgggccggcgggcaggca

SEQ ID NO: 1928235 - RNA, 19 nt, Artificial Sequence
  Description of Artificial Sequence: Synthetic oligonucleotide
gauacagcuacguugaaug

SEQ ID NO: 1928236 - RNA, 19 nt, Artificial Sequence
  Description of Artificial Sequence: Synthetic oligonucleotide
auaucauuggucaggaagc

SEQ ID NO: 1928237 - RNA, 19 nt, Artificial Sequence
  Description of Artificial Sequence: Synthetic oligonucleotide
aauggcuggaacuuauuga

SEQ ID NO: 1928238 - RNA, 19 nt, Artificial Sequence
  Description of Artificial Sequence: Synthetic oligonucleotide
caugcaguaacguacuggc

SEQ ID NO: 1928239 - RNA, 19 nt, Artificial Sequence
  Description of Artificial Sequence: Synthetic oligonucleotide
aggaacagcacguuacugg

SEQ ID NO: 1928240 - RNA, 19 nt, Artificial Sequence
  Description of Artificial Sequence: Synthetic oligonucleotide
uggaacuucacaagucggg

SEQ ID NO: 1928241 - RNA, 19 nt, Artificial Sequence
  Description of Artificial Sequence: Synthetic oligonucleotide
agcagcuacuggcauaugc

SEQ ID NO: 1928242 - RNA, 19 nt, Artificial Sequence
  Description of Artificial Sequence: Synthetic oligonucleotide
uggaggauaucauugguca

SEQ ID NO: 1928243 - RNA, 19 nt, Artificial Sequence
  Description of Artificial Sequence: Synthetic oligonucleotide
ugcaguaacguacuggcac

SEQ ID NO: 1928244 - RNA, 19 nt, Artificial Sequence
  Description of Artificial Sequence: Synthetic oligonucleotide
ucuuggaggauaucauugg

SEQ ID NO: 1928245 - RNA, 19 nt, Artificial Sequence
  Description of Artificial Sequence: Synthetic oligonucleotide
ugaccucuggcucagagga

SEQ ID NO: 1928246 - RNA, 19 nt, Artificial Sequence
  Description of Artificial Sequence: Synthetic oligonucleotide
auggggaugccauagucac

SEQ ID NO: 1928247 - RNA, 19 nt, Artificial Sequence
  Description of Artificial Sequence: Synthetic oligonucleotide
aaagggcagaucuuggacu

SEQ ID NO: 1928248 - RNA, 19 nt, Artificial Sequence
  Description of Artificial Sequence: Synthetic oligonucleotide
aagggcagaucuuggacuc

SEQ ID NO: 1928249 - RNA, 19 nt, Artificial Sequence
  Description of Artificial Sequence: Synthetic oligonucleotide
uggaacuuauugauggcag

SEQ ID NO: 1928250 - RNA, 19 nt, Artificial Sequence
  Description of Artificial Sequence: Synthetic oligonucleotide
caaugugucgcccaggcgc

SEQ ID NO: 1928251 - RNA, 19 nt, Artificial Sequence
  Description of Artificial Sequence: Synthetic oligonucleotide
cuugucaaguuucuggccc

SEQ ID NO: 1928252 - RNA, 19 nt, Artificial Sequence
  Description of Artificial Sequence: Synthetic oligonucleotide
augccauagucacugggcc

SEQ ID NO: 1928253 - RNA, 19 nt, Artificial Sequence
  Description of Artificial Sequence: Synthetic oligonucleotide
cuuauugauggcagcaaag

SEQ ID NO: 1928254 - RNA, 19 nt, Artificial Sequence
  Description of Artificial Sequence: Synthetic oligonucleotide
aauaguacggggagcacag

SEQ ID NO: 1928255 - RNA, 19 nt, Artificial Sequence
  Description of Artificial Sequence: Synthetic oligonucleotide
acaguggaaguccaagagg

SEQ ID NO: 1928256 - RNA, 19 nt, Artificial Sequence
  Description of Artificial Sequence: Synthetic oligonucleotide
ugugguaccagcccaccag

SEQ ID NO: 1928257 - RNA, 19 nt, Artificial Sequence
  Description of Artificial Sequence: Synthetic oligonucleotide
ucuacgaccuuucuccucu

SEQ ID NO: 1928258 - RNA, 19 nt, Artificial Sequence
  Description of Artificial Sequence: Synthetic oligonucleotide
aacaguggcugcaguaucc

SEQ ID NO: 1928259 - RNA, 19 nt, Artificial Sequence
  Description of Artificial Sequence: Synthetic oligonucleotide
acccuuguagaacucugcc

SEQ ID NO: 1928260 - RNA, 19 nt, Artificial Sequence
  Description of Artificial Sequence: Synthetic oligonucleotide
auaggauccugccauccgg

SEQ ID NO: 1928261 - RNA, 19 nt, Artificial Sequence
  Description of Artificial Sequence: Synthetic oligonucleotide
gaauggcuggaacuuauug

SEQ ID NO: 1928262 - RNA, 19 nt, Artificial Sequence
  Description of Artificial Sequence: Synthetic oligonucleotide
uggguugccagaauaguac

SEQ ID NO: 1928263 - RNA, 19 nt, Artificial Sequence
  Description of Artificial Sequence: Synthetic oligonucleotide
agcaccaucucuuggagga

SEQ ID NO: 1928264 - RNA, 19 nt, Artificial Sequence
  Description of Artificial Sequence: Synthetic oligonucleotide
aacguacuggcaccuggac

SEQ ID NO: 1928265 - RNA, 19 nt, Artificial Sequence
  Description of Artificial Sequence: Synthetic oligonucleotide
cagggauaggccucgaagg

SEQ ID NO: 1928266 - RNA, 19 nt, Artificial Sequence
  Description of Artificial Sequence: Synthetic oligonucleotide
uccaagaggaacagcacgu

SEQ ID NO: 1928267 - RNA, 19 nt, Artificial Sequence
  Description of Artificial Sequence: Synthetic oligonucleotide
uguacuugacggaugccca

SEQ ID NO: 1928268 - RNA, 19 nt, Artificial Sequence
  Description of Artificial Sequence: Synthetic oligonucleotide
gagguuacuucuaccaggg

SEQ ID NO: 1928269 - RNA, 19 nt, Artificial Sequence
  Description of Artificial Sequence: Synthetic oligonucleotide
ucuacguccauggggaugc

SEQ ID NO: 1928270 - RNA, 19 nt, Artificial Sequence
  Description of Artificial Sequence: Synthetic oligonucleotide
cucuuggaggauaucauug

SEQ ID NO: 1928271 - RNA, 19 nt, Artificial Sequence
  Description of Artificial Sequence: Synthetic oligonucleotide
uuguacuugacggaugccc

SEQ ID NO: 1928272 - RNA, 19 nt, Artificial Sequence
  Description of Artificial Sequence: Synthetic oligonucleotide
caucucuacguccaugggg

SEQ ID NO: 1928273 - RNA, 19 nt, Artificial Sequence
  Description of Artificial Sequence: Synthetic oligonucleotide
auaucuugagcuuguccag

SEQ ID NO: 1928274 - RNA, 19 nt, Artificial Sequence
  Description of Artificial Sequence: Synthetic oligonucleotide
uccaagucaggugacagug

SEQ ID NO: 1928275 - RNA, 19 nt, Artificial Sequence
  Description of Artificial Sequence: Synthetic oligonucleotide
acguacuggcaccuggacc

SEQ ID NO: 1928276 - RNA, 19 nt, Artificial Sequence
  Description of Artificial Sequence: Synthetic oligonucleotide
agcaucugauuguugaugu

SEQ ID NO: 1928277 - RNA, 19 nt, Artificial Sequence
  Description of Artificial Sequence: Synthetic oligonucleotide
guccaagaggaacagcacg

SEQ ID NO: 1928278 - RNA, 19 nt, Artificial Sequence
  Description of Artificial Sequence: Synthetic oligonucleotide
ugucccagcgaccaccaag

SEQ ID NO: 1928279 - RNA, 19 nt, Artificial Sequence
  Description of Artificial Sequence: Synthetic oligonucleotide
guaacguacuggcaccugg

SEQ ID NO: 1928280 - RNA, 19 nt, Artificial Sequence
  Description of Artificial Sequence: Synthetic oligonucleotide
cagaucuuggacucggggc

SEQ ID NO: 1928281 - RNA, 19 nt, Artificial Sequence
  Description of Artificial Sequence: Synthetic oligonucleotide
uagaacucugccagcagca

SEQ ID NO: 1928282 - RNA, 19 nt, Artificial Sequence
  Description of Artificial Sequence: Synthetic oligonucleotide
gaagauuugcccaguuucc

SEQ ID NO: 1928283 - RNA, 19 nt, Artificial Sequence
  Description of Artificial Sequence: Synthetic oligonucleotide
acagccggacuucuuggcc

SEQ ID NO: 1928284 - RNA, 19 nt, Artificial Sequence
  Description of Artificial Sequence: Synthetic oligonucleotide
aacagcacguuacuggaua

SEQ ID NO: 1928285 - RNA, 19 nt, Artificial Sequence
  Description of Artificial Sequence: Synthetic oligonucleotide
acuugacggaugcccagcc

SEQ ID NO: 1928286 - RNA, 19 nt, Artificial Sequence
  Description of Artificial Sequence: Synthetic oligonucleotide
gaagcuguccuggacauac

SEQ ID NO: 1928287 - RNA, 19 nt, Artificial Sequence
  Description of Artificial Sequence: Synthetic oligonucleotide
gggucuacgaccuuucucc

SEQ ID NO: 1928288 - RNA, 19 nt, Artificial Sequence
  Description of Artificial Sequence: Synthetic oligonucleotide
agagucacgacugcccagc

SEQ ID NO: 1928289 - RNA, 19 nt, Artificial Sequence
  Description of Artificial Sequence: Synthetic oligonucleotide
ggcaaguacaucuuccucc

SEQ ID NO: 1928290 - RNA, 19 nt, Artificial Sequence
  Description of Artificial Sequence: Synthetic oligonucleotide
uugccagaauaguacgggg

SEQ ID NO: 1928291 - RNA, 19 nt, Artificial Sequence
  Description of Artificial Sequence: Synthetic oligonucleotide
auacgccaucucuacgucc

SEQ ID NO: 1928292 - RNA, 19 nt, Artificial Sequence
  Description of Artificial Sequence: Synthetic oligonucleotide
ggagguuacuucuaccagg

SEQ ID NO: 1928293 - RNA, 19 nt, Artificial Sequence
  Description of Artificial Sequence: Synthetic oligonucleotide
auacagcuacguugaaugg

SEQ ID NO: 1928294 - RNA, 19 nt, Artificial Sequence
  Description of Artificial Sequence: Synthetic oligonucleotide
uacgccaucucuacgucca

SEQ ID NO: 1928295 - RNA, 19 nt, Artificial Sequence
  Description of Artificial Sequence: Synthetic oligonucleotide
uuggaggauaucauugguc

SEQ ID NO: 1928296 - RNA, 19 nt, Artificial Sequence
  Description of Artificial Sequence: Synthetic oligonucleotide
ugccauaggauccugccau

SEQ ID NO: 1928297 - RNA, 19 nt, Artificial Sequence
  Description of Artificial Sequence: Synthetic oligonucleotide
uugacggaugcccagccac

SEQ ID NO: 1928298 - RNA, 19 nt, Artificial Sequence
  Description of Artificial Sequence: Synthetic oligonucleotide
agcuacguugaauggcugg

SEQ ID NO: 1928299 - RNA, 19 nt, Artificial Sequence
  Description of Artificial Sequence: Synthetic oligonucleotide
gucacgacugcccagcaug

SEQ ID NO: 1928300 - RNA, 19 nt, Artificial Sequence
  Description of Artificial Sequence: Synthetic oligonucleotide
uaguacggggagcacagca

SEQ ID NO: 1928301 - RNA, 19 nt, Artificial Sequence
  Description of Artificial Sequence: Synthetic oligonucleotide
acagcacguuacuggauac

SEQ ID NO: 1928302 - RNA, 19 nt, Artificial Sequence
  Description of Artificial Sequence: Synthetic oligonucleotide
acuccaggccuccuggaac

SEQ ID NO: 1928303 - RNA, 19 nt, Artificial Sequence
  Description of Artificial Sequence: Synthetic oligonucleotide
gaugcccagccacagccgg

SEQ ID NO: 1928304 - RNA, 19 nt, Artificial Sequence
  Description of Artificial Sequence: Synthetic oligonucleotide
uacagcuacguugaauggc

SEQ ID NO: 1928305 - RNA, 19 nt, Artificial Sequence
  Description of Artificial Sequence: Synthetic oligonucleotide
uacguugaauggcuggaac

SEQ ID NO: 1928306 - RNA, 19 nt, Artificial Sequence
  Description of Artificial Sequence: Synthetic oligonucleotide
gacauacgccaucucuacg

SEQ ID NO: 1928307 - RNA, 19 nt, Artificial Sequence
  Description of Artificial Sequence: Synthetic oligonucleotide
cauugcuggagccuugcag

SEQ ID NO: 1928308 - RNA, 19 nt, Artificial Sequence
  Description of Artificial Sequence: Synthetic oligonucleotide
aggagguuacuucuaccag

SEQ ID NO: 1928309 - RNA, 19 nt, Artificial Sequence
  Description of Artificial Sequence: Synthetic oligonucleotide
caccugauggaucuccucc

SEQ ID NO: 1928310 - RNA, 19 nt, Artificial Sequence
  Description of Artificial Sequence: Synthetic oligonucleotide
uugacgagcuucuugcaau

SEQ ID NO: 1928311 - RNA, 19 nt, Artificial Sequence
  Description of Artificial Sequence: Synthetic oligonucleotide
uggacauacgccaucucua

SEQ ID NO: 1928312 - RNA, 19 nt, Artificial Sequence
  Description of Artificial Sequence: Synthetic oligonucleotide
gaacuuauugauggcagca

SEQ ID NO: 1928313 - RNA, 19 nt, Artificial Sequence
  Description of Artificial Sequence: Synthetic oligonucleotide
cucacuccaagucagguga

SEQ ID NO: 1928314 - RNA, 19 nt, Artificial Sequence
  Description of Artificial Sequence: Synthetic oligonucleotide
cuucuugcaaugugucgcc

SEQ ID NO: 1928315 - RNA, 19 nt, Artificial Sequence
  Description of Artificial Sequence: Synthetic oligonucleotide
ucgaaggaauagcaccuga

SEQ ID NO: 1928316 - RNA, 19 nt, Artificial Sequence
  Description of Artificial Sequence: Synthetic oligonucleotide
acguugaauggcuggaacu

SEQ ID NO: 1928317 - RNA, 19 nt, Artificial Sequence
  Description of Artificial Sequence: Synthetic oligonucleotide
caaccucacuccaagucag

SEQ ID NO: 1928318 - RNA, 19 nt, Artificial Sequence
  Description of Artificial Sequence: Synthetic oligonucleotide
cauaggauccugccauccg

SEQ ID NO: 1928319 - RNA, 19 nt, Artificial Sequence
  Description of Artificial Sequence: Synthetic oligonucleotide
agcacguuacuggauacag

SEQ ID NO: 1928320 - RNA, 19 nt, Artificial Sequence
  Description of Artificial Sequence: Synthetic oligonucleotide
uguggcacaugcccuggcc

SEQ ID NO: 1928321 - RNA, 19 nt, Artificial Sequence
  Description of Artificial Sequence: Synthetic oligonucleotide
uguacuugucaaguuucug

SEQ ID NO: 1928322 - RNA, 19 nt, Artificial Sequence
  Description of Artificial Sequence: Synthetic oligonucleotide
guacggggagcacagcagg

SEQ ID NO: 1928323 - RNA, 19 nt, Artificial Sequence
  Description of Artificial Sequence: Synthetic oligonucleotide
uacuggcauaugcaggcug

SEQ ID NO: 1928324 - RNA, 19 nt, Artificial Sequence
  Description of Artificial Sequence: Synthetic oligonucleotide
ucuugcaaugugucgccca

SEQ ID NO: 1928325 - RNA, 19 nt, Artificial Sequence
  Description of Artificial Sequence: Synthetic oligonucleotide
gcaucgauguccugcaggg

SEQ ID NO: 1928326 - RNA, 19 nt, Artificial Sequence
  Description of Artificial Sequence: Synthetic oligonucleotide
uaacguacuggcaccugga

SEQ ID NO: 1928327 - RNA, 19 nt, Artificial Sequence
  Description of Artificial Sequence: Synthetic oligonucleotide
guaggugugcucuggacuc

SEQ ID NO: 1928328 - RNA, 19 nt, Artificial Sequence
  Description of Artificial Sequence: Synthetic oligonucleotide
cuugcaaugugucgcccag

SEQ ID NO: 1928329 - RNA, 19 nt, Artificial Sequence
  Description of Artificial Sequence: Synthetic oligonucleotide
uacggggagcacagcaggg

SEQ ID NO: 1928330 - RNA, 19 nt, Artificial Sequence
  Description of Artificial Sequence: Synthetic oligonucleotide
aucucuacguccaugggga

SEQ ID NO: 1928331 - RNA, 19 nt, Artificial Sequence
  Description of Artificial Sequence: Synthetic oligonucleotide
cacaaccucacuccaaguc

SEQ ID NO: 1928332 - RNA, 19 nt, Artificial Sequence
  Description of Artificial Sequence: Synthetic oligonucleotide
cugauuguugaugucccag

SEQ ID NO: 1928333 - RNA, 19 nt, Artificial Sequence
  Description of Artificial Sequence: Synthetic oligonucleotide
uggugggacucucaucagc

SEQ ID NO: 1928334 - RNA, 19 nt, Artificial Sequence
  Description of Artificial Sequence: Synthetic oligonucleotide
gacccuggcaaguacaucu

SEQ ID NO: 1928335 - RNA, 19 nt, Artificial Sequence
  Description of Artificial Sequence: Synthetic oligonucleotide
uugaagauuugcccaguuu

SEQ ID NO: 1928336 - RNA, 19 nt, Artificial Sequence
  Description of Artificial Sequence: Synthetic oligonucleotide
guuacuggauacagcuacg

SEQ ID NO: 1928337 - RNA, 19 nt, Artificial Sequence
  Description of Artificial Sequence: Synthetic oligonucleotide
ccagcaugcaguaacguac

SEQ ID NO: 1928338 - RNA, 19 nt, Artificial Sequence
  Description of Artificial Sequence: Synthetic oligonucleotide
ggguugacgagcuucuugc

SEQ ID NO: 1928339 - RNA, 19 nt, Artificial Sequence
  Description of Artificial Sequence: Synthetic oligonucleotide
acuggcauaugcaggcugg

SEQ ID NO: 1928340 - RNA, 19 nt, Artificial Sequence
  Description of Artificial Sequence: Synthetic oligonucleotide
gaauaguacggggagcaca

SEQ ID NO: 1928341 - RNA, 19 nt, Artificial Sequence
  Description of Artificial Sequence: Synthetic oligonucleotide
guagcccacaaccucacuc

SEQ ID NO: 1928342 - RNA, 19 nt, Artificial Sequence
  Description of Artificial Sequence: Synthetic oligonucleotide
ugauggaucuccuccucaa

SEQ ID NO: 1928343 - RNA, 19 nt, Artificial Sequence
  Description of Artificial Sequence: Synthetic oligonucleotide
aacuuauugauggcagcaa

SEQ ID NO: 1928344 - RNA, 19 nt, Artificial Sequence
  Description of Artificial Sequence: Synthetic oligonucleotide
ucaacaguggcugcaguau

SEQ ID NO: 1928345 - RNA, 19 nt, Artificial Sequence
  Description of Artificial Sequence: Synthetic oligonucleotide
ggaacuucacaagucgggg

SEQ ID NO: 1928346 - RNA, 19 nt, Artificial Sequence
  Description of Artificial Sequence: Synthetic oligonucleotide
gcgaguugaagauuugccc

SEQ ID NO: 1928347 - RNA, 19 nt, Artificial Sequence
  Description of Artificial Sequence: Synthetic oligonucleotide
cagcuacuggcauaugcag

SEQ ID NO: 1928348 - RNA, 19 nt, Artificial Sequence
  Description of Artificial Sequence: Synthetic oligonucleotide
ugacgagcuucuugcaaug

SEQ ID NO: 1928349 - RNA, 19 nt, Artificial Sequence
  Description of Artificial Sequence: Synthetic oligonucleotide
agggauaggccucgaagga

SEQ ID NO: 1928350 - RNA, 19 nt, Artificial Sequence
  Description of Artificial Sequence: Synthetic oligonucleotide
caagguagcccacaaccuc

SEQ ID NO: 1928351 - RNA, 19 nt, Artificial Sequence
  Description of Artificial Sequence: Synthetic oligonucleotide
cacguuacuggauacagcu

SEQ ID NO: 1928352 - RNA, 19 nt, Artificial Sequence
  Description of Artificial Sequence: Synthetic oligonucleotide
ucugauuguugauguccca

SEQ ID NO: 1928353 - RNA, 19 nt, Artificial Sequence
  Description of Artificial Sequence: Synthetic oligonucleotide
ucacgacugcccagcaugc

SEQ ID NO: 1928354 - RNA, 19 nt, Artificial Sequence
  Description of Artificial Sequence: Synthetic oligonucleotide
acagcuacguugaauggcu

SEQ ID NO: 1928355 - RNA, 19 nt, Artificial Sequence
  Description of Artificial Sequence: Synthetic oligonucleotide
ggcauaugcaggcugggug

SEQ ID NO: 1928356 - RNA, 19 nt, Artificial Sequence
  Description of Artificial Sequence: Synthetic oligonucleotide
acuccaagucaggugacag

SEQ ID NO: 1928357 - RNA, 19 nt, Artificial Sequence
  Description of Artificial Sequence: Synthetic oligonucleotide
ucucuuggaggauaucauu

SEQ ID NO: 1928358 - RNA, 19 nt, Artificial Sequence
  Description of Artificial Sequence: Synthetic oligonucleotide
uaggccucgaaggaauagc

SEQ ID NO: 1928359 - RNA, 19 nt, Artificial Sequence
  Description of Artificial Sequence: Synthetic oligonucleotide
uuacuggauacagcuacgu

SEQ ID NO: 1928360 - RNA, 19 nt, Artificial Sequence
  Description of Artificial Sequence: Synthetic oligonucleotide
uaucauuggucaggaagcu

SEQ ID NO: 1928361 - RNA, 19 nt, Artificial Sequence
  Description of Artificial Sequence: Synthetic oligonucleotide
cagccggacuucuuggccg

SEQ ID NO: 1928362 - RNA, 19 nt, Artificial Sequence
  Description of Artificial Sequence: Synthetic oligonucleotide
gucccagcgaccaccaagg

SEQ ID NO: 1928363 - RNA, 19 nt, Artificial Sequence
  Description of Artificial Sequence: Synthetic oligonucleotide
aguccaagaggaacagcac

SEQ ID NO: 1928364 - RNA, 19 nt, Artificial Sequence
  Description of Artificial Sequence: Synthetic oligonucleotide
agcuacuggcauaugcagg

SEQ ID NO: 1928365 - RNA, 19 nt, Artificial Sequence
  Description of Artificial Sequence: Synthetic oligonucleotide
uugucaaguuucuggcccu

SEQ ID NO: 1928366 - RNA, 19 nt, Artificial Sequence
  Description of Artificial Sequence: Synthetic oligonucleotide
cugcccagcaugcaguaac

SEQ ID NO: 1928367 - RNA, 19 nt, Artificial Sequence
  Description of Artificial Sequence: Synthetic oligonucleotide
ggaacuuauugauggcagc

SEQ ID NO: 1928368 - RNA, 19 nt, Artificial Sequence
  Description of Artificial Sequence: Synthetic oligonucleotide
gccagaauaguacggggag

SEQ ID NO: 1928369 - RNA, 19 nt, Artificial Sequence
  Description of Artificial Sequence: Synthetic oligonucleotide
uccacacgcuugcccaggg

SEQ ID NO: 1928370 - RNA, 19 nt, Artificial Sequence
  Description of Artificial Sequence: Synthetic oligonucleotide
aggcaucacccagaaaggg

SEQ ID NO: 1928371 - RNA, 19 nt, Artificial Sequence
  Description of Artificial Sequence: Synthetic oligonucleotide
ggguugccagaauaguacg

SEQ ID NO: 1928372 - RNA, 19 nt, Artificial Sequence
  Description of Artificial Sequence: Synthetic oligonucleotide
uggcaaguacaucuuccuc

SEQ ID NO: 1928373 - RNA, 19 nt, Artificial Sequence
  Description of Artificial Sequence: Synthetic oligonucleotide
cagcccaccagggauaggc

SEQ ID NO: 1928374 - RNA, 19 nt, Artificial Sequence
  Description of Artificial Sequence: Synthetic oligonucleotide
ugguacuccaucugugcau

SEQ ID NO: 1928375 - RNA, 19 nt, Artificial Sequence
  Description of Artificial Sequence: Synthetic oligonucleotide
agaacucugccagcagcac

SEQ ID NO: 1928376 - RNA, 19 nt, Artificial Sequence
  Description of Artificial Sequence: Synthetic oligonucleotide
aaugugucgcccaggcgcu

SEQ ID NO: 1928377 - RNA, 19 nt, Artificial Sequence
  Description of Artificial Sequence: Synthetic oligonucleotide
cauggggaugccauaguca

SEQ ID NO: 1928378 - RNA, 19 nt, Artificial Sequence
  Description of Artificial Sequence: Synthetic oligonucleotide
cacgccgacuccugcaggg

SEQ ID NO: 1928379 - RNA, 19 nt, Artificial Sequence
  Description of Artificial Sequence: Synthetic oligonucleotide
guacuugacggaugcccag

SEQ ID NO: 1928380 - RNA, 19 nt, Artificial Sequence
  Description of Artificial Sequence: Synthetic oligonucleotide
cacccuuguagaacucugc

SEQ ID NO: 1928381 - RNA, 19 nt, Artificial Sequence
  Description of Artificial Sequence: Synthetic oligonucleotide
ggaugccauagucacuggg

SEQ ID NO: 1928382 - RNA, 19 nt, Artificial Sequence
  Description of Artificial Sequence: Synthetic oligonucleotide
caagucaggugacagugga

SEQ ID NO: 1928383 - RNA, 19 nt, Artificial Sequence
  Description of Artificial Sequence: Synthetic oligonucleotide
cagaauaguacggggagca

SEQ ID NO: 1928384 - RNA, 19 nt, Artificial Sequence
  Description of Artificial Sequence: Synthetic oligonucleotide
gcagaucuuggacucgggg

SEQ ID NO: 1928385 - RNA, 19 nt, Artificial Sequence
  Description of Artificial Sequence: Synthetic oligonucleotide
acggaugcccagccacagc

SEQ ID NO: 1928386 - RNA, 19 nt, Artificial Sequence
  Description of Artificial Sequence: Synthetic oligonucleotide
acggggagcacagcagggc

SEQ ID NO: 1928387 - RNA, 19 nt, Artificial Sequence
  Description of Artificial Sequence: Synthetic oligonucleotide
aguacggggagcacagcag

SEQ ID NO: 1928388 - RNA, 19 nt, Artificial Sequence
  Description of Artificial Sequence: Synthetic oligonucleotide
ugacggaugcccagccaca

SEQ ID NO: 1928389 - RNA, 19 nt, Artificial Sequence
  Description of Artificial Sequence: Synthetic oligonucleotide
auguggcacaugcccuggc

SEQ ID NO: 1928390 - RNA, 19 nt, Artificial Sequence
  Description of Artificial Sequence: Synthetic oligonucleotide
auaggccucgaaggaauag

SEQ ID NO: 1928391 - RNA, 19 nt, Artificial Sequence
  Description of Artificial Sequence: Synthetic oligonucleotide
ugccauagucacugggccu

SEQ ID NO: 1928392 - RNA, 19 nt, Artificial Sequence
  Description of Artificial Sequence: Synthetic oligonucleotide
ggaacagcacguuacugga

SEQ ID NO: 1928393 - RNA, 19 nt, Artificial Sequence
  Description of Artificial Sequence: Synthetic oligonucleotide
uacgaccuuucuccucugc

SEQ ID NO: 1928394 - RNA, 19 nt, Artificial Sequence
  Description of Artificial Sequence: Synthetic oligonucleotide
gcaguaacguacuggcacc

SEQ ID NO: 1928395 - RNA, 19 nt, Artificial Sequence
  Description of Artificial Sequence: Synthetic oligonucleotide
uacuugacggaugcccagc

SEQ ID NO: 1928396 - RNA, 19 nt, Artificial Sequence
  Description of Artificial Sequence: Synthetic oligonucleotide
ugccggcggagccaggcag

SEQ ID NO: 1928397 - RNA, 19 nt, Artificial Sequence
  Description of Artificial Sequence: Synthetic oligonucleotide
aggaagcuguccuggacau

SEQ ID NO: 1928398 - RNA, 19 nt, Artificial Sequence
  Description of Artificial Sequence: Synthetic oligonucleotide
cguuacuggauacagcuac

SEQ ID NO: 1928399 - RNA, 19 nt, Artificial Sequence
  Description of Artificial Sequence: Synthetic oligonucleotide
uacuucuaccagggugugg

SEQ ID NO: 1928400 - RNA, 19 nt, Artificial Sequence
  Description of Artificial Sequence: Synthetic oligonucleotide
uccuggacauacgccaucu

SEQ ID NO: 1928401 - RNA, 19 nt, Artificial Sequence
  Description of Artificial Sequence: Synthetic oligonucleotide
uguccuggacauacgccau

SEQ ID NO: 1928402 - RNA, 19 nt, Artificial Sequence
  Description of Artificial Sequence: Synthetic oligonucleotide
gguugccagaauaguacgg

SEQ ID NO: 1928403 - RNA, 19 nt, Artificial Sequence
  Description of Artificial Sequence: Synthetic oligonucleotide
ggcgaguugaagauuugcc

SEQ ID NO: 1928404 - RNA, 19 nt, Artificial Sequence
  Description of Artificial Sequence: Synthetic oligonucleotide
guugacgagcuucuugcaa

SEQ ID NO: 1928405 - RNA, 19 nt, Artificial Sequence
  Description of Artificial Sequence: Synthetic oligonucleotide
ugugucgcccaggcgcugg

SEQ ID NO: 1928406 - RNA, 19 nt, Artificial Sequence
  Description of Artificial Sequence: Synthetic oligonucleotide
caucacccagaaagggcag

SEQ ID NO: 1928407 - RNA, 19 nt, Artificial Sequence
  Description of Artificial Sequence: Synthetic oligonucleotide
ugagcuuguccagguaggu

SEQ ID NO: 1928408 - RNA, 19 nt, Artificial Sequence
  Description of Artificial Sequence: Synthetic oligonucleotide
ugcaguauccagggucccc

SEQ ID NO: 1928409 - RNA, 19 nt, Artificial Sequence
  Description of Artificial Sequence: Synthetic oligonucleotide
guacuccaucugugcaucg

SEQ ID NO: 1928410 - RNA, 19 nt, Artificial Sequence
  Description of Artificial Sequence: Synthetic oligonucleotide
auaguacggggagcacagc

SEQ ID NO: 1928411 - RNA, 19 nt, Artificial Sequence
  Description of Artificial Sequence: Synthetic oligonucleotide
cacagccggacuucuuggc

SEQ ID NO: 1928412 - RNA, 19 nt, Artificial Sequence
  Description of Artificial Sequence: Synthetic oligonucleotide
cuucuaccagggugugggg

SEQ ID NO: 1928413 - RNA, 19 nt, Artificial Sequence
  Description of Artificial Sequence: Synthetic oligonucleotide
cauacgccaucucuacguc

SEQ ID NO: 1928414 - RNA, 19 nt, Artificial Sequence
  Description of Artificial Sequence: Synthetic oligonucleotide
cauaugcaggcugggugcc

SEQ ID NO: 1928415 - RNA, 19 nt, Artificial Sequence
  Description of Artificial Sequence: Synthetic oligonucleotide
uuacuucuaccagggugug

SEQ ID NO: 1928416 - RNA, 19 nt, Artificial Sequence
  Description of Artificial Sequence: Synthetic oligonucleotide
ccugccauaggauccugcc

SEQ ID NO: 1928417 - RNA, 19 nt, Artificial Sequence
  Description of Artificial Sequence: Synthetic oligonucleotide
gaauagcaccugauggauc

SEQ ID NO: 1928418 - RNA, 19 nt, Artificial Sequence
  Description of Artificial Sequence: Synthetic oligonucleotide
ucacuccaagucaggugac

SEQ ID NO: 1928419 - RNA, 19 nt, Artificial Sequence
  Description of Artificial Sequence: Synthetic oligonucleotide
uacuccaucugugcaucga

SEQ ID NO: 1928420 - RNA, 19 nt, Artificial Sequence
  Description of Artificial Sequence: Synthetic oligonucleotide
agcaugcaguaacguacug

SEQ ID NO: 1928421 - RNA, 19 nt, Artificial Sequence
  Description of Artificial Sequence: Synthetic oligonucleotide
ccagggauaggccucgaag

SEQ ID NO: 1928422 - RNA, 19 nt, Artificial Sequence
  Description of Artificial Sequence: Synthetic oligonucleotide
gacggaugcccagccacag

SEQ ID NO: 1928423 - RNA, 19 nt, Artificial Sequence
  Description of Artificial Sequence: Synthetic oligonucleotide
ucuuggccggguugacgag

SEQ ID NO: 1928424 - RNA, 19 nt, Artificial Sequence
  Description of Artificial Sequence: Synthetic oligonucleotide
cauuggucaggaagcuguc

SEQ ID NO: 1928425 - RNA, 19 nt, Artificial Sequence
  Description of Artificial Sequence: Synthetic oligonucleotide
ugggcgaguugaagauuug

SEQ ID NO: 1928426 - RNA, 19 nt, Artificial Sequence
  Description of Artificial Sequence: Synthetic oligonucleotide
uccccuuugcuggugggac

SEQ ID NO: 1928427 - RNA, 19 nt, Artificial Sequence
  Description of Artificial Sequence: Synthetic oligonucleotide
uuggacucggggccugggu

SEQ ID NO: 1928428 - RNA, 19 nt, Artificial Sequence
  Description of Artificial Sequence: Synthetic oligonucleotide
uucuugcaaugugucgccc

SEQ ID NO: 1928429 - RNA, 19 nt, Artificial Sequence
  Description of Artificial Sequence: Synthetic oligonucleotide
cuuguacuugacggaugcc

SEQ ID NO: 1928430 - RNA, 19 nt, Artificial Sequence
  Description of Artificial Sequence: Synthetic oligonucleotide
ggaaguccaagaggaacag

SEQ ID NO: 1928431 - RNA, 19 nt, Artificial Sequence
  Description of Artificial Sequence: Synthetic oligonucleotide
agcgaccaccaagguagcc

SEQ ID NO: 1928432 - RNA, 19 nt, Artificial Sequence
  Description of Artificial Sequence: Synthetic oligonucleotide
cugagacccuggcaaguac

SEQ ID NO: 1928433 - RNA, 19 nt, Artificial Sequence
  Description of Artificial Sequence: Synthetic oligonucleotide
ccaguuuccugccauagga

SEQ ID NO: 1928434 - RNA, 19 nt, Artificial Sequence
  Description of Artificial Sequence: Synthetic oligonucleotide
cuggcagagucacgacugc

SEQ ID NO: 1928435 - RNA, 19 nt, Artificial Sequence
  Description of Artificial Sequence: Synthetic oligonucleotide
ggcaucacccagaaagggc

SEQ ID NO: 1928436 - RNA, 19 nt, Artificial Sequence
  Description of Artificial Sequence: Synthetic oligonucleotide
aucucuuggaggauaucau

SEQ ID NO: 1928437 - RNA, 19 nt, Artificial Sequence
  Description of Artificial Sequence: Synthetic oligonucleotide
uggcagagucacgacugcc

SEQ ID NO: 1928438 - RNA, 19 nt, Artificial Sequence
  Description of Artificial Sequence: Synthetic oligonucleotide
cuuggccggguugacgagc

SEQ ID NO: 1928439 - RNA, 19 nt, Artificial Sequence
  Description of Artificial Sequence: Synthetic oligonucleotide
aguaacguacuggcaccug

SEQ ID NO: 1928440 - RNA, 19 nt, Artificial Sequence
  Description of Artificial Sequence: Synthetic oligonucleotide
cuggguugccagaauagua

SEQ ID NO: 1928441 - RNA, 19 nt, Artificial Sequence
  Description of Artificial Sequence: Synthetic oligonucleotide
gcuaggcagggcuggaagc

SEQ ID NO: 1928442 - RNA, 19 nt, Artificial Sequence
  Description of Artificial Sequence: Synthetic oligonucleotide
agggauaucuugagcuugu

SEQ ID NO: 1928443 - RNA, 19 nt, Artificial Sequence
  Description of Artificial Sequence: Synthetic oligonucleotide
cccacaaccucacuccaag

SEQ ID NO: 1928444 - RNA, 19 nt, Artificial Sequence
  Description of Artificial Sequence: Synthetic oligonucleotide
cuggacauacgccaucucu

SEQ ID NO: 1928445 - RNA, 19 nt, Artificial Sequence
  Description of Artificial Sequence: Synthetic oligonucleotide
auaugcaggcugggugccg

SEQ ID NO: 1928446 - RNA, 19 nt, Artificial Sequence
  Description of Artificial Sequence: Synthetic oligonucleotide
ugcaggcugggugccggcg

SEQ ID NO: 1928447 - RNA, 19 nt, Artificial Sequence
  Description of Artificial Sequence: Synthetic oligonucleotide
accucacuccaagucaggu

SEQ ID NO: 1928448 - RNA, 19 nt, Artificial Sequence
  Description of Artificial Sequence: Synthetic oligonucleotide
cucgaaggaauagcaccug

SEQ ID NO: 1928449 - RNA, 19 nt, Artificial Sequence
  Description of Artificial Sequence: Synthetic oligonucleotide
uggcagcaaaggagguuac

SEQ ID NO: 1928450 - RNA, 19 nt, Artificial Sequence
  Description of Artificial Sequence: Synthetic oligonucleotide
agacccuggcaaguacauc

SEQ ID NO: 1928451 - RNA, 19 nt, Artificial Sequence
  Description of Artificial Sequence: Synthetic oligonucleotide
gcaucacccagaaagggca

SEQ ID NO: 1928452 - RNA, 19 nt, Artificial Sequence
  Description of Artificial Sequence: Synthetic oligonucleotide
gccacagccggacuucuug

SEQ ID NO: 1928453 - RNA, 19 nt, Artificial Sequence
  Description of Artificial Sequence: Synthetic oligonucleotide
aggccucgaaggaauagca

SEQ ID NO: 1928454 - RNA, 19 nt, Artificial Sequence
  Description of Artificial Sequence: Synthetic oligonucleotide
ggugggacucucaucagca

SEQ ID NO: 1928455 - RNA, 19 nt, Artificial Sequence
  Description of Artificial Sequence: Synthetic oligonucleotide
cucuacguccauggggaug

SEQ ID NO: 1928456 - RNA, 19 nt, Artificial Sequence
  Description of Artificial Sequence: Synthetic oligonucleotide
ccaagucaggugacagugg

SEQ ID NO: 1928457 - RNA, 19 nt, Artificial Sequence
  Description of Artificial Sequence: Synthetic oligonucleotide
caguggcugcaguauccag

SEQ ID NO: 1928458 - RNA, 19 nt, Artificial Sequence
  Description of Artificial Sequence: Synthetic oligonucleotide
auagcaccugauggaucuc

SEQ ID NO: 1928459 - RNA, 19 nt, Artificial Sequence
  Description of Artificial Sequence: Synthetic oligonucleotide
uaggugugcucuggacucc

SEQ ID NO: 1928460 - RNA, 19 nt, Artificial Sequence
  Description of Artificial Sequence: Synthetic oligonucleotide
gcaaugugucgcccaggcg

SEQ ID NO: 1928461 - RNA, 19 nt, Artificial Sequence
  Description of Artificial Sequence: Synthetic oligonucleotide
cuggccuuugggguccugc

SEQ ID NO: 1928462 - RNA, 19 nt, Artificial Sequence
  Description of Artificial Sequence: Synthetic oligonucleotide
gguaggugugcucuggacu

SEQ ID NO: 1928463 - RNA, 19 nt, Artificial Sequence
  Description of Artificial Sequence: Synthetic oligonucleotide
cuuggaggauaucauuggu

SEQ ID NO: 1928464 - RNA, 19 nt, Artificial Sequence
  Description of Artificial Sequence: Synthetic oligonucleotide
uggcauaugcaggcugggu

SEQ ID NO: 1928465 - RNA, 19 nt, Artificial Sequence
  Description of Artificial Sequence: Synthetic oligonucleotide
uggcacaugcccuggccuu

SEQ ID NO: 1928466 - RNA, 19 nt, Artificial Sequence
  Description of Artificial Sequence: Synthetic oligonucleotide
uggauacagcuacguugaa

SEQ ID NO: 1928467 - RNA, 19 nt, Artificial Sequence
  Description of Artificial Sequence: Synthetic oligonucleotide
gucuacgaccuuucuccuc

SEQ ID NO: 1928468 - RNA, 19 nt, Artificial Sequence
  Description of Artificial Sequence: Synthetic oligonucleotide
agggcagaucuuggacucg

SEQ ID NO: 1928469 - RNA, 19 nt, Artificial Sequence
  Description of Artificial Sequence: Synthetic oligonucleotide
gggacucucaucagcagca

SEQ ID NO: 1928470 - RNA, 19 nt, Artificial Sequence
  Description of Artificial Sequence: Synthetic oligonucleotide
gcgaccaccaagguagccc

SEQ ID NO: 1928471 - RNA, 19 nt, Artificial Sequence
  Description of Artificial Sequence: Synthetic oligonucleotide
accaccaagguagcccaca

SEQ ID NO: 1928472 - RNA, 19 nt, Artificial Sequence
  Description of Artificial Sequence: Synthetic oligonucleotide
cugggccuuugcucagggg

SEQ ID NO: 1928473 - RNA, 19 nt, Artificial Sequence
  Description of Artificial Sequence: Synthetic oligonucleotide
gcagcuacuggcauaugca

SEQ ID NO: 1928474 - RNA, 19 nt, Artificial Sequence
  Description of Artificial Sequence: Synthetic oligonucleotide
agguuacuucuaccagggu

SEQ ID NO: 1928475 - RNA, 19 nt, Artificial Sequence
  Description of Artificial Sequence: Synthetic oligonucleotide
ugcggguggcugugguacc

SEQ ID NO: 1928476 - RNA, 19 nt, Artificial Sequence
  Description of Artificial Sequence: Synthetic oligonucleotide
cuggcaaguacaucuuccu

SEQ ID NO: 1928477 - RNA, 19 nt, Artificial Sequence
  Description of Artificial Sequence: Synthetic oligonucleotide
ucuccucugcugagacccu

SEQ ID NO: 1928478 - RNA, 19 nt, Artificial Sequence
  Description of Artificial Sequence: Synthetic oligonucleotide
agucacgacugcccagcau

SEQ ID NO: 1928479 - RNA, 19 nt, Artificial Sequence
  Description of Artificial Sequence: Synthetic oligonucleotide
guaccagcccaccagggau

SEQ ID NO: 1928480 - RNA, 19 nt, Artificial Sequence
  Description of Artificial Sequence: Synthetic oligonucleotide
gguacuccaucugugcauc

SEQ ID NO: 1928481 - RNA, 19 nt, Artificial Sequence
  Description of Artificial Sequence: Synthetic oligonucleotide
cagcuacguugaauggcug

SEQ ID NO: 1928482 - RNA, 19 nt, Artificial Sequence
  Description of Artificial Sequence: Synthetic oligonucleotide
aucacccagaaagggcaga

SEQ ID NO: 1928483 - RNA, 19 nt, Artificial Sequence
  Description of Artificial Sequence: Synthetic oligonucleotide
guugaauggcuggaacuua

SEQ ID NO: 1928484 - RNA, 19 nt, Artificial Sequence
  Description of Artificial Sequence: Synthetic oligonucleotide
ccacagccggacuucuugg

SEQ ID NO: 1928485 - RNA, 19 nt, Artificial Sequence
  Description of Artificial Sequence: Synthetic oligonucleotide
ucucuacguccauggggau

SEQ ID NO: 1928486 - RNA, 19 nt, Artificial Sequence
  Description of Artificial Sequence: Synthetic oligonucleotide
ggggucuacgaccuuucuc

SEQ ID NO: 1928487 - RNA, 19 nt, Artificial Sequence
  Description of Artificial Sequence: Synthetic oligonucleotide
gggaaggcucucagcacgg

SEQ ID NO: 1928488 - RNA, 19 nt, Artificial Sequence
  Description of Artificial Sequence: Synthetic oligonucleotide
ccagaauaguacggggagc

SEQ ID NO: 1928489 - RNA, 19 nt, Artificial Sequence
  Description of Artificial Sequence: Synthetic oligonucleotide
accaucucuuggaggauau

SEQ ID NO: 1928490 - RNA, 19 nt, Artificial Sequence
  Description of Artificial Sequence: Synthetic oligonucleotide
cuugacggaugcccagcca

SEQ ID NO: 1928491 - RNA, 19 nt, Artificial Sequence
  Description of Artificial Sequence: Synthetic oligonucleotide
gcuacguugaauggcugga

SEQ ID NO: 1928492 - RNA, 19 nt, Artificial Sequence
  Description of Artificial Sequence: Synthetic oligonucleotide
caaguacaucuuccuccuc

SEQ ID NO: 1928493 - RNA, 19 nt, Artificial Sequence
  Description of Artificial Sequence: Synthetic oligonucleotide
gaccucuggcucagaggag

SEQ ID NO: 1928494 - RNA, 19 nt, Artificial Sequence
  Description of Artificial Sequence: Synthetic oligonucleotide
gggcgaguugaagauuugc

SEQ ID NO: 1928495 - RNA, 19 nt, Artificial Sequence
  Description of Artificial Sequence: Synthetic oligonucleotide
ggccagggauaucuugagc

SEQ ID NO: 1928496 - RNA, 19 nt, Artificial Sequence
  Description of Artificial Sequence: Synthetic oligonucleotide
cacacgcuugcccagggcu

SEQ ID NO: 1928497 - RNA, 19 nt, Artificial Sequence
  Description of Artificial Sequence: Synthetic oligonucleotide
ccauaggauccugccaucc

SEQ ID NO: 1928498 - RNA, 19 nt, Artificial Sequence
  Description of Artificial Sequence: Synthetic oligonucleotide
cccaguuuccugccauagg

SEQ ID NO: 1928499 - RNA, 19 nt, Artificial Sequence
  Description of Artificial Sequence: Synthetic oligonucleotide
cagucucagcugguacucc

SEQ ID NO: 1928500 - RNA, 19 nt, Artificial Sequence
  Description of Artificial Sequence: Synthetic oligonucleotide
gugcaucgauguccugcag

SEQ ID NO: 1928501 - RNA, 19 nt, Artificial Sequence
  Description of Artificial Sequence: Synthetic oligonucleotide
cuacgaccuuucuccucug

SEQ ID NO: 1928502 - RNA, 19 nt, Artificial Sequence
  Description of Artificial Sequence: Synthetic oligonucleotide
gagucacgacugcccagca

SEQ ID NO: 1928503 - RNA, 19 nt, Artificial Sequence
  Description of Artificial Sequence: Synthetic oligonucleotide
ccaucucuacguccauggg

SEQ ID NO: 1928504 - RNA, 19 nt, Artificial Sequence
  Description of Artificial Sequence: Synthetic oligonucleotide
augcaguaacguacuggca

SEQ ID NO: 1928505 - RNA, 19 nt, Artificial Sequence
  Description of Artificial Sequence: Synthetic oligonucleotide
accagggauaggccucgaa

SEQ ID NO: 1928506 - RNA, 19 nt, Artificial Sequence
  Description of Artificial Sequence: Synthetic oligonucleotide
agcaccugauggaucuccu

SEQ ID NO: 1928507 - RNA, 19 nt, Artificial Sequence
  Description of Artificial Sequence: Synthetic oligonucleotide
gguugacgagcuucuugca

SEQ ID NO: 1928508 - RNA, 19 nt, Artificial Sequence
  Description of Artificial Sequence: Synthetic oligonucleotide
gauaggccucgaaggaaua

SEQ ID NO: 1928509 - RNA, 19 nt, Artificial Sequence
  Description of Artificial Sequence: Synthetic oligonucleotide
cugggcgaguugaagauuu

SEQ ID NO: 1928510 - RNA, 19 nt, Artificial Sequence
  Description of Artificial Sequence: Synthetic oligonucleotide
ugucaaguuucuggcccuu

SEQ ID NO: 1928511 - RNA, 19 nt, Artificial Sequence
  Description of Artificial Sequence: Synthetic oligonucleotide
acgccgacuccugcagggg

SEQ ID NO: 1928512 - RNA, 19 nt, Artificial Sequence
  Description of Artificial Sequence: Synthetic oligonucleotide
cguacuggcaccuggaccu

SEQ ID NO: 1928513 - RNA, 19 nt, Artificial Sequence
  Description of Artificial Sequence: Synthetic oligonucleotide
cugcaguauccaggguccc

SEQ ID NO: 1928514 - RNA, 19 nt, Artificial Sequence
  Description of Artificial Sequence: Synthetic oligonucleotide
cagcaugcaguaacguacu

SEQ ID NO: 1928515 - RNA, 19 nt, Artificial Sequence
  Description of Artificial Sequence: Synthetic oligonucleotide
guggcacaugcccuggccu

SEQ ID NO: 1928516 - RNA, 19 nt, Artificial Sequence
  Description of Artificial Sequence: Synthetic oligonucleotide
gccauccggcugcaggucc

SEQ ID NO: 1928517 - RNA, 19 nt, Artificial Sequence
  Description of Artificial Sequence: Synthetic oligonucleotide
cuugcagucucagcuggua

SEQ ID NO: 1928518 - RNA, 19 nt, Artificial Sequence
  Description of Artificial Sequence: Synthetic oligonucleotide
gcacccuuguagaacucug

SEQ ID NO: 1928519 - RNA, 19 nt, Artificial Sequence
  Description of Artificial Sequence: Synthetic oligonucleotide
gcacguuacuggauacagc

SEQ ID NO: 1928520 - RNA, 19 nt, Artificial Sequence
  Description of Artificial Sequence: Synthetic oligonucleotide
ggaauagcaccugauggau

SEQ ID NO: 1928521 - RNA, 19 nt, Artificial Sequence
  Description of Artificial Sequence: Synthetic oligonucleotide
gggcuggaagccauugcug

SEQ ID NO: 1928522 - RNA, 19 nt, Artificial Sequence
  Description of Artificial Sequence: Synthetic oligonucleotide
gcagucucagcugguacuc

SEQ ID NO: 1928523 - RNA, 19 nt, Artificial Sequence
  Description of Artificial Sequence: Synthetic oligonucleotide
cuacguugaauggcuggaa

SEQ ID NO: 1928524 - RNA, 19 nt, Artificial Sequence
  Description of Artificial Sequence: Synthetic oligonucleotide
gguuccuggcagagucacg

SEQ ID NO: 1928525 - RNA, 19 nt, Artificial Sequence
  Description of Artificial Sequence: Synthetic oligonucleotide
gcugggugccggcggagcc

SEQ ID NO: 1928526 - RNA, 19 nt, Artificial Sequence
  Description of Artificial Sequence: Synthetic oligonucleotide
ggggcacccuuguagaacu

SEQ ID NO: 1928527 - RNA, 19 nt, Artificial Sequence
  Description of Artificial Sequence: Synthetic oligonucleotide
ugcuggccagggauaucuu

SEQ ID NO: 1928528 - RNA, 19 nt, Artificial Sequence
  Description of Artificial Sequence: Synthetic oligonucleotide
ggacucucaucagcagcag

SEQ ID NO: 1928529 - RNA, 19 nt, Artificial Sequence
  Description of Artificial Sequence: Synthetic oligonucleotide
caggcgcugggcgaguuga

SEQ ID NO: 1928530 - RNA, 19 nt, Artificial Sequence
  Description of Artificial Sequence: Synthetic oligonucleotide
cuccaagucaggugacagu

SEQ ID NO: 1928531 - RNA, 19 nt, Artificial Sequence
  Description of Artificial Sequence: Synthetic oligonucleotide
cccuuguacuugacggaug

SEQ ID NO: 1928532 - RNA, 19 nt, Artificial Sequence
  Description of Artificial Sequence: Synthetic oligonucleotide
cauccggcugcaggucccc

SEQ ID NO: 1928533 - RNA, 19 nt, Artificial Sequence
  Description of Artificial Sequence: Synthetic oligonucleotide
uggcucagaggagcccuuc

SEQ ID NO: 1928534 - RNA, 19 nt, Artificial Sequence
  Description of Artificial Sequence: Synthetic oligonucleotide
ugccauccggcugcagguc

SEQ ID NO: 1928535 - RNA, 19 nt, Artificial Sequence
  Description of Artificial Sequence: Synthetic oligonucleotide
acucggggccuggguugcc

SEQ ID NO: 1928536 - RNA, 19 nt, Artificial Sequence
  Description of Artificial Sequence: Synthetic oligonucleotide
cacuccaagucaggugaca

SEQ ID NO: 1928537 - RNA, 19 nt, Artificial Sequence
  Description of Artificial Sequence: Synthetic oligonucleotide
gacgagcuucuugcaaugu

SEQ ID NO: 1928538 - RNA, 19 nt, Artificial Sequence
  Description of Artificial Sequence: Synthetic oligonucleotide
acguuacuggauacagcua

SEQ ID NO: 1928539 - RNA, 19 nt, Artificial Sequence
  Description of Artificial Sequence: Synthetic oligonucleotide
ggagggcacugcugggcug

SEQ ID NO: 1928540 - RNA, 19 nt, Artificial Sequence
  Description of Artificial Sequence: Synthetic oligonucleotide
cagcacguuacuggauaca

SEQ ID NO: 1928541 - RNA, 19 nt, Artificial Sequence
  Description of Artificial Sequence: Synthetic oligonucleotide
ccauccggcugcagguccc

SEQ ID NO: 1928542 - RNA, 19 nt, Artificial Sequence
  Description of Artificial Sequence: Synthetic oligonucleotide
ggccucgaaggaauagcac

SEQ ID NO: 1928543 - RNA, 19 nt, Artificial Sequence
  Description of Artificial Sequence: Synthetic oligonucleotide
gccauugcuggagccuugc

SEQ ID NO: 1928544 - RNA, 19 nt, Artificial Sequence
  Description of Artificial Sequence: Synthetic oligonucleotide
ccaggcagccuuguacuug

SEQ ID NO: 1928545 - RNA, 19 nt, Artificial Sequence
  Description of Artificial Sequence: Synthetic oligonucleotide
ggaucuccuccucaacagu

SEQ ID NO: 1928546 - RNA, 19 nt, Artificial Sequence
  Description of Artificial Sequence: Synthetic oligonucleotide
ccaccagggauaggccucg

SEQ ID NO: 1928547 - RNA, 19 nt, Artificial Sequence
  Description of Artificial Sequence: Synthetic oligonucleotide
gggauaggccucgaaggaa

SEQ ID NO: 1928548 - RNA, 19 nt, Artificial Sequence
  Description of Artificial Sequence: Synthetic oligonucleotide
acugcccagcaugcaguaa

SEQ ID NO: 1928549 - RNA, 19 nt, Artificial Sequence
  Description of Artificial Sequence: Synthetic oligonucleotide
cccacgccgacuccugcag

SEQ ID NO: 1928550 - RNA, 19 nt, Artificial Sequence
  Description of Artificial Sequence: Synthetic oligonucleotide
cggguugacgagcuucuug

SEQ ID NO: 1928551 - RNA, 19 nt, Artificial Sequence
  Description of Artificial Sequence: Synthetic oligonucleotide
ggauaucauuggucaggaa

SEQ ID NO: 1928552 - RNA, 19 nt, Artificial Sequence
  Description of Artificial Sequence: Synthetic oligonucleotide
ggccggguugacgagcuuc

SEQ ID NO: 1928553 - RNA, 19 nt, Artificial Sequence
  Description of Artificial Sequence: Synthetic oligonucleotide
caucgauguccugcaggga

SEQ ID NO: 1928554 - RNA, 19 nt, Artificial Sequence
  Description of Artificial Sequence: Synthetic oligonucleotide
gcaaaggagguuacuucua

SEQ ID NO: 1928555 - RNA, 19 nt, Artificial Sequence
  Description of Artificial Sequence: Synthetic oligonucleotide
cccagcaugcaguaacgua

SEQ ID NO: 1928556 - RNA, 19 nt, Artificial Sequence
  Description of Artificial Sequence: Synthetic oligonucleotide
cuccccuuugcugguggga

SEQ ID NO: 1928557 - RNA, 19 nt, Artificial Sequence
  Description of Artificial Sequence: Synthetic oligonucleotide
agggcuaggcagggcugga

SEQ ID NO: 1928558 - RNA, 19 nt, Artificial Sequence
  Description of Artificial Sequence: Synthetic oligonucleotide
cuacguccauggggaugcc

SEQ ID NO: 1928559 - RNA, 19 nt, Artificial Sequence
  Description of Artificial Sequence: Synthetic oligonucleotide
augucccagcgaccaccaa

SEQ ID NO: 1928560 - RNA, 19 nt, Artificial Sequence
  Description of Artificial Sequence: Synthetic oligonucleotide
acccuggcaaguacaucuu

SEQ ID NO: 1928561 - RNA, 19 nt, Artificial Sequence
  Description of Artificial Sequence: Synthetic oligonucleotide
ggugacaguggaaguccaa

SEQ ID NO: 1928562 - RNA, 19 nt, Artificial Sequence
  Description of Artificial Sequence: Synthetic oligonucleotide
ggacuccaggccuccugga

SEQ ID NO: 1928563 - RNA, 19 nt, Artificial Sequence
  Description of Artificial Sequence: Synthetic oligonucleotide
cgaccaccaagguagccca

SEQ ID NO: 1928564 - RNA, 19 nt, Artificial Sequence
  Description of Artificial Sequence: Synthetic oligonucleotide
augugucgcccaggcgcug

SEQ ID NO: 1928565 - RNA, 19 nt, Artificial Sequence
  Description of Artificial Sequence: Synthetic oligonucleotide
ccacgccgacuccugcagg

SEQ ID NO: 1928566 - RNA, 19 nt, Artificial Sequence
  Description of Artificial Sequence: Synthetic oligonucleotide
caguaacguacuggcaccu

SEQ ID NO: 1928567 - RNA, 19 nt, Artificial Sequence
  Description of Artificial Sequence: Synthetic oligonucleotide
cacgacugcccagcaugca

SEQ ID NO: 1928568 - RNA, 19 nt, Artificial Sequence
  Description of Artificial Sequence: Synthetic oligonucleotide
ccacacgcuugcccagggc

SEQ ID NO: 1928569 - RNA, 19 nt, Artificial Sequence
  Description of Artificial Sequence: Synthetic oligonucleotide
cugcagggagggcacugcu

SEQ ID NO: 1928570 - RNA, 19 nt, Artificial Sequence
  Description of Artificial Sequence: Synthetic oligonucleotide
ccgacuccugcaggggaag

SEQ ID NO: 1928571 - RNA, 19 nt, Artificial Sequence
  Description of Artificial Sequence: Synthetic oligonucleotide
gccauagucacugggccuu

SEQ ID NO: 1928572 - RNA, 19 nt, Artificial Sequence
  Description of Artificial Sequence: Synthetic oligonucleotide
uggccggguugacgagcuu

SEQ ID NO: 1928573 - RNA, 19 nt, Artificial Sequence
  Description of Artificial Sequence: Synthetic oligonucleotide
auccggcugcaggucccca

SEQ ID NO: 1928574 - RNA, 19 nt, Artificial Sequence
  Description of Artificial Sequence: Synthetic oligonucleotide
cccagcgaccaccaaggua

SEQ ID NO: 1928575 - RNA, 19 nt, Artificial Sequence
  Description of Artificial Sequence: Synthetic oligonucleotide
cugugcggguggcuguggu

SEQ ID NO: 1928576 - RNA, 19 nt, Artificial Sequence
  Description of Artificial Sequence: Synthetic oligonucleotide
cagcagcuacuggcauaug

SEQ ID NO: 1928577 - RNA, 19 nt, Artificial Sequence
  Description of Artificial Sequence: Synthetic oligonucleotide
cacgcuugcccagggcugu

SEQ ID NO: 1928578 - RNA, 19 nt, Artificial Sequence
  Description of Artificial Sequence: Synthetic oligonucleotide
gccggcggagccaggcagc

SEQ ID NO: 1928579 - RNA, 19 nt, Artificial Sequence
  Description of Artificial Sequence: Synthetic oligonucleotide
ggcagcaaaggagguuacu

SEQ ID NO: 1928580 - RNA, 19 nt, Artificial Sequence
  Description of Artificial Sequence: Synthetic oligonucleotide
ccggcggagccaggcagcc

SEQ ID NO: 1928581 - RNA, 19 nt, Artificial Sequence
  Description of Artificial Sequence: Synthetic oligonucleotide
gccgacuccugcaggggaa

SEQ ID NO: 1928582 - RNA, 19 nt, Artificial Sequence
  Description of Artificial Sequence: Synthetic oligonucleotide
ccuggguugccagaauagu

SEQ ID NO: 1928583 - RNA, 19 nt, Artificial Sequence
  Description of Artificial Sequence: Synthetic oligonucleotide
gccggacuucuuggccggg

SEQ ID NO: 1928584 - RNA, 19 nt, Artificial Sequence
  Description of Artificial Sequence: Synthetic oligonucleotide
ccccacgccgacuccugca

SEQ ID NO: 1928585 - RNA, 19 nt, Artificial Sequence
  Description of Artificial Sequence: Synthetic oligonucleotide
gccggguugacgagcuucu

SEQ ID NO: 1928586 - RNA, 19 nt, Artificial Sequence
  Description of Artificial Sequence: Synthetic oligonucleotide
cguugaauggcuggaacuu

SEQ ID NO: 1928587 - RNA, 19 nt, Artificial Sequence
  Description of Artificial Sequence: Synthetic oligonucleotide
ggaagcuguccuggacaua

SEQ ID NO: 1928588 - RNA, 19 nt, Artificial Sequence
  Description of Artificial Sequence: Synthetic oligonucleotide
gcggagccaggcagccuug

SEQ ID NO: 1928589 - RNA, 19 nt, Artificial Sequence
  Description of Artificial Sequence: Synthetic oligonucleotide
ccacaaccucacuccaagu

SEQ ID NO: 1928590 - RNA, 19 nt, Artificial Sequence
  Description of Artificial Sequence: Synthetic oligonucleotide
cccagaaagggcagaucuu

SEQ ID NO: 1928591 - RNA, 19 nt, Artificial Sequence
  Description of Artificial Sequence: Synthetic oligonucleotide
ccuugcagucucagcuggu

SEQ ID NO: 1928592 - RNA, 19 nt, Artificial Sequence
  Description of Artificial Sequence: Synthetic oligonucleotide
caccagggauaggccucga

SEQ ID NO: 1928593 - RNA, 19 nt, Artificial Sequence
  Description of Artificial Sequence: Synthetic oligonucleotide
gcccagcaugcaguaacgu

SEQ ID NO: 1928594 - RNA, 19 nt, Artificial Sequence
  Description of Artificial Sequence: Synthetic oligonucleotide
cugugaccucuggcucaga

SEQ ID NO: 1928595 - RNA, 19 nt, Artificial Sequence
  Description of Artificial Sequence: Synthetic oligonucleotide
cgcugggcgaguugaagau

SEQ ID NO: 1928596 - RNA, 19 nt, Artificial Sequence
  Description of Artificial Sequence: Synthetic oligonucleotide
guacuggcaccuggaccuu

SEQ ID NO: 1928597 - RNA, 19 nt, Artificial Sequence
  Description of Artificial Sequence: Synthetic oligonucleotide
cgccgacuccugcagggga

SEQ ID NO: 1928598 - RNA, 19 nt, Artificial Sequence
  Description of Artificial Sequence: Synthetic oligonucleotide
ccaagaggaacagcacguu

SEQ ID NO: 1928599 - RNA, 19 nt, Artificial Sequence
  Description of Artificial Sequence: Synthetic oligonucleotide
gcugggcgaguugaagauu

SEQ ID NO: 1928600 - RNA, 19 nt, Artificial Sequence
  Description of Artificial Sequence: Synthetic oligonucleotide
ggcacaugcccuggccuuu

SEQ ID NO: 1928601 - RNA, 19 nt, Artificial Sequence
  Description of Artificial Sequence: Synthetic oligonucleotide
gcccagccacagccggacu

SEQ ID NO: 1928602 - RNA, 19 nt, Artificial Sequence
  Description of Artificial Sequence: Synthetic oligonucleotide
cggucagcaucugauuguu

SEQ ID NO: 1928603 - RNA, 19 nt, Artificial Sequence
  Description of Artificial Sequence: Synthetic oligonucleotide
ccggacuucuuggccgggu

SEQ ID NO: 1928604 - RNA, 19 nt, Artificial Sequence
  Description of Artificial Sequence: Synthetic oligonucleotide
cgcuugcccagggcuguga

SEQ ID NO: 1928605 - RNA, 19 nt, Artificial Sequence
  Description of Artificial Sequence: Synthetic oligonucleotide
ccggguugacgagcuucuu

SEQ ID NO: 1928606 - RNA, 19 nt, Artificial Sequence
  Description of Artificial Sequence: Synthetic oligonucleotide
cccaggcgcugggcgaguu

SEQ ID NO: 1928607 - RNA, 19 nt, Artificial Sequence
  Description of Artificial Sequence: Synthetic oligonucleotide
cccuggccuuugggguccu

SEQ ID NO: 1928608 - RNA, 19 nt, Artificial Sequence
  Description of Artificial Sequence: Synthetic oligonucleotide
aaagaaagaacccuaaacg

SEQ ID NO: 1928609 - RNA, 19 nt, Artificial Sequence
  Description of Artificial Sequence: Synthetic oligonucleotide
ucaauaauagaacucacug

SEQ ID NO: 1928610 - RNA, 19 nt, Artificial Sequence
  Description of Artificial Sequence: Synthetic oligonucleotide
aaugucagcaccuucaacu

SEQ ID NO: 1928611 - RNA, 19 nt, Artificial Sequence
  Description of Artificial Sequence: Synthetic oligonucleotide
aauauaccaaguuugagaa

SEQ ID NO: 1928612 - RNA, 19 nt, Artificial Sequence
  Description of Artificial Sequence: Synthetic oligonucleotide
aguguuuaauaauuaagac

SEQ ID NO: 1928613 - RNA, 19 nt, Artificial Sequence
  Description of Artificial Sequence: Synthetic oligonucleotide
uuaguguuuaauaauuaag

SEQ ID NO: 1928614 - RNA, 19 nt, Artificial Sequence
  Description of Artificial Sequence: Synthetic oligonucleotide
aaccaaugcuacuagaauc

SEQ ID NO: 1928615 - RNA, 19 nt, Artificial Sequence
  Description of Artificial Sequence: Synthetic oligonucleotide
aauuuuaugcagaaaccgc

SEQ ID NO: 1928616 - RNA, 19 nt, Artificial Sequence
  Description of Artificial Sequence: Synthetic oligonucleotide
uuuaaucaauaauagaacu

SEQ ID NO: 1928617 - RNA, 19 nt, Artificial Sequence
  Description of Artificial Sequence: Synthetic oligonucleotide
uuagacaguagcucgaagg

SEQ ID NO: 1928618 - RNA, 19 nt, Artificial Sequence
  Description of Artificial Sequence: Synthetic oligonucleotide
uuaggcaagaaauaguuca

SEQ ID NO: 1928619 - RNA, 19 nt, Artificial Sequence
  Description of Artificial Sequence: Synthetic oligonucleotide
gacucuauggacuauguag

SEQ ID NO: 1928620 - RNA, 19 nt, Artificial Sequence
  Description of Artificial Sequence: Synthetic oligonucleotide
aacaguaacuaccacaaga

SEQ ID NO: 1928621 - RNA, 19 nt, Artificial Sequence
  Description of Artificial Sequence: Synthetic oligonucleotide
ucacuagucaccuaacugg

SEQ ID NO: 1928622 - RNA, 19 nt, Artificial Sequence
  Description of Artificial Sequence: Synthetic oligonucleotide
ugucuuuaaucaauaauag

SEQ ID NO: 1928623 - RNA, 19 nt, Artificial Sequence
  Description of Artificial Sequence: Synthetic oligonucleotide
aaaaccagugccuccuacc

SEQ ID NO: 1928624 - RNA, 19 nt, Artificial Sequence
  Description of Artificial Sequence: Synthetic oligonucleotide
aagaauacacgcuucauaa

SEQ ID NO: 1928625 - RNA, 19 nt, Artificial Sequence
  Description of Artificial Sequence: Synthetic oligonucleotide
aguaguuaguugcagaaag

SEQ ID NO: 1928626 - RNA, 19 nt, Artificial Sequence
  Description of Artificial Sequence: Synthetic oligonucleotide
ugcuacuagaaucucaugc

SEQ ID NO: 1928627 - RNA, 19 nt, Artificial Sequence
  Description of Artificial Sequence: Synthetic oligonucleotide
ugugcaagaauuuaggcaa

SEQ ID NO: 1928628 - RNA, 19 nt, Artificial Sequence
  Description of Artificial Sequence: Synthetic oligonucleotide
uuuauuguaugaaaucacu

SEQ ID NO: 1928629 - RNA, 19 nt, Artificial Sequence
  Description of Artificial Sequence: Synthetic oligonucleotide
ucuuuaauuauucaugguu

SEQ ID NO: 1928630 - RNA, 19 nt, Artificial Sequence
  Description of Artificial Sequence: Synthetic oligonucleotide
cuuuaaucaauaauagaac

SEQ ID NO: 1928631 - RNA, 19 nt, Artificial Sequence
  Description of Artificial Sequence: Synthetic oligonucleotide
aaguuugagaaacugggga

SEQ ID NO: 1928632 - RNA, 19 nt, Artificial Sequence
  Description of Artificial Sequence: Synthetic oligonucleotide
uuaaucaauaauagaacuc

SEQ ID NO: 1928633 - RNA, 19 nt, Artificial Sequence
  Description of Artificial Sequence: Synthetic oligonucleotide
uacacaucucacaucacgg

SEQ ID NO: 1928634 - RNA, 19 nt, Artificial Sequence
  Description of Artificial Sequence: Synthetic oligonucleotide
ucaaacaguaacuaccaca

SEQ ID NO: 1928635 - RNA, 19 nt, Artificial Sequence
  Description of Artificial Sequence: Synthetic oligonucleotide
gaauauaccaaguuugaga

SEQ ID NO: 1928636 - RNA, 19 nt, Artificial Sequence
  Description of Artificial Sequence: Synthetic oligonucleotide
auuaagacaacugaccaag

SEQ ID NO: 1928637 - RNA, 19 nt, Artificial Sequence
  Description of Artificial Sequence: Synthetic oligonucleotide
uagaaucucaugcaaaacu

SEQ ID NO: 1928638 - RNA, 19 nt, Artificial Sequence
  Description of Artificial Sequence: Synthetic oligonucleotide
uagacaguagcucgaaggg

SEQ ID NO: 1928639 - RNA, 19 nt, Artificial Sequence
  Description of Artificial Sequence: Synthetic oligonucleotide
uuuggaaaaguauuucuga

SEQ ID NO: 1928640 - RNA, 19 nt, Artificial Sequence
  Description of Artificial Sequence: Synthetic oligonucleotide
ugugauaagaauacacgcu

SEQ ID NO: 1928641 - RNA, 19 nt, Artificial Sequence
  Description of Artificial Sequence: Synthetic oligonucleotide
auuucugacacucuagugu

SEQ ID NO: 1928642 - RNA, 19 nt, Artificial Sequence
  Description of Artificial Sequence: Synthetic oligonucleotide
gaauuuaggcaagaaauag

SEQ ID NO: 1928643 - RNA, 19 nt, Artificial Sequence
  Description of Artificial Sequence: Synthetic oligonucleotide
uguugggacagugacaugg

SEQ ID NO: 1928644 - RNA, 19 nt, Artificial Sequence
  Description of Artificial Sequence: Synthetic oligonucleotide
aaaguuugacaauuuuaug

SEQ ID NO: 1928645 - RNA, 19 nt, Artificial Sequence
  Description of Artificial Sequence: Synthetic oligonucleotide
uaauagaacucacugugca

SEQ ID NO: 1928646 - RNA, 19 nt, Artificial Sequence
  Description of Artificial Sequence: Synthetic oligonucleotide
acuuacuugggucuuuugg

SEQ ID NO: 1928647 - RNA, 19 nt, Artificial Sequence
  Description of Artificial Sequence: Synthetic oligonucleotide
uucccuuuuagacaguagc

SEQ ID NO: 1928648 - RNA, 19 nt, Artificial Sequence
  Description of Artificial Sequence: Synthetic oligonucleotide
aguuugacaauuuuaugca

SEQ ID NO: 1928649 - RNA, 19 nt, Artificial Sequence
  Description of Artificial Sequence: Synthetic oligonucleotide
uaccacaagaagaacagca

SEQ ID NO: 1928650 - RNA, 19 nt, Artificial Sequence
  Description of Artificial Sequence: Synthetic oligonucleotide
caauuuuaugcagaaaccg

SEQ ID NO: 1928651 - RNA, 19 nt, Artificial Sequence
  Description of Artificial Sequence: Synthetic oligonucleotide
gaugcaggggacucuaugg

SEQ ID NO: 1928652 - RNA, 19 nt, Artificial Sequence
  Description of Artificial Sequence: Synthetic oligonucleotide
acaauuuuaugcagaaacc

SEQ ID NO: 1928653 - RNA, 19 nt, Artificial Sequence
  Description of Artificial Sequence: Synthetic oligonucleotide
cugugauaagaauacacgc

SEQ ID NO: 1928654 - RNA, 19 nt, Artificial Sequence
  Description of Artificial Sequence: Synthetic oligonucleotide
cuuccaaugaucugauccg

SEQ ID NO: 1928655 - RNA, 19 nt, Artificial Sequence
  Description of Artificial Sequence: Synthetic oligonucleotide
aaacguacacaucucacau

SEQ ID NO: 1928656 - RNA, 19 nt, Artificial Sequence
  Description of Artificial Sequence: Synthetic oligonucleotide
uggauugccuuccagguca

SEQ ID NO: 1928657 - RNA, 19 nt, Artificial Sequence
  Description of Artificial Sequence: Synthetic oligonucleotide
aagaacccuaaacguacac

SEQ ID NO: 1928658 - RNA, 19 nt, Artificial Sequence
  Description of Artificial Sequence: Synthetic oligonucleotide
ucugucuuuaaucaauaau

SEQ ID NO: 1928659 - RNA, 19 nt, Artificial Sequence
  Description of Artificial Sequence: Synthetic oligonucleotide
acauggauugccuuccagg

SEQ ID NO: 1928660 - RNA, 19 nt, Artificial Sequence
  Description of Artificial Sequence: Synthetic oligonucleotide
ugcaaaacucuguuaaaug

SEQ ID NO: 1928661 - RNA, 19 nt, Artificial Sequence
  Description of Artificial Sequence: Synthetic oligonucleotide
aggcuaagccuacagacac

SEQ ID NO: 1928662 - RNA, 19 nt, Artificial Sequence
  Description of Artificial Sequence: Synthetic oligonucleotide
agucacuuugugcugaaag

SEQ ID NO: 1928663 - RNA, 19 nt, Artificial Sequence
  Description of Artificial Sequence: Synthetic oligonucleotide
agugacauggauugccuuc

SEQ ID NO: 1928664 - RNA, 19 nt, Artificial Sequence
  Description of Artificial Sequence: Synthetic oligonucleotide
gucaacacauaguaguuag

SEQ ID NO: 1928665 - RNA, 19 nt, Artificial Sequence
  Description of Artificial Sequence: Synthetic oligonucleotide
guacacaucucacaucacg

SEQ ID NO: 1928666 - RNA, 19 nt, Artificial Sequence
  Description of Artificial Sequence: Synthetic oligonucleotide
ugugcaguagcaaucuugu

SEQ ID NO: 1928667 - RNA, 19 nt, Artificial Sequence
  Description of Artificial Sequence: Synthetic oligonucleotide
uauuguaugaaaucacuuu

SEQ ID NO: 1928668 - RNA, 19 nt, Artificial Sequence
  Description of Artificial Sequence: Synthetic oligonucleotide
ugaucugaaacuugucuug

SEQ ID NO: 1928669 - RNA, 19 nt, Artificial Sequence
  Description of Artificial Sequence: Synthetic oligonucleotide
uaaacguacacaucucaca

SEQ ID NO: 1928670 - RNA, 19 nt, Artificial Sequence
  Description of Artificial Sequence: Synthetic oligonucleotide
aauguagaguuuaucuguc

SEQ ID NO: 1928671 - RNA, 19 nt, Artificial Sequence
  Description of Artificial Sequence: Synthetic oligonucleotide
cuauggacuauguaggcug

SEQ ID NO: 1928672 - RNA, 19 nt, Artificial Sequence
  Description of Artificial Sequence: Synthetic oligonucleotide
uccgacaugaucugaaacu

SEQ ID NO: 1928673 - RNA, 19 nt, Artificial Sequence
  Description of Artificial Sequence: Synthetic oligonucleotide
aguaacuaccacaagaaga

SEQ ID NO: 1928674 - RNA, 19 nt, Artificial Sequence
  Description of Artificial Sequence: Synthetic oligonucleotide
gaaagaacccuaaacguac

SEQ ID NO: 1928675 - RNA, 19 nt, Artificial Sequence
  Description of Artificial Sequence: Synthetic oligonucleotide
ucacugugcaagaauuuag

SEQ ID NO: 1928676 - RNA, 19 nt, Artificial Sequence
  Description of Artificial Sequence: Synthetic oligonucleotide
uucaacagucacuuugugc

SEQ ID NO: 1928677 - RNA, 19 nt, Artificial Sequence
  Description of Artificial Sequence: Synthetic oligonucleotide
aaccugucaacacauagua

SEQ ID NO: 1928678 - RNA, 19 nt, Artificial Sequence
  Description of Artificial Sequence: Synthetic oligonucleotide
aaagauguucuggacucgg

SEQ ID NO: 1928679 - RNA, 19 nt, Artificial Sequence
  Description of Artificial Sequence: Synthetic oligonucleotide
uguuaaauguucucggcau

SEQ ID NO: 1928680 - RNA, 19 nt, Artificial Sequence
  Description of Artificial Sequence: Synthetic oligonucleotide
ugcaguagcaaucuuguuu

SEQ ID NO: 1928681 - RNA, 19 nt, Artificial Sequence
  Description of Artificial Sequence: Synthetic oligonucleotide
agaaucucaugcaaaacuc

SEQ ID NO: 1928682 - RNA, 19 nt, Artificial Sequence
  Description of Artificial Sequence: Synthetic oligonucleotide
acguacacaucucacauca

SEQ ID NO: 1928683 - RNA, 19 nt, Artificial Sequence
  Description of Artificial Sequence: Synthetic oligonucleotide
auaauagaacucacugugc

SEQ ID NO: 1928684 - RNA, 19 nt, Artificial Sequence
  Description of Artificial Sequence: Synthetic oligonucleotide
acccuaaacguacacaucu

SEQ ID NO: 1928685 - RNA, 19 nt, Artificial Sequence
  Description of Artificial Sequence: Synthetic oligonucleotide
uuguaugaaaucacuuugu

SEQ ID NO: 1928686 - RNA, 19 nt, Artificial Sequence
  Description of Artificial Sequence: Synthetic oligonucleotide
uuggaaaaguauuucugac

SEQ ID NO: 1928687 - RNA, 19 nt, Artificial Sequence
  Description of Artificial Sequence: Synthetic oligonucleotide
ccaaguuugagaaacuggg

SEQ ID NO: 1928688 - RNA, 19 nt, Artificial Sequence
  Description of Artificial Sequence: Synthetic oligonucleotide
agacaacugaccaagaugu

SEQ ID NO: 1928689 - RNA, 19 nt, Artificial Sequence
  Description of Artificial Sequence: Synthetic oligonucleotide
uuauuguaugaaaucacuu

SEQ ID NO: 1928690 - RNA, 19 nt, Artificial Sequence
  Description of Artificial Sequence: Synthetic oligonucleotide
aauuuaggcaagaaauagu

SEQ ID NO: 1928691 - RNA, 19 nt, Artificial Sequence
  Description of Artificial Sequence: Synthetic oligonucleotide
gaaaccgccaaaguuuuag

SEQ ID NO: 1928692 - RNA, 19 nt, Artificial Sequence
  Description of Artificial Sequence: Synthetic oligonucleotide
guagcaaucuuguuuuccc

SEQ ID NO: 1928693 - RNA, 19 nt, Artificial Sequence
  Description of Artificial Sequence: Synthetic oligonucleotide
acucuauggacuauguagg

SEQ ID NO: 1928694 - RNA, 19 nt, Artificial Sequence
  Description of Artificial Sequence: Synthetic oligonucleotide
aaccgccaaaguuuuagug

SEQ ID NO: 1928695 - RNA, 19 nt, Artificial Sequence
  Description of Artificial Sequence: Synthetic oligonucleotide
aacugggaaguacucuguc

SEQ ID NO: 1928696 - RNA, 19 nt, Artificial Sequence
  Description of Artificial Sequence: Synthetic oligonucleotide
aacuaccacaagaagaaca

SEQ ID NO: 1928697 - RNA, 19 nt, Artificial Sequence
  Description of Artificial Sequence: Synthetic oligonucleotide
ucgucaaugcgacugcuca

SEQ ID NO: 1928698 - RNA, 19 nt, Artificial Sequence
  Description of Artificial Sequence: Synthetic oligonucleotide
cugcucaugucaucgaucc

SEQ ID NO: 1928699 - RNA, 19 nt, Artificial Sequence
  Description of Artificial Sequence: Synthetic oligonucleotide
aaugcuacuagaaucucau

SEQ ID NO: 1928700 - RNA, 19 nt, Artificial Sequence
  Description of Artificial Sequence: Synthetic oligonucleotide
ucuccagaucgucaaugcg

SEQ ID NO: 1928701 - RNA, 19 nt, Artificial Sequence
  Description of Artificial Sequence: Synthetic oligonucleotide
uuuaauuauucaugguuuu

SEQ ID NO: 1928702 - RNA, 19 nt, Artificial Sequence
  Description of Artificial Sequence: Synthetic oligonucleotide
agaucgucaaugcgacugc

SEQ ID NO: 1928703 - RNA, 19 nt, Artificial Sequence
  Description of Artificial Sequence: Synthetic oligonucleotide
cuaaacguacacaucucac

SEQ ID NO: 1928704 - RNA, 19 nt, Artificial Sequence
  Description of Artificial Sequence: Synthetic oligonucleotide
caguucaacagucacuuug

SEQ ID NO: 1928705 - RNA, 19 nt, Artificial Sequence
  Description of Artificial Sequence: Synthetic oligonucleotide
aagccaguugguuuucucu

SEQ ID NO: 1928706 - RNA, 19 nt, Artificial Sequence
  Description of Artificial Sequence: Synthetic oligonucleotide
ugcagaaaccgccaaaguu

SEQ ID NO: 1928707 - RNA, 19 nt, Artificial Sequence
  Description of Artificial Sequence: Synthetic oligonucleotide
auccgacaugaucugaaac

SEQ ID NO: 1928708 - RNA, 19 nt, Artificial Sequence
  Description of Artificial Sequence: Synthetic oligonucleotide
ugcaagagcgucuccacca

SEQ ID NO: 1928709 - RNA, 19 nt, Artificial Sequence
  Description of Artificial Sequence: Synthetic oligonucleotide
ugcagugaacuuacuuggg

SEQ ID NO: 1928710 - RNA, 19 nt, Artificial Sequence
  Description of Artificial Sequence: Synthetic oligonucleotide
uuuaggcaagaaauaguuc

SEQ ID NO: 1928711 - RNA, 19 nt, Artificial Sequence
  Description of Artificial Sequence: Synthetic oligonucleotide
uguaggcccaaccaaugcu

SEQ ID NO: 1928712 - RNA, 19 nt, Artificial Sequence
  Description of Artificial Sequence: Synthetic oligonucleotide
agccaugugaccugcagug

SEQ ID NO: 1928713 - RNA, 19 nt, Artificial Sequence
  Description of Artificial Sequence: Synthetic oligonucleotide
gucacuagucaccuaacug

SEQ ID NO: 1928714 - RNA, 19 nt, Artificial Sequence
  Description of Artificial Sequence: Synthetic oligonucleotide
ucccuuuuagacaguagcu

SEQ ID NO: 1928715 - RNA, 19 nt, Artificial Sequence
  Description of Artificial Sequence: Synthetic oligonucleotide
cacuagucaccuaacuggg

SEQ ID NO: 1928716 - RNA, 19 nt, Artificial Sequence
  Description of Artificial Sequence: Synthetic oligonucleotide
ugauaagaauacacgcuuc

SEQ ID NO: 1928717 - RNA, 19 nt, Artificial Sequence
  Description of Artificial Sequence: Synthetic oligonucleotide
uccagaucgucaaugcgac

SEQ ID NO: 1928718 - RNA, 19 nt, Artificial Sequence
  Description of Artificial Sequence: Synthetic oligonucleotide
guaacuaccacaagaagaa

SEQ ID NO: 1928719 - RNA, 19 nt, Artificial Sequence
  Description of Artificial Sequence: Synthetic oligonucleotide
accgccaaaguuuuagugu

SEQ ID NO: 1928720 - RNA, 19 nt, Artificial Sequence
  Description of Artificial Sequence: Synthetic oligonucleotide
ccuuuuagacaguagcucg

SEQ ID NO: 1928721 - RNA, 19 nt, Artificial Sequence
  Description of Artificial Sequence: Synthetic oligonucleotide
caggucauuaaaaguggcc

SEQ ID NO: 1928722 - RNA, 19 nt, Artificial Sequence
  Description of Artificial Sequence: Synthetic oligonucleotide
ucggcauuuggaaaaguau

SEQ ID NO: 1928723 - RNA, 19 nt, Artificial Sequence
  Description of Artificial Sequence: Synthetic oligonucleotide
augugaauauaccaaguuu

SEQ ID NO: 1928724 - RNA, 19 nt, Artificial Sequence
  Description of Artificial Sequence: Synthetic oligonucleotide
uuggucucuucccuuuuag

SEQ ID NO: 1928725 - RNA, 19 nt, Artificial Sequence
  Description of Artificial Sequence: Synthetic oligonucleotide
uucuuuaauuauucauggu

SEQ ID NO: 1928726 - RNA, 19 nt, Artificial Sequence
  Description of Artificial Sequence: Synthetic oligonucleotide
aggucauuaaaaguggccu

SEQ ID NO: 1928727 - RNA, 19 nt, Artificial Sequence
  Description of Artificial Sequence: Synthetic oligonucleotide
aacagcaggaaaggacuuc

SEQ ID NO: 1928728 - RNA, 19 nt, Artificial Sequence
  Description of Artificial Sequence: Synthetic oligonucleotide
auuuaggcaagaaauaguu

SEQ ID NO: 1928729 - RNA, 19 nt, Artificial Sequence
  Description of Artificial Sequence: Synthetic oligonucleotide
agauguucuggacucggug

SEQ ID NO: 1928730 - RNA, 19 nt, Artificial Sequence
  Description of Artificial Sequence: Synthetic oligonucleotide
aaaccugucaacacauagu

SEQ ID NO: 1928731 - RNA, 19 nt, Artificial Sequence
  Description of Artificial Sequence: Synthetic oligonucleotide
ucucaugcaaaacucuguu

SEQ ID NO: 1928732 - RNA, 19 nt, Artificial Sequence
  Description of Artificial Sequence: Synthetic oligonucleotide
uuuaugcagaaaccgccaa

SEQ ID NO: 1928733 - RNA, 19 nt, Artificial Sequence
  Description of Artificial Sequence: Synthetic oligonucleotide
accaaguuugagaaacugg

SEQ ID NO: 1928734 - RNA, 19 nt, Artificial Sequence
  Description of Artificial Sequence: Synthetic oligonucleotide
cugugcaagaauuuaggca

SEQ ID NO: 1928735 - RNA, 19 nt, Artificial Sequence
  Description of Artificial Sequence: Synthetic oligonucleotide
aguucaaguaaaauaguau

SEQ ID NO: 1928736 - RNA, 19 nt, Artificial Sequence
  Description of Artificial Sequence: Synthetic oligonucleotide
ugauccgacaugaucugaa

SEQ ID NO: 1928737 - RNA, 19 nt, Artificial Sequence
  Description of Artificial Sequence: Synthetic oligonucleotide
acacucuagugucaguuca

SEQ ID NO: 1928738 - RNA, 19 nt, Artificial Sequence
  Description of Artificial Sequence: Synthetic oligonucleotide
uuacuugggucuuuugguc

SEQ ID NO: 1928739 - RNA, 19 nt, Artificial Sequence
  Description of Artificial Sequence: Synthetic oligonucleotide
ucugccaaggggaggaguc

SEQ ID NO: 1928740 - RNA, 19 nt, Artificial Sequence
  Description of Artificial Sequence: Synthetic oligonucleotide
ucugauccgacaugaucug

SEQ ID NO: 1928741 - RNA, 19 nt, Artificial Sequence
  Description of Artificial Sequence: Synthetic oligonucleotide
cucuauggacuauguaggc

SEQ ID NO: 1928742 - RNA, 19 nt, Artificial Sequence
  Description of Artificial Sequence: Synthetic oligonucleotide
aaaccgccaaaguuuuagu

SEQ ID NO: 1928743 - RNA, 19 nt, Artificial Sequence
  Description of Artificial Sequence: Synthetic oligonucleotide
aguagcucgaagggaggcc

SEQ ID NO: 1928744 - RNA, 19 nt, Artificial Sequence
  Description of Artificial Sequence: Synthetic oligonucleotide
cugaaacuugucuugcauc

SEQ ID NO: 1928745 - RNA, 19 nt, Artificial Sequence
  Description of Artificial Sequence: Synthetic oligonucleotide
cagaucgucaaugcgacug

SEQ ID NO: 1928746 - RNA, 19 nt, Artificial Sequence
  Description of Artificial Sequence: Synthetic oligonucleotide
aucaauaauagaacucacu

SEQ ID NO: 1928747 - RNA, 19 nt, Artificial Sequence
  Description of Artificial Sequence: Synthetic oligonucleotide
uuaugcagaaaccgccaaa

SEQ ID NO: 1928748 - RNA, 19 nt, Artificial Sequence
  Description of Artificial Sequence: Synthetic oligonucleotide
gaccaagaugugaauauac

SEQ ID NO: 1928749 - RNA, 19 nt, Artificial Sequence
  Description of Artificial Sequence: Synthetic oligonucleotide
uagucaccuaacugggaag

SEQ ID NO: 1928750 - RNA, 19 nt, Artificial Sequence
  Description of Artificial Sequence: Synthetic oligonucleotide
uccgucucggccaucuccc

SEQ ID NO: 1928751 - RNA, 19 nt, Artificial Sequence
  Description of Artificial Sequence: Synthetic oligonucleotide
uagcaaucuuguuuucccc

SEQ ID NO: 1928752 - RNA, 19 nt, Artificial Sequence
  Description of Artificial Sequence: Synthetic oligonucleotide
cauuaaaaguggccuggag

SEQ ID NO: 1928753 - RNA, 19 nt, Artificial Sequence
  Description of Artificial Sequence: Synthetic oligonucleotide
ucuauggacuauguaggcu

SEQ ID NO: 1928754 - RNA, 19 nt, Artificial Sequence
  Description of Artificial Sequence: Synthetic oligonucleotide
uaccaaguuugagaaacug

SEQ ID NO: 1928755 - RNA, 19 nt, Artificial Sequence
  Description of Artificial Sequence: Synthetic oligonucleotide
acaacugaccaagauguga

SEQ ID NO: 1928756 - RNA, 19 nt, Artificial Sequence
  Description of Artificial Sequence: Synthetic oligonucleotide
ucgaagggaggccaggguc

SEQ ID NO: 1928757 - RNA, 19 nt, Artificial Sequence
  Description of Artificial Sequence: Synthetic oligonucleotide
auggauugccuuccagguc

SEQ ID NO: 1928758 - RNA, 19 nt, Artificial Sequence
  Description of Artificial Sequence: Synthetic oligonucleotide
cagugaacuuacuuggguc

SEQ ID NO: 1928759 - RNA, 19 nt, Artificial Sequence
  Description of Artificial Sequence: Synthetic oligonucleotide
agggucacuggguucugac

SEQ ID NO: 1928760 - RNA, 19 nt, Artificial Sequence
  Description of Artificial Sequence: Synthetic oligonucleotide
cauaguaguuaguugcaga

SEQ ID NO: 1928761 - RNA, 19 nt, Artificial Sequence
  Description of Artificial Sequence: Synthetic oligonucleotide
gucacuuugugcugaaaga

SEQ ID NO: 1928762 - RNA, 19 nt, Artificial Sequence
  Description of Artificial Sequence: Synthetic oligonucleotide
augucaucgauccuuccaa

SEQ ID NO: 1928763 - RNA, 19 nt, Artificial Sequence
  Description of Artificial Sequence: Synthetic oligonucleotide
uguucucggcauuuggaaa

SEQ ID NO: 1928764 - RNA, 19 nt, Artificial Sequence
  Description of Artificial Sequence: Synthetic oligonucleotide
uuaaauguucucggcauuu

SEQ ID NO: 1928765 - RNA, 19 nt, Artificial Sequence
  Description of Artificial Sequence: Synthetic oligonucleotide
aacuuacuugggucuuuug

SEQ ID NO: 1928766 - RNA, 19 nt, Artificial Sequence
  Description of Artificial Sequence: Synthetic oligonucleotide
agucacuagucaccuaacu

SEQ ID NO: 1928767 - RNA, 19 nt, Artificial Sequence
  Description of Artificial Sequence: Synthetic oligonucleotide
uaacugggaaguacucugu

SEQ ID NO: 1928768 - RNA, 19 nt, Artificial Sequence
  Description of Artificial Sequence: Synthetic oligonucleotide
acucuagugucaguucaac

SEQ ID NO: 1928769 - RNA, 19 nt, Artificial Sequence
  Description of Artificial Sequence: Synthetic oligonucleotide
uccaaugaucugauccgac

SEQ ID NO: 1928770 - RNA, 19 nt, Artificial Sequence
  Description of Artificial Sequence: Synthetic oligonucleotide
augucaucaaacaguaacu

SEQ ID NO: 1928771 - RNA, 19 nt, Artificial Sequence
  Description of Artificial Sequence: Synthetic oligonucleotide
ccugcagugaacuuacuug

SEQ ID NO: 1928772 - RNA, 19 nt, Artificial Sequence
  Description of Artificial Sequence: Synthetic oligonucleotide
uaaauguucucggcauuug

SEQ ID NO: 1928773 - RNA, 19 nt, Artificial Sequence
  Description of Artificial Sequence: Synthetic oligonucleotide
aacccuaaacguacacauc

SEQ ID NO: 1928774 - RNA, 19 nt, Artificial Sequence
  Description of Artificial Sequence: Synthetic oligonucleotide
caguaacuaccacaagaag

SEQ ID NO: 1928775 - RNA, 19 nt, Artificial Sequence
  Description of Artificial Sequence: Synthetic oligonucleotide
uagaguuuaucugucuuua

SEQ ID NO: 1928776 - RNA, 19 nt, Artificial Sequence
  Description of Artificial Sequence: Synthetic oligonucleotide
guaguuaguugcagaaagc

SEQ ID NO: 1928777 - RNA, 19 nt, Artificial Sequence
  Description of Artificial Sequence: Synthetic oligonucleotide
cuccagaucgucaaugcga

SEQ ID NO: 1928778 - RNA, 19 nt, Artificial Sequence
  Description of Artificial Sequence: Synthetic oligonucleotide
cuguuaaauguucucggca

SEQ ID NO: 1928779 - RNA, 19 nt, Artificial Sequence
  Description of Artificial Sequence: Synthetic oligonucleotide
acauaguaguuaguugcag

SEQ ID NO: 1928780 - RNA, 19 nt, Artificial Sequence
  Description of Artificial Sequence: Synthetic oligonucleotide
auguucucggcauuuggaa

SEQ ID NO: 1928781 - RNA, 19 nt, Artificial Sequence
  Description of Artificial Sequence: Synthetic oligonucleotide
caaucuuguuuuccccucc

SEQ ID NO: 1928782 - RNA, 19 nt, Artificial Sequence
  Description of Artificial Sequence: Synthetic oligonucleotide
cucggugugaaugucagca

SEQ ID NO: 1928783 - RNA, 19 nt, Artificial Sequence
  Description of Artificial Sequence: Synthetic oligonucleotide
ccuccuaccagccacuggg

SEQ ID NO: 1928784 - RNA, 19 nt, Artificial Sequence
  Description of Artificial Sequence: Synthetic oligonucleotide
gcuacuagaaucucaugca

SEQ ID NO: 1928785 - RNA, 19 nt, Artificial Sequence
  Description of Artificial Sequence: Synthetic oligonucleotide
agaaagaacccuaaacgua

SEQ ID NO: 1928786 - RNA, 19 nt, Artificial Sequence
  Description of Artificial Sequence: Synthetic oligonucleotide
agaauuuaggcaagaaaua

SEQ ID NO: 1928787 - RNA, 19 nt, Artificial Sequence
  Description of Artificial Sequence: Synthetic oligonucleotide
cucacaucacggcuucugc

SEQ ID NO: 1928788 - RNA, 19 nt, Artificial Sequence
  Description of Artificial Sequence: Synthetic oligonucleotide
acacgcuucauaaaccugu

SEQ ID NO: 1928789 - RNA, 19 nt, Artificial Sequence
  Description of Artificial Sequence: Synthetic oligonucleotide
ucucacaucacggcuucug

SEQ ID NO: 1928790 - RNA, 19 nt, Artificial Sequence
  Description of Artificial Sequence: Synthetic oligonucleotide
cuuuuagacaguagcucga

SEQ ID NO: 1928791 - RNA, 19 nt, Artificial Sequence
  Description of Artificial Sequence: Synthetic oligonucleotide
aagagcgucuccaccacca

SEQ ID NO: 1928792 - RNA, 19 nt, Artificial Sequence
  Description of Artificial Sequence: Synthetic oligonucleotide
augcaaaacucuguuaaau

SEQ ID NO: 1928793 - RNA, 19 nt, Artificial Sequence
  Description of Artificial Sequence: Synthetic oligonucleotide
uuuuagacaguagcucgaa

SEQ ID NO: 1928794 - RNA, 19 nt, Artificial Sequence
  Description of Artificial Sequence: Synthetic oligonucleotide
ucacuuuguugggacagug

SEQ ID NO: 1928795 - RNA, 19 nt, Artificial Sequence
  Description of Artificial Sequence: Synthetic oligonucleotide
cauccugccagaugagcac

SEQ ID NO: 1928796 - RNA, 19 nt, Artificial Sequence
  Description of Artificial Sequence: Synthetic oligonucleotide
agaauacacgcuucauaaa

SEQ ID NO: 1928797 - RNA, 19 nt, Artificial Sequence
  Description of Artificial Sequence: Synthetic oligonucleotide
auguagaguuuaucugucu

SEQ ID NO: 1928798 - RNA, 19 nt, Artificial Sequence
  Description of Artificial Sequence: Synthetic oligonucleotide
agaacccuaaacguacaca

SEQ ID NO: 1928799 - RNA, 19 nt, Artificial Sequence
  Description of Artificial Sequence: Synthetic oligonucleotide
ucauuaaaaguggccugga

SEQ ID NO: 1928800 - RNA, 19 nt, Artificial Sequence
  Description of Artificial Sequence: Synthetic oligonucleotide
aauuccaaauguagaguuu

SEQ ID NO: 1928801 - RNA, 19 nt, Artificial Sequence
  Description of Artificial Sequence: Synthetic oligonucleotide
cuuacuugggucuuuuggu

SEQ ID NO: 1928802 - RNA, 19 nt, Artificial Sequence
  Description of Artificial Sequence: Synthetic oligonucleotide
guucucggcauuuggaaaa

SEQ ID NO: 1928803 - RNA, 19 nt, Artificial Sequence
  Description of Artificial Sequence: Synthetic oligonucleotide
cuauguaggcugugauaag

SEQ ID NO: 1928804 - RNA, 19 nt, Artificial Sequence
  Description of Artificial Sequence: Synthetic oligonucleotide
aaagaacccuaaacguaca

SEQ ID NO: 1928805 - RNA, 19 nt, Artificial Sequence
  Description of Artificial Sequence: Synthetic oligonucleotide
uggacuauguaggcuguga

SEQ ID NO: 1928806 - RNA, 19 nt, Artificial Sequence
  Description of Artificial Sequence: Synthetic oligonucleotide
caacugaccaagaugugaa

SEQ ID NO: 1928807 - RNA, 19 nt, Artificial Sequence
  Description of Artificial Sequence: Synthetic oligonucleotide
agcaggaaaggacuucaaa

SEQ ID NO: 1928808 - RNA, 19 nt, Artificial Sequence
  Description of Artificial Sequence: Synthetic oligonucleotide
cuguaggcccaaccaaugc

SEQ ID NO: 1928809 - RNA, 19 nt, Artificial Sequence
  Description of Artificial Sequence: Synthetic oligonucleotide
caugugaccugcagugaac

SEQ ID NO: 1928810 - RNA, 19 nt, Artificial Sequence
  Description of Artificial Sequence: Synthetic oligonucleotide
agaugugaauauaccaagu

SEQ ID NO: 1928811 - RNA, 19 nt, Artificial Sequence
  Description of Artificial Sequence: Synthetic oligonucleotide
cuagucaccuaacugggaa

SEQ ID NO: 1928812 - RNA, 19 nt, Artificial Sequence
  Description of Artificial Sequence: Synthetic oligonucleotide
ugcaagaauuuaggcaaga

SEQ ID NO: 1928813 - RNA, 19 nt, Artificial Sequence
  Description of Artificial Sequence: Synthetic oligonucleotide
cuucccuuuuagacaguag

SEQ ID NO: 1928814 - RNA, 19 nt, Artificial Sequence
  Description of Artificial Sequence: Synthetic oligonucleotide
gugaauauaccaaguuuga

SEQ ID NO: 1928815 - RNA, 19 nt, Artificial Sequence
  Description of Artificial Sequence: Synthetic oligonucleotide
ugcugcaagagcgucucca

SEQ ID NO: 1928816 - RNA, 19 nt, Artificial Sequence
  Description of Artificial Sequence: Synthetic oligonucleotide
cucaugucaucgauccuuc

SEQ ID NO: 1928817 - RNA, 19 nt, Artificial Sequence
  Description of Artificial Sequence: Synthetic oligonucleotide
ugacauccugccagaugag

SEQ ID NO: 1928818 - RNA, 19 nt, Artificial Sequence
  Description of Artificial Sequence: Synthetic oligonucleotide
acugcucaugucaucgauc

SEQ ID NO: 1928819 - RNA, 19 nt, Artificial Sequence
  Description of Artificial Sequence: Synthetic oligonucleotide
caaugcuacuagaaucuca

SEQ ID NO: 1928820 - RNA, 19 nt, Artificial Sequence
  Description of Artificial Sequence: Synthetic oligonucleotide
agucaccuaacugggaagu

SEQ ID NO: 1928821 - RNA, 19 nt, Artificial Sequence
  Description of Artificial Sequence: Synthetic oligonucleotide
cacauaguaguuaguugca

SEQ ID NO: 1928822 - RNA, 19 nt, Artificial Sequence
  Description of Artificial Sequence: Synthetic oligonucleotide
uuccaaugaucugauccga

SEQ ID NO: 1928823 - RNA, 19 nt, Artificial Sequence
  Description of Artificial Sequence: Synthetic oligonucleotide
ugucaacacauaguaguua

SEQ ID NO: 1928824 - RNA, 19 nt, Artificial Sequence
  Description of Artificial Sequence: Synthetic oligonucleotide
augcaggggacucuaugga

SEQ ID NO: 1928825 - RNA, 19 nt, Artificial Sequence
  Description of Artificial Sequence: Synthetic oligonucleotide
cugaaagaaagaacccuaa

SEQ ID NO: 1928826 - RNA, 19 nt, Artificial Sequence
  Description of Artificial Sequence: Synthetic oligonucleotide
aucugucuuuaaucaauaa

SEQ ID NO: 1928827 - RNA, 19 nt, Artificial Sequence
  Description of Artificial Sequence: Synthetic oligonucleotide
guaggcugugauaagaaua

SEQ ID NO: 1928828 - RNA, 19 nt, Artificial Sequence
  Description of Artificial Sequence: Synthetic oligonucleotide
gagcacuguaggcccaacc

SEQ ID NO: 1928829 - RNA, 19 nt, Artificial Sequence
  Description of Artificial Sequence: Synthetic oligonucleotide
gcaaaacucuguuaaaugu

SEQ ID NO: 1928830 - RNA, 19 nt, Artificial Sequence
  Description of Artificial Sequence: Synthetic oligonucleotide
gaagaacagcaggaaagga

SEQ ID NO: 1928831 - RNA, 19 nt, Artificial Sequence
  Description of Artificial Sequence: Synthetic oligonucleotide
cacaucacggcuucugcca

SEQ ID NO: 1928832 - RNA, 19 nt, Artificial Sequence
  Description of Artificial Sequence: Synthetic oligonucleotide
ggagucacuagucaccuaa

SEQ ID NO: 1928833 - RNA, 19 nt, Artificial Sequence
  Description of Artificial Sequence: Synthetic oligonucleotide
auauaccaaguuugagaaa

SEQ ID NO: 1928834 - RNA, 19 nt, Artificial Sequence
  Description of Artificial Sequence: Synthetic oligonucleotide
aagccuacagacacuggaa

SEQ ID NO: 1928835 - RNA, 19 nt, Artificial Sequence
  Description of Artificial Sequence: Synthetic oligonucleotide
cuacuagaaucucaugcaa

SEQ ID NO: 1928836 - RNA, 19 nt, Artificial Sequence
  Description of Artificial Sequence: Synthetic oligonucleotide
ucggugugaaugucagcac

SEQ ID NO: 1928837 - RNA, 19 nt, Artificial Sequence
  Description of Artificial Sequence: Synthetic oligonucleotide
augcagaaaccgccaaagu

SEQ ID NO: 1928838 - RNA, 19 nt, Artificial Sequence
  Description of Artificial Sequence: Synthetic oligonucleotide
accaccaaggugauguccu

SEQ ID NO: 1928839 - RNA, 19 nt, Artificial Sequence
  Description of Artificial Sequence: Synthetic oligonucleotide
guccgucucggccaucucc

SEQ ID NO: 1928840 - RNA, 19 nt, Artificial Sequence
  Description of Artificial Sequence: Synthetic oligonucleotide
ugcauggucuugggguccg

SEQ ID NO: 1928841 - RNA, 19 nt, Artificial Sequence
  Description of Artificial Sequence: Synthetic oligonucleotide
cuuggcggcgaugucucgg

SEQ ID NO: 1928842 - RNA, 19 nt, Artificial Sequence
  Description of Artificial Sequence: Synthetic oligonucleotide
caaggggaggagucacuag

SEQ ID NO: 1928843 - RNA, 19 nt, Artificial Sequence
  Description of Artificial Sequence: Synthetic oligonucleotide
gcgacugcucaugucaucg

SEQ ID NO: 1928844 - RNA, 19 nt, Artificial Sequence
  Description of Artificial Sequence: Synthetic oligonucleotide
accugcagugaacuuacuu

SEQ ID NO: 1928845 - RNA, 19 nt, Artificial Sequence
  Description of Artificial Sequence: Synthetic oligonucleotide
agccaguugguuuucucuu

SEQ ID NO: 1928846 - RNA, 19 nt, Artificial Sequence
  Description of Artificial Sequence: Synthetic oligonucleotide
caacagucacuuugugcug

SEQ ID NO: 1928847 - RNA, 19 nt, Artificial Sequence
  Description of Artificial Sequence: Synthetic oligonucleotide
cauggauugccuuccaggu

SEQ ID NO: 1928848 - RNA, 19 nt, Artificial Sequence
  Description of Artificial Sequence: Synthetic oligonucleotide
gcuaagccuacagacacug

SEQ ID NO: 1928849 - RNA, 19 nt, Artificial Sequence
  Description of Artificial Sequence: Synthetic oligonucleotide
cugcaagagcgucuccacc

SEQ ID NO: 1928850 - RNA, 19 nt, Artificial Sequence
  Description of Artificial Sequence: Synthetic oligonucleotide
uaacuaccacaagaagaac

SEQ ID NO: 1928851 - RNA, 19 nt, Artificial Sequence
  Description of Artificial Sequence: Synthetic oligonucleotide
gaaucucaugcaaaacucu

SEQ ID NO: 1928852 - RNA, 19 nt, Artificial Sequence
  Description of Artificial Sequence: Synthetic oligonucleotide
augcuacuagaaucucaug

SEQ ID NO: 1928853 - RNA, 19 nt, Artificial Sequence
  Description of Artificial Sequence: Synthetic oligonucleotide
acuguaggcccaaccaaug

SEQ ID NO: 1928854 - RNA, 19 nt, Artificial Sequence
  Description of Artificial Sequence: Synthetic oligonucleotide
ggaggagucacuagucacc

SEQ ID NO: 1928855 - RNA, 19 nt, Artificial Sequence
  Description of Artificial Sequence: Synthetic oligonucleotide
ugaccaagaugugaauaua

SEQ ID NO: 1928856 - RNA, 19 nt, Artificial Sequence
  Description of Artificial Sequence: Synthetic oligonucleotide
gauccgacaugaucugaaa

SEQ ID NO: 1928857 - RNA, 19 nt, Artificial Sequence
  Description of Artificial Sequence: Synthetic oligonucleotide
accuaacugggaaguacuc

SEQ ID NO: 1928858 - RNA, 19 nt, Artificial Sequence
  Description of Artificial Sequence: Synthetic oligonucleotide
augugaccugcagugaacu

SEQ ID NO: 1928859 - RNA, 19 nt, Artificial Sequence
  Description of Artificial Sequence: Synthetic oligonucleotide
cucuagugucaguucaaca

SEQ ID NO: 1928860 - RNA, 19 nt, Artificial Sequence
  Description of Artificial Sequence: Synthetic oligonucleotide
aagauguucuggacucggu

SEQ ID NO: 1928861 - RNA, 19 nt, Artificial Sequence
  Description of Artificial Sequence: Synthetic oligonucleotide
cuuguuuuccccuccaguu

SEQ ID NO: 1928862 - RNA, 19 nt, Artificial Sequence
  Description of Artificial Sequence: Synthetic oligonucleotide
uuggcggcgaugucucgga

SEQ ID NO: 1928863 - RNA, 19 nt, Artificial Sequence
  Description of Artificial Sequence: Synthetic oligonucleotide
acuuuucugugcaguagca

SEQ ID NO: 1928864 - RNA, 19 nt, Artificial Sequence
  Description of Artificial Sequence: Synthetic oligonucleotide
uguucuggacucgguguga

SEQ ID NO: 1928865 - RNA, 19 nt, Artificial Sequence
  Description of Artificial Sequence: Synthetic oligonucleotide
aucgucaaugcgacugcuc

SEQ ID NO: 1928866 - RNA, 19 nt, Artificial Sequence
  Description of Artificial Sequence: Synthetic oligonucleotide
cugggucaugaggucagcg

SEQ ID NO: 1928867 - RNA, 19 nt, Artificial Sequence
  Description of Artificial Sequence: Synthetic oligonucleotide
gcggcgaugucucggaacc

SEQ ID NO: 1928868 - RNA, 19 nt, Artificial Sequence
  Description of Artificial Sequence: Synthetic oligonucleotide
cuagugucaguucaacagu

SEQ ID NO: 1928869 - RNA, 19 nt, Artificial Sequence
  Description of Artificial Sequence: Synthetic oligonucleotide
cucggcauuuggaaaagua

SEQ ID NO: 1928870 - RNA, 19 nt, Artificial Sequence
  Description of Artificial Sequence: Synthetic oligonucleotide
caccuucaacuuuucugug

SEQ ID NO: 1928871 - RNA, 19 nt, Artificial Sequence
  Description of Artificial Sequence: Synthetic oligonucleotide
acagugacauggauugccu

SEQ ID NO: 1928872 - RNA, 19 nt, Artificial Sequence
  Description of Artificial Sequence: Synthetic oligonucleotide
gggaggagucacuagucac

SEQ ID NO: 1928873 - RNA, 19 nt, Artificial Sequence
  Description of Artificial Sequence: Synthetic oligonucleotide
caguagcucgaagggaggc

SEQ ID NO: 1928874 - RNA, 19 nt, Artificial Sequence
  Description of Artificial Sequence: Synthetic oligonucleotide
ggaugcaggggacucuaug

SEQ ID NO: 1928875 - RNA, 19 nt, Artificial Sequence
  Description of Artificial Sequence: Synthetic oligonucleotide
ccaggucauuaaaaguggc

SEQ ID NO: 1928876 - RNA, 19 nt, Artificial Sequence
  Description of Artificial Sequence: Synthetic oligonucleotide
guacucugucaugucauca

SEQ ID NO: 1928877 - RNA, 19 nt, Artificial Sequence
  Description of Artificial Sequence: Synthetic oligonucleotide
ggucuugggguccgucucg

SEQ ID NO: 1928878 - RNA, 19 nt, Artificial Sequence
  Description of Artificial Sequence: Synthetic oligonucleotide
guagcucgaagggaggcca

SEQ ID NO: 1928879 - RNA, 19 nt, Artificial Sequence
  Description of Artificial Sequence: Synthetic oligonucleotide
ugcucaugucaucgauccu

SEQ ID NO: 1928880 - RNA, 19 nt, Artificial Sequence
  Description of Artificial Sequence: Synthetic oligonucleotide
gccacugggcauuucucag

SEQ ID NO: 1928881 - RNA, 19 nt, Artificial Sequence
  Description of Artificial Sequence: Synthetic oligonucleotide
agaacucacugugcaagaa

SEQ ID NO: 1928882 - RNA, 19 nt, Artificial Sequence
  Description of Artificial Sequence: Synthetic oligonucleotide
guagaguuuaucugucuuu

SEQ ID NO: 1928883 - RNA, 19 nt, Artificial Sequence
  Description of Artificial Sequence: Synthetic oligonucleotide
cacuuuguugggacaguga

SEQ ID NO: 1928884 - RNA, 19 nt, Artificial Sequence
  Description of Artificial Sequence: Synthetic oligonucleotide
auaccaaguuugagaaacu

SEQ ID NO: 1928885 - RNA, 19 nt, Artificial Sequence
  Description of Artificial Sequence: Synthetic oligonucleotide
auguaggcugugauaagaa

SEQ ID NO: 1928886 - RNA, 19 nt, Artificial Sequence
  Description of Artificial Sequence: Synthetic oligonucleotide
caucacggcuucugccaag

SEQ ID NO: 1928887 - RNA, 19 nt, Artificial Sequence
  Description of Artificial Sequence: Synthetic oligonucleotide
gagucacuagucaccuaac

SEQ ID NO: 1928888 - RNA, 19 nt, Artificial Sequence
  Description of Artificial Sequence: Synthetic oligonucleotide
ugccaaggggaggagucac

SEQ ID NO: 1928889 - RNA, 19 nt, Artificial Sequence
  Description of Artificial Sequence: Synthetic oligonucleotide
ugaacuuacuugggucuuu

SEQ ID NO: 1928890 - RNA, 19 nt, Artificial Sequence
  Description of Artificial Sequence: Synthetic oligonucleotide
caaugaucugauccgacau

SEQ ID NO: 1928891 - RNA, 19 nt, Artificial Sequence
  Description of Artificial Sequence: Synthetic oligonucleotide
ugugaccugcagugaacuu

SEQ ID NO: 1928892 - RNA, 19 nt, Artificial Sequence
  Description of Artificial Sequence: Synthetic oligonucleotide
ccuaaacguacacaucuca

SEQ ID NO: 1928893 - RNA, 19 nt, Artificial Sequence
  Description of Artificial Sequence: Synthetic oligonucleotide
agcucgaagggaggccagg

SEQ ID NO: 1928894 - RNA, 19 nt, Artificial Sequence
  Description of Artificial Sequence: Synthetic oligonucleotide
cucacugugcaagaauuua

SEQ ID NO: 1928895 - RNA, 19 nt, Artificial Sequence
  Description of Artificial Sequence: Synthetic oligonucleotide
ugggucuuuuggucucuuc

SEQ ID NO: 1928896 - RNA, 19 nt, Artificial Sequence
  Description of Artificial Sequence: Synthetic oligonucleotide
gucacuggguucugacauc

SEQ ID NO: 1928897 - RNA, 19 nt, Artificial Sequence
  Description of Artificial Sequence: Synthetic oligonucleotide
uuguugggacagugacaug

SEQ ID NO: 1928898 - RNA, 19 nt, Artificial Sequence
  Description of Artificial Sequence: Synthetic oligonucleotide
gccaguugguuuucucuug

SEQ ID NO: 1928899 - RNA, 19 nt, Artificial Sequence
  Description of Artificial Sequence: Synthetic oligonucleotide
gcugaaagaaagaacccua

SEQ ID NO: 1928900 - RNA, 19 nt, Artificial Sequence
  Description of Artificial Sequence: Synthetic oligonucleotide
gaggagucacuagucaccu

SEQ ID NO: 1928901 - RNA, 19 nt, Artificial Sequence
  Description of Artificial Sequence: Synthetic oligonucleotide
acuagucaccuaacuggga

SEQ ID NO: 1928902 - RNA, 19 nt, Artificial Sequence
  Description of Artificial Sequence: Synthetic oligonucleotide
caacacauaguaguuaguu

SEQ ID NO: 1928903 - RNA, 19 nt, Artificial Sequence
  Description of Artificial Sequence: Synthetic oligonucleotide
caccuaacugggaaguacu

SEQ ID NO: 1928904 - RNA, 19 nt, Artificial Sequence
  Description of Artificial Sequence: Synthetic oligonucleotide
aggcccaaccaaugcuacu

SEQ ID NO: 1928905 - RNA, 19 nt, Artificial Sequence
  Description of Artificial Sequence: Synthetic oligonucleotide
augaggucagcgauauuuu

SEQ ID NO: 1928906 - RNA, 19 nt, Artificial Sequence
  Description of Artificial Sequence: Synthetic oligonucleotide
guaggcccaaccaaugcua

SEQ ID NO: 1928907 - RNA, 19 nt, Artificial Sequence
  Description of Artificial Sequence: Synthetic oligonucleotide
ucucggcauuuggaaaagu

SEQ ID NO: 1928908 - RNA, 19 nt, Artificial Sequence
  Description of Artificial Sequence: Synthetic oligonucleotide
guuaaauguucucggcauu

SEQ ID NO: 1928909 - RNA, 19 nt, Artificial Sequence
  Description of Artificial Sequence: Synthetic oligonucleotide
uggacucggugugaauguc

SEQ ID NO: 1928910 - RNA, 19 nt, Artificial Sequence
  Description of Artificial Sequence: Synthetic oligonucleotide
ggaauuccaaauguagagu

SEQ ID NO: 1928911 - RNA, 19 nt, Artificial Sequence
  Description of Artificial Sequence: Synthetic oligonucleotide
auggacuauguaggcugug

SEQ ID NO: 1928912 - RNA, 19 nt, Artificial Sequence
  Description of Artificial Sequence: Synthetic oligonucleotide
uucuggacucggugugaau

SEQ ID NO: 1928913 - RNA, 19 nt, Artificial Sequence
  Description of Artificial Sequence: Synthetic oligonucleotide
acucacugugcaagaauuu

SEQ ID NO: 1928914 - RNA, 19 nt, Artificial Sequence
  Description of Artificial Sequence: Synthetic oligonucleotide
gcagaaaccgccaaaguuu

SEQ ID NO: 1928915 - RNA, 19 nt, Artificial Sequence
  Description of Artificial Sequence: Synthetic oligonucleotide
gcucgaagggaggccaggg

SEQ ID NO: 1928916 - RNA, 19 nt, Artificial Sequence
  Description of Artificial Sequence: Synthetic oligonucleotide
cugggcauuucucagccau

SEQ ID NO: 1928917 - RNA, 19 nt, Artificial Sequence
  Description of Artificial Sequence: Synthetic oligonucleotide
uggggaugcaggggacucu

SEQ ID NO: 1928918 - RNA, 19 nt, Artificial Sequence
  Description of Artificial Sequence: Synthetic oligonucleotide
uucugacauccugccagau

SEQ ID NO: 1928919 - RNA, 19 nt, Artificial Sequence
  Description of Artificial Sequence: Synthetic oligonucleotide
cacuguaggcccaaccaau

SEQ ID NO: 1928920 - RNA, 19 nt, Artificial Sequence
  Description of Artificial Sequence: Synthetic oligonucleotide
gcaagagcgucuccaccac

SEQ ID NO: 1928921 - RNA, 19 nt, Artificial Sequence
  Description of Artificial Sequence: Synthetic oligonucleotide
cagaaaccgccaaaguuuu

SEQ ID NO: 1928922 - RNA, 19 nt, Artificial Sequence
  Description of Artificial Sequence: Synthetic oligonucleotide
ugccuccuaccagccacug

SEQ ID NO: 1928923 - RNA, 19 nt, Artificial Sequence
  Description of Artificial Sequence: Synthetic oligonucleotide
cccuaaacguacacaucuc

SEQ ID NO: 1928924 - RNA, 19 nt, Artificial Sequence
  Description of Artificial Sequence: Synthetic oligonucleotide
cauggucuugggguccguc

SEQ ID NO: 1928925 - RNA, 19 nt, Artificial Sequence
  Description of Artificial Sequence: Synthetic oligonucleotide
ugagcacuguaggcccaac

SEQ ID NO: 1928926 - RNA, 19 nt, Artificial Sequence
  Description of Artificial Sequence: Synthetic oligonucleotide
cgacaugaucugaaacuug

SEQ ID NO: 1928927 - RNA, 19 nt, Artificial Sequence
  Description of Artificial Sequence: Synthetic oligonucleotide
gaucgucaaugcgacugcu

SEQ ID NO: 1928928 - RNA, 19 nt, Artificial Sequence
  Description of Artificial Sequence: Synthetic oligonucleotide
gccuccuaccagccacugg

SEQ ID NO: 1928929 - RNA, 19 nt, Artificial Sequence
  Description of Artificial Sequence: Synthetic oligonucleotide
cugauccgacaugaucuga

SEQ ID NO: 1928930 - RNA, 19 nt, Artificial Sequence
  Description of Artificial Sequence: Synthetic oligonucleotide
ggcccaaccaaugcuacua

SEQ ID NO: 1928931 - RNA, 19 nt, Artificial Sequence
  Description of Artificial Sequence: Synthetic oligonucleotide
aggagucacuagucaccua

SEQ ID NO: 1928932 - RNA, 19 nt, Artificial Sequence
  Description of Artificial Sequence: Synthetic oligonucleotide
gaacuuacuugggucuuuu

SEQ ID NO: 1928933 - RNA, 19 nt, Artificial Sequence
  Description of Artificial Sequence: Synthetic oligonucleotide
ggacucggugugaauguca

SEQ ID NO: 1928934 - RNA, 19 nt, Artificial Sequence
  Description of Artificial Sequence: Synthetic oligonucleotide
ggacucuauggacuaugua

SEQ ID NO: 1928935 - RNA, 19 nt, Artificial Sequence
  Description of Artificial Sequence: Synthetic oligonucleotide
ggacuauguaggcugugau

SEQ ID NO: 1928936 - RNA, 19 nt, Artificial Sequence
  Description of Artificial Sequence: Synthetic oligonucleotide
cgauccuuccaaugaucug

SEQ ID NO: 1928937 - RNA, 19 nt, Artificial Sequence
  Description of Artificial Sequence: Synthetic oligonucleotide
ccaugugaccugcagugaa

SEQ ID NO: 1928938 - RNA, 19 nt, Artificial Sequence
  Description of Artificial Sequence: Synthetic oligonucleotide
ccaaugcuacuagaaucuc

SEQ ID NO: 1928939 - RNA, 19 nt, Artificial Sequence
  Description of Artificial Sequence: Synthetic oligonucleotide
gcucaugucaucgauccuu

SEQ ID NO: 1928940 - RNA, 19 nt, Artificial Sequence
  Description of Artificial Sequence: Synthetic oligonucleotide
cugccagaugagcacugua

SEQ ID NO: 1928941 - RNA, 19 nt, Artificial Sequence
  Description of Artificial Sequence: Synthetic oligonucleotide
aucucacaucacggcuucu

SEQ ID NO: 1928942 - RNA, 19 nt, Artificial Sequence
  Description of Artificial Sequence: Synthetic oligonucleotide
gcuuggcggcgaugucucg

SEQ ID NO: 1928943 - RNA, 19 nt, Artificial Sequence
  Description of Artificial Sequence: Synthetic oligonucleotide
gucaccuaacugggaagua

SEQ ID NO: 1928944 - RNA, 19 nt, Artificial Sequence
  Description of Artificial Sequence: Synthetic oligonucleotide
cugccaaggggaggaguca

SEQ ID NO: 1928945 - RNA, 19 nt, Artificial Sequence
  Description of Artificial Sequence: Synthetic oligonucleotide
cucgaagggaggccagggu

SEQ ID NO: 1928946 - RNA, 19 nt, Artificial Sequence
  Description of Artificial Sequence: Synthetic oligonucleotide
cgucucggccaucuccccg

SEQ ID NO: 1928947 - RNA, 19 nt, Artificial Sequence
  Description of Artificial Sequence: Synthetic oligonucleotide
gugaacuuacuugggucuu

SEQ ID NO: 1928948 - RNA, 19 nt, Artificial Sequence
  Description of Artificial Sequence: Synthetic oligonucleotide
cguacacaucucacaucac

SEQ ID NO: 1928949 - RNA, 19 nt, Artificial Sequence
  Description of Artificial Sequence: Synthetic oligonucleotide
ccuaacugggaaguacucu

SEQ ID NO: 1928950 - RNA, 19 nt, Artificial Sequence
  Description of Artificial Sequence: Synthetic oligonucleotide
cuaccagccacugggcauu

SEQ ID NO: 1928951 - RNA, 19 nt, Artificial Sequence
  Description of Artificial Sequence: Synthetic oligonucleotide
gggacucuauggacuaugu

SEQ ID NO: 1928952 - RNA, 19 nt, Artificial Sequence
  Description of Artificial Sequence: Synthetic oligonucleotide
gccaugugaccugcaguga

SEQ ID NO: 1928953 - RNA, 19 nt, Artificial Sequence
  Description of Artificial Sequence: Synthetic oligonucleotide
ccgccaaaguuuuaguguu

SEQ ID NO: 1928954 - RNA, 19 nt, Artificial Sequence
  Description of Artificial Sequence: Synthetic oligonucleotide
gugcaguagcaaucuuguu

SEQ ID NO: 1928955 - RNA, 19 nt, Artificial Sequence
  Description of Artificial Sequence: Synthetic oligonucleotide
cagggucacuggguucuga

SEQ ID NO: 1928956 - RNA, 19 nt, Artificial Sequence
  Description of Artificial Sequence: Synthetic oligonucleotide
uaccagccacugggcauuu

SEQ ID NO: 1928957 - RNA, 19 nt, Artificial Sequence
  Description of Artificial Sequence: Synthetic oligonucleotide
cagucacuuugugcugaaa

SEQ ID NO: 1928958 - RNA, 19 nt, Artificial Sequence
  Description of Artificial Sequence: Synthetic oligonucleotide
ccaaggggaggagucacua

SEQ ID NO: 1928959 - RNA, 19 nt, Artificial Sequence
  Description of Artificial Sequence: Synthetic oligonucleotide
cacuggguucugacauccu

SEQ ID NO: 1928960 - RNA, 19 nt, Artificial Sequence
  Description of Artificial Sequence: Synthetic oligonucleotide
gccuggaggcuaagccuac

SEQ ID NO: 1928961 - RNA, 19 nt, Artificial Sequence
  Description of Artificial Sequence: Synthetic oligonucleotide
ccgacaugaucugaaacuu

SEQ ID NO: 1928962 - RNA, 19 nt, Artificial Sequence
  Description of Artificial Sequence: Synthetic oligonucleotide
ggcuaagccuacagacacu

SEQ ID NO: 1928963 - RNA, 19 nt, Artificial Sequence
  Description of Artificial Sequence: Synthetic oligonucleotide
gaccugcagugaacuuacu

SEQ ID NO: 1928964 - RNA, 19 nt, Artificial Sequence
  Description of Artificial Sequence: Synthetic oligonucleotide
cgacugcucaugucaucga

SEQ ID NO: 1928965 - RNA, 19 nt, Artificial Sequence
  Description of Artificial Sequence: Synthetic oligonucleotide
ccaaggugauguccugcau

SEQ ID NO: 1928966 - RNA, 19 nt, Artificial Sequence
  Description of Artificial Sequence: Synthetic oligonucleotide
ccagaucgucaaugcgacu

SEQ ID NO: 1928967 - RNA, 19 nt, Artificial Sequence
  Description of Artificial Sequence: Synthetic oligonucleotide
cgucaaugcgacugcucau

SEQ ID NO: 1928968 - RNA, 19 nt, Artificial Sequence
  Description of Artificial Sequence: Synthetic oligonucleotide
ggauugccuuccaggucau

SEQ ID NO: 1928969 - RNA, 19 nt, Artificial Sequence
  Description of Artificial Sequence: Synthetic oligonucleotide
gggaugcaggggacucuau

SEQ ID NO: 1928970 - RNA, 19 nt, Artificial Sequence
  Description of Artificial Sequence: Synthetic oligonucleotide
gcauggucuugggguccgu

SEQ ID NO: 1928971 - RNA, 19 nt, Artificial Sequence
  Description of Artificial Sequence: Synthetic oligonucleotide
auuaaugccauccauugcc

SEQ ID NO: 1928972 - RNA, 19 nt, Artificial Sequence
  Description of Artificial Sequence: Synthetic oligonucleotide
aagauuugcauuuugaccu

SEQ ID NO: 1928973 - RNA, 19 nt, Artificial Sequence
  Description of Artificial Sequence: Synthetic oligonucleotide
auuuucuaaacuuaaauug

SEQ ID NO: 1928974 - RNA, 19 nt, Artificial Sequence
  Description of Artificial Sequence: Synthetic oligonucleotide
cuuaaauuggggcaaaugg

SEQ ID NO: 1928975 - RNA, 19 nt, Artificial Sequence
  Description of Artificial Sequence: Synthetic oligonucleotide
agacugaagaauuaauagc

SEQ ID NO: 1928976 - RNA, 19 nt, Artificial Sequence
  Description of Artificial Sequence: Synthetic oligonucleotide
uuucuaaacuuaaauuggg

SEQ ID NO: 1928977 - RNA, 19 nt, Artificial Sequence
  Description of Artificial Sequence: Synthetic oligonucleotide
ucuaaacuuaaauuggggc

SEQ ID NO: 1928978 - RNA, 19 nt, Artificial Sequence
  Description of Artificial Sequence: Synthetic oligonucleotide
aaagaugagucgcugcugg

SEQ ID NO: 1928979 - RNA, 19 nt, Artificial Sequence
  Description of Artificial Sequence: Synthetic oligonucleotide
uuaaauuggggcaaauggc

SEQ ID NO: 1928980 - RNA, 19 nt, Artificial Sequence
  Description of Artificial Sequence: Synthetic oligonucleotide
ugugaugagaccacaaacc

SEQ ID NO: 1928981 - RNA, 19 nt, Artificial Sequence
  Description of Artificial Sequence: Synthetic oligonucleotide
uuaauagccaccccugagg

SEQ ID NO: 1928982 - RNA, 19 nt, Artificial Sequence
  Description of Artificial Sequence: Synthetic oligonucleotide
uauagugcagauuaaugcc

SEQ ID NO: 1928983 - RNA, 19 nt, Artificial Sequence
  Description of Artificial Sequence: Synthetic oligonucleotide
gaagauuugcauuuugacc

SEQ ID NO: 1928984 - RNA, 19 nt, Artificial Sequence
  Description of Artificial Sequence: Synthetic oligonucleotide
cuauagugcagauuaaugc

SEQ ID NO: 1928985 - RNA, 19 nt, Artificial Sequence
  Description of Artificial Sequence: Synthetic oligonucleotide
gauguuguaaucagaaagg

SEQ ID NO: 1928986 - RNA, 19 nt, Artificial Sequence
  Description of Artificial Sequence: Synthetic oligonucleotide
uguaaucagaaagagugcg

SEQ ID NO: 1928987 - RNA, 19 nt, Artificial Sequence
  Description of Artificial Sequence: Synthetic oligonucleotide
aaaaucugcaugccacccc

SEQ ID NO: 1928988 - RNA, 19 nt, Artificial Sequence
  Description of Artificial Sequence: Synthetic oligonucleotide
uuaccaugcaacaaaaccu

SEQ ID NO: 1928989 - RNA, 19 nt, Artificial Sequence
  Description of Artificial Sequence: Synthetic oligonucleotide
guuguaaucagaaagggug

SEQ ID NO: 1928990 - RNA, 19 nt, Artificial Sequence
  Description of Artificial Sequence: Synthetic oligonucleotide
aaacuuggauuuucuaaac

SEQ ID NO: 1928991 - RNA, 19 nt, Artificial Sequence
  Description of Artificial Sequence: Synthetic oligonucleotide
aaaaccuuuauuaacauuu

SEQ ID NO: 1928992 - RNA, 19 nt, Artificial Sequence
  Description of Artificial Sequence: Synthetic oligonucleotide
ugcaacaaaaccuuuauua

SEQ ID NO: 1928993 - RNA, 19 nt, Artificial Sequence
  Description of Artificial Sequence: Synthetic oligonucleotide
aacaccuagacgcaaggag

SEQ ID NO: 1928994 - RNA, 19 nt, Artificial Sequence
  Description of Artificial Sequence: Synthetic oligonucleotide
gacugaagaauuaauagcc

SEQ ID NO: 1928995 - RNA, 19 nt, Artificial Sequence
  Description of Artificial Sequence: Synthetic oligonucleotide
aaucagaaagagugcggcc

SEQ ID NO: 1928996 - RNA, 19 nt, Artificial Sequence
  Description of Artificial Sequence: Synthetic oligonucleotide
uucuaaacuuaaauugggg

SEQ ID NO: 1928997 - RNA, 19 nt, Artificial Sequence
  Description of Artificial Sequence: Synthetic oligonucleotide
aaagagugcggccaucuuc

SEQ ID NO: 1928998 - RNA, 19 nt, Artificial Sequence
  Description of Artificial Sequence: Synthetic oligonucleotide
auuacugaaacuuggauuu

SEQ ID NO: 1928999 - RNA, 19 nt, Artificial Sequence
  Description of Artificial Sequence: Synthetic oligonucleotide
ugaagaauuaauagccacc

SEQ ID NO: 1929000 - RNA, 19 nt, Artificial Sequence
  Description of Artificial Sequence: Synthetic oligonucleotide
aagaauuaauagccacccc

SEQ ID NO: 1929001 - RNA, 19 nt, Artificial Sequence
  Description of Artificial Sequence: Synthetic oligonucleotide
agaauuaauagccaccccu

SEQ ID NO: 1929002 - RNA, 19 nt, Artificial Sequence
  Description of Artificial Sequence: Synthetic oligonucleotide
uucacgaagaucugcaugc

SEQ ID NO: 1929003 - RNA, 19 nt, Artificial Sequence
  Description of Artificial Sequence: Synthetic oligonucleotide
uaaauuggggcaaauggcu

SEQ ID NO: 1929004 - RNA, 19 nt, Artificial Sequence
  Description of Artificial Sequence: Synthetic oligonucleotide
aaucagaaagggugcggcc

SEQ ID NO: 1929005 - RNA, 19 nt, Artificial Sequence
  Description of Artificial Sequence: Synthetic oligonucleotide
uuaacagagguucagcuau

SEQ ID NO: 1929006 - RNA, 19 nt, Artificial Sequence
  Description of Artificial Sequence: Synthetic oligonucleotide
aaugccauccauugcccac

SEQ ID NO: 1929007 - RNA, 19 nt, Artificial Sequence
  Description of Artificial Sequence: Synthetic oligonucleotide
cagacugaagaauuaauag

SEQ ID NO: 1929008 - RNA, 19 nt, Artificial Sequence
  Description of Artificial Sequence: Synthetic oligonucleotide
agauuaaugccauccauug

SEQ ID NO: 1929009 - RNA, 19 nt, Artificial Sequence
  Description of Artificial Sequence: Synthetic oligonucleotide
augugaugagaccacaaac

SEQ ID NO: 1929010 - RNA, 19 nt, Artificial Sequence
  Description of Artificial Sequence: Synthetic oligonucleotide
gaagaauuaauagccaccc

SEQ ID NO: 1929011 - RNA, 19 nt, Artificial Sequence
  Description of Artificial Sequence: Synthetic oligonucleotide
gaugagaccacaaaccgcc

SEQ ID NO: 1929012 - RNA, 19 nt, Artificial Sequence
  Description of Artificial Sequence: Synthetic oligonucleotide
ugggaaugcagacugaaga

SEQ ID NO: 1929013 - RNA, 19 nt, Artificial Sequence
  Description of Artificial Sequence: Synthetic oligonucleotide
uuaacggaugugaugagac

SEQ ID NO: 1929014 - RNA, 19 nt, Artificial Sequence
  Description of Artificial Sequence: Synthetic oligonucleotide
aagagugcggccaucuucc

SEQ ID NO: 1929015 - RNA, 19 nt, Artificial Sequence
  Description of Artificial Sequence: Synthetic oligonucleotide
uuuucgauggugucacugg

SEQ ID NO: 1929016 - RNA, 19 nt, Artificial Sequence
  Description of Artificial Sequence: Synthetic oligonucleotide
cauuuugaccuguuaacgg

SEQ ID NO: 1929017 - RNA, 19 nt, Artificial Sequence
  Description of Artificial Sequence: Synthetic oligonucleotide
aaagggugcggccaucuuc

SEQ ID NO: 1929018 - RNA, 19 nt, Artificial Sequence
  Description of Artificial Sequence: Synthetic oligonucleotide
uuuuaacagagguucagcu

SEQ ID NO: 1929019 - RNA, 19 nt, Artificial Sequence
  Description of Artificial Sequence: Synthetic oligonucleotide
ucuuuauccuggaucuugg

SEQ ID NO: 1929020 - RNA, 19 nt, Artificial Sequence
  Description of Artificial Sequence: Synthetic oligonucleotide
ucagcuauuacugaaacuu

SEQ ID NO: 1929021 - RNA, 19 nt, Artificial Sequence
  Description of Artificial Sequence: Synthetic oligonucleotide
gugaugagaccacaaaccg

SEQ ID NO: 1929022 - RNA, 19 nt, Artificial Sequence
  Description of Artificial Sequence: Synthetic oligonucleotide
uauuacugaaacuuggauu

SEQ ID NO: 1929023 - RNA, 19 nt, Artificial Sequence
  Description of Artificial Sequence: Synthetic oligonucleotide
auggcuauagugcagauua

SEQ ID NO: 1929024 - RNA, 19 nt, Artificial Sequence
  Description of Artificial Sequence: Synthetic oligonucleotide
cuaaacuuaaauuggggca

SEQ ID NO: 1929025 - RNA, 19 nt, Artificial Sequence
  Description of Artificial Sequence: Synthetic oligonucleotide
gaaacuuggauuuucuaaa

SEQ ID NO: 1929026 - RNA, 19 nt, Artificial Sequence
  Description of Artificial Sequence: Synthetic oligonucleotide
uuguaaucagaaagggugc

SEQ ID NO: 1929027 - RNA, 19 nt, Artificial Sequence
  Description of Artificial Sequence: Synthetic oligonucleotide
uugacauuuucgauggugu

SEQ ID NO: 1929028 - RNA, 19 nt, Artificial Sequence
  Description of Artificial Sequence: Synthetic oligonucleotide
cuggguuccaccucuaggg

SEQ ID NO: 1929029 - RNA, 19 nt, Artificial Sequence
  Description of Artificial Sequence: Synthetic oligonucleotide
uaauagccaccccugaggc

SEQ ID NO: 1929030 - RNA, 19 nt, Artificial Sequence
  Description of Artificial Sequence: Synthetic oligonucleotide
auuaauagccaccccugag

SEQ ID NO: 1929031 - RNA, 19 nt, Artificial Sequence
  Description of Artificial Sequence: Synthetic oligonucleotide
aaaucugcaugccaccccu

SEQ ID NO: 1929032 - RNA, 19 nt, Artificial Sequence
  Description of Artificial Sequence: Synthetic oligonucleotide
aauuaauagccaccccuga

SEQ ID NO: 1929033 - RNA, 19 nt, Artificial Sequence
  Description of Artificial Sequence: Synthetic oligonucleotide
uaaucagaaagagugcggc

SEQ ID NO: 1929034 - RNA, 19 nt, Artificial Sequence
  Description of Artificial Sequence: Synthetic oligonucleotide
uuucgauggugucacuggg

SEQ ID NO: 1929035 - RNA, 19 nt, Artificial Sequence
  Description of Artificial Sequence: Synthetic oligonucleotide
gaaacaccuagacgcaagg

SEQ ID NO: 1929036 - RNA, 19 nt, Artificial Sequence
  Description of Artificial Sequence: Synthetic oligonucleotide
ugcauuuugaccuguuaac

SEQ ID NO: 1929037 - RNA, 19 nt, Artificial Sequence
  Description of Artificial Sequence: Synthetic oligonucleotide
aacuuggauuuucuaaacu

SEQ ID NO: 1929038 - RNA, 19 nt, Artificial Sequence
  Description of Artificial Sequence: Synthetic oligonucleotide
auuuugaccuguuaacgga

SEQ ID NO: 1929039 - RNA, 19 nt, Artificial Sequence
  Description of Artificial Sequence: Synthetic oligonucleotide
caacaaaaccuuuauuaac

SEQ ID NO: 1929040 - RNA, 19 nt, Artificial Sequence
  Description of Artificial Sequence: Synthetic oligonucleotide
acauuuucgauggugucac

SEQ ID NO: 1929041 - RNA, 19 nt, Artificial Sequence
  Description of Artificial Sequence: Synthetic oligonucleotide
uguuguaaucagaaagagu

SEQ ID NO: 1929042 - RNA, 19 nt, Artificial Sequence
  Description of Artificial Sequence: Synthetic oligonucleotide
uguaaucagaaagggugcg

SEQ ID NO: 1929043 - RNA, 19 nt, Artificial Sequence
  Description of Artificial Sequence: Synthetic oligonucleotide
uguuguaaucagaaagggu

SEQ ID NO: 1929044 - RNA, 19 nt, Artificial Sequence
  Description of Artificial Sequence: Synthetic oligonucleotide
gauguuguaaucagaaaga

SEQ ID NO: 1929045 - RNA, 19 nt, Artificial Sequence
  Description of Artificial Sequence: Synthetic oligonucleotide
acgaaaaucugcaugccac

SEQ ID NO: 1929046 - RNA, 19 nt, Artificial Sequence
  Description of Artificial Sequence: Synthetic oligonucleotide
uccgaaguggacaaagccu

SEQ ID NO: 1929047 - RNA, 19 nt, Artificial Sequence
  Description of Artificial Sequence: Synthetic oligonucleotide
uucacgaagauuugcauuu

SEQ ID NO: 1929048 - RNA, 19 nt, Artificial Sequence
  Description of Artificial Sequence: Synthetic oligonucleotide
cugaagaauuaauagccac

SEQ ID NO: 1929049 - RNA, 19 nt, Artificial Sequence
  Description of Artificial Sequence: Synthetic oligonucleotide
uugcauuuugaccuguuaa

SEQ ID NO: 1929050 - RNA, 19 nt, Artificial Sequence
  Description of Artificial Sequence: Synthetic oligonucleotide
uaaacuuaaauuggggcaa

SEQ ID NO: 1929051 - RNA, 19 nt, Artificial Sequence
  Description of Artificial Sequence: Synthetic oligonucleotide
aacggaugugaugagacca

SEQ ID NO: 1929052 - RNA, 19 nt, Artificial Sequence
  Description of Artificial Sequence: Synthetic oligonucleotide
uuaaugccauccauugccc

SEQ ID NO: 1929053 - RNA, 19 nt, Artificial Sequence
  Description of Artificial Sequence: Synthetic oligonucleotide
ugaugagaccacaaaccgc

SEQ ID NO: 1929054 - RNA, 19 nt, Artificial Sequence
  Description of Artificial Sequence: Synthetic oligonucleotide
uucuggauguuguaaucag

SEQ ID NO: 1929055 - RNA, 19 nt, Artificial Sequence
  Description of Artificial Sequence: Synthetic oligonucleotide
auguuguaaucagaaaggg

SEQ ID NO: 1929056 - RNA, 19 nt, Artificial Sequence
  Description of Artificial Sequence: Synthetic oligonucleotide
acaccuagacgcaaggagc

SEQ ID NO: 1929057 - RNA, 19 nt, Artificial Sequence
  Description of Artificial Sequence: Synthetic oligonucleotide
aauagccaccccugaggcg

SEQ ID NO: 1929058 - RNA, 19 nt, Artificial Sequence
  Description of Artificial Sequence: Synthetic oligonucleotide
gaauuaauagccaccccug

SEQ ID NO: 1929059 - RNA, 19 nt, Artificial Sequence
  Description of Artificial Sequence: Synthetic oligonucleotide
agcgcguagaaacaccuag

SEQ ID NO: 1929060 - RNA, 19 nt, Artificial Sequence
  Description of Artificial Sequence: Synthetic oligonucleotide
auagccaccccugaggcgg

SEQ ID NO: 1929061 - RNA, 19 nt, Artificial Sequence
  Description of Artificial Sequence: Synthetic oligonucleotide
gauuaaugccauccauugc

SEQ ID NO: 1929062 - RNA, 19 nt, Artificial Sequence
  Description of Artificial Sequence: Synthetic oligonucleotide
agagguucagcuauuacug

SEQ ID NO: 1929063 - RNA, 19 nt, Artificial Sequence
  Description of Artificial Sequence: Synthetic oligonucleotide
acuuggauuuucuaaacuu

SEQ ID NO: 1929064 - RNA, 19 nt, Artificial Sequence
  Description of Artificial Sequence: Synthetic oligonucleotide
uaaucagaaagggugcggc

SEQ ID NO: 1929065 - RNA, 19 nt, Artificial Sequence
  Description of Artificial Sequence: Synthetic oligonucleotide
gauuuucuaaacuuaaauu

SEQ ID NO: 1929066 - RNA, 19 nt, Artificial Sequence
  Description of Artificial Sequence: Synthetic oligonucleotide
aauuggggcaaauggcuau

SEQ ID NO: 1929067 - RNA, 19 nt, Artificial Sequence
  Description of Artificial Sequence: Synthetic oligonucleotide
gacgcaaggagcuccgaag

SEQ ID NO: 1929068 - RNA, 19 nt, Artificial Sequence
  Description of Artificial Sequence: Synthetic oligonucleotide
cugggcuccaccucuaggg

SEQ ID NO: 1929069 - RNA, 19 nt, Artificial Sequence
  Description of Artificial Sequence: Synthetic oligonucleotide
uuuaacagagguucagcua

SEQ ID NO: 1929070 - RNA, 19 nt, Artificial Sequence
  Description of Artificial Sequence: Synthetic oligonucleotide
agcuauuacugaaacuugg

SEQ ID NO: 1929071 - RNA, 19 nt, Artificial Sequence
  Description of Artificial Sequence: Synthetic oligonucleotide
gaccacaaaccgccgagcg

SEQ ID NO: 1929072 - RNA, 19 nt, Artificial Sequence
  Description of Artificial Sequence: Synthetic oligonucleotide
acuggguuccaccucuagg

SEQ ID NO: 1929073 - RNA, 19 nt, Artificial Sequence
  Description of Artificial Sequence: Synthetic oligonucleotide
ugcagauuaaugccaucca

SEQ ID NO: 1929074 - RNA, 19 nt, Artificial Sequence
  Description of Artificial Sequence: Synthetic oligonucleotide
acgaagaucugcaugccac

SEQ ID NO: 1929075 - RNA, 19 nt, Artificial Sequence
  Description of Artificial Sequence: Synthetic oligonucleotide
auguuguaaucagaaagag

SEQ ID NO: 1929076 - RNA, 19 nt, Artificial Sequence
  Description of Artificial Sequence: Synthetic oligonucleotide
gaaaaucugcaugccaccc

SEQ ID NO: 1929077 - RNA, 19 nt, Artificial Sequence
  Description of Artificial Sequence: Synthetic oligonucleotide
acagagguucagcuauuac

SEQ ID NO: 1929078 - RNA, 19 nt, Artificial Sequence
  Description of Artificial Sequence: Synthetic oligonucleotide
ucuagggugauggucuugc

SEQ ID NO: 1929079 - RNA, 19 nt, Artificial Sequence
  Description of Artificial Sequence: Synthetic oligonucleotide
gagaccacaaaccgccgag

SEQ ID NO: 1929080 - RNA, 19 nt, Artificial Sequence
  Description of Artificial Sequence: Synthetic oligonucleotide
guaaucagaaagagugcgg

SEQ ID NO: 1929081 - RNA, 19 nt, Artificial Sequence
  Description of Artificial Sequence: Synthetic oligonucleotide
cuccgaaguggacaaagcc

SEQ ID NO: 1929082 - RNA, 19 nt, Artificial Sequence
  Description of Artificial Sequence: Synthetic oligonucleotide
uaccaugcaacaaaaccuu

SEQ ID NO: 1929083 - RNA, 19 nt, Artificial Sequence
  Description of Artificial Sequence: Synthetic oligonucleotide
uuuugaccuguuaacggau

SEQ ID NO: 1929084 - RNA, 19 nt, Artificial Sequence
  Description of Artificial Sequence: Synthetic oligonucleotide
uggauuuucuaaacuuaaa

SEQ ID NO: 1929085 - RNA, 19 nt, Artificial Sequence
  Description of Artificial Sequence: Synthetic oligonucleotide
ggggcaaauggcuauagug

SEQ ID NO: 1929086 - RNA, 19 nt, Artificial Sequence
  Description of Artificial Sequence: Synthetic oligonucleotide
cuguuaacggaugugauga

SEQ ID NO: 1929087 - RNA, 19 nt, Artificial Sequence
  Description of Artificial Sequence: Synthetic oligonucleotide
acuuaaauuggggcaaaug

SEQ ID NO: 1929088 - RNA, 19 nt, Artificial Sequence
  Description of Artificial Sequence: Synthetic oligonucleotide
uugaccuguuaacggaugu

SEQ ID NO: 1929089 - RNA, 19 nt, Artificial Sequence
  Description of Artificial Sequence: Synthetic oligonucleotide
gaugugaugagaccacaaa

SEQ ID NO: 1929090 - RNA, 19 nt, Artificial Sequence
  Description of Artificial Sequence: Synthetic oligonucleotide
guucagcuauuacugaaac

SEQ ID NO: 1929091 - RNA, 19 nt, Artificial Sequence
  Description of Artificial Sequence: Synthetic oligonucleotide
auuuucgauggugucacug

SEQ ID NO: 1929092 - RNA, 19 nt, Artificial Sequence
  Description of Artificial Sequence: Synthetic oligonucleotide
uuugcauuuugaccuguua

SEQ ID NO: 1929093 - RNA, 19 nt, Artificial Sequence
  Description of Artificial Sequence: Synthetic oligonucleotide
uucagcuauuacugaaacu

SEQ ID NO: 1929094 - RNA, 19 nt, Artificial Sequence
  Description of Artificial Sequence: Synthetic oligonucleotide
aucagaaagagugcggcca

SEQ ID NO: 1929095 - RNA, 19 nt, Artificial Sequence
  Description of Artificial Sequence: Synthetic oligonucleotide
ugcagacugaagaauuaau

SEQ ID NO: 1929096 - RNA, 19 nt, Artificial Sequence
  Description of Artificial Sequence: Synthetic oligonucleotide
gugcagauuaaugccaucc

SEQ ID NO: 1929097 - RNA, 19 nt, Artificial Sequence
  Description of Artificial Sequence: Synthetic oligonucleotide
agggucuucacgaagauuu

SEQ ID NO: 1929098 - RNA, 19 nt, Artificial Sequence
  Description of Artificial Sequence: Synthetic oligonucleotide
augcuuaccaugcaacaaa

SEQ ID NO: 1929099 - RNA, 19 nt, Artificial Sequence
  Description of Artificial Sequence: Synthetic oligonucleotide
uaacggaugugaugagacc

SEQ ID NO: 1929100 - RNA, 19 nt, Artificial Sequence
  Description of Artificial Sequence: Synthetic oligonucleotide
uugcccacugggaaugcag

SEQ ID NO: 1929101 - RNA, 19 nt, Artificial Sequence
  Description of Artificial Sequence: Synthetic oligonucleotide
guaaucagaaagggugcgg

SEQ ID NO: 1929102 - RNA, 19 nt, Artificial Sequence
  Description of Artificial Sequence: Synthetic oligonucleotide
ugcuuaccaugcaacaaaa

SEQ ID NO: 1929103 - RNA, 19 nt, Artificial Sequence
  Description of Artificial Sequence: Synthetic oligonucleotide
gacauuuucgaugguguca

SEQ ID NO: 1929104 - RNA, 19 nt, Artificial Sequence
  Description of Artificial Sequence: Synthetic oligonucleotide
gcauuuugaccuguuaacg

SEQ ID NO: 1929105 - RNA, 19 nt, Artificial Sequence
  Description of Artificial Sequence: Synthetic oligonucleotide
uguuaacggaugugaugag

SEQ ID NO: 1929106 - RNA, 19 nt, Artificial Sequence
  Description of Artificial Sequence: Synthetic oligonucleotide
agauuugcauuuugaccug

SEQ ID NO: 1929107 - RNA, 19 nt, Artificial Sequence
  Description of Artificial Sequence: Synthetic oligonucleotide
ugagaccacaaaccgccga

SEQ ID NO: 1929108 - RNA, 19 nt, Artificial Sequence
  Description of Artificial Sequence: Synthetic oligonucleotide
cuagacgcaaggagcuccg

SEQ ID NO: 1929109 - RNA, 19 nt, Artificial Sequence
  Description of Artificial Sequence: Synthetic oligonucleotide
cuuggauuuucuaaacuua

SEQ ID NO: 1929110 - RNA, 19 nt, Artificial Sequence
  Description of Artificial Sequence: Synthetic oligonucleotide
agugcagauuaaugccauc

SEQ ID NO: 1929111 - RNA, 19 nt, Artificial Sequence
  Description of Artificial Sequence: Synthetic oligonucleotide
auagugcagauuaaugcca

SEQ ID NO: 1929112 - RNA, 19 nt, Artificial Sequence
  Description of Artificial Sequence: Synthetic oligonucleotide
cucuuuauccuggaucuug

SEQ ID NO: 1929113 - RNA, 19 nt, Artificial Sequence
  Description of Artificial Sequence: Synthetic oligonucleotide
cuuuauccuggaucuuggc

SEQ ID NO: 1929114 - RNA, 19 nt, Artificial Sequence
  Description of Artificial Sequence: Synthetic oligonucleotide
agaugagucgcugcugguc

SEQ ID NO: 1929115 - RNA, 19 nt, Artificial Sequence
  Description of Artificial Sequence: Synthetic oligonucleotide
cagcuauuacugaaacuug

SEQ ID NO: 1929116 - RNA, 19 nt, Artificial Sequence
  Description of Artificial Sequence: Synthetic oligonucleotide
agaaacaccuagacgcaag

SEQ ID NO: 1929117 - RNA, 19 nt, Artificial Sequence
  Description of Artificial Sequence: Synthetic oligonucleotide
uagugcagauuaaugccau

SEQ ID NO: 1929118 - RNA, 19 nt, Artificial Sequence
  Description of Artificial Sequence: Synthetic oligonucleotide
ugacauuuucgaugguguc

SEQ ID NO: 1929119 - RNA, 19 nt, Artificial Sequence
  Description of Artificial Sequence: Synthetic oligonucleotide
uggauguuguaaucagaaa

SEQ ID NO: 1929120 - RNA, 19 nt, Artificial Sequence
  Description of Artificial Sequence: Synthetic oligonucleotide
acugaagaauuaauagcca

SEQ ID NO: 1929121 - RNA, 19 nt, Artificial Sequence
  Description of Artificial Sequence: Synthetic oligonucleotide
aaauggcuauagugcagau

SEQ ID NO: 1929122 - RNA, 19 nt, Artificial Sequence
  Description of Artificial Sequence: Synthetic oligonucleotide
ucagaaagagugcggccau

SEQ ID NO: 1929123 - RNA, 19 nt, Artificial Sequence
  Description of Artificial Sequence: Synthetic oligonucleotide
aaugcagacugaagaauua

SEQ ID NO: 1929124 - RNA, 19 nt, Artificial Sequence
  Description of Artificial Sequence: Synthetic oligonucleotide
uaaugccauccauugccca

SEQ ID NO: 1929125 - RNA, 19 nt, Artificial Sequence
  Description of Artificial Sequence: Synthetic oligonucleotide
agguucagcuauuacugaa

SEQ ID NO: 1929126 - RNA, 19 nt, Artificial Sequence
  Description of Artificial Sequence: Synthetic oligonucleotide
aaacaccuagacgcaagga

SEQ ID NO: 1929127 - RNA, 19 nt, Artificial Sequence
  Description of Artificial Sequence: Synthetic oligonucleotide
gggcaaauggcuauagugc

SEQ ID NO: 1929128 - RNA, 19 nt, Artificial Sequence
  Description of Artificial Sequence: Synthetic oligonucleotide
ccauccauugcccacuggg

SEQ ID NO: 1929129 - RNA, 19 nt, Artificial Sequence
  Description of Artificial Sequence: Synthetic oligonucleotide
gcaacaaaaccuuuauuaa

SEQ ID NO: 1929130 - RNA, 19 nt, Artificial Sequence
  Description of Artificial Sequence: Synthetic oligonucleotide
aagaugagucgcugcuggu

SEQ ID NO: 1929131 - RNA, 19 nt, Artificial Sequence
  Description of Artificial Sequence: Synthetic oligonucleotide
gaccuguuaacggauguga

SEQ ID NO: 1929132 - RNA, 19 nt, Artificial Sequence
  Description of Artificial Sequence: Synthetic oligonucleotide
agaaagagugcggccaucu

SEQ ID NO: 1929133 - RNA, 19 nt, Artificial Sequence
  Description of Artificial Sequence: Synthetic oligonucleotide
gcuauagugcagauuaaug

SEQ ID NO: 1929134 - RNA, 19 nt, Artificial Sequence
  Description of Artificial Sequence: Synthetic oligonucleotide
aucagaaagggugcggcca

SEQ ID NO: 1929135 - RNA, 19 nt, Artificial Sequence
  Description of Artificial Sequence: Synthetic oligonucleotide
cugggaaugcagacugaag

SEQ ID NO: 1929136 - RNA, 19 nt, Artificial Sequence
  Description of Artificial Sequence: Synthetic oligonucleotide
agaccacaaaccgccgagc

SEQ ID NO: 1929137 - RNA, 19 nt, Artificial Sequence
  Description of Artificial Sequence: Synthetic oligonucleotide
gcguagaaacaccuagacg

SEQ ID NO: 1929138 - RNA, 19 nt, Artificial Sequence
  Description of Artificial Sequence: Synthetic oligonucleotide
ucacgaaaaucugcaugcc

SEQ ID NO: 1929139 - RNA, 19 nt, Artificial Sequence
  Description of Artificial Sequence: Synthetic oligonucleotide
auccauugcccacugggaa

SEQ ID NO: 1929140 - RNA, 19 nt, Artificial Sequence
  Description of Artificial Sequence: Synthetic oligonucleotide
ucagaaagggugcggccau

SEQ ID NO: 1929141 - RNA, 19 nt, Artificial Sequence
  Description of Artificial Sequence: Synthetic oligonucleotide
uacugaaacuuggauuuuc

SEQ ID NO: 1929142 - RNA, 19 nt, Artificial Sequence
  Description of Artificial Sequence: Synthetic oligonucleotide
aaaccuuuauuaacauuuu

SEQ ID NO: 1929143 - RNA, 19 nt, Artificial Sequence
  Description of Artificial Sequence: Synthetic oligonucleotide
agcuccgaaguggacaaag

SEQ ID NO: 1929144 - RNA, 19 nt, Artificial Sequence
  Description of Artificial Sequence: Synthetic oligonucleotide
ggcaaauggcuauagugca

SEQ ID NO: 1929145 - RNA, 19 nt, Artificial Sequence
  Description of Artificial Sequence: Synthetic oligonucleotide
accucuagggugauggucu

SEQ ID NO: 1929146 - RNA, 19 nt, Artificial Sequence
  Description of Artificial Sequence: Synthetic oligonucleotide
uccauugcccacugggaau

SEQ ID NO: 1929147 - RNA, 19 nt, Artificial Sequence
  Description of Artificial Sequence: Synthetic oligonucleotide
acgcaaggagcuccgaagu

SEQ ID NO: 1929148 - RNA, 19 nt, Artificial Sequence
  Description of Artificial Sequence: Synthetic oligonucleotide
acugaaacuuggauuuucu

SEQ ID NO: 1929149 - RNA, 19 nt, Artificial Sequence
  Description of Artificial Sequence: Synthetic oligonucleotide
ugaccuguuaacggaugug

SEQ ID NO: 1929150 - RNA, 19 nt, Artificial Sequence
  Description of Artificial Sequence: Synthetic oligonucleotide
acgaagauuugcauuuuga

SEQ ID NO: 1929151 - RNA, 19 nt, Artificial Sequence
  Description of Artificial Sequence: Synthetic oligonucleotide
ugcccacugggaaugcaga

SEQ ID NO: 1929152 - RNA, 19 nt, Artificial Sequence
  Description of Artificial Sequence: Synthetic oligonucleotide
aauggcuauagugcagauu

SEQ ID NO: 1929153 - RNA, 19 nt, Artificial Sequence
  Description of Artificial Sequence: Synthetic oligonucleotide
aaacuuaaauuggggcaaa

SEQ ID NO: 1929154 - RNA, 19 nt, Artificial Sequence
  Description of Artificial Sequence: Synthetic oligonucleotide
cagagguucagcuauuacu

SEQ ID NO: 1929155 - RNA, 19 nt, Artificial Sequence
  Description of Artificial Sequence: Synthetic oligonucleotide
cacgaagauuugcauuuug

SEQ ID NO: 1929156 - RNA, 19 nt, Artificial Sequence
  Description of Artificial Sequence: Synthetic oligonucleotide
uugccagucagggucuuca

SEQ ID NO: 1929157 - RNA, 19 nt, Artificial Sequence
  Description of Artificial Sequence: Synthetic oligonucleotide
aaauuggggcaaauggcua

SEQ ID NO: 1929158 - RNA, 19 nt, Artificial Sequence
  Description of Artificial Sequence: Synthetic oligonucleotide
gcaaggagcuccgaagugg

SEQ ID NO: 1929159 - RNA, 19 nt, Artificial Sequence
  Description of Artificial Sequence: Synthetic oligonucleotide
acggaugugaugagaccac

SEQ ID NO: 1929160 - RNA, 19 nt, Artificial Sequence
  Description of Artificial Sequence: Synthetic oligonucleotide
uggguuccaccucuagggu

SEQ ID NO: 1929161 - RNA, 19 nt, Artificial Sequence
  Description of Artificial Sequence: Synthetic oligonucleotide
ugccggcaaagaugagucg

SEQ ID NO: 1929162 - RNA, 19 nt, Artificial Sequence
  Description of Artificial Sequence: Synthetic oligonucleotide
caaauggcuauagugcaga

SEQ ID NO: 1929163 - RNA, 19 nt, Artificial Sequence
  Description of Artificial Sequence: Synthetic oligonucleotide
augagucgcugcuggucgg

SEQ ID NO: 1929164 - RNA, 19 nt, Artificial Sequence
  Description of Artificial Sequence: Synthetic oligonucleotide
gagguucagcuauuacuga

SEQ ID NO: 1929165 - RNA, 19 nt, Artificial Sequence
  Description of Artificial Sequence: Synthetic oligonucleotide
guuaacggaugugaugaga

SEQ ID NO: 1929166 - RNA, 19 nt, Artificial Sequence
  Description of Artificial Sequence: Synthetic oligonucleotide
ccacaaaccgccgagcgcg

SEQ ID NO: 1929167 - RNA, 19 nt, Artificial Sequence
  Description of Artificial Sequence: Synthetic oligonucleotide
cgaagauuugcauuuugac

SEQ ID NO: 1929168 - RNA, 19 nt, Artificial Sequence
  Description of Artificial Sequence: Synthetic oligonucleotide
ggcaaagaugagucgcugc

SEQ ID NO: 1929169 - RNA, 19 nt, Artificial Sequence
  Description of Artificial Sequence: Synthetic oligonucleotide
aacuuaaauuggggcaaau

SEQ ID NO: 1929170 - RNA, 19 nt, Artificial Sequence
  Description of Artificial Sequence: Synthetic oligonucleotide
aggagcuccgaaguggaca

SEQ ID NO: 1929171 - RNA, 19 nt, Artificial Sequence
  Description of Artificial Sequence: Synthetic oligonucleotide
uuggggcaaauggcuauag

SEQ ID NO: 1929172 - RNA, 19 nt, Artificial Sequence
  Description of Artificial Sequence: Synthetic oligonucleotide
uggggcaaauggcuauagu

SEQ ID NO: 1929173 - RNA, 19 nt, Artificial Sequence
  Description of Artificial Sequence: Synthetic oligonucleotide
ugagucgcugcuggucagg

SEQ ID NO: 1929174 - RNA, 19 nt, Artificial Sequence
  Description of Artificial Sequence: Synthetic oligonucleotide
gagugcggccaucuuccag

SEQ ID NO: 1929175 - RNA, 19 nt, Artificial Sequence
  Description of Artificial Sequence: Synthetic oligonucleotide
caaagaugagucgcugcug

SEQ ID NO: 1929176 - RNA, 19 nt, Artificial Sequence
  Description of Artificial Sequence: Synthetic oligonucleotide
caaaccgccgagcgcguag

SEQ ID NO: 1929177 - RNA, 19 nt, Artificial Sequence
  Description of Artificial Sequence: Synthetic oligonucleotide
cacgaaaaucugcaugcca

SEQ ID NO: 1929178 - RNA, 19 nt, Artificial Sequence
  Description of Artificial Sequence: Synthetic oligonucleotide
ccuguuaacggaugugaug

SEQ ID NO: 1929179 - RNA, 19 nt, Artificial Sequence
  Description of Artificial Sequence: Synthetic oligonucleotide
ugagucgcugcuggucggg

SEQ ID NO: 1929180 - RNA, 19 nt, Artificial Sequence
  Description of Artificial Sequence: Synthetic oligonucleotide
ccgaaguggacaaagccuc

SEQ ID NO: 1929181 - RNA, 19 nt, Artificial Sequence
  Description of Artificial Sequence: Synthetic oligonucleotide
aaggagcuccgaaguggac

SEQ ID NO: 1929182 - RNA, 19 nt, Artificial Sequence
  Description of Artificial Sequence: Synthetic oligonucleotide
augcaacaaaaccuuuauu

SEQ ID NO: 1929183 - RNA, 19 nt, Artificial Sequence
  Description of Artificial Sequence: Synthetic oligonucleotide
aacagagguucagcuauua

SEQ ID NO: 1929184 - RNA, 19 nt, Artificial Sequence
  Description of Artificial Sequence: Synthetic oligonucleotide
gagucgcugcuggucaggg

SEQ ID NO: 1929185 - RNA, 19 nt, Artificial Sequence
  Description of Artificial Sequence: Synthetic oligonucleotide
acugggaaugcagacugaa

SEQ ID NO: 1929186 - RNA, 19 nt, Artificial Sequence
  Description of Artificial Sequence: Synthetic oligonucleotide
caaggagcuccgaagugga

SEQ ID NO: 1929187 - RNA, 19 nt, Artificial Sequence
  Description of Artificial Sequence: Synthetic oligonucleotide
cuagggugauggucuugcc

SEQ ID NO: 1929188 - RNA, 19 nt, Artificial Sequence
  Description of Artificial Sequence: Synthetic oligonucleotide
cauccauugcccacuggga

SEQ ID NO: 1929189 - RNA, 19 nt, Artificial Sequence
  Description of Artificial Sequence: Synthetic oligonucleotide
agucgcugcuggucagggg

SEQ ID NO: 1929190 - RNA, 19 nt, Artificial Sequence
  Description of Artificial Sequence: Synthetic oligonucleotide
agaaagggugcggccaucu

SEQ ID NO: 1929191 - RNA, 19 nt, Artificial Sequence
  Description of Artificial Sequence: Synthetic oligonucleotide
gaaugcagacugaagaauu

SEQ ID NO: 1929192 - RNA, 19 nt, Artificial Sequence
  Description of Artificial Sequence: Synthetic oligonucleotide
cuauuacugaaacuuggau

SEQ ID NO: 1929193 - RNA, 19 nt, Artificial Sequence
  Description of Artificial Sequence: Synthetic oligonucleotide
caugcaacaaaaccuuuau

SEQ ID NO: 1929194 - RNA, 19 nt, Artificial Sequence
  Description of Artificial Sequence: Synthetic oligonucleotide
gggaaugcagacugaagaa

SEQ ID NO: 1929195 - RNA, 19 nt, Artificial Sequence
  Description of Artificial Sequence: Synthetic oligonucleotide
ccacugggaaugcagacug

SEQ ID NO: 1929196 - RNA, 19 nt, Artificial Sequence
  Description of Artificial Sequence: Synthetic oligonucleotide
agacgcaaggagcuccgaa

SEQ ID NO: 1929197 - RNA, 19 nt, Artificial Sequence
  Description of Artificial Sequence: Synthetic oligonucleotide
uaacagagguucagcuauu

SEQ ID NO: 1929198 - RNA, 19 nt, Artificial Sequence
  Description of Artificial Sequence: Synthetic oligonucleotide
uggcuauagugcagauuaa

SEQ ID NO: 1929199 - RNA, 19 nt, Artificial Sequence
  Description of Artificial Sequence: Synthetic oligonucleotide
ugccauccauugcccacug

SEQ ID NO: 1929200 - RNA, 19 nt, Artificial Sequence
  Description of Artificial Sequence: Synthetic oligonucleotide
augcagacugaagaauuaa

SEQ ID NO: 1929201 - RNA, 19 nt, Artificial Sequence
  Description of Artificial Sequence: Synthetic oligonucleotide
cagauuaaugccauccauu

SEQ ID NO: 1929202 - RNA, 19 nt, Artificial Sequence
  Description of Artificial Sequence: Synthetic oligonucleotide
gcuauuacugaaacuugga

SEQ ID NO: 1929203 - RNA, 19 nt, Artificial Sequence
  Description of Artificial Sequence: Synthetic oligonucleotide
gcaaauggcuauagugcag

SEQ ID NO: 1929204 - RNA, 19 nt, Artificial Sequence
  Description of Artificial Sequence: Synthetic oligonucleotide
cgaaaaucugcaugccacc

SEQ ID NO: 1929205 - RNA, 19 nt, Artificial Sequence
  Description of Artificial Sequence: Synthetic oligonucleotide
aaaccgccgagcgcguaga

SEQ ID NO: 1929206 - RNA, 19 nt, Artificial Sequence
  Description of Artificial Sequence: Synthetic oligonucleotide
gcccucuuuauccuggauc

SEQ ID NO: 1929207 - RNA, 19 nt, Artificial Sequence
  Description of Artificial Sequence: Synthetic oligonucleotide
cugaaacuuggauuuucua

SEQ ID NO: 1929208 - RNA, 19 nt, Artificial Sequence
  Description of Artificial Sequence: Synthetic oligonucleotide
augagaccacaaaccgccg

SEQ ID NO: 1929209 - RNA, 19 nt, Artificial Sequence
  Description of Artificial Sequence: Synthetic oligonucleotide
ggguuccaccucuagggug

SEQ ID NO: 1929210 - RNA, 19 nt, Artificial Sequence
  Description of Artificial Sequence: Synthetic oligonucleotide
ccuagacgcaaggagcucc

SEQ ID NO: 1929211 - RNA, 19 nt, Artificial Sequence
  Description of Artificial Sequence: Synthetic oligonucleotide
gccggcaaagaugagucgc

SEQ ID NO: 1929212 - RNA, 19 nt, Artificial Sequence
  Description of Artificial Sequence: Synthetic oligonucleotide
augccauccauugcccacu

SEQ ID NO: 1929213 - RNA, 19 nt, Artificial Sequence
  Description of Artificial Sequence: Synthetic oligonucleotide
gcaaagaugagucgcugcu

SEQ ID NO: 1929214 - RNA, 19 nt, Artificial Sequence
  Description of Artificial Sequence: Synthetic oligonucleotide
accuagacgcaaggagcuc

SEQ ID NO: 1929215 - RNA, 19 nt, Artificial Sequence
  Description of Artificial Sequence: Synthetic oligonucleotide
uuacugaaacuuggauuuu

SEQ ID NO: 1929216 - RNA, 19 nt, Artificial Sequence
  Description of Artificial Sequence: Synthetic oligonucleotide
cuucacgaagauuugcauu

SEQ ID NO: 1929217 - RNA, 19 nt, Artificial Sequence
  Description of Artificial Sequence: Synthetic oligonucleotide
ccgccgagcgcguagaaac

SEQ ID NO: 1929218 - RNA, 19 nt, Artificial Sequence
  Description of Artificial Sequence: Synthetic oligonucleotide
gcagacugaagaauuaaua

SEQ ID NO: 1929219 - RNA, 19 nt, Artificial Sequence
  Description of Artificial Sequence: Synthetic oligonucleotide
cacgaagaucugcaugcca

SEQ ID NO: 1929220 - RNA, 19 nt, Artificial Sequence
  Description of Artificial Sequence: Synthetic oligonucleotide
cacuggguuccaccucuag

SEQ ID NO: 1929221 - RNA, 19 nt, Artificial Sequence
  Description of Artificial Sequence: Synthetic oligonucleotide
gguuccaccucuaggguga

SEQ ID NO: 1929222 - RNA, 19 nt, Artificial Sequence
  Description of Artificial Sequence: Synthetic oligonucleotide
caccucuagggugaugguc

SEQ ID NO: 1929223 - RNA, 19 nt, Artificial Sequence
  Description of Artificial Sequence: Synthetic oligonucleotide
ugccagucagggucuucac

SEQ ID NO: 1929224 - RNA, 19 nt, Artificial Sequence
  Description of Artificial Sequence: Synthetic oligonucleotide
ggagcuccgaaguggacaa

SEQ ID NO: 1929225 - RNA, 19 nt, Artificial Sequence
  Description of Artificial Sequence: Synthetic oligonucleotide
caccuagacgcaaggagcu

SEQ ID NO: 1929226 - RNA, 19 nt, Artificial Sequence
  Description of Artificial Sequence: Synthetic oligonucleotide
accuguuaacggaugugau

SEQ ID NO: 1929227 - RNA, 19 nt, Artificial Sequence
  Description of Artificial Sequence: Synthetic oligonucleotide
cgcguagaaacaccuagac

SEQ ID NO: 1929228 - RNA, 19 nt, Artificial Sequence
  Description of Artificial Sequence: Synthetic oligonucleotide
gccggucagggucuucacg

SEQ ID NO: 1929229 - RNA, 19 nt, Artificial Sequence
  Description of Artificial Sequence: Synthetic oligonucleotide
ucacgaagauuugcauuuu

SEQ ID NO: 1929230 - RNA, 19 nt, Artificial Sequence
  Description of Artificial Sequence: Synthetic oligonucleotide
gguucagcuauuacugaaa

SEQ ID NO: 1929231 - RNA, 19 nt, Artificial Sequence
  Description of Artificial Sequence: Synthetic oligonucleotide
ugcccucuuuauccuggau

SEQ ID NO: 1929232 - RNA, 19 nt, Artificial Sequence
  Description of Artificial Sequence: Synthetic oligonucleotide
augcccucuuuauccugga

SEQ ID NO: 1929233 - RNA, 19 nt, Artificial Sequence
  Description of Artificial Sequence: Synthetic oligonucleotide
cgaagaucugcaugccacc

SEQ ID NO: 1929234 - RNA, 19 nt, Artificial Sequence
  Description of Artificial Sequence: Synthetic oligonucleotide
auuggggcaaauggcuaua

SEQ ID NO: 1929235 - RNA, 19 nt, Artificial Sequence
  Description of Artificial Sequence: Synthetic oligonucleotide
gauuugcauuuugaccugu

SEQ ID NO: 1929236 - RNA, 19 nt, Artificial Sequence
  Description of Artificial Sequence: Synthetic oligonucleotide
auugcccacugggaaugca

SEQ ID NO: 1929237 - RNA, 19 nt, Artificial Sequence
  Description of Artificial Sequence: Synthetic oligonucleotide
agagugcggccaucuucca

SEQ ID NO: 1929238 - RNA, 19 nt, Artificial Sequence
  Description of Artificial Sequence: Synthetic oligonucleotide
auuugcauuuugaccuguu

SEQ ID NO: 1929239 - RNA, 19 nt, Artificial Sequence
  Description of Artificial Sequence: Synthetic oligonucleotide
cauugcccacugggaaugc

SEQ ID NO: 1929240 - RNA, 19 nt, Artificial Sequence
  Description of Artificial Sequence: Synthetic oligonucleotide
gggcuccaccucuagggug

SEQ ID NO: 1929241 - RNA, 19 nt, Artificial Sequence
  Description of Artificial Sequence: Synthetic oligonucleotide
gcagauuaaugccauccau

SEQ ID NO: 1929242 - RNA, 19 nt, Artificial Sequence
  Description of Artificial Sequence: Synthetic oligonucleotide
ugccggucagggucuucac

SEQ ID NO: 1929243 - RNA, 19 nt, Artificial Sequence
  Description of Artificial Sequence: Synthetic oligonucleotide
ucacuggguuccaccucua

SEQ ID NO: 1929244 - RNA, 19 nt, Artificial Sequence
  Description of Artificial Sequence: Synthetic oligonucleotide
gcuuaccaugcaacaaaac

SEQ ID NO: 1929245 - RNA, 19 nt, Artificial Sequence
  Description of Artificial Sequence: Synthetic oligonucleotide
aaccgccgagcgcguagaa

SEQ ID NO: 1929246 - RNA, 19 nt, Artificial Sequence
  Description of Artificial Sequence: Synthetic oligonucleotide
uagacgcaaggagcuccga

SEQ ID NO: 1929247 - RNA, 19 nt, Artificial Sequence
  Description of Artificial Sequence: Synthetic oligonucleotide
ccgagcgcguagaaacacc

SEQ ID NO: 1929248 - RNA, 19 nt, Artificial Sequence
  Description of Artificial Sequence: Synthetic oligonucleotide
cucuagggugauggucuug

SEQ ID NO: 1929249 - RNA, 19 nt, Artificial Sequence
  Description of Artificial Sequence: Synthetic oligonucleotide
ccauugcccacugggaaug

SEQ ID NO: 1929250 - RNA, 19 nt, Artificial Sequence
  Description of Artificial Sequence: Synthetic oligonucleotide
gcuccgaaguggacaaagc

SEQ ID NO: 1929251 - RNA, 19 nt, Artificial Sequence
  Description of Artificial Sequence: Synthetic oligonucleotide
ccaugcaacaaaaccuuua

SEQ ID NO: 1929252 - RNA, 19 nt, Artificial Sequence
  Description of Artificial Sequence: Synthetic oligonucleotide
accaugcaacaaaaccuuu

SEQ ID NO: 1929253 - RNA, 19 nt, Artificial Sequence
  Description of Artificial Sequence: Synthetic oligonucleotide
uagccaccccugaggcgga

SEQ ID NO: 1929254 - RNA, 19 nt, Artificial Sequence
  Description of Artificial Sequence: Synthetic oligonucleotide
cagaaagagugcggccauc

SEQ ID NO: 1929255 - RNA, 19 nt, Artificial Sequence
  Description of Artificial Sequence: Synthetic oligonucleotide
ggcuccaccucuaggguga

SEQ ID NO: 1929256 - RNA, 19 nt, Artificial Sequence
  Description of Artificial Sequence: Synthetic oligonucleotide
gcccacugggaaugcagac

SEQ ID NO: 1929257 - RNA, 19 nt, Artificial Sequence
  Description of Artificial Sequence: Synthetic oligonucleotide
ggaugugaugagaccacaa

SEQ ID NO: 1929258 - RNA, 19 nt, Artificial Sequence
  Description of Artificial Sequence: Synthetic oligonucleotide
cagucagggucuucacgaa

SEQ ID NO: 1929259 - RNA, 19 nt, Artificial Sequence
  Description of Artificial Sequence: Synthetic oligonucleotide
cacugggaaugcagacuga

SEQ ID NO: 1929260 - RNA, 19 nt, Artificial Sequence
  Description of Artificial Sequence: Synthetic oligonucleotide
cuugccagucagggucuuc

SEQ ID NO: 1929261 - RNA, 19 nt, Artificial Sequence
  Description of Artificial Sequence: Synthetic oligonucleotide
uuccaccucuagggugaug

SEQ ID NO: 1929262 - RNA, 19 nt, Artificial Sequence
  Description of Artificial Sequence: Synthetic oligonucleotide
gccauccauugcccacugg

SEQ ID NO: 1929263 - RNA, 19 nt, Artificial Sequence
  Description of Artificial Sequence: Synthetic oligonucleotide
cccuccuuauccuggaucu

SEQ ID NO: 1929264 - RNA, 19 nt, Artificial Sequence
  Description of Artificial Sequence: Synthetic oligonucleotide
ggcuauagugcagauuaau

SEQ ID NO: 1929265 - RNA, 19 nt, Artificial Sequence
  Description of Artificial Sequence: Synthetic oligonucleotide
cagaaagggugcggccauc

SEQ ID NO: 1929266 - RNA, 19 nt, Artificial Sequence
  Description of Artificial Sequence: Synthetic oligonucleotide
accgccgagcgcguagaaa

SEQ ID NO: 1929267 - RNA, 19 nt, Artificial Sequence
  Description of Artificial Sequence: Synthetic oligonucleotide
gccgagcgcguagaaacac

SEQ ID NO: 1929268 - RNA, 19 nt, Artificial Sequence
  Description of Artificial Sequence: Synthetic oligonucleotide
auggugucacuggguucca

SEQ ID NO: 1929269 - RNA, 19 nt, Artificial Sequence
  Description of Artificial Sequence: Synthetic oligonucleotide
gaaagggugcggccaucuu

SEQ ID NO: 1929270 - RNA, 19 nt, Artificial Sequence
  Description of Artificial Sequence: Synthetic oligonucleotide
ucuugccagucagggucuu

SEQ ID NO: 1929271 - RNA, 19 nt, Artificial Sequence
  Description of Artificial Sequence: Synthetic oligonucleotide
gcgcguagaaacaccuaga

SEQ ID NO: 1929272 - RNA, 19 nt, Artificial Sequence
  Description of Artificial Sequence: Synthetic oligonucleotide
gagcgcguagaaacaccua

SEQ ID NO: 1929273 - RNA, 19 nt, Artificial Sequence
  Description of Artificial Sequence: Synthetic oligonucleotide
cgcaaggagcuccgaagug

SEQ ID NO: 1929274 - RNA, 19 nt, Artificial Sequence
  Description of Artificial Sequence: Synthetic oligonucleotide
gucuugccagucagggucu

SEQ ID NO: 1929275 - RNA, 19 nt, Artificial Sequence
  Description of Artificial Sequence: Synthetic oligonucleotide
cauuuucgauggugucacu

SEQ ID NO: 1929276 - RNA, 19 nt, Artificial Sequence
  Description of Artificial Sequence: Synthetic oligonucleotide
acaaaccgccgagcgcgua

SEQ ID NO: 1929277 - RNA, 19 nt, Artificial Sequence
  Description of Artificial Sequence: Synthetic oligonucleotide
cuugccggucagggucuuc

SEQ ID NO: 1929278 - RNA, 19 nt, Artificial Sequence
  Description of Artificial Sequence: Synthetic oligonucleotide
gucuugccggucagggucu

SEQ ID NO: 1929279 - RNA, 19 nt, Artificial Sequence
  Description of Artificial Sequence: Synthetic oligonucleotide
ucuugccggucagggucuu

SEQ ID NO: 1929280 - RNA, 19 nt, Artificial Sequence
  Description of Artificial Sequence: Synthetic oligonucleotide
cuccaccucuagggugaug

SEQ ID NO: 1929281 - RNA, 19 nt, Artificial Sequence
  Description of Artificial Sequence: Synthetic oligonucleotide
gagcuccgaaguggacaaa

SEQ ID NO: 1929282 - RNA, 19 nt, Artificial Sequence
  Description of Artificial Sequence: Synthetic oligonucleotide
ccggcaaagaugagucgcu

SEQ ID NO: 1929283 - RNA, 19 nt, Artificial Sequence
  Description of Artificial Sequence: Synthetic oligonucleotide
cacaaaccgccgagcgcgu

SEQ ID NO: 1929284 - RNA, 19 nt, Artificial Sequence
  Description of Artificial Sequence: Synthetic oligonucleotide
cgagcgcguagaaacaccu

SEQ ID NO: 1929285 - RNA, 19 nt, Artificial Sequence
  Description of Artificial Sequence: Synthetic oligonucleotide
cggcaaagaugagucgcug

SEQ ID NO: 1929286 - RNA, 19 nt, Artificial Sequence
  Description of Artificial Sequence: Synthetic oligonucleotide
cccacugggaaugcagacu

SEQ ID NO: 1929287 - RNA, 19 nt, Artificial Sequence
  Description of Artificial Sequence: Synthetic oligonucleotide
cggaugugaugagaccaca

SEQ ID NO: 1929288 - RNA, 19 nt, Artificial Sequence
  Description of Artificial Sequence: Synthetic oligonucleotide
cgccgagcgcguagaaaca

SEQ ID NO: 1929289 - RNA, 19 nt, Artificial Sequence
  Description of Artificial Sequence: Synthetic oligonucleotide
guuccaccucuagggugau

SEQ ID NO: 1929290 - RNA, 19 nt, Artificial Sequence
  Description of Artificial Sequence: Synthetic oligonucleotide
cggucagggucuucacgaa

SEQ ID NO: 1929291 - RNA, 19 nt, Artificial Sequence
  Description of Artificial Sequence: Synthetic oligonucleotide
ccaccucuagggugauggu

SEQ ID NO: 1929292 - RNA, 19 nt, Artificial Sequence
  Description of Artificial Sequence: Synthetic oligonucleotide
ccucuagggugauggucuu

SEQ ID NO: 1929293 - RNA, 19 nt, Artificial Sequence
  Description of Artificial Sequence: Synthetic oligonucleotide
ccuccuuauccuggaucuu

SEQ ID NO: 1929294 - RNA, 19 nt, Artificial Sequence
  Description of Artificial Sequence: Synthetic oligonucleotide
gcuccaccucuagggugau

SEQ ID NO: 1929295 - RNA, 19 nt, Artificial Sequence
  Description of Artificial Sequence: Synthetic oligonucleotide
aacagcaacacgcucacgg

SEQ ID NO: 1929296 - RNA, 19 nt, Artificial Sequence
  Description of Artificial Sequence: Synthetic oligonucleotide
uuuagcaaaucucugggca

SEQ ID NO: 1929297 - RNA, 19 nt, Artificial Sequence
  Description of Artificial Sequence: Synthetic oligonucleotide
ugacccaucacagagauga

SEQ ID NO: 1929298 - RNA, 19 nt, Artificial Sequence
  Description of Artificial Sequence: Synthetic oligonucleotide
gaagcagaaggacacagag

SEQ ID NO: 1929299 - RNA, 19 nt, Artificial Sequence
  Description of Artificial Sequence: Synthetic oligonucleotide
aacaggguccgcuccaccc

SEQ ID NO: 1929300 - RNA, 19 nt, Artificial Sequence
  Description of Artificial Sequence: Synthetic oligonucleotide
cagggaaacagcaacacgc

SEQ ID NO: 1929301 - RNA, 19 nt, Artificial Sequence
  Description of Artificial Sequence: Synthetic oligonucleotide
uccuuuagcaaaucucugg

SEQ ID NO: 1929302 - RNA, 19 nt, Artificial Sequence
  Description of Artificial Sequence: Synthetic oligonucleotide
acuauguuggucuccacag

SEQ ID NO: 1929303 - RNA, 19 nt, Artificial Sequence
  Description of Artificial Sequence: Synthetic oligonucleotide
ggauccacagaacaaaugg

SEQ ID NO: 1929304 - RNA, 19 nt, Artificial Sequence
  Description of Artificial Sequence: Synthetic oligonucleotide
agaacaaaugggugaugcc

SEQ ID NO: 1929305 - RNA, 19 nt, Artificial Sequence
  Description of Artificial Sequence: Synthetic oligonucleotide
aaucugagccaccccgccc

SEQ ID NO: 1929306 - RNA, 19 nt, Artificial Sequence
  Description of Artificial Sequence: Synthetic oligonucleotide
acuacuugggccgggaccc

SEQ ID NO: 1929307 - RNA, 19 nt, Artificial Sequence
  Description of Artificial Sequence: Synthetic oligonucleotide
ugcaccgaggcccuuagag

SEQ ID NO: 1929308 - RNA, 19 nt, Artificial Sequence
  Description of Artificial Sequence: Synthetic oligonucleotide
agugagugcucucuccagc

SEQ ID NO: 1929309 - RNA, 19 nt, Artificial Sequence
  Description of Artificial Sequence: Synthetic oligonucleotide
aacucccacuuccucaggg

SEQ ID NO: 1929310 - RNA, 19 nt, Artificial Sequence
  Description of Artificial Sequence: Synthetic oligonucleotide
aggacacagagucacagug

SEQ ID NO: 1929311 - RNA, 19 nt, Artificial Sequence
  Description of Artificial Sequence: Synthetic oligonucleotide
uguguauucuccaggcaca

SEQ ID NO: 1929312 - RNA, 19 nt, Artificial Sequence
  Description of Artificial Sequence: Synthetic oligonucleotide
uagaccaccgcgcccaggg

SEQ ID NO: 1929313 - RNA, 19 nt, Artificial Sequence
  Description of Artificial Sequence: Synthetic oligonucleotide
guaaucgucgucucccacg

SEQ ID NO: 1929314 - RNA, 19 nt, Artificial Sequence
  Description of Artificial Sequence: Synthetic oligonucleotide
aacaaaugggugaugccag

SEQ ID NO: 1929315 - RNA, 19 nt, Artificial Sequence
  Description of Artificial Sequence: Synthetic oligonucleotide
acagcaacacgcucacggc

SEQ ID NO: 1929316 - RNA, 19 nt, Artificial Sequence
  Description of Artificial Sequence: Synthetic oligonucleotide
gucacagugcuccacgagg

SEQ ID NO: 1929317 - RNA, 19 nt, Artificial Sequence
  Description of Artificial Sequence: Synthetic oligonucleotide
agcuccaugcaugugggcc

SEQ ID NO: 1929318 - RNA, 19 nt, Artificial Sequence
  Description of Artificial Sequence: Synthetic oligonucleotide
cacagagucacagugcucc

SEQ ID NO: 1929319 - RNA, 19 nt, Artificial Sequence
  Description of Artificial Sequence: Synthetic oligonucleotide
aaucucugggcauucucgu

SEQ ID NO: 1929320 - RNA, 19 nt, Artificial Sequence
  Description of Artificial Sequence: Synthetic oligonucleotide
cucggugccacacaacccg

SEQ ID NO: 1929321 - RNA, 19 nt, Artificial Sequence
  Description of Artificial Sequence: Synthetic oligonucleotide
gagcucgcagacuggaugg

SEQ ID NO: 1929322 - RNA, 19 nt, Artificial Sequence
  Description of Artificial Sequence: Synthetic oligonucleotide
gaacaaaugggugaugcca

SEQ ID NO: 1929323 - RNA, 19 nt, Artificial Sequence
  Description of Artificial Sequence: Synthetic oligonucleotide
acucccaaagccccgagug

SEQ ID NO: 1929324 - RNA, 19 nt, Artificial Sequence
  Description of Artificial Sequence: Synthetic oligonucleotide
aguuccuagaccaccgcgc

SEQ ID NO: 1929325 - RNA, 19 nt, Artificial Sequence
  Description of Artificial Sequence: Synthetic oligonucleotide
ucgucgucucccacgagcg

SEQ ID NO: 1929326 - RNA, 19 nt, Artificial Sequence
  Description of Artificial Sequence: Synthetic oligonucleotide
cuuuagcaaaucucugggc

SEQ ID NO: 1929327 - RNA, 19 nt, Artificial Sequence
  Description of Artificial Sequence: Synthetic oligonucleotide
uacuacuugggccgggacc

SEQ ID NO: 1929328 - RNA, 19 nt, Artificial Sequence
  Description of Artificial Sequence: Synthetic oligonucleotide
uaaucgucgucucccacga

SEQ ID NO: 1929329 - RNA, 19 nt, Artificial Sequence
  Description of Artificial Sequence: Synthetic oligonucleotide
guauucuccaggcacacga

SEQ ID NO: 1929330 - RNA, 19 nt, Artificial Sequence
  Description of Artificial Sequence: Synthetic oligonucleotide
agucggaggacccggcccc

SEQ ID NO: 1929331 - RNA, 19 nt, Artificial Sequence
  Description of Artificial Sequence: Synthetic oligonucleotide
gaaacagcaacacgcucac

SEQ ID NO: 1929332 - RNA, 19 nt, Artificial Sequence
  Description of Artificial Sequence: Synthetic oligonucleotide
caaacucccacuuccucag

SEQ ID NO: 1929333 - RNA, 19 nt, Artificial Sequence
  Description of Artificial Sequence: Synthetic oligonucleotide
caucacagagaugagguug

SEQ ID NO: 1929334 - RNA, 19 nt, Artificial Sequence
  Description of Artificial Sequence: Synthetic oligonucleotide
accccaagcagcuucgcag

SEQ ID NO: 1929335 - RNA, 19 nt, Artificial Sequence
  Description of Artificial Sequence: Synthetic oligonucleotide
acucccacuuccucagggc

SEQ ID NO: 1929336 - RNA, 19 nt, Artificial Sequence
  Description of Artificial Sequence: Synthetic oligonucleotide
uccguaaucgucgucuccc

SEQ ID NO: 1929337 - RNA, 19 nt, Artificial Sequence
  Description of Artificial Sequence: Synthetic oligonucleotide
cauggcgugccucauggcc

SEQ ID NO: 1929338 - RNA, 19 nt, Artificial Sequence
  Description of Artificial Sequence: Synthetic oligonucleotide
acaaaugggugaugccagg

SEQ ID NO: 1929339 - RNA, 19 nt, Artificial Sequence
  Description of Artificial Sequence: Synthetic oligonucleotide
ugcaguucguggaccgugg

SEQ ID NO: 1929340 - RNA, 19 nt, Artificial Sequence
  Description of Artificial Sequence: Synthetic oligonucleotide
caccccggcaaucugagcc

SEQ ID NO: 1929341 - RNA, 19 nt, Artificial Sequence
  Description of Artificial Sequence: Synthetic oligonucleotide
uucuccguaaucgucgucu

SEQ ID NO: 1929342 - RNA, 19 nt, Artificial Sequence
  Description of Artificial Sequence: Synthetic oligonucleotide
gucucggugccacacaacc

SEQ ID NO: 1929343 - RNA, 19 nt, Artificial Sequence
  Description of Artificial Sequence: Synthetic oligonucleotide
aacugucucagcacaaacu

SEQ ID NO: 1929344 - RNA, 19 nt, Artificial Sequence
  Description of Artificial Sequence: Synthetic oligonucleotide
cuggaugguaggaacuccc

SEQ ID NO: 1929345 - RNA, 19 nt, Artificial Sequence
  Description of Artificial Sequence: Synthetic oligonucleotide
guucuguccagggaaacag

SEQ ID NO: 1929346 - RNA, 19 nt, Artificial Sequence
  Description of Artificial Sequence: Synthetic oligonucleotide
uggggcaugucugggaggg

SEQ ID NO: 1929347 - RNA, 19 nt, Artificial Sequence
  Description of Artificial Sequence: Synthetic oligonucleotide
uguagacgcuggcacagcu

SEQ ID NO: 1929348 - RNA, 19 nt, Artificial Sequence
  Description of Artificial Sequence: Synthetic oligonucleotide
cuucgcagccuuuuccugc

SEQ ID NO: 1929349 - RNA, 19 nt, Artificial Sequence
  Description of Artificial Sequence: Synthetic oligonucleotide
cagaaggacacagagucac

SEQ ID NO: 1929350 - RNA, 19 nt, Artificial Sequence
  Description of Artificial Sequence: Synthetic oligonucleotide
ucauagacguggagguggc

SEQ ID NO: 1929351 - RNA, 19 nt, Artificial Sequence
  Description of Artificial Sequence: Synthetic oligonucleotide
ccuuuagcaaaucucuggg

SEQ ID NO: 1929352 - RNA, 19 nt, Artificial Sequence
  Description of Artificial Sequence: Synthetic oligonucleotide
gaccguggggucuucuccg

SEQ ID NO: 1929353 - RNA, 19 nt, Artificial Sequence
  Description of Artificial Sequence: Synthetic oligonucleotide
agcugcauucaucagccgu

SEQ ID NO: 1929354 - RNA, 19 nt, Artificial Sequence
  Description of Artificial Sequence: Synthetic oligonucleotide
ugguaggaacucccaaagc

SEQ ID NO: 1929355 - RNA, 19 nt, Artificial Sequence
  Description of Artificial Sequence: Synthetic oligonucleotide
cucgcagacuggaugguag

SEQ ID NO: 1929356 - RNA, 19 nt, Artificial Sequence
  Description of Artificial Sequence: Synthetic oligonucleotide
cagacuggaugguaggaac

SEQ ID NO: 1929357 - RNA, 19 nt, Artificial Sequence
  Description of Artificial Sequence: Synthetic oligonucleotide
agucugagccaccuuccuc

SEQ ID NO: 1929358 - RNA, 19 nt, Artificial Sequence
  Description of Artificial Sequence: Synthetic oligonucleotide
uccaccccaagcagcuucg

SEQ ID NO: 1929359 - RNA, 19 nt, Artificial Sequence
  Description of Artificial Sequence: Synthetic oligonucleotide
acgcucacggcacagccag

SEQ ID NO: 1929360 - RNA, 19 nt, Artificial Sequence
  Description of Artificial Sequence: Synthetic oligonucleotide
uuccucagggccaguuccg

SEQ ID NO: 1929361 - RNA, 19 nt, Artificial Sequence
  Description of Artificial Sequence: Synthetic oligonucleotide
aguuccguguccugagcag

SEQ ID NO: 1929362 - RNA, 19 nt, Artificial Sequence
  Description of Artificial Sequence: Synthetic oligonucleotide
guggcauuccugcccaagg

SEQ ID NO: 1929363 - RNA, 19 nt, Artificial Sequence
  Description of Artificial Sequence: Synthetic oligonucleotide
caguacgccagccugccgc

SEQ ID NO: 1929364 - RNA, 19 nt, Artificial Sequence
  Description of Artificial Sequence: Synthetic oligonucleotide
aguucguggaccguggggu

SEQ ID NO: 1929365 - RNA, 19 nt, Artificial Sequence
  Description of Artificial Sequence: Synthetic oligonucleotide
ugcccaaggaggaccuggg

SEQ ID NO: 1929366 - RNA, 19 nt, Artificial Sequence
  Description of Artificial Sequence: Synthetic oligonucleotide
gaguccuuuagcaaaucuc

SEQ ID NO: 1929367 - RNA, 19 nt, Artificial Sequence
  Description of Artificial Sequence: Synthetic oligonucleotide
uucuguccagggaaacagc

SEQ ID NO: 1929368 - RNA, 19 nt, Artificial Sequence
  Description of Artificial Sequence: Synthetic oligonucleotide
ucgcagacuggaugguagg

SEQ ID NO: 1929369 - RNA, 19 nt, Artificial Sequence
  Description of Artificial Sequence: Synthetic oligonucleotide
agcaacacgcucacggcac

SEQ ID NO: 1929370 - RNA, 19 nt, Artificial Sequence
  Description of Artificial Sequence: Synthetic oligonucleotide
uagucggaggacccggccc

SEQ ID NO: 1929371 - RNA, 19 nt, Artificial Sequence
  Description of Artificial Sequence: Synthetic oligonucleotide
uccgcuccaccccaagcag

SEQ ID NO: 1929372 - RNA, 19 nt, Artificial Sequence
  Description of Artificial Sequence: Synthetic oligonucleotide
ucucggugccacacaaccc

SEQ ID NO: 1929373 - RNA, 19 nt, Artificial Sequence
  Description of Artificial Sequence: Synthetic oligonucleotide
uggaugguaggaacuccca

SEQ ID NO: 1929374 - RNA, 19 nt, Artificial Sequence
  Description of Artificial Sequence: Synthetic oligonucleotide
ugccauggggcaugucugg

SEQ ID NO: 1929375 - RNA, 19 nt, Artificial Sequence
  Description of Artificial Sequence: Synthetic oligonucleotide
gguccaaggugccaugggg

SEQ ID NO: 1929376 - RNA, 19 nt, Artificial Sequence
  Description of Artificial Sequence: Synthetic oligonucleotide
ugcaccccggcaaucugag

SEQ ID NO: 1929377 - RNA, 19 nt, Artificial Sequence
  Description of Artificial Sequence: Synthetic oligonucleotide
gcuguguguauucuccagg

SEQ ID NO: 1929378 - RNA, 19 nt, Artificial Sequence
  Description of Artificial Sequence: Synthetic oligonucleotide
guuccuagaccaccgcgcc

SEQ ID NO: 1929379 - RNA, 19 nt, Artificial Sequence
  Description of Artificial Sequence: Synthetic oligonucleotide
gacacagagucacagugcu

SEQ ID NO: 1929380 - RNA, 19 nt, Artificial Sequence
  Description of Artificial Sequence: Synthetic oligonucleotide
uguauucuccaggcacacg

SEQ ID NO: 1929381 - RNA, 19 nt, Artificial Sequence
  Description of Artificial Sequence: Synthetic oligonucleotide
cacaaacaggguccgcucc

SEQ ID NO: 1929382 - RNA, 19 nt, Artificial Sequence
  Description of Artificial Sequence: Synthetic oligonucleotide
gcucacagccuguagacgc

SEQ ID NO: 1929383 - RNA, 19 nt, Artificial Sequence
  Description of Artificial Sequence: Synthetic oligonucleotide
gagugagugcucucuccag

SEQ ID NO: 1929384 - RNA, 19 nt, Artificial Sequence
  Description of Artificial Sequence: Synthetic oligonucleotide
ggggucuucuccguaaucg

SEQ ID NO: 1929385 - RNA, 19 nt, Artificial Sequence
  Description of Artificial Sequence: Synthetic oligonucleotide
uguucuguccagggaaaca

SEQ ID NO: 1929386 - RNA, 19 nt, Artificial Sequence
  Description of Artificial Sequence: Synthetic oligonucleotide
agcuucgcagccuuuuccu

SEQ ID NO: 1929387 - RNA, 19 nt, Artificial Sequence
  Description of Artificial Sequence: Synthetic oligonucleotide
cauucagguccaaggugcc

SEQ ID NO: 1929388 - RNA, 19 nt, Artificial Sequence
  Description of Artificial Sequence: Synthetic oligonucleotide
acacaacccgcacggagug

SEQ ID NO: 1929389 - RNA, 19 nt, Artificial Sequence
  Description of Artificial Sequence: Synthetic oligonucleotide
aacucccaaagccccgagu

SEQ ID NO: 1929390 - RNA, 19 nt, Artificial Sequence
  Description of Artificial Sequence: Synthetic oligonucleotide
guggacccgagcuccaugc

SEQ ID NO: 1929391 - RNA, 19 nt, Artificial Sequence
  Description of Artificial Sequence: Synthetic oligonucleotide
gagugcucucuccagcuca

SEQ ID NO: 1929392 - RNA, 19 nt, Artificial Sequence
  Description of Artificial Sequence: Synthetic oligonucleotide
cucccacuuccucagggcc

SEQ ID NO: 1929393 - RNA, 19 nt, Artificial Sequence
  Description of Artificial Sequence: Synthetic oligonucleotide
accuggcggagguagucgg

SEQ ID NO: 1929394 - RNA, 19 nt, Artificial Sequence
  Description of Artificial Sequence: Synthetic oligonucleotide
ucuucuccguaaucgucgu

SEQ ID NO: 1929395 - RNA, 19 nt, Artificial Sequence
  Description of Artificial Sequence: Synthetic oligonucleotide
aggcacacgagcucgcaga

SEQ ID NO: 1929396 - RNA, 19 nt, Artificial Sequence
  Description of Artificial Sequence: Synthetic oligonucleotide
agacacgucucggugccac

SEQ ID NO: 1929397 - RNA, 19 nt, Artificial Sequence
  Description of Artificial Sequence: Synthetic oligonucleotide
agggccucaacugucucag

SEQ ID NO: 1929398 - RNA, 19 nt, Artificial Sequence
  Description of Artificial Sequence: Synthetic oligonucleotide
ugcgcaggucuacuacuug

SEQ ID NO: 1929399 - RNA, 19 nt, Artificial Sequence
  Description of Artificial Sequence: Synthetic oligonucleotide
auggcgugccucauggccg

SEQ ID NO: 1929400 - RNA, 19 nt, Artificial Sequence
  Description of Artificial Sequence: Synthetic oligonucleotide
gaccugggaaccccggcgc

SEQ ID NO: 1929401 - RNA, 19 nt, Artificial Sequence
  Description of Artificial Sequence: Synthetic oligonucleotide
ucaacugucucagcacaaa

SEQ ID NO: 1929402 - RNA, 19 nt, Artificial Sequence
  Description of Artificial Sequence: Synthetic oligonucleotide
gaucccugguucccugacc

SEQ ID NO: 1929403 - RNA, 19 nt, Artificial Sequence
  Description of Artificial Sequence: Synthetic oligonucleotide
ugcauucaucagccgugcc

SEQ ID NO: 1929404 - RNA, 19 nt, Artificial Sequence
  Description of Artificial Sequence: Synthetic oligonucleotide
ucuacuacuugggccggga

SEQ ID NO: 1929405 - RNA, 19 nt, Artificial Sequence
  Description of Artificial Sequence: Synthetic oligonucleotide
cacuauguuggucuccaca

SEQ ID NO: 1929406 - RNA, 19 nt, Artificial Sequence
  Description of Artificial Sequence: Synthetic oligonucleotide
auagacguggagguggcau

SEQ ID NO: 1929407 - RNA, 19 nt, Artificial Sequence
  Description of Artificial Sequence: Synthetic oligonucleotide
caguucguggaccgugggg

SEQ ID NO: 1929408 - RNA, 19 nt, Artificial Sequence
  Description of Artificial Sequence: Synthetic oligonucleotide
cauucucguggucccuugg

SEQ ID NO: 1929409 - RNA, 19 nt, Artificial Sequence
  Description of Artificial Sequence: Synthetic oligonucleotide
cuccacgaggcgagcaggg

SEQ ID NO: 1929410 - RNA, 19 nt, Artificial Sequence
  Description of Artificial Sequence: Synthetic oligonucleotide
ucggccauggcgugccuca

SEQ ID NO: 1929411 - RNA, 19 nt, Artificial Sequence
  Description of Artificial Sequence: Synthetic oligonucleotide
gagguagucggaggacccg

SEQ ID NO: 1929412 - RNA, 19 nt, Artificial Sequence
  Description of Artificial Sequence: Synthetic oligonucleotide
aaacagcaacacgcucacg

SEQ ID NO: 1929413 - RNA, 19 nt, Artificial Sequence
  Description of Artificial Sequence: Synthetic oligonucleotide
ucugcgggaggcagcccag

SEQ ID NO: 1929414 - RNA, 19 nt, Artificial Sequence
  Description of Artificial Sequence: Synthetic oligonucleotide
acacgucucggugccacac

SEQ ID NO: 1929415 - RNA, 19 nt, Artificial Sequence
  Description of Artificial Sequence: Synthetic oligonucleotide
ggcagccgcagccaguacg

SEQ ID NO: 1929416 - RNA, 19 nt, Artificial Sequence
  Description of Artificial Sequence: Synthetic oligonucleotide
aaucgucgucucccacgag

SEQ ID NO: 1929417 - RNA, 19 nt, Artificial Sequence
  Description of Artificial Sequence: Synthetic oligonucleotide
uuccuagaccaccgcgccc

SEQ ID NO: 1929418 - RNA, 19 nt, Artificial Sequence
  Description of Artificial Sequence: Synthetic oligonucleotide
ccgagcuccaugcaugugg

SEQ ID NO: 1929419 - RNA, 19 nt, Artificial Sequence
  Description of Artificial Sequence: Synthetic oligonucleotide
cagugcuccacgaggcgag

SEQ ID NO: 1929420 - RNA, 19 nt, Artificial Sequence
  Description of Artificial Sequence: Synthetic oligonucleotide
ccaaggaggaccugggaac

SEQ ID NO: 1929421 - RNA, 19 nt, Artificial Sequence
  Description of Artificial Sequence: Synthetic oligonucleotide
gacuggaugguaggaacuc

SEQ ID NO: 1929422 - RNA, 19 nt, Artificial Sequence
  Description of Artificial Sequence: Synthetic oligonucleotide
gacccgagcuccaugcaug

SEQ ID NO: 1929423 - RNA, 19 nt, Artificial Sequence
  Description of Artificial Sequence: Synthetic oligonucleotide
uggcggagguagucggagg

SEQ ID NO: 1929424 - RNA, 19 nt, Artificial Sequence
  Description of Artificial Sequence: Synthetic oligonucleotide
cucauggccggcccuggcc

SEQ ID NO: 1929425 - RNA, 19 nt, Artificial Sequence
  Description of Artificial Sequence: Synthetic oligonucleotide
gcgcaggucuacuacuugg

SEQ ID NO: 1929426 - RNA, 19 nt, Artificial Sequence
  Description of Artificial Sequence: Synthetic oligonucleotide
ggaccugggaaccccggcg

SEQ ID NO: 1929427 - RNA, 19 nt, Artificial Sequence
  Description of Artificial Sequence: Synthetic oligonucleotide
cacaaacucccacuuccuc

SEQ ID NO: 1929428 - RNA, 19 nt, Artificial Sequence
  Description of Artificial Sequence: Synthetic oligonucleotide
agagaugagguuggccaug

SEQ ID NO: 1929429 - RNA, 19 nt, Artificial Sequence
  Description of Artificial Sequence: Synthetic oligonucleotide
ucccacgagcgccucggcc

SEQ ID NO: 1929430 - RNA, 19 nt, Artificial Sequence
  Description of Artificial Sequence: Synthetic oligonucleotide
ugcgggaggcagcccagcc

SEQ ID NO: 1929431 - RNA, 19 nt, Artificial Sequence
  Description of Artificial Sequence: Synthetic oligonucleotide
ggccaagaggugcaccugg

SEQ ID NO: 1929432 - RNA, 19 nt, Artificial Sequence
  Description of Artificial Sequence: Synthetic oligonucleotide
cugcccaaggaggaccugg

SEQ ID NO: 1929433 - RNA, 19 nt, Artificial Sequence
  Description of Artificial Sequence: Synthetic oligonucleotide
uccucagcgcucacagccu

SEQ ID NO: 1929434 - RNA, 19 nt, Artificial Sequence
  Description of Artificial Sequence: Synthetic oligonucleotide
ugagugcucucuccagcuc

SEQ ID NO: 1929435 - RNA, 19 nt, Artificial Sequence
  Description of Artificial Sequence: Synthetic oligonucleotide
gucgucucccacgagcgcc

SEQ ID NO: 1929436 - RNA, 19 nt, Artificial Sequence
  Description of Artificial Sequence: Synthetic oligonucleotide
guagucggaggacccggcc

SEQ ID NO: 1929437 - RNA, 19 nt, Artificial Sequence
  Description of Artificial Sequence: Synthetic oligonucleotide
uacgccagccugccgcaug

SEQ ID NO: 1929438 - RNA, 19 nt, Artificial Sequence
  Description of Artificial Sequence: Synthetic oligonucleotide
ugagccaccccgcccugcu

SEQ ID NO: 1929439 - RNA, 19 nt, Artificial Sequence
  Description of Artificial Sequence: Synthetic oligonucleotide
gaacucccaaagccccgag

SEQ ID NO: 1929440 - RNA, 19 nt, Artificial Sequence
  Description of Artificial Sequence: Synthetic oligonucleotide
caccgaggcccuuagagaa

SEQ ID NO: 1929441 - RNA, 19 nt, Artificial Sequence
  Description of Artificial Sequence: Synthetic oligonucleotide
agggaaacagcaacacgcu

SEQ ID NO: 1929442 - RNA, 19 nt, Artificial Sequence
  Description of Artificial Sequence: Synthetic oligonucleotide
agaccaccgcgcccagggc

SEQ ID NO: 1929443 - RNA, 19 nt, Artificial Sequence
  Description of Artificial Sequence: Synthetic oligonucleotide
ucuccguaaucgucgucuc

SEQ ID NO: 1929444 - RNA, 19 nt, Artificial Sequence
  Description of Artificial Sequence: Synthetic oligonucleotide
uccacgaggcgagcagggg

SEQ ID NO: 1929445 - RNA, 19 nt, Artificial Sequence
  Description of Artificial Sequence: Synthetic oligonucleotide
gucaccgugucgcugcgca

SEQ ID NO: 1929446 - RNA, 19 nt, Artificial Sequence
  Description of Artificial Sequence: Synthetic oligonucleotide
guccuuuagcaaaucucug

SEQ ID NO: 1929447 - RNA, 19 nt, Artificial Sequence
  Description of Artificial Sequence: Synthetic oligonucleotide
agugcaccccggcaaucug

SEQ ID NO: 1929448 - RNA, 19 nt, Artificial Sequence
  Description of Artificial Sequence: Synthetic oligonucleotide
cuccguaaucgucgucucc

SEQ ID NO: 1929449 - RNA, 19 nt, Artificial Sequence
  Description of Artificial Sequence: Synthetic oligonucleotide
aguacgccagccugccgca

SEQ ID NO: 1929450 - RNA, 19 nt, Artificial Sequence
  Description of Artificial Sequence: Synthetic oligonucleotide
ugccgcaugccuccaccca

SEQ ID NO: 1929451 - RNA, 19 nt, Artificial Sequence
  Description of Artificial Sequence: Synthetic oligonucleotide
ugcggaggcgccaggcuuc

SEQ ID NO: 1929452 - RNA, 19 nt, Artificial Sequence
  Description of Artificial Sequence: Synthetic oligonucleotide
cugcauucaucagccgugc

SEQ ID NO: 1929453 - RNA, 19 nt, Artificial Sequence
  Description of Artificial Sequence: Synthetic oligonucleotide
acagugcuccacgaggcga

SEQ ID NO: 1929454 - RNA, 19 nt, Artificial Sequence
  Description of Artificial Sequence: Synthetic oligonucleotide
cuccaccccaagcagcuuc

SEQ ID NO: 1929455 - RNA, 19 nt, Artificial Sequence
  Description of Artificial Sequence: Synthetic oligonucleotide
acggaguguucuguccagg

SEQ ID NO: 1929456 - RNA, 19 nt, Artificial Sequence
  Description of Artificial Sequence: Synthetic oligonucleotide
ucgucucccacgagcgccu

SEQ ID NO: 1929457 - RNA, 19 nt, Artificial Sequence
  Description of Artificial Sequence: Synthetic oligonucleotide
agugcuccacgaggcgagc

SEQ ID NO: 1929458 - RNA, 19 nt, Artificial Sequence
  Description of Artificial Sequence: Synthetic oligonucleotide
aacccgcacggaguguucu

SEQ ID NO: 1929459 - RNA, 19 nt, Artificial Sequence
  Description of Artificial Sequence: Synthetic oligonucleotide
ccacagaacaaauggguga

SEQ ID NO: 1929460 - RNA, 19 nt, Artificial Sequence
  Description of Artificial Sequence: Synthetic oligonucleotide
agcgccucggccauggcgu

SEQ ID NO: 1929461 - RNA, 19 nt, Artificial Sequence
  Description of Artificial Sequence: Synthetic oligonucleotide
uggacccgagcuccaugca

SEQ ID NO: 1929462 - RNA, 19 nt, Artificial Sequence
  Description of Artificial Sequence: Synthetic oligonucleotide
caccccgcccugcucauag

SEQ ID NO: 1929463 - RNA, 19 nt, Artificial Sequence
  Description of Artificial Sequence: Synthetic oligonucleotide
acgucucggugccacacaa

SEQ ID NO: 1929464 - RNA, 19 nt, Artificial Sequence
  Description of Artificial Sequence: Synthetic oligonucleotide
gugccauggggcaugucug

SEQ ID NO: 1929465 - RNA, 19 nt, Artificial Sequence
  Description of Artificial Sequence: Synthetic oligonucleotide
ggaccguggggucuucucc

SEQ ID NO: 1929466 - RNA, 19 nt, Artificial Sequence
  Description of Artificial Sequence: Synthetic oligonucleotide
agccaccccgcccugcuca

SEQ ID NO: 1929467 - RNA, 19 nt, Artificial Sequence
  Description of Artificial Sequence: Synthetic oligonucleotide
ggccucaacugucucagca

SEQ ID NO: 1929468 - RNA, 19 nt, Artificial Sequence
  Description of Artificial Sequence: Synthetic oligonucleotide
gugcaccuggcggagguag

SEQ ID NO: 1929469 - RNA, 19 nt, Artificial Sequence
  Description of Artificial Sequence: Synthetic oligonucleotide
ggacacagagucacagugc

SEQ ID NO: 1929470 - RNA, 19 nt, Artificial Sequence
  Description of Artificial Sequence: Synthetic oligonucleotide
cuacuacuugggccgggac

SEQ ID NO: 1929471 - RNA, 19 nt, Artificial Sequence
  Description of Artificial Sequence: Synthetic oligonucleotide
cuggcggagguagucggag

SEQ ID NO: 1929472 - RNA, 19 nt, Artificial Sequence
  Description of Artificial Sequence: Synthetic oligonucleotide
gaggaccugggaaccccgg

SEQ ID NO: 1929473 - RNA, 19 nt, Artificial Sequence
  Description of Artificial Sequence: Synthetic oligonucleotide
guguauucuccaggcacac

SEQ ID NO: 1929474 - RNA, 19 nt, Artificial Sequence
  Description of Artificial Sequence: Synthetic oligonucleotide
uggaccguggggucuucuc

SEQ ID NO: 1929475 - RNA, 19 nt, Artificial Sequence
  Description of Artificial Sequence: Synthetic oligonucleotide
acguggagguggcauuccu

SEQ ID NO: 1929476 - RNA, 19 nt, Artificial Sequence
  Description of Artificial Sequence: Synthetic oligonucleotide
acagccagucugagccacc

SEQ ID NO: 1929477 - RNA, 19 nt, Artificial Sequence
  Description of Artificial Sequence: Synthetic oligonucleotide
cugccgcaugccuccaccc

SEQ ID NO: 1929478 - RNA, 19 nt, Artificial Sequence
  Description of Artificial Sequence: Synthetic oligonucleotide
ucugagccaccccgcccug

SEQ ID NO: 1929479 - RNA, 19 nt, Artificial Sequence
  Description of Artificial Sequence: Synthetic oligonucleotide
caguuccguguccugagca

SEQ ID NO: 1929480 - RNA, 19 nt, Artificial Sequence
  Description of Artificial Sequence: Synthetic oligonucleotide
acccgagcuccaugcaugu

SEQ ID NO: 1929481 - RNA, 19 nt, Artificial Sequence
  Description of Artificial Sequence: Synthetic oligonucleotide
cagcaacacgcucacggca

SEQ ID NO: 1929482 - RNA, 19 nt, Artificial Sequence
  Description of Artificial Sequence: Synthetic oligonucleotide
caccuggcggagguagucg

SEQ ID NO: 1929483 - RNA, 19 nt, Artificial Sequence
  Description of Artificial Sequence: Synthetic oligonucleotide
aaccccggcgccggcagug

SEQ ID NO: 1929484 - RNA, 19 nt, Artificial Sequence
  Description of Artificial Sequence: Synthetic oligonucleotide
acacagagucacagugcuc

SEQ ID NO: 1929485 - RNA, 19 nt, Artificial Sequence
  Description of Artificial Sequence: Synthetic oligonucleotide
gccaguuccguguccugag

SEQ ID NO: 1929486 - RNA, 19 nt, Artificial Sequence
  Description of Artificial Sequence: Synthetic oligonucleotide
cugaccucagggccucaac

SEQ ID NO: 1929487 - RNA, 19 nt, Artificial Sequence
  Description of Artificial Sequence: Synthetic oligonucleotide
ucguggucccuuggcagca

SEQ ID NO: 1929488 - RNA, 19 nt, Artificial Sequence
  Description of Artificial Sequence: Synthetic oligonucleotide
cucaacugucucagcacaa

SEQ ID NO: 1929489 - RNA, 19 nt, Artificial Sequence
  Description of Artificial Sequence: Synthetic oligonucleotide
gugagugcucucuccagcu

SEQ ID NO: 1929490 - RNA, 19 nt, Artificial Sequence
  Description of Artificial Sequence: Synthetic oligonucleotide
cuccacccagggcuuugcg

SEQ ID NO: 1929491 - RNA, 19 nt, Artificial Sequence
  Description of Artificial Sequence: Synthetic oligonucleotide
cacacaacccgcacggagu

SEQ ID NO: 1929492 - RNA, 19 nt, Artificial Sequence
  Description of Artificial Sequence: Synthetic oligonucleotide
aggaucccugguucccuga

SEQ ID NO: 1929493 - RNA, 19 nt, Artificial Sequence
  Description of Artificial Sequence: Synthetic oligonucleotide
ccacacaacccgcacggag

SEQ ID NO: 1929494 - RNA, 19 nt, Artificial Sequence
  Description of Artificial Sequence: Synthetic oligonucleotide
ggaguguucuguccaggga

SEQ ID NO: 1929495 - RNA, 19 nt, Artificial Sequence
  Description of Artificial Sequence: Synthetic oligonucleotide
cacagccagucugagccac

SEQ ID NO: 1929496 - RNA, 19 nt, Artificial Sequence
  Description of Artificial Sequence: Synthetic oligonucleotide
agaaggacacagagucaca

SEQ ID NO: 1929497 - RNA, 19 nt, Artificial Sequence
  Description of Artificial Sequence: Synthetic oligonucleotide
acaacccgcacggaguguu

SEQ ID NO: 1929498 - RNA, 19 nt, Artificial Sequence
  Description of Artificial Sequence: Synthetic oligonucleotide
cacggcacagccagucuga

SEQ ID NO: 1929499 - RNA, 19 nt, Artificial Sequence
  Description of Artificial Sequence: Synthetic oligonucleotide
cucugcgggaggcagccca

SEQ ID NO: 1929500 - RNA, 19 nt, Artificial Sequence
  Description of Artificial Sequence: Synthetic oligonucleotide
cccgccaguuccuagacca

SEQ ID NO: 1929501 - RNA, 19 nt, Artificial Sequence
  Description of Artificial Sequence: Synthetic oligonucleotide
ggugccacacaacccgcac

SEQ ID NO: 1929502 - RNA, 19 nt, Artificial Sequence
  Description of Artificial Sequence: Synthetic oligonucleotide
cagugacccaucacagaga

SEQ ID NO: 1929503 - RNA, 19 nt, Artificial Sequence
  Description of Artificial Sequence: Synthetic oligonucleotide
guuccguguccugagcaga

SEQ ID NO: 1929504 - RNA, 19 nt, Artificial Sequence
  Description of Artificial Sequence: Synthetic oligonucleotide
gcgccaggcuucuucaaug

SEQ ID NO: 1929505 - RNA, 19 nt, Artificial Sequence
  Description of Artificial Sequence: Synthetic oligonucleotide
cugggaaccccggcgccgg

SEQ ID NO: 1929506 - RNA, 19 nt, Artificial Sequence
  Description of Artificial Sequence: Synthetic oligonucleotide
gggaaacagcaacacgcuc

SEQ ID NO: 1929507 - RNA, 19 nt, Artificial Sequence
  Description of Artificial Sequence: Synthetic oligonucleotide
guucguggaccgugggguc

SEQ ID NO: 1929508 - RNA, 19 nt, Artificial Sequence
  Description of Artificial Sequence: Synthetic oligonucleotide
cgcaggucuacuacuuggg

SEQ ID NO: 1929509 - RNA, 19 nt, Artificial Sequence
  Description of Artificial Sequence: Synthetic oligonucleotide
cucagggccaguuccgugu

SEQ ID NO: 1929510 - RNA, 19 nt, Artificial Sequence
  Description of Artificial Sequence: Synthetic oligonucleotide
accgugucgcugcgcaggu

SEQ ID NO: 1929511 - RNA, 19 nt, Artificial Sequence
  Description of Artificial Sequence: Synthetic oligonucleotide
gcaguucguggaccguggg

SEQ ID NO: 1929512 - RNA, 19 nt, Artificial Sequence
  Description of Artificial Sequence: Synthetic oligonucleotide
uccguguccugagcagaca

SEQ ID NO: 1929513 - RNA, 19 nt, Artificial Sequence
  Description of Artificial Sequence: Synthetic oligonucleotide
gcgcucacagccuguagac

SEQ ID NO: 1929514 - RNA, 19 nt, Artificial Sequence
  Description of Artificial Sequence: Synthetic oligonucleotide
gccgcaugccuccacccag

SEQ ID NO: 1929515 - RNA, 19 nt, Artificial Sequence
  Description of Artificial Sequence: Synthetic oligonucleotide
guguucuguccagggaaac

SEQ ID NO: 1929516 - RNA, 19 nt, Artificial Sequence
  Description of Artificial Sequence: Synthetic oligonucleotide
cugagccaccuuccucagc

SEQ ID NO: 1929517 - RNA, 19 nt, Artificial Sequence
  Description of Artificial Sequence: Synthetic oligonucleotide
ggaugguaggaacucccaa

SEQ ID NO: 1929518 - RNA, 19 nt, Artificial Sequence
  Description of Artificial Sequence: Synthetic oligonucleotide
ccccaagcagcuucgcagc

SEQ ID NO: 1929519 - RNA, 19 nt, Artificial Sequence
  Description of Artificial Sequence: Synthetic oligonucleotide
caacacgcucacggcacag

SEQ ID NO: 1929520 - RNA, 19 nt, Artificial Sequence
  Description of Artificial Sequence: Synthetic oligonucleotide
ccgagugagugcucucucc

SEQ ID NO: 1929521 - RNA, 19 nt, Artificial Sequence
  Description of Artificial Sequence: Synthetic oligonucleotide
gcuucgcagccuuuuccug

SEQ ID NO: 1929522 - RNA, 19 nt, Artificial Sequence
  Description of Artificial Sequence: Synthetic oligonucleotide
gguggcauuccugcccaag

SEQ ID NO: 1929523 - RNA, 19 nt, Artificial Sequence
  Description of Artificial Sequence: Synthetic oligonucleotide
guagacgcuggcacagcuc

SEQ ID NO: 1929524 - RNA, 19 nt, Artificial Sequence
  Description of Artificial Sequence: Synthetic oligonucleotide
accguggggucuucuccgu

SEQ ID NO: 1929525 - RNA, 19 nt, Artificial Sequence
  Description of Artificial Sequence: Synthetic oligonucleotide
acccgcacggaguguucug

SEQ ID NO: 1929526 - RNA, 19 nt, Artificial Sequence
  Description of Artificial Sequence: Synthetic oligonucleotide
cggaguguucuguccaggg

SEQ ID NO: 1929527 - RNA, 19 nt, Artificial Sequence
  Description of Artificial Sequence: Synthetic oligonucleotide
cuguagacgcuggcacagc

SEQ ID NO: 1929528 - RNA, 19 nt, Artificial Sequence
  Description of Artificial Sequence: Synthetic oligonucleotide
ggcacacgagcucgcagac

SEQ ID NO: 1929529 - RNA, 19 nt, Artificial Sequence
  Description of Artificial Sequence: Synthetic oligonucleotide
gacacgucucggugccaca

SEQ ID NO: 1929530 - RNA, 19 nt, Artificial Sequence
  Description of Artificial Sequence: Synthetic oligonucleotide
cagcucugcgggaggcagc

SEQ ID NO: 1929531 - RNA, 19 nt, Artificial Sequence
  Description of Artificial Sequence: Synthetic oligonucleotide
gcacggaguguucugucca

SEQ ID NO: 1929532 - RNA, 19 nt, Artificial Sequence
  Description of Artificial Sequence: Synthetic oligonucleotide
accgaggcccuuagagaag

SEQ ID NO: 1929533 - RNA, 19 nt, Artificial Sequence
  Description of Artificial Sequence: Synthetic oligonucleotide
ggccgggucaccgugucgc

SEQ ID NO: 1929534 - RNA, 19 nt, Artificial Sequence
  Description of Artificial Sequence: Synthetic oligonucleotide
cuucuccguaaucgucguc

SEQ ID NO: 1929535 - RNA, 19 nt, Artificial Sequence
  Description of Artificial Sequence: Synthetic oligonucleotide
gcacaaacaggguccgcuc

SEQ ID NO: 1929536 - RNA, 19 nt, Artificial Sequence
  Description of Artificial Sequence: Synthetic oligonucleotide
gguggacccgagcuccaug

SEQ ID NO: 1929537 - RNA, 19 nt, Artificial Sequence
  Description of Artificial Sequence: Synthetic oligonucleotide
gcagccgcagccaguacgc

SEQ ID NO: 1929538 - RNA, 19 nt, Artificial Sequence
  Description of Artificial Sequence: Synthetic oligonucleotide
ggaggaccugggaaccccg

SEQ ID NO: 1929539 - RNA, 19 nt, Artificial Sequence
  Description of Artificial Sequence: Synthetic oligonucleotide
aaggugccauggggcaugu

SEQ ID NO: 1929540 - RNA, 19 nt, Artificial Sequence
  Description of Artificial Sequence: Synthetic oligonucleotide
ccggcaaucugagccaccc

SEQ ID NO: 1929541 - RNA, 19 nt, Artificial Sequence
  Description of Artificial Sequence: Synthetic oligonucleotide
cgagcucgcagacuggaug

SEQ ID NO: 1929542 - RNA, 19 nt, Artificial Sequence
  Description of Artificial Sequence: Synthetic oligonucleotide
ggucuacuacuugggccgg

SEQ ID NO: 1929543 - RNA, 19 nt, Artificial Sequence
  Description of Artificial Sequence: Synthetic oligonucleotide
gcaccgaggcccuuagaga

SEQ ID NO: 1929544 - RNA, 19 nt, Artificial Sequence
  Description of Artificial Sequence: Synthetic oligonucleotide
cguguccugagcagacacg

SEQ ID NO: 1929545 - RNA, 19 nt, Artificial Sequence
  Description of Artificial Sequence: Synthetic oligonucleotide
gcuccacgaggcgagcagg

SEQ ID NO: 1929546 - RNA, 19 nt, Artificial Sequence
  Description of Artificial Sequence: Synthetic oligonucleotide
cuauguuggucuccacagu

SEQ ID NO: 1929547 - RNA, 19 nt, Artificial Sequence
  Description of Artificial Sequence: Synthetic oligonucleotide
ggaucccugguucccugac

SEQ ID NO: 1929548 - RNA, 19 nt, Artificial Sequence
  Description of Artificial Sequence: Synthetic oligonucleotide
ccguguccugagcagacac

SEQ ID NO: 1929549 - RNA, 19 nt, Artificial Sequence
  Description of Artificial Sequence: Synthetic oligonucleotide
cugggagugcaccccggca

SEQ ID NO: 1929550 - RNA, 19 nt, Artificial Sequence
  Description of Artificial Sequence: Synthetic oligonucleotide
cccgcccugcucauagacg

SEQ ID NO: 1929551 - RNA, 19 nt, Artificial Sequence
  Description of Artificial Sequence: Synthetic oligonucleotide
ccugccgcaugccuccacc

SEQ ID NO: 1929552 - RNA, 19 nt, Artificial Sequence
  Description of Artificial Sequence: Synthetic oligonucleotide
gcugggagugcaccccggc

SEQ ID NO: 1929553 - RNA, 19 nt, Artificial Sequence
  Description of Artificial Sequence: Synthetic oligonucleotide
ucccugguucccugaccuc

SEQ ID NO: 1929554 - RNA, 19 nt, Artificial Sequence
  Description of Artificial Sequence: Synthetic oligonucleotide
gugggccaagaggugcacc

SEQ ID NO: 1929555 - RNA, 19 nt, Artificial Sequence
  Description of Artificial Sequence: Synthetic oligonucleotide
cacgagcucgcagacugga

SEQ ID NO: 1929556 - RNA, 19 nt, Artificial Sequence
  Description of Artificial Sequence: Synthetic oligonucleotide
caacccgcacggaguguuc

SEQ ID NO: 1929557 - RNA, 19 nt, Artificial Sequence
  Description of Artificial Sequence: Synthetic oligonucleotide
ucgcugcgcaggucuacua

SEQ ID NO: 1929558 - RNA, 19 nt, Artificial Sequence
  Description of Artificial Sequence: Synthetic oligonucleotide
ggcccuuagagaagcagaa

SEQ ID NO: 1929559 - RNA, 19 nt, Artificial Sequence
  Description of Artificial Sequence: Synthetic oligonucleotide
cuggccgggucaccguguc

SEQ ID NO: 1929560 - RNA, 19 nt, Artificial Sequence
  Description of Artificial Sequence: Synthetic oligonucleotide
caccccaagcagcuucgca

SEQ ID NO: 1929561 - RNA, 19 nt, Artificial Sequence
  Description of Artificial Sequence: Synthetic oligonucleotide
gguagucggaggacccggc

SEQ ID NO: 1929562 - RNA, 19 nt, Artificial Sequence
  Description of Artificial Sequence: Synthetic oligonucleotide
uccaugcaugugggccaag

SEQ ID NO: 1929563 - RNA, 19 nt, Artificial Sequence
  Description of Artificial Sequence: Synthetic oligonucleotide
cgcacggaguguucugucc

SEQ ID NO: 1929564 - RNA, 19 nt, Artificial Sequence
  Description of Artificial Sequence: Synthetic oligonucleotide
cggcagugacccaucacag

SEQ ID NO: 1929565 - RNA, 19 nt, Artificial Sequence
  Description of Artificial Sequence: Synthetic oligonucleotide
ucccugaccucagggccuc

SEQ ID NO: 1929566 - RNA, 19 nt, Artificial Sequence
  Description of Artificial Sequence: Synthetic oligonucleotide
cucacagccuguagacgcu

SEQ ID NO: 1929567 - RNA, 19 nt, Artificial Sequence
  Description of Artificial Sequence: Synthetic oligonucleotide
ggaacucccaaagccccga

SEQ ID NO: 1929568 - RNA, 19 nt, Artificial Sequence
  Description of Artificial Sequence: Synthetic oligonucleotide
agcucgcagacuggauggu

SEQ ID NO: 1929569 - RNA, 19 nt, Artificial Sequence
  Description of Artificial Sequence: Synthetic oligonucleotide
ccagcacuauguuggucuc

SEQ ID NO: 1929570 - RNA, 19 nt, Artificial Sequence
  Description of Artificial Sequence: Synthetic oligonucleotide
cccacgagcgccucggcca

SEQ ID NO: 1929571 - RNA, 19 nt, Artificial Sequence
  Description of Artificial Sequence: Synthetic oligonucleotide
ggcuuugcggaggcgccag

SEQ ID NO: 1929572 - RNA, 19 nt, Artificial Sequence
  Description of Artificial Sequence: Synthetic oligonucleotide
cgggucaccgugucgcugc

SEQ ID NO: 1929573 - RNA, 19 nt, Artificial Sequence
  Description of Artificial Sequence: Synthetic oligonucleotide
cccaagcagcuucgcagcc

SEQ ID NO: 1929574 - RNA, 19 nt, Artificial Sequence
  Description of Artificial Sequence: Synthetic oligonucleotide
ccaguuccguguccugagc

SEQ ID NO: 1929575 - RNA, 19 nt, Artificial Sequence
  Description of Artificial Sequence: Synthetic oligonucleotide
gugcaccccggcaaucuga

SEQ ID NO: 1929576 - RNA, 19 nt, Artificial Sequence
  Description of Artificial Sequence: Synthetic oligonucleotide
ccgcaugccuccacccagg

SEQ ID NO: 1929577 - RNA, 19 nt, Artificial Sequence
  Description of Artificial Sequence: Synthetic oligonucleotide
uggugcaccgaggcccuua

SEQ ID NO: 1929578 - RNA, 19 nt, Artificial Sequence
  Description of Artificial Sequence: Synthetic oligonucleotide
cacgucucggugccacaca

SEQ ID NO: 1929579 - RNA, 19 nt, Artificial Sequence
  Description of Artificial Sequence: Synthetic oligonucleotide
ggcccuggccgggucaccg

SEQ ID NO: 1929580 - RNA, 19 nt, Artificial Sequence
  Description of Artificial Sequence: Synthetic oligonucleotide
gcuuugcggaggcgccagg

SEQ ID NO: 1929581 - RNA, 19 nt, Artificial Sequence
  Description of Artificial Sequence: Synthetic oligonucleotide
gggucuucuccguaaucgu

SEQ ID NO: 1929582 - RNA, 19 nt, Artificial Sequence
  Description of Artificial Sequence: Synthetic oligonucleotide
gggucaccgugucgcugcg

SEQ ID NO: 1929583 - RNA, 19 nt, Artificial Sequence
  Description of Artificial Sequence: Synthetic oligonucleotide
caagcagcuucgcagccuu

SEQ ID NO: 1929584 - RNA, 19 nt, Artificial Sequence
  Description of Artificial Sequence: Synthetic oligonucleotide
gcaugucugggaggggcug

SEQ ID NO: 1929585 - RNA, 19 nt, Artificial Sequence
  Description of Artificial Sequence: Synthetic oligonucleotide
gcugcgcaggucuacuacu

SEQ ID NO: 1929586 - RNA, 19 nt, Artificial Sequence
  Description of Artificial Sequence: Synthetic oligonucleotide
ucguggaccguggggucuu

SEQ ID NO: 1929587 - RNA, 19 nt, Artificial Sequence
  Description of Artificial Sequence: Synthetic oligonucleotide
ccugggaaccccggcgccg

SEQ ID NO: 1929588 - RNA, 19 nt, Artificial Sequence
  Description of Artificial Sequence: Synthetic oligonucleotide
gcaacacgcucacggcaca

SEQ ID NO: 1929589 - RNA, 19 nt, Artificial Sequence
  Description of Artificial Sequence: Synthetic oligonucleotide
agacgcuggcacagcucug

SEQ ID NO: 1929590 - RNA, 19 nt, Artificial Sequence
  Description of Artificial Sequence: Synthetic oligonucleotide
aggcgccaggcuucuucaa

SEQ ID NO: 1929591 - RNA, 19 nt, Artificial Sequence
  Description of Artificial Sequence: Synthetic oligonucleotide
cauagacguggagguggca

SEQ ID NO: 1929592 - RNA, 19 nt, Artificial Sequence
  Description of Artificial Sequence: Synthetic oligonucleotide
cugcgggaggcagcccagc

SEQ ID NO: 1929593 - RNA, 19 nt, Artificial Sequence
  Description of Artificial Sequence: Synthetic oligonucleotide
cgagugagugcucucucca

SEQ ID NO: 1929594 - RNA, 19 nt, Artificial Sequence
  Description of Artificial Sequence: Synthetic oligonucleotide
cagccgcagccaguacgcc

SEQ ID NO: 1929595 - RNA, 19 nt, Artificial Sequence
  Description of Artificial Sequence: Synthetic oligonucleotide
ccccgcccugcucauagac

SEQ ID NO: 1929596 - RNA, 19 nt, Artificial Sequence
  Description of Artificial Sequence: Synthetic oligonucleotide
gcacuauguuggucuccac

SEQ ID NO: 1929597 - RNA, 19 nt, Artificial Sequence
  Description of Artificial Sequence: Synthetic oligonucleotide
gugcuccacgaggcgagca

SEQ ID NO: 1929598 - RNA, 19 nt, Artificial Sequence
  Description of Artificial Sequence: Synthetic oligonucleotide
ggcugggagugcaccccgg

SEQ ID NO: 1929599 - RNA, 19 nt, Artificial Sequence
  Description of Artificial Sequence: Synthetic oligonucleotide
cagucugagccaccuuccu

SEQ ID NO: 1929600 - RNA, 19 nt, Artificial Sequence
  Description of Artificial Sequence: Synthetic oligonucleotide
acgagcucgcagacuggau

SEQ ID NO: 1929601 - RNA, 19 nt, Artificial Sequence
  Description of Artificial Sequence: Synthetic oligonucleotide
cgcuggcacagcucugcgg

SEQ ID NO: 1929602 - RNA, 19 nt, Artificial Sequence
  Description of Artificial Sequence: Synthetic oligonucleotide
cagguggacccgagcucca

SEQ ID NO: 1929603 - RNA, 19 nt, Artificial Sequence
  Description of Artificial Sequence: Synthetic oligonucleotide
ccaugguguuggugggcac

SEQ ID NO: 1929604 - RNA, 19 nt, Artificial Sequence
  Description of Artificial Sequence: Synthetic oligonucleotide
accccgcccugcucauaga

SEQ ID NO: 1929605 - RNA, 19 nt, Artificial Sequence
  Description of Artificial Sequence: Synthetic oligonucleotide
cucacggcacagccagucu

SEQ ID NO: 1929606 - RNA, 19 nt, Artificial Sequence
  Description of Artificial Sequence: Synthetic oligonucleotide
ccaguacgccagccugccg

SEQ ID NO: 1929607 - RNA, 19 nt, Artificial Sequence
  Description of Artificial Sequence: Synthetic oligonucleotide
cccgagugagugcucucuc

SEQ ID NO: 1929608 - RNA, 19 nt, Artificial Sequence
  Description of Artificial Sequence: Synthetic oligonucleotide
agguggacccgagcuccau

SEQ ID NO: 1929609 - RNA, 19 nt, Artificial Sequence
  Description of Artificial Sequence: Synthetic oligonucleotide
cugcgcaggucuacuacuu

SEQ ID NO: 1929610 - RNA, 19 nt, Artificial Sequence
  Description of Artificial Sequence: Synthetic oligonucleotide
gcggagguagucggaggac

SEQ ID NO: 1929611 - RNA, 19 nt, Artificial Sequence
  Description of Artificial Sequence: Synthetic oligonucleotide
gggccucaacugucucagc

SEQ ID NO: 1929612 - RNA, 19 nt, Artificial Sequence
  Description of Artificial Sequence: Synthetic oligonucleotide
caccgcgcccagggcaccc

SEQ ID NO: 1929613 - RNA, 19 nt, Artificial Sequence
  Description of Artificial Sequence: Synthetic oligonucleotide
gcaccuggcggagguaguc

SEQ ID NO: 1929614 - RNA, 19 nt, Artificial Sequence
  Description of Artificial Sequence: Synthetic oligonucleotide
ccgcccugcucauagacgu

SEQ ID NO: 1929615 - RNA, 19 nt, Artificial Sequence
  Description of Artificial Sequence: Synthetic oligonucleotide
cccggcaaucugagccacc

SEQ ID NO: 1929616 - RNA, 19 nt, Artificial Sequence
  Description of Artificial Sequence: Synthetic oligonucleotide
ccguaaucgucgucuccca

SEQ ID NO: 1929617 - RNA, 19 nt, Artificial Sequence
  Description of Artificial Sequence: Synthetic oligonucleotide
gugcaccgaggcccuuaga

SEQ ID NO: 1929618 - RNA, 19 nt, Artificial Sequence
  Description of Artificial Sequence: Synthetic oligonucleotide
gucgcugcgcaggucuacu

SEQ ID NO: 1929619 - RNA, 19 nt, Artificial Sequence
  Description of Artificial Sequence: Synthetic oligonucleotide
ccgcacggaguguucuguc

SEQ ID NO: 1929620 - RNA, 19 nt, Artificial Sequence
  Description of Artificial Sequence: Synthetic oligonucleotide
ggcgccaggcuucuucaau

SEQ ID NO: 1929621 - RNA, 19 nt, Artificial Sequence
  Description of Artificial Sequence: Synthetic oligonucleotide
cagccagucugagccaccu

SEQ ID NO: 1929622 - RNA, 19 nt, Artificial Sequence
  Description of Artificial Sequence: Synthetic oligonucleotide
ccccgccaguuccuagacc

SEQ ID NO: 1929623 - RNA, 19 nt, Artificial Sequence
  Description of Artificial Sequence: Synthetic oligonucleotide
cccuggccgggucaccgug

SEQ ID NO: 1929624 - RNA, 19 nt, Artificial Sequence
  Description of Artificial Sequence: Synthetic oligonucleotide
cgucucggugccacacaac

SEQ ID NO: 1929625 - RNA, 19 nt, Artificial Sequence
  Description of Artificial Sequence: Synthetic oligonucleotide
cgugucgcugcgcaggucu

SEQ ID NO: 1929626 - RNA, 19 nt, Artificial Sequence
  Description of Artificial Sequence: Synthetic oligonucleotide
ggucaccgugucgcugcgc

SEQ ID NO: 1929627 - RNA, 19 nt, Artificial Sequence
  Description of Artificial Sequence: Synthetic oligonucleotide
cgucgucucccacgagcgc

SEQ ID NO: 1929628 - RNA, 19 nt, Artificial Sequence
  Description of Artificial Sequence: Synthetic oligonucleotide
gcgugccucauggccggcc

SEQ ID NO: 1929629 - RNA, 19 nt, Artificial Sequence
  Description of Artificial Sequence: Synthetic oligonucleotide
ccuggcggagguagucgga

SEQ ID NO: 1929630 - RNA, 19 nt, Artificial Sequence
  Description of Artificial Sequence: Synthetic oligonucleotide
ugccuccacccagggcuuu

SEQ ID NO: 1929631 - RNA, 19 nt, Artificial Sequence
  Description of Artificial Sequence: Synthetic oligonucleotide
uggccggcccuggccgggu

SEQ ID NO: 1929632 - RNA, 19 nt, Artificial Sequence
  Description of Artificial Sequence: Synthetic oligonucleotide
gaaccccggcgccggcagu

SEQ ID NO: 1929633 - RNA, 19 nt, Artificial Sequence
  Description of Artificial Sequence: Synthetic oligonucleotide
gcucgcagacuggauggua

SEQ ID NO: 1929634 - RNA, 19 nt, Artificial Sequence
  Description of Artificial Sequence: Synthetic oligonucleotide
cacgagcgccucggccaug

SEQ ID NO: 1929635 - RNA, 19 nt, Artificial Sequence
  Description of Artificial Sequence: Synthetic oligonucleotide
gggaaccccggcgccggca

SEQ ID NO: 1929636 - RNA, 19 nt, Artificial Sequence
  Description of Artificial Sequence: Synthetic oligonucleotide
ccccggcaaucugagccac

SEQ ID NO: 1929637 - RNA, 19 nt, Artificial Sequence
  Description of Artificial Sequence: Synthetic oligonucleotide
gccccgagugagugcucuc

SEQ ID NO: 1929638 - RNA, 19 nt, Artificial Sequence
  Description of Artificial Sequence: Synthetic oligonucleotide
gccugccgcaugccuccac

SEQ ID NO: 1929639 - RNA, 19 nt, Artificial Sequence
  Description of Artificial Sequence: Synthetic oligonucleotide
ggcgccggcagugacccau

SEQ ID NO: 1929640 - RNA, 19 nt, Artificial Sequence
  Description of Artificial Sequence: Synthetic oligonucleotide
cgcccugcucauagacgug

SEQ ID NO: 1929641 - RNA, 19 nt, Artificial Sequence
  Description of Artificial Sequence: Synthetic oligonucleotide
gggcagccgcagccaguac

SEQ ID NO: 1929642 - RNA, 19 nt, Artificial Sequence
  Description of Artificial Sequence: Synthetic oligonucleotide
gccacacaacccgcacgga

SEQ ID NO: 1929643 - RNA, 19 nt, Artificial Sequence
  Description of Artificial Sequence: Synthetic oligonucleotide
cacaacccgcacggagugu

SEQ ID NO: 1929644 - RNA, 19 nt, Artificial Sequence
  Description of Artificial Sequence: Synthetic oligonucleotide
cccgagcuccaugcaugug

SEQ ID NO: 1929645 - RNA, 19 nt, Artificial Sequence
  Description of Artificial Sequence: Synthetic oligonucleotide
guggaccguggggucuucu

SEQ ID NO: 1929646 - RNA, 19 nt, Artificial Sequence
  Description of Artificial Sequence: Synthetic oligonucleotide
ccaagcagcuucgcagccu

SEQ ID NO: 1929647 - RNA, 19 nt, Artificial Sequence
  Description of Artificial Sequence: Synthetic oligonucleotide
ggcgugccucauggccggc

SEQ ID NO: 1929648 - RNA, 19 nt, Artificial Sequence
  Description of Artificial Sequence: Synthetic oligonucleotide
gcacacgagcucgcagacu

SEQ ID NO: 1929649 - RNA, 19 nt, Artificial Sequence
  Description of Artificial Sequence: Synthetic oligonucleotide
cgaggcccuuagagaagca

SEQ ID NO: 1929650 - RNA, 19 nt, Artificial Sequence
  Description of Artificial Sequence: Synthetic oligonucleotide
cccggcgcugcugugugua

SEQ ID NO: 1929651 - RNA, 19 nt, Artificial Sequence
  Description of Artificial Sequence: Synthetic oligonucleotide
ccccgagugagugcucucu

SEQ ID NO: 1929652 - RNA, 19 nt, Artificial Sequence
  Description of Artificial Sequence: Synthetic oligonucleotide
ccuggccgggucaccgugu

SEQ ID NO: 1929653 - RNA, 19 nt, Artificial Sequence
  Description of Artificial Sequence: Synthetic oligonucleotide
ccaccgcgcccagggcacc

SEQ ID NO: 1929654 - RNA, 19 nt, Artificial Sequence
  Description of Artificial Sequence: Synthetic oligonucleotide
guacgccagccugccgcau

SEQ ID NO: 1929655 - RNA, 19 nt, Artificial Sequence
  Description of Artificial Sequence: Synthetic oligonucleotide
cccgcacggaguguucugu

SEQ ID NO: 1929656 - RNA, 19 nt, Artificial Sequence
  Description of Artificial Sequence: Synthetic oligonucleotide
gcgcugcuguguguauucu

SEQ ID NO: 1929657 - RNA, 19 nt, Artificial Sequence
  Description of Artificial Sequence: Synthetic oligonucleotide
ggccggcccuggccggguc

SEQ ID NO: 1929658 - RNA, 19 nt, Artificial Sequence
  Description of Artificial Sequence: Synthetic oligonucleotide
cgagcgccucggccauggc

SEQ ID NO: 1929659 - RNA, 19 nt, Artificial Sequence
  Description of Artificial Sequence: Synthetic oligonucleotide
ccgugucgcugcgcagguc

SEQ ID NO: 1929660 - RNA, 19 nt, Artificial Sequence
  Description of Artificial Sequence: Synthetic oligonucleotide
gcccuggccgggucaccgu

SEQ ID NO: 1929661 - RNA, 19 nt, Artificial Sequence
  Description of Artificial Sequence: Synthetic oligonucleotide
ccacgagcgccucggccau

SEQ ID NO: 1929662 - RNA, 19 nt, Artificial Sequence
  Description of Artificial Sequence: Synthetic oligonucleotide
cguggaccguggggucuuc

SEQ ID NO: 1929663 - RNA, 19 nt, Artificial Sequence
  Description of Artificial Sequence: Synthetic oligonucleotide
ccggcgcugcuguguguau

SEQ ID NO: 1929664 - RNA, 19 nt, Artificial Sequence
  Description of Artificial Sequence: Synthetic oligonucleotide
cuggugcaccgaggcccuu

SEQ ID NO: 1929665 - RNA, 19 nt, Artificial Sequence
  Description of Artificial Sequence: Synthetic oligonucleotide
cccugaccucagggccuca

SEQ ID NO: 1929666 - RNA, 19 nt, Artificial Sequence
  Description of Artificial Sequence: Synthetic oligonucleotide
cgcucacggcacagccagu

SEQ ID NO: 1929667 - RNA, 19 nt, Artificial Sequence
  Description of Artificial Sequence: Synthetic oligonucleotide
ccccggcgcugcugugugu

SEQ ID NO: 1929668 - RNA, 19 nt, Artificial Sequence
  Description of Artificial Sequence: Synthetic oligonucleotide
ccaccccgcccugcucaua

SEQ ID NO: 1929669 - RNA, 19 nt, Artificial Sequence
  Description of Artificial Sequence: Synthetic oligonucleotide
ccacuuccucagggccagu

SEQ ID NO: 1929670 - RNA, 19 nt, Artificial Sequence
  Description of Artificial Sequence: Synthetic oligonucleotide
cggcgcugcuguguguauu

SEQ ID NO: 1929671 - RNA, 19 nt, Artificial Sequence
  Description of Artificial Sequence: Synthetic oligonucleotide
cggcgccggcagugaccca

SEQ ID NO: 1929672 - RNA, 19 nt, Artificial Sequence
  Description of Artificial Sequence: Synthetic oligonucleotide
cggccauggcgugccucau

SEQ ID NO: 1929673 - RNA, 19 nt, Artificial Sequence
  Description of Artificial Sequence: Synthetic oligonucleotide
cggaggcgccaggcuucuu

SEQ ID NO: 1929674 - RNA, 19 nt, Artificial Sequence
  Description of Artificial Sequence: Synthetic oligonucleotide
acaugcuucaguuugcugc

SEQ ID NO: 1929675 - RNA, 19 nt, Artificial Sequence
  Description of Artificial Sequence: Synthetic oligonucleotide
ugcaaaugaaucaugaggu

SEQ ID NO: 1929676 - RNA, 19 nt, Artificial Sequence
  Description of Artificial Sequence: Synthetic oligonucleotide
gauucuuugggacaggccc

SEQ ID NO: 1929677 - RNA, 19 nt, Artificial Sequence
  Description of Artificial Sequence: Synthetic oligonucleotide
acaaucaccaugcaguggg

SEQ ID NO: 1929678 - RNA, 19 nt, Artificial Sequence
  Description of Artificial Sequence: Synthetic oligonucleotide
uaaaagcuaggauaggucc

SEQ ID NO: 1929679 - RNA, 19 nt, Artificial Sequence
  Description of Artificial Sequence: Synthetic oligonucleotide
aaaugugugaacugggccu

SEQ ID NO: 1929680 - RNA, 19 nt, Artificial Sequence
  Description of Artificial Sequence: Synthetic oligonucleotide
uuaauuuacaugcuucagu

SEQ ID NO: 1929681 - RNA, 19 nt, Artificial Sequence
  Description of Artificial Sequence: Synthetic oligonucleotide
uacaaggucaacuuuaaaa

SEQ ID NO: 1929682 - RNA, 19 nt, Artificial Sequence
  Description of Artificial Sequence: Synthetic oligonucleotide
guagguaccacccagcacc

SEQ ID NO: 1929683 - RNA, 19 nt, Artificial Sequence
  Description of Artificial Sequence: Synthetic oligonucleotide
uuugcugcuuacaagguca

SEQ ID NO: 1929684 - RNA, 19 nt, Artificial Sequence
  Description of Artificial Sequence: Synthetic oligonucleotide
uucuaaaugugugaacugg

SEQ ID NO: 1929685 - RNA, 19 nt, Artificial Sequence
  Description of Artificial Sequence: Synthetic oligonucleotide
aacaugucgccacaaccac

SEQ ID NO: 1929686 - RNA, 19 nt, Artificial Sequence
  Description of Artificial Sequence: Synthetic oligonucleotide
ucaacuuuaaaagcuagga

SEQ ID NO: 1929687 - RNA, 19 nt, Artificial Sequence
  Description of Artificial Sequence: Synthetic oligonucleotide
aaaagcuaggauagguccc

SEQ ID NO: 1929688 - RNA, 19 nt, Artificial Sequence
  Description of Artificial Sequence: Synthetic oligonucleotide
accucaagcacucugagcu

SEQ ID NO: 1929689 - RNA, 19 nt, Artificial Sequence
  Description of Artificial Sequence: Synthetic oligonucleotide
ucaacaugucgccacaacc

SEQ ID NO: 1929690 - RNA, 19 nt, Artificial Sequence
  Description of Artificial Sequence: Synthetic oligonucleotide
gcugaggucauccaaaugg

SEQ ID NO: 1929691 - RNA, 19 nt, Artificial Sequence
  Description of Artificial Sequence: Synthetic oligonucleotide
agagccagagaacagguag

SEQ ID NO: 1929692 - RNA, 19 nt, Artificial Sequence
  Description of Artificial Sequence: Synthetic oligonucleotide
augacuuuuggacgcaucg

SEQ ID NO: 1929693 - RNA, 19 nt, Artificial Sequence
  Description of Artificial Sequence: Synthetic oligonucleotide
ucggguaaggcccugcagg

SEQ ID NO: 1929694 - RNA, 19 nt, Artificial Sequence
  Description of Artificial Sequence: Synthetic oligonucleotide
ucggaaucggguaaggccc

SEQ ID NO: 1929695 - RNA, 19 nt, Artificial Sequence
  Description of Artificial Sequence: Synthetic oligonucleotide
gaucauugagaucucgcag

SEQ ID NO: 1929696 - RNA, 19 nt, Artificial Sequence
  Description of Artificial Sequence: Synthetic oligonucleotide
auugagaucucgcagcugu

SEQ ID NO: 1929697 - RNA, 19 nt, Artificial Sequence
  Description of Artificial Sequence: Synthetic oligonucleotide
gaugcauuccagcagcggc

SEQ ID NO: 1929698 - RNA, 19 nt, Artificial Sequence
  Description of Artificial Sequence: Synthetic oligonucleotide
aauggcagacaaccccagc

SEQ ID NO: 1929699 - RNA, 19 nt, Artificial Sequence
  Description of Artificial Sequence: Synthetic oligonucleotide
ggaggucacaaucugagcg

SEQ ID NO: 1929700 - RNA, 19 nt, Artificial Sequence
  Description of Artificial Sequence: Synthetic oligonucleotide
ugccacaugacuuuuggac

SEQ ID NO: 1929701 - RNA, 19 nt, Artificial Sequence
  Description of Artificial Sequence: Synthetic oligonucleotide
aaucugagcgggugugggc

SEQ ID NO: 1929702 - RNA, 19 nt, Artificial Sequence
  Description of Artificial Sequence: Synthetic oligonucleotide
ggacgcaucguguagagcg

SEQ ID NO: 1929703 - RNA, 19 nt, Artificial Sequence
  Description of Artificial Sequence: Synthetic oligonucleotide
auuucuggggugaugaggg

SEQ ID NO: 1929704 - RNA, 19 nt, Artificial Sequence
  Description of Artificial Sequence: Synthetic oligonucleotide
ucaugagguagcuaugaug

SEQ ID NO: 1929705 - RNA, 19 nt, Artificial Sequence
  Description of Artificial Sequence: Synthetic oligonucleotide
ugggugacaaggcugaggu

SEQ ID NO: 1929706 - RNA, 19 nt, Artificial Sequence
  Description of Artificial Sequence: Synthetic oligonucleotide
guaagcacaaacucuccag

SEQ ID NO: 1929707 - RNA, 19 nt, Artificial Sequence
  Description of Artificial Sequence: Synthetic oligonucleotide
uguaagcacaaacucucca

SEQ ID NO: 1929708 - RNA, 19 nt, Artificial Sequence
  Description of Artificial Sequence: Synthetic oligonucleotide
cauguaccggcgcagaagg

SEQ ID NO: 1929709 - RNA, 19 nt, Artificial Sequence
  Description of Artificial Sequence: Synthetic oligonucleotide
cucggaaucggguaaggcc

SEQ ID NO: 1929710 - RNA, 19 nt, Artificial Sequence
  Description of Artificial Sequence: Synthetic oligonucleotide
ucuugugaccuccaguuuc

SEQ ID NO: 1929711 - RNA, 19 nt, Artificial Sequence
  Description of Artificial Sequence: Synthetic oligonucleotide
aaugugugaacugggccuc

SEQ ID NO: 1929712 - RNA, 19 nt, Artificial Sequence
  Description of Artificial Sequence: Synthetic oligonucleotide
uucaguuugcugcuuacaa

SEQ ID NO: 1929713 - RNA, 19 nt, Artificial Sequence
  Description of Artificial Sequence: Synthetic oligonucleotide
aaucaccaugcaguggggc

SEQ ID NO: 1929714 - RNA, 19 nt, Artificial Sequence
  Description of Artificial Sequence: Synthetic oligonucleotide
gccugguuaauuuacaugc

SEQ ID NO: 1929715 - RNA, 19 nt, Artificial Sequence
  Description of Artificial Sequence: Synthetic oligonucleotide
ucaagccugguuaauuuac

SEQ ID NO: 1929716 - RNA, 19 nt, Artificial Sequence
  Description of Artificial Sequence: Synthetic oligonucleotide
uaugaugccuauuucuaaa

SEQ ID NO: 1929717 - RNA, 19 nt, Artificial Sequence
  Description of Artificial Sequence: Synthetic oligonucleotide
gacuuuuggacgcaucgug

SEQ ID NO: 1929718 - RNA, 19 nt, Artificial Sequence
  Description of Artificial Sequence: Synthetic oligonucleotide
uuuuggacgcaucguguag

SEQ ID NO: 1929719 - RNA, 19 nt, Artificial Sequence
  Description of Artificial Sequence: Synthetic oligonucleotide
ugaugccuauuucuaaaug

SEQ ID NO: 1929720 - RNA, 19 nt, Artificial Sequence
  Description of Artificial Sequence: Synthetic oligonucleotide
agcuuaggcaugguaaggc

SEQ ID NO: 1929721 - RNA, 19 nt, Artificial Sequence
  Description of Artificial Sequence: Synthetic oligonucleotide
aaucaugagguagcuauga

SEQ ID NO: 1929722 - RNA, 19 nt, Artificial Sequence
  Description of Artificial Sequence: Synthetic oligonucleotide
caggguacagcccagcacc

SEQ ID NO: 1929723 - RNA, 19 nt, Artificial Sequence
  Description of Artificial Sequence: Synthetic oligonucleotide
ucguccacuagccucuucc

SEQ ID NO: 1929724 - RNA, 19 nt, Artificial Sequence
  Description of Artificial Sequence: Synthetic oligonucleotide
uauuucuaaaugugugaac

SEQ ID NO: 1929725 - RNA, 19 nt, Artificial Sequence
  Description of Artificial Sequence: Synthetic oligonucleotide
cuuaggcaugguaaggcag

SEQ ID NO: 1929726 - RNA, 19 nt, Artificial Sequence
  Description of Artificial Sequence: Synthetic oligonucleotide
gaggucauccaaauggcag

SEQ ID NO: 1929727 - RNA, 19 nt, Artificial Sequence
  Description of Artificial Sequence: Synthetic oligonucleotide
ucuuccgcacaucucggag

SEQ ID NO: 1929728 - RNA, 19 nt, Artificial Sequence
  Description of Artificial Sequence: Synthetic oligonucleotide
gaugccuauuucuaaaugu

SEQ ID NO: 1929729 - RNA, 19 nt, Artificial Sequence
  Description of Artificial Sequence: Synthetic oligonucleotide
ggcaugguaaggcaggagg

SEQ ID NO: 1929730 - RNA, 19 nt, Artificial Sequence
  Description of Artificial Sequence: Synthetic oligonucleotide
aggcauucccuccaggaag

SEQ ID NO: 1929731 - RNA, 19 nt, Artificial Sequence
  Description of Artificial Sequence: Synthetic oligonucleotide
ugccuauuucuaaaugugu

SEQ ID NO: 1929732 - RNA, 19 nt, Artificial Sequence
  Description of Artificial Sequence: Synthetic oligonucleotide
acaggguacagcccagcac

SEQ ID NO: 1929733 - RNA, 19 nt, Artificial Sequence
  Description of Artificial Sequence: Synthetic oligonucleotide
augaggggacccuguaagc

SEQ ID NO: 1929734 - RNA, 19 nt, Artificial Sequence
  Description of Artificial Sequence: Synthetic oligonucleotide
uccaaauggcagacaaccc

SEQ ID NO: 1929735 - RNA, 19 nt, Artificial Sequence
  Description of Artificial Sequence: Synthetic oligonucleotide
cugacaaucaccaugcagu

SEQ ID NO: 1929736 - RNA, 19 nt, Artificial Sequence
  Description of Artificial Sequence: Synthetic oligonucleotide
uccauggauucuuugggac

SEQ ID NO: 1929737 - RNA, 19 nt, Artificial Sequence
  Description of Artificial Sequence: Synthetic oligonucleotide
acaaccaccggucguccac

SEQ ID NO: 1929738 - RNA, 19 nt, Artificial Sequence
  Description of Artificial Sequence: Synthetic oligonucleotide
gguaccuucacauccacca

SEQ ID NO: 1929739 - RNA, 19 nt, Artificial Sequence
  Description of Artificial Sequence: Synthetic oligonucleotide
agagcgucaggucaacaug

SEQ ID NO: 1929740 - RNA, 19 nt, Artificial Sequence
  Description of Artificial Sequence: Synthetic oligonucleotide
cacgaugcauuccagcagc

SEQ ID NO: 1929741 - RNA, 19 nt, Artificial Sequence
  Description of Artificial Sequence: Synthetic oligonucleotide
aaagcuaggauagguccca

SEQ ID NO: 1929742 - RNA, 19 nt, Artificial Sequence
  Description of Artificial Sequence: Synthetic oligonucleotide
uccaccaauccauggauuc

SEQ ID NO: 1929743 - RNA, 19 nt, Artificial Sequence
  Description of Artificial Sequence: Synthetic oligonucleotide
ugcaccucaagcacucuga

SEQ ID NO: 1929744 - RNA, 19 nt, Artificial Sequence
  Description of Artificial Sequence: Synthetic oligonucleotide
gucaacuuuaaaagcuagg

SEQ ID NO: 1929745 - RNA, 19 nt, Artificial Sequence
  Description of Artificial Sequence: Synthetic oligonucleotide
augcgcagugaguggagcc

SEQ ID NO: 1929746 - RNA, 19 nt, Artificial Sequence
  Description of Artificial Sequence: Synthetic oligonucleotide
ugagguagcuaugaugccu

SEQ ID NO: 1929747 - RNA, 19 nt, Artificial Sequence
  Description of Artificial Sequence: Synthetic oligonucleotide
augggugguaccuucacau

SEQ ID NO: 1929748 - RNA, 19 nt, Artificial Sequence
  Description of Artificial Sequence: Synthetic oligonucleotide
cauggauucuuugggacag

SEQ ID NO: 1929749 - RNA, 19 nt, Artificial Sequence
  Description of Artificial Sequence: Synthetic oligonucleotide
cauuucuggggugaugagg

SEQ ID NO: 1929750 - RNA, 19 nt, Artificial Sequence
  Description of Artificial Sequence: Synthetic oligonucleotide
ugcucgucacggaaggcag

SEQ ID NO: 1929751 - RNA, 19 nt, Artificial Sequence
  Description of Artificial Sequence: Synthetic oligonucleotide
agagaacagguagccaccc

SEQ ID NO: 1929752 - RNA, 19 nt, Artificial Sequence
  Description of Artificial Sequence: Synthetic oligonucleotide
ugaggucauccaaauggca

SEQ ID NO: 1929753 - RNA, 19 nt, Artificial Sequence
  Description of Artificial Sequence: Synthetic oligonucleotide
gauuugcaaaugaaucaug

SEQ ID NO: 1929754 - RNA, 19 nt, Artificial Sequence
  Description of Artificial Sequence: Synthetic oligonucleotide
agcccuugcaccucaagca

SEQ ID NO: 1929755 - RNA, 19 nt, Artificial Sequence
  Description of Artificial Sequence: Synthetic oligonucleotide
gccacaugacuuuuggacg

SEQ ID NO: 1929756 - RNA, 19 nt, Artificial Sequence
  Description of Artificial Sequence: Synthetic oligonucleotide
aagccugguuaauuuacau

SEQ ID NO: 1929757 - RNA, 19 nt, Artificial Sequence
  Description of Artificial Sequence: Synthetic oligonucleotide
agccugguuaauuuacaug

SEQ ID NO: 1929758 - RNA, 19 nt, Artificial Sequence
  Description of Artificial Sequence: Synthetic oligonucleotide
guuuccucaagccugguua

SEQ ID NO: 1929759 - RNA, 19 nt, Artificial Sequence
  Description of Artificial Sequence: Synthetic oligonucleotide
acggaaggcaggcacucgg

SEQ ID NO: 1929760 - RNA, 19 nt, Artificial Sequence
  Description of Artificial Sequence: Synthetic oligonucleotide
uguaccggcgcagaaggug

SEQ ID NO: 1929761 - RNA, 19 nt, Artificial Sequence
  Description of Artificial Sequence: Synthetic oligonucleotide
aaucuuccgcacaucucgg

SEQ ID NO: 1929762 - RNA, 19 nt, Artificial Sequence
  Description of Artificial Sequence: Synthetic oligonucleotide
ugcauaggaccuucucugc

SEQ ID NO: 1929763 - RNA, 19 nt, Artificial Sequence
  Description of Artificial Sequence: Synthetic oligonucleotide
cagagaacagguagccacc

SEQ ID NO: 1929764 - RNA, 19 nt, Artificial Sequence
  Description of Artificial Sequence: Synthetic oligonucleotide
aggugcucgucacggaagg

SEQ ID NO: 1929765 - RNA, 19 nt, Artificial Sequence
  Description of Artificial Sequence: Synthetic oligonucleotide
ucaagcacucugagcuuag

SEQ ID NO: 1929766 - RNA, 19 nt, Artificial Sequence
  Description of Artificial Sequence: Synthetic oligonucleotide
aaucggguaaggcccugca

SEQ ID NO: 1929767 - RNA, 19 nt, Artificial Sequence
  Description of Artificial Sequence: Synthetic oligonucleotide
guuggggcacuucuggccc

SEQ ID NO: 1929768 - RNA, 19 nt, Artificial Sequence
  Description of Artificial Sequence: Synthetic oligonucleotide
uuuggacgcaucguguaga

SEQ ID NO: 1929769 - RNA, 19 nt, Artificial Sequence
  Description of Artificial Sequence: Synthetic oligonucleotide
ccaaauggcagacaacccc

SEQ ID NO: 1929770 - RNA, 19 nt, Artificial Sequence
  Description of Artificial Sequence: Synthetic oligonucleotide
gaugccauguaccggcgca

SEQ ID NO: 1929771 - RNA, 19 nt, Artificial Sequence
  Description of Artificial Sequence: Synthetic oligonucleotide
acuagccucuuccagcggu

SEQ ID NO: 1929772 - RNA, 19 nt, Artificial Sequence
  Description of Artificial Sequence: Synthetic oligonucleotide
uuccagcggugacagaccc

SEQ ID NO: 1929773 - RNA, 19 nt, Artificial Sequence
  Description of Artificial Sequence: Synthetic oligonucleotide
aucguguagagcgucaggu

SEQ ID NO: 1929774 - RNA, 19 nt, Artificial Sequence
  Description of Artificial Sequence: Synthetic oligonucleotide
ugacucgguagguaccacc

SEQ ID NO: 1929775 - RNA, 19 nt, Artificial Sequence
  Description of Artificial Sequence: Synthetic oligonucleotide
ucggugacucgguagguac

SEQ ID NO: 1929776 - RNA, 19 nt, Artificial Sequence
  Description of Artificial Sequence: Synthetic oligonucleotide
cacaugcaggcacaggcgc

SEQ ID NO: 1929777 - RNA, 19 nt, Artificial Sequence
  Description of Artificial Sequence: Synthetic oligonucleotide
augccuauuucuaaaugug

SEQ ID NO: 1929778 - RNA, 19 nt, Artificial Sequence
  Description of Artificial Sequence: Synthetic oligonucleotide
aucaccaugcaguggggca

SEQ ID NO: 1929779 - RNA, 19 nt, Artificial Sequence
  Description of Artificial Sequence: Synthetic oligonucleotide
uuggacgcaucguguagag

SEQ ID NO: 1929780 - RNA, 19 nt, Artificial Sequence
  Description of Artificial Sequence: Synthetic oligonucleotide
ugcgcagugaguggagccg

SEQ ID NO: 1929781 - RNA, 19 nt, Artificial Sequence
  Description of Artificial Sequence: Synthetic oligonucleotide
cuucacauccaccaaucca

SEQ ID NO: 1929782 - RNA, 19 nt, Artificial Sequence
  Description of Artificial Sequence: Synthetic oligonucleotide
gaucucgcagcugugcagc

SEQ ID NO: 1929783 - RNA, 19 nt, Artificial Sequence
  Description of Artificial Sequence: Synthetic oligonucleotide
ugagaucucgcagcugugc

SEQ ID NO: 1929784 - RNA, 19 nt, Artificial Sequence
  Description of Artificial Sequence: Synthetic oligonucleotide
gguaaggcccugcaggugc

SEQ ID NO: 1929785 - RNA, 19 nt, Artificial Sequence
  Description of Artificial Sequence: Synthetic oligonucleotide
cacaaacucuccagggcag

SEQ ID NO: 1929786 - RNA, 19 nt, Artificial Sequence
  Description of Artificial Sequence: Synthetic oligonucleotide
ccagagaacagguagccac

SEQ ID NO: 1929787 - RNA, 19 nt, Artificial Sequence
  Description of Artificial Sequence: Synthetic oligonucleotide
ucuagccucugcagguagc

SEQ ID NO: 1929788 - RNA, 19 nt, Artificial Sequence
  Description of Artificial Sequence: Synthetic oligonucleotide
uggauucuuugggacaggc

SEQ ID NO: 1929789 - RNA, 19 nt, Artificial Sequence
  Description of Artificial Sequence: Synthetic oligonucleotide
ucaccaugcaguggggcag

SEQ ID NO: 1929790 - RNA, 19 nt, Artificial Sequence
  Description of Artificial Sequence: Synthetic oligonucleotide
guagcuaugaugccuauuu

SEQ ID NO: 1929791 - RNA, 19 nt, Artificial Sequence
  Description of Artificial Sequence: Synthetic oligonucleotide
augaugccuauuucuaaau

SEQ ID NO: 1929792 - RNA, 19 nt, Artificial Sequence
  Description of Artificial Sequence: Synthetic oligonucleotide
cucgcaucaaggcagggga

SEQ ID NO: 1929793 - RNA, 19 nt, Artificial Sequence
  Description of Artificial Sequence: Synthetic oligonucleotide
gggugguaccuucacaucc

SEQ ID NO: 1929794 - RNA, 19 nt, Artificial Sequence
  Description of Artificial Sequence: Synthetic oligonucleotide
ucgguagguaccacccagc

SEQ ID NO: 1929795 - RNA, 19 nt, Artificial Sequence
  Description of Artificial Sequence: Synthetic oligonucleotide
aaauggcagacaaccccag

SEQ ID NO: 1929796 - RNA, 19 nt, Artificial Sequence
  Description of Artificial Sequence: Synthetic oligonucleotide
auggcuagcagggugcugu

SEQ ID NO: 1929797 - RNA, 19 nt, Artificial Sequence
  Description of Artificial Sequence: Synthetic oligonucleotide
gaggggacccuguaagcac

SEQ ID NO: 1929798 - RNA, 19 nt, Artificial Sequence
  Description of Artificial Sequence: Synthetic oligonucleotide
aucaaggcaggggacagcu

SEQ ID NO: 1929799 - RNA, 19 nt, Artificial Sequence
  Description of Artificial Sequence: Synthetic oligonucleotide
acggucagccgaaucuucc

SEQ ID NO: 1929800 - RNA, 19 nt, Artificial Sequence
  Description of Artificial Sequence: Synthetic oligonucleotide
uacaugcuucaguuugcug

SEQ ID NO: 1929801 - RNA, 19 nt, Artificial Sequence
  Description of Artificial Sequence: Synthetic oligonucleotide
gcuagcagggugcugucgg

SEQ ID NO: 1929802 - RNA, 19 nt, Artificial Sequence
  Description of Artificial Sequence: Synthetic oligonucleotide
agggcucgcaucaaggcag

SEQ ID NO: 1929803 - RNA, 19 nt, Artificial Sequence
  Description of Artificial Sequence: Synthetic oligonucleotide
ucagccgaaucuuccgcac

SEQ ID NO: 1929804 - RNA, 19 nt, Artificial Sequence
  Description of Artificial Sequence: Synthetic oligonucleotide
uggcagacaaccccagcuc

SEQ ID NO: 1929805 - RNA, 19 nt, Artificial Sequence
  Description of Artificial Sequence: Synthetic oligonucleotide
acucugagcuuaggcaugg

SEQ ID NO: 1929806 - RNA, 19 nt, Artificial Sequence
  Description of Artificial Sequence: Synthetic oligonucleotide
agcacuguaggguccugcu

SEQ ID NO: 1929807 - RNA, 19 nt, Artificial Sequence
  Description of Artificial Sequence: Synthetic oligonucleotide
cauccaaauggcagacaac

SEQ ID NO: 1929808 - RNA, 19 nt, Artificial Sequence
  Description of Artificial Sequence: Synthetic oligonucleotide
ugcuuacaaggucaacuuu

SEQ ID NO: 1929809 - RNA, 19 nt, Artificial Sequence
  Description of Artificial Sequence: Synthetic oligonucleotide
gagaucucgcagcugugca

SEQ ID NO: 1929810 - RNA, 19 nt, Artificial Sequence
  Description of Artificial Sequence: Synthetic oligonucleotide
cuuccagcggugacagacc

SEQ ID NO: 1929811 - RNA, 19 nt, Artificial Sequence
  Description of Artificial Sequence: Synthetic oligonucleotide
ucgccacaaccaccggucg

SEQ ID NO: 1929812 - RNA, 19 nt, Artificial Sequence
  Description of Artificial Sequence: Synthetic oligonucleotide
uugagaucucgcagcugug

SEQ ID NO: 1929813 - RNA, 19 nt, Artificial Sequence
  Description of Artificial Sequence: Synthetic oligonucleotide
gcggcugauggcuagcagg

SEQ ID NO: 1929814 - RNA, 19 nt, Artificial Sequence
  Description of Artificial Sequence: Synthetic oligonucleotide
acaggcccugacaaucacc

SEQ ID NO: 1929815 - RNA, 19 nt, Artificial Sequence
  Description of Artificial Sequence: Synthetic oligonucleotide
caggcccugacaaucacca

SEQ ID NO: 1929816 - RNA, 19 nt, Artificial Sequence
  Description of Artificial Sequence: Synthetic oligonucleotide
caucguguagagcgucagg

SEQ ID NO: 1929817 - RNA, 19 nt, Artificial Sequence
  Description of Artificial Sequence: Synthetic oligonucleotide
ccacaugacuuuuggacgc

SEQ ID NO: 1929818 - RNA, 19 nt, Artificial Sequence
  Description of Artificial Sequence: Synthetic oligonucleotide
aucggguaaggcccugcag

SEQ ID NO: 1929819 - RNA, 19 nt, Artificial Sequence
  Description of Artificial Sequence: Synthetic oligonucleotide
gcagcggcagcacuguagg

SEQ ID NO: 1929820 - RNA, 19 nt, Artificial Sequence
  Description of Artificial Sequence: Synthetic oligonucleotide
caaucaccaugcagugggg

SEQ ID NO: 1929821 - RNA, 19 nt, Artificial Sequence
  Description of Artificial Sequence: Synthetic oligonucleotide
agccgggaugccauguacc

SEQ ID NO: 1929822 - RNA, 19 nt, Artificial Sequence
  Description of Artificial Sequence: Synthetic oligonucleotide
cacccaugcgcagugagug

SEQ ID NO: 1929823 - RNA, 19 nt, Artificial Sequence
  Description of Artificial Sequence: Synthetic oligonucleotide
gccuauuucuaaaugugug

SEQ ID NO: 1929824 - RNA, 19 nt, Artificial Sequence
  Description of Artificial Sequence: Synthetic oligonucleotide
cuaugaugccuauuucuaa

SEQ ID NO: 1929825 - RNA, 19 nt, Artificial Sequence
  Description of Artificial Sequence: Synthetic oligonucleotide
ggucaacuuuaaaagcuag

SEQ ID NO: 1929826 - RNA, 19 nt, Artificial Sequence
  Description of Artificial Sequence: Synthetic oligonucleotide
aucaugagguagcuaugau

SEQ ID NO: 1929827 - RNA, 19 nt, Artificial Sequence
  Description of Artificial Sequence: Synthetic oligonucleotide
ucggcugacaggguacagc

SEQ ID NO: 1929828 - RNA, 19 nt, Artificial Sequence
  Description of Artificial Sequence: Synthetic oligonucleotide
ggcccugacaaucaccaug

SEQ ID NO: 1929829 - RNA, 19 nt, Artificial Sequence
  Description of Artificial Sequence: Synthetic oligonucleotide
agaaggugccacaugacuu

SEQ ID NO: 1929830 - RNA, 19 nt, Artificial Sequence
  Description of Artificial Sequence: Synthetic oligonucleotide
cagcacgaugcauuccagc

SEQ ID NO: 1929831 - RNA, 19 nt, Artificial Sequence
  Description of Artificial Sequence: Synthetic oligonucleotide
cgucaggucaacaugucgc

SEQ ID NO: 1929832 - RNA, 19 nt, Artificial Sequence
  Description of Artificial Sequence: Synthetic oligonucleotide
guccacuagccucuuccag

SEQ ID NO: 1929833 - RNA, 19 nt, Artificial Sequence
  Description of Artificial Sequence: Synthetic oligonucleotide
gucaacaugucgccacaac

SEQ ID NO: 1929834 - RNA, 19 nt, Artificial Sequence
  Description of Artificial Sequence: Synthetic oligonucleotide
cuugcauaggaccuucucu

SEQ ID NO: 1929835 - RNA, 19 nt, Artificial Sequence
  Description of Artificial Sequence: Synthetic oligonucleotide
ucguguagagcgucagguc

SEQ ID NO: 1929836 - RNA, 19 nt, Artificial Sequence
  Description of Artificial Sequence: Synthetic oligonucleotide
ccugacaaucaccaugcag

SEQ ID NO: 1929837 - RNA, 19 nt, Artificial Sequence
  Description of Artificial Sequence: Synthetic oligonucleotide
cacucugagcuuaggcaug

SEQ ID NO: 1929838 - RNA, 19 nt, Artificial Sequence
  Description of Artificial Sequence: Synthetic oligonucleotide
aucugagcgggugugggca

SEQ ID NO: 1929839 - RNA, 19 nt, Artificial Sequence
  Description of Artificial Sequence: Synthetic oligonucleotide
cucgucacggaaggcaggc

SEQ ID NO: 1929840 - RNA, 19 nt, Artificial Sequence
  Description of Artificial Sequence: Synthetic oligonucleotide
acccaugcgcagugagugg

SEQ ID NO: 1929841 - RNA, 19 nt, Artificial Sequence
  Description of Artificial Sequence: Synthetic oligonucleotide
agccucuuccagcggugac

SEQ ID NO: 1929842 - RNA, 19 nt, Artificial Sequence
  Description of Artificial Sequence: Synthetic oligonucleotide
caccggucguccacuagcc

SEQ ID NO: 1929843 - RNA, 19 nt, Artificial Sequence
  Description of Artificial Sequence: Synthetic oligonucleotide
gagcgcagggcucggaauc

SEQ ID NO: 1929844 - RNA, 19 nt, Artificial Sequence
  Description of Artificial Sequence: Synthetic oligonucleotide
caugguaaggcaggagguc

SEQ ID NO: 1929845 - RNA, 19 nt, Artificial Sequence
  Description of Artificial Sequence: Synthetic oligonucleotide
cacaaucugagcgggugug

SEQ ID NO: 1929846 - RNA, 19 nt, Artificial Sequence
  Description of Artificial Sequence: Synthetic oligonucleotide
gccgggaugccauguaccg

SEQ ID NO: 1929847 - RNA, 19 nt, Artificial Sequence
  Description of Artificial Sequence: Synthetic oligonucleotide
cagacaaccccagcucugc

SEQ ID NO: 1929848 - RNA, 19 nt, Artificial Sequence
  Description of Artificial Sequence: Synthetic oligonucleotide
gacccuguaagcacaaacu

SEQ ID NO: 1929849 - RNA, 19 nt, Artificial Sequence
  Description of Artificial Sequence: Synthetic oligonucleotide
cugggugacaaggcugagg

SEQ ID NO: 1929850 - RNA, 19 nt, Artificial Sequence
  Description of Artificial Sequence: Synthetic oligonucleotide
caagccugguuaauuuaca

SEQ ID NO: 1929851 - RNA, 19 nt, Artificial Sequence
  Description of Artificial Sequence: Synthetic oligonucleotide
agccgaaucuuccgcacau

SEQ ID NO: 1929852 - RNA, 19 nt, Artificial Sequence
  Description of Artificial Sequence: Synthetic oligonucleotide
cucuagccucugcagguag

SEQ ID NO: 1929853 - RNA, 19 nt, Artificial Sequence
  Description of Artificial Sequence: Synthetic oligonucleotide
ggaagaccaggccuugggc

SEQ ID NO: 1929854 - RNA, 19 nt, Artificial Sequence
  Description of Artificial Sequence: Synthetic oligonucleotide
cugucggcugacaggguac

SEQ ID NO: 1929855 - RNA, 19 nt, Artificial Sequence
  Description of Artificial Sequence: Synthetic oligonucleotide
agcccggucucggugacuc

SEQ ID NO: 1929856 - RNA, 19 nt, Artificial Sequence
  Description of Artificial Sequence: Synthetic oligonucleotide
caaacucuccagggcaggc

SEQ ID NO: 1929857 - RNA, 19 nt, Artificial Sequence
  Description of Artificial Sequence: Synthetic oligonucleotide
guaccggcgcagaaggugc

SEQ ID NO: 1929858 - RNA, 19 nt, Artificial Sequence
  Description of Artificial Sequence: Synthetic oligonucleotide
cuuugggacaggcccugac

SEQ ID NO: 1929859 - RNA, 19 nt, Artificial Sequence
  Description of Artificial Sequence: Synthetic oligonucleotide
gggugugggcauuucuggg

SEQ ID NO: 1929860 - RNA, 19 nt, Artificial Sequence
  Description of Artificial Sequence: Synthetic oligonucleotide
agggcaggcauucccucca

SEQ ID NO: 1929861 - RNA, 19 nt, Artificial Sequence
  Description of Artificial Sequence: Synthetic oligonucleotide
guaccacccagcaccagug

SEQ ID NO: 1929862 - RNA, 19 nt, Artificial Sequence
  Description of Artificial Sequence: Synthetic oligonucleotide
cauucccuccaggaagacc

SEQ ID NO: 1929863 - RNA, 19 nt, Artificial Sequence
  Description of Artificial Sequence: Synthetic oligonucleotide
cuuuuggacgcaucgugua

SEQ ID NO: 1929864 - RNA, 19 nt, Artificial Sequence
  Description of Artificial Sequence: Synthetic oligonucleotide
ucgcaucaaggcaggggac

SEQ ID NO: 1929865 - RNA, 19 nt, Artificial Sequence
  Description of Artificial Sequence: Synthetic oligonucleotide
gcauaggaccuucucugcc

SEQ ID NO: 1929866 - RNA, 19 nt, Artificial Sequence
  Description of Artificial Sequence: Synthetic oligonucleotide
cauuccagcagcggcagca

SEQ ID NO: 1929867 - RNA, 19 nt, Artificial Sequence
  Description of Artificial Sequence: Synthetic oligonucleotide
cacucgguccagcacgaug

SEQ ID NO: 1929868 - RNA, 19 nt, Artificial Sequence
  Description of Artificial Sequence: Synthetic oligonucleotide
gcgucaggucaacaugucg

SEQ ID NO: 1929869 - RNA, 19 nt, Artificial Sequence
  Description of Artificial Sequence: Synthetic oligonucleotide
gcacaggcgcuucagguug

SEQ ID NO: 1929870 - RNA, 19 nt, Artificial Sequence
  Description of Artificial Sequence: Synthetic oligonucleotide
gagccgggaugccauguac

SEQ ID NO: 1929871 - RNA, 19 nt, Artificial Sequence
  Description of Artificial Sequence: Synthetic oligonucleotide
aagcuaggauaggucccag

SEQ ID NO: 1929872 - RNA, 19 nt, Artificial Sequence
  Description of Artificial Sequence: Synthetic oligonucleotide
gaaggugccacaugacuuu

SEQ ID NO: 1929873 - RNA, 19 nt, Artificial Sequence
  Description of Artificial Sequence: Synthetic oligonucleotide
gacaggcccugacaaucac

SEQ ID NO: 1929874 - RNA, 19 nt, Artificial Sequence
  Description of Artificial Sequence: Synthetic oligonucleotide
ugggugguaccuucacauc

SEQ ID NO: 1929875 - RNA, 19 nt, Artificial Sequence
  Description of Artificial Sequence: Synthetic oligonucleotide
aucuuccgcacaucucgga

SEQ ID NO: 1929876 - RNA, 19 nt, Artificial Sequence
  Description of Artificial Sequence: Synthetic oligonucleotide
ggucucggugacucgguag

SEQ ID NO: 1929877 - RNA, 19 nt, Artificial Sequence
  Description of Artificial Sequence: Synthetic oligonucleotide
gaaucggguaaggcccugc

SEQ ID NO: 1929878 - RNA, 19 nt, Artificial Sequence
  Description of Artificial Sequence: Synthetic oligonucleotide
augcauuccagcagcggca

SEQ ID NO: 1929879 - RNA, 19 nt, Artificial Sequence
  Description of Artificial Sequence: Synthetic oligonucleotide
uguagagcgucaggucaac

SEQ ID NO: 1929880 - RNA, 19 nt, Artificial Sequence
  Description of Artificial Sequence: Synthetic oligonucleotide
auaggucccagggauggau

SEQ ID NO: 1929881 - RNA, 19 nt, Artificial Sequence
  Description of Artificial Sequence: Synthetic oligonucleotide
caacuuuaaaagcuaggau

SEQ ID NO: 1929882 - RNA, 19 nt, Artificial Sequence
  Description of Artificial Sequence: Synthetic oligonucleotide
agggcucggaaucggguaa

SEQ ID NO: 1929883 - RNA, 19 nt, Artificial Sequence
  Description of Artificial Sequence: Synthetic oligonucleotide
caccaugcucaggucagcc

SEQ ID NO: 1929884 - RNA, 19 nt, Artificial Sequence
  Description of Artificial Sequence: Synthetic oligonucleotide
aguggggcaggcccuugca

SEQ ID NO: 1929885 - RNA, 19 nt, Artificial Sequence
  Description of Artificial Sequence: Synthetic oligonucleotide
caugcgcagugaguggagc

SEQ ID NO: 1929886 - RNA, 19 nt, Artificial Sequence
  Description of Artificial Sequence: Synthetic oligonucleotide
ggucagccgaaucuuccgc

SEQ ID NO: 1929887 - RNA, 19 nt, Artificial Sequence
  Description of Artificial Sequence: Synthetic oligonucleotide
gucgccacaaccaccgguc

SEQ ID NO: 1929888 - RNA, 19 nt, Artificial Sequence
  Description of Artificial Sequence: Synthetic oligonucleotide
ccacaugcaggcacaggcg

SEQ ID NO: 1929889 - RNA, 19 nt, Artificial Sequence
  Description of Artificial Sequence: Synthetic oligonucleotide
agcgggugugggcauuucu

SEQ ID NO: 1929890 - RNA, 19 nt, Artificial Sequence
  Description of Artificial Sequence: Synthetic oligonucleotide
caugcuucaguuugcugcu

SEQ ID NO: 1929891 - RNA, 19 nt, Artificial Sequence
  Description of Artificial Sequence: Synthetic oligonucleotide
accagugagcgcagggcuc

SEQ ID NO: 1929892 - RNA, 19 nt, Artificial Sequence
  Description of Artificial Sequence: Synthetic oligonucleotide
ucacggaaggcaggcacuc

SEQ ID NO: 1929893 - RNA, 19 nt, Artificial Sequence
  Description of Artificial Sequence: Synthetic oligonucleotide
acucgguagguaccaccca

SEQ ID NO: 1929894 - RNA, 19 nt, Artificial Sequence
  Description of Artificial Sequence: Synthetic oligonucleotide
aggucaacuuuaaaagcua

SEQ ID NO: 1929895 - RNA, 19 nt, Artificial Sequence
  Description of Artificial Sequence: Synthetic oligonucleotide
auggauucuuugggacagg

SEQ ID NO: 1929896 - RNA, 19 nt, Artificial Sequence
  Description of Artificial Sequence: Synthetic oligonucleotide
acgaugcauuccagcagcg

SEQ ID NO: 1929897 - RNA, 19 nt, Artificial Sequence
  Description of Artificial Sequence: Synthetic oligonucleotide
ugucggcugacaggguaca

SEQ ID NO: 1929898 - RNA, 19 nt, Artificial Sequence
  Description of Artificial Sequence: Synthetic oligonucleotide
gcuuacaaggucaacuuua

SEQ ID NO: 1929899 - RNA, 19 nt, Artificial Sequence
  Description of Artificial Sequence: Synthetic oligonucleotide
agcgucaggucaacauguc

SEQ ID NO: 1929900 - RNA, 19 nt, Artificial Sequence
  Description of Artificial Sequence: Synthetic oligonucleotide
acgcaucguguagagcguc

SEQ ID NO: 1929901 - RNA, 19 nt, Artificial Sequence
  Description of Artificial Sequence: Synthetic oligonucleotide
cucaagccugguuaauuua

SEQ ID NO: 1929902 - RNA, 19 nt, Artificial Sequence
  Description of Artificial Sequence: Synthetic oligonucleotide
ugauggcuagcagggugcu

SEQ ID NO: 1929903 - RNA, 19 nt, Artificial Sequence
  Description of Artificial Sequence: Synthetic oligonucleotide
gguagguaccacccagcac

SEQ ID NO: 1929904 - RNA, 19 nt, Artificial Sequence
  Description of Artificial Sequence: Synthetic oligonucleotide
gcuuaggcaugguaaggca

SEQ ID NO: 1929905 - RNA, 19 nt, Artificial Sequence
  Description of Artificial Sequence: Synthetic oligonucleotide
accaccggucguccacuag

SEQ ID NO: 1929906 - RNA, 19 nt, Artificial Sequence
  Description of Artificial Sequence: Synthetic oligonucleotide
gugcucgucacggaaggca

SEQ ID NO: 1929907 - RNA, 19 nt, Artificial Sequence
  Description of Artificial Sequence: Synthetic oligonucleotide
augucgccacaaccaccgg

SEQ ID NO: 1929908 - RNA, 19 nt, Artificial Sequence
  Description of Artificial Sequence: Synthetic oligonucleotide
gcucgcaucaaggcagggg

SEQ ID NO: 1929909 - RNA, 19 nt, Artificial Sequence
  Description of Artificial Sequence: Synthetic oligonucleotide
gcugcuuacaaggucaacu

SEQ ID NO: 1929910 - RNA, 19 nt, Artificial Sequence
  Description of Artificial Sequence: Synthetic oligonucleotide
gcaccucaagcacucugag

SEQ ID NO: 1929911 - RNA, 19 nt, Artificial Sequence
  Description of Artificial Sequence: Synthetic oligonucleotide
ggcaggggacagcuguggg

SEQ ID NO: 1929912 - RNA, 19 nt, Artificial Sequence
  Description of Artificial Sequence: Synthetic oligonucleotide
gcuggugaugggcaccaug

SEQ ID NO: 1929913 - RNA, 19 nt, Artificial Sequence
  Description of Artificial Sequence: Synthetic oligonucleotide
augccauguaccggcgcag

SEQ ID NO: 1929914 - RNA, 19 nt, Artificial Sequence
  Description of Artificial Sequence: Synthetic oligonucleotide
cagggcucgcaucaaggca

SEQ ID NO: 1929915 - RNA, 19 nt, Artificial Sequence
  Description of Artificial Sequence: Synthetic oligonucleotide
cacuucuggcccagggcuc

SEQ ID NO: 1929916 - RNA, 19 nt, Artificial Sequence
  Description of Artificial Sequence: Synthetic oligonucleotide
aguggagccgggaugccau

SEQ ID NO: 1929917 - RNA, 19 nt, Artificial Sequence
  Description of Artificial Sequence: Synthetic oligonucleotide
cuucaguuugcugcuuaca

SEQ ID NO: 1929918 - RNA, 19 nt, Artificial Sequence
  Description of Artificial Sequence: Synthetic oligonucleotide
gggcacuucuggcccaggg

SEQ ID NO: 1929919 - RNA, 19 nt, Artificial Sequence
  Description of Artificial Sequence: Synthetic oligonucleotide
ccaccggucguccacuagc

SEQ ID NO: 1929920 - RNA, 19 nt, Artificial Sequence
  Description of Artificial Sequence: Synthetic oligonucleotide
gcuaugaugccuauuucua

SEQ ID NO: 1929921 - RNA, 19 nt, Artificial Sequence
  Description of Artificial Sequence: Synthetic oligonucleotide
uggacgcaucguguagagc

SEQ ID NO: 1929922 - RNA, 19 nt, Artificial Sequence
  Description of Artificial Sequence: Synthetic oligonucleotide
ccgcacaucucggaggugg

SEQ ID NO: 1929923 - RNA, 19 nt, Artificial Sequence
  Description of Artificial Sequence: Synthetic oligonucleotide
guaccuucacauccaccaa

SEQ ID NO: 1929924 - RNA, 19 nt, Artificial Sequence
  Description of Artificial Sequence: Synthetic oligonucleotide
aaggugccacaugacuuuu

SEQ ID NO: 1929925 - RNA, 19 nt, Artificial Sequence
  Description of Artificial Sequence: Synthetic oligonucleotide
ugccauguaccggcgcaga

SEQ ID NO: 1929926 - RNA, 19 nt, Artificial Sequence
  Description of Artificial Sequence: Synthetic oligonucleotide
ucggagguggcggcugaug

SEQ ID NO: 1929927 - RNA, 19 nt, Artificial Sequence
  Description of Artificial Sequence: Synthetic oligonucleotide
caggcacucgguccagcac

SEQ ID NO: 1929928 - RNA, 19 nt, Artificial Sequence
  Description of Artificial Sequence: Synthetic oligonucleotide
gguccagcacgaugcauuc

SEQ ID NO: 1929929 - RNA, 19 nt, Artificial Sequence
  Description of Artificial Sequence: Synthetic oligonucleotide
gauggcuagcagggugcug

SEQ ID NO: 1929930 - RNA, 19 nt, Artificial Sequence
  Description of Artificial Sequence: Synthetic oligonucleotide
aggcaugguaaggcaggag

SEQ ID NO: 1929931 - RNA, 19 nt, Artificial Sequence
  Description of Artificial Sequence: Synthetic oligonucleotide
aucucgcagcugugcagcu

SEQ ID NO: 1929932 - RNA, 19 nt, Artificial Sequence
  Description of Artificial Sequence: Synthetic oligonucleotide
ccuugcaccucaagcacuc

SEQ ID NO: 1929933 - RNA, 19 nt, Artificial Sequence
  Description of Artificial Sequence: Synthetic oligonucleotide
ucucggugacucgguaggu

SEQ ID NO: 1929934 - RNA, 19 nt, Artificial Sequence
  Description of Artificial Sequence: Synthetic oligonucleotide
ucugagcgggugugggcau

SEQ ID NO: 1929935 - RNA, 19 nt, Artificial Sequence
  Description of Artificial Sequence: Synthetic oligonucleotide
cacuagccucuuccagcgg

SEQ ID NO: 1929936 - RNA, 19 nt, Artificial Sequence
  Description of Artificial Sequence: Synthetic oligonucleotide
gugccacaugacuuuugga

SEQ ID NO: 1929937 - RNA, 19 nt, Artificial Sequence
  Description of Artificial Sequence: Synthetic oligonucleotide
acaugcaggcacaggcgcu

SEQ ID NO: 1929938 - RNA, 19 nt, Artificial Sequence
  Description of Artificial Sequence: Synthetic oligonucleotide
gugggcauuucugggguga

SEQ ID NO: 1929939 - RNA, 19 nt, Artificial Sequence
  Description of Artificial Sequence: Synthetic oligonucleotide
cugcuuacaaggucaacuu

SEQ ID NO: 1929940 - RNA, 19 nt, Artificial Sequence
  Description of Artificial Sequence: Synthetic oligonucleotide
uggagccgggaugccaugu

SEQ ID NO: 1929941 - RNA, 19 nt, Artificial Sequence
  Description of Artificial Sequence: Synthetic oligonucleotide
gggauggaugggugguacc

SEQ ID NO: 1929942 - RNA, 19 nt, Artificial Sequence
  Description of Artificial Sequence: Synthetic oligonucleotide
augaaucaugagguagcua

SEQ ID NO: 1929943 - RNA, 19 nt, Artificial Sequence
  Description of Artificial Sequence: Synthetic oligonucleotide
gguagccacccaugcgcag

SEQ ID NO: 1929944 - RNA, 19 nt, Artificial Sequence
  Description of Artificial Sequence: Synthetic oligonucleotide
guaaggcaggaggucacaa

SEQ ID NO: 1929945 - RNA, 19 nt, Artificial Sequence
  Description of Artificial Sequence: Synthetic oligonucleotide
gguacagcccagcaccucu

SEQ ID NO: 1929946 - RNA, 19 nt, Artificial Sequence
  Description of Artificial Sequence: Synthetic oligonucleotide
accggucguccacuagccu

SEQ ID NO: 1929947 - RNA, 19 nt, Artificial Sequence
  Description of Artificial Sequence: Synthetic oligonucleotide
aaccaccggucguccacua

SEQ ID NO: 1929948 - RNA, 19 nt, Artificial Sequence
  Description of Artificial Sequence: Synthetic oligonucleotide
ccauggauucuuugggaca

SEQ ID NO: 1929949 - RNA, 19 nt, Artificial Sequence
  Description of Artificial Sequence: Synthetic oligonucleotide
gaguggagccgggaugcca

SEQ ID NO: 1929950 - RNA, 19 nt, Artificial Sequence
  Description of Artificial Sequence: Synthetic oligonucleotide
agguagcuaugaugccuau

SEQ ID NO: 1929951 - RNA, 19 nt, Artificial Sequence
  Description of Artificial Sequence: Synthetic oligonucleotide
ccauguaccggcgcagaag

SEQ ID NO: 1929952 - RNA, 19 nt, Artificial Sequence
  Description of Artificial Sequence: Synthetic oligonucleotide
gguaccacccagcaccagu

SEQ ID NO: 1929953 - RNA, 19 nt, Artificial Sequence
  Description of Artificial Sequence: Synthetic oligonucleotide
gggcaccaugcucagguca

SEQ ID NO: 1929954 - RNA, 19 nt, Artificial Sequence
  Description of Artificial Sequence: Synthetic oligonucleotide
guguagagcgucaggucaa

SEQ ID NO: 1929955 - RNA, 19 nt, Artificial Sequence
  Description of Artificial Sequence: Synthetic oligonucleotide
ggaugccauguaccggcgc

SEQ ID NO: 1929956 - RNA, 19 nt, Artificial Sequence
  Description of Artificial Sequence: Synthetic oligonucleotide
gcaucguguagagcgucag

SEQ ID NO: 1929957 - RNA, 19 nt, Artificial Sequence
  Description of Artificial Sequence: Synthetic oligonucleotide
uggcggcugauggcuagca

SEQ ID NO: 1929958 - RNA, 19 nt, Artificial Sequence
  Description of Artificial Sequence: Synthetic oligonucleotide
uuccucaagccugguuaau

SEQ ID NO: 1929959 - RNA, 19 nt, Artificial Sequence
  Description of Artificial Sequence: Synthetic oligonucleotide
ucgucacggaaggcaggca

SEQ ID NO: 1929960 - RNA, 19 nt, Artificial Sequence
  Description of Artificial Sequence: Synthetic oligonucleotide
ucucgcagcugugcagcuc

SEQ ID NO: 1929961 - RNA, 19 nt, Artificial Sequence
  Description of Artificial Sequence: Synthetic oligonucleotide
ugcugucggcugacagggu

SEQ ID NO: 1929962 - RNA, 19 nt, Artificial Sequence
  Description of Artificial Sequence: Synthetic oligonucleotide
gcgggugugggcauuucug

SEQ ID NO: 1929963 - RNA, 19 nt, Artificial Sequence
  Description of Artificial Sequence: Synthetic oligonucleotide
uggcuagcagggugcuguc

SEQ ID NO: 1929964 - RNA, 19 nt, Artificial Sequence
  Description of Artificial Sequence: Synthetic oligonucleotide
aggccccaagguccugucu

SEQ ID NO: 1929965 - RNA, 19 nt, Artificial Sequence
  Description of Artificial Sequence: Synthetic oligonucleotide
gcauccagcccggucucgg

SEQ ID NO: 1929966 - RNA, 19 nt, Artificial Sequence
  Description of Artificial Sequence: Synthetic oligonucleotide
ccaacggucagccgaaucu

SEQ ID NO: 1929967 - RNA, 19 nt, Artificial Sequence
  Description of Artificial Sequence: Synthetic oligonucleotide
cagggcucggaaucgggua

SEQ ID NO: 1929968 - RNA, 19 nt, Artificial Sequence
  Description of Artificial Sequence: Synthetic oligonucleotide
gcacaucucggagguggcg

SEQ ID NO: 1929969 - RNA, 19 nt, Artificial Sequence
  Description of Artificial Sequence: Synthetic oligonucleotide
aggcccugcaggugcucgu

SEQ ID NO: 1929970 - RNA, 19 nt, Artificial Sequence
  Description of Artificial Sequence: Synthetic oligonucleotide
gcucggaaucggguaaggc

SEQ ID NO: 1929971 - RNA, 19 nt, Artificial Sequence
  Description of Artificial Sequence: Synthetic oligonucleotide
guagagcgucaggucaaca

SEQ ID NO: 1929972 - RNA, 19 nt, Artificial Sequence
  Description of Artificial Sequence: Synthetic oligonucleotide
caccagugagcgcagggcu

SEQ ID NO: 1929973 - RNA, 19 nt, Artificial Sequence
  Description of Artificial Sequence: Synthetic oligonucleotide
guccagcacgaugcauucc

SEQ ID NO: 1929974 - RNA, 19 nt, Artificial Sequence
  Description of Artificial Sequence: Synthetic oligonucleotide
ggcggcugauggcuagcag

SEQ ID NO: 1929975 - RNA, 19 nt, Artificial Sequence
  Description of Artificial Sequence: Synthetic oligonucleotide
gucggcugacaggguacag

SEQ ID NO: 1929976 - RNA, 19 nt, Artificial Sequence
  Description of Artificial Sequence: Synthetic oligonucleotide
caggcgcuucagguugggg

SEQ ID NO: 1929977 - RNA, 19 nt, Artificial Sequence
  Description of Artificial Sequence: Synthetic oligonucleotide
cagccgaaucuuccgcaca

SEQ ID NO: 1929978 - RNA, 19 nt, Artificial Sequence
  Description of Artificial Sequence: Synthetic oligonucleotide
guggagccgggaugccaug

SEQ ID NO: 1929979 - RNA, 19 nt, Artificial Sequence
  Description of Artificial Sequence: Synthetic oligonucleotide
ggcuagcagggugcugucg

SEQ ID NO: 1929980 - RNA, 19 nt, Artificial Sequence
  Description of Artificial Sequence: Synthetic oligonucleotide
cacaugacuuuuggacgca

SEQ ID NO: 1929981 - RNA, 19 nt, Artificial Sequence
  Description of Artificial Sequence: Synthetic oligonucleotide
gccacaaccaccggucguc

SEQ ID NO: 1929982 - RNA, 19 nt, Artificial Sequence
  Description of Artificial Sequence: Synthetic oligonucleotide
gagagccagagaacaggua

SEQ ID NO: 1929983 - RNA, 19 nt, Artificial Sequence
  Description of Artificial Sequence: Synthetic oligonucleotide
ucgguccagcacgaugcau

SEQ ID NO: 1929984 - RNA, 19 nt, Artificial Sequence
  Description of Artificial Sequence: Synthetic oligonucleotide
ugagcgggugugggcauuu

SEQ ID NO: 1929985 - RNA, 19 nt, Artificial Sequence
  Description of Artificial Sequence: Synthetic oligonucleotide
cgaaucuuccgcacaucuc

SEQ ID NO: 1929986 - RNA, 19 nt, Artificial Sequence
  Description of Artificial Sequence: Synthetic oligonucleotide
gcugucggcugacagggua

SEQ ID NO: 1929987 - RNA, 19 nt, Artificial Sequence
  Description of Artificial Sequence: Synthetic oligonucleotide
cccuguaagcacaaacucu

SEQ ID NO: 1929988 - RNA, 19 nt, Artificial Sequence
  Description of Artificial Sequence: Synthetic oligonucleotide
ggauggaugggugguaccu

SEQ ID NO: 1929989 - RNA, 19 nt, Artificial Sequence
  Description of Artificial Sequence: Synthetic oligonucleotide
gggaugccauguaccggcg

SEQ ID NO: 1929990 - RNA, 19 nt, Artificial Sequence
  Description of Artificial Sequence: Synthetic oligonucleotide
gcgcagugaguggagccgg

SEQ ID NO: 1929991 - RNA, 19 nt, Artificial Sequence
  Description of Artificial Sequence: Synthetic oligonucleotide
guagccacccaugcgcagu

SEQ ID NO: 1929992 - RNA, 19 nt, Artificial Sequence
  Description of Artificial Sequence: Synthetic oligonucleotide
gcagaaggugccacaugac

SEQ ID NO: 1929993 - RNA, 19 nt, Artificial Sequence
  Description of Artificial Sequence: Synthetic oligonucleotide
cuccuucugcagccagauc

SEQ ID NO: 1929994 - RNA, 19 nt, Artificial Sequence
  Description of Artificial Sequence: Synthetic oligonucleotide
caggccccaagguccuguc

SEQ ID NO: 1929995 - RNA, 19 nt, Artificial Sequence
  Description of Artificial Sequence: Synthetic oligonucleotide
cuagccucugcagguagcu

SEQ ID NO: 1929996 - RNA, 19 nt, Artificial Sequence
  Description of Artificial Sequence: Synthetic oligonucleotide
ccaugcgcagugaguggag

SEQ ID NO: 1929997 - RNA, 19 nt, Artificial Sequence
  Description of Artificial Sequence: Synthetic oligonucleotide
gacgcaucguguagagcgu

SEQ ID NO: 1929998 - RNA, 19 nt, Artificial Sequence
  Description of Artificial Sequence: Synthetic oligonucleotide
gcucgucacggaaggcagg

SEQ ID NO: 1929999 - RNA, 19 nt, Artificial Sequence
  Description of Artificial Sequence: Synthetic oligonucleotide
aggcccugacaaucaccau

SEQ ID NO: 1930000 - RNA, 19 nt, Artificial Sequence
  Description of Artificial Sequence: Synthetic oligonucleotide
gguaaggcaggaggucaca

SEQ ID NO: 1930001 - RNA, 19 nt, Artificial Sequence
  Description of Artificial Sequence: Synthetic oligonucleotide
gcacuguaggguccugcuc

SEQ ID NO: 1930002 - RNA, 19 nt, Artificial Sequence
  Description of Artificial Sequence: Synthetic oligonucleotide
cccggucucggugacucgg

SEQ ID NO: 1930003 - RNA, 19 nt, Artificial Sequence
  Description of Artificial Sequence: Synthetic oligonucleotide
gugacucgguagguaccac

SEQ ID NO: 1930004 - RNA, 19 nt, Artificial Sequence
  Description of Artificial Sequence: Synthetic oligonucleotide
cucgguccagcacgaugca

SEQ ID NO: 1930005 - RNA, 19 nt, Artificial Sequence
  Description of Artificial Sequence: Synthetic oligonucleotide
agguaccacccagcaccag

SEQ ID NO: 1930006 - RNA, 19 nt, Artificial Sequence
  Description of Artificial Sequence: Synthetic oligonucleotide
ccucccagaggcuggguga

SEQ ID NO: 1930007 - RNA, 19 nt, Artificial Sequence
  Description of Artificial Sequence: Synthetic oligonucleotide
guggcggcugauggcuagc

SEQ ID NO: 1930008 - RNA, 19 nt, Artificial Sequence
  Description of Artificial Sequence: Synthetic oligonucleotide
gucacggaaggcaggcacu

SEQ ID NO: 1930009 - RNA, 19 nt, Artificial Sequence
  Description of Artificial Sequence: Synthetic oligonucleotide
ggugcucgucacggaaggc

SEQ ID NO: 1930010 - RNA, 19 nt, Artificial Sequence
  Description of Artificial Sequence: Synthetic oligonucleotide
auguaccggcgcagaaggu

SEQ ID NO: 1930011 - RNA, 19 nt, Artificial Sequence
  Description of Artificial Sequence: Synthetic oligonucleotide
gggcucgcaucaaggcagg

SEQ ID NO: 1930012 - RNA, 19 nt, Artificial Sequence
  Description of Artificial Sequence: Synthetic oligonucleotide
cgaugcauuccagcagcgg

SEQ ID NO: 1930013 - RNA, 19 nt, Artificial Sequence
  Description of Artificial Sequence: Synthetic oligonucleotide
gggcucggaaucggguaag

SEQ ID NO: 1930014 - RNA, 19 nt, Artificial Sequence
  Description of Artificial Sequence: Synthetic oligonucleotide
ggguaaggcccugcaggug

SEQ ID NO: 1930015 - RNA, 19 nt, Artificial Sequence
  Description of Artificial Sequence: Synthetic oligonucleotide
cagugagcgcagggcucgg

SEQ ID NO: 1930016 - RNA, 19 nt, Artificial Sequence
  Description of Artificial Sequence: Synthetic oligonucleotide
gcgcagaaggugccacaug

SEQ ID NO: 1930017 - RNA, 19 nt, Artificial Sequence
  Description of Artificial Sequence: Synthetic oligonucleotide
accggcgcagaaggugcca

SEQ ID NO: 1930018 - RNA, 19 nt, Artificial Sequence
  Description of Artificial Sequence: Synthetic oligonucleotide
ccgggaugccauguaccgg

SEQ ID NO: 1930019 - RNA, 19 nt, Artificial Sequence
  Description of Artificial Sequence: Synthetic oligonucleotide
ccgaaucuuccgcacaucu

SEQ ID NO: 1930020 - RNA, 19 nt, Artificial Sequence
  Description of Artificial Sequence: Synthetic oligonucleotide
cucggugacucgguaggua

SEQ ID NO: 1930021 - RNA, 19 nt, Artificial Sequence
  Description of Artificial Sequence: Synthetic oligonucleotide
cagugaguggagccgggau

SEQ ID NO: 1930022 - RNA, 19 nt, Artificial Sequence
  Description of Artificial Sequence: Synthetic oligonucleotide
cccaacggucagccgaauc

SEQ ID NO: 1930023 - RNA, 19 nt, Artificial Sequence
  Description of Artificial Sequence: Synthetic oligonucleotide
caccaauccauggauucuu

SEQ ID NO: 1930024 - RNA, 19 nt, Artificial Sequence
  Description of Artificial Sequence: Synthetic oligonucleotide
ggcucgcaucaaggcaggg

SEQ ID NO: 1930025 - RNA, 19 nt, Artificial Sequence
  Description of Artificial Sequence: Synthetic oligonucleotide
guacagcccagcaccucua

SEQ ID NO: 1930026 - RNA, 19 nt, Artificial Sequence
  Description of Artificial Sequence: Synthetic oligonucleotide
ggucaacaugucgccacaa

SEQ ID NO: 1930027 - RNA, 19 nt, Artificial Sequence
  Description of Artificial Sequence: Synthetic oligonucleotide
ccaggaagaccaggccuug

SEQ ID NO: 1930028 - RNA, 19 nt, Artificial Sequence
  Description of Artificial Sequence: Synthetic oligonucleotide
gccauguaccggcgcagaa

SEQ ID NO: 1930029 - RNA, 19 nt, Artificial Sequence
  Description of Artificial Sequence: Synthetic oligonucleotide
gcaccaugcucaggucagc

SEQ ID NO: 1930030 - RNA, 19 nt, Artificial Sequence
  Description of Artificial Sequence: Synthetic oligonucleotide
ggagccgggaugccaugua

SEQ ID NO: 1930031 - RNA, 19 nt, Artificial Sequence
  Description of Artificial Sequence: Synthetic oligonucleotide
cccaugcgcagugagugga

SEQ ID NO: 1930032 - RNA, 19 nt, Artificial Sequence
  Description of Artificial Sequence: Synthetic oligonucleotide
guaaggcccugcaggugcu

SEQ ID NO: 1930033 - RNA, 19 nt, Artificial Sequence
  Description of Artificial Sequence: Synthetic oligonucleotide
gagcgggugugggcauuuc

SEQ ID NO: 1930034 - RNA, 19 nt, Artificial Sequence
  Description of Artificial Sequence: Synthetic oligonucleotide
ggccccaagguccugucuu

SEQ ID NO: 1930035 - RNA, 19 nt, Artificial Sequence
  Description of Artificial Sequence: Synthetic oligonucleotide
gcgcagggcucggaaucgg

SEQ ID NO: 1930036 - RNA, 19 nt, Artificial Sequence
  Description of Artificial Sequence: Synthetic oligonucleotide
gcagugaguggagccggga

SEQ ID NO: 1930037 - RNA, 19 nt, Artificial Sequence
  Description of Artificial Sequence: Synthetic oligonucleotide
agccacccaugcgcaguga

SEQ ID NO: 1930038 - RNA, 19 nt, Artificial Sequence
  Description of Artificial Sequence: Synthetic oligonucleotide
caacggucagccgaaucuu

SEQ ID NO: 1930039 - RNA, 19 nt, Artificial Sequence
  Description of Artificial Sequence: Synthetic oligonucleotide
cauccagcccggucucggu

SEQ ID NO: 1930040 - RNA, 19 nt, Artificial Sequence
  Description of Artificial Sequence: Synthetic oligonucleotide
gcccggucucggugacucg

SEQ ID NO: 1930041 - RNA, 19 nt, Artificial Sequence
  Description of Artificial Sequence: Synthetic oligonucleotide
cgguagguaccacccagca

SEQ ID NO: 1930042 - RNA, 19 nt, Artificial Sequence
  Description of Artificial Sequence: Synthetic oligonucleotide
caugcaggcacaggcgcuu

SEQ ID NO: 1930043 - RNA, 19 nt, Artificial Sequence
  Description of Artificial Sequence: Synthetic oligonucleotide
cugccuccuggcccuccca

SEQ ID NO: 1930044 - RNA, 19 nt, Artificial Sequence
  Description of Artificial Sequence: Synthetic oligonucleotide
gccgaaucuuccgcacauc

SEQ ID NO: 1930045 - RNA, 19 nt, Artificial Sequence
  Description of Artificial Sequence: Synthetic oligonucleotide
caaccaccggucguccacu

SEQ ID NO: 1930046 - RNA, 19 nt, Artificial Sequence
  Description of Artificial Sequence: Synthetic oligonucleotide
cuugcaccucaagcacucu

SEQ ID NO: 1930047 - RNA, 19 nt, Artificial Sequence
  Description of Artificial Sequence: Synthetic oligonucleotide
cgcaucguguagagcguca

SEQ ID NO: 1930048 - RNA, 19 nt, Artificial Sequence
  Description of Artificial Sequence: Synthetic oligonucleotide
gguagcuaugaugccuauu

SEQ ID NO: 1930049 - RNA, 19 nt, Artificial Sequence
  Description of Artificial Sequence: Synthetic oligonucleotide
ccagcccggucucggugac

SEQ ID NO: 1930050 - RNA, 19 nt, Artificial Sequence
  Description of Artificial Sequence: Synthetic oligonucleotide
ggcgcagaaggugccacau

SEQ ID NO: 1930051 - RNA, 19 nt, Artificial Sequence
  Description of Artificial Sequence: Synthetic oligonucleotide
ccggcgcagaaggugccac

SEQ ID NO: 1930052 - RNA, 19 nt, Artificial Sequence
  Description of Artificial Sequence: Synthetic oligonucleotide
gcgcuucagguuggggcac

SEQ ID NO: 1930053 - RNA, 19 nt, Artificial Sequence
  Description of Artificial Sequence: Synthetic oligonucleotide
gcagggcucggaaucgggu

SEQ ID NO: 1930054 - RNA, 19 nt, Artificial Sequence
  Description of Artificial Sequence: Synthetic oligonucleotide
cccuugcaccucaagcacu

SEQ ID NO: 1930055 - RNA, 19 nt, Artificial Sequence
  Description of Artificial Sequence: Synthetic oligonucleotide
caucucggagguggcggcu

SEQ ID NO: 1930056 - RNA, 19 nt, Artificial Sequence
  Description of Artificial Sequence: Synthetic oligonucleotide
ccagggauggauggguggu

SEQ ID NO: 1930057 - RNA, 19 nt, Artificial Sequence
  Description of Artificial Sequence: Synthetic oligonucleotide
ccaccaauccauggauucu

SEQ ID NO: 1930058 - RNA, 19 nt, Artificial Sequence
  Description of Artificial Sequence: Synthetic oligonucleotide
cggguaaggcccugcaggu

SEQ ID NO: 1930059 - RNA, 19 nt, Artificial Sequence
  Description of Artificial Sequence: Synthetic oligonucleotide
cggucguccacuagccucu

SEQ ID NO: 1930060 - RNA, 19 nt, Artificial Sequence
  Description of Artificial Sequence: Synthetic oligonucleotide
cgguccagcacgaugcauu

SEQ ID NO: 1930061 - RNA, 19 nt, Artificial Sequence
  Description of Artificial Sequence: Synthetic oligonucleotide
gggacccuguaagcacaaa

SEQ ID NO: 1930062 - RNA, 19 nt, Artificial Sequence
  Description of Artificial Sequence: Synthetic oligonucleotide
cggaaucggguaaggcccu

SEQ ID NO: 1930063 - RNA, 19 nt, Artificial Sequence
  Description of Artificial Sequence: Synthetic oligonucleotide
cggcgcagaaggugccaca

SEQ ID NO: 1930064 - RNA, 19 nt, Artificial Sequence
  Description of Artificial Sequence: Synthetic oligonucleotide
cccaagguccugucuucuu

SEQ ID NO: 1930065 - RNA, 19 nt, Artificial Sequence
  Description of Artificial Sequence: Synthetic oligonucleotide
cugagcgggugugggcauu

SEQ ID NO: 1930066 - RNA, 19 nt, Artificial Sequence
  Description of Artificial Sequence: Synthetic oligonucleotide
cucggagguggcggcugau

SEQ ID NO: 1930067 - RNA, 19 nt, Artificial Sequence
  Description of Artificial Sequence: Synthetic oligonucleotide
cgccacaaccaccggucgu

SEQ ID NO: 1930068 - RNA, 19 nt, Artificial Sequence
  Description of Artificial Sequence: Synthetic oligonucleotide
cggucucggugacucggua

SEQ ID NO: 1930069 - RNA, 19 nt, Artificial Sequence
  Description of Artificial Sequence: Synthetic oligonucleotide
cagcccggucucggugacu

SEQ ID NO: 1930070 - RNA, 19 nt, Artificial Sequence
  Description of Artificial Sequence: Synthetic oligonucleotide
ggucguccacuagccucuu

SEQ ID NO: 1930071 - RNA, 19 nt, Artificial Sequence
  Description of Artificial Sequence: Synthetic oligonucleotide
gcacucgguccagcacgau

SEQ ID NO: 1930072 - RNA, 19 nt, Artificial Sequence
  Description of Artificial Sequence: Synthetic oligonucleotide
ccccaacggucagccgaau

SEQ ID NO: 1930073 - RNA, 19 nt, Artificial Sequence
  Description of Artificial Sequence: Synthetic oligonucleotide
ugugaaugcacaauaauag

SEQ ID NO: 1930074 - RNA, 19 nt, Artificial Sequence
  Description of Artificial Sequence: Synthetic oligonucleotide
aaguacucuacccacaaac

SEQ ID NO: 1930075 - RNA, 19 nt, Artificial Sequence
  Description of Artificial Sequence: Synthetic oligonucleotide
gguucuaagaauuuuacgg

SEQ ID NO: 1930076 - RNA, 19 nt, Artificial Sequence
  Description of Artificial Sequence: Synthetic oligonucleotide
ugcucguucacucuaaagg

SEQ ID NO: 1930077 - RNA, 19 nt, Artificial Sequence
  Description of Artificial Sequence: Synthetic oligonucleotide
auuguuauccccacgaugc

SEQ ID NO: 1930078 - RNA, 19 nt, Artificial Sequence
  Description of Artificial Sequence: Synthetic oligonucleotide
uuagauucaucaucgaucc

SEQ ID NO: 1930079 - RNA, 19 nt, Artificial Sequence
  Description of Artificial Sequence: Synthetic oligonucleotide
agaauuuuacggucaaacc

SEQ ID NO: 1930080 - RNA, 19 nt, Artificial Sequence
  Description of Artificial Sequence: Synthetic oligonucleotide
uuauuaaccauucucucca

SEQ ID NO: 1930081 - RNA, 19 nt, Artificial Sequence
  Description of Artificial Sequence: Synthetic oligonucleotide
uuuauuaaccauucucucc

SEQ ID NO: 1930082 - RNA, 19 nt, Artificial Sequence
  Description of Artificial Sequence: Synthetic oligonucleotide
acucauuaaacgucgcucc

SEQ ID NO: 1930083 - RNA, 19 nt, Artificial Sequence
  Description of Artificial Sequence: Synthetic oligonucleotide
auaauguugaagccaauag

SEQ ID NO: 1930084 - RNA, 19 nt, Artificial Sequence
  Description of Artificial Sequence: Synthetic oligonucleotide
aaagagauuacuggauggc

SEQ ID NO: 1930085 - RNA, 19 nt, Artificial Sequence
  Description of Artificial Sequence: Synthetic oligonucleotide
aauguugaagccaauagca

SEQ ID NO: 1930086 - RNA, 19 nt, Artificial Sequence
  Description of Artificial Sequence: Synthetic oligonucleotide
aaaaucuuggggaacuucg

SEQ ID NO: 1930087 - RNA, 19 nt, Artificial Sequence
  Description of Artificial Sequence: Synthetic oligonucleotide
ugaaugcacaauaauaggu

SEQ ID NO: 1930088 - RNA, 19 nt, Artificial Sequence
  Description of Artificial Sequence: Synthetic oligonucleotide
gaauuuuacggucaaacca

SEQ ID NO: 1930089 - RNA, 19 nt, Artificial Sequence
  Description of Artificial Sequence: Synthetic oligonucleotide
aauagguccaaagagauua

SEQ ID NO: 1930090 - RNA, 19 nt, Artificial Sequence
  Description of Artificial Sequence: Synthetic oligonucleotide
aauaauagguccaaagaga

SEQ ID NO: 1930091 - RNA, 19 nt, Artificial Sequence
  Description of Artificial Sequence: Synthetic oligonucleotide
acucuaaaggaacacuucg

SEQ ID NO: 1930092 - RNA, 19 nt, Artificial Sequence
  Description of Artificial Sequence: Synthetic oligonucleotide
uguauauagauaauguguu

SEQ ID NO: 1930093 - RNA, 19 nt, Artificial Sequence
  Description of Artificial Sequence: Synthetic oligonucleotide
aaagguuuagaggacgccg

SEQ ID NO: 1930094 - RNA, 19 nt, Artificial Sequence
  Description of Artificial Sequence: Synthetic oligonucleotide
auggcuuagagucuuacag

SEQ ID NO: 1930095 - RNA, 19 nt, Artificial Sequence
  Description of Artificial Sequence: Synthetic oligonucleotide
ucuauaauguugaagccaa

SEQ ID NO: 1930096 - RNA, 19 nt, Artificial Sequence
  Description of Artificial Sequence: Synthetic oligonucleotide
ucuaacuugucauacugug

SEQ ID NO: 1930097 - RNA, 19 nt, Artificial Sequence
  Description of Artificial Sequence: Synthetic oligonucleotide
aauucgcagggucagagcu

SEQ ID NO: 1930098 - RNA, 19 nt, Artificial Sequence
  Description of Artificial Sequence: Synthetic oligonucleotide
cuugcauuaaacacgcaag

SEQ ID NO: 1930099 - RNA, 19 nt, Artificial Sequence
  Description of Artificial Sequence: Synthetic oligonucleotide
ugcguaagcagauagggca

SEQ ID NO: 1930100 - RNA, 19 nt, Artificial Sequence
  Description of Artificial Sequence: Synthetic oligonucleotide
ugagccguuagauucauca

SEQ ID NO: 1930101 - RNA, 19 nt, Artificial Sequence
  Description of Artificial Sequence: Synthetic oligonucleotide
ucuaagaauuuuacgguca

SEQ ID NO: 1930102 - RNA, 19 nt, Artificial Sequence
  Description of Artificial Sequence: Synthetic oligonucleotide
acaaaauuccaggaguccc

SEQ ID NO: 1930103 - RNA, 19 nt, Artificial Sequence
  Description of Artificial Sequence: Synthetic oligonucleotide
agauucaucaucgauccac

SEQ ID NO: 1930104 - RNA, 19 nt, Artificial Sequence
  Description of Artificial Sequence: Synthetic oligonucleotide
ugagccauuuaauauauuc

SEQ ID NO: 1930105 - RNA, 19 nt, Artificial Sequence
  Description of Artificial Sequence: Synthetic oligonucleotide
ucaucgauccaccucagca

SEQ ID NO: 1930106 - RNA, 19 nt, Artificial Sequence
  Description of Artificial Sequence: Synthetic oligonucleotide
ugugauacaagcacugggu

SEQ ID NO: 1930107 - RNA, 19 nt, Artificial Sequence
  Description of Artificial Sequence: Synthetic oligonucleotide
ucgaaguccaaauaugugu

SEQ ID NO: 1930108 - RNA, 19 nt, Artificial Sequence
  Description of Artificial Sequence: Synthetic oligonucleotide
aaauucgcagggucagagc

SEQ ID NO: 1930109 - RNA, 19 nt, Artificial Sequence
  Description of Artificial Sequence: Synthetic oligonucleotide
aacugcucaaaaucuuggg

SEQ ID NO: 1930110 - RNA, 19 nt, Artificial Sequence
  Description of Artificial Sequence: Synthetic oligonucleotide
agaaugccaggauaugccc

SEQ ID NO: 1930111 - RNA, 19 nt, Artificial Sequence
  Description of Artificial Sequence: Synthetic oligonucleotide
caaagagauuacuggaugg

SEQ ID NO: 1930112 - RNA, 19 nt, Artificial Sequence
  Description of Artificial Sequence: Synthetic oligonucleotide
uuacggucaaaccauagaa

SEQ ID NO: 1930113 - RNA, 19 nt, Artificial Sequence
  Description of Artificial Sequence: Synthetic oligonucleotide
ucacaguagcccuugagcc

SEQ ID NO: 1930114 - RNA, 19 nt, Artificial Sequence
  Description of Artificial Sequence: Synthetic oligonucleotide
uacucuacccacaaacacc

SEQ ID NO: 1930115 - RNA, 19 nt, Artificial Sequence
  Description of Artificial Sequence: Synthetic oligonucleotide
uucagagcgauggagaacc

SEQ ID NO: 1930116 - RNA, 19 nt, Artificial Sequence
  Description of Artificial Sequence: Synthetic oligonucleotide
uucaagaaugccaggauau

SEQ ID NO: 1930117 - RNA, 19 nt, Artificial Sequence
  Description of Artificial Sequence: Synthetic oligonucleotide
caggauaugcccugcaugg

SEQ ID NO: 1930118 - RNA, 19 nt, Artificial Sequence
  Description of Artificial Sequence: Synthetic oligonucleotide
agucuuacaggaucgccac

SEQ ID NO: 1930119 - RNA, 19 nt, Artificial Sequence
  Description of Artificial Sequence: Synthetic oligonucleotide
ugggaguugauccaaucug

SEQ ID NO: 1930120 - RNA, 19 nt, Artificial Sequence
  Description of Artificial Sequence: Synthetic oligonucleotide
agagauugaaacugguucu

SEQ ID NO: 1930121 - RNA, 19 nt, Artificial Sequence
  Description of Artificial Sequence: Synthetic oligonucleotide
cuugcguaagcagauaggg

SEQ ID NO: 1930122 - RNA, 19 nt, Artificial Sequence
  Description of Artificial Sequence: Synthetic oligonucleotide
uacuggauggcugaaaggc

SEQ ID NO: 1930123 - RNA, 19 nt, Artificial Sequence
  Description of Artificial Sequence: Synthetic oligonucleotide
cuuccaagugauuggagcc

SEQ ID NO: 1930124 - RNA, 19 nt, Artificial Sequence
  Description of Artificial Sequence: Synthetic oligonucleotide
uuaaacgucgcuccccagc

SEQ ID NO: 1930125 - RNA, 19 nt, Artificial Sequence
  Description of Artificial Sequence: Synthetic oligonucleotide
ucguuucagagauugaaac

SEQ ID NO: 1930126 - RNA, 19 nt, Artificial Sequence
  Description of Artificial Sequence: Synthetic oligonucleotide
aaucugacugugaaugcac

SEQ ID NO: 1930127 - RNA, 19 nt, Artificial Sequence
  Description of Artificial Sequence: Synthetic oligonucleotide
auggaauagucacuggaag

SEQ ID NO: 1930128 - RNA, 19 nt, Artificial Sequence
  Description of Artificial Sequence: Synthetic oligonucleotide
aaugccaggauaugcccug

SEQ ID NO: 1930129 - RNA, 19 nt, Artificial Sequence
  Description of Artificial Sequence: Synthetic oligonucleotide
cugauaacuuuguuguugc

SEQ ID NO: 1930130 - RNA, 19 nt, Artificial Sequence
  Description of Artificial Sequence: Synthetic oligonucleotide
uucacuuugccuucauacc

SEQ ID NO: 1930131 - RNA, 19 nt, Artificial Sequence
  Description of Artificial Sequence: Synthetic oligonucleotide
uuuuacggucaaaccauag

SEQ ID NO: 1930132 - RNA, 19 nt, Artificial Sequence
  Description of Artificial Sequence: Synthetic oligonucleotide
agagcgauggagaaccugc

SEQ ID NO: 1930133 - RNA, 19 nt, Artificial Sequence
  Description of Artificial Sequence: Synthetic oligonucleotide
gugccaauauuuauuaagg

SEQ ID NO: 1930134 - RNA, 19 nt, Artificial Sequence
  Description of Artificial Sequence: Synthetic oligonucleotide
uccagaauagcaaugcauu

SEQ ID NO: 1930135 - RNA, 19 nt, Artificial Sequence
  Description of Artificial Sequence: Synthetic oligonucleotide
aauauacuagugaucucag

SEQ ID NO: 1930136 - RNA, 19 nt, Artificial Sequence
  Description of Artificial Sequence: Synthetic oligonucleotide
acuguaauaguuaucaaaa

SEQ ID NO: 1930137 - RNA, 19 nt, Artificial Sequence
  Description of Artificial Sequence: Synthetic oligonucleotide
agccguuagauucaucauc

SEQ ID NO: 1930138 - RNA, 19 nt, Artificial Sequence
  Description of Artificial Sequence: Synthetic oligonucleotide
agcugaauauccccacacc

SEQ ID NO: 1930139 - RNA, 19 nt, Artificial Sequence
  Description of Artificial Sequence: Synthetic oligonucleotide
guaucugucuauaauguug

SEQ ID NO: 1930140 - RNA, 19 nt, Artificial Sequence
  Description of Artificial Sequence: Synthetic oligonucleotide
agugucgaaguccaaauau

SEQ ID NO: 1930141 - RNA, 19 nt, Artificial Sequence
  Description of Artificial Sequence: Synthetic oligonucleotide
gagccuugcauuaaacacg

SEQ ID NO: 1930142 - RNA, 19 nt, Artificial Sequence
  Description of Artificial Sequence: Synthetic oligonucleotide
uacuagugaucucaggacu

SEQ ID NO: 1930143 - RNA, 19 nt, Artificial Sequence
  Description of Artificial Sequence: Synthetic oligonucleotide
agauucuuccaagugauug

SEQ ID NO: 1930144 - RNA, 19 nt, Artificial Sequence
  Description of Artificial Sequence: Synthetic oligonucleotide
uacugugauacaagcacug

SEQ ID NO: 1930145 - RNA, 19 nt, Artificial Sequence
  Description of Artificial Sequence: Synthetic oligonucleotide
acgccggucagauucuucc

SEQ ID NO: 1930146 - RNA, 19 nt, Artificial Sequence
  Description of Artificial Sequence: Synthetic oligonucleotide
uucuaagaauuuuacgguc

SEQ ID NO: 1930147 - RNA, 19 nt, Artificial Sequence
  Description of Artificial Sequence: Synthetic oligonucleotide
acugauaacuuuguuguug

SEQ ID NO: 1930148 - RNA, 19 nt, Artificial Sequence
  Description of Artificial Sequence: Synthetic oligonucleotide
auagggcaaagguuuagag

SEQ ID NO: 1930149 - RNA, 19 nt, Artificial Sequence
  Description of Artificial Sequence: Synthetic oligonucleotide
uggguaaagaucaaucauu

SEQ ID NO: 1930150 - RNA, 19 nt, Artificial Sequence
  Description of Artificial Sequence: Synthetic oligonucleotide
uuauuaagguuacuccuau

SEQ ID NO: 1930151 - RNA, 19 nt, Artificial Sequence
  Description of Artificial Sequence: Synthetic oligonucleotide
gaucaaucauuguuauccc

SEQ ID NO: 1930152 - RNA, 19 nt, Artificial Sequence
  Description of Artificial Sequence: Synthetic oligonucleotide
aacgucgcuccccagcauc

SEQ ID NO: 1930153 - RNA, 19 nt, Artificial Sequence
  Description of Artificial Sequence: Synthetic oligonucleotide
uuucaagaaugccaggaua

SEQ ID NO: 1930154 - RNA, 19 nt, Artificial Sequence
  Description of Artificial Sequence: Synthetic oligonucleotide
cugugauacaagcacuggg

SEQ ID NO: 1930155 - RNA, 19 nt, Artificial Sequence
  Description of Artificial Sequence: Synthetic oligonucleotide
auauacuagugaucucagg

SEQ ID NO: 1930156 - RNA, 19 nt, Artificial Sequence
  Description of Artificial Sequence: Synthetic oligonucleotide
acggucaaaccauagaaaa

SEQ ID NO: 1930157 - RNA, 19 nt, Artificial Sequence
  Description of Artificial Sequence: Synthetic oligonucleotide
ugcauuaaacacgcaagcc

SEQ ID NO: 1930158 - RNA, 19 nt, Artificial Sequence
  Description of Artificial Sequence: Synthetic oligonucleotide
uuuaggguguguucagagc

SEQ ID NO: 1930159 - RNA, 19 nt, Artificial Sequence
  Description of Artificial Sequence: Synthetic oligonucleotide
uucaaauucgcagggucag

SEQ ID NO: 1930160 - RNA, 19 nt, Artificial Sequence
  Description of Artificial Sequence: Synthetic oligonucleotide
gaaugcacaauaauagguc

SEQ ID NO: 1930161 - RNA, 19 nt, Artificial Sequence
  Description of Artificial Sequence: Synthetic oligonucleotide
uuacaggaucgccacagca

SEQ ID NO: 1930162 - RNA, 19 nt, Artificial Sequence
  Description of Artificial Sequence: Synthetic oligonucleotide
aaagcugaauauccccaca

SEQ ID NO: 1930163 - RNA, 19 nt, Artificial Sequence
  Description of Artificial Sequence: Synthetic oligonucleotide
uaaacgucgcuccccagca

SEQ ID NO: 1930164 - RNA, 19 nt, Artificial Sequence
  Description of Artificial Sequence: Synthetic oligonucleotide
aagguuuagaggacgccgg

SEQ ID NO: 1930165 - RNA, 19 nt, Artificial Sequence
  Description of Artificial Sequence: Synthetic oligonucleotide
cuuuaggguguguucagag

SEQ ID NO: 1930166 - RNA, 19 nt, Artificial Sequence
  Description of Artificial Sequence: Synthetic oligonucleotide
uaagcagauagggcaaagg

SEQ ID NO: 1930167 - RNA, 19 nt, Artificial Sequence
  Description of Artificial Sequence: Synthetic oligonucleotide
uuccagaauagcaaugcau

SEQ ID NO: 1930168 - RNA, 19 nt, Artificial Sequence
  Description of Artificial Sequence: Synthetic oligonucleotide
ugaaguacucuacccacaa

SEQ ID NO: 1930169 - RNA, 19 nt, Artificial Sequence
  Description of Artificial Sequence: Synthetic oligonucleotide
gaaguccaaauaugugucc

SEQ ID NO: 1930170 - RNA, 19 nt, Artificial Sequence
  Description of Artificial Sequence: Synthetic oligonucleotide
aauggaauagucacuggaa

SEQ ID NO: 1930171 - RNA, 19 nt, Artificial Sequence
  Description of Artificial Sequence: Synthetic oligonucleotide
uuaaacacgcaagccacug

SEQ ID NO: 1930172 - RNA, 19 nt, Artificial Sequence
  Description of Artificial Sequence: Synthetic oligonucleotide
agccauuuaauauauucuu

SEQ ID NO: 1930173 - RNA, 19 nt, Artificial Sequence
  Description of Artificial Sequence: Synthetic oligonucleotide
ucguucacucuaaaggaac

SEQ ID NO: 1930174 - RNA, 19 nt, Artificial Sequence
  Description of Artificial Sequence: Synthetic oligonucleotide
ucuucacugauaacuuugu

SEQ ID NO: 1930175 - RNA, 19 nt, Artificial Sequence
  Description of Artificial Sequence: Synthetic oligonucleotide
agccuugcauuaaacacgc

SEQ ID NO: 1930176 - RNA, 19 nt, Artificial Sequence
  Description of Artificial Sequence: Synthetic oligonucleotide
uagaaauccuugccguacc

SEQ ID NO: 1930177 - RNA, 19 nt, Artificial Sequence
  Description of Artificial Sequence: Synthetic oligonucleotide
uucguuucagagauugaaa

SEQ ID NO: 1930178 - RNA, 19 nt, Artificial Sequence
  Description of Artificial Sequence: Synthetic oligonucleotide
agagucuuacaggaucgcc

SEQ ID NO: 1930179 - RNA, 19 nt, Artificial Sequence
  Description of Artificial Sequence: Synthetic oligonucleotide
ugccaauauuuauuaaggu

SEQ ID NO: 1930180 - RNA, 19 nt, Artificial Sequence
  Description of Artificial Sequence: Synthetic oligonucleotide
uauaauguugaagccaaua

SEQ ID NO: 1930181 - RNA, 19 nt, Artificial Sequence
  Description of Artificial Sequence: Synthetic oligonucleotide
agcuugcguaagcagauag

SEQ ID NO: 1930182 - RNA, 19 nt, Artificial Sequence
  Description of Artificial Sequence: Synthetic oligonucleotide
ucggggugggaguugaucc

SEQ ID NO: 1930183 - RNA, 19 nt, Artificial Sequence
  Description of Artificial Sequence: Synthetic oligonucleotide
agacaaaauuccaggaguc

SEQ ID NO: 1930184 - RNA, 19 nt, Artificial Sequence
  Description of Artificial Sequence: Synthetic oligonucleotide
agugcuuuguaucugucua

SEQ ID NO: 1930185 - RNA, 19 nt, Artificial Sequence
  Description of Artificial Sequence: Synthetic oligonucleotide
gaagccaauagcacauugc

SEQ ID NO: 1930186 - RNA, 19 nt, Artificial Sequence
  Description of Artificial Sequence: Synthetic oligonucleotide
aagagauuacuggauggcu

SEQ ID NO: 1930187 - RNA, 19 nt, Artificial Sequence
  Description of Artificial Sequence: Synthetic oligonucleotide
cauuguuauccccacgaug

SEQ ID NO: 1930188 - RNA, 19 nt, Artificial Sequence
  Description of Artificial Sequence: Synthetic oligonucleotide
uuuagaggacgccggucag

SEQ ID NO: 1930189 - RNA, 19 nt, Artificial Sequence
  Description of Artificial Sequence: Synthetic oligonucleotide
augcagaaagcaucuucgg

SEQ ID NO: 1930190 - RNA, 19 nt, Artificial Sequence
  Description of Artificial Sequence: Synthetic oligonucleotide
caucgauccaccucagcag

SEQ ID NO: 1930191 - RNA, 19 nt, Artificial Sequence
  Description of Artificial Sequence: Synthetic oligonucleotide
uucuguggcuaucagugaa

SEQ ID NO: 1930192 - RNA, 19 nt, Artificial Sequence
  Description of Artificial Sequence: Synthetic oligonucleotide
uccaauccuuaaaagcuuc

SEQ ID NO: 1930193 - RNA, 19 nt, Artificial Sequence
  Description of Artificial Sequence: Synthetic oligonucleotide
auauguguccaaucucaug

SEQ ID NO: 1930194 - RNA, 19 nt, Artificial Sequence
  Description of Artificial Sequence: Synthetic oligonucleotide
uacaggaucgccacagcaa

SEQ ID NO: 1930195 - RNA, 19 nt, Artificial Sequence
  Description of Artificial Sequence: Synthetic oligonucleotide
ggagccuugcauuaaacac

SEQ ID NO: 1930196 - RNA, 19 nt, Artificial Sequence
  Description of Artificial Sequence: Synthetic oligonucleotide
uggagccuugcauuaaaca

SEQ ID NO: 1930197 - RNA, 19 nt, Artificial Sequence
  Description of Artificial Sequence: Synthetic oligonucleotide
gacaaaauuccaggagucc

SEQ ID NO: 1930198 - RNA, 19 nt, Artificial Sequence
  Description of Artificial Sequence: Synthetic oligonucleotide
ugaugagccguuagauuca

SEQ ID NO: 1930199 - RNA, 19 nt, Artificial Sequence
  Description of Artificial Sequence: Synthetic oligonucleotide
guacucuacccacaaacac

SEQ ID NO: 1930200 - RNA, 19 nt, Artificial Sequence
  Description of Artificial Sequence: Synthetic oligonucleotide
uugcguaagcagauagggc

SEQ ID NO: 1930201 - RNA, 19 nt, Artificial Sequence
  Description of Artificial Sequence: Synthetic oligonucleotide
gaucgccacagcaauauac

SEQ ID NO: 1930202 - RNA, 19 nt, Artificial Sequence
  Description of Artificial Sequence: Synthetic oligonucleotide
agagcuauuuaccggcgcu

SEQ ID NO: 1930203 - RNA, 19 nt, Artificial Sequence
  Description of Artificial Sequence: Synthetic oligonucleotide
gaacacuucguuucagaga

SEQ ID NO: 1930204 - RNA, 19 nt, Artificial Sequence
  Description of Artificial Sequence: Synthetic oligonucleotide
uuguuguugccuagagagc

SEQ ID NO: 1930205 - RNA, 19 nt, Artificial Sequence
  Description of Artificial Sequence: Synthetic oligonucleotide
ucauuaaacgucgcucccc

SEQ ID NO: 1930206 - RNA, 19 nt, Artificial Sequence
  Description of Artificial Sequence: Synthetic oligonucleotide
agcuauuuaccggcgcugc

SEQ ID NO: 1930207 - RNA, 19 nt, Artificial Sequence
  Description of Artificial Sequence: Synthetic oligonucleotide
guuuagaggacgccgguca

SEQ ID NO: 1930208 - RNA, 19 nt, Artificial Sequence
  Description of Artificial Sequence: Synthetic oligonucleotide
uugucauacugugauacaa

SEQ ID NO: 1930209 - RNA, 19 nt, Artificial Sequence
  Description of Artificial Sequence: Synthetic oligonucleotide
acuccuaucugaaaguccu

SEQ ID NO: 1930210 - RNA, 19 nt, Artificial Sequence
  Description of Artificial Sequence: Synthetic oligonucleotide
ugccguaccuggcaaagcu

SEQ ID NO: 1930211 - RNA, 19 nt, Artificial Sequence
  Description of Artificial Sequence: Synthetic oligonucleotide
ggaacacuucguuucagag

SEQ ID NO: 1930212 - RNA, 19 nt, Artificial Sequence
  Description of Artificial Sequence: Synthetic oligonucleotide
auguugaagccaauagcac

SEQ ID NO: 1930213 - RNA, 19 nt, Artificial Sequence
  Description of Artificial Sequence: Synthetic oligonucleotide
aagugauuggagccuugca

SEQ ID NO: 1930214 - RNA, 19 nt, Artificial Sequence
  Description of Artificial Sequence: Synthetic oligonucleotide
ugugugugcucguucacuc

SEQ ID NO: 1930215 - RNA, 19 nt, Artificial Sequence
  Description of Artificial Sequence: Synthetic oligonucleotide
gggucagagcuauuuaccg

SEQ ID NO: 1930216 - RNA, 19 nt, Artificial Sequence
  Description of Artificial Sequence: Synthetic oligonucleotide
caaauucgcagggucagag

SEQ ID NO: 1930217 - RNA, 19 nt, Artificial Sequence
  Description of Artificial Sequence: Synthetic oligonucleotide
uaacuuuguuguugccuag

SEQ ID NO: 1930218 - RNA, 19 nt, Artificial Sequence
  Description of Artificial Sequence: Synthetic oligonucleotide
uucacucauuaaacgucgc

SEQ ID NO: 1930219 - RNA, 19 nt, Artificial Sequence
  Description of Artificial Sequence: Synthetic oligonucleotide
agagauuacuggauggcug

SEQ ID NO: 1930220 - RNA, 19 nt, Artificial Sequence
  Description of Artificial Sequence: Synthetic oligonucleotide
gcauuaaacacgcaagcca

SEQ ID NO: 1930221 - RNA, 19 nt, Artificial Sequence
  Description of Artificial Sequence: Synthetic oligonucleotide
cauaccgugagcuguagaa

SEQ ID NO: 1930222 - RNA, 19 nt, Artificial Sequence
  Description of Artificial Sequence: Synthetic oligonucleotide
gucuauaauguugaagcca

SEQ ID NO: 1930223 - RNA, 19 nt, Artificial Sequence
  Description of Artificial Sequence: Synthetic oligonucleotide
uaccgugagcuguagaaau

SEQ ID NO: 1930224 - RNA, 19 nt, Artificial Sequence
  Description of Artificial Sequence: Synthetic oligonucleotide
ugauccaaucugacuguga

SEQ ID NO: 1930225 - RNA, 19 nt, Artificial Sequence
  Description of Artificial Sequence: Synthetic oligonucleotide
agucccguggguaaagauc

SEQ ID NO: 1930226 - RNA, 19 nt, Artificial Sequence
  Description of Artificial Sequence: Synthetic oligonucleotide
ggucagagcuauuuaccgg

SEQ ID NO: 1930227 - RNA, 19 nt, Artificial Sequence
  Description of Artificial Sequence: Synthetic oligonucleotide
guagaaauccuugccguac

SEQ ID NO: 1930228 - RNA, 19 nt, Artificial Sequence
  Description of Artificial Sequence: Synthetic oligonucleotide
uccccagcaucuaacuugu

SEQ ID NO: 1930229 - RNA, 19 nt, Artificial Sequence
  Description of Artificial Sequence: Synthetic oligonucleotide
aucgauccaccucagcagu

SEQ ID NO: 1930230 - RNA, 19 nt, Artificial Sequence
  Description of Artificial Sequence: Synthetic oligonucleotide
uauccccacaccaucuguc

SEQ ID NO: 1930231 - RNA, 19 nt, Artificial Sequence
  Description of Artificial Sequence: Synthetic oligonucleotide
ggguucuuagagaugagag

SEQ ID NO: 1930232 - RNA, 19 nt, Artificial Sequence
  Description of Artificial Sequence: Synthetic oligonucleotide
ucuguggcuaucagugaaa

SEQ ID NO: 1930233 - RNA, 19 nt, Artificial Sequence
  Description of Artificial Sequence: Synthetic oligonucleotide
gagucuuacaggaucgcca

SEQ ID NO: 1930234 - RNA, 19 nt, Artificial Sequence
  Description of Artificial Sequence: Synthetic oligonucleotide
ugauuggagccuugcauua

SEQ ID NO: 1930235 - RNA, 19 nt, Artificial Sequence
  Description of Artificial Sequence: Synthetic oligonucleotide
uuacuccuaucugaaaguc

SEQ ID NO: 1930236 - RNA, 19 nt, Artificial Sequence
  Description of Artificial Sequence: Synthetic oligonucleotide
aauauguguccaaucucau

SEQ ID NO: 1930237 - RNA, 19 nt, Artificial Sequence
  Description of Artificial Sequence: Synthetic oligonucleotide
ucauuguuauccccacgau

SEQ ID NO: 1930238 - RNA, 19 nt, Artificial Sequence
  Description of Artificial Sequence: Synthetic oligonucleotide
acuagugaucucaggacug

SEQ ID NO: 1930239 - RNA, 19 nt, Artificial Sequence
  Description of Artificial Sequence: Synthetic oligonucleotide
agguccaaagagauuacug

SEQ ID NO: 1930240 - RNA, 19 nt, Artificial Sequence
  Description of Artificial Sequence: Synthetic oligonucleotide
cuaacuugucauacuguga

SEQ ID NO: 1930241 - RNA, 19 nt, Artificial Sequence
  Description of Artificial Sequence: Synthetic oligonucleotide
aggaacacuucguuucaga

SEQ ID NO: 1930242 - RNA, 19 nt, Artificial Sequence
  Description of Artificial Sequence: Synthetic oligonucleotide
auugcagcuugcguaagca

SEQ ID NO: 1930243 - RNA, 19 nt, Artificial Sequence
  Description of Artificial Sequence: Synthetic oligonucleotide
aguacucuacccacaaaca

SEQ ID NO: 1930244 - RNA, 19 nt, Artificial Sequence
  Description of Artificial Sequence: Synthetic oligonucleotide
uuguuauccccacgaugca

SEQ ID NO: 1930245 - RNA, 19 nt, Artificial Sequence
  Description of Artificial Sequence: Synthetic oligonucleotide
uggguucuuagagaugaga

SEQ ID NO: 1930246 - RNA, 19 nt, Artificial Sequence
  Description of Artificial Sequence: Synthetic oligonucleotide
uuggagccuugcauuaaac

SEQ ID NO: 1930247 - RNA, 19 nt, Artificial Sequence
  Description of Artificial Sequence: Synthetic oligonucleotide
gaagauguuuguuggugcu

SEQ ID NO: 1930248 - RNA, 19 nt, Artificial Sequence
  Description of Artificial Sequence: Synthetic oligonucleotide
gcugaauauccccacacca

SEQ ID NO: 1930249 - RNA, 19 nt, Artificial Sequence
  Description of Artificial Sequence: Synthetic oligonucleotide
cauugcagcuugcguaagc

SEQ ID NO: 1930250 - RNA, 19 nt, Artificial Sequence
  Description of Artificial Sequence: Synthetic oligonucleotide
auuaaacgucgcuccccag

SEQ ID NO: 1930251 - RNA, 19 nt, Artificial Sequence
  Description of Artificial Sequence: Synthetic oligonucleotide
caucugucaaagaggccug

SEQ ID NO: 1930252 - RNA, 19 nt, Artificial Sequence
  Description of Artificial Sequence: Synthetic oligonucleotide
gucgaaguccaaauaugug

SEQ ID NO: 1930253 - RNA, 19 nt, Artificial Sequence
  Description of Artificial Sequence: Synthetic oligonucleotide
cauuaaacgucgcucccca

SEQ ID NO: 1930254 - RNA, 19 nt, Artificial Sequence
  Description of Artificial Sequence: Synthetic oligonucleotide
uccugaugagccguuagau

SEQ ID NO: 1930255 - RNA, 19 nt, Artificial Sequence
  Description of Artificial Sequence: Synthetic oligonucleotide
uagagagccaauggauugu

SEQ ID NO: 1930256 - RNA, 19 nt, Artificial Sequence
  Description of Artificial Sequence: Synthetic oligonucleotide
uuccaagugauuggagccu

SEQ ID NO: 1930257 - RNA, 19 nt, Artificial Sequence
  Description of Artificial Sequence: Synthetic oligonucleotide
cuuacaggaucgccacagc

SEQ ID NO: 1930258 - RNA, 19 nt, Artificial Sequence
  Description of Artificial Sequence: Synthetic oligonucleotide
ccaaagagauuacuggaug

SEQ ID NO: 1930259 - RNA, 19 nt, Artificial Sequence
  Description of Artificial Sequence: Synthetic oligonucleotide
agauagggcaaagguuuag

SEQ ID NO: 1930260 - RNA, 19 nt, Artificial Sequence
  Description of Artificial Sequence: Synthetic oligonucleotide
cuugccguaccuggcaaag

SEQ ID NO: 1930261 - RNA, 19 nt, Artificial Sequence
  Description of Artificial Sequence: Synthetic oligonucleotide
acugguucuaagaauuuua

SEQ ID NO: 1930262 - RNA, 19 nt, Artificial Sequence
  Description of Artificial Sequence: Synthetic oligonucleotide
cuucguuucagagauugaa

SEQ ID NO: 1930263 - RNA, 19 nt, Artificial Sequence
  Description of Artificial Sequence: Synthetic oligonucleotide
cuauuuaccggcgcugcuc

SEQ ID NO: 1930264 - RNA, 19 nt, Artificial Sequence
  Description of Artificial Sequence: Synthetic oligonucleotide
gcucguucacucuaaagga

SEQ ID NO: 1930265 - RNA, 19 nt, Artificial Sequence
  Description of Artificial Sequence: Synthetic oligonucleotide
uccuaucugaaaguccuua

SEQ ID NO: 1930266 - RNA, 19 nt, Artificial Sequence
  Description of Artificial Sequence: Synthetic oligonucleotide
aucgccacagcaauauacu

SEQ ID NO: 1930267 - RNA, 19 nt, Artificial Sequence
  Description of Artificial Sequence: Synthetic oligonucleotide
gugcucguucacucuaaag

SEQ ID NO: 1930268 - RNA, 19 nt, Artificial Sequence
  Description of Artificial Sequence: Synthetic oligonucleotide
guagguuuugugugugcuc

SEQ ID NO: 1930269 - RNA, 19 nt, Artificial Sequence
  Description of Artificial Sequence: Synthetic oligonucleotide
ucgauccaccucagcagug

SEQ ID NO: 1930270 - RNA, 19 nt, Artificial Sequence
  Description of Artificial Sequence: Synthetic oligonucleotide
guaagcagauagggcaaag

SEQ ID NO: 1930271 - RNA, 19 nt, Artificial Sequence
  Description of Artificial Sequence: Synthetic oligonucleotide
guuauccccacgaugcaga

SEQ ID NO: 1930272 - RNA, 19 nt, Artificial Sequence
  Description of Artificial Sequence: Synthetic oligonucleotide
ucauggcuuagagucuuac

SEQ ID NO: 1930273 - RNA, 19 nt, Artificial Sequence
  Description of Artificial Sequence: Synthetic oligonucleotide
cagagcuauuuaccggcgc

SEQ ID NO: 1930274 - RNA, 19 nt, Artificial Sequence
  Description of Artificial Sequence: Synthetic oligonucleotide
uccaaucucauggcuuaga

SEQ ID NO: 1930275 - RNA, 19 nt, Artificial Sequence
  Description of Artificial Sequence: Synthetic oligonucleotide
ugcuuuguaucugucuaua

SEQ ID NO: 1930276 - RNA, 19 nt, Artificial Sequence
  Description of Artificial Sequence: Synthetic oligonucleotide
auaugcccugcauggauuu

SEQ ID NO: 1930277 - RNA, 19 nt, Artificial Sequence
  Description of Artificial Sequence: Synthetic oligonucleotide
gagcuauuuaccggcgcug

SEQ ID NO: 1930278 - RNA, 19 nt, Artificial Sequence
  Description of Artificial Sequence: Synthetic oligonucleotide
aggaucgccacagcaauau

SEQ ID NO: 1930279 - RNA, 19 nt, Artificial Sequence
  Description of Artificial Sequence: Synthetic oligonucleotide
augcacaauaauaggucca

SEQ ID NO: 1930280 - RNA, 19 nt, Artificial Sequence
  Description of Artificial Sequence: Synthetic oligonucleotide
ucaaauucgcagggucaga

SEQ ID NO: 1930281 - RNA, 19 nt, Artificial Sequence
  Description of Artificial Sequence: Synthetic oligonucleotide
auuaaacacgcaagccacu

SEQ ID NO: 1930282 - RNA, 19 nt, Artificial Sequence
  Description of Artificial Sequence: Synthetic oligonucleotide
uuagaggacgccggucaga

SEQ ID NO: 1930283 - RNA, 19 nt, Artificial Sequence
  Description of Artificial Sequence: Synthetic oligonucleotide
caaucugacugugaaugca

SEQ ID NO: 1930284 - RNA, 19 nt, Artificial Sequence
  Description of Artificial Sequence: Synthetic oligonucleotide
agguuuagaggacgccggu

SEQ ID NO: 1930285 - RNA, 19 nt, Artificial Sequence
  Description of Artificial Sequence: Synthetic oligonucleotide
uucauaccgugagcuguag

SEQ ID NO: 1930286 - RNA, 19 nt, Artificial Sequence
  Description of Artificial Sequence: Synthetic oligonucleotide
cuugagccauuuaauauau

SEQ ID NO: 1930287 - RNA, 19 nt, Artificial Sequence
  Description of Artificial Sequence: Synthetic oligonucleotide
agcagauagggcaaagguu

SEQ ID NO: 1930288 - RNA, 19 nt, Artificial Sequence
  Description of Artificial Sequence: Synthetic oligonucleotide
acaguagcccuugagccau

SEQ ID NO: 1930289 - RNA, 19 nt, Artificial Sequence
  Description of Artificial Sequence: Synthetic oligonucleotide
uuauccccacgaugcagaa

SEQ ID NO: 1930290 - RNA, 19 nt, Artificial Sequence
  Description of Artificial Sequence: Synthetic oligonucleotide
accgugagcuguagaaauc

SEQ ID NO: 1930291 - RNA, 19 nt, Artificial Sequence
  Description of Artificial Sequence: Synthetic oligonucleotide
guggguaaagaucaaucau

SEQ ID NO: 1930292 - RNA, 19 nt, Artificial Sequence
  Description of Artificial Sequence: Synthetic oligonucleotide
aacacgcaagccacuggca

SEQ ID NO: 1930293 - RNA, 19 nt, Artificial Sequence
  Description of Artificial Sequence: Synthetic oligonucleotide
caauccuuaaaagcuucca

SEQ ID NO: 1930294 - RNA, 19 nt, Artificial Sequence
  Description of Artificial Sequence: Synthetic oligonucleotide
cucguucacucuaaaggaa

SEQ ID NO: 1930295 - RNA, 19 nt, Artificial Sequence
  Description of Artificial Sequence: Synthetic oligonucleotide
ucgccacagcaauauacua

SEQ ID NO: 1930296 - RNA, 19 nt, Artificial Sequence
  Description of Artificial Sequence: Synthetic oligonucleotide
gggaacuucggggugggag

SEQ ID NO: 1930297 - RNA, 19 nt, Artificial Sequence
  Description of Artificial Sequence: Synthetic oligonucleotide
gcuucacucauuaaacguc

SEQ ID NO: 1930298 - RNA, 19 nt, Artificial Sequence
  Description of Artificial Sequence: Synthetic oligonucleotide
acgcaagccacuggcagug

SEQ ID NO: 1930299 - RNA, 19 nt, Artificial Sequence
  Description of Artificial Sequence: Synthetic oligonucleotide
agauugaaacugguucuaa

SEQ ID NO: 1930300 - RNA, 19 nt, Artificial Sequence
  Description of Artificial Sequence: Synthetic oligonucleotide
guugaagccaauagcacau

SEQ ID NO: 1930301 - RNA, 19 nt, Artificial Sequence
  Description of Artificial Sequence: Synthetic oligonucleotide
ccacgaugcagaaagcauc

SEQ ID NO: 1930302 - RNA, 19 nt, Artificial Sequence
  Description of Artificial Sequence: Synthetic oligonucleotide
cucuaaaggaacacuucgu

SEQ ID NO: 1930303 - RNA, 19 nt, Artificial Sequence
  Description of Artificial Sequence: Synthetic oligonucleotide
gagauugaaacugguucua

SEQ ID NO: 1930304 - RNA, 19 nt, Artificial Sequence
  Description of Artificial Sequence: Synthetic oligonucleotide
uuguugccuagagagccaa

SEQ ID NO: 1930305 - RNA, 19 nt, Artificial Sequence
  Description of Artificial Sequence: Synthetic oligonucleotide
cuaaaggaacacuucguuu

SEQ ID NO: 1930306 - RNA, 19 nt, Artificial Sequence
  Description of Artificial Sequence: Synthetic oligonucleotide
gauggcugaaaggcuucac

SEQ ID NO: 1930307 - RNA, 19 nt, Artificial Sequence
  Description of Artificial Sequence: Synthetic oligonucleotide
agcgauggagaaccugcau

SEQ ID NO: 1930308 - RNA, 19 nt, Artificial Sequence
  Description of Artificial Sequence: Synthetic oligonucleotide
gauuacuggauggcugaaa

SEQ ID NO: 1930309 - RNA, 19 nt, Artificial Sequence
  Description of Artificial Sequence: Synthetic oligonucleotide
gcuugcguaagcagauagg

SEQ ID NO: 1930310 - RNA, 19 nt, Artificial Sequence
  Description of Artificial Sequence: Synthetic oligonucleotide
gugggaguugauccaaucu

SEQ ID NO: 1930311 - RNA, 19 nt, Artificial Sequence
  Description of Artificial Sequence: Synthetic oligonucleotide
cacgaugcagaaagcaucu

SEQ ID NO: 1930312 - RNA, 19 nt, Artificial Sequence
  Description of Artificial Sequence: Synthetic oligonucleotide
ccaggauaugcccugcaug

SEQ ID NO: 1930313 - RNA, 19 nt, Artificial Sequence
  Description of Artificial Sequence: Synthetic oligonucleotide
auaccgugagcuguagaaa

SEQ ID NO: 1930314 - RNA, 19 nt, Artificial Sequence
  Description of Artificial Sequence: Synthetic oligonucleotide
gcaaagguuuagaggacgc

SEQ ID NO: 1930315 - RNA, 19 nt, Artificial Sequence
  Description of Artificial Sequence: Synthetic oligonucleotide
gugauuggagccuugcauu

SEQ ID NO: 1930316 - RNA, 19 nt, Artificial Sequence
  Description of Artificial Sequence: Synthetic oligonucleotide
cucaaaaucuuggggaacu

SEQ ID NO: 1930317 - RNA, 19 nt, Artificial Sequence
  Description of Artificial Sequence: Synthetic oligonucleotide
aaacgucgcuccccagcau

SEQ ID NO: 1930318 - RNA, 19 nt, Artificial Sequence
  Description of Artificial Sequence: Synthetic oligonucleotide
caagcacuggguucuuaga

SEQ ID NO: 1930319 - RNA, 19 nt, Artificial Sequence
  Description of Artificial Sequence: Synthetic oligonucleotide
ccuugcauuaaacacgcaa

SEQ ID NO: 1930320 - RNA, 19 nt, Artificial Sequence
  Description of Artificial Sequence: Synthetic oligonucleotide
ccguggguaaagaucaauc

SEQ ID NO: 1930321 - RNA, 19 nt, Artificial Sequence
  Description of Artificial Sequence: Synthetic oligonucleotide
aaacacccagugugccaau

SEQ ID NO: 1930322 - RNA, 19 nt, Artificial Sequence
  Description of Artificial Sequence: Synthetic oligonucleotide
uugagccauuuaauauauu

SEQ ID NO: 1930323 - RNA, 19 nt, Artificial Sequence
  Description of Artificial Sequence: Synthetic oligonucleotide
augcccugcauggauuugu

SEQ ID NO: 1930324 - RNA, 19 nt, Artificial Sequence
  Description of Artificial Sequence: Synthetic oligonucleotide
aacuucggggugggaguug

SEQ ID NO: 1930325 - RNA, 19 nt, Artificial Sequence
  Description of Artificial Sequence: Synthetic oligonucleotide
uccaagugauuggagccuu

SEQ ID NO: 1930326 - RNA, 19 nt, Artificial Sequence
  Description of Artificial Sequence: Synthetic oligonucleotide
cacuggguucuuagagaug

SEQ ID NO: 1930327 - RNA, 19 nt, Artificial Sequence
  Description of Artificial Sequence: Synthetic oligonucleotide
uccaggagucccgugggua

SEQ ID NO: 1930328 - RNA, 19 nt, Artificial Sequence
  Description of Artificial Sequence: Synthetic oligonucleotide
cuccugaugagccguuaga

SEQ ID NO: 1930329 - RNA, 19 nt, Artificial Sequence
  Description of Artificial Sequence: Synthetic oligonucleotide
ccuugagccauuuaauaua

SEQ ID NO: 1930330 - RNA, 19 nt, Artificial Sequence
  Description of Artificial Sequence: Synthetic oligonucleotide
cuucauaccgugagcugua

SEQ ID NO: 1930331 - RNA, 19 nt, Artificial Sequence
  Description of Artificial Sequence: Synthetic oligonucleotide
gaaugccaggauaugcccu

SEQ ID NO: 1930332 - RNA, 19 nt, Artificial Sequence
  Description of Artificial Sequence: Synthetic oligonucleotide
uguugccuagagagccaau

SEQ ID NO: 1930333 - RNA, 19 nt, Artificial Sequence
  Description of Artificial Sequence: Synthetic oligonucleotide
acauugcagcuugcguaag

SEQ ID NO: 1930334 - RNA, 19 nt, Artificial Sequence
  Description of Artificial Sequence: Synthetic oligonucleotide
auuuuacggucaaaccaua

SEQ ID NO: 1930335 - RNA, 19 nt, Artificial Sequence
  Description of Artificial Sequence: Synthetic oligonucleotide
gcaauauacuagugaucuc

SEQ ID NO: 1930336 - RNA, 19 nt, Artificial Sequence
  Description of Artificial Sequence: Synthetic oligonucleotide
aggagucccguggguaaag

SEQ ID NO: 1930337 - RNA, 19 nt, Artificial Sequence
  Description of Artificial Sequence: Synthetic oligonucleotide
aggauaugcccugcaugga

SEQ ID NO: 1930338 - RNA, 19 nt, Artificial Sequence
  Description of Artificial Sequence: Synthetic oligonucleotide
auuuaccggcgcugcuccu

SEQ ID NO: 1930339 - RNA, 19 nt, Artificial Sequence
  Description of Artificial Sequence: Synthetic oligonucleotide
aacacccagugugccaaua

SEQ ID NO: 1930340 - RNA, 19 nt, Artificial Sequence
  Description of Artificial Sequence: Synthetic oligonucleotide
guuguugccuagagagcca

SEQ ID NO: 1930341 - RNA, 19 nt, Artificial Sequence
  Description of Artificial Sequence: Synthetic oligonucleotide
agagagccaauggauugua

SEQ ID NO: 1930342 - RNA, 19 nt, Artificial Sequence
  Description of Artificial Sequence: Synthetic oligonucleotide
gugauacaagcacuggguu

SEQ ID NO: 1930343 - RNA, 19 nt, Artificial Sequence
  Description of Artificial Sequence: Synthetic oligonucleotide
guguguucagagcgaugga

SEQ ID NO: 1930344 - RNA, 19 nt, Artificial Sequence
  Description of Artificial Sequence: Synthetic oligonucleotide
gagcgauggagaaccugca

SEQ ID NO: 1930345 - RNA, 19 nt, Artificial Sequence
  Description of Artificial Sequence: Synthetic oligonucleotide
acuucguuucagagauuga

SEQ ID NO: 1930346 - RNA, 19 nt, Artificial Sequence
  Description of Artificial Sequence: Synthetic oligonucleotide
guccaaucucauggcuuag

SEQ ID NO: 1930347 - RNA, 19 nt, Artificial Sequence
  Description of Artificial Sequence: Synthetic oligonucleotide
agauuacuggauggcugaa

SEQ ID NO: 1930348 - RNA, 19 nt, Artificial Sequence
  Description of Artificial Sequence: Synthetic oligonucleotide
ggaacuucggggugggagu

SEQ ID NO: 1930349 - RNA, 19 nt, Artificial Sequence
  Description of Artificial Sequence: Synthetic oligonucleotide
aggguguguucagagcgau

SEQ ID NO: 1930350 - RNA, 19 nt, Artificial Sequence
  Description of Artificial Sequence: Synthetic oligonucleotide
gucuuacaggaucgccaca

SEQ ID NO: 1930351 - RNA, 19 nt, Artificial Sequence
  Description of Artificial Sequence: Synthetic oligonucleotide
gccuucauaccgugagcug

SEQ ID NO: 1930352 - RNA, 19 nt, Artificial Sequence
  Description of Artificial Sequence: Synthetic oligonucleotide
gagccguuagauucaucau

SEQ ID NO: 1930353 - RNA, 19 nt, Artificial Sequence
  Description of Artificial Sequence: Synthetic oligonucleotide
cagauagggcaaagguuua

SEQ ID NO: 1930354 - RNA, 19 nt, Artificial Sequence
  Description of Artificial Sequence: Synthetic oligonucleotide
cuguggcuaucagugaaaa

SEQ ID NO: 1930355 - RNA, 19 nt, Artificial Sequence
  Description of Artificial Sequence: Synthetic oligonucleotide
ccugcauggauuuguaggu

SEQ ID NO: 1930356 - RNA, 19 nt, Artificial Sequence
  Description of Artificial Sequence: Synthetic oligonucleotide
cagcagugcuuuguaucug

SEQ ID NO: 1930357 - RNA, 19 nt, Artificial Sequence
  Description of Artificial Sequence: Synthetic oligonucleotide
ucccguggguaaagaucaa

SEQ ID NO: 1930358 - RNA, 19 nt, Artificial Sequence
  Description of Artificial Sequence: Synthetic oligonucleotide
ggacuguaauaguuaucaa

SEQ ID NO: 1930359 - RNA, 19 nt, Artificial Sequence
  Description of Artificial Sequence: Synthetic oligonucleotide
gguuuagaggacgccgguc

SEQ ID NO: 1930360 - RNA, 19 nt, Artificial Sequence
  Description of Artificial Sequence: Synthetic oligonucleotide
cagugucgaaguccaaaua

SEQ ID NO: 1930361 - RNA, 19 nt, Artificial Sequence
  Description of Artificial Sequence: Synthetic oligonucleotide
augagccguuagauucauc

SEQ ID NO: 1930362 - RNA, 19 nt, Artificial Sequence
  Description of Artificial Sequence: Synthetic oligonucleotide
ggauaugcccugcauggau

SEQ ID NO: 1930363 - RNA, 19 nt, Artificial Sequence
  Description of Artificial Sequence: Synthetic oligonucleotide
ggcagugucgaaguccaaa

SEQ ID NO: 1930364 - RNA, 19 nt, Artificial Sequence
  Description of Artificial Sequence: Synthetic oligonucleotide
gucgcuccccagcaucuaa

SEQ ID NO: 1930365 - RNA, 19 nt, Artificial Sequence
  Description of Artificial Sequence: Synthetic oligonucleotide
gugcuuuguaucugucuau

SEQ ID NO: 1930366 - RNA, 19 nt, Artificial Sequence
  Description of Artificial Sequence: Synthetic oligonucleotide
gagucccguggguaaagau

SEQ ID NO: 1930367 - RNA, 19 nt, Artificial Sequence
  Description of Artificial Sequence: Synthetic oligonucleotide
gcagugucgaaguccaaau

SEQ ID NO: 1930368 - RNA, 19 nt, Artificial Sequence
  Description of Artificial Sequence: Synthetic oligonucleotide
ccaagugauuggagccuug

SEQ ID NO: 1930369 - RNA, 19 nt, Artificial Sequence
  Description of Artificial Sequence: Synthetic oligonucleotide
cacgcaagccacuggcagu

SEQ ID NO: 1930370 - RNA, 19 nt, Artificial Sequence
  Description of Artificial Sequence: Synthetic oligonucleotide
aguagcccuugagccauuu

SEQ ID NO: 1930371 - RNA, 19 nt, Artificial Sequence
  Description of Artificial Sequence: Synthetic oligonucleotide
gugugugcucguucacucu

SEQ ID NO: 1930372 - RNA, 19 nt, Artificial Sequence
  Description of Artificial Sequence: Synthetic oligonucleotide
gaugagccguuagauucau

SEQ ID NO: 1930373 - RNA, 19 nt, Artificial Sequence
  Description of Artificial Sequence: Synthetic oligonucleotide
cuauaauguugaagccaau

SEQ ID NO: 1930374 - RNA, 19 nt, Artificial Sequence
  Description of Artificial Sequence: Synthetic oligonucleotide
ugcuccugaugagccguua

SEQ ID NO: 1930375 - RNA, 19 nt, Artificial Sequence
  Description of Artificial Sequence: Synthetic oligonucleotide
gggcaaagguuuagaggac

SEQ ID NO: 1930376 - RNA, 19 nt, Artificial Sequence
  Description of Artificial Sequence: Synthetic oligonucleotide
gccggucagauucuuccaa

SEQ ID NO: 1930377 - RNA, 19 nt, Artificial Sequence
  Description of Artificial Sequence: Synthetic oligonucleotide
guagcccuugagccauuua

SEQ ID NO: 1930378 - RNA, 19 nt, Artificial Sequence
  Description of Artificial Sequence: Synthetic oligonucleotide
cccuugagccauuuaauau

SEQ ID NO: 1930379 - RNA, 19 nt, Artificial Sequence
  Description of Artificial Sequence: Synthetic oligonucleotide
acgaugcagaaagcaucuu

SEQ ID NO: 1930380 - RNA, 19 nt, Artificial Sequence
  Description of Artificial Sequence: Synthetic oligonucleotide
gugugcucguucacucuaa

SEQ ID NO: 1930381 - RNA, 19 nt, Artificial Sequence
  Description of Artificial Sequence: Synthetic oligonucleotide
gauggagaaccugcaucuu

SEQ ID NO: 1930382 - RNA, 19 nt, Artificial Sequence
  Description of Artificial Sequence: Synthetic oligonucleotide
cucauggcuuagagucuua

SEQ ID NO: 1930383 - RNA, 19 nt, Artificial Sequence
  Description of Artificial Sequence: Synthetic oligonucleotide
ccuucauaccgugagcugu

SEQ ID NO: 1930384 - RNA, 19 nt, Artificial Sequence
  Description of Artificial Sequence: Synthetic oligonucleotide
gcguaagcagauagggcaa

SEQ ID NO: 1930385 - RNA, 19 nt, Artificial Sequence
  Description of Artificial Sequence: Synthetic oligonucleotide
gaacuucggggugggaguu

SEQ ID NO: 1930386 - RNA, 19 nt, Artificial Sequence
  Description of Artificial Sequence: Synthetic oligonucleotide
gcuauuuaccggcgcugcu

SEQ ID NO: 1930387 - RNA, 19 nt, Artificial Sequence
  Description of Artificial Sequence: Synthetic oligonucleotide
ccaggagucccguggguaa

SEQ ID NO: 1930388 - RNA, 19 nt, Artificial Sequence
  Description of Artificial Sequence: Synthetic oligonucleotide
gagagccaauggauuguau

SEQ ID NO: 1930389 - RNA, 19 nt, Artificial Sequence
  Description of Artificial Sequence: Synthetic oligonucleotide
ggguguguucagagcgaug

SEQ ID NO: 1930390 - RNA, 19 nt, Artificial Sequence
  Description of Artificial Sequence: Synthetic oligonucleotide
ggagucccguggguaaaga

SEQ ID NO: 1930391 - RNA, 19 nt, Artificial Sequence
  Description of Artificial Sequence: Synthetic oligonucleotide
ccagugugccaauauuuau

SEQ ID NO: 1930392 - RNA, 19 nt, Artificial Sequence
  Description of Artificial Sequence: Synthetic oligonucleotide
gcagcuugcguaagcagau

SEQ ID NO: 1930393 - RNA, 19 nt, Artificial Sequence
  Description of Artificial Sequence: Synthetic oligonucleotide
cccacgaugcagaaagcau

SEQ ID NO: 1930394 - RNA, 19 nt, Artificial Sequence
  Description of Artificial Sequence: Synthetic oligonucleotide
ggaucgccacagcaauaua

SEQ ID NO: 1930395 - RNA, 19 nt, Artificial Sequence
  Description of Artificial Sequence: Synthetic oligonucleotide
ggggugggaguugauccaa

SEQ ID NO: 1930396 - RNA, 19 nt, Artificial Sequence
  Description of Artificial Sequence: Synthetic oligonucleotide
cugcauggauuuguagguu

SEQ ID NO: 1930397 - RNA, 19 nt, Artificial Sequence
  Description of Artificial Sequence: Synthetic oligonucleotide
cagcuugcguaagcagaua

SEQ ID NO: 1930398 - RNA, 19 nt, Artificial Sequence
  Description of Artificial Sequence: Synthetic oligonucleotide
cguaagcagauagggcaaa

SEQ ID NO: 1930399 - RNA, 19 nt, Artificial Sequence
  Description of Artificial Sequence: Synthetic oligonucleotide
cgccggucagauucuucca

SEQ ID NO: 1930400 - RNA, 19 nt, Artificial Sequence
  Description of Artificial Sequence: Synthetic oligonucleotide
cuucggggugggaguugau

SEQ ID NO: 1930401 - RNA, 19 nt, Artificial Sequence
  Description of Artificial Sequence: Synthetic oligonucleotide
ccccagcaucuaacuuguc

SEQ ID NO: 1930402 - RNA, 19 nt, Artificial Sequence
  Description of Artificial Sequence: Synthetic oligonucleotide
ggggaacuucgggguggga

SEQ ID NO: 1930403 - RNA, 19 nt, Artificial Sequence
  Description of Artificial Sequence: Synthetic oligonucleotide
cccguggguaaagaucaau

SEQ ID NO: 1930404 - RNA, 19 nt, Artificial Sequence
  Description of Artificial Sequence: Synthetic oligonucleotide
caguagcccuugagccauu

SEQ ID NO: 1930405 - RNA, 19 nt, Artificial Sequence
  Description of Artificial Sequence: Synthetic oligonucleotide
aauucauuacaauacacag

SEQ ID NO: 1930406 - RNA, 19 nt, Artificial Sequence
  Description of Artificial Sequence: Synthetic oligonucleotide
aaagaauucauuacaauac

SEQ ID NO: 1930407 - RNA, 19 nt, Artificial Sequence
  Description of Artificial Sequence: Synthetic oligonucleotide
uaugaaauuauaaaauccc

SEQ ID NO: 1930408 - RNA, 19 nt, Artificial Sequence
  Description of Artificial Sequence: Synthetic oligonucleotide
uuuagauacauuuuaaugu

SEQ ID NO: 1930409 - RNA, 19 nt, Artificial Sequence
  Description of Artificial Sequence: Synthetic oligonucleotide
uaucuauuuuacaacaugg

SEQ ID NO: 1930410 - RNA, 19 nt, Artificial Sequence
  Description of Artificial Sequence: Synthetic oligonucleotide
aaugcaagcaaauugggcu

SEQ ID NO: 1930411 - RNA, 19 nt, Artificial Sequence
  Description of Artificial Sequence: Synthetic oligonucleotide
guuauuaagguuuaccucc

SEQ ID NO: 1930412 - RNA, 19 nt, Artificial Sequence
  Description of Artificial Sequence: Synthetic oligonucleotide
aacaaaaccaggccugccc

SEQ ID NO: 1930413 - RNA, 19 nt, Artificial Sequence
  Description of Artificial Sequence: Synthetic oligonucleotide
uaugaaagcaagcauaccu

SEQ ID NO: 1930414 - RNA, 19 nt, Artificial Sequence
  Description of Artificial Sequence: Synthetic oligonucleotide
aagaagaaaauucccaucu

SEQ ID NO: 1930415 - RNA, 19 nt, Artificial Sequence
  Description of Artificial Sequence: Synthetic oligonucleotide
acaacauggguuuagcuac

SEQ ID NO: 1930416 - RNA, 19 nt, Artificial Sequence
  Description of Artificial Sequence: Synthetic oligonucleotide
ucugaaauuuauaaaaguc

SEQ ID NO: 1930417 - RNA, 19 nt, Artificial Sequence
  Description of Artificial Sequence: Synthetic oligonucleotide
ucuauaaugcuugauauug

SEQ ID NO: 1930418 - RNA, 19 nt, Artificial Sequence
  Description of Artificial Sequence: Synthetic oligonucleotide
aaugcucuggauuaaucuc

SEQ ID NO: 1930419 - RNA, 19 nt, Artificial Sequence
  Description of Artificial Sequence: Synthetic oligonucleotide
auugcugucaucuguggcc

SEQ ID NO: 1930420 - RNA, 19 nt, Artificial Sequence
  Description of Artificial Sequence: Synthetic oligonucleotide
aaggagaacccagagacgc

SEQ ID NO: 1930421 - RNA, 19 nt, Artificial Sequence
  Description of Artificial Sequence: Synthetic oligonucleotide
uaaagaguguguuaaaaga

SEQ ID NO: 1930422 - RNA, 19 nt, Artificial Sequence
  Description of Artificial Sequence: Synthetic oligonucleotide
uuuagaaacagacuacuaa

SEQ ID NO: 1930423 - RNA, 19 nt, Artificial Sequence
  Description of Artificial Sequence: Synthetic oligonucleotide
uugggcuuuaguuuggugg

SEQ ID NO: 1930424 - RNA, 19 nt, Artificial Sequence
  Description of Artificial Sequence: Synthetic oligonucleotide
ugaaauuauaaaaucccac

SEQ ID NO: 1930425 - RNA, 19 nt, Artificial Sequence
  Description of Artificial Sequence: Synthetic oligonucleotide
uuuguaagagacuuccucc

SEQ ID NO: 1930426 - RNA, 19 nt, Artificial Sequence
  Description of Artificial Sequence: Synthetic oligonucleotide
uaaugcuugauauugugug

SEQ ID NO: 1930427 - RNA, 19 nt, Artificial Sequence
  Description of Artificial Sequence: Synthetic oligonucleotide
uuaucuauuuuacaacaug

SEQ ID NO: 1930428 - RNA, 19 nt, Artificial Sequence
  Description of Artificial Sequence: Synthetic oligonucleotide
uuacaauacacagugauac

SEQ ID NO: 1930429 - RNA, 19 nt, Artificial Sequence
  Description of Artificial Sequence: Synthetic oligonucleotide
uuucuguaguaaaauaaag

SEQ ID NO: 1930430 - RNA, 19 nt, Artificial Sequence
  Description of Artificial Sequence: Synthetic oligonucleotide
aguguguuaaaagagcuac

SEQ ID NO: 1930431 - RNA, 19 nt, Artificial Sequence
  Description of Artificial Sequence: Synthetic oligonucleotide
aaagcaagcauaccucauc

SEQ ID NO: 1930432 - RNA, 19 nt, Artificial Sequence
  Description of Artificial Sequence: Synthetic oligonucleotide
aagaguguguuaaaagagc

SEQ ID NO: 1930433 - RNA, 19 nt, Artificial Sequence
  Description of Artificial Sequence: Synthetic oligonucleotide
auaaagaguguguuaaaag

SEQ ID NO: 1930434 - RNA, 19 nt, Artificial Sequence
  Description of Artificial Sequence: Synthetic oligonucleotide
uacacagugauacaguuaa

SEQ ID NO: 1930435 - RNA, 19 nt, Artificial Sequence
  Description of Artificial Sequence: Synthetic oligonucleotide
ucaguauaacaaaaccagg

SEQ ID NO: 1930436 - RNA, 19 nt, Artificial Sequence
  Description of Artificial Sequence: Synthetic oligonucleotide
gaaacagacuacuaaaguc

SEQ ID NO: 1930437 - RNA, 19 nt, Artificial Sequence
  Description of Artificial Sequence: Synthetic oligonucleotide
aaaugcaagcaaauugggc

SEQ ID NO: 1930438 - RNA, 19 nt, Artificial Sequence
  Description of Artificial Sequence: Synthetic oligonucleotide
aucaguauaacaaaaccag

SEQ ID NO: 1930439 - RNA, 19 nt, Artificial Sequence
  Description of Artificial Sequence: Synthetic oligonucleotide
uauuuuacaacauggguuu

SEQ ID NO: 1930440 - RNA, 19 nt, Artificial Sequence
  Description of Artificial Sequence: Synthetic oligonucleotide
uaaucucacagccuucccg

SEQ ID NO: 1930441 - RNA, 19 nt, Artificial Sequence
  Description of Artificial Sequence: Synthetic oligonucleotide
auuaaucucacagccuucc

SEQ ID NO: 1930442 - RNA, 19 nt, Artificial Sequence
  Description of Artificial Sequence: Synthetic oligonucleotide
cuggauuaaucucacagcc

SEQ ID NO: 1930443 - RNA, 19 nt, Artificial Sequence
  Description of Artificial Sequence: Synthetic oligonucleotide
aacucuaaaauaauuucug

SEQ ID NO: 1930444 - RNA, 19 nt, Artificial Sequence
  Description of Artificial Sequence: Synthetic oligonucleotide
ugguuauuaagguuuaccu

SEQ ID NO: 1930445 - RNA, 19 nt, Artificial Sequence
  Description of Artificial Sequence: Synthetic oligonucleotide
uaaaagagcuacacaaaga

SEQ ID NO: 1930446 - RNA, 19 nt, Artificial Sequence
  Description of Artificial Sequence: Synthetic oligonucleotide
aaacucuaaaauaauuucu

SEQ ID NO: 1930447 - RNA, 19 nt, Artificial Sequence
  Description of Artificial Sequence: Synthetic oligonucleotide
cuuuggacugagaagagac

SEQ ID NO: 1930448 - RNA, 19 nt, Artificial Sequence
  Description of Artificial Sequence: Synthetic oligonucleotide
uucauuuuagaaacagacu

SEQ ID NO: 1930449 - RNA, 19 nt, Artificial Sequence
  Description of Artificial Sequence: Synthetic oligonucleotide
aaaaugcaagcaaauuggg

SEQ ID NO: 1930450 - RNA, 19 nt, Artificial Sequence
  Description of Artificial Sequence: Synthetic oligonucleotide
cucuggauuaaucucacag

SEQ ID NO: 1930451 - RNA, 19 nt, Artificial Sequence
  Description of Artificial Sequence: Synthetic oligonucleotide
ucuggauuaaucucacagc

SEQ ID NO: 1930452 - RNA, 19 nt, Artificial Sequence
  Description of Artificial Sequence: Synthetic oligonucleotide
uucccgaucaguauaacaa

SEQ ID NO: 1930453 - RNA, 19 nt, Artificial Sequence
  Description of Artificial Sequence: Synthetic oligonucleotide
uuagauacauuuuaauguu

SEQ ID NO: 1930454 - RNA, 19 nt, Artificial Sequence
  Description of Artificial Sequence: Synthetic oligonucleotide
agacuacuaaagucuauac

SEQ ID NO: 1930455 - RNA, 19 nt, Artificial Sequence
  Description of Artificial Sequence: Synthetic oligonucleotide
cacaaagaagaaaauuccc

SEQ ID NO: 1930456 - RNA, 19 nt, Artificial Sequence
  Description of Artificial Sequence: Synthetic oligonucleotide
cuugacugcagccagcacc

SEQ ID NO: 1930457 - RNA, 19 nt, Artificial Sequence
  Description of Artificial Sequence: Synthetic oligonucleotide
ugaaacauggccagcuuga

SEQ ID NO: 1930458 - RNA, 19 nt, Artificial Sequence
  Description of Artificial Sequence: Synthetic oligonucleotide
uuagcuuucuggacugccg

SEQ ID NO: 1930459 - RNA, 19 nt, Artificial Sequence
  Description of Artificial Sequence: Synthetic oligonucleotide
ucucuauaaugcuugauau

SEQ ID NO: 1930460 - RNA, 19 nt, Artificial Sequence
  Description of Artificial Sequence: Synthetic oligonucleotide
aauaaagaguguguuaaaa

SEQ ID NO: 1930461 - RNA, 19 nt, Artificial Sequence
  Description of Artificial Sequence: Synthetic oligonucleotide
aagguuuaccuccacuaug

SEQ ID NO: 1930462 - RNA, 19 nt, Artificial Sequence
  Description of Artificial Sequence: Synthetic oligonucleotide
uucucuauaaugcuugaua

SEQ ID NO: 1930463 - RNA, 19 nt, Artificial Sequence
  Description of Artificial Sequence: Synthetic oligonucleotide
aaucucacagccuucccga

SEQ ID NO: 1930464 - RNA, 19 nt, Artificial Sequence
  Description of Artificial Sequence: Synthetic oligonucleotide
gauaugaaagcaagcauac

SEQ ID NO: 1930465 - RNA, 19 nt, Artificial Sequence
  Description of Artificial Sequence: Synthetic oligonucleotide
ucgucuuaagaacaggagu

SEQ ID NO: 1930466 - RNA, 19 nt, Artificial Sequence
  Description of Artificial Sequence: Synthetic oligonucleotide
gaagaaaauucccaucuuc

SEQ ID NO: 1930467 - RNA, 19 nt, Artificial Sequence
  Description of Artificial Sequence: Synthetic oligonucleotide
uaaugcucuggauuaaucu

SEQ ID NO: 1930468 - RNA, 19 nt, Artificial Sequence
  Description of Artificial Sequence: Synthetic oligonucleotide
cugauaugaaauuauaaaa

SEQ ID NO: 1930469 - RNA, 19 nt, Artificial Sequence
  Description of Artificial Sequence: Synthetic oligonucleotide
uguguuaaaagagcuacac

SEQ ID NO: 1930470 - RNA, 19 nt, Artificial Sequence
  Description of Artificial Sequence: Synthetic oligonucleotide
gaguaucugaaauuuauaa

SEQ ID NO: 1930471 - RNA, 19 nt, Artificial Sequence
  Description of Artificial Sequence: Synthetic oligonucleotide
aguugugcgagguguaggg

SEQ ID NO: 1930472 - RNA, 19 nt, Artificial Sequence
  Description of Artificial Sequence: Synthetic oligonucleotide
agaauucauuacaauacac

SEQ ID NO: 1930473 - RNA, 19 nt, Artificial Sequence
  Description of Artificial Sequence: Synthetic oligonucleotide
agaacaggagucucuuugg

SEQ ID NO: 1930474 - RNA, 19 nt, Artificial Sequence
  Description of Artificial Sequence: Synthetic oligonucleotide
aacccugacuuucuccgcg

SEQ ID NO: 1930475 - RNA, 19 nt, Artificial Sequence
  Description of Artificial Sequence: Synthetic oligonucleotide
gaauucauuacaauacaca

SEQ ID NO: 1930476 - RNA, 19 nt, Artificial Sequence
  Description of Artificial Sequence: Synthetic oligonucleotide
ugaaagcaagcauaccuca

SEQ ID NO: 1930477 - RNA, 19 nt, Artificial Sequence
  Description of Artificial Sequence: Synthetic oligonucleotide
ugagucacguucaugugcu

SEQ ID NO: 1930478 - RNA, 19 nt, Artificial Sequence
  Description of Artificial Sequence: Synthetic oligonucleotide
uuuaucuauuuuacaacau

SEQ ID NO: 1930479 - RNA, 19 nt, Artificial Sequence
  Description of Artificial Sequence: Synthetic oligonucleotide
acacagcuuauugaaauac

SEQ ID NO: 1930480 - RNA, 19 nt, Artificial Sequence
  Description of Artificial Sequence: Synthetic oligonucleotide
acgccugugagucacguuc

SEQ ID NO: 1930481 - RNA, 19 nt, Artificial Sequence
  Description of Artificial Sequence: Synthetic oligonucleotide
acaggagucucuuuggacu

SEQ ID NO: 1930482 - RNA, 19 nt, Artificial Sequence
  Description of Artificial Sequence: Synthetic oligonucleotide
uugugugaaacauggccag

SEQ ID NO: 1930483 - RNA, 19 nt, Artificial Sequence
  Description of Artificial Sequence: Synthetic oligonucleotide
auaacaaaaccaggccugc

SEQ ID NO: 1930484 - RNA, 19 nt, Artificial Sequence
  Description of Artificial Sequence: Synthetic oligonucleotide
ucacacuuagcuuucugga

SEQ ID NO: 1930485 - RNA, 19 nt, Artificial Sequence
  Description of Artificial Sequence: Synthetic oligonucleotide
auuuuagaaacagacuacu

SEQ ID NO: 1930486 - RNA, 19 nt, Artificial Sequence
  Description of Artificial Sequence: Synthetic oligonucleotide
uuauuaagguuuaccucca

SEQ ID NO: 1930487 - RNA, 19 nt, Artificial Sequence
  Description of Artificial Sequence: Synthetic oligonucleotide
aucuauuuuacaacauggg

SEQ ID NO: 1930488 - RNA, 19 nt, Artificial Sequence
  Description of Artificial Sequence: Synthetic oligonucleotide
acaguuaaugcucuggauu

SEQ ID NO: 1930489 - RNA, 19 nt, Artificial Sequence
  Description of Artificial Sequence: Synthetic oligonucleotide
acucuaaaauaauuucugu

SEQ ID NO: 1930490 - RNA, 19 nt, Artificial Sequence
  Description of Artificial Sequence: Synthetic oligonucleotide
uuuuacaacauggguuuag

SEQ ID NO: 1930491 - RNA, 19 nt, Artificial Sequence
  Description of Artificial Sequence: Synthetic oligonucleotide
aaagcugaaaagaauucau

SEQ ID NO: 1930492 - RNA, 19 nt, Artificial Sequence
  Description of Artificial Sequence: Synthetic oligonucleotide
uugauauugugugaaacau

SEQ ID NO: 1930493 - RNA, 19 nt, Artificial Sequence
  Description of Artificial Sequence: Synthetic oligonucleotide
cuugauauugugugaaaca

SEQ ID NO: 1930494 - RNA, 19 nt, Artificial Sequence
  Description of Artificial Sequence: Synthetic oligonucleotide
aguuuggugguuccccugg

SEQ ID NO: 1930495 - RNA, 19 nt, Artificial Sequence
  Description of Artificial Sequence: Synthetic oligonucleotide
aagcauaccucauccgcug

SEQ ID NO: 1930496 - RNA, 19 nt, Artificial Sequence
  Description of Artificial Sequence: Synthetic oligonucleotide
auuaagguuuaccuccacu

SEQ ID NO: 1930497 - RNA, 19 nt, Artificial Sequence
  Description of Artificial Sequence: Synthetic oligonucleotide
uuccgugucaucagaauuc

SEQ ID NO: 1930498 - RNA, 19 nt, Artificial Sequence
  Description of Artificial Sequence: Synthetic oligonucleotide
uucggguucgccuuugugu

SEQ ID NO: 1930499 - RNA, 19 nt, Artificial Sequence
  Description of Artificial Sequence: Synthetic oligonucleotide
gacuacuaaagucuauaca

SEQ ID NO: 1930500 - RNA, 19 nt, Artificial Sequence
  Description of Artificial Sequence: Synthetic oligonucleotide
guaagagacuuccuccucc

SEQ ID NO: 1930501 - RNA, 19 nt, Artificial Sequence
  Description of Artificial Sequence: Synthetic oligonucleotide
aagcaaauugggcuuuagu

SEQ ID NO: 1930502 - RNA, 19 nt, Artificial Sequence
  Description of Artificial Sequence: Synthetic oligonucleotide
augaaagcaagcauaccuc

SEQ ID NO: 1930503 - RNA, 19 nt, Artificial Sequence
  Description of Artificial Sequence: Synthetic oligonucleotide
auacaguuaaugcucugga

SEQ ID NO: 1930504 - RNA, 19 nt, Artificial Sequence
  Description of Artificial Sequence: Synthetic oligonucleotide
uuaaugcucuggauuaauc

SEQ ID NO: 1930505 - RNA, 19 nt, Artificial Sequence
  Description of Artificial Sequence: Synthetic oligonucleotide
ugaaggaggccauggagac

SEQ ID NO: 1930506 - RNA, 19 nt, Artificial Sequence
  Description of Artificial Sequence: Synthetic oligonucleotide
aucagaauucucccggucu

SEQ ID NO: 1930507 - RNA, 19 nt, Artificial Sequence
  Description of Artificial Sequence: Synthetic oligonucleotide
auaugaaagcaagcauacc

SEQ ID NO: 1930508 - RNA, 19 nt, Artificial Sequence
  Description of Artificial Sequence: Synthetic oligonucleotide
agggcggaauucuuguugg

SEQ ID NO: 1930509 - RNA, 19 nt, Artificial Sequence
  Description of Artificial Sequence: Synthetic oligonucleotide
gacagugugcacaucagac

SEQ ID NO: 1930510 - RNA, 19 nt, Artificial Sequence
  Description of Artificial Sequence: Synthetic oligonucleotide
uccuucucuucacacuuag

SEQ ID NO: 1930511 - RNA, 19 nt, Artificial Sequence
  Description of Artificial Sequence: Synthetic oligonucleotide
gugcacaucagacaccgcc

SEQ ID NO: 1930512 - RNA, 19 nt, Artificial Sequence
  Description of Artificial Sequence: Synthetic oligonucleotide
agcuacacaaagaagaaaa

SEQ ID NO: 1930513 - RNA, 19 nt, Artificial Sequence
  Description of Artificial Sequence: Synthetic oligonucleotide
uuuggacugagaagagaca

SEQ ID NO: 1930514 - RNA, 19 nt, Artificial Sequence
  Description of Artificial Sequence: Synthetic oligonucleotide
cucgucuuaagaacaggag

SEQ ID NO: 1930515 - RNA, 19 nt, Artificial Sequence
  Description of Artificial Sequence: Synthetic oligonucleotide
aucuguggccuccucacuc

SEQ ID NO: 1930516 - RNA, 19 nt, Artificial Sequence
  Description of Artificial Sequence: Synthetic oligonucleotide
ucccaucuucucuauaaug

SEQ ID NO: 1930517 - RNA, 19 nt, Artificial Sequence
  Description of Artificial Sequence: Synthetic oligonucleotide
cucguugaggagaagacca

SEQ ID NO: 1930518 - RNA, 19 nt, Artificial Sequence
  Description of Artificial Sequence: Synthetic oligonucleotide
uaugaucugcucccuuuug

SEQ ID NO: 1930519 - RNA, 19 nt, Artificial Sequence
  Description of Artificial Sequence: Synthetic oligonucleotide
ugaguaucugaaauuuaua

SEQ ID NO: 1930520 - RNA, 19 nt, Artificial Sequence
  Description of Artificial Sequence: Synthetic oligonucleotide
cagcgaguguugaagaccc

SEQ ID NO: 1930521 - RNA, 19 nt, Artificial Sequence
  Description of Artificial Sequence: Synthetic oligonucleotide
uggauuaaucucacagccu

SEQ ID NO: 1930522 - RNA, 19 nt, Artificial Sequence
  Description of Artificial Sequence: Synthetic oligonucleotide
gcugauaugaaauuauaaa

SEQ ID NO: 1930523 - RNA, 19 nt, Artificial Sequence
  Description of Artificial Sequence: Synthetic oligonucleotide
agucauugcugucaucugu

SEQ ID NO: 1930524 - RNA, 19 nt, Artificial Sequence
  Description of Artificial Sequence: Synthetic oligonucleotide
uaagguuuaccuccacuau

SEQ ID NO: 1930525 - RNA, 19 nt, Artificial Sequence
  Description of Artificial Sequence: Synthetic oligonucleotide
aggauaugaaagcaagcau

SEQ ID NO: 1930526 - RNA, 19 nt, Artificial Sequence
  Description of Artificial Sequence: Synthetic oligonucleotide
ugggcuuuaguuugguggu

SEQ ID NO: 1930527 - RNA, 19 nt, Artificial Sequence
  Description of Artificial Sequence: Synthetic oligonucleotide
uaggggaaguggcagcugc

SEQ ID NO: 1930528 - RNA, 19 nt, Artificial Sequence
  Description of Artificial Sequence: Synthetic oligonucleotide
ucuccguagucauugcugu

SEQ ID NO: 1930529 - RNA, 19 nt, Artificial Sequence
  Description of Artificial Sequence: Synthetic oligonucleotide
uguguaacccugacuuucu

SEQ ID NO: 1930530 - RNA, 19 nt, Artificial Sequence
  Description of Artificial Sequence: Synthetic oligonucleotide
uccgcugauaugaaauuau

SEQ ID NO: 1930531 - RNA, 19 nt, Artificial Sequence
  Description of Artificial Sequence: Synthetic oligonucleotide
ugauggucggccaggacaa

SEQ ID NO: 1930532 - RNA, 19 nt, Artificial Sequence
  Description of Artificial Sequence: Synthetic oligonucleotide
uucuuguuggcucccucug

SEQ ID NO: 1930533 - RNA, 19 nt, Artificial Sequence
  Description of Artificial Sequence: Synthetic oligonucleotide
ucgccuuuguguaacccug

SEQ ID NO: 1930534 - RNA, 19 nt, Artificial Sequence
  Description of Artificial Sequence: Synthetic oligonucleotide
gagggcggaauucuuguug

SEQ ID NO: 1930535 - RNA, 19 nt, Artificial Sequence
  Description of Artificial Sequence: Synthetic oligonucleotide
gugugcacaucagacaccg

SEQ ID NO: 1930536 - RNA, 19 nt, Artificial Sequence
  Description of Artificial Sequence: Synthetic oligonucleotide
ucccggucuuccuugacag

SEQ ID NO: 1930537 - RNA, 19 nt, Artificial Sequence
  Description of Artificial Sequence: Synthetic oligonucleotide
accucauccgcugauauga

SEQ ID NO: 1930538 - RNA, 19 nt, Artificial Sequence
  Description of Artificial Sequence: Synthetic oligonucleotide
accaggauaugaaagcaag

SEQ ID NO: 1930539 - RNA, 19 nt, Artificial Sequence
  Description of Artificial Sequence: Synthetic oligonucleotide
gguuuagcuacacugaaaa

SEQ ID NO: 1930540 - RNA, 19 nt, Artificial Sequence
  Description of Artificial Sequence: Synthetic oligonucleotide
caacagaggcaguucuucg

SEQ ID NO: 1930541 - RNA, 19 nt, Artificial Sequence
  Description of Artificial Sequence: Synthetic oligonucleotide
uggucagucugauggucgg

SEQ ID NO: 1930542 - RNA, 19 nt, Artificial Sequence
  Description of Artificial Sequence: Synthetic oligonucleotide
aacauggguuuagcuacac

SEQ ID NO: 1930543 - RNA, 19 nt, Artificial Sequence
  Description of Artificial Sequence: Synthetic oligonucleotide
guauaacaaaaccaggccu

SEQ ID NO: 1930544 - RNA, 19 nt, Artificial Sequence
  Description of Artificial Sequence: Synthetic oligonucleotide
uugugcgagguguagggga

SEQ ID NO: 1930545 - RNA, 19 nt, Artificial Sequence
  Description of Artificial Sequence: Synthetic oligonucleotide
agaguguguuaaaagagcu

SEQ ID NO: 1930546 - RNA, 19 nt, Artificial Sequence
  Description of Artificial Sequence: Synthetic oligonucleotide
gguuauuaagguuuaccuc

SEQ ID NO: 1930547 - RNA, 19 nt, Artificial Sequence
  Description of Artificial Sequence: Synthetic oligonucleotide
uucgccuuuguguaacccu

SEQ ID NO: 1930548 - RNA, 19 nt, Artificial Sequence
  Description of Artificial Sequence: Synthetic oligonucleotide
uguaagagacuuccuccuc

SEQ ID NO: 1930549 - RNA, 19 nt, Artificial Sequence
  Description of Artificial Sequence: Synthetic oligonucleotide
auauugugugaaacauggc

SEQ ID NO: 1930550 - RNA, 19 nt, Artificial Sequence
  Description of Artificial Sequence: Synthetic oligonucleotide
uccguagucauugcuguca

SEQ ID NO: 1930551 - RNA, 19 nt, Artificial Sequence
  Description of Artificial Sequence: Synthetic oligonucleotide
cucuccguagucauugcug

SEQ ID NO: 1930552 - RNA, 19 nt, Artificial Sequence
  Description of Artificial Sequence: Synthetic oligonucleotide
ugugagucacguucaugug

SEQ ID NO: 1930553 - RNA, 19 nt, Artificial Sequence
  Description of Artificial Sequence: Synthetic oligonucleotide
agaagaccaggauaugaaa

SEQ ID NO: 1930554 - RNA, 19 nt, Artificial Sequence
  Description of Artificial Sequence: Synthetic oligonucleotide
cacacuuagcuuucuggac

SEQ ID NO: 1930555 - RNA, 19 nt, Artificial Sequence
  Description of Artificial Sequence: Synthetic oligonucleotide
cgugucaucagaauucucc

SEQ ID NO: 1930556 - RNA, 19 nt, Artificial Sequence
  Description of Artificial Sequence: Synthetic oligonucleotide
caaggagaacccagagacg

SEQ ID NO: 1930557 - RNA, 19 nt, Artificial Sequence
  Description of Artificial Sequence: Synthetic oligonucleotide
caggauaugaaagcaagca

SEQ ID NO: 1930558 - RNA, 19 nt, Artificial Sequence
  Description of Artificial Sequence: Synthetic oligonucleotide
aaaccaggccugccccucg

SEQ ID NO: 1930559 - RNA, 19 nt, Artificial Sequence
  Description of Artificial Sequence: Synthetic oligonucleotide
ccuuuuguaagagacuucc

SEQ ID NO: 1930560 - RNA, 19 nt, Artificial Sequence
  Description of Artificial Sequence: Synthetic oligonucleotide
guuuaccuccacuaugauc

SEQ ID NO: 1930561 - RNA, 19 nt, Artificial Sequence
  Description of Artificial Sequence: Synthetic oligonucleotide
gcuuugggcuccuuggugg

SEQ ID NO: 1930562 - RNA, 19 nt, Artificial Sequence
  Description of Artificial Sequence: Synthetic oligonucleotide
gcaagcauaccucauccgc

SEQ ID NO: 1930563 - RNA, 19 nt, Artificial Sequence
  Description of Artificial Sequence: Synthetic oligonucleotide
uccggccucgaguugugcg

SEQ ID NO: 1930564 - RNA, 19 nt, Artificial Sequence
  Description of Artificial Sequence: Synthetic oligonucleotide
accaaagcugaaaagaauu

SEQ ID NO: 1930565 - RNA, 19 nt, Artificial Sequence
  Description of Artificial Sequence: Synthetic oligonucleotide
acuaugaucugcucccuuu

SEQ ID NO: 1930566 - RNA, 19 nt, Artificial Sequence
  Description of Artificial Sequence: Synthetic oligonucleotide
uacaguuaaugcucuggau

SEQ ID NO: 1930567 - RNA, 19 nt, Artificial Sequence
  Description of Artificial Sequence: Synthetic oligonucleotide
ucccuuuuguaagagacuu

SEQ ID NO: 1930568 - RNA, 19 nt, Artificial Sequence
  Description of Artificial Sequence: Synthetic oligonucleotide
cugccguucguucucuccg

SEQ ID NO: 1930569 - RNA, 19 nt, Artificial Sequence
  Description of Artificial Sequence: Synthetic oligonucleotide
aaaaucccacagucugagu

SEQ ID NO: 1930570 - RNA, 19 nt, Artificial Sequence
  Description of Artificial Sequence: Synthetic oligonucleotide
uauuaagguuuaccuccac

SEQ ID NO: 1930571 - RNA, 19 nt, Artificial Sequence
  Description of Artificial Sequence: Synthetic oligonucleotide
guaccagcgaguguugaag

SEQ ID NO: 1930572 - RNA, 19 nt, Artificial Sequence
  Description of Artificial Sequence: Synthetic oligonucleotide
ucuuuggacugagaagaga

SEQ ID NO: 1930573 - RNA, 19 nt, Artificial Sequence
  Description of Artificial Sequence: Synthetic oligonucleotide
cgaucaguauaacaaaacc

SEQ ID NO: 1930574 - RNA, 19 nt, Artificial Sequence
  Description of Artificial Sequence: Synthetic oligonucleotide
aguucuucggguucgccuu

SEQ ID NO: 1930575 - RNA, 19 nt, Artificial Sequence
  Description of Artificial Sequence: Synthetic oligonucleotide
cacuuagcuuucuggacug

SEQ ID NO: 1930576 - RNA, 19 nt, Artificial Sequence
  Description of Artificial Sequence: Synthetic oligonucleotide
guguuaaaagagcuacaca

SEQ ID NO: 1930577 - RNA, 19 nt, Artificial Sequence
  Description of Artificial Sequence: Synthetic oligonucleotide
agguuuaccuccacuauga

SEQ ID NO: 1930578 - RNA, 19 nt, Artificial Sequence
  Description of Artificial Sequence: Synthetic oligonucleotide
ugaucugcucccuuuugua

SEQ ID NO: 1930579 - RNA, 19 nt, Artificial Sequence
  Description of Artificial Sequence: Synthetic oligonucleotide
gguagcucugcacucuucc

SEQ ID NO: 1930580 - RNA, 19 nt, Artificial Sequence
  Description of Artificial Sequence: Synthetic oligonucleotide
gaguugugcgagguguagg

SEQ ID NO: 1930581 - RNA, 19 nt, Artificial Sequence
  Description of Artificial Sequence: Synthetic oligonucleotide
uucguucucuccguaguca

SEQ ID NO: 1930582 - RNA, 19 nt, Artificial Sequence
  Description of Artificial Sequence: Synthetic oligonucleotide
ucccgaucaguauaacaaa

SEQ ID NO: 1930583 - RNA, 19 nt, Artificial Sequence
  Description of Artificial Sequence: Synthetic oligonucleotide
agugugcacaucagacacc

SEQ ID NO: 1930584 - RNA, 19 nt, Artificial Sequence
  Description of Artificial Sequence: Synthetic oligonucleotide
ugugcgagguguaggggaa

SEQ ID NO: 1930585 - RNA, 19 nt, Artificial Sequence
  Description of Artificial Sequence: Synthetic oligonucleotide
caguuaaugcucuggauua

SEQ ID NO: 1930586 - RNA, 19 nt, Artificial Sequence
  Description of Artificial Sequence: Synthetic oligonucleotide
ugcucgucuuaagaacagg

SEQ ID NO: 1930587 - RNA, 19 nt, Artificial Sequence
  Description of Artificial Sequence: Synthetic oligonucleotide
cugugagucacguucaugu

SEQ ID NO: 1930588 - RNA, 19 nt, Artificial Sequence
  Description of Artificial Sequence: Synthetic oligonucleotide
ucucuccguagucauugcu

SEQ ID NO: 1930589 - RNA, 19 nt, Artificial Sequence
  Description of Artificial Sequence: Synthetic oligonucleotide
uagucauugcugucaucug

SEQ ID NO: 1930590 - RNA, 19 nt, Artificial Sequence
  Description of Artificial Sequence: Synthetic oligonucleotide
gagaagaccaggauaugaa

SEQ ID NO: 1930591 - RNA, 19 nt, Artificial Sequence
  Description of Artificial Sequence: Synthetic oligonucleotide
ucggguucgccuuugugua

SEQ ID NO: 1930592 - RNA, 19 nt, Artificial Sequence
  Description of Artificial Sequence: Synthetic oligonucleotide
auuacaauacacagugaua

SEQ ID NO: 1930593 - RNA, 19 nt, Artificial Sequence
  Description of Artificial Sequence: Synthetic oligonucleotide
auaccucauccgcugauau

SEQ ID NO: 1930594 - RNA, 19 nt, Artificial Sequence
  Description of Artificial Sequence: Synthetic oligonucleotide
uccccugguugugagggcg

SEQ ID NO: 1930595 - RNA, 19 nt, Artificial Sequence
  Description of Artificial Sequence: Synthetic oligonucleotide
uccccuuuagauacauuuu

SEQ ID NO: 1930596 - RNA, 19 nt, Artificial Sequence
  Description of Artificial Sequence: Synthetic oligonucleotide
aagcugaaaagaauucauu

SEQ ID NO: 1930597 - RNA, 19 nt, Artificial Sequence
  Description of Artificial Sequence: Synthetic oligonucleotide
ucuguggccuccucacucu

SEQ ID NO: 1930598 - RNA, 19 nt, Artificial Sequence
  Description of Artificial Sequence: Synthetic oligonucleotide
caggagucucuuuggacug

SEQ ID NO: 1930599 - RNA, 19 nt, Artificial Sequence
  Description of Artificial Sequence: Synthetic oligonucleotide
aacagacuacuaaagucua

SEQ ID NO: 1930600 - RNA, 19 nt, Artificial Sequence
  Description of Artificial Sequence: Synthetic oligonucleotide
ugugaaacauggccagcuu

SEQ ID NO: 1930601 - RNA, 19 nt, Artificial Sequence
  Description of Artificial Sequence: Synthetic oligonucleotide
ucagucugauggucggcca

SEQ ID NO: 1930602 - RNA, 19 nt, Artificial Sequence
  Description of Artificial Sequence: Synthetic oligonucleotide
cagugauacaguuaaugcu

SEQ ID NO: 1930603 - RNA, 19 nt, Artificial Sequence
  Description of Artificial Sequence: Synthetic oligonucleotide
cgucuuaagaacaggaguc

SEQ ID NO: 1930604 - RNA, 19 nt, Artificial Sequence
  Description of Artificial Sequence: Synthetic oligonucleotide
uaacaaaaccaggccugcc

SEQ ID NO: 1930605 - RNA, 19 nt, Artificial Sequence
  Description of Artificial Sequence: Synthetic oligonucleotide
uucccaucuucucuauaau

SEQ ID NO: 1930606 - RNA, 19 nt, Artificial Sequence
  Description of Artificial Sequence: Synthetic oligonucleotide
ugugugaaacauggccagc

SEQ ID NO: 1930607 - RNA, 19 nt, Artificial Sequence
  Description of Artificial Sequence: Synthetic oligonucleotide
cugaguaucugaaauuuau

SEQ ID NO: 1930608 - RNA, 19 nt, Artificial Sequence
  Description of Artificial Sequence: Synthetic oligonucleotide
uaacccugacuuucuccgc

SEQ ID NO: 1930609 - RNA, 19 nt, Artificial Sequence
  Description of Artificial Sequence: Synthetic oligonucleotide
gagacaaggagaacccaga

SEQ ID NO: 1930610 - RNA, 19 nt, Artificial Sequence
  Description of Artificial Sequence: Synthetic oligonucleotide
guugaggagaagaccagga

SEQ ID NO: 1930611 - RNA, 19 nt, Artificial Sequence
  Description of Artificial Sequence: Synthetic oligonucleotide
uaccucauccgcugauaug

SEQ ID NO: 1930612 - RNA, 19 nt, Artificial Sequence
  Description of Artificial Sequence: Synthetic oligonucleotide
cuucccgaucaguauaaca

SEQ ID NO: 1930613 - RNA, 19 nt, Artificial Sequence
  Description of Artificial Sequence: Synthetic oligonucleotide
uggugguuccccugguugu

SEQ ID NO: 1930614 - RNA, 19 nt, Artificial Sequence
  Description of Artificial Sequence: Synthetic oligonucleotide
uccgugucaucagaauucu

SEQ ID NO: 1930615 - RNA, 19 nt, Artificial Sequence
  Description of Artificial Sequence: Synthetic oligonucleotide
ugcuugauauugugugaaa

SEQ ID NO: 1930616 - RNA, 19 nt, Artificial Sequence
  Description of Artificial Sequence: Synthetic oligonucleotide
auggguuuagcuacacuga

SEQ ID NO: 1930617 - RNA, 19 nt, Artificial Sequence
  Description of Artificial Sequence: Synthetic oligonucleotide
ucucacagccuucccgauc

SEQ ID NO: 1930618 - RNA, 19 nt, Artificial Sequence
  Description of Artificial Sequence: Synthetic oligonucleotide
cacagucugaguaucugaa

SEQ ID NO: 1930619 - RNA, 19 nt, Artificial Sequence
  Description of Artificial Sequence: Synthetic oligonucleotide
gcugcggcaacagaggcag

SEQ ID NO: 1930620 - RNA, 19 nt, Artificial Sequence
  Description of Artificial Sequence: Synthetic oligonucleotide
gaaacauggccagcuugac

SEQ ID NO: 1930621 - RNA, 19 nt, Artificial Sequence
  Description of Artificial Sequence: Synthetic oligonucleotide
ucguucucuccguagucau

SEQ ID NO: 1930622 - RNA, 19 nt, Artificial Sequence
  Description of Artificial Sequence: Synthetic oligonucleotide
acaauggggaagguccuga

SEQ ID NO: 1930623 - RNA, 19 nt, Artificial Sequence
  Description of Artificial Sequence: Synthetic oligonucleotide
gcucccuuuuguaagagac

SEQ ID NO: 1930624 - RNA, 19 nt, Artificial Sequence
  Description of Artificial Sequence: Synthetic oligonucleotide
cacguucaugugcuucucc

SEQ ID NO: 1930625 - RNA, 19 nt, Artificial Sequence
  Description of Artificial Sequence: Synthetic oligonucleotide
acauggguuuagcuacacu

SEQ ID NO: 1930626 - RNA, 19 nt, Artificial Sequence
  Description of Artificial Sequence: Synthetic oligonucleotide
gcuugauauugugugaaac

SEQ ID NO: 1930627 - RNA, 19 nt, Artificial Sequence
  Description of Artificial Sequence: Synthetic oligonucleotide
gcuuauugaaauacauuuc

SEQ ID NO: 1930628 - RNA, 19 nt, Artificial Sequence
  Description of Artificial Sequence: Synthetic oligonucleotide
uucucuccguagucauugc

SEQ ID NO: 1930629 - RNA, 19 nt, Artificial Sequence
  Description of Artificial Sequence: Synthetic oligonucleotide
caucagaauucucccgguc

SEQ ID NO: 1930630 - RNA, 19 nt, Artificial Sequence
  Description of Artificial Sequence: Synthetic oligonucleotide
uucuccgcgcgcuucuccu

SEQ ID NO: 1930631 - RNA, 19 nt, Artificial Sequence
  Description of Artificial Sequence: Synthetic oligonucleotide
agaacccagagacgccugu

SEQ ID NO: 1930632 - RNA, 19 nt, Artificial Sequence
  Description of Artificial Sequence: Synthetic oligonucleotide
aucccacagucugaguauc

SEQ ID NO: 1930633 - RNA, 19 nt, Artificial Sequence
  Description of Artificial Sequence: Synthetic oligonucleotide
ugguuccccugguugugag

SEQ ID NO: 1930634 - RNA, 19 nt, Artificial Sequence
  Description of Artificial Sequence: Synthetic oligonucleotide
agaggcaguucuucggguu

SEQ ID NO: 1930635 - RNA, 19 nt, Artificial Sequence
  Description of Artificial Sequence: Synthetic oligonucleotide
acccuggggcacuucucac

SEQ ID NO: 1930636 - RNA, 19 nt, Artificial Sequence
  Description of Artificial Sequence: Synthetic oligonucleotide
aggcaguucuucggguucg

SEQ ID NO: 1930637 - RNA, 19 nt, Artificial Sequence
  Description of Artificial Sequence: Synthetic oligonucleotide
uuggguagcucugcacucu

SEQ ID NO: 1930638 - RNA, 19 nt, Artificial Sequence
  Description of Artificial Sequence: Synthetic oligonucleotide
uuaccuccacuaugaucug

SEQ ID NO: 1930639 - RNA, 19 nt, Artificial Sequence
  Description of Artificial Sequence: Synthetic oligonucleotide
uggagacaaggagaaccca

SEQ ID NO: 1930640 - RNA, 19 nt, Artificial Sequence
  Description of Artificial Sequence: Synthetic oligonucleotide
cucugcacucuuccuccgg

SEQ ID NO: 1930641 - RNA, 19 nt, Artificial Sequence
  Description of Artificial Sequence: Synthetic oligonucleotide
guucguucucuccguaguc

SEQ ID NO: 1930642 - RNA, 19 nt, Artificial Sequence
  Description of Artificial Sequence: Synthetic oligonucleotide
gacaauggggaagguccug

SEQ ID NO: 1930643 - RNA, 19 nt, Artificial Sequence
  Description of Artificial Sequence: Synthetic oligonucleotide
agcuugacugcagccagca

SEQ ID NO: 1930644 - RNA, 19 nt, Artificial Sequence
  Description of Artificial Sequence: Synthetic oligonucleotide
ggagaagaccaggauauga

SEQ ID NO: 1930645 - RNA, 19 nt, Artificial Sequence
  Description of Artificial Sequence: Synthetic oligonucleotide
ggauuaaucucacagccuu

SEQ ID NO: 1930646 - RNA, 19 nt, Artificial Sequence
  Description of Artificial Sequence: Synthetic oligonucleotide
uccgcuuggguagcucugc

SEQ ID NO: 1930647 - RNA, 19 nt, Artificial Sequence
  Description of Artificial Sequence: Synthetic oligonucleotide
ugugcacaucagacaccgc

SEQ ID NO: 1930648 - RNA, 19 nt, Artificial Sequence
  Description of Artificial Sequence: Synthetic oligonucleotide
agcauaccucauccgcuga

SEQ ID NO: 1930649 - RNA, 19 nt, Artificial Sequence
  Description of Artificial Sequence: Synthetic oligonucleotide
ucgaguugugcgaggugua

SEQ ID NO: 1930650 - RNA, 19 nt, Artificial Sequence
  Description of Artificial Sequence: Synthetic oligonucleotide
agccuucccgaucaguaua

SEQ ID NO: 1930651 - RNA, 19 nt, Artificial Sequence
  Description of Artificial Sequence: Synthetic oligonucleotide
cuucggguucgccuuugug

SEQ ID NO: 1930652 - RNA, 19 nt, Artificial Sequence
  Description of Artificial Sequence: Synthetic oligonucleotide
cagacuacuaaagucuaua

SEQ ID NO: 1930653 - RNA, 19 nt, Artificial Sequence
  Description of Artificial Sequence: Synthetic oligonucleotide
aguuaaugcucuggauuaa

SEQ ID NO: 1930654 - RNA, 19 nt, Artificial Sequence
  Description of Artificial Sequence: Synthetic oligonucleotide
gaacccagagacgccugug

SEQ ID NO: 1930655 - RNA, 19 nt, Artificial Sequence
  Description of Artificial Sequence: Synthetic oligonucleotide
caagcauaccucauccgcu

SEQ ID NO: 1930656 - RNA, 19 nt, Artificial Sequence
  Description of Artificial Sequence: Synthetic oligonucleotide
guucgccuuuguguaaccc

SEQ ID NO: 1930657 - RNA, 19 nt, Artificial Sequence
  Description of Artificial Sequence: Synthetic oligonucleotide
cuccagguaccagcgagug

SEQ ID NO: 1930658 - RNA, 19 nt, Artificial Sequence
  Description of Artificial Sequence: Synthetic oligonucleotide
cuucgcugcucgucuuaag

SEQ ID NO: 1930659 - RNA, 19 nt, Artificial Sequence
  Description of Artificial Sequence: Synthetic oligonucleotide
gaccaggauaugaaagcaa

SEQ ID NO: 1930660 - RNA, 19 nt, Artificial Sequence
  Description of Artificial Sequence: Synthetic oligonucleotide
ugccccucguugaggagaa

SEQ ID NO: 1930661 - RNA, 19 nt, Artificial Sequence
  Description of Artificial Sequence: Synthetic oligonucleotide
ucuucggguucgccuuugu

SEQ ID NO: 1930662 - RNA, 19 nt, Artificial Sequence
  Description of Artificial Sequence: Synthetic oligonucleotide
auggucggccaggacaaug

SEQ ID NO: 1930663 - RNA, 19 nt, Artificial Sequence
  Description of Artificial Sequence: Synthetic oligonucleotide
gagcuacacaaagaagaaa

SEQ ID NO: 1930664 - RNA, 19 nt, Artificial Sequence
  Description of Artificial Sequence: Synthetic oligonucleotide
gaaguggcagcugcggcaa

SEQ ID NO: 1930665 - RNA, 19 nt, Artificial Sequence
  Description of Artificial Sequence: Synthetic oligonucleotide
ugcggcaacagaggcaguu

SEQ ID NO: 1930666 - RNA, 19 nt, Artificial Sequence
  Description of Artificial Sequence: Synthetic oligonucleotide
gaguguguuaaaagagcua

SEQ ID NO: 1930667 - RNA, 19 nt, Artificial Sequence
  Description of Artificial Sequence: Synthetic oligonucleotide
aaccaggccugccccucgu

SEQ ID NO: 1930668 - RNA, 19 nt, Artificial Sequence
  Description of Artificial Sequence: Synthetic oligonucleotide
cuacacaaagaagaaaauu

SEQ ID NO: 1930669 - RNA, 19 nt, Artificial Sequence
  Description of Artificial Sequence: Synthetic oligonucleotide
ugccguucguucucuccgu

SEQ ID NO: 1930670 - RNA, 19 nt, Artificial Sequence
  Description of Artificial Sequence: Synthetic oligonucleotide
guguguuaaaagagcuaca

SEQ ID NO: 1930671 - RNA, 19 nt, Artificial Sequence
  Description of Artificial Sequence: Synthetic oligonucleotide
ugcaagcaaauugggcuuu

SEQ ID NO: 1930672 - RNA, 19 nt, Artificial Sequence
  Description of Artificial Sequence: Synthetic oligonucleotide
ccagcgaguguugaagacc

SEQ ID NO: 1930673 - RNA, 19 nt, Artificial Sequence
  Description of Artificial Sequence: Synthetic oligonucleotide
aggccugccccucguugag

SEQ ID NO: 1930674 - RNA, 19 nt, Artificial Sequence
  Description of Artificial Sequence: Synthetic oligonucleotide
gucuuaagaacaggagucu

SEQ ID NO: 1930675 - RNA, 19 nt, Artificial Sequence
  Description of Artificial Sequence: Synthetic oligonucleotide
ugagggcggaauucuuguu

SEQ ID NO: 1930676 - RNA, 19 nt, Artificial Sequence
  Description of Artificial Sequence: Synthetic oligonucleotide
ggucggccaggacaauggg

SEQ ID NO: 1930677 - RNA, 19 nt, Artificial Sequence
  Description of Artificial Sequence: Synthetic oligonucleotide
uccuucgcugcucgucuua

SEQ ID NO: 1930678 - RNA, 19 nt, Artificial Sequence
  Description of Artificial Sequence: Synthetic oligonucleotide
guugugagggcggaauucu

SEQ ID NO: 1930679 - RNA, 19 nt, Artificial Sequence
  Description of Artificial Sequence: Synthetic oligonucleotide
gguuccccugguugugagg

SEQ ID NO: 1930680 - RNA, 19 nt, Artificial Sequence
  Description of Artificial Sequence: Synthetic oligonucleotide
gugagggcggaauucuugu

SEQ ID NO: 1930681 - RNA, 19 nt, Artificial Sequence
  Description of Artificial Sequence: Synthetic oligonucleotide
uuccccugguugugagggc

SEQ ID NO: 1930682 - RNA, 19 nt, Artificial Sequence
  Description of Artificial Sequence: Synthetic oligonucleotide
gugugaaacauggccagcu

SEQ ID NO: 1930683 - RNA, 19 nt, Artificial Sequence
  Description of Artificial Sequence: Synthetic oligonucleotide
gcucgucuuaagaacagga

SEQ ID NO: 1930684 - RNA, 19 nt, Artificial Sequence
  Description of Artificial Sequence: Synthetic oligonucleotide
cagguaccagcgaguguug

SEQ ID NO: 1930685 - RNA, 19 nt, Artificial Sequence
  Description of Artificial Sequence: Synthetic oligonucleotide
cuuguuggcucccucuggu

SEQ ID NO: 1930686 - RNA, 19 nt, Artificial Sequence
  Description of Artificial Sequence: Synthetic oligonucleotide
gucuuccuugacagugugc

SEQ ID NO: 1930687 - RNA, 19 nt, Artificial Sequence
  Description of Artificial Sequence: Synthetic oligonucleotide
guguaacccugacuuucuc

SEQ ID NO: 1930688 - RNA, 19 nt, Artificial Sequence
  Description of Artificial Sequence: Synthetic oligonucleotide
acagacuacuaaagucuau

SEQ ID NO: 1930689 - RNA, 19 nt, Artificial Sequence
  Description of Artificial Sequence: Synthetic oligonucleotide
cucuuccgugucaucagaa

SEQ ID NO: 1930690 - RNA, 19 nt, Artificial Sequence
  Description of Artificial Sequence: Synthetic oligonucleotide
cuccguagucauugcuguc

SEQ ID NO: 1930691 - RNA, 19 nt, Artificial Sequence
  Description of Artificial Sequence: Synthetic oligonucleotide
agguguaggggaaguggca

SEQ ID NO: 1930692 - RNA, 19 nt, Artificial Sequence
  Description of Artificial Sequence: Synthetic oligonucleotide
cgagguguaggggaagugg

SEQ ID NO: 1930693 - RNA, 19 nt, Artificial Sequence
  Description of Artificial Sequence: Synthetic oligonucleotide
cucccggucuuccuugaca

SEQ ID NO: 1930694 - RNA, 19 nt, Artificial Sequence
  Description of Artificial Sequence: Synthetic oligonucleotide
gaaagcaagcauaccucau

SEQ ID NO: 1930695 - RNA, 19 nt, Artificial Sequence
  Description of Artificial Sequence: Synthetic oligonucleotide
ucacguucaugugcuucuc

SEQ ID NO: 1930696 - RNA, 19 nt, Artificial Sequence
  Description of Artificial Sequence: Synthetic oligonucleotide
cucgaguugugcgaggugu

SEQ ID NO: 1930697 - RNA, 19 nt, Artificial Sequence
  Description of Artificial Sequence: Synthetic oligonucleotide
aucucacagccuucccgau

SEQ ID NO: 1930698 - RNA, 19 nt, Artificial Sequence
  Description of Artificial Sequence: Synthetic oligonucleotide
cucuauaaugcuugauauu

SEQ ID NO: 1930699 - RNA, 19 nt, Artificial Sequence
  Description of Artificial Sequence: Synthetic oligonucleotide
gugauacaguuaaugcucu

SEQ ID NO: 1930700 - RNA, 19 nt, Artificial Sequence
  Description of Artificial Sequence: Synthetic oligonucleotide
gcuuggguagcucugcacu

SEQ ID NO: 1930701 - RNA, 19 nt, Artificial Sequence
  Description of Artificial Sequence: Synthetic oligonucleotide
gaaggaggccauggagaca

SEQ ID NO: 1930702 - RNA, 19 nt, Artificial Sequence
  Description of Artificial Sequence: Synthetic oligonucleotide
cuuccgugucaucagaauu

SEQ ID NO: 1930703 - RNA, 19 nt, Artificial Sequence
  Description of Artificial Sequence: Synthetic oligonucleotide
ccggucuuccuugacagug

SEQ ID NO: 1930704 - RNA, 19 nt, Artificial Sequence
  Description of Artificial Sequence: Synthetic oligonucleotide
gagacgccugugagucacg

SEQ ID NO: 1930705 - RNA, 19 nt, Artificial Sequence
  Description of Artificial Sequence: Synthetic oligonucleotide
uuccuccggccucgaguug

SEQ ID NO: 1930706 - RNA, 19 nt, Artificial Sequence
  Description of Artificial Sequence: Synthetic oligonucleotide
gguucgccuuuguguaacc

SEQ ID NO: 1930707 - RNA, 19 nt, Artificial Sequence
  Description of Artificial Sequence: Synthetic oligonucleotide
agacgccugugagucacgu

SEQ ID NO: 1930708 - RNA, 19 nt, Artificial Sequence
  Description of Artificial Sequence: Synthetic oligonucleotide
ggccagcuugacugcagcc

SEQ ID NO: 1930709 - RNA, 19 nt, Artificial Sequence
  Description of Artificial Sequence: Synthetic oligonucleotide
cucccuuuuguaagagacu

SEQ ID NO: 1930710 - RNA, 19 nt, Artificial Sequence
  Description of Artificial Sequence: Synthetic oligonucleotide
gcucugcacucuuccuccg

SEQ ID NO: 1930711 - RNA, 19 nt, Artificial Sequence
  Description of Artificial Sequence: Synthetic oligonucleotide
ccugacuuucuccgcgcgc

SEQ ID NO: 1930712 - RNA, 19 nt, Artificial Sequence
  Description of Artificial Sequence: Synthetic oligonucleotide
cagaaaaugcaagcaaauu

SEQ ID NO: 1930713 - RNA, 19 nt, Artificial Sequence
  Description of Artificial Sequence: Synthetic oligonucleotide
cccgaucaguauaacaaaa

SEQ ID NO: 1930714 - RNA, 19 nt, Artificial Sequence
  Description of Artificial Sequence: Synthetic oligonucleotide
cguugaggagaagaccagg

SEQ ID NO: 1930715 - RNA, 19 nt, Artificial Sequence
  Description of Artificial Sequence: Synthetic oligonucleotide
cugacuuucuccgcgcgcu

SEQ ID NO: 1930716 - RNA, 19 nt, Artificial Sequence
  Description of Artificial Sequence: Synthetic oligonucleotide
ccuuuagauacauuuuaau

SEQ ID NO: 1930717 - RNA, 19 nt, Artificial Sequence
  Description of Artificial Sequence: Synthetic oligonucleotide
cgcugauaugaaauuauaa

SEQ ID NO: 1930718 - RNA, 19 nt, Artificial Sequence
  Description of Artificial Sequence: Synthetic oligonucleotide
cugagaagagacacccuuu

SEQ ID NO: 1930719 - RNA, 19 nt, Artificial Sequence
  Description of Artificial Sequence: Synthetic oligonucleotide
gaauucuuguuggcucccu

SEQ ID NO: 1930720 - RNA, 19 nt, Artificial Sequence
  Description of Artificial Sequence: Synthetic oligonucleotide
cuuccuccggccucgaguu

SEQ ID NO: 1930721 - RNA, 19 nt, Artificial Sequence
  Description of Artificial Sequence: Synthetic oligonucleotide
cugccccucguugaggaga

SEQ ID NO: 1930722 - RNA, 19 nt, Artificial Sequence
  Description of Artificial Sequence: Synthetic oligonucleotide
gugcuucuccagguaccag

SEQ ID NO: 1930723 - RNA, 19 nt, Artificial Sequence
  Description of Artificial Sequence: Synthetic oligonucleotide
cauaccucauccgcugaua

SEQ ID NO: 1930724 - RNA, 19 nt, Artificial Sequence
  Description of Artificial Sequence: Synthetic oligonucleotide
ccguucguucucuccguag

SEQ ID NO: 1930725 - RNA, 19 nt, Artificial Sequence
  Description of Artificial Sequence: Synthetic oligonucleotide
cccuuuuguaagagacuuc

SEQ ID NO: 1930726 - RNA, 19 nt, Artificial Sequence
  Description of Artificial Sequence: Synthetic oligonucleotide
ggguucgccuuuguguaac

SEQ ID NO: 1930727 - RNA, 19 nt, Artificial Sequence
  Description of Artificial Sequence: Synthetic oligonucleotide
gggcggaauucuuguuggc

SEQ ID NO: 1930728 - RNA, 19 nt, Artificial Sequence
  Description of Artificial Sequence: Synthetic oligonucleotide
gacugccgcuuugggcucc

SEQ ID NO: 1930729 - RNA, 19 nt, Artificial Sequence
  Description of Artificial Sequence: Synthetic oligonucleotide
cuaugaucugcucccuuuu

SEQ ID NO: 1930730 - RNA, 19 nt, Artificial Sequence
  Description of Artificial Sequence: Synthetic oligonucleotide
gugcgagguguaggggaag

SEQ ID NO: 1930731 - RNA, 19 nt, Artificial Sequence
  Description of Artificial Sequence: Synthetic oligonucleotide
ucccucuggucagucugau

SEQ ID NO: 1930732 - RNA, 19 nt, Artificial Sequence
  Description of Artificial Sequence: Synthetic oligonucleotide
gucugauggucggccagga

SEQ ID NO: 1930733 - RNA, 19 nt, Artificial Sequence
  Description of Artificial Sequence: Synthetic oligonucleotide
ggucagucugauggucggc

SEQ ID NO: 1930734 - RNA, 19 nt, Artificial Sequence
  Description of Artificial Sequence: Synthetic oligonucleotide
cccugacuuucuccgcgcg

SEQ ID NO: 1930735 - RNA, 19 nt, Artificial Sequence
  Description of Artificial Sequence: Synthetic oligonucleotide
guuuggugguuccccuggu

SEQ ID NO: 1930736 - RNA, 19 nt, Artificial Sequence
  Description of Artificial Sequence: Synthetic oligonucleotide
gacugagaagagacacccu

SEQ ID NO: 1930737 - RNA, 19 nt, Artificial Sequence
  Description of Artificial Sequence: Synthetic oligonucleotide
ggguuuagcuacacugaaa

SEQ ID NO: 1930738 - RNA, 19 nt, Artificial Sequence
  Description of Artificial Sequence: Synthetic oligonucleotide
acacagugauacaguuaau

SEQ ID NO: 1930739 - RNA, 19 nt, Artificial Sequence
  Description of Artificial Sequence: Synthetic oligonucleotide
gcuacacaaagaagaaaau

SEQ ID NO: 1930740 - RNA, 19 nt, Artificial Sequence
  Description of Artificial Sequence: Synthetic oligonucleotide
gguccugaaggaggccaug

SEQ ID NO: 1930741 - RNA, 19 nt, Artificial Sequence
  Description of Artificial Sequence: Synthetic oligonucleotide
gccugccccucguugagga

SEQ ID NO: 1930742 - RNA, 19 nt, Artificial Sequence
  Description of Artificial Sequence: Synthetic oligonucleotide
ggcggaauucuuguuggcu

SEQ ID NO: 1930743 - RNA, 19 nt, Artificial Sequence
  Description of Artificial Sequence: Synthetic oligonucleotide
cuucucuauaaugcuugau

SEQ ID NO: 1930744 - RNA, 19 nt, Artificial Sequence
  Description of Artificial Sequence: Synthetic oligonucleotide
gcucuggauuaaucucaca

SEQ ID NO: 1930745 - RNA, 19 nt, Artificial Sequence
  Description of Artificial Sequence: Synthetic oligonucleotide
gcaguucuucggguucgcc

SEQ ID NO: 1930746 - RNA, 19 nt, Artificial Sequence
  Description of Artificial Sequence: Synthetic oligonucleotide
cugguugugagggcggaau

SEQ ID NO: 1930747 - RNA, 19 nt, Artificial Sequence
  Description of Artificial Sequence: Synthetic oligonucleotide
agcgaguguugaagacccu

SEQ ID NO: 1930748 - RNA, 19 nt, Artificial Sequence
  Description of Artificial Sequence: Synthetic oligonucleotide
uccgcgcgcuucuccuuuu

SEQ ID NO: 1930749 - RNA, 19 nt, Artificial Sequence
  Description of Artificial Sequence: Synthetic oligonucleotide
cgaguugugcgagguguag

SEQ ID NO: 1930750 - RNA, 19 nt, Artificial Sequence
  Description of Artificial Sequence: Synthetic oligonucleotide
cuccggccucgaguugugc

SEQ ID NO: 1930751 - RNA, 19 nt, Artificial Sequence
  Description of Artificial Sequence: Synthetic oligonucleotide
ccgcugauaugaaauuaua

SEQ ID NO: 1930752 - RNA, 19 nt, Artificial Sequence
  Description of Artificial Sequence: Synthetic oligonucleotide
ggcaguucuucggguucgc

SEQ ID NO: 1930753 - RNA, 19 nt, Artificial Sequence
  Description of Artificial Sequence: Synthetic oligonucleotide
ccucgaguugugcgaggug

SEQ ID NO: 1930754 - RNA, 19 nt, Artificial Sequence
  Description of Artificial Sequence: Synthetic oligonucleotide
uggcucccucuggucaguc

SEQ ID NO: 1930755 - RNA, 19 nt, Artificial Sequence
  Description of Artificial Sequence: Synthetic oligonucleotide
ggacugccgcuuugggcuc

SEQ ID NO: 1930756 - RNA, 19 nt, Artificial Sequence
  Description of Artificial Sequence: Synthetic oligonucleotide
gcggcaacagaggcaguuc

SEQ ID NO: 1930757 - RNA, 19 nt, Artificial Sequence
  Description of Artificial Sequence: Synthetic oligonucleotide
ccccucguugaggagaaga

SEQ ID NO: 1930758 - RNA, 19 nt, Artificial Sequence
  Description of Artificial Sequence: Synthetic oligonucleotide
gccuucccgaucaguauaa

SEQ ID NO: 1930759 - RNA, 19 nt, Artificial Sequence
  Description of Artificial Sequence: Synthetic oligonucleotide
ccuuuguguaacccugacu

SEQ ID NO: 1930760 - RNA, 19 nt, Artificial Sequence
  Description of Artificial Sequence: Synthetic oligonucleotide
ggccugccccucguugagg

SEQ ID NO: 1930761 - RNA, 19 nt, Artificial Sequence
  Description of Artificial Sequence: Synthetic oligonucleotide
ccggccucgaguugugcga

SEQ ID NO: 1930762 - RNA, 19 nt, Artificial Sequence
  Description of Artificial Sequence: Synthetic oligonucleotide
cccuggggcacuucucaca

SEQ ID NO: 1930763 - RNA, 19 nt, Artificial Sequence
  Description of Artificial Sequence: Synthetic oligonucleotide
cgcuucuuccgcuugggua

SEQ ID NO: 1930764 - RNA, 19 nt, Artificial Sequence
  Description of Artificial Sequence: Synthetic oligonucleotide
ggacaauggggaagguccu

SEQ ID NO: 1930765 - RNA, 19 nt, Artificial Sequence
  Description of Artificial Sequence: Synthetic oligonucleotide
ccauggagacaaggagaac

SEQ ID NO: 1930766 - RNA, 19 nt, Artificial Sequence
  Description of Artificial Sequence: Synthetic oligonucleotide
ccgugucaucagaauucuc

SEQ ID NO: 1930767 - RNA, 19 nt, Artificial Sequence
  Description of Artificial Sequence: Synthetic oligonucleotide
gacgccugugagucacguu

SEQ ID NO: 1930768 - RNA, 19 nt, Artificial Sequence
  Description of Artificial Sequence: Synthetic oligonucleotide
cacuaugaucugcucccuu

SEQ ID NO: 1930769 - RNA, 19 nt, Artificial Sequence
  Description of Artificial Sequence: Synthetic oligonucleotide
gcauaccucauccgcugau

SEQ ID NO: 1930770 - RNA, 19 nt, Artificial Sequence
  Description of Artificial Sequence: Synthetic oligonucleotide
ccuucccgaucaguauaac

SEQ ID NO: 1930771 - RNA, 19 nt, Artificial Sequence
  Description of Artificial Sequence: Synthetic oligonucleotide
gcaagcaaauugggcuuua

SEQ ID NO: 1930772 - RNA, 19 nt, Artificial Sequence
  Description of Artificial Sequence: Synthetic oligonucleotide
cccagagacgccugugagu

SEQ ID NO: 1930773 - RNA, 19 nt, Artificial Sequence
  Description of Artificial Sequence: Synthetic oligonucleotide
cguucguucucuccguagu

SEQ ID NO: 1930774 - RNA, 19 nt, Artificial Sequence
  Description of Artificial Sequence: Synthetic oligonucleotide
ccucauccgcugauaugaa

SEQ ID NO: 1930775 - RNA, 19 nt, Artificial Sequence
  Description of Artificial Sequence: Synthetic oligonucleotide
cgccugugagucacguuca

SEQ ID NO: 1930776 - RNA, 19 nt, Artificial Sequence
  Description of Artificial Sequence: Synthetic oligonucleotide
gccucgaguugugcgaggu

SEQ ID NO: 1930777 - RNA, 19 nt, Artificial Sequence
  Description of Artificial Sequence: Synthetic oligonucleotide
gauggucggccaggacaau

SEQ ID NO: 1930778 - RNA, 19 nt, Artificial Sequence
  Description of Artificial Sequence: Synthetic oligonucleotide
gccguucguucucuccgua

SEQ ID NO: 1930779 - RNA, 19 nt, Artificial Sequence
  Description of Artificial Sequence: Synthetic oligonucleotide
cgccuuuguguaacccuga

SEQ ID NO: 1930780 - RNA, 19 nt, Artificial Sequence
  Description of Artificial Sequence: Synthetic oligonucleotide
agccagcaccaaagcugaa

SEQ ID NO: 1930781 - RNA, 19 nt, Artificial Sequence
  Description of Artificial Sequence: Synthetic oligonucleotide
ccuucgcugcucgucuuaa

SEQ ID NO: 1930782 - RNA, 19 nt, Artificial Sequence
  Description of Artificial Sequence: Synthetic oligonucleotide
cuccgcgcgcuucuccuuu

SEQ ID NO: 1930783 - RNA, 19 nt, Artificial Sequence
  Description of Artificial Sequence: Synthetic oligonucleotide
ccgcuuggguagcucugca

SEQ ID NO: 1930784 - RNA, 19 nt, Artificial Sequence
  Description of Artificial Sequence: Synthetic oligonucleotide
gggcuuuaguuuggugguu

SEQ ID NO: 1930785 - RNA, 19 nt, Artificial Sequence
  Description of Artificial Sequence: Synthetic oligonucleotide
cugcggcaacagaggcagu

SEQ ID NO: 1930786 - RNA, 19 nt, Artificial Sequence
  Description of Artificial Sequence: Synthetic oligonucleotide
gccccucguugaggagaag

SEQ ID NO: 1930787 - RNA, 19 nt, Artificial Sequence
  Description of Artificial Sequence: Synthetic oligonucleotide
cggguucgccuuuguguaa

SEQ ID NO: 1930788 - RNA, 19 nt, Artificial Sequence
  Description of Artificial Sequence: Synthetic oligonucleotide
cccggucuuccuugacagu

SEQ ID NO: 1930789 - RNA, 19 nt, Artificial Sequence
  Description of Artificial Sequence: Synthetic oligonucleotide
uuauacaagaauaagcuag

SEQ ID NO: 1930790 - RNA, 19 nt, Artificial Sequence
  Description of Artificial Sequence: Synthetic oligonucleotide
auaaacuccaaguuguucc

SEQ ID NO: 1930791 - RNA, 19 nt, Artificial Sequence
  Description of Artificial Sequence: Synthetic oligonucleotide
auuuagaagaaccaucccc

SEQ ID NO: 1930792 - RNA, 19 nt, Artificial Sequence
  Description of Artificial Sequence: Synthetic oligonucleotide
cuuguuauagauaaacucc

SEQ ID NO: 1930793 - RNA, 19 nt, Artificial Sequence
  Description of Artificial Sequence: Synthetic oligonucleotide
aacaguuuguugcagaaag

SEQ ID NO: 1930794 - RNA, 19 nt, Artificial Sequence
  Description of Artificial Sequence: Synthetic oligonucleotide
aaagacuauacacagagau

SEQ ID NO: 1930795 - RNA, 19 nt, Artificial Sequence
  Description of Artificial Sequence: Synthetic oligonucleotide
acucacuuuaugcaaaucc

SEQ ID NO: 1930796 - RNA, 19 nt, Artificial Sequence
  Description of Artificial Sequence: Synthetic oligonucleotide
aaugcaugaaugugggagc

SEQ ID NO: 1930797 - RNA, 19 nt, Artificial Sequence
  Description of Artificial Sequence: Synthetic oligonucleotide
uugaacggaauauugaaag

SEQ ID NO: 1930798 - RNA, 19 nt, Artificial Sequence
  Description of Artificial Sequence: Synthetic oligonucleotide
gauaugauuccacaucugg

SEQ ID NO: 1930799 - RNA, 19 nt, Artificial Sequence
  Description of Artificial Sequence: Synthetic oligonucleotide
agacuauacacagagauac

SEQ ID NO: 1930800 - RNA, 19 nt, Artificial Sequence
  Description of Artificial Sequence: Synthetic oligonucleotide
uuauagauaaacuccaagu

SEQ ID NO: 1930801 - RNA, 19 nt, Artificial Sequence
  Description of Artificial Sequence: Synthetic oligonucleotide
aauuugauauucuucauua

SEQ ID NO: 1930802 - RNA, 19 nt, Artificial Sequence
  Description of Artificial Sequence: Synthetic oligonucleotide
aaagaaugaacucaagaau

SEQ ID NO: 1930803 - RNA, 19 nt, Artificial Sequence
  Description of Artificial Sequence: Synthetic oligonucleotide
aacgccaggaauuagccag

SEQ ID NO: 1930804 - RNA, 19 nt, Artificial Sequence
  Description of Artificial Sequence: Synthetic oligonucleotide
aagauagagcgccuggagc

SEQ ID NO: 1930805 - RNA, 19 nt, Artificial Sequence
  Description of Artificial Sequence: Synthetic oligonucleotide
aauaacgccaggaauuagc

SEQ ID NO: 1930806 - RNA, 19 nt, Artificial Sequence
  Description of Artificial Sequence: Synthetic oligonucleotide
gaacauaacgaucauggag

SEQ ID NO: 1930807 - RNA, 19 nt, Artificial Sequence
  Description of Artificial Sequence: Synthetic oligonucleotide
aaacuugcggaacuugucg

SEQ ID NO: 1930808 - RNA, 19 nt, Artificial Sequence
  Description of Artificial Sequence: Synthetic oligonucleotide
uagcguaucacaaucaaca

SEQ ID NO: 1930809 - RNA, 19 nt, Artificial Sequence
  Description of Artificial Sequence: Synthetic oligonucleotide
gugaacauaacgaucaugg

SEQ ID NO: 1930810 - RNA, 19 nt, Artificial Sequence
  Description of Artificial Sequence: Synthetic oligonucleotide
auagauaaacuccaaguug

SEQ ID NO: 1930811 - RNA, 19 nt, Artificial Sequence
  Description of Artificial Sequence: Synthetic oligonucleotide
uagauaaacuccaaguugu

SEQ ID NO: 1930812 - RNA, 19 nt, Artificial Sequence
  Description of Artificial Sequence: Synthetic oligonucleotide
ugcacuucuauaaauuaag

SEQ ID NO: 1930813 - RNA, 19 nt, Artificial Sequence
  Description of Artificial Sequence: Synthetic oligonucleotide
uuaugcaaaucccacuagg

SEQ ID NO: 1930814 - RNA, 19 nt, Artificial Sequence
  Description of Artificial Sequence: Synthetic oligonucleotide
cuuagauagagcaagccac

SEQ ID NO: 1930815 - RNA, 19 nt, Artificial Sequence
  Description of Artificial Sequence: Synthetic oligonucleotide
ucuuguuauagauaaacuc

SEQ ID NO: 1930816 - RNA, 19 nt, Artificial Sequence
  Description of Artificial Sequence: Synthetic oligonucleotide
agccgugauacuuugaacg

SEQ ID NO: 1930817 - RNA, 19 nt, Artificial Sequence
  Description of Artificial Sequence: Synthetic oligonucleotide
aacauaacgaucauggagu

SEQ ID NO: 1930818 - RNA, 19 nt, Artificial Sequence
  Description of Artificial Sequence: Synthetic oligonucleotide
guaaacacucacuuuaugc

SEQ ID NO: 1930819 - RNA, 19 nt, Artificial Sequence
  Description of Artificial Sequence: Synthetic oligonucleotide
uaaacacucacuuuaugca

SEQ ID NO: 1930820 - RNA, 19 nt, Artificial Sequence
  Description of Artificial Sequence: Synthetic oligonucleotide
ugcuucauuuagaagaacc

SEQ ID NO: 1930821 - RNA, 19 nt, Artificial Sequence
  Description of Artificial Sequence: Synthetic oligonucleotide
aacucaagaauuccaaaga

SEQ ID NO: 1930822 - RNA, 19 nt, Artificial Sequence
  Description of Artificial Sequence: Synthetic oligonucleotide
acaagaauaagcuagcgua

SEQ ID NO: 1930823 - RNA, 19 nt, Artificial Sequence
  Description of Artificial Sequence: Synthetic oligonucleotide
agucuuguuauagauaaac

SEQ ID NO: 1930824 - RNA, 19 nt, Artificial Sequence
  Description of Artificial Sequence: Synthetic oligonucleotide
aacuugcggaacuugucgc

SEQ ID NO: 1930825 - RNA, 19 nt, Artificial Sequence
  Description of Artificial Sequence: Synthetic oligonucleotide
acgaucauggaguaguuuc

SEQ ID NO: 1930826 - RNA, 19 nt, Artificial Sequence
  Description of Artificial Sequence: Synthetic oligonucleotide
aguaguuucgagguggggc

SEQ ID NO: 1930827 - RNA, 19 nt, Artificial Sequence
  Description of Artificial Sequence: Synthetic oligonucleotide
uauagauaaacuccaaguu

SEQ ID NO: 1930828 - RNA, 19 nt, Artificial Sequence
  Description of Artificial Sequence: Synthetic oligonucleotide
acagucugccuuuugaagg

SEQ ID NO: 1930829 - RNA, 19 nt, Artificial Sequence
  Description of Artificial Sequence: Synthetic oligonucleotide
cauacacugagaauacugg

SEQ ID NO: 1930830 - RNA, 19 nt, Artificial Sequence
  Description of Artificial Sequence: Synthetic oligonucleotide
aagcuagcguaucacaauc

SEQ ID NO: 1930831 - RNA, 19 nt, Artificial Sequence
  Description of Artificial Sequence: Synthetic oligonucleotide
auuagccagaauuugauau

SEQ ID NO: 1930832 - RNA, 19 nt, Artificial Sequence
  Description of Artificial Sequence: Synthetic oligonucleotide
auucggaagauagagcgcc

SEQ ID NO: 1930833 - RNA, 19 nt, Artificial Sequence
  Description of Artificial Sequence: Synthetic oligonucleotide
accaacaagggauacuaac

SEQ ID NO: 1930834 - RNA, 19 nt, Artificial Sequence
  Description of Artificial Sequence: Synthetic oligonucleotide
aauaagcuagcguaucaca

SEQ ID NO: 1930835 - RNA, 19 nt, Artificial Sequence
  Description of Artificial Sequence: Synthetic oligonucleotide
uaugcaaaucccacuaggc

SEQ ID NO: 1930836 - RNA, 19 nt, Artificial Sequence
  Description of Artificial Sequence: Synthetic oligonucleotide
cauaguuacacugucauuc

SEQ ID NO: 1930837 - RNA, 19 nt, Artificial Sequence
  Description of Artificial Sequence: Synthetic oligonucleotide
augaauguagcucacuugu

SEQ ID NO: 1930838 - RNA, 19 nt, Artificial Sequence
  Description of Artificial Sequence: Synthetic oligonucleotide
aacagucugccuuuugaag

SEQ ID NO: 1930839 - RNA, 19 nt, Artificial Sequence
  Description of Artificial Sequence: Synthetic oligonucleotide
aaucaacaaagaaugaacu

SEQ ID NO: 1930840 - RNA, 19 nt, Artificial Sequence
  Description of Artificial Sequence: Synthetic oligonucleotide
agaagauaaugugaggaac

SEQ ID NO: 1930841 - RNA, 19 nt, Artificial Sequence
  Description of Artificial Sequence: Synthetic oligonucleotide
aaucccacgaggcaaauua

SEQ ID NO: 1930842 - RNA, 19 nt, Artificial Sequence
  Description of Artificial Sequence: Synthetic oligonucleotide
aacugagccuggcugcucc

SEQ ID NO: 1930843 - RNA, 19 nt, Artificial Sequence
  Description of Artificial Sequence: Synthetic oligonucleotide
acacagagauaccauggcc

SEQ ID NO: 1930844 - RNA, 19 nt, Artificial Sequence
  Description of Artificial Sequence: Synthetic oligonucleotide
acuggaaaacacuuggaug

SEQ ID NO: 1930845 - RNA, 19 nt, Artificial Sequence
  Description of Artificial Sequence: Synthetic oligonucleotide
aaacacuuggauguuccac

SEQ ID NO: 1930846 - RNA, 19 nt, Artificial Sequence
  Description of Artificial Sequence: Synthetic oligonucleotide
ugaaggaaaaugcaugaau

SEQ ID NO: 1930847 - RNA, 19 nt, Artificial Sequence
  Description of Artificial Sequence: Synthetic oligonucleotide
auucauucggaagauagag

SEQ ID NO: 1930848 - RNA, 19 nt, Artificial Sequence
  Description of Artificial Sequence: Synthetic oligonucleotide
aagggauacuaacagucug

SEQ ID NO: 1930849 - RNA, 19 nt, Artificial Sequence
  Description of Artificial Sequence: Synthetic oligonucleotide
uuagauagagcaagccacc

SEQ ID NO: 1930850 - RNA, 19 nt, Artificial Sequence
  Description of Artificial Sequence: Synthetic oligonucleotide
cuugucgccauucauucgg

SEQ ID NO: 1930851 - RNA, 19 nt, Artificial Sequence
  Description of Artificial Sequence: Synthetic oligonucleotide
cacagagauaccauggccc

SEQ ID NO: 1930852 - RNA, 19 nt, Artificial Sequence
  Description of Artificial Sequence: Synthetic oligonucleotide
aacggaauauugaaaguag

SEQ ID NO: 1930853 - RNA, 19 nt, Artificial Sequence
  Description of Artificial Sequence: Synthetic oligonucleotide
acggauaugauuccacauc

SEQ ID NO: 1930854 - RNA, 19 nt, Artificial Sequence
  Description of Artificial Sequence: Synthetic oligonucleotide
gauaaugugaggaacagcu

SEQ ID NO: 1930855 - RNA, 19 nt, Artificial Sequence
  Description of Artificial Sequence: Synthetic oligonucleotide
auuguguggguucuuauga

SEQ ID NO: 1930856 - RNA, 19 nt, Artificial Sequence
  Description of Artificial Sequence: Synthetic oligonucleotide
agaaagcagaugaauaacg

SEQ ID NO: 1930857 - RNA, 19 nt, Artificial Sequence
  Description of Artificial Sequence: Synthetic oligonucleotide
auauugaaaguagaaaacu

SEQ ID NO: 1930858 - RNA, 19 nt, Artificial Sequence
  Description of Artificial Sequence: Synthetic oligonucleotide
agaccaccaggccuaaucc

SEQ ID NO: 1930859 - RNA, 19 nt, Artificial Sequence
  Description of Artificial Sequence: Synthetic oligonucleotide
auaacgaucauggaguagu

SEQ ID NO: 1930860 - RNA, 19 nt, Artificial Sequence
  Description of Artificial Sequence: Synthetic oligonucleotide
uacaagaauaagcuagcgu

SEQ ID NO: 1930861 - RNA, 19 nt, Artificial Sequence
  Description of Artificial Sequence: Synthetic oligonucleotide
aagaauaagcuagcguauc

SEQ ID NO: 1930862 - RNA, 19 nt, Artificial Sequence
  Description of Artificial Sequence: Synthetic oligonucleotide
acugagaauacuggaaaac

SEQ ID NO: 1930863 - RNA, 19 nt, Artificial Sequence
  Description of Artificial Sequence: Synthetic oligonucleotide
aagauaaugugaggaacag

SEQ ID NO: 1930864 - RNA, 19 nt, Artificial Sequence
  Description of Artificial Sequence: Synthetic oligonucleotide
uggaguaguuucgaggugg

SEQ ID NO: 1930865 - RNA, 19 nt, Artificial Sequence
  Description of Artificial Sequence: Synthetic oligonucleotide
uuagccugccugcaaacag

SEQ ID NO: 1930866 - RNA, 19 nt, Artificial Sequence
  Description of Artificial Sequence: Synthetic oligonucleotide
ugugggagcagaauucaug

SEQ ID NO: 1930867 - RNA, 19 nt, Artificial Sequence
  Description of Artificial Sequence: Synthetic oligonucleotide
agcauucaguaccagaaug

SEQ ID NO: 1930868 - RNA, 19 nt, Artificial Sequence
  Description of Artificial Sequence: Synthetic oligonucleotide
aaguuguuccuccuuagau

SEQ ID NO: 1930869 - RNA, 19 nt, Artificial Sequence
  Description of Artificial Sequence: Synthetic oligonucleotide
uuccuccuuagauagagca

SEQ ID NO: 1930870 - RNA, 19 nt, Artificial Sequence
  Description of Artificial Sequence: Synthetic oligonucleotide
aacaagggauacuaacagu

SEQ ID NO: 1930871 - RNA, 19 nt, Artificial Sequence
  Description of Artificial Sequence: Synthetic oligonucleotide
ugaaugugggagcagaauu

SEQ ID NO: 1930872 - RNA, 19 nt, Artificial Sequence
  Description of Artificial Sequence: Synthetic oligonucleotide
cuuuucagucaaaagguuc

SEQ ID NO: 1930873 - RNA, 19 nt, Artificial Sequence
  Description of Artificial Sequence: Synthetic oligonucleotide
uccacuguggauuacugaa

SEQ ID NO: 1930874 - RNA, 19 nt, Artificial Sequence
  Description of Artificial Sequence: Synthetic oligonucleotide
gaagauagagcgccuggag

SEQ ID NO: 1930875 - RNA, 19 nt, Artificial Sequence
  Description of Artificial Sequence: Synthetic oligonucleotide
ugucguugaggcuggagag

SEQ ID NO: 1930876 - RNA, 19 nt, Artificial Sequence
  Description of Artificial Sequence: Synthetic oligonucleotide
uucauucggaagauagagc

SEQ ID NO: 1930877 - RNA, 19 nt, Artificial Sequence
  Description of Artificial Sequence: Synthetic oligonucleotide
aaugucacauaugcacuuc

SEQ ID NO: 1930878 - RNA, 19 nt, Artificial Sequence
  Description of Artificial Sequence: Synthetic oligonucleotide
acuugcggaacuugucgcc

SEQ ID NO: 1930879 - RNA, 19 nt, Artificial Sequence
  Description of Artificial Sequence: Synthetic oligonucleotide
ucaucauaguccaccauuc

SEQ ID NO: 1930880 - RNA, 19 nt, Artificial Sequence
  Description of Artificial Sequence: Synthetic oligonucleotide
ugcagaaagcagaugaaua

SEQ ID NO: 1930881 - RNA, 19 nt, Artificial Sequence
  Description of Artificial Sequence: Synthetic oligonucleotide
uacuggaaaacacuuggau

SEQ ID NO: 1930882 - RNA, 19 nt, Artificial Sequence
  Description of Artificial Sequence: Synthetic oligonucleotide
acuuggauguuccacugug

SEQ ID NO: 1930883 - RNA, 19 nt, Artificial Sequence
  Description of Artificial Sequence: Synthetic oligonucleotide
agaauaagcuagcguauca

SEQ ID NO: 1930884 - RNA, 19 nt, Artificial Sequence
  Description of Artificial Sequence: Synthetic oligonucleotide
aucauaguccaccauucca

SEQ ID NO: 1930885 - RNA, 19 nt, Artificial Sequence
  Description of Artificial Sequence: Synthetic oligonucleotide
gaagauaaugugaggaaca

SEQ ID NO: 1930886 - RNA, 19 nt, Artificial Sequence
  Description of Artificial Sequence: Synthetic oligonucleotide
agauaaugugaggaacagc

SEQ ID NO: 1930887 - RNA, 19 nt, Artificial Sequence
  Description of Artificial Sequence: Synthetic oligonucleotide
gaugcagagcagcagcagc

SEQ ID NO: 1930888 - RNA, 19 nt, Artificial Sequence
  Description of Artificial Sequence: Synthetic oligonucleotide
agggauacuaacagucugc

SEQ ID NO: 1930889 - RNA, 19 nt, Artificial Sequence
  Description of Artificial Sequence: Synthetic oligonucleotide
aguaccagaaugaugugug

SEQ ID NO: 1930890 - RNA, 19 nt, Artificial Sequence
  Description of Artificial Sequence: Synthetic oligonucleotide
uucccaacauccccuuugg

SEQ ID NO: 1930891 - RNA, 19 nt, Artificial Sequence
  Description of Artificial Sequence: Synthetic oligonucleotide
gacgucauagcaaagacua

SEQ ID NO: 1930892 - RNA, 19 nt, Artificial Sequence
  Description of Artificial Sequence: Synthetic oligonucleotide
ugcaaaucccacuaggcuu

SEQ ID NO: 1930893 - RNA, 19 nt, Artificial Sequence
  Description of Artificial Sequence: Synthetic oligonucleotide
ugaacggaauauugaaagu

SEQ ID NO: 1930894 - RNA, 19 nt, Artificial Sequence
  Description of Artificial Sequence: Synthetic oligonucleotide
acucaagaauuccaaagaa

SEQ ID NO: 1930895 - RNA, 19 nt, Artificial Sequence
  Description of Artificial Sequence: Synthetic oligonucleotide
acuuuaugcaaaucccacu

SEQ ID NO: 1930896 - RNA, 19 nt, Artificial Sequence
  Description of Artificial Sequence: Synthetic oligonucleotide
uccaucaacuguuccaccu

SEQ ID NO: 1930897 - RNA, 19 nt, Artificial Sequence
  Description of Artificial Sequence: Synthetic oligonucleotide
aauuagccagaauuugaua

SEQ ID NO: 1930898 - RNA, 19 nt, Artificial Sequence
  Description of Artificial Sequence: Synthetic oligonucleotide
aaaacacuuggauguucca

SEQ ID NO: 1930899 - RNA, 19 nt, Artificial Sequence
  Description of Artificial Sequence: Synthetic oligonucleotide
uguuauagauaaacuccaa

SEQ ID NO: 1930900 - RNA, 19 nt, Artificial Sequence
  Description of Artificial Sequence: Synthetic oligonucleotide
agaugaauaacgccaggaa

SEQ ID NO: 1930901 - RNA, 19 nt, Artificial Sequence
  Description of Artificial Sequence: Synthetic oligonucleotide
auacacugagaauacugga

SEQ ID NO: 1930902 - RNA, 19 nt, Artificial Sequence
  Description of Artificial Sequence: Synthetic oligonucleotide
ugaacauaacgaucaugga

SEQ ID NO: 1930903 - RNA, 19 nt, Artificial Sequence
  Description of Artificial Sequence: Synthetic oligonucleotide
agaaugaugugugacucug

SEQ ID NO: 1930904 - RNA, 19 nt, Artificial Sequence
  Description of Artificial Sequence: Synthetic oligonucleotide
cuggaaaacacuuggaugu

SEQ ID NO: 1930905 - RNA, 19 nt, Artificial Sequence
  Description of Artificial Sequence: Synthetic oligonucleotide
auagccgugauacuuugaa

SEQ ID NO: 1930906 - RNA, 19 nt, Artificial Sequence
  Description of Artificial Sequence: Synthetic oligonucleotide
augcaaaucccacuaggcu

SEQ ID NO: 1930907 - RNA, 19 nt, Artificial Sequence
  Description of Artificial Sequence: Synthetic oligonucleotide
auacaagaauaagcuagcg

SEQ ID NO: 1930908 - RNA, 19 nt, Artificial Sequence
  Description of Artificial Sequence: Synthetic oligonucleotide
guuuguugcagaaagcaga

SEQ ID NO: 1930909 - RNA, 19 nt, Artificial Sequence
  Description of Artificial Sequence: Synthetic oligonucleotide
cucacuuguccauugugug

SEQ ID NO: 1930910 - RNA, 19 nt, Artificial Sequence
  Description of Artificial Sequence: Synthetic oligonucleotide
gugacucugccacaaacug

SEQ ID NO: 1930911 - RNA, 19 nt, Artificial Sequence
  Description of Artificial Sequence: Synthetic oligonucleotide
agcauauggugguccacgg

SEQ ID NO: 1930912 - RNA, 19 nt, Artificial Sequence
  Description of Artificial Sequence: Synthetic oligonucleotide
agguggggccuucacaaac

SEQ ID NO: 1930913 - RNA, 19 nt, Artificial Sequence
  Description of Artificial Sequence: Synthetic oligonucleotide
ucauuagccugccugcaaa

SEQ ID NO: 1930914 - RNA, 19 nt, Artificial Sequence
  Description of Artificial Sequence: Synthetic oligonucleotide
gauacuuugaacggaauau

SEQ ID NO: 1930915 - RNA, 19 nt, Artificial Sequence
  Description of Artificial Sequence: Synthetic oligonucleotide
uuccacaucuggccagacg

SEQ ID NO: 1930916 - RNA, 19 nt, Artificial Sequence
  Description of Artificial Sequence: Synthetic oligonucleotide
cauuguguggguucuuaug

SEQ ID NO: 1930917 - RNA, 19 nt, Artificial Sequence
  Description of Artificial Sequence: Synthetic oligonucleotide
gaauaagcuagcguaucac

SEQ ID NO: 1930918 - RNA, 19 nt, Artificial Sequence
  Description of Artificial Sequence: Synthetic oligonucleotide
uaagcuagcguaucacaau

SEQ ID NO: 1930919 - RNA, 19 nt, Artificial Sequence
  Description of Artificial Sequence: Synthetic oligonucleotide
agcuccauuccaucaacug

SEQ ID NO: 1930920 - RNA, 19 nt, Artificial Sequence
  Description of Artificial Sequence: Synthetic oligonucleotide
augaauaacgccaggaauu

SEQ ID NO: 1930921 - RNA, 19 nt, Artificial Sequence
  Description of Artificial Sequence: Synthetic oligonucleotide
aguuguuccuccuuagaua

SEQ ID NO: 1930922 - RNA, 19 nt, Artificial Sequence
  Description of Artificial Sequence: Synthetic oligonucleotide
cuagcguaucacaaucaac

SEQ ID NO: 1930923 - RNA, 19 nt, Artificial Sequence
  Description of Artificial Sequence: Synthetic oligonucleotide
gaugaauaacgccaggaau

SEQ ID NO: 1930924 - RNA, 19 nt, Artificial Sequence
  Description of Artificial Sequence: Synthetic oligonucleotide
guugcugcuucauuuagaa

SEQ ID NO: 1930925 - RNA, 19 nt, Artificial Sequence
  Description of Artificial Sequence: Synthetic oligonucleotide
gauaaacuccaaguuguuc

SEQ ID NO: 1930926 - RNA, 19 nt, Artificial Sequence
  Description of Artificial Sequence: Synthetic oligonucleotide
gucgccauucauucggaag

SEQ ID NO: 1930927 - RNA, 19 nt, Artificial Sequence
  Description of Artificial Sequence: Synthetic oligonucleotide
augauuccacaucuggcca

SEQ ID NO: 1930928 - RNA, 19 nt, Artificial Sequence
  Description of Artificial Sequence: Synthetic oligonucleotide
uccuuagauagagcaagcc

SEQ ID NO: 1930929 - RNA, 19 nt, Artificial Sequence
  Description of Artificial Sequence: Synthetic oligonucleotide
gaaugugggagcagaauuc

SEQ ID NO: 1930930 - RNA, 19 nt, Artificial Sequence
  Description of Artificial Sequence: Synthetic oligonucleotide
aguuuguugcagaaagcag

SEQ ID NO: 1930931 - RNA, 19 nt, Artificial Sequence
  Description of Artificial Sequence: Synthetic oligonucleotide
cuuuaugcaaaucccacua

SEQ ID NO: 1930932 - RNA, 19 nt, Artificial Sequence
  Description of Artificial Sequence: Synthetic oligonucleotide
cauucggaagauagagcgc

SEQ ID NO: 1930933 - RNA, 19 nt, Artificial Sequence
  Description of Artificial Sequence: Synthetic oligonucleotide
cagacgucauagcaaagac

SEQ ID NO: 1930934 - RNA, 19 nt, Artificial Sequence
  Description of Artificial Sequence: Synthetic oligonucleotide
guggcauacacugagaaua

SEQ ID NO: 1930935 - RNA, 19 nt, Artificial Sequence
  Description of Artificial Sequence: Synthetic oligonucleotide
ugaauaacgccaggaauua

SEQ ID NO: 1930936 - RNA, 19 nt, Artificial Sequence
  Description of Artificial Sequence: Synthetic oligonucleotide
caggccuaaucccacgagg

SEQ ID NO: 1930937 - RNA, 19 nt, Artificial Sequence
  Description of Artificial Sequence: Synthetic oligonucleotide
uccacggauaugauuccac

SEQ ID NO: 1930938 - RNA, 19 nt, Artificial Sequence
  Description of Artificial Sequence: Synthetic oligonucleotide
cuuuggaaguugcugcuuc

SEQ ID NO: 1930939 - RNA, 19 nt, Artificial Sequence
  Description of Artificial Sequence: Synthetic oligonucleotide
acuaggcuucauuuaauua

SEQ ID NO: 1930940 - RNA, 19 nt, Artificial Sequence
  Description of Artificial Sequence: Synthetic oligonucleotide
caucauaguccaccauucc

SEQ ID NO: 1930941 - RNA, 19 nt, Artificial Sequence
  Description of Artificial Sequence: Synthetic oligonucleotide
uagccagaauuugauauuc

SEQ ID NO: 1930942 - RNA, 19 nt, Artificial Sequence
  Description of Artificial Sequence: Synthetic oligonucleotide
agcagaugaauaacgccag

SEQ ID NO: 1930943 - RNA, 19 nt, Artificial Sequence
  Description of Artificial Sequence: Synthetic oligonucleotide
cugagaauacuggaaaaca

SEQ ID NO: 1930944 - RNA, 19 nt, Artificial Sequence
  Description of Artificial Sequence: Synthetic oligonucleotide
aagacuauacacagagaua

SEQ ID NO: 1930945 - RNA, 19 nt, Artificial Sequence
  Description of Artificial Sequence: Synthetic oligonucleotide
uuagaagaaccauccccau

SEQ ID NO: 1930946 - RNA, 19 nt, Artificial Sequence
  Description of Artificial Sequence: Synthetic oligonucleotide
cauggaguaguuucgaggu

SEQ ID NO: 1930947 - RNA, 19 nt, Artificial Sequence
  Description of Artificial Sequence: Synthetic oligonucleotide
aacacucacuuuaugcaaa

SEQ ID NO: 1930948 - RNA, 19 nt, Artificial Sequence
  Description of Artificial Sequence: Synthetic oligonucleotide
cuccuuagauagagcaagc

SEQ ID NO: 1930949 - RNA, 19 nt, Artificial Sequence
  Description of Artificial Sequence: Synthetic oligonucleotide
augucacauaugcacuucu

SEQ ID NO: 1930950 - RNA, 19 nt, Artificial Sequence
  Description of Artificial Sequence: Synthetic oligonucleotide
ucguugaggcuggagagca

SEQ ID NO: 1930951 - RNA, 19 nt, Artificial Sequence
  Description of Artificial Sequence: Synthetic oligonucleotide
uucauuagccugccugcaa

SEQ ID NO: 1930952 - RNA, 19 nt, Artificial Sequence
  Description of Artificial Sequence: Synthetic oligonucleotide
auagagcgccuggagcucc

SEQ ID NO: 1930953 - RNA, 19 nt, Artificial Sequence
  Description of Artificial Sequence: Synthetic oligonucleotide
agcucacuuguccauugug

SEQ ID NO: 1930954 - RNA, 19 nt, Artificial Sequence
  Description of Artificial Sequence: Synthetic oligonucleotide
uccgccccgagcuggaugc

SEQ ID NO: 1930955 - RNA, 19 nt, Artificial Sequence
  Description of Artificial Sequence: Synthetic oligonucleotide
auaagcuagcguaucacaa

SEQ ID NO: 1930956 - RNA, 19 nt, Artificial Sequence
  Description of Artificial Sequence: Synthetic oligonucleotide
uguuccacuguggauuacu

SEQ ID NO: 1930957 - RNA, 19 nt, Artificial Sequence
  Description of Artificial Sequence: Synthetic oligonucleotide
guagcucacuuguccauug

SEQ ID NO: 1930958 - RNA, 19 nt, Artificial Sequence
  Description of Artificial Sequence: Synthetic oligonucleotide
ggaauauugaaaguagaaa

SEQ ID NO: 1930959 - RNA, 19 nt, Artificial Sequence
  Description of Artificial Sequence: Synthetic oligonucleotide
uggagcuccauuccaucaa

SEQ ID NO: 1930960 - RNA, 19 nt, Artificial Sequence
  Description of Artificial Sequence: Synthetic oligonucleotide
gaccaccaggccuaauccc

SEQ ID NO: 1930961 - RNA, 19 nt, Artificial Sequence
  Description of Artificial Sequence: Synthetic oligonucleotide
uccccuuuggaaguugcug

SEQ ID NO: 1930962 - RNA, 19 nt, Artificial Sequence
  Description of Artificial Sequence: Synthetic oligonucleotide
gccgugauacuuugaacgg

SEQ ID NO: 1930963 - RNA, 19 nt, Artificial Sequence
  Description of Artificial Sequence: Synthetic oligonucleotide
aucugucccuucaucauag

SEQ ID NO: 1930964 - RNA, 19 nt, Artificial Sequence
  Description of Artificial Sequence: Synthetic oligonucleotide
ugucacauaugcacuucua

SEQ ID NO: 1930965 - RNA, 19 nt, Artificial Sequence
  Description of Artificial Sequence: Synthetic oligonucleotide
ucacuccuguggcauacac

SEQ ID NO: 1930966 - RNA, 19 nt, Artificial Sequence
  Description of Artificial Sequence: Synthetic oligonucleotide
aggaaaggaagcugccagu

SEQ ID NO: 1930967 - RNA, 19 nt, Artificial Sequence
  Description of Artificial Sequence: Synthetic oligonucleotide
agcguaucacaaucaacaa

SEQ ID NO: 1930968 - RNA, 19 nt, Artificial Sequence
  Description of Artificial Sequence: Synthetic oligonucleotide
uauggauagccgugauacu

SEQ ID NO: 1930969 - RNA, 19 nt, Artificial Sequence
  Description of Artificial Sequence: Synthetic oligonucleotide
auaugcacuucuauaaauu

SEQ ID NO: 1930970 - RNA, 19 nt, Artificial Sequence
  Description of Artificial Sequence: Synthetic oligonucleotide
uugaaggaaaaugcaugaa

SEQ ID NO: 1930971 - RNA, 19 nt, Artificial Sequence
  Description of Artificial Sequence: Synthetic oligonucleotide
uaacgccaggaauuagcca

SEQ ID NO: 1930972 - RNA, 19 nt, Artificial Sequence
  Description of Artificial Sequence: Synthetic oligonucleotide
gaauaacgccaggaauuag

SEQ ID NO: 1930973 - RNA, 19 nt, Artificial Sequence
  Description of Artificial Sequence: Synthetic oligonucleotide
acgaggcaaauuauucuuc

SEQ ID NO: 1930974 - RNA, 19 nt, Artificial Sequence
  Description of Artificial Sequence: Synthetic oligonucleotide
cauucauucggaagauaga

SEQ ID NO: 1930975 - RNA, 19 nt, Artificial Sequence
  Description of Artificial Sequence: Synthetic oligonucleotide
uuucacuccuguggcauac

SEQ ID NO: 1930976 - RNA, 19 nt, Artificial Sequence
  Description of Artificial Sequence: Synthetic oligonucleotide
aucccacuaggcuucauuu

SEQ ID NO: 1930977 - RNA, 19 nt, Artificial Sequence
  Description of Artificial Sequence: Synthetic oligonucleotide
cauuagccugccugcaaac

SEQ ID NO: 1930978 - RNA, 19 nt, Artificial Sequence
  Description of Artificial Sequence: Synthetic oligonucleotide
ccagucuuguuauagauaa

SEQ ID NO: 1930979 - RNA, 19 nt, Artificial Sequence
  Description of Artificial Sequence: Synthetic oligonucleotide
guagaaaacugaagaagaa

SEQ ID NO: 1930980 - RNA, 19 nt, Artificial Sequence
  Description of Artificial Sequence: Synthetic oligonucleotide
cuucacaaacuugcggaac

SEQ ID NO: 1930981 - RNA, 19 nt, Artificial Sequence
  Description of Artificial Sequence: Synthetic oligonucleotide
gaaugaugugugacucugc

SEQ ID NO: 1930982 - RNA, 19 nt, Artificial Sequence
  Description of Artificial Sequence: Synthetic oligonucleotide
cuguuccaccuuuucaguc

SEQ ID NO: 1930983 - RNA, 19 nt, Artificial Sequence
  Description of Artificial Sequence: Synthetic oligonucleotide
uaccauggcccaaccaguc

SEQ ID NO: 1930984 - RNA, 19 nt, Artificial Sequence
  Description of Artificial Sequence: Synthetic oligonucleotide
auggaguaguuucgaggug

SEQ ID NO: 1930985 - RNA, 19 nt, Artificial Sequence
  Description of Artificial Sequence: Synthetic oligonucleotide
uagccgugauacuuugaac

SEQ ID NO: 1930986 - RNA, 19 nt, Artificial Sequence
  Description of Artificial Sequence: Synthetic oligonucleotide
uguccauuguguggguucu

SEQ ID NO: 1930987 - RNA, 19 nt, Artificial Sequence
  Description of Artificial Sequence: Synthetic oligonucleotide
ccugccugcaaacagagca

SEQ ID NO: 1930988 - RNA, 19 nt, Artificial Sequence
  Description of Artificial Sequence: Synthetic oligonucleotide
cuggccagacgucauagca

SEQ ID NO: 1930989 - RNA, 19 nt, Artificial Sequence
  Description of Artificial Sequence: Synthetic oligonucleotide
ucuggccagacgucauagc

SEQ ID NO: 1930990 - RNA, 19 nt, Artificial Sequence
  Description of Artificial Sequence: Synthetic oligonucleotide
gauguuccacuguggauua

SEQ ID NO: 1930991 - RNA, 19 nt, Artificial Sequence
  Description of Artificial Sequence: Synthetic oligonucleotide
acauaacgaucauggagua

SEQ ID NO: 1930992 - RNA, 19 nt, Artificial Sequence
  Description of Artificial Sequence: Synthetic oligonucleotide
cauaacgaucauggaguag

SEQ ID NO: 1930993 - RNA, 19 nt, Artificial Sequence
  Description of Artificial Sequence: Synthetic oligonucleotide
auacuuugaacggaauauu

SEQ ID NO: 1930994 - RNA, 19 nt, Artificial Sequence
  Description of Artificial Sequence: Synthetic oligonucleotide
acggaauauugaaaguaga

SEQ ID NO: 1930995 - RNA, 19 nt, Artificial Sequence
  Description of Artificial Sequence: Synthetic oligonucleotide
gaauuagccagaauuugau

SEQ ID NO: 1930996 - RNA, 19 nt, Artificial Sequence
  Description of Artificial Sequence: Synthetic oligonucleotide
uucggaagauagagcgccu

SEQ ID NO: 1930997 - RNA, 19 nt, Artificial Sequence
  Description of Artificial Sequence: Synthetic oligonucleotide
ugccagugggcagguagcg

SEQ ID NO: 1930998 - RNA, 19 nt, Artificial Sequence
  Description of Artificial Sequence: Synthetic oligonucleotide
cagaugaauaacgccagga

SEQ ID NO: 1930999 - RNA, 19 nt, Artificial Sequence
  Description of Artificial Sequence: Synthetic oligonucleotide
ccaacaagggauacuaaca

SEQ ID NO: 1931000 - RNA, 19 nt, Artificial Sequence
  Description of Artificial Sequence: Synthetic oligonucleotide
ucggaagauagagcgccug

SEQ ID NO: 1931001 - RNA, 19 nt, Artificial Sequence
  Description of Artificial Sequence: Synthetic oligonucleotide
cugccagugggcagguagc

SEQ ID NO: 1931002 - RNA, 19 nt, Artificial Sequence
  Description of Artificial Sequence: Synthetic oligonucleotide
uugucgccauucauucgga

SEQ ID NO: 1931003 - RNA, 19 nt, Artificial Sequence
  Description of Artificial Sequence: Synthetic oligonucleotide
ucccacgaggcaaauuauu

SEQ ID NO: 1931004 - RNA, 19 nt, Artificial Sequence
  Description of Artificial Sequence: Synthetic oligonucleotide
auuagccugccugcaaaca

SEQ ID NO: 1931005 - RNA, 19 nt, Artificial Sequence
  Description of Artificial Sequence: Synthetic oligonucleotide
agacgucauagcaaagacu

SEQ ID NO: 1931006 - RNA, 19 nt, Artificial Sequence
  Description of Artificial Sequence: Synthetic oligonucleotide
ugcaugaaugugggagcag

SEQ ID NO: 1931007 - RNA, 19 nt, Artificial Sequence
  Description of Artificial Sequence: Synthetic oligonucleotide
gaguaguuucgaggugggg

SEQ ID NO: 1931008 - RNA, 19 nt, Artificial Sequence
  Description of Artificial Sequence: Synthetic oligonucleotide
augcacuucuauaaauuaa

SEQ ID NO: 1931009 - RNA, 19 nt, Artificial Sequence
  Description of Artificial Sequence: Synthetic oligonucleotide
ugauggcagcauucaguac

SEQ ID NO: 1931010 - RNA, 19 nt, Artificial Sequence
  Description of Artificial Sequence: Synthetic oligonucleotide
gggauacuaacagucugcc

SEQ ID NO: 1931011 - RNA, 19 nt, Artificial Sequence
  Description of Artificial Sequence: Synthetic oligonucleotide
auacuggaaaacacuugga

SEQ ID NO: 1931012 - RNA, 19 nt, Artificial Sequence
  Description of Artificial Sequence: Synthetic oligonucleotide
aacgaucauggaguaguuu

SEQ ID NO: 1931013 - RNA, 19 nt, Artificial Sequence
  Description of Artificial Sequence: Synthetic oligonucleotide
gaaugucacauaugcacuu

SEQ ID NO: 1931014 - RNA, 19 nt, Artificial Sequence
  Description of Artificial Sequence: Synthetic oligonucleotide
ccaaccagucuuguuauag

SEQ ID NO: 1931015 - RNA, 19 nt, Artificial Sequence
  Description of Artificial Sequence: Synthetic oligonucleotide
caaccagucuuguuauaga

SEQ ID NO: 1931016 - RNA, 19 nt, Artificial Sequence
  Description of Artificial Sequence: Synthetic oligonucleotide
uagcucacuuguccauugu

SEQ ID NO: 1931017 - RNA, 19 nt, Artificial Sequence
  Description of Artificial Sequence: Synthetic oligonucleotide
gcagaugaauaacgccagg

SEQ ID NO: 1931018 - RNA, 19 nt, Artificial Sequence
  Description of Artificial Sequence: Synthetic oligonucleotide
uuguuccuccuuagauaga

SEQ ID NO: 1931019 - RNA, 19 nt, Artificial Sequence
  Description of Artificial Sequence: Synthetic oligonucleotide
augaaugugggagcagaau

SEQ ID NO: 1931020 - RNA, 19 nt, Artificial Sequence
  Description of Artificial Sequence: Synthetic oligonucleotide
cauauggugguccacggau

SEQ ID NO: 1931021 - RNA, 19 nt, Artificial Sequence
  Description of Artificial Sequence: Synthetic oligonucleotide
ugugugacucugccacaaa

SEQ ID NO: 1931022 - RNA, 19 nt, Artificial Sequence
  Description of Artificial Sequence: Synthetic oligonucleotide
ugcucccaugaauguagcu

SEQ ID NO: 1931023 - RNA, 19 nt, Artificial Sequence
  Description of Artificial Sequence: Synthetic oligonucleotide
ucccacuaggcuucauuua

SEQ ID NO: 1931024 - RNA, 19 nt, Artificial Sequence
  Description of Artificial Sequence: Synthetic oligonucleotide
ccuuagauagagcaagcca

SEQ ID NO: 1931025 - RNA, 19 nt, Artificial Sequence
  Description of Artificial Sequence: Synthetic oligonucleotide
accaccaggccuaauccca

SEQ ID NO: 1931026 - RNA, 19 nt, Artificial Sequence
  Description of Artificial Sequence: Synthetic oligonucleotide
uguagcucacuuguccauu

SEQ ID NO: 1931027 - RNA, 19 nt, Artificial Sequence
  Description of Artificial Sequence: Synthetic oligonucleotide
ggauagccgugauacuuug

SEQ ID NO: 1931028 - RNA, 19 nt, Artificial Sequence
  Description of Artificial Sequence: Synthetic oligonucleotide
caaguuguuccuccuuaga

SEQ ID NO: 1931029 - RNA, 19 nt, Artificial Sequence
  Description of Artificial Sequence: Synthetic oligonucleotide
cccacgaggcaaauuauuc

SEQ ID NO: 1931030 - RNA, 19 nt, Artificial Sequence
  Description of Artificial Sequence: Synthetic oligonucleotide
uucuucuguccgccccgag

SEQ ID NO: 1931031 - RNA, 19 nt, Artificial Sequence
  Description of Artificial Sequence: Synthetic oligonucleotide
caagaauaagcuagcguau

SEQ ID NO: 1931032 - RNA, 19 nt, Artificial Sequence
  Description of Artificial Sequence: Synthetic oligonucleotide
guaccagaaugauguguga

SEQ ID NO: 1931033 - RNA, 19 nt, Artificial Sequence
  Description of Artificial Sequence: Synthetic oligonucleotide
uccauuguguggguucuua

SEQ ID NO: 1931034 - RNA, 19 nt, Artificial Sequence
  Description of Artificial Sequence: Synthetic oligonucleotide
cauaguccaccauuccaaa

SEQ ID NO: 1931035 - RNA, 19 nt, Artificial Sequence
  Description of Artificial Sequence: Synthetic oligonucleotide
cuggagcuccauuccauca

SEQ ID NO: 1931036 - RNA, 19 nt, Artificial Sequence
  Description of Artificial Sequence: Synthetic oligonucleotide
gucacauaugcacuucuau

SEQ ID NO: 1931037 - RNA, 19 nt, Artificial Sequence
  Description of Artificial Sequence: Synthetic oligonucleotide
ucccaacauccccuuugga

SEQ ID NO: 1931038 - RNA, 19 nt, Artificial Sequence
  Description of Artificial Sequence: Synthetic oligonucleotide
cugcucccaugaauguagc

SEQ ID NO: 1931039 - RNA, 19 nt, Artificial Sequence
  Description of Artificial Sequence: Synthetic oligonucleotide
gcauucaguaccagaauga

SEQ ID NO: 1931040 - RNA, 19 nt, Artificial Sequence
  Description of Artificial Sequence: Synthetic oligonucleotide
ccaaguuguuccuccuuag

SEQ ID NO: 1931041 - RNA, 19 nt, Artificial Sequence
  Description of Artificial Sequence: Synthetic oligonucleotide
gauagagcgccuggagcuc

SEQ ID NO: 1931042 - RNA, 19 nt, Artificial Sequence
  Description of Artificial Sequence: Synthetic oligonucleotide
guugcagaaagcagaugaa

SEQ ID NO: 1931043 - RNA, 19 nt, Artificial Sequence
  Description of Artificial Sequence: Synthetic oligonucleotide
ggaguaguuucgagguggg

SEQ ID NO: 1931044 - RNA, 19 nt, Artificial Sequence
  Description of Artificial Sequence: Synthetic oligonucleotide
gucuuguuauagauaaacu

SEQ ID NO: 1931045 - RNA, 19 nt, Artificial Sequence
  Description of Artificial Sequence: Synthetic oligonucleotide
aggaaaacccacaguuuaa

SEQ ID NO: 1931046 - RNA, 19 nt, Artificial Sequence
  Description of Artificial Sequence: Synthetic oligonucleotide
agccaccaacaagggauac

SEQ ID NO: 1931047 - RNA, 19 nt, Artificial Sequence
  Description of Artificial Sequence: Synthetic oligonucleotide
gcucccaugaauguagcuc

SEQ ID NO: 1931048 - RNA, 19 nt, Artificial Sequence
  Description of Artificial Sequence: Synthetic oligonucleotide
uucuguccgccccgagcug

SEQ ID NO: 1931049 - RNA, 19 nt, Artificial Sequence
  Description of Artificial Sequence: Synthetic oligonucleotide
aggcuggagagcagugaac

SEQ ID NO: 1931050 - RNA, 19 nt, Artificial Sequence
  Description of Artificial Sequence: Synthetic oligonucleotide
ugucgccauucauucggaa

SEQ ID NO: 1931051 - RNA, 19 nt, Artificial Sequence
  Description of Artificial Sequence: Synthetic oligonucleotide
uggaaaacacuuggauguu

SEQ ID NO: 1931052 - RNA, 19 nt, Artificial Sequence
  Description of Artificial Sequence: Synthetic oligonucleotide
agcuagcguaucacaauca

SEQ ID NO: 1931053 - RNA, 19 nt, Artificial Sequence
  Description of Artificial Sequence: Synthetic oligonucleotide
cuucauuuagaagaaccau

SEQ ID NO: 1931054 - RNA, 19 nt, Artificial Sequence
  Description of Artificial Sequence: Synthetic oligonucleotide
uuucuucuguccgccccga

SEQ ID NO: 1931055 - RNA, 19 nt, Artificial Sequence
  Description of Artificial Sequence: Synthetic oligonucleotide
augugugacucugccacaa

SEQ ID NO: 1931056 - RNA, 19 nt, Artificial Sequence
  Description of Artificial Sequence: Synthetic oligonucleotide
ggcccaaccagucuuguua

SEQ ID NO: 1931057 - RNA, 19 nt, Artificial Sequence
  Description of Artificial Sequence: Synthetic oligonucleotide
gcuagcguaucacaaucaa

SEQ ID NO: 1931058 - RNA, 19 nt, Artificial Sequence
  Description of Artificial Sequence: Synthetic oligonucleotide
ggauaugauuccacaucug

SEQ ID NO: 1931059 - RNA, 19 nt, Artificial Sequence
  Description of Artificial Sequence: Synthetic oligonucleotide
cacaucuggccagacguca

SEQ ID NO: 1931060 - RNA, 19 nt, Artificial Sequence
  Description of Artificial Sequence: Synthetic oligonucleotide
aaccauccccauggugaug

SEQ ID NO: 1931061 - RNA, 19 nt, Artificial Sequence
  Description of Artificial Sequence: Synthetic oligonucleotide
cacgaggcaaauuauucuu

SEQ ID NO: 1931062 - RNA, 19 nt, Artificial Sequence
  Description of Artificial Sequence: Synthetic oligonucleotide
gcguaucacaaucaacaaa

SEQ ID NO: 1931063 - RNA, 19 nt, Artificial Sequence
  Description of Artificial Sequence: Synthetic oligonucleotide
ccgagcuggaugcagagca

SEQ ID NO: 1931064 - RNA, 19 nt, Artificial Sequence
  Description of Artificial Sequence: Synthetic oligonucleotide
ggccagacgucauagcaaa

SEQ ID NO: 1931065 - RNA, 19 nt, Artificial Sequence
  Description of Artificial Sequence: Synthetic oligonucleotide
ggaaaacacuuggauguuc

SEQ ID NO: 1931066 - RNA, 19 nt, Artificial Sequence
  Description of Artificial Sequence: Synthetic oligonucleotide
cuucauuagccugccugca

SEQ ID NO: 1931067 - RNA, 19 nt, Artificial Sequence
  Description of Artificial Sequence: Synthetic oligonucleotide
uaguuucgagguggggccu

SEQ ID NO: 1931068 - RNA, 19 nt, Artificial Sequence
  Description of Artificial Sequence: Synthetic oligonucleotide
aagccaccaacaagggaua

SEQ ID NO: 1931069 - RNA, 19 nt, Artificial Sequence
  Description of Artificial Sequence: Synthetic oligonucleotide
cccaacauccccuuuggaa

SEQ ID NO: 1931070 - RNA, 19 nt, Artificial Sequence
  Description of Artificial Sequence: Synthetic oligonucleotide
gcaugaaugugggagcaga

SEQ ID NO: 1931071 - RNA, 19 nt, Artificial Sequence
  Description of Artificial Sequence: Synthetic oligonucleotide
ggauuacugaaugucacau

SEQ ID NO: 1931072 - RNA, 19 nt, Artificial Sequence
  Description of Artificial Sequence: Synthetic oligonucleotide
caacauccccuuuggaagu

SEQ ID NO: 1931073 - RNA, 19 nt, Artificial Sequence
  Description of Artificial Sequence: Synthetic oligonucleotide
uaaucccacgaggcaaauu

SEQ ID NO: 1931074 - RNA, 19 nt, Artificial Sequence
  Description of Artificial Sequence: Synthetic oligonucleotide
cacggauaugauuccacau

SEQ ID NO: 1931075 - RNA, 19 nt, Artificial Sequence
  Description of Artificial Sequence: Synthetic oligonucleotide
uuccaccuuuucagucaaa

SEQ ID NO: 1931076 - RNA, 19 nt, Artificial Sequence
  Description of Artificial Sequence: Synthetic oligonucleotide
cauucaguaccagaaugau

SEQ ID NO: 1931077 - RNA, 19 nt, Artificial Sequence
  Description of Artificial Sequence: Synthetic oligonucleotide
cggaagauagagcgccugg

SEQ ID NO: 1931078 - RNA, 19 nt, Artificial Sequence
  Description of Artificial Sequence: Synthetic oligonucleotide
cagaaugaugugugacucu

SEQ ID NO: 1931079 - RNA, 19 nt, Artificial Sequence
  Description of Artificial Sequence: Synthetic oligonucleotide
ccagacgucauagcaaaga

SEQ ID NO: 1931080 - RNA, 19 nt, Artificial Sequence
  Description of Artificial Sequence: Synthetic oligonucleotide
cacuaggcuucauuuaauu

SEQ ID NO: 1931081 - RNA, 19 nt, Artificial Sequence
  Description of Artificial Sequence: Synthetic oligonucleotide
ggccuaaucccacgaggca

SEQ ID NO: 1931082 - RNA, 19 nt, Artificial Sequence
  Description of Artificial Sequence: Synthetic oligonucleotide
guccgccccgagcuggaug

SEQ ID NO: 1931083 - RNA, 19 nt, Artificial Sequence
  Description of Artificial Sequence: Synthetic oligonucleotide
cgugauacuuugaacggaa

SEQ ID NO: 1931084 - RNA, 19 nt, Artificial Sequence
  Description of Artificial Sequence: Synthetic oligonucleotide
agucugccuuuugaaggaa

SEQ ID NO: 1931085 - RNA, 19 nt, Artificial Sequence
  Description of Artificial Sequence: Synthetic oligonucleotide
aucccacgaggcaaauuau

SEQ ID NO: 1931086 - RNA, 19 nt, Artificial Sequence
  Description of Artificial Sequence: Synthetic oligonucleotide
ccacggauaugauuccaca

SEQ ID NO: 1931087 - RNA, 19 nt, Artificial Sequence
  Description of Artificial Sequence: Synthetic oligonucleotide
gcauauggugguccacgga

SEQ ID NO: 1931088 - RNA, 19 nt, Artificial Sequence
  Description of Artificial Sequence: Synthetic oligonucleotide
caccaacaagggauacuaa

SEQ ID NO: 1931089 - RNA, 19 nt, Artificial Sequence
  Description of Artificial Sequence: Synthetic oligonucleotide
ccaggccuaaucccacgag

SEQ ID NO: 1931090 - RNA, 19 nt, Artificial Sequence
  Description of Artificial Sequence: Synthetic oligonucleotide
auggcccaaccagucuugu

SEQ ID NO: 1931091 - RNA, 19 nt, Artificial Sequence
  Description of Artificial Sequence: Synthetic oligonucleotide
acgucauagcaaagacuau

SEQ ID NO: 1931092 - RNA, 19 nt, Artificial Sequence
  Description of Artificial Sequence: Synthetic oligonucleotide
uggcccaaccagucuuguu

SEQ ID NO: 1931093 - RNA, 19 nt, Artificial Sequence
  Description of Artificial Sequence: Synthetic oligonucleotide
gccuaaucccacgaggcaa

SEQ ID NO: 1931094 - RNA, 19 nt, Artificial Sequence
  Description of Artificial Sequence: Synthetic oligonucleotide
augugggagcagaauucau

SEQ ID NO: 1931095 - RNA, 19 nt, Artificial Sequence
  Description of Artificial Sequence: Synthetic oligonucleotide
ccuaaucccacgaggcaaa

SEQ ID NO: 1931096 - RNA, 19 nt, Artificial Sequence
  Description of Artificial Sequence: Synthetic oligonucleotide
acgccaggaauuagccaga

SEQ ID NO: 1931097 - RNA, 19 nt, Artificial Sequence
  Description of Artificial Sequence: Synthetic oligonucleotide
gcgccuggagcuccauucc

SEQ ID NO: 1931098 - RNA, 19 nt, Artificial Sequence
  Description of Artificial Sequence: Synthetic oligonucleotide
ggauacuaacagucugccu

SEQ ID NO: 1931099 - RNA, 19 nt, Artificial Sequence
  Description of Artificial Sequence: Synthetic oligonucleotide
gcacugucguugaggcugg

SEQ ID NO: 1931100 - RNA, 19 nt, Artificial Sequence
  Description of Artificial Sequence: Synthetic oligonucleotide
ccuucacaaacuugcggaa

SEQ ID NO: 1931101 - RNA, 19 nt, Artificial Sequence
  Description of Artificial Sequence: Synthetic oligonucleotide
ccaccaacaagggauacua

SEQ ID NO: 1931102 - RNA, 19 nt, Artificial Sequence
  Description of Artificial Sequence: Synthetic oligonucleotide
gcacuucuauaaauuaagu

SEQ ID NO: 1931103 - RNA, 19 nt, Artificial Sequence
  Description of Artificial Sequence: Synthetic oligonucleotide
ggcgccugccugcuccugc

SEQ ID NO: 1931104 - RNA, 19 nt, Artificial Sequence
  Description of Artificial Sequence: Synthetic oligonucleotide
aguuucgagguggggccuu

SEQ ID NO: 1931105 - RNA, 19 nt, Artificial Sequence
  Description of Artificial Sequence: Synthetic oligonucleotide
caaacagagcacugucguu

SEQ ID NO: 1931106 - RNA, 19 nt, Artificial Sequence
  Description of Artificial Sequence: Synthetic oligonucleotide
cggauaugauuccacaucu

SEQ ID NO: 1931107 - RNA, 19 nt, Artificial Sequence
  Description of Artificial Sequence: Synthetic oligonucleotide
gugguccacggauaugauu

SEQ ID NO: 1931108 - RNA, 19 nt, Artificial Sequence
  Description of Artificial Sequence: Synthetic oligonucleotide
ccacgaggcaaauuauucu

SEQ ID NO: 1931109 - RNA, 19 nt, Artificial Sequence
  Description of Artificial Sequence: Synthetic oligonucleotide
gagcacugucguugaggcu

SEQ ID NO: 1931110 - RNA, 19 nt, Artificial Sequence
  Description of Artificial Sequence: Synthetic oligonucleotide
ccacaucuggccagacguc

SEQ ID NO: 1931111 - RNA, 19 nt, Artificial Sequence
  Description of Artificial Sequence: Synthetic oligonucleotide
gccugcaaacagagcacug

SEQ ID NO: 1931112 - RNA, 19 nt, Artificial Sequence
  Description of Artificial Sequence: Synthetic oligonucleotide
ccccgagcuggaugcagag

SEQ ID NO: 1931113 - RNA, 19 nt, Artificial Sequence
  Description of Artificial Sequence: Synthetic oligonucleotide
cacuuggauguuccacugu

SEQ ID NO: 1931114 - RNA, 19 nt, Artificial Sequence
  Description of Artificial Sequence: Synthetic oligonucleotide
gccagacgucauagcaaag

SEQ ID NO: 1931115 - RNA, 19 nt, Artificial Sequence
  Description of Artificial Sequence: Synthetic oligonucleotide
gugauacuuugaacggaau

SEQ ID NO: 1931116 - RNA, 19 nt, Artificial Sequence
  Description of Artificial Sequence: Synthetic oligonucleotide
guagcgcagccggcgccug

SEQ ID NO: 1931117 - RNA, 19 nt, Artificial Sequence
  Description of Artificial Sequence: Synthetic oligonucleotide
cagugaacauaacgaucau

SEQ ID NO: 1931118 - RNA, 19 nt, Artificial Sequence
  Description of Artificial Sequence: Synthetic oligonucleotide
ccgugauacuuugaacgga

SEQ ID NO: 1931119 - RNA, 19 nt, Artificial Sequence
  Description of Artificial Sequence: Synthetic oligonucleotide
cuguccgccccgagcugga

SEQ ID NO: 1931120 - RNA, 19 nt, Artificial Sequence
  Description of Artificial Sequence: Synthetic oligonucleotide
ccugcaaacagagcacugu

SEQ ID NO: 1931121 - RNA, 19 nt, Artificial Sequence
  Description of Artificial Sequence: Synthetic oligonucleotide
gcccaaccagucuuguuau

SEQ ID NO: 1931122 - RNA, 19 nt, Artificial Sequence
  Description of Artificial Sequence: Synthetic oligonucleotide
ggcauacacugagaauacu

SEQ ID NO: 1931123 - RNA, 19 nt, Artificial Sequence
  Description of Artificial Sequence: Synthetic oligonucleotide
cguugaggcuggagagcag

SEQ ID NO: 1931124 - RNA, 19 nt, Artificial Sequence
  Description of Artificial Sequence: Synthetic oligonucleotide
uguccgccccgagcuggau

SEQ ID NO: 1931125 - RNA, 19 nt, Artificial Sequence
  Description of Artificial Sequence: Synthetic oligonucleotide
cuaaucccacgaggcaaau

SEQ ID NO: 1931126 - RNA, 19 nt, Artificial Sequence
  Description of Artificial Sequence: Synthetic oligonucleotide
gccauucauucggaagaua

SEQ ID NO: 1931127 - RNA, 19 nt, Artificial Sequence
  Description of Artificial Sequence: Synthetic oligonucleotide
ccacaaacugagccuggcu

SEQ ID NO: 1931128 - RNA, 19 nt, Artificial Sequence
  Description of Artificial Sequence: Synthetic oligonucleotide
ccuggcugcucccaugaau

SEQ ID NO: 1931129 - RNA, 19 nt, Artificial Sequence
  Description of Artificial Sequence: Synthetic oligonucleotide
ccauuguguggguucuuau

SEQ ID NO: 1931130 - RNA, 19 nt, Artificial Sequence
  Description of Artificial Sequence: Synthetic oligonucleotide
gccccgagcuggaugcaga

SEQ ID NO: 1931131 - RNA, 19 nt, Artificial Sequence
  Description of Artificial Sequence: Synthetic oligonucleotide
ccacuaggcuucauuuaau

SEQ ID NO: 1931132 - RNA, 19 nt, Artificial Sequence
  Description of Artificial Sequence: Synthetic oligonucleotide
ggugguccacggauaugau

SEQ ID NO: 1931133 - RNA, 19 nt, Artificial Sequence
  Description of Artificial Sequence: Synthetic oligonucleotide
cccaugaauguagcucacu

SEQ ID NO: 1931134 - RNA, 19 nt, Artificial Sequence
  Description of Artificial Sequence: Synthetic oligonucleotide
cacugucguugaggcugga

SEQ ID NO: 1931135 - RNA, 19 nt, Artificial Sequence
  Description of Artificial Sequence: Synthetic oligonucleotide
guccauuguguggguucuu

SEQ ID NO: 1931136 - RNA, 19 nt, Artificial Sequence
  Description of Artificial Sequence: Synthetic oligonucleotide
cagccggcgccugccugcu

SEQ ID NO: 1931137 - RNA, 19 nt, Artificial Sequence
  Description of Artificial Sequence: Synthetic oligonucleotide
cgccauucauucggaagau

SEQ ID NO: 1931138 - RNA, 19 nt, Artificial Sequence
  Description of Artificial Sequence: Synthetic oligonucleotide
ccgccccgagcuggaugca

SEQ ID NO: 1931139 - RNA, 19 nt, Artificial Sequence
  Description of Artificial Sequence: Synthetic oligonucleotide
acugagaauacucagaccc

SEQ ID NO: 1931140 - RNA, 19 nt, Artificial Sequence
  Description of Artificial Sequence: Synthetic oligonucleotide
uuuuaaacagcuacaaagg

SEQ ID NO: 1931141 - RNA, 19 nt, Artificial Sequence
  Description of Artificial Sequence: Synthetic oligonucleotide
uuaacuaaagguuccaagg

SEQ ID NO: 1931142 - RNA, 19 nt, Artificial Sequence
  Description of Artificial Sequence: Synthetic oligonucleotide
aaaguuuucucagaggaac

SEQ ID NO: 1931143 - RNA, 19 nt, Artificial Sequence
  Description of Artificial Sequence: Synthetic oligonucleotide
uaguuuaucaguuuuaaac

SEQ ID NO: 1931144 - RNA, 19 nt, Artificial Sequence
  Description of Artificial Sequence: Synthetic oligonucleotide
uuuaaacagcuacaaaggg

SEQ ID NO: 1931145 - RNA, 19 nt, Artificial Sequence
  Description of Artificial Sequence: Synthetic oligonucleotide
uuccaaaaggcacacaggg

SEQ ID NO: 1931146 - RNA, 19 nt, Artificial Sequence
  Description of Artificial Sequence: Synthetic oligonucleotide
ucuauuaaaagaauucuaa

SEQ ID NO: 1931147 - RNA, 19 nt, Artificial Sequence
  Description of Artificial Sequence: Synthetic oligonucleotide
aauguuaacuaaagguucc

SEQ ID NO: 1931148 - RNA, 19 nt, Artificial Sequence
  Description of Artificial Sequence: Synthetic oligonucleotide
uuaucuauuaaaagaauuc

SEQ ID NO: 1931149 - RNA, 19 nt, Artificial Sequence
  Description of Artificial Sequence: Synthetic oligonucleotide
ugcucaucaaaauaagacg

SEQ ID NO: 1931150 - RNA, 19 nt, Artificial Sequence
  Description of Artificial Sequence: Synthetic oligonucleotide
uuaaagagugaucugcugc

SEQ ID NO: 1931151 - RNA, 19 nt, Artificial Sequence
  Description of Artificial Sequence: Synthetic oligonucleotide
gaauuugucuuacuuagcc

SEQ ID NO: 1931152 - RNA, 19 nt, Artificial Sequence
  Description of Artificial Sequence: Synthetic oligonucleotide
aaaauaagacgccauggcu

SEQ ID NO: 1931153 - RNA, 19 nt, Artificial Sequence
  Description of Artificial Sequence: Synthetic oligonucleotide
agaauacucagacccaagc

SEQ ID NO: 1931154 - RNA, 19 nt, Artificial Sequence
  Description of Artificial Sequence: Synthetic oligonucleotide
aggaauuugucuuacuuag

SEQ ID NO: 1931155 - RNA, 19 nt, Artificial Sequence
  Description of Artificial Sequence: Synthetic oligonucleotide
auaacugucaucaucagug

SEQ ID NO: 1931156 - RNA, 19 nt, Artificial Sequence
  Description of Artificial Sequence: Synthetic oligonucleotide
uuaucaguuuuaaacagcu

SEQ ID NO: 1931157 - RNA, 19 nt, Artificial Sequence
  Description of Artificial Sequence: Synthetic oligonucleotide
uuugauuccuugauauggg

SEQ ID NO: 1931158 - RNA, 19 nt, Artificial Sequence
  Description of Artificial Sequence: Synthetic oligonucleotide
uuaaaaguuuucucagagg

SEQ ID NO: 1931159 - RNA, 19 nt, Artificial Sequence
  Description of Artificial Sequence: Synthetic oligonucleotide
ucaaaauaagacgccaugg

SEQ ID NO: 1931160 - RNA, 19 nt, Artificial Sequence
  Description of Artificial Sequence: Synthetic oligonucleotide
ucaaauuccaaaaggcaca

SEQ ID NO: 1931161 - RNA, 19 nt, Artificial Sequence
  Description of Artificial Sequence: Synthetic oligonucleotide
uuuaucaguuuuaaacagc

SEQ ID NO: 1931162 - RNA, 19 nt, Artificial Sequence
  Description of Artificial Sequence: Synthetic oligonucleotide
uaaugaagaucaaagugca

SEQ ID NO: 1931163 - RNA, 19 nt, Artificial Sequence
  Description of Artificial Sequence: Synthetic oligonucleotide
uuuaucuauuaaaagaauu

SEQ ID NO: 1931164 - RNA, 19 nt, Artificial Sequence
  Description of Artificial Sequence: Synthetic oligonucleotide
caggaaagauucuugaggg

SEQ ID NO: 1931165 - RNA, 19 nt, Artificial Sequence
  Description of Artificial Sequence: Synthetic oligonucleotide
uccucaaauuccaaaaggc

SEQ ID NO: 1931166 - RNA, 19 nt, Artificial Sequence
  Description of Artificial Sequence: Synthetic oligonucleotide
cuaauuugcauguuugcag

SEQ ID NO: 1931167 - RNA, 19 nt, Artificial Sequence
  Description of Artificial Sequence: Synthetic oligonucleotide
ucuaacugagaauacucag

SEQ ID NO: 1931168 - RNA, 19 nt, Artificial Sequence
  Description of Artificial Sequence: Synthetic oligonucleotide
aguccauccuauuaaagag

SEQ ID NO: 1931169 - RNA, 19 nt, Artificial Sequence
  Description of Artificial Sequence: Synthetic oligonucleotide
cuauuaaagagugaucugc

SEQ ID NO: 1931170 - RNA, 19 nt, Artificial Sequence
  Description of Artificial Sequence: Synthetic oligonucleotide
agaauucuaauuugcaugu

SEQ ID NO: 1931171 - RNA, 19 nt, Artificial Sequence
  Description of Artificial Sequence: Synthetic oligonucleotide
aacuuuuacaauguuaaaa

SEQ ID NO: 1931172 - RNA, 19 nt, Artificial Sequence
  Description of Artificial Sequence: Synthetic oligonucleotide
guggagauucuccagacgg

SEQ ID NO: 1931173 - RNA, 19 nt, Artificial Sequence
  Description of Artificial Sequence: Synthetic oligonucleotide
ucuuacuuagccagggcag

SEQ ID NO: 1931174 - RNA, 19 nt, Artificial Sequence
  Description of Artificial Sequence: Synthetic oligonucleotide
ucaaaguccauccuauuaa

SEQ ID NO: 1931175 - RNA, 19 nt, Artificial Sequence
  Description of Artificial Sequence: Synthetic oligonucleotide
guuaacuaaagguuccaag

SEQ ID NO: 1931176 - RNA, 19 nt, Artificial Sequence
  Description of Artificial Sequence: Synthetic oligonucleotide
ucaguuuuaaacagcuaca

SEQ ID NO: 1931177 - RNA, 19 nt, Artificial Sequence
  Description of Artificial Sequence: Synthetic oligonucleotide
uaaagagugaucugcugcc

SEQ ID NO: 1931178 - RNA, 19 nt, Artificial Sequence
  Description of Artificial Sequence: Synthetic oligonucleotide
agcaacauguuguugcggg

SEQ ID NO: 1931179 - RNA, 19 nt, Artificial Sequence
  Description of Artificial Sequence: Synthetic oligonucleotide
uaucuauuaaaagaauucu

SEQ ID NO: 1931180 - RNA, 19 nt, Artificial Sequence
  Description of Artificial Sequence: Synthetic oligonucleotide
agaaaggcagucuggcacc

SEQ ID NO: 1931181 - RNA, 19 nt, Artificial Sequence
  Description of Artificial Sequence: Synthetic oligonucleotide
aauuugucuuacuuagcca

SEQ ID NO: 1931182 - RNA, 19 nt, Artificial Sequence
  Description of Artificial Sequence: Synthetic oligonucleotide
uuucuugugcucuucauaa

SEQ ID NO: 1931183 - RNA, 19 nt, Artificial Sequence
  Description of Artificial Sequence: Synthetic oligonucleotide
uuccaauguuaacuaaagg

SEQ ID NO: 1931184 - RNA, 19 nt, Artificial Sequence
  Description of Artificial Sequence: Synthetic oligonucleotide
ugaaaagaagcccuuucgu

SEQ ID NO: 1931185 - RNA, 19 nt, Artificial Sequence
  Description of Artificial Sequence: Synthetic oligonucleotide
gaauacucagacccaagcc

SEQ ID NO: 1931186 - RNA, 19 nt, Artificial Sequence
  Description of Artificial Sequence: Synthetic oligonucleotide
ugcaaguuaguuuaucagu

SEQ ID NO: 1931187 - RNA, 19 nt, Artificial Sequence
  Description of Artificial Sequence: Synthetic oligonucleotide
uaacuaaagguuccaaggu

SEQ ID NO: 1931188 - RNA, 19 nt, Artificial Sequence
  Description of Artificial Sequence: Synthetic oligonucleotide
caauguuaacuaaagguuc

SEQ ID NO: 1931189 - RNA, 19 nt, Artificial Sequence
  Description of Artificial Sequence: Synthetic oligonucleotide
aaucccaaguccucaaagu

SEQ ID NO: 1931190 - RNA, 19 nt, Artificial Sequence
  Description of Artificial Sequence: Synthetic oligonucleotide
uuugucuuacuuagccagg

SEQ ID NO: 1931191 - RNA, 19 nt, Artificial Sequence
  Description of Artificial Sequence: Synthetic oligonucleotide
gcuacaaagggccaggccg

SEQ ID NO: 1931192 - RNA, 19 nt, Artificial Sequence
  Description of Artificial Sequence: Synthetic oligonucleotide
uugagcucagccuuggagc

SEQ ID NO: 1931193 - RNA, 19 nt, Artificial Sequence
  Description of Artificial Sequence: Synthetic oligonucleotide
ccuuuaaugaagaucaaag

SEQ ID NO: 1931194 - RNA, 19 nt, Artificial Sequence
  Description of Artificial Sequence: Synthetic oligonucleotide
ugagcucucagcccuaacc

SEQ ID NO: 1931195 - RNA, 19 nt, Artificial Sequence
  Description of Artificial Sequence: Synthetic oligonucleotide
aagagugaucugcugcccg

SEQ ID NO: 1931196 - RNA, 19 nt, Artificial Sequence
  Description of Artificial Sequence: Synthetic oligonucleotide
uaauuugcauguuugcagu

SEQ ID NO: 1931197 - RNA, 19 nt, Artificial Sequence
  Description of Artificial Sequence: Synthetic oligonucleotide
uuucguccaggaaagauuc

SEQ ID NO: 1931198 - RNA, 19 nt, Artificial Sequence
  Description of Artificial Sequence: Synthetic oligonucleotide
cucagaggaacuaaagaac

SEQ ID NO: 1931199 - RNA, 19 nt, Artificial Sequence
  Description of Artificial Sequence: Synthetic oligonucleotide
agguuaacuagagucuucc

SEQ ID NO: 1931200 - RNA, 19 nt, Artificial Sequence
  Description of Artificial Sequence: Synthetic oligonucleotide
uucuggagaaucagagagg

SEQ ID NO: 1931201 - RNA, 19 nt, Artificial Sequence
  Description of Artificial Sequence: Synthetic oligonucleotide
uucccaauccaccaauccc

SEQ ID NO: 1931202 - RNA, 19 nt, Artificial Sequence
  Description of Artificial Sequence: Synthetic oligonucleotide
uguuaaaaguuuucucaga

SEQ ID NO: 1931203 - RNA, 19 nt, Artificial Sequence
  Description of Artificial Sequence: Synthetic oligonucleotide
agugcaaaggggaagaugu

SEQ ID NO: 1931204 - RNA, 19 nt, Artificial Sequence
  Description of Artificial Sequence: Synthetic oligonucleotide
agaucaaagugcaaagggg

SEQ ID NO: 1931205 - RNA, 19 nt, Artificial Sequence
  Description of Artificial Sequence: Synthetic oligonucleotide
uacaauguuaaaaguuuuc

SEQ ID NO: 1931206 - RNA, 19 nt, Artificial Sequence
  Description of Artificial Sequence: Synthetic oligonucleotide
aaagagugaucugcugccc

SEQ ID NO: 1931207 - RNA, 19 nt, Artificial Sequence
  Description of Artificial Sequence: Synthetic oligonucleotide
agagucuagaggcaagcag

SEQ ID NO: 1931208 - RNA, 19 nt, Artificial Sequence
  Description of Artificial Sequence: Synthetic oligonucleotide
cuucuaacugagaauacuc

SEQ ID NO: 1931209 - RNA, 19 nt, Artificial Sequence
  Description of Artificial Sequence: Synthetic oligonucleotide
ucccaauccaccaauccca

SEQ ID NO: 1931210 - RNA, 19 nt, Artificial Sequence
  Description of Artificial Sequence: Synthetic oligonucleotide
uucuaauuugcauguuugc

SEQ ID NO: 1931211 - RNA, 19 nt, Artificial Sequence
  Description of Artificial Sequence: Synthetic oligonucleotide
gagcucucagcccuaaccg

SEQ ID NO: 1931212 - RNA, 19 nt, Artificial Sequence
  Description of Artificial Sequence: Synthetic oligonucleotide
cuaccgaugacuguucugg

SEQ ID NO: 1931213 - RNA, 19 nt, Artificial Sequence
  Description of Artificial Sequence: Synthetic oligonucleotide
cuguucuggagaaucagag

SEQ ID NO: 1931214 - RNA, 19 nt, Artificial Sequence
  Description of Artificial Sequence: Synthetic oligonucleotide
aacuaaagguuccaagguu

SEQ ID NO: 1931215 - RNA, 19 nt, Artificial Sequence
  Description of Artificial Sequence: Synthetic oligonucleotide
uaacugucaucaucagugg

SEQ ID NO: 1931216 - RNA, 19 nt, Artificial Sequence
  Description of Artificial Sequence: Synthetic oligonucleotide
guagggaugaaaagaagcc

SEQ ID NO: 1931217 - RNA, 19 nt, Artificial Sequence
  Description of Artificial Sequence: Synthetic oligonucleotide
uugaacuuugauuccuuga

SEQ ID NO: 1931218 - RNA, 19 nt, Artificial Sequence
  Description of Artificial Sequence: Synthetic oligonucleotide
gaucaaagugcaaagggga

SEQ ID NO: 1931219 - RNA, 19 nt, Artificial Sequence
  Description of Artificial Sequence: Synthetic oligonucleotide
cuucauaacugucaucauc

SEQ ID NO: 1931220 - RNA, 19 nt, Artificial Sequence
  Description of Artificial Sequence: Synthetic oligonucleotide
gugcaaguuaguuuaucag

SEQ ID NO: 1931221 - RNA, 19 nt, Artificial Sequence
  Description of Artificial Sequence: Synthetic oligonucleotide
agggcacuugagcucagcc

SEQ ID NO: 1931222 - RNA, 19 nt, Artificial Sequence
  Description of Artificial Sequence: Synthetic oligonucleotide
uugucuuacuuagccaggg

SEQ ID NO: 1931223 - RNA, 19 nt, Artificial Sequence
  Description of Artificial Sequence: Synthetic oligonucleotide
cuugagcucagccuuggag

SEQ ID NO: 1931224 - RNA, 19 nt, Artificial Sequence
  Description of Artificial Sequence: Synthetic oligonucleotide
agcuacaaagggccaggcc

SEQ ID NO: 1931225 - RNA, 19 nt, Artificial Sequence
  Description of Artificial Sequence: Synthetic oligonucleotide
uguacauggcuccguggag

SEQ ID NO: 1931226 - RNA, 19 nt, Artificial Sequence
  Description of Artificial Sequence: Synthetic oligonucleotide
agcucucagcccuaaccgc

SEQ ID NO: 1931227 - RNA, 19 nt, Artificial Sequence
  Description of Artificial Sequence: Synthetic oligonucleotide
ucgugcucaucaaaauaag

SEQ ID NO: 1931228 - RNA, 19 nt, Artificial Sequence
  Description of Artificial Sequence: Synthetic oligonucleotide
uuggagcuaccgaugacug

SEQ ID NO: 1931229 - RNA, 19 nt, Artificial Sequence
  Description of Artificial Sequence: Synthetic oligonucleotide
ugaucugcugcccggggcc

SEQ ID NO: 1931230 - RNA, 19 nt, Artificial Sequence
  Description of Artificial Sequence: Synthetic oligonucleotide
agauucuugagggugucag

SEQ ID NO: 1931231 - RNA, 19 nt, Artificial Sequence
  Description of Artificial Sequence: Synthetic oligonucleotide
agagugaucugcugcccgg

SEQ ID NO: 1931232 - RNA, 19 nt, Artificial Sequence
  Description of Artificial Sequence: Synthetic oligonucleotide
caggugauguucccaaucc

SEQ ID NO: 1931233 - RNA, 19 nt, Artificial Sequence
  Description of Artificial Sequence: Synthetic oligonucleotide
cuaacugagaauacucaga

SEQ ID NO: 1931234 - RNA, 19 nt, Artificial Sequence
  Description of Artificial Sequence: Synthetic oligonucleotide
uuuucauuagcagcagggu

SEQ ID NO: 1931235 - RNA, 19 nt, Artificial Sequence
  Description of Artificial Sequence: Synthetic oligonucleotide
ggguugaggaugcagagcc

SEQ ID NO: 1931236 - RNA, 19 nt, Artificial Sequence
  Description of Artificial Sequence: Synthetic oligonucleotide
gaauggaagaggugacggc

SEQ ID NO: 1931237 - RNA, 19 nt, Artificial Sequence
  Description of Artificial Sequence: Synthetic oligonucleotide
uguucuggagaaucagaga

SEQ ID NO: 1931238 - RNA, 19 nt, Artificial Sequence
  Description of Artificial Sequence: Synthetic oligonucleotide
guagguagggaugaaaaga

SEQ ID NO: 1931239 - RNA, 19 nt, Artificial Sequence
  Description of Artificial Sequence: Synthetic oligonucleotide
cagagagcaacuuuuacaa

SEQ ID NO: 1931240 - RNA, 19 nt, Artificial Sequence
  Description of Artificial Sequence: Synthetic oligonucleotide
aacauguuguugcgggccu

SEQ ID NO: 1931241 - RNA, 19 nt, Artificial Sequence
  Description of Artificial Sequence: Synthetic oligonucleotide
gcucaucaaaauaagacgc

SEQ ID NO: 1931242 - RNA, 19 nt, Artificial Sequence
  Description of Artificial Sequence: Synthetic oligonucleotide
gguagggaugaaaagaagc

SEQ ID NO: 1931243 - RNA, 19 nt, Artificial Sequence
  Description of Artificial Sequence: Synthetic oligonucleotide
uguuguugcgggccucgcg

SEQ ID NO: 1931244 - RNA, 19 nt, Artificial Sequence
  Description of Artificial Sequence: Synthetic oligonucleotide
ucugauccaguagguaggg

SEQ ID NO: 1931245 - RNA, 19 nt, Artificial Sequence
  Description of Artificial Sequence: Synthetic oligonucleotide
uccucaaaguccauccuau

SEQ ID NO: 1931246 - RNA, 19 nt, Artificial Sequence
  Description of Artificial Sequence: Synthetic oligonucleotide
acuuugauuccuugauaug

SEQ ID NO: 1931247 - RNA, 19 nt, Artificial Sequence
  Description of Artificial Sequence: Synthetic oligonucleotide
accgaugacuguucugggg

SEQ ID NO: 1931248 - RNA, 19 nt, Artificial Sequence
  Description of Artificial Sequence: Synthetic oligonucleotide
agcccuuucguccaggaaa

SEQ ID NO: 1931249 - RNA, 19 nt, Artificial Sequence
  Description of Artificial Sequence: Synthetic oligonucleotide
uccguggagauucuccaga

SEQ ID NO: 1931250 - RNA, 19 nt, Artificial Sequence
  Description of Artificial Sequence: Synthetic oligonucleotide
ugugccauuugacaccuuu

SEQ ID NO: 1931251 - RNA, 19 nt, Artificial Sequence
  Description of Artificial Sequence: Synthetic oligonucleotide
guuguugcgggccucgcgc

SEQ ID NO: 1931252 - RNA, 19 nt, Artificial Sequence
  Description of Artificial Sequence: Synthetic oligonucleotide
ugugcucuucauaacuguc

SEQ ID NO: 1931253 - RNA, 19 nt, Artificial Sequence
  Description of Artificial Sequence: Synthetic oligonucleotide
aagguuaacuagagucuuc

SEQ ID NO: 1931254 - RNA, 19 nt, Artificial Sequence
  Description of Artificial Sequence: Synthetic oligonucleotide
ugcagagagcaacuuuuac

SEQ ID NO: 1931255 - RNA, 19 nt, Artificial Sequence
  Description of Artificial Sequence: Synthetic oligonucleotide
ucgcgcucaggguucaacg

SEQ ID NO: 1931256 - RNA, 19 nt, Artificial Sequence
  Description of Artificial Sequence: Synthetic oligonucleotide
cuugaacuuugauuccuug

SEQ ID NO: 1931257 - RNA, 19 nt, Artificial Sequence
  Description of Artificial Sequence: Synthetic oligonucleotide
cuuagccagggcagaaugc

SEQ ID NO: 1931258 - RNA, 19 nt, Artificial Sequence
  Description of Artificial Sequence: Synthetic oligonucleotide
ggaauggaagaggugacgg

SEQ ID NO: 1931259 - RNA, 19 nt, Artificial Sequence
  Description of Artificial Sequence: Synthetic oligonucleotide
gagucuagaggcaagcaga

SEQ ID NO: 1931260 - RNA, 19 nt, Artificial Sequence
  Description of Artificial Sequence: Synthetic oligonucleotide
ugucuuacuuagccagggc

SEQ ID NO: 1931261 - RNA, 19 nt, Artificial Sequence
  Description of Artificial Sequence: Synthetic oligonucleotide
uucaacggcucgcagucgu

SEQ ID NO: 1931262 - RNA, 19 nt, Artificial Sequence
  Description of Artificial Sequence: Synthetic oligonucleotide
gucuuacuuagccagggca

SEQ ID NO: 1931263 - RNA, 19 nt, Artificial Sequence
  Description of Artificial Sequence: Synthetic oligonucleotide
uguuccagcgugugagcag

SEQ ID NO: 1931264 - RNA, 19 nt, Artificial Sequence
  Description of Artificial Sequence: Synthetic oligonucleotide
aggauuccaauguuaacua

SEQ ID NO: 1931265 - RNA, 19 nt, Artificial Sequence
  Description of Artificial Sequence: Synthetic oligonucleotide
agcagagagaaaggcaguc

SEQ ID NO: 1931266 - RNA, 19 nt, Artificial Sequence
  Description of Artificial Sequence: Synthetic oligonucleotide
agagagaaaggcagucugg

SEQ ID NO: 1931267 - RNA, 19 nt, Artificial Sequence
  Description of Artificial Sequence: Synthetic oligonucleotide
gauccaguagguagggaug

SEQ ID NO: 1931268 - RNA, 19 nt, Artificial Sequence
  Description of Artificial Sequence: Synthetic oligonucleotide
uugugcucuucauaacugu

SEQ ID NO: 1931269 - RNA, 19 nt, Artificial Sequence
  Description of Artificial Sequence: Synthetic oligonucleotide
cauguuugcagucuguucu

SEQ ID NO: 1931270 - RNA, 19 nt, Artificial Sequence
  Description of Artificial Sequence: Synthetic oligonucleotide
ugagaauacucagacccaa

SEQ ID NO: 1931271 - RNA, 19 nt, Artificial Sequence
  Description of Artificial Sequence: Synthetic oligonucleotide
cagaggaacuaaagaacac

SEQ ID NO: 1931272 - RNA, 19 nt, Artificial Sequence
  Description of Artificial Sequence: Synthetic oligonucleotide
agagcaacuuuuacaaugu

SEQ ID NO: 1931273 - RNA, 19 nt, Artificial Sequence
  Description of Artificial Sequence: Synthetic oligonucleotide
guuccaagguuaacuagag

SEQ ID NO: 1931274 - RNA, 19 nt, Artificial Sequence
  Description of Artificial Sequence: Synthetic oligonucleotide
cauggcuccguggagauuc

SEQ ID NO: 1931275 - RNA, 19 nt, Artificial Sequence
  Description of Artificial Sequence: Synthetic oligonucleotide
acagcuacaaagggccagg

SEQ ID NO: 1931276 - RNA, 19 nt, Artificial Sequence
  Description of Artificial Sequence: Synthetic oligonucleotide
gcaacuuuuacaauguuaa

SEQ ID NO: 1931277 - RNA, 19 nt, Artificial Sequence
  Description of Artificial Sequence: Synthetic oligonucleotide
caacauguuguugcgggcc

SEQ ID NO: 1931278 - RNA, 19 nt, Artificial Sequence
  Description of Artificial Sequence: Synthetic oligonucleotide
guuaguuuaucaguuuuaa

SEQ ID NO: 1931279 - RNA, 19 nt, Artificial Sequence
  Description of Artificial Sequence: Synthetic oligonucleotide
uauucccagggccccacca

SEQ ID NO: 1931280 - RNA, 19 nt, Artificial Sequence
  Description of Artificial Sequence: Synthetic oligonucleotide
agucugacuucuaacugag

SEQ ID NO: 1931281 - RNA, 19 nt, Artificial Sequence
  Description of Artificial Sequence: Synthetic oligonucleotide
agagcccuguuccagcgug

SEQ ID NO: 1931282 - RNA, 19 nt, Artificial Sequence
  Description of Artificial Sequence: Synthetic oligonucleotide
ggugcaaguuaguuuauca

SEQ ID NO: 1931283 - RNA, 19 nt, Artificial Sequence
  Description of Artificial Sequence: Synthetic oligonucleotide
uggagauucuccagacggu

SEQ ID NO: 1931284 - RNA, 19 nt, Artificial Sequence
  Description of Artificial Sequence: Synthetic oligonucleotide
gaagaggugacggcagggc

SEQ ID NO: 1931285 - RNA, 19 nt, Artificial Sequence
  Description of Artificial Sequence: Synthetic oligonucleotide
uguuaacuaaagguuccaa

SEQ ID NO: 1931286 - RNA, 19 nt, Artificial Sequence
  Description of Artificial Sequence: Synthetic oligonucleotide
acuaaagguuccaagguua

SEQ ID NO: 1931287 - RNA, 19 nt, Artificial Sequence
  Description of Artificial Sequence: Synthetic oligonucleotide
aucuauuaaaagaauucua

SEQ ID NO: 1931288 - RNA, 19 nt, Artificial Sequence
  Description of Artificial Sequence: Synthetic oligonucleotide
auuugcauguuugcagucu

SEQ ID NO: 1931289 - RNA, 19 nt, Artificial Sequence
  Description of Artificial Sequence: Synthetic oligonucleotide
aggaugcagagcccuguuc

SEQ ID NO: 1931290 - RNA, 19 nt, Artificial Sequence
  Description of Artificial Sequence: Synthetic oligonucleotide
uagagucuuccggaagggg

SEQ ID NO: 1931291 - RNA, 19 nt, Artificial Sequence
  Description of Artificial Sequence: Synthetic oligonucleotide
cuggaauggaagaggugac

SEQ ID NO: 1931292 - RNA, 19 nt, Artificial Sequence
  Description of Artificial Sequence: Synthetic oligonucleotide
gugauguucccaauccacc

SEQ ID NO: 1931293 - RNA, 19 nt, Artificial Sequence
  Description of Artificial Sequence: Synthetic oligonucleotide
uucuugagggugucagcug

SEQ ID NO: 1931294 - RNA, 19 nt, Artificial Sequence
  Description of Artificial Sequence: Synthetic oligonucleotide
auccuauuaaagagugauc

SEQ ID NO: 1931295 - RNA, 19 nt, Artificial Sequence
  Description of Artificial Sequence: Synthetic oligonucleotide
agcucagccuuggagcuac

SEQ ID NO: 1931296 - RNA, 19 nt, Artificial Sequence
  Description of Artificial Sequence: Synthetic oligonucleotide
guguacauggcuccgugga

SEQ ID NO: 1931297 - RNA, 19 nt, Artificial Sequence
  Description of Artificial Sequence: Synthetic oligonucleotide
gagaauacucagacccaag

SEQ ID NO: 1931298 - RNA, 19 nt, Artificial Sequence
  Description of Artificial Sequence: Synthetic oligonucleotide
cuagagucuuccggaaggg

SEQ ID NO: 1931299 - RNA, 19 nt, Artificial Sequence
  Description of Artificial Sequence: Synthetic oligonucleotide
acggcagggcaucucaaug

SEQ ID NO: 1931300 - RNA, 19 nt, Artificial Sequence
  Description of Artificial Sequence: Synthetic oligonucleotide
cucgcagucgugcucauca

SEQ ID NO: 1931301 - RNA, 19 nt, Artificial Sequence
  Description of Artificial Sequence: Synthetic oligonucleotide
aggaaagauucuugagggu

SEQ ID NO: 1931302 - RNA, 19 nt, Artificial Sequence
  Description of Artificial Sequence: Synthetic oligonucleotide
uaucaguuuuaaacagcua

SEQ ID NO: 1931303 - RNA, 19 nt, Artificial Sequence
  Description of Artificial Sequence: Synthetic oligonucleotide
agucuagaggcaagcagag

SEQ ID NO: 1931304 - RNA, 19 nt, Artificial Sequence
  Description of Artificial Sequence: Synthetic oligonucleotide
gguuaacuagagucuuccg

SEQ ID NO: 1931305 - RNA, 19 nt, Artificial Sequence
  Description of Artificial Sequence: Synthetic oligonucleotide
uuccaagguuaacuagagu

SEQ ID NO: 1931306 - RNA, 19 nt, Artificial Sequence
  Description of Artificial Sequence: Synthetic oligonucleotide
cagucugacuucuaacuga

SEQ ID NO: 1931307 - RNA, 19 nt, Artificial Sequence
  Description of Artificial Sequence: Synthetic oligonucleotide
gucgugcucaucaaaauaa

SEQ ID NO: 1931308 - RNA, 19 nt, Artificial Sequence
  Description of Artificial Sequence: Synthetic oligonucleotide
cuaaccgcugccucacgug

SEQ ID NO: 1931309 - RNA, 19 nt, Artificial Sequence
  Description of Artificial Sequence: Synthetic oligonucleotide
ucaggguucaacggcucgc

SEQ ID NO: 1931310 - RNA, 19 nt, Artificial Sequence
  Description of Artificial Sequence: Synthetic oligonucleotide
auacucagacccaagcccu

SEQ ID NO: 1931311 - RNA, 19 nt, Artificial Sequence
  Description of Artificial Sequence: Synthetic oligonucleotide
uucccagggccccaccacc

SEQ ID NO: 1931312 - RNA, 19 nt, Artificial Sequence
  Description of Artificial Sequence: Synthetic oligonucleotide
uucuugugcucuucauaac

SEQ ID NO: 1931313 - RNA, 19 nt, Artificial Sequence
  Description of Artificial Sequence: Synthetic oligonucleotide
gcuggaauggaagagguga

SEQ ID NO: 1931314 - RNA, 19 nt, Artificial Sequence
  Description of Artificial Sequence: Synthetic oligonucleotide
gguucaacggcucgcaguc

SEQ ID NO: 1931315 - RNA, 19 nt, Artificial Sequence
  Description of Artificial Sequence: Synthetic oligonucleotide
aggcugagcucucagcccu

SEQ ID NO: 1931316 - RNA, 19 nt, Artificial Sequence
  Description of Artificial Sequence: Synthetic oligonucleotide
aacggcucgcagucgugcu

SEQ ID NO: 1931317 - RNA, 19 nt, Artificial Sequence
  Description of Artificial Sequence: Synthetic oligonucleotide
cucaaaguccauccuauua

SEQ ID NO: 1931318 - RNA, 19 nt, Artificial Sequence
  Description of Artificial Sequence: Synthetic oligonucleotide
accuuuaaugaagaucaaa

SEQ ID NO: 1931319 - RNA, 19 nt, Artificial Sequence
  Description of Artificial Sequence: Synthetic oligonucleotide
agcaacuuuuacaauguua

SEQ ID NO: 1931320 - RNA, 19 nt, Artificial Sequence
  Description of Artificial Sequence: Synthetic oligonucleotide
aggugauguucccaaucca

SEQ ID NO: 1931321 - RNA, 19 nt, Artificial Sequence
  Description of Artificial Sequence: Synthetic oligonucleotide
ucacguguacauggcuccg

SEQ ID NO: 1931322 - RNA, 19 nt, Artificial Sequence
  Description of Artificial Sequence: Synthetic oligonucleotide
cuugagggugucagcuggc

SEQ ID NO: 1931323 - RNA, 19 nt, Artificial Sequence
  Description of Artificial Sequence: Synthetic oligonucleotide
caggaauuugucuuacuua

SEQ ID NO: 1931324 - RNA, 19 nt, Artificial Sequence
  Description of Artificial Sequence: Synthetic oligonucleotide
acguguacauggcuccgug

SEQ ID NO: 1931325 - RNA, 19 nt, Artificial Sequence
  Description of Artificial Sequence: Synthetic oligonucleotide
aaauuccaaaaggcacaca

SEQ ID NO: 1931326 - RNA, 19 nt, Artificial Sequence
  Description of Artificial Sequence: Synthetic oligonucleotide
uaaagguuccaagguuaac

SEQ ID NO: 1931327 - RNA, 19 nt, Artificial Sequence
  Description of Artificial Sequence: Synthetic oligonucleotide
caggauuccaauguuaacu

SEQ ID NO: 1931328 - RNA, 19 nt, Artificial Sequence
  Description of Artificial Sequence: Synthetic oligonucleotide
caaaguccauccuauuaaa

SEQ ID NO: 1931329 - RNA, 19 nt, Artificial Sequence
  Description of Artificial Sequence: Synthetic oligonucleotide
cuagaggcaagcagagaga

SEQ ID NO: 1931330 - RNA, 19 nt, Artificial Sequence
  Description of Artificial Sequence: Synthetic oligonucleotide
ugccucacguguacauggc

SEQ ID NO: 1931331 - RNA, 19 nt, Artificial Sequence
  Description of Artificial Sequence: Synthetic oligonucleotide
gacuucuaacugagaauac

SEQ ID NO: 1931332 - RNA, 19 nt, Artificial Sequence
  Description of Artificial Sequence: Synthetic oligonucleotide
auguuaacuaaagguucca

SEQ ID NO: 1931333 - RNA, 19 nt, Artificial Sequence
  Description of Artificial Sequence: Synthetic oligonucleotide
cuacaaagggccaggccga

SEQ ID NO: 1931334 - RNA, 19 nt, Artificial Sequence
  Description of Artificial Sequence: Synthetic oligonucleotide
gguuccaagguuaacuaga

SEQ ID NO: 1931335 - RNA, 19 nt, Artificial Sequence
  Description of Artificial Sequence: Synthetic oligonucleotide
agggcggguaaagaaaccu

SEQ ID NO: 1931336 - RNA, 19 nt, Artificial Sequence
  Description of Artificial Sequence: Synthetic oligonucleotide
agagagcaacuuuuacaau

SEQ ID NO: 1931337 - RNA, 19 nt, Artificial Sequence
  Description of Artificial Sequence: Synthetic oligonucleotide
ggugauguucccaauccac

SEQ ID NO: 1931338 - RNA, 19 nt, Artificial Sequence
  Description of Artificial Sequence: Synthetic oligonucleotide
cauccuauuaaagagugau

SEQ ID NO: 1931339 - RNA, 19 nt, Artificial Sequence
  Description of Artificial Sequence: Synthetic oligonucleotide
caccuugugccauuugaca

SEQ ID NO: 1931340 - RNA, 19 nt, Artificial Sequence
  Description of Artificial Sequence: Synthetic oligonucleotide
ucaacggcucgcagucgug

SEQ ID NO: 1931341 - RNA, 19 nt, Artificial Sequence
  Description of Artificial Sequence: Synthetic oligonucleotide
auccaguagguagggauga

SEQ ID NO: 1931342 - RNA, 19 nt, Artificial Sequence
  Description of Artificial Sequence: Synthetic oligonucleotide
ccagcaacauguuguugcg

SEQ ID NO: 1931343 - RNA, 19 nt, Artificial Sequence
  Description of Artificial Sequence: Synthetic oligonucleotide
agugggcagcucauggcgg

SEQ ID NO: 1931344 - RNA, 19 nt, Artificial Sequence
  Description of Artificial Sequence: Synthetic oligonucleotide
aguuuucucagaggaacua

SEQ ID NO: 1931345 - RNA, 19 nt, Artificial Sequence
  Description of Artificial Sequence: Synthetic oligonucleotide
agacccaagcccuggcuau

SEQ ID NO: 1931346 - RNA, 19 nt, Artificial Sequence
  Description of Artificial Sequence: Synthetic oligonucleotide
agguagggaugaaaagaag

SEQ ID NO: 1931347 - RNA, 19 nt, Artificial Sequence
  Description of Artificial Sequence: Synthetic oligonucleotide
ccucaaauuccaaaaggca

SEQ ID NO: 1931348 - RNA, 19 nt, Artificial Sequence
  Description of Artificial Sequence: Synthetic oligonucleotide
aaacagcuacaaagggcca

SEQ ID NO: 1931349 - RNA, 19 nt, Artificial Sequence
  Description of Artificial Sequence: Synthetic oligonucleotide
ggagauucuccagacggug

SEQ ID NO: 1931350 - RNA, 19 nt, Artificial Sequence
  Description of Artificial Sequence: Synthetic oligonucleotide
gaagcccuuucguccagga

SEQ ID NO: 1931351 - RNA, 19 nt, Artificial Sequence
  Description of Artificial Sequence: Synthetic oligonucleotide
cuccguggagauucuccag

SEQ ID NO: 1931352 - RNA, 19 nt, Artificial Sequence
  Description of Artificial Sequence: Synthetic oligonucleotide
guuuucucagaggaacuaa

SEQ ID NO: 1931353 - RNA, 19 nt, Artificial Sequence
  Description of Artificial Sequence: Synthetic oligonucleotide
agcuaccgaugacuguucu

SEQ ID NO: 1931354 - RNA, 19 nt, Artificial Sequence
  Description of Artificial Sequence: Synthetic oligonucleotide
uggagcuaccgaugacugu

SEQ ID NO: 1931355 - RNA, 19 nt, Artificial Sequence
  Description of Artificial Sequence: Synthetic oligonucleotide
agcccuaaccgcugccuca

SEQ ID NO: 1931356 - RNA, 19 nt, Artificial Sequence
  Description of Artificial Sequence: Synthetic oligonucleotide
aagcccuuucguccaggaa

SEQ ID NO: 1931357 - RNA, 19 nt, Artificial Sequence
  Description of Artificial Sequence: Synthetic oligonucleotide
ugacaccuuugccaucuuu

SEQ ID NO: 1931358 - RNA, 19 nt, Artificial Sequence
  Description of Artificial Sequence: Synthetic oligonucleotide
cagggcggguaaagaaacc

SEQ ID NO: 1931359 - RNA, 19 nt, Artificial Sequence
  Description of Artificial Sequence: Synthetic oligonucleotide
guacauggcuccguggaga

SEQ ID NO: 1931360 - RNA, 19 nt, Artificial Sequence
  Description of Artificial Sequence: Synthetic oligonucleotide
acggcucgcagucgugcuc

SEQ ID NO: 1931361 - RNA, 19 nt, Artificial Sequence
  Description of Artificial Sequence: Synthetic oligonucleotide
cuuacuuagccagggcaga

SEQ ID NO: 1931362 - RNA, 19 nt, Artificial Sequence
  Description of Artificial Sequence: Synthetic oligonucleotide
gugacggcagggcaucuca

SEQ ID NO: 1931363 - RNA, 19 nt, Artificial Sequence
  Description of Artificial Sequence: Synthetic oligonucleotide
agucuguucuggagaauca

SEQ ID NO: 1931364 - RNA, 19 nt, Artificial Sequence
  Description of Artificial Sequence: Synthetic oligonucleotide
caacuuuuacaauguuaaa

SEQ ID NO: 1931365 - RNA, 19 nt, Artificial Sequence
  Description of Artificial Sequence: Synthetic oligonucleotide
ggaagaggugacggcaggg

SEQ ID NO: 1931366 - RNA, 19 nt, Artificial Sequence
  Description of Artificial Sequence: Synthetic oligonucleotide
aggguucaacggcucgcag

SEQ ID NO: 1931367 - RNA, 19 nt, Artificial Sequence
  Description of Artificial Sequence: Synthetic oligonucleotide
cacuugagcucagccuugg

SEQ ID NO: 1931368 - RNA, 19 nt, Artificial Sequence
  Description of Artificial Sequence: Synthetic oligonucleotide
uccagcgugugagcagugc

SEQ ID NO: 1931369 - RNA, 19 nt, Artificial Sequence
  Description of Artificial Sequence: Synthetic oligonucleotide
auguuguugcgggccucgc

SEQ ID NO: 1931370 - RNA, 19 nt, Artificial Sequence
  Description of Artificial Sequence: Synthetic oligonucleotide
cauaacugucaucaucagu

SEQ ID NO: 1931371 - RNA, 19 nt, Artificial Sequence
  Description of Artificial Sequence: Synthetic oligonucleotide
agaagcccuuucguccagg

SEQ ID NO: 1931372 - RNA, 19 nt, Artificial Sequence
  Description of Artificial Sequence: Synthetic oligonucleotide
ugagggugucagcuggcuu

SEQ ID NO: 1931373 - RNA, 19 nt, Artificial Sequence
  Description of Artificial Sequence: Synthetic oligonucleotide
cuccucgcgagcuccagca

SEQ ID NO: 1931374 - RNA, 19 nt, Artificial Sequence
  Description of Artificial Sequence: Synthetic oligonucleotide
caggccgacacagucugac

SEQ ID NO: 1931375 - RNA, 19 nt, Artificial Sequence
  Description of Artificial Sequence: Synthetic oligonucleotide
uggugcaaguuaguuuauc

SEQ ID NO: 1931376 - RNA, 19 nt, Artificial Sequence
  Description of Artificial Sequence: Synthetic oligonucleotide
cucgcgagcuccagcaaca

SEQ ID NO: 1931377 - RNA, 19 nt, Artificial Sequence
  Description of Artificial Sequence: Synthetic oligonucleotide
uggcuauucccagggcccc

SEQ ID NO: 1931378 - RNA, 19 nt, Artificial Sequence
  Description of Artificial Sequence: Synthetic oligonucleotide
cagcaacauguuguugcgg

SEQ ID NO: 1931379 - RNA, 19 nt, Artificial Sequence
  Description of Artificial Sequence: Synthetic oligonucleotide
uuguugcgggccucgcgcu

SEQ ID NO: 1931380 - RNA, 19 nt, Artificial Sequence
  Description of Artificial Sequence: Synthetic oligonucleotide
gcaacauguuguugcgggc

SEQ ID NO: 1931381 - RNA, 19 nt, Artificial Sequence
  Description of Artificial Sequence: Synthetic oligonucleotide
caucaaaauaagacgccau

SEQ ID NO: 1931382 - RNA, 19 nt, Artificial Sequence
  Description of Artificial Sequence: Synthetic oligonucleotide
caacggcucgcagucgugc

SEQ ID NO: 1931383 - RNA, 19 nt, Artificial Sequence
  Description of Artificial Sequence: Synthetic oligonucleotide
ggugucagcuggcuugaac

SEQ ID NO: 1931384 - RNA, 19 nt, Artificial Sequence
  Description of Artificial Sequence: Synthetic oligonucleotide
ggcagggcaucucaaugac

SEQ ID NO: 1931385 - RNA, 19 nt, Artificial Sequence
  Description of Artificial Sequence: Synthetic oligonucleotide
aaccuuuaaugaagaucaa

SEQ ID NO: 1931386 - RNA, 19 nt, Artificial Sequence
  Description of Artificial Sequence: Synthetic oligonucleotide
uacuuagccagggcagaau

SEQ ID NO: 1931387 - RNA, 19 nt, Artificial Sequence
  Description of Artificial Sequence: Synthetic oligonucleotide
ccucacguguacauggcuc

SEQ ID NO: 1931388 - RNA, 19 nt, Artificial Sequence
  Description of Artificial Sequence: Synthetic oligonucleotide
cucagcccuaaccgcugcc

SEQ ID NO: 1931389 - RNA, 19 nt, Artificial Sequence
  Description of Artificial Sequence: Synthetic oligonucleotide
cugacuucuaacugagaau

SEQ ID NO: 1931390 - RNA, 19 nt, Artificial Sequence
  Description of Artificial Sequence: Synthetic oligonucleotide
agggcaucucaaugacagu

SEQ ID NO: 1931391 - RNA, 19 nt, Artificial Sequence
  Description of Artificial Sequence: Synthetic oligonucleotide
gcaggugauguucccaauc

SEQ ID NO: 1931392 - RNA, 19 nt, Artificial Sequence
  Description of Artificial Sequence: Synthetic oligonucleotide
gcauguuugcagucuguuc

SEQ ID NO: 1931393 - RNA, 19 nt, Artificial Sequence
  Description of Artificial Sequence: Synthetic oligonucleotide
guucaacggcucgcagucg

SEQ ID NO: 1931394 - RNA, 19 nt, Artificial Sequence
  Description of Artificial Sequence: Synthetic oligonucleotide
gccaggccgacacagucug

SEQ ID NO: 1931395 - RNA, 19 nt, Artificial Sequence
  Description of Artificial Sequence: Synthetic oligonucleotide
cacagggcacuugagcuca

SEQ ID NO: 1931396 - RNA, 19 nt, Artificial Sequence
  Description of Artificial Sequence: Synthetic oligonucleotide
gcuaccgaugacuguucug

SEQ ID NO: 1931397 - RNA, 19 nt, Artificial Sequence
  Description of Artificial Sequence: Synthetic oligonucleotide
uuccagcgugugagcagug

SEQ ID NO: 1931398 - RNA, 19 nt, Artificial Sequence
  Description of Artificial Sequence: Synthetic oligonucleotide
acuguucuggggaggcucu

SEQ ID NO: 1931399 - RNA, 19 nt, Artificial Sequence
  Description of Artificial Sequence: Synthetic oligonucleotide
gaaucagagagggucugau

SEQ ID NO: 1931400 - RNA, 19 nt, Artificial Sequence
  Description of Artificial Sequence: Synthetic oligonucleotide
ggauuccaauguuaacuaa

SEQ ID NO: 1931401 - RNA, 19 nt, Artificial Sequence
  Description of Artificial Sequence: Synthetic oligonucleotide
cugcagggcggguaaagaa

SEQ ID NO: 1931402 - RNA, 19 nt, Artificial Sequence
  Description of Artificial Sequence: Synthetic oligonucleotide
agaaugcagcuggaaugga

SEQ ID NO: 1931403 - RNA, 19 nt, Artificial Sequence
  Description of Artificial Sequence: Synthetic oligonucleotide
uguugcgggccucgcgcuc

SEQ ID NO: 1931404 - RNA, 19 nt, Artificial Sequence
  Description of Artificial Sequence: Synthetic oligonucleotide
uacaaagggccaggccgac

SEQ ID NO: 1931405 - RNA, 19 nt, Artificial Sequence
  Description of Artificial Sequence: Synthetic oligonucleotide
gcccuuucguccaggaaag

SEQ ID NO: 1931406 - RNA, 19 nt, Artificial Sequence
  Description of Artificial Sequence: Synthetic oligonucleotide
aggccgacacagucugacu

SEQ ID NO: 1931407 - RNA, 19 nt, Artificial Sequence
  Description of Artificial Sequence: Synthetic oligonucleotide
gaucugcugcccggggccc

SEQ ID NO: 1931408 - RNA, 19 nt, Artificial Sequence
  Description of Artificial Sequence: Synthetic oligonucleotide
gcgcucaggguucaacggc

SEQ ID NO: 1931409 - RNA, 19 nt, Artificial Sequence
  Description of Artificial Sequence: Synthetic oligonucleotide
ggcuccguggagauucucc

SEQ ID NO: 1931410 - RNA, 19 nt, Artificial Sequence
  Description of Artificial Sequence: Synthetic oligonucleotide
gcuccguggagauucucca

SEQ ID NO: 1931411 - RNA, 19 nt, Artificial Sequence
  Description of Artificial Sequence: Synthetic oligonucleotide
cagcuacaaagggccaggc

SEQ ID NO: 1931412 - RNA, 19 nt, Artificial Sequence
  Description of Artificial Sequence: Synthetic oligonucleotide
ggcagucuggcaccuugug

SEQ ID NO: 1931413 - RNA, 19 nt, Artificial Sequence
  Description of Artificial Sequence: Synthetic oligonucleotide
gcagggcggguaaagaaac

SEQ ID NO: 1931414 - RNA, 19 nt, Artificial Sequence
  Description of Artificial Sequence: Synthetic oligonucleotide
caucagugggcagcucaug

SEQ ID NO: 1931415 - RNA, 19 nt, Artificial Sequence
  Description of Artificial Sequence: Synthetic oligonucleotide
ggggccuacagggacagga

SEQ ID NO: 1931416 - RNA, 19 nt, Artificial Sequence
  Description of Artificial Sequence: Synthetic oligonucleotide
gcaggaauuugucuuacuu

SEQ ID NO: 1931417 - RNA, 19 nt, Artificial Sequence
  Description of Artificial Sequence: Synthetic oligonucleotide
ucgcagucgugcucaucaa

SEQ ID NO: 1931418 - RNA, 19 nt, Artificial Sequence
  Description of Artificial Sequence: Synthetic oligonucleotide
ggcacuugagcucagccuu

SEQ ID NO: 1931419 - RNA, 19 nt, Artificial Sequence
  Description of Artificial Sequence: Synthetic oligonucleotide
acccagagucuagaggcaa

SEQ ID NO: 1931420 - RNA, 19 nt, Artificial Sequence
  Description of Artificial Sequence: Synthetic oligonucleotide
gcgggccucgcgcucaggg

SEQ ID NO: 1931421 - RNA, 19 nt, Artificial Sequence
  Description of Artificial Sequence: Synthetic oligonucleotide
uccucgcgagcuccagcaa

SEQ ID NO: 1931422 - RNA, 19 nt, Artificial Sequence
  Description of Artificial Sequence: Synthetic oligonucleotide
cccaggauuccaauguuaa

SEQ ID NO: 1931423 - RNA, 19 nt, Artificial Sequence
  Description of Artificial Sequence: Synthetic oligonucleotide
gcagucgugcucaucaaaa

SEQ ID NO: 1931424 - RNA, 19 nt, Artificial Sequence
  Description of Artificial Sequence: Synthetic oligonucleotide
agggugucagcuggcuuga

SEQ ID NO: 1931425 - RNA, 19 nt, Artificial Sequence
  Description of Artificial Sequence: Synthetic oligonucleotide
cagagucuagaggcaagca

SEQ ID NO: 1931426 - RNA, 19 nt, Artificial Sequence
  Description of Artificial Sequence: Synthetic oligonucleotide
gagcuaccgaugacuguuc

SEQ ID NO: 1931427 - RNA, 19 nt, Artificial Sequence
  Description of Artificial Sequence: Synthetic oligonucleotide
cucgcgcucaggguucaac

SEQ ID NO: 1931428 - RNA, 19 nt, Artificial Sequence
  Description of Artificial Sequence: Synthetic oligonucleotide
uccagacggugcugcugcu

SEQ ID NO: 1931429 - RNA, 19 nt, Artificial Sequence
  Description of Artificial Sequence: Synthetic oligonucleotide
gcaccuugugccauuugac

SEQ ID NO: 1931430 - RNA, 19 nt, Artificial Sequence
  Description of Artificial Sequence: Synthetic oligonucleotide
gccgacacagucugacuuc

SEQ ID NO: 1931431 - RNA, 19 nt, Artificial Sequence
  Description of Artificial Sequence: Synthetic oligonucleotide
caccaaucccaaguccuca

SEQ ID NO: 1931432 - RNA, 19 nt, Artificial Sequence
  Description of Artificial Sequence: Synthetic oligonucleotide
ccguggagauucuccagac

SEQ ID NO: 1931433 - RNA, 19 nt, Artificial Sequence
  Description of Artificial Sequence: Synthetic oligonucleotide
gccuuggagcuaccgauga

SEQ ID NO: 1931434 - RNA, 19 nt, Artificial Sequence
  Description of Artificial Sequence: Synthetic oligonucleotide
cguguacauggcuccgugg

SEQ ID NO: 1931435 - RNA, 19 nt, Artificial Sequence
  Description of Artificial Sequence: Synthetic oligonucleotide
cugagcucucagcccuaac

SEQ ID NO: 1931436 - RNA, 19 nt, Artificial Sequence
  Description of Artificial Sequence: Synthetic oligonucleotide
cagacccaagcccuggcua

SEQ ID NO: 1931437 - RNA, 19 nt, Artificial Sequence
  Description of Artificial Sequence: Synthetic oligonucleotide
cguggagauucuccagacg

SEQ ID NO: 1931438 - RNA, 19 nt, Artificial Sequence
  Description of Artificial Sequence: Synthetic oligonucleotide
guuccagcgugugagcagu

SEQ ID NO: 1931439 - RNA, 19 nt, Artificial Sequence
  Description of Artificial Sequence: Synthetic oligonucleotide
gccccgcgcacucuccucg

SEQ ID NO: 1931440 - RNA, 19 nt, Artificial Sequence
  Description of Artificial Sequence: Synthetic oligonucleotide
caagguuaacuagagucuu

SEQ ID NO: 1931441 - RNA, 19 nt, Artificial Sequence
  Description of Artificial Sequence: Synthetic oligonucleotide
ggagaaucagagagggucu

SEQ ID NO: 1931442 - RNA, 19 nt, Artificial Sequence
  Description of Artificial Sequence: Synthetic oligonucleotide
ccgagccuugucuuucuug

SEQ ID NO: 1931443 - RNA, 19 nt, Artificial Sequence
  Description of Artificial Sequence: Synthetic oligonucleotide
ggaggcucuccaccacagc

SEQ ID NO: 1931444 - RNA, 19 nt, Artificial Sequence
  Description of Artificial Sequence: Synthetic oligonucleotide
cgcgcucaggguucaacgg

SEQ ID NO: 1931445 - RNA, 19 nt, Artificial Sequence
  Description of Artificial Sequence: Synthetic oligonucleotide
gacggcagggcaucucaau

SEQ ID NO: 1931446 - RNA, 19 nt, Artificial Sequence
  Description of Artificial Sequence: Synthetic oligonucleotide
gucuagaggcaagcagaga

SEQ ID NO: 1931447 - RNA, 19 nt, Artificial Sequence
  Description of Artificial Sequence: Synthetic oligonucleotide
gaaaggcagucuggcaccu

SEQ ID NO: 1931448 - RNA, 19 nt, Artificial Sequence
  Description of Artificial Sequence: Synthetic oligonucleotide
gcugccucacguguacaug

SEQ ID NO: 1931449 - RNA, 19 nt, Artificial Sequence
  Description of Artificial Sequence: Synthetic oligonucleotide
caggguucaacggcucgca

SEQ ID NO: 1931450 - RNA, 19 nt, Artificial Sequence
  Description of Artificial Sequence: Synthetic oligonucleotide
ggagcuaccgaugacuguu

SEQ ID NO: 1931451 - RNA, 19 nt, Artificial Sequence
  Description of Artificial Sequence: Synthetic oligonucleotide
ccucgcgagcuccagcaac

SEQ ID NO: 1931452 - RNA, 19 nt, Artificial Sequence
  Description of Artificial Sequence: Synthetic oligonucleotide
guugcgggccucgcgcuca

SEQ ID NO: 1931453 - RNA, 19 nt, Artificial Sequence
  Description of Artificial Sequence: Synthetic oligonucleotide
gagcaacuuuuacaauguu

SEQ ID NO: 1931454 - RNA, 19 nt, Artificial Sequence
  Description of Artificial Sequence: Synthetic oligonucleotide
ggguucaacggcucgcagu

SEQ ID NO: 1931455 - RNA, 19 nt, Artificial Sequence
  Description of Artificial Sequence: Synthetic oligonucleotide
ggggcaggaauuugucuua

SEQ ID NO: 1931456 - RNA, 19 nt, Artificial Sequence
  Description of Artificial Sequence: Synthetic oligonucleotide
cucuccucgcgagcuccag

SEQ ID NO: 1931457 - RNA, 19 nt, Artificial Sequence
  Description of Artificial Sequence: Synthetic oligonucleotide
cccaccacccagagucuag

SEQ ID NO: 1931458 - RNA, 19 nt, Artificial Sequence
  Description of Artificial Sequence: Synthetic oligonucleotide
ggcaucucaaugacagucu

SEQ ID NO: 1931459 - RNA, 19 nt, Artificial Sequence
  Description of Artificial Sequence: Synthetic oligonucleotide
cagucgugcucaucaaaau

SEQ ID NO: 1931460 - RNA, 19 nt, Artificial Sequence
  Description of Artificial Sequence: Synthetic oligonucleotide
ccauccuauuaaagaguga

SEQ ID NO: 1931461 - RNA, 19 nt, Artificial Sequence
  Description of Artificial Sequence: Synthetic oligonucleotide
ccuuggagcuaccgaugac

SEQ ID NO: 1931462 - RNA, 19 nt, Artificial Sequence
  Description of Artificial Sequence: Synthetic oligonucleotide
gaggaugcagagcccuguu

SEQ ID NO: 1931463 - RNA, 19 nt, Artificial Sequence
  Description of Artificial Sequence: Synthetic oligonucleotide
ccagcgugugagcagugca

SEQ ID NO: 1931464 - RNA, 19 nt, Artificial Sequence
  Description of Artificial Sequence: Synthetic oligonucleotide
gggcaggaauuugucuuac

SEQ ID NO: 1931465 - RNA, 19 nt, Artificial Sequence
  Description of Artificial Sequence: Synthetic oligonucleotide
gcacuugagcucagccuug

SEQ ID NO: 1931466 - RNA, 19 nt, Artificial Sequence
  Description of Artificial Sequence: Synthetic oligonucleotide
cagcugguggaggcaggug

SEQ ID NO: 1931467 - RNA, 19 nt, Artificial Sequence
  Description of Artificial Sequence: Synthetic oligonucleotide
caucaucagugggcagcuc

SEQ ID NO: 1931468 - RNA, 19 nt, Artificial Sequence
  Description of Artificial Sequence: Synthetic oligonucleotide
ggccgacacagucugacuu

SEQ ID NO: 1931469 - RNA, 19 nt, Artificial Sequence
  Description of Artificial Sequence: Synthetic oligonucleotide
uugugccauuugacaccuu

SEQ ID NO: 1931470 - RNA, 19 nt, Artificial Sequence
  Description of Artificial Sequence: Synthetic oligonucleotide
ccuacagggacaggaugca

SEQ ID NO: 1931471 - RNA, 19 nt, Artificial Sequence
  Description of Artificial Sequence: Synthetic oligonucleotide
gcggguaaagaaaccuuua

SEQ ID NO: 1931472 - RNA, 19 nt, Artificial Sequence
  Description of Artificial Sequence: Synthetic oligonucleotide
ggcaggaauuugucuuacu

SEQ ID NO: 1931473 - RNA, 19 nt, Artificial Sequence
  Description of Artificial Sequence: Synthetic oligonucleotide
ccuccgagccuugucuuuc

SEQ ID NO: 1931474 - RNA, 19 nt, Artificial Sequence
  Description of Artificial Sequence: Synthetic oligonucleotide
auggcuccguggagauucu

SEQ ID NO: 1931475 - RNA, 19 nt, Artificial Sequence
  Description of Artificial Sequence: Synthetic oligonucleotide
cgcgcacucuccucgcgag

SEQ ID NO: 1931476 - RNA, 19 nt, Artificial Sequence
  Description of Artificial Sequence: Synthetic oligonucleotide
gcucucagcccuaaccgcu

SEQ ID NO: 1931477 - RNA, 19 nt, Artificial Sequence
  Description of Artificial Sequence: Synthetic oligonucleotide
gcccuaaccgcugccucac

SEQ ID NO: 1931478 - RNA, 19 nt, Artificial Sequence
  Description of Artificial Sequence: Synthetic oligonucleotide
uggcuccguggagauucuc

SEQ ID NO: 1931479 - RNA, 19 nt, Artificial Sequence
  Description of Artificial Sequence: Synthetic oligonucleotide
gcagggcaucucaaugaca

SEQ ID NO: 1931480 - RNA, 19 nt, Artificial Sequence
  Description of Artificial Sequence: Synthetic oligonucleotide
ggaugaaaagaagcccuuu

SEQ ID NO: 1931481 - RNA, 19 nt, Artificial Sequence
  Description of Artificial Sequence: Synthetic oligonucleotide
aggugacggcagggcaucu

SEQ ID NO: 1931482 - RNA, 19 nt, Artificial Sequence
  Description of Artificial Sequence: Synthetic oligonucleotide
cggcagggcaucucaauga

SEQ ID NO: 1931483 - RNA, 19 nt, Artificial Sequence
  Description of Artificial Sequence: Synthetic oligonucleotide
ggugacggcagggcaucuc

SEQ ID NO: 1931484 - RNA, 19 nt, Artificial Sequence
  Description of Artificial Sequence: Synthetic oligonucleotide
gcgcacucuccucgcgagc

SEQ ID NO: 1931485 - RNA, 19 nt, Artificial Sequence
  Description of Artificial Sequence: Synthetic oligonucleotide
cccuggcuauucccagggc

SEQ ID NO: 1931486 - RNA, 19 nt, Artificial Sequence
  Description of Artificial Sequence: Synthetic oligonucleotide
cccuaaccgcugccucacg

SEQ ID NO: 1931487 - RNA, 19 nt, Artificial Sequence
  Description of Artificial Sequence: Synthetic oligonucleotide
gggaugaaaagaagcccuu

SEQ ID NO: 1931488 - RNA, 19 nt, Artificial Sequence
  Description of Artificial Sequence: Synthetic oligonucleotide
gccucacguguacauggcu

SEQ ID NO: 1931489 - RNA, 19 nt, Artificial Sequence
  Description of Artificial Sequence: Synthetic oligonucleotide
cacguguacauggcuccgu

SEQ ID NO: 1931490 - RNA, 19 nt, Artificial Sequence
  Description of Artificial Sequence: Synthetic oligonucleotide
gcacucuccucgcgagcuc

SEQ ID NO: 1931491 - RNA, 19 nt, Artificial Sequence
  Description of Artificial Sequence: Synthetic oligonucleotide
gcgugugagcagugcagcu

SEQ ID NO: 1931492 - RNA, 19 nt, Artificial Sequence
  Description of Artificial Sequence: Synthetic oligonucleotide
ccuaaccgcugccucacgu

SEQ ID NO: 1931493 - RNA, 19 nt, Artificial Sequence
  Description of Artificial Sequence: Synthetic oligonucleotide
gagcccuguuccagcgugu

SEQ ID NO: 1931494 - RNA, 19 nt, Artificial Sequence
  Description of Artificial Sequence: Synthetic oligonucleotide
gguggaggcaggugauguu

SEQ ID NO: 1931495 - RNA, 19 nt, Artificial Sequence
  Description of Artificial Sequence: Synthetic oligonucleotide
ggcuauucccagggcccca

SEQ ID NO: 1931496 - RNA, 19 nt, Artificial Sequence
  Description of Artificial Sequence: Synthetic oligonucleotide
guggugcaaguuaguuuau

SEQ ID NO: 1931497 - RNA, 19 nt, Artificial Sequence
  Description of Artificial Sequence: Synthetic oligonucleotide
ggcaggugauguucccaau

SEQ ID NO: 1931498 - RNA, 19 nt, Artificial Sequence
  Description of Artificial Sequence: Synthetic oligonucleotide
gggccucgcgcucaggguu

SEQ ID NO: 1931499 - RNA, 19 nt, Artificial Sequence
  Description of Artificial Sequence: Synthetic oligonucleotide
cagagcccuguuccagcgu

SEQ ID NO: 1931500 - RNA, 19 nt, Artificial Sequence
  Description of Artificial Sequence: Synthetic oligonucleotide
ccaccacccagagucuaga

SEQ ID NO: 1931501 - RNA, 19 nt, Artificial Sequence
  Description of Artificial Sequence: Synthetic oligonucleotide
ccccgcgcacucuccucgc

SEQ ID NO: 1931502 - RNA, 19 nt, Artificial Sequence
  Description of Artificial Sequence: Synthetic oligonucleotide
gacccaagcccuggcuauu

SEQ ID NO: 1931503 - RNA, 19 nt, Artificial Sequence
  Description of Artificial Sequence: Synthetic oligonucleotide
gcugagcucucagcccuaa

SEQ ID NO: 1931504 - RNA, 19 nt, Artificial Sequence
  Description of Artificial Sequence: Synthetic oligonucleotide
gggcggguaaagaaaccuu

SEQ ID NO: 1931505 - RNA, 19 nt, Artificial Sequence
  Description of Artificial Sequence: Synthetic oligonucleotide
cgcagucgugcucaucaaa

SEQ ID NO: 1931506 - RNA, 19 nt, Artificial Sequence
  Description of Artificial Sequence: Synthetic oligonucleotide
ccgcgcacucuccucgcga

SEQ ID NO: 1931507 - RNA, 19 nt, Artificial Sequence
  Description of Artificial Sequence: Synthetic oligonucleotide
ccgacacagucugacuucu

SEQ ID NO: 1931508 - RNA, 19 nt, Artificial Sequence
  Description of Artificial Sequence: Synthetic oligonucleotide
gcucgcagucgugcucauc

SEQ ID NO: 1931509 - RNA, 19 nt, Artificial Sequence
  Description of Artificial Sequence: Synthetic oligonucleotide
gggccuacagggacaggau

SEQ ID NO: 1931510 - RNA, 19 nt, Artificial Sequence
  Description of Artificial Sequence: Synthetic oligonucleotide
cagcaggguugaggaugca

SEQ ID NO: 1931511 - RNA, 19 nt, Artificial Sequence
  Description of Artificial Sequence: Synthetic oligonucleotide
ccaggccgacacagucuga

SEQ ID NO: 1931512 - RNA, 19 nt, Artificial Sequence
  Description of Artificial Sequence: Synthetic oligonucleotide
cagcugcagggcggguaaa

SEQ ID NO: 1931513 - RNA, 19 nt, Artificial Sequence
  Description of Artificial Sequence: Synthetic oligonucleotide
gccuccgagccuugucuuu

SEQ ID NO: 1931514 - RNA, 19 nt, Artificial Sequence
  Description of Artificial Sequence: Synthetic oligonucleotide
cgcacucuccucgcgagcu

SEQ ID NO: 1931515 - RNA, 19 nt, Artificial Sequence
  Description of Artificial Sequence: Synthetic oligonucleotide
cccuuucguccaggaaaga

SEQ ID NO: 1931516 - RNA, 19 nt, Artificial Sequence
  Description of Artificial Sequence: Synthetic oligonucleotide
ggcugagcucucagcccua

SEQ ID NO: 1931517 - RNA, 19 nt, Artificial Sequence
  Description of Artificial Sequence: Synthetic oligonucleotide
cgacacagucugacuucua

SEQ ID NO: 1931518 - RNA, 19 nt, Artificial Sequence
  Description of Artificial Sequence: Synthetic oligonucleotide
gggccccaccacccagagu

SEQ ID NO: 1931519 - RNA, 19 nt, Artificial Sequence
  Description of Artificial Sequence: Synthetic oligonucleotide
ccccaccacccagagucua

SEQ ID NO: 1931520 - RNA, 19 nt, Artificial Sequence
  Description of Artificial Sequence: Synthetic oligonucleotide
ccgcugccucacguguaca

SEQ ID NO: 1931521 - RNA, 19 nt, Artificial Sequence
  Description of Artificial Sequence: Synthetic oligonucleotide
ggcucgcagucgugcucau

SEQ ID NO: 1931522 - RNA, 19 nt, Artificial Sequence
  Description of Artificial Sequence: Synthetic oligonucleotide
gccccaccacccagagucu

SEQ ID NO: 1931523 - RNA, 19 nt, Artificial Sequence
  Description of Artificial Sequence: Synthetic oligonucleotide
ccucgcgcucaggguucaa

SEQ ID NO: 1931524 - RNA, 19 nt, Artificial Sequence
  Description of Artificial Sequence: Synthetic oligonucleotide
aaaauuuucaccuuggacu

SEQ ID NO: 1931525 - RNA, 19 nt, Artificial Sequence
  Description of Artificial Sequence: Synthetic oligonucleotide
aacccugucauuuaauucc

SEQ ID NO: 1931526 - RNA, 19 nt, Artificial Sequence
  Description of Artificial Sequence: Synthetic oligonucleotide
aaugucauuacuaacacca

SEQ ID NO: 1931527 - RNA, 19 nt, Artificial Sequence
  Description of Artificial Sequence: Synthetic oligonucleotide
uguacuguagccaucuucc

SEQ ID NO: 1931528 - RNA, 19 nt, Artificial Sequence
  Description of Artificial Sequence: Synthetic oligonucleotide
aguagagucuguuuugagc

SEQ ID NO: 1931529 - RNA, 19 nt, Artificial Sequence
  Description of Artificial Sequence: Synthetic oligonucleotide
ugucuaaccagauuggcag

SEQ ID NO: 1931530 - RNA, 19 nt, Artificial Sequence
  Description of Artificial Sequence: Synthetic oligonucleotide
uucauuugcaauauccuug

SEQ ID NO: 1931531 - RNA, 19 nt, Artificial Sequence
  Description of Artificial Sequence: Synthetic oligonucleotide
uucaaaauuuucaccuugg

SEQ ID NO: 1931532 - RNA, 19 nt, Artificial Sequence
  Description of Artificial Sequence: Synthetic oligonucleotide
gaaaaugucaucucugcac

SEQ ID NO: 1931533 - RNA, 19 nt, Artificial Sequence
  Description of Artificial Sequence: Synthetic oligonucleotide
aaaaugucaucucugcacu

SEQ ID NO: 1931534 - RNA, 19 nt, Artificial Sequence
  Description of Artificial Sequence: Synthetic oligonucleotide
acuaacaccacagaaaaug

SEQ ID NO: 1931535 - RNA, 19 nt, Artificial Sequence
  Description of Artificial Sequence: Synthetic oligonucleotide
aauuguucguugcugucuc

SEQ ID NO: 1931536 - RNA, 19 nt, Artificial Sequence
  Description of Artificial Sequence: Synthetic oligonucleotide
aagacagcaucuuggcagc

SEQ ID NO: 1931537 - RNA, 19 nt, Artificial Sequence
  Description of Artificial Sequence: Synthetic oligonucleotide
auauccuuguuacuuugcc

SEQ ID NO: 1931538 - RNA, 19 nt, Artificial Sequence
  Description of Artificial Sequence: Synthetic oligonucleotide
ucuuuuauacuuuucugcu

SEQ ID NO: 1931539 - RNA, 19 nt, Artificial Sequence
  Description of Artificial Sequence: Synthetic oligonucleotide
ucuuauugcuucaucagcu

SEQ ID NO: 1931540 - RNA, 19 nt, Artificial Sequence
  Description of Artificial Sequence: Synthetic oligonucleotide
agcuugucuaaccagauug

SEQ ID NO: 1931541 - RNA, 19 nt, Artificial Sequence
  Description of Artificial Sequence: Synthetic oligonucleotide
uagagcucgguucaggcgg

SEQ ID NO: 1931542 - RNA, 19 nt, Artificial Sequence
  Description of Artificial Sequence: Synthetic oligonucleotide
ugcauuuaaacgcuuguac

SEQ ID NO: 1931543 - RNA, 19 nt, Artificial Sequence
  Description of Artificial Sequence: Synthetic oligonucleotide
acugcacucgcacacaacg

SEQ ID NO: 1931544 - RNA, 19 nt, Artificial Sequence
  Description of Artificial Sequence: Synthetic oligonucleotide
ucaauuguuucuugaaccc

SEQ ID NO: 1931545 - RNA, 19 nt, Artificial Sequence
  Description of Artificial Sequence: Synthetic oligonucleotide
agcucgaacuucuugcugc

SEQ ID NO: 1931546 - RNA, 19 nt, Artificial Sequence
  Description of Artificial Sequence: Synthetic oligonucleotide
caugauguaauuacuguug

SEQ ID NO: 1931547 - RNA, 19 nt, Artificial Sequence
  Description of Artificial Sequence: Synthetic oligonucleotide
augucaauuaauuucaauu

SEQ ID NO: 1931548 - RNA, 19 nt, Artificial Sequence
  Description of Artificial Sequence: Synthetic oligonucleotide
ugaaguaauuguucguugc

SEQ ID NO: 1931549 - RNA, 19 nt, Artificial Sequence
  Description of Artificial Sequence: Synthetic oligonucleotide
gaugacaacagaucucuug

SEQ ID NO: 1931550 - RNA, 19 nt, Artificial Sequence
  Description of Artificial Sequence: Synthetic oligonucleotide
uguuucuugaacccuguca

SEQ ID NO: 1931551 - RNA, 19 nt, Artificial Sequence
  Description of Artificial Sequence: Synthetic oligonucleotide
uuucaauuguuucuugaac

SEQ ID NO: 1931552 - RNA, 19 nt, Artificial Sequence
  Description of Artificial Sequence: Synthetic oligonucleotide
uuuugagccuuguuuacag

SEQ ID NO: 1931553 - RNA, 19 nt, Artificial Sequence
  Description of Artificial Sequence: Synthetic oligonucleotide
ugucauuuaauuccccucu

SEQ ID NO: 1931554 - RNA, 19 nt, Artificial Sequence
  Description of Artificial Sequence: Synthetic oligonucleotide
uuugagacugcugugaagu

SEQ ID NO: 1931555 - RNA, 19 nt, Artificial Sequence
  Description of Artificial Sequence: Synthetic oligonucleotide
aucacauggaguuuggccu

SEQ ID NO: 1931556 - RNA, 19 nt, Artificial Sequence
  Description of Artificial Sequence: Synthetic oligonucleotide
ugaacugccccacucaaga

SEQ ID NO: 1931557 - RNA, 19 nt, Artificial Sequence
  Description of Artificial Sequence: Synthetic oligonucleotide
uauugaugagagcugcugc

SEQ ID NO: 1931558 - RNA, 19 nt, Artificial Sequence
  Description of Artificial Sequence: Synthetic oligonucleotide
ggauguuucaguuuaacac

SEQ ID NO: 1931559 - RNA, 19 nt, Artificial Sequence
  Description of Artificial Sequence: Synthetic oligonucleotide
uggaguuuggccuucagaa

SEQ ID NO: 1931560 - RNA, 19 nt, Artificial Sequence
  Description of Artificial Sequence: Synthetic oligonucleotide
aauugucuuggcaagggag

SEQ ID NO: 1931561 - RNA, 19 nt, Artificial Sequence
  Description of Artificial Sequence: Synthetic oligonucleotide
aaaaggccuagcucgaacu

SEQ ID NO: 1931562 - RNA, 19 nt, Artificial Sequence
  Description of Artificial Sequence: Synthetic oligonucleotide
ucucuuauugcuucaucag

SEQ ID NO: 1931563 - RNA, 19 nt, Artificial Sequence
  Description of Artificial Sequence: Synthetic oligonucleotide
aauccugcuaauugucuug

SEQ ID NO: 1931564 - RNA, 19 nt, Artificial Sequence
  Description of Artificial Sequence: Synthetic oligonucleotide
acugaguaucugcagcacc

SEQ ID NO: 1931565 - RNA, 19 nt, Artificial Sequence
  Description of Artificial Sequence: Synthetic oligonucleotide
cauuuaaacgcuuguacuc

SEQ ID NO: 1931566 - RNA, 19 nt, Artificial Sequence
  Description of Artificial Sequence: Synthetic oligonucleotide
ugaucugagccucuguccc

SEQ ID NO: 1931567 - RNA, 19 nt, Artificial Sequence
  Description of Artificial Sequence: Synthetic oligonucleotide
uuugacuuguggcagccug

SEQ ID NO: 1931568 - RNA, 19 nt, Artificial Sequence
  Description of Artificial Sequence: Synthetic oligonucleotide
uuugcaugauguaauuacu

SEQ ID NO: 1931569 - RNA, 19 nt, Artificial Sequence
  Description of Artificial Sequence: Synthetic oligonucleotide
cuuguuuacaggaccagug

SEQ ID NO: 1931570 - RNA, 19 nt, Artificial Sequence
  Description of Artificial Sequence: Synthetic oligonucleotide
uuuaaauccugaauuucau

SEQ ID NO: 1931571 - RNA, 19 nt, Artificial Sequence
  Description of Artificial Sequence: Synthetic oligonucleotide
ugucauuacuaacaccaca

SEQ ID NO: 1931572 - RNA, 19 nt, Artificial Sequence
  Description of Artificial Sequence: Synthetic oligonucleotide
uuuggcuugguuucugacc

SEQ ID NO: 1931573 - RNA, 19 nt, Artificial Sequence
  Description of Artificial Sequence: Synthetic oligonucleotide
gucauuacuaacaccacag

SEQ ID NO: 1931574 - RNA, 19 nt, Artificial Sequence
  Description of Artificial Sequence: Synthetic oligonucleotide
aguaauuguucguugcugu

SEQ ID NO: 1931575 - RNA, 19 nt, Artificial Sequence
  Description of Artificial Sequence: Synthetic oligonucleotide
caucacauggaguuuggcc

SEQ ID NO: 1931576 - RNA, 19 nt, Artificial Sequence
  Description of Artificial Sequence: Synthetic oligonucleotide
cuuuaaauccugaauuuca

SEQ ID NO: 1931577 - RNA, 19 nt, Artificial Sequence
  Description of Artificial Sequence: Synthetic oligonucleotide
ucuuacugcacucgcacac

SEQ ID NO: 1931578 - RNA, 19 nt, Artificial Sequence
  Description of Artificial Sequence: Synthetic oligonucleotide
cagaaaaugucaucucugc

SEQ ID NO: 1931579 - RNA, 19 nt, Artificial Sequence
  Description of Artificial Sequence: Synthetic oligonucleotide
aauuguuucuugaacccug

SEQ ID NO: 1931580 - RNA, 19 nt, Artificial Sequence
  Description of Artificial Sequence: Synthetic oligonucleotide
uggacuuuaaauccugaau

SEQ ID NO: 1931581 - RNA, 19 nt, Artificial Sequence
  Description of Artificial Sequence: Synthetic oligonucleotide
uccagcugcaagcugcccg

SEQ ID NO: 1931582 - RNA, 19 nt, Artificial Sequence
  Description of Artificial Sequence: Synthetic oligonucleotide
gacaacagaucucuuguac

SEQ ID NO: 1931583 - RNA, 19 nt, Artificial Sequence
  Description of Artificial Sequence: Synthetic oligonucleotide
gaucucuuguacuguagcc

SEQ ID NO: 1931584 - RNA, 19 nt, Artificial Sequence
  Description of Artificial Sequence: Synthetic oligonucleotide
gaaaucaucugggauggcc

SEQ ID NO: 1931585 - RNA, 19 nt, Artificial Sequence
  Description of Artificial Sequence: Synthetic oligonucleotide
cauuuaauuccccucuuug

SEQ ID NO: 1931586 - RNA, 19 nt, Artificial Sequence
  Description of Artificial Sequence: Synthetic oligonucleotide
acgcuuguacucuugcucg

SEQ ID NO: 1931587 - RNA, 19 nt, Artificial Sequence
  Description of Artificial Sequence: Synthetic oligonucleotide
caccuuggacuuuaaaucc

SEQ ID NO: 1931588 - RNA, 19 nt, Artificial Sequence
  Description of Artificial Sequence: Synthetic oligonucleotide
ugcuaauugucuuggcaag

SEQ ID NO: 1931589 - RNA, 19 nt, Artificial Sequence
  Description of Artificial Sequence: Synthetic oligonucleotide
gaccauguaugauccaucc

SEQ ID NO: 1931590 - RNA, 19 nt, Artificial Sequence
  Description of Artificial Sequence: Synthetic oligonucleotide
uguuacuuugccuuaguuu

SEQ ID NO: 1931591 - RNA, 19 nt, Artificial Sequence
  Description of Artificial Sequence: Synthetic oligonucleotide
gauguuucaguuuaacacu

SEQ ID NO: 1931592 - RNA, 19 nt, Artificial Sequence
  Description of Artificial Sequence: Synthetic oligonucleotide
uaaacgcuuguacucuugc

SEQ ID NO: 1931593 - RNA, 19 nt, Artificial Sequence
  Description of Artificial Sequence: Synthetic oligonucleotide
uugagccuuguuuacagga

SEQ ID NO: 1931594 - RNA, 19 nt, Artificial Sequence
  Description of Artificial Sequence: Synthetic oligonucleotide
auucccucucuauugauga

SEQ ID NO: 1931595 - RNA, 19 nt, Artificial Sequence
  Description of Artificial Sequence: Synthetic oligonucleotide
uuuucuaauucccucucua

SEQ ID NO: 1931596 - RNA, 19 nt, Artificial Sequence
  Description of Artificial Sequence: Synthetic oligonucleotide
agaaaucugaucugagccu

SEQ ID NO: 1931597 - RNA, 19 nt, Artificial Sequence
  Description of Artificial Sequence: Synthetic oligonucleotide
auuugcaauauccuuguua

SEQ ID NO: 1931598 - RNA, 19 nt, Artificial Sequence
  Description of Artificial Sequence: Synthetic oligonucleotide
ugauccaucccuucagaug

SEQ ID NO: 1931599 - RNA, 19 nt, Artificial Sequence
  Description of Artificial Sequence: Synthetic oligonucleotide
aaguaauuguucguugcug

SEQ ID NO: 1931600 - RNA, 19 nt, Artificial Sequence
  Description of Artificial Sequence: Synthetic oligonucleotide
uugguuucugaccauguau

SEQ ID NO: 1931601 - RNA, 19 nt, Artificial Sequence
  Description of Artificial Sequence: Synthetic oligonucleotide
cucuuauugcuucaucagc

SEQ ID NO: 1931602 - RNA, 19 nt, Artificial Sequence
  Description of Artificial Sequence: Synthetic oligonucleotide
uuuaucugcagaguagagu

SEQ ID NO: 1931603 - RNA, 19 nt, Artificial Sequence
  Description of Artificial Sequence: Synthetic oligonucleotide
auuacuaacaccacagaaa

SEQ ID NO: 1931604 - RNA, 19 nt, Artificial Sequence
  Description of Artificial Sequence: Synthetic oligonucleotide
acaacagaucucuuguacu

SEQ ID NO: 1931605 - RNA, 19 nt, Artificial Sequence
  Description of Artificial Sequence: Synthetic oligonucleotide
ugcucacucaugaacugcc

SEQ ID NO: 1931606 - RNA, 19 nt, Artificial Sequence
  Description of Artificial Sequence: Synthetic oligonucleotide
uuaaauccugaauuucauc

SEQ ID NO: 1931607 - RNA, 19 nt, Artificial Sequence
  Description of Artificial Sequence: Synthetic oligonucleotide
augauguaauuacuguuga

SEQ ID NO: 1931608 - RNA, 19 nt, Artificial Sequence
  Description of Artificial Sequence: Synthetic oligonucleotide
cacaacgcuguccaguucc

SEQ ID NO: 1931609 - RNA, 19 nt, Artificial Sequence
  Description of Artificial Sequence: Synthetic oligonucleotide
cuaauugucuuggcaaggg

SEQ ID NO: 1931610 - RNA, 19 nt, Artificial Sequence
  Description of Artificial Sequence: Synthetic oligonucleotide
ugucccaaugucauuacua

SEQ ID NO: 1931611 - RNA, 19 nt, Artificial Sequence
  Description of Artificial Sequence: Synthetic oligonucleotide
ugggauggccacaucacug

SEQ ID NO: 1931612 - RNA, 19 nt, Artificial Sequence
  Description of Artificial Sequence: Synthetic oligonucleotide
caacagaucucuuguacug

SEQ ID NO: 1931613 - RNA, 19 nt, Artificial Sequence
  Description of Artificial Sequence: Synthetic oligonucleotide
uugccuuaguuuauucagc

SEQ ID NO: 1931614 - RNA, 19 nt, Artificial Sequence
  Description of Artificial Sequence: Synthetic oligonucleotide
ucaauccugcuaauugucu

SEQ ID NO: 1931615 - RNA, 19 nt, Artificial Sequence
  Description of Artificial Sequence: Synthetic oligonucleotide
ucauuacuaacaccacaga

SEQ ID NO: 1931616 - RNA, 19 nt, Artificial Sequence
  Description of Artificial Sequence: Synthetic oligonucleotide
uuaaacgcuuguacucuug

SEQ ID NO: 1931617 - RNA, 19 nt, Artificial Sequence
  Description of Artificial Sequence: Synthetic oligonucleotide
agaaaaugucaucucugca

SEQ ID NO: 1931618 - RNA, 19 nt, Artificial Sequence
  Description of Artificial Sequence: Synthetic oligonucleotide
uuugagccuuguuuacagg

SEQ ID NO: 1931619 - RNA, 19 nt, Artificial Sequence
  Description of Artificial Sequence: Synthetic oligonucleotide
aaaucaucugggauggcca

SEQ ID NO: 1931620 - RNA, 19 nt, Artificial Sequence
  Description of Artificial Sequence: Synthetic oligonucleotide
ucaugaacugccccacuca

SEQ ID NO: 1931621 - RNA, 19 nt, Artificial Sequence
  Description of Artificial Sequence: Synthetic oligonucleotide
uggcacuuugacuuguggc

SEQ ID NO: 1931622 - RNA, 19 nt, Artificial Sequence
  Description of Artificial Sequence: Synthetic oligonucleotide
uuguacuguagccaucuuc

SEQ ID NO: 1931623 - RNA, 19 nt, Artificial Sequence
  Description of Artificial Sequence: Synthetic oligonucleotide
uugcucgcgggccagguag

SEQ ID NO: 1931624 - RNA, 19 nt, Artificial Sequence
  Description of Artificial Sequence: Synthetic oligonucleotide
ugccuuaguuuauucagcu

SEQ ID NO: 1931625 - RNA, 19 nt, Artificial Sequence
  Description of Artificial Sequence: Synthetic oligonucleotide
uccucacugaaagacagca

SEQ ID NO: 1931626 - RNA, 19 nt, Artificial Sequence
  Description of Artificial Sequence: Synthetic oligonucleotide
cuucuuacugcacucgcac

SEQ ID NO: 1931627 - RNA, 19 nt, Artificial Sequence
  Description of Artificial Sequence: Synthetic oligonucleotide
uucaggcggacuucugugg

SEQ ID NO: 1931628 - RNA, 19 nt, Artificial Sequence
  Description of Artificial Sequence: Synthetic oligonucleotide
uggcagucugcacacgggg

SEQ ID NO: 1931629 - RNA, 19 nt, Artificial Sequence
  Description of Artificial Sequence: Synthetic oligonucleotide
ugucaucucugcacucugg

SEQ ID NO: 1931630 - RNA, 19 nt, Artificial Sequence
  Description of Artificial Sequence: Synthetic oligonucleotide
uauuugagacugcugugaa

SEQ ID NO: 1931631 - RNA, 19 nt, Artificial Sequence
  Description of Artificial Sequence: Synthetic oligonucleotide
ucacucaugaacugcccca

SEQ ID NO: 1931632 - RNA, 19 nt, Artificial Sequence
  Description of Artificial Sequence: Synthetic oligonucleotide
uuaacacuuggauuuguuu

SEQ ID NO: 1931633 - RNA, 19 nt, Artificial Sequence
  Description of Artificial Sequence: Synthetic oligonucleotide
ucuucugccuuuucaaaau

SEQ ID NO: 1931634 - RNA, 19 nt, Artificial Sequence
  Description of Artificial Sequence: Synthetic oligonucleotide
ucgcacacaacgcugucca

SEQ ID NO: 1931635 - RNA, 19 nt, Artificial Sequence
  Description of Artificial Sequence: Synthetic oligonucleotide
uauccuuguuacuuugccu

SEQ ID NO: 1931636 - RNA, 19 nt, Artificial Sequence
  Description of Artificial Sequence: Synthetic oligonucleotide
uaauugucuuggcaaggga

SEQ ID NO: 1931637 - RNA, 19 nt, Artificial Sequence
  Description of Artificial Sequence: Synthetic oligonucleotide
ugugaaguaauuguucguu

SEQ ID NO: 1931638 - RNA, 19 nt, Artificial Sequence
  Description of Artificial Sequence: Synthetic oligonucleotide
ugcacucgcacacaacgcu

SEQ ID NO: 1931639 - RNA, 19 nt, Artificial Sequence
  Description of Artificial Sequence: Synthetic oligonucleotide
aauucccucucuauugaug

SEQ ID NO: 1931640 - RNA, 19 nt, Artificial Sequence
  Description of Artificial Sequence: Synthetic oligonucleotide
uuugccucuaauucugcau

SEQ ID NO: 1931641 - RNA, 19 nt, Artificial Sequence
  Description of Artificial Sequence: Synthetic oligonucleotide
ugcaucacauggaguuugg

SEQ ID NO: 1931642 - RNA, 19 nt, Artificial Sequence
  Description of Artificial Sequence: Synthetic oligonucleotide
acacuuggauuuguuuucc

SEQ ID NO: 1931643 - RNA, 19 nt, Artificial Sequence
  Description of Artificial Sequence: Synthetic oligonucleotide
aaacgcuuguacucuugcu

SEQ ID NO: 1931644 - RNA, 19 nt, Artificial Sequence
  Description of Artificial Sequence: Synthetic oligonucleotide
caagggagaagucugagaa

SEQ ID NO: 1931645 - RNA, 19 nt, Artificial Sequence
  Description of Artificial Sequence: Synthetic oligonucleotide
gagccuuguuuacaggacc

SEQ ID NO: 1931646 - RNA, 19 nt, Artificial Sequence
  Description of Artificial Sequence: Synthetic oligonucleotide
cugaucugagccucugucc

SEQ ID NO: 1931647 - RNA, 19 nt, Artificial Sequence
  Description of Artificial Sequence: Synthetic oligonucleotide
uuuaacacuuggauuuguu

SEQ ID NO: 1931648 - RNA, 19 nt, Artificial Sequence
  Description of Artificial Sequence: Synthetic oligonucleotide
uguuuacaggaccaguguu

SEQ ID NO: 1931649 - RNA, 19 nt, Artificial Sequence
  Description of Artificial Sequence: Synthetic oligonucleotide
auuugagacugcugugaag

SEQ ID NO: 1931650 - RNA, 19 nt, Artificial Sequence
  Description of Artificial Sequence: Synthetic oligonucleotide
gugaaguaauuguucguug

SEQ ID NO: 1931651 - RNA, 19 nt, Artificial Sequence
  Description of Artificial Sequence: Synthetic oligonucleotide
uaauuguucguugcugucu

SEQ ID NO: 1931652 - RNA, 19 nt, Artificial Sequence
  Description of Artificial Sequence: Synthetic oligonucleotide
gaguaucugcagcaccgcg

SEQ ID NO: 1931653 - RNA, 19 nt, Artificial Sequence
  Description of Artificial Sequence: Synthetic oligonucleotide
cuuuaucugcagaguagag

SEQ ID NO: 1931654 - RNA, 19 nt, Artificial Sequence
  Description of Artificial Sequence: Synthetic oligonucleotide
ugagccuuguuuacaggac

SEQ ID NO: 1931655 - RNA, 19 nt, Artificial Sequence
  Description of Artificial Sequence: Synthetic oligonucleotide
aaggccuagcucgaacuuc

SEQ ID NO: 1931656 - RNA, 19 nt, Artificial Sequence
  Description of Artificial Sequence: Synthetic oligonucleotide
cuagagcucgguucaggcg

SEQ ID NO: 1931657 - RNA, 19 nt, Artificial Sequence
  Description of Artificial Sequence: Synthetic oligonucleotide
ucucuuguacuguagccau

SEQ ID NO: 1931658 - RNA, 19 nt, Artificial Sequence
  Description of Artificial Sequence: Synthetic oligonucleotide
guaggucccguccagcugc

SEQ ID NO: 1931659 - RNA, 19 nt, Artificial Sequence
  Description of Artificial Sequence: Synthetic oligonucleotide
uuuauucagcuccucuuuu

SEQ ID NO: 1931660 - RNA, 19 nt, Artificial Sequence
  Description of Artificial Sequence: Synthetic oligonucleotide
acagaaaaugucaucucug

SEQ ID NO: 1931661 - RNA, 19 nt, Artificial Sequence
  Description of Artificial Sequence: Synthetic oligonucleotide
cucuauugaugagagcugc

SEQ ID NO: 1931662 - RNA, 19 nt, Artificial Sequence
  Description of Artificial Sequence: Synthetic oligonucleotide
auguaugauccaucccuuc

SEQ ID NO: 1931663 - RNA, 19 nt, Artificial Sequence
  Description of Artificial Sequence: Synthetic oligonucleotide
cacucaagagccuucauaa

SEQ ID NO: 1931664 - RNA, 19 nt, Artificial Sequence
  Description of Artificial Sequence: Synthetic oligonucleotide
ucuauugaugagagcugcu

SEQ ID NO: 1931665 - RNA, 19 nt, Artificial Sequence
  Description of Artificial Sequence: Synthetic oligonucleotide
uuucugauuuuaacacuuc

SEQ ID NO: 1931666 - RNA, 19 nt, Artificial Sequence
  Description of Artificial Sequence: Synthetic oligonucleotide
gaaaucugaucugagccuc

SEQ ID NO: 1931667 - RNA, 19 nt, Artificial Sequence
  Description of Artificial Sequence: Synthetic oligonucleotide
uccuuucuuuaucugcaga

SEQ ID NO: 1931668 - RNA, 19 nt, Artificial Sequence
  Description of Artificial Sequence: Synthetic oligonucleotide
aauaugcaucuucugccuu

SEQ ID NO: 1931669 - RNA, 19 nt, Artificial Sequence
  Description of Artificial Sequence: Synthetic oligonucleotide
cauuacuaacaccacagaa

SEQ ID NO: 1931670 - RNA, 19 nt, Artificial Sequence
  Description of Artificial Sequence: Synthetic oligonucleotide
aucccuucagaugacaaca

SEQ ID NO: 1931671 - RNA, 19 nt, Artificial Sequence
  Description of Artificial Sequence: Synthetic oligonucleotide
ccuagcucgaacuucuugc

SEQ ID NO: 1931672 - RNA, 19 nt, Artificial Sequence
  Description of Artificial Sequence: Synthetic oligonucleotide
cuugucuaaccagauuggc

SEQ ID NO: 1931673 - RNA, 19 nt, Artificial Sequence
  Description of Artificial Sequence: Synthetic oligonucleotide
cuucaauaugcaucuucug

SEQ ID NO: 1931674 - RNA, 19 nt, Artificial Sequence
  Description of Artificial Sequence: Synthetic oligonucleotide
cuuguacucuugcucgcgg

SEQ ID NO: 1931675 - RNA, 19 nt, Artificial Sequence
  Description of Artificial Sequence: Synthetic oligonucleotide
ucccuucagaugacaacag

SEQ ID NO: 1931676 - RNA, 19 nt, Artificial Sequence
  Description of Artificial Sequence: Synthetic oligonucleotide
gucaauuaauuucaauugu

SEQ ID NO: 1931677 - RNA, 19 nt, Artificial Sequence
  Description of Artificial Sequence: Synthetic oligonucleotide
aucuuggcagcuucaauau

SEQ ID NO: 1931678 - RNA, 19 nt, Artificial Sequence
  Description of Artificial Sequence: Synthetic oligonucleotide
cucacucaugaacugcccc

SEQ ID NO: 1931679 - RNA, 19 nt, Artificial Sequence
  Description of Artificial Sequence: Synthetic oligonucleotide
cuauugaugagagcugcug

SEQ ID NO: 1931680 - RNA, 19 nt, Artificial Sequence
  Description of Artificial Sequence: Synthetic oligonucleotide
gaaagacagcaucuuggca

SEQ ID NO: 1931681 - RNA, 19 nt, Artificial Sequence
  Description of Artificial Sequence: Synthetic oligonucleotide
guucguugcugucucacac

SEQ ID NO: 1931682 - RNA, 19 nt, Artificial Sequence
  Description of Artificial Sequence: Synthetic oligonucleotide
agggagaagucugagaaau

SEQ ID NO: 1931683 - RNA, 19 nt, Artificial Sequence
  Description of Artificial Sequence: Synthetic oligonucleotide
ucgcgggccagguaggucc

SEQ ID NO: 1931684 - RNA, 19 nt, Artificial Sequence
  Description of Artificial Sequence: Synthetic oligonucleotide
caucagcuugucuaaccag

SEQ ID NO: 1931685 - RNA, 19 nt, Artificial Sequence
  Description of Artificial Sequence: Synthetic oligonucleotide
uucuugaacccugucauuu

SEQ ID NO: 1931686 - RNA, 19 nt, Artificial Sequence
  Description of Artificial Sequence: Synthetic oligonucleotide
uccuccucacugaaagaca

SEQ ID NO: 1931687 - RNA, 19 nt, Artificial Sequence
  Description of Artificial Sequence: Synthetic oligonucleotide
aucucuuguacuguagcca

SEQ ID NO: 1931688 - RNA, 19 nt, Artificial Sequence
  Description of Artificial Sequence: Synthetic oligonucleotide
uuuacaggaccaguguuuu

SEQ ID NO: 1931689 - RNA, 19 nt, Artificial Sequence
  Description of Artificial Sequence: Synthetic oligonucleotide
ucaucucugcacucuggca

SEQ ID NO: 1931690 - RNA, 19 nt, Artificial Sequence
  Description of Artificial Sequence: Synthetic oligonucleotide
aaaggccuagcucgaacuu

SEQ ID NO: 1931691 - RNA, 19 nt, Artificial Sequence
  Description of Artificial Sequence: Synthetic oligonucleotide
uaucugcagaguagagucu

SEQ ID NO: 1931692 - RNA, 19 nt, Artificial Sequence
  Description of Artificial Sequence: Synthetic oligonucleotide
aagggagaagucugagaaa

SEQ ID NO: 1931693 - RNA, 19 nt, Artificial Sequence
  Description of Artificial Sequence: Synthetic oligonucleotide
guucaggcggacuucugug

SEQ ID NO: 1931694 - RNA, 19 nt, Artificial Sequence
  Description of Artificial Sequence: Synthetic oligonucleotide
caucccuucagaugacaac

SEQ ID NO: 1931695 - RNA, 19 nt, Artificial Sequence
  Description of Artificial Sequence: Synthetic oligonucleotide
acccugucauuuaauuccc

SEQ ID NO: 1931696 - RNA, 19 nt, Artificial Sequence
  Description of Artificial Sequence: Synthetic oligonucleotide
gacugcugugaaguaauug

SEQ ID NO: 1931697 - RNA, 19 nt, Artificial Sequence
  Description of Artificial Sequence: Synthetic oligonucleotide
ggcacuuugacuuguggca

SEQ ID NO: 1931698 - RNA, 19 nt, Artificial Sequence
  Description of Artificial Sequence: Synthetic oligonucleotide
cugcuaauugucuuggcaa

SEQ ID NO: 1931699 - RNA, 19 nt, Artificial Sequence
  Description of Artificial Sequence: Synthetic oligonucleotide
cacaucacuggcagucugc

SEQ ID NO: 1931700 - RNA, 19 nt, Artificial Sequence
  Description of Artificial Sequence: Synthetic oligonucleotide
aaucugaucugagccucug

SEQ ID NO: 1931701 - RNA, 19 nt, Artificial Sequence
  Description of Artificial Sequence: Synthetic oligonucleotide
ucccaaugucauuacuaac

SEQ ID NO: 1931702 - RNA, 19 nt, Artificial Sequence
  Description of Artificial Sequence: Synthetic oligonucleotide
acggggauguuucaguuua

SEQ ID NO: 1931703 - RNA, 19 nt, Artificial Sequence
  Description of Artificial Sequence: Synthetic oligonucleotide
auugucuuggcaagggaga

SEQ ID NO: 1931704 - RNA, 19 nt, Artificial Sequence
  Description of Artificial Sequence: Synthetic oligonucleotide
uucuuacugcacucgcaca

SEQ ID NO: 1931705 - RNA, 19 nt, Artificial Sequence
  Description of Artificial Sequence: Synthetic oligonucleotide
auccugcuaauugucuugg

SEQ ID NO: 1931706 - RNA, 19 nt, Artificial Sequence
  Description of Artificial Sequence: Synthetic oligonucleotide
uuguuacuuugccuuaguu

SEQ ID NO: 1931707 - RNA, 19 nt, Artificial Sequence
  Description of Artificial Sequence: Synthetic oligonucleotide
uagcucgaacuucuugcug

SEQ ID NO: 1931708 - RNA, 19 nt, Artificial Sequence
  Description of Artificial Sequence: Synthetic oligonucleotide
uuacuuugccuuaguuuau

SEQ ID NO: 1931709 - RNA, 19 nt, Artificial Sequence
  Description of Artificial Sequence: Synthetic oligonucleotide
ugagacugcugugaaguaa

SEQ ID NO: 1931710 - RNA, 19 nt, Artificial Sequence
  Description of Artificial Sequence: Synthetic oligonucleotide
gggauggccacaucacugg

SEQ ID NO: 1931711 - RNA, 19 nt, Artificial Sequence
  Description of Artificial Sequence: Synthetic oligonucleotide
aucugcagaguagagucug

SEQ ID NO: 1931712 - RNA, 19 nt, Artificial Sequence
  Description of Artificial Sequence: Synthetic oligonucleotide
cagaucucuuguacuguag

SEQ ID NO: 1931713 - RNA, 19 nt, Artificial Sequence
  Description of Artificial Sequence: Synthetic oligonucleotide
cuaauucccucucuauuga

SEQ ID NO: 1931714 - RNA, 19 nt, Artificial Sequence
  Description of Artificial Sequence: Synthetic oligonucleotide
augucauuacuaacaccac

SEQ ID NO: 1931715 - RNA, 19 nt, Artificial Sequence
  Description of Artificial Sequence: Synthetic oligonucleotide
gaacugccccacucaagag

SEQ ID NO: 1931716 - RNA, 19 nt, Artificial Sequence
  Description of Artificial Sequence: Synthetic oligonucleotide
uuacugcacucgcacacaa

SEQ ID NO: 1931717 - RNA, 19 nt, Artificial Sequence
  Description of Artificial Sequence: Synthetic oligonucleotide
guggcacuuugacuugugg

SEQ ID NO: 1931718 - RNA, 19 nt, Artificial Sequence
  Description of Artificial Sequence: Synthetic oligonucleotide
aguuuggccuucagaaauc

SEQ ID NO: 1931719 - RNA, 19 nt, Artificial Sequence
  Description of Artificial Sequence: Synthetic oligonucleotide
cccaaugucauuacuaaca

SEQ ID NO: 1931720 - RNA, 19 nt, Artificial Sequence
  Description of Artificial Sequence: Synthetic oligonucleotide
uggugaucuucauuugcaa

SEQ ID NO: 1931721 - RNA, 19 nt, Artificial Sequence
  Description of Artificial Sequence: Synthetic oligonucleotide
aucagcuugucuaaccaga

SEQ ID NO: 1931722 - RNA, 19 nt, Artificial Sequence
  Description of Artificial Sequence: Synthetic oligonucleotide
uaaccagauuggcaguuuu

SEQ ID NO: 1931723 - RNA, 19 nt, Artificial Sequence
  Description of Artificial Sequence: Synthetic oligonucleotide
ugagagcugcugcuguagu

SEQ ID NO: 1931724 - RNA, 19 nt, Artificial Sequence
  Description of Artificial Sequence: Synthetic oligonucleotide
uaauuccccucuuugucuu

SEQ ID NO: 1931725 - RNA, 19 nt, Artificial Sequence
  Description of Artificial Sequence: Synthetic oligonucleotide
uagagucuguuuugagccu

SEQ ID NO: 1931726 - RNA, 19 nt, Artificial Sequence
  Description of Artificial Sequence: Synthetic oligonucleotide
ucuuugcaugauguaauua

SEQ ID NO: 1931727 - RNA, 19 nt, Artificial Sequence
  Description of Artificial Sequence: Synthetic oligonucleotide
gucccguccagcugcaagc

SEQ ID NO: 1931728 - RNA, 19 nt, Artificial Sequence
  Description of Artificial Sequence: Synthetic oligonucleotide
ucuugaacccugucauuua

SEQ ID NO: 1931729 - RNA, 19 nt, Artificial Sequence
  Description of Artificial Sequence: Synthetic oligonucleotide
cacuuugacuuguggcagc

SEQ ID NO: 1931730 - RNA, 19 nt, Artificial Sequence
  Description of Artificial Sequence: Synthetic oligonucleotide
caucucugcacucuggcaa

SEQ ID NO: 1931731 - RNA, 19 nt, Artificial Sequence
  Description of Artificial Sequence: Synthetic oligonucleotide
uucccucucuauugaugag

SEQ ID NO: 1931732 - RNA, 19 nt, Artificial Sequence
  Description of Artificial Sequence: Synthetic oligonucleotide
ugaguaucugcagcaccgc

SEQ ID NO: 1931733 - RNA, 19 nt, Artificial Sequence
  Description of Artificial Sequence: Synthetic oligonucleotide
ugcagaguagagucuguuu

SEQ ID NO: 1931734 - RNA, 19 nt, Artificial Sequence
  Description of Artificial Sequence: Synthetic oligonucleotide
cugcacacggggauguuuc

SEQ ID NO: 1931735 - RNA, 19 nt, Artificial Sequence
  Description of Artificial Sequence: Synthetic oligonucleotide
cugcacucgcacacaacgc

SEQ ID NO: 1931736 - RNA, 19 nt, Artificial Sequence
  Description of Artificial Sequence: Synthetic oligonucleotide
ggacuuuaaauccugaauu

SEQ ID NO: 1931737 - RNA, 19 nt, Artificial Sequence
  Description of Artificial Sequence: Synthetic oligonucleotide
uaauucccucucuauugau

SEQ ID NO: 1931738 - RNA, 19 nt, Artificial Sequence
  Description of Artificial Sequence: Synthetic oligonucleotide
uugcaauauccuuguuacu

SEQ ID NO: 1931739 - RNA, 19 nt, Artificial Sequence
  Description of Artificial Sequence: Synthetic oligonucleotide
uuguucguugcugucucac

SEQ ID NO: 1931740 - RNA, 19 nt, Artificial Sequence
  Description of Artificial Sequence: Synthetic oligonucleotide
aguaucugcagcaccgcgu

SEQ ID NO: 1931741 - RNA, 19 nt, Artificial Sequence
  Description of Artificial Sequence: Synthetic oligonucleotide
gcuaauugucuuggcaagg

SEQ ID NO: 1931742 - RNA, 19 nt, Artificial Sequence
  Description of Artificial Sequence: Synthetic oligonucleotide
ucuaaccagauuggcaguu

SEQ ID NO: 1931743 - RNA, 19 nt, Artificial Sequence
  Description of Artificial Sequence: Synthetic oligonucleotide
cuaacaccacagaaaaugu

SEQ ID NO: 1931744 - RNA, 19 nt, Artificial Sequence
  Description of Artificial Sequence: Synthetic oligonucleotide
gggauguuucaguuuaaca

SEQ ID NO: 1931745 - RNA, 19 nt, Artificial Sequence
  Description of Artificial Sequence: Synthetic oligonucleotide
cugcaucacauggaguuug

SEQ ID NO: 1931746 - RNA, 19 nt, Artificial Sequence
  Description of Artificial Sequence: Synthetic oligonucleotide
gcgacugaguaucugcagc

SEQ ID NO: 1931747 - RNA, 19 nt, Artificial Sequence
  Description of Artificial Sequence: Synthetic oligonucleotide
aaaucugaucugagccucu

SEQ ID NO: 1931748 - RNA, 19 nt, Artificial Sequence
  Description of Artificial Sequence: Synthetic oligonucleotide
cacagaaaaugucaucucu

SEQ ID NO: 1931749 - RNA, 19 nt, Artificial Sequence
  Description of Artificial Sequence: Synthetic oligonucleotide
ucacauggaguuuggccuu

SEQ ID NO: 1931750 - RNA, 19 nt, Artificial Sequence
  Description of Artificial Sequence: Synthetic oligonucleotide
cuccuucuuacugcacucg

SEQ ID NO: 1931751 - RNA, 19 nt, Artificial Sequence
  Description of Artificial Sequence: Synthetic oligonucleotide
ucaucugggauggccacau

SEQ ID NO: 1931752 - RNA, 19 nt, Artificial Sequence
  Description of Artificial Sequence: Synthetic oligonucleotide
agaaaucaucugggauggc

SEQ ID NO: 1931753 - RNA, 19 nt, Artificial Sequence
  Description of Artificial Sequence: Synthetic oligonucleotide
aggcggacuucuguggcac

SEQ ID NO: 1931754 - RNA, 19 nt, Artificial Sequence
  Description of Artificial Sequence: Synthetic oligonucleotide
cccucaauccugcuaauug

SEQ ID NO: 1931755 - RNA, 19 nt, Artificial Sequence
  Description of Artificial Sequence: Synthetic oligonucleotide
ugcugcuguaguccaucac

SEQ ID NO: 1931756 - RNA, 19 nt, Artificial Sequence
  Description of Artificial Sequence: Synthetic oligonucleotide
acucaagagccuucauaaa

SEQ ID NO: 1931757 - RNA, 19 nt, Artificial Sequence
  Description of Artificial Sequence: Synthetic oligonucleotide
guuuugagccuuguuuaca

SEQ ID NO: 1931758 - RNA, 19 nt, Artificial Sequence
  Description of Artificial Sequence: Synthetic oligonucleotide
acacaacgcuguccaguuc

SEQ ID NO: 1931759 - RNA, 19 nt, Artificial Sequence
  Description of Artificial Sequence: Synthetic oligonucleotide
gcauuuaaacgcuuguacu

SEQ ID NO: 1931760 - RNA, 19 nt, Artificial Sequence
  Description of Artificial Sequence: Synthetic oligonucleotide
uccugcuaauugucuuggc

SEQ ID NO: 1931761 - RNA, 19 nt, Artificial Sequence
  Description of Artificial Sequence: Synthetic oligonucleotide
gcugcaagcugcccgcgcg

SEQ ID NO: 1931762 - RNA, 19 nt, Artificial Sequence
  Description of Artificial Sequence: Synthetic oligonucleotide
uccuuguuacuuugccuua

SEQ ID NO: 1931763 - RNA, 19 nt, Artificial Sequence
  Description of Artificial Sequence: Synthetic oligonucleotide
cuugaacccugucauuuaa

SEQ ID NO: 1931764 - RNA, 19 nt, Artificial Sequence
  Description of Artificial Sequence: Synthetic oligonucleotide
cccucucuauugaugagag

SEQ ID NO: 1931765 - RNA, 19 nt, Artificial Sequence
  Description of Artificial Sequence: Synthetic oligonucleotide
uacugcacucgcacacaac

SEQ ID NO: 1931766 - RNA, 19 nt, Artificial Sequence
  Description of Artificial Sequence: Synthetic oligonucleotide
gcugcucucuuauugcuuc

SEQ ID NO: 1931767 - RNA, 19 nt, Artificial Sequence
  Description of Artificial Sequence: Synthetic oligonucleotide
cucgcacacaacgcugucc

SEQ ID NO: 1931768 - RNA, 19 nt, Artificial Sequence
  Description of Artificial Sequence: Synthetic oligonucleotide
auuguucguugcugucuca

SEQ ID NO: 1931769 - RNA, 19 nt, Artificial Sequence
  Description of Artificial Sequence: Synthetic oligonucleotide
caagcugcccgcgcgacug

SEQ ID NO: 1931770 - RNA, 19 nt, Artificial Sequence
  Description of Artificial Sequence: Synthetic oligonucleotide
ucuuggcaagggagaaguc

SEQ ID NO: 1931771 - RNA, 19 nt, Artificial Sequence
  Description of Artificial Sequence: Synthetic oligonucleotide
aucugaucugagccucugu

SEQ ID NO: 1931772 - RNA, 19 nt, Artificial Sequence
  Description of Artificial Sequence: Synthetic oligonucleotide
gacugaguaucugcagcac

SEQ ID NO: 1931773 - RNA, 19 nt, Artificial Sequence
  Description of Artificial Sequence: Synthetic oligonucleotide
ugccucuaauucugcauuu

SEQ ID NO: 1931774 - RNA, 19 nt, Artificial Sequence
  Description of Artificial Sequence: Synthetic oligonucleotide
guacucuugcucgcgggcc

SEQ ID NO: 1931775 - RNA, 19 nt, Artificial Sequence
  Description of Artificial Sequence: Synthetic oligonucleotide
acacggggauguuucaguu

SEQ ID NO: 1931776 - RNA, 19 nt, Artificial Sequence
  Description of Artificial Sequence: Synthetic oligonucleotide
agccuuguuuacaggacca

SEQ ID NO: 1931777 - RNA, 19 nt, Artificial Sequence
  Description of Artificial Sequence: Synthetic oligonucleotide
accuuggacuuuaaauccu

SEQ ID NO: 1931778 - RNA, 19 nt, Artificial Sequence
  Description of Artificial Sequence: Synthetic oligonucleotide
augaacugccccacucaag

SEQ ID NO: 1931779 - RNA, 19 nt, Artificial Sequence
  Description of Artificial Sequence: Synthetic oligonucleotide
acucaugaacugccccacu

SEQ ID NO: 1931780 - RNA, 19 nt, Artificial Sequence
  Description of Artificial Sequence: Synthetic oligonucleotide
cacucaugaacugccccac

SEQ ID NO: 1931781 - RNA, 19 nt, Artificial Sequence
  Description of Artificial Sequence: Synthetic oligonucleotide
caugaacugccccacucaa

SEQ ID NO: 1931782 - RNA, 19 nt, Artificial Sequence
  Description of Artificial Sequence: Synthetic oligonucleotide
agcugccccucaauccugc

SEQ ID NO: 1931783 - RNA, 19 nt, Artificial Sequence
  Description of Artificial Sequence: Synthetic oligonucleotide
uacuuugccuuaguuuauu

SEQ ID NO: 1931784 - RNA, 19 nt, Artificial Sequence
  Description of Artificial Sequence: Synthetic oligonucleotide
ccguccagcugcaagcugc

SEQ ID NO: 1931785 - RNA, 19 nt, Artificial Sequence
  Description of Artificial Sequence: Synthetic oligonucleotide
cugagaaaucaucugggau

SEQ ID NO: 1931786 - RNA, 19 nt, Artificial Sequence
  Description of Artificial Sequence: Synthetic oligonucleotide
cuggcaagcuguccucuuc

SEQ ID NO: 1931787 - RNA, 19 nt, Artificial Sequence
  Description of Artificial Sequence: Synthetic oligonucleotide
gagucuguuuugagccuug

SEQ ID NO: 1931788 - RNA, 19 nt, Artificial Sequence
  Description of Artificial Sequence: Synthetic oligonucleotide
ucgguucaggcggacuucu

SEQ ID NO: 1931789 - RNA, 19 nt, Artificial Sequence
  Description of Artificial Sequence: Synthetic oligonucleotide
gucuuggcaagggagaagu

SEQ ID NO: 1931790 - RNA, 19 nt, Artificial Sequence
  Description of Artificial Sequence: Synthetic oligonucleotide
gcacuuugacuuguggcag

SEQ ID NO: 1931791 - RNA, 19 nt, Artificial Sequence
  Description of Artificial Sequence: Synthetic oligonucleotide
cuuggcaagggagaagucu

SEQ ID NO: 1931792 - RNA, 19 nt, Artificial Sequence
  Description of Artificial Sequence: Synthetic oligonucleotide
aggccuagcucgaacuucu

SEQ ID NO: 1931793 - RNA, 19 nt, Artificial Sequence
  Description of Artificial Sequence: Synthetic oligonucleotide
agagucuguuuugagccuu

SEQ ID NO: 1931794 - RNA, 19 nt, Artificial Sequence
  Description of Artificial Sequence: Synthetic oligonucleotide
gagacugcugugaaguaau

SEQ ID NO: 1931795 - RNA, 19 nt, Artificial Sequence
  Description of Artificial Sequence: Synthetic oligonucleotide
ucugcacacggggauguuu

SEQ ID NO: 1931796 - RNA, 19 nt, Artificial Sequence
  Description of Artificial Sequence: Synthetic oligonucleotide
gcuuguacucuugcucgcg

SEQ ID NO: 1931797 - RNA, 19 nt, Artificial Sequence
  Description of Artificial Sequence: Synthetic oligonucleotide
cuuuuauacuuuucugcuu

SEQ ID NO: 1931798 - RNA, 19 nt, Artificial Sequence
  Description of Artificial Sequence: Synthetic oligonucleotide
ugucucacacagucuucuu

SEQ ID NO: 1931799 - RNA, 19 nt, Artificial Sequence
  Description of Artificial Sequence: Synthetic oligonucleotide
cuugguuucugaccaugua

SEQ ID NO: 1931800 - RNA, 19 nt, Artificial Sequence
  Description of Artificial Sequence: Synthetic oligonucleotide
ccugcuaauugucuuggca

SEQ ID NO: 1931801 - RNA, 19 nt, Artificial Sequence
  Description of Artificial Sequence: Synthetic oligonucleotide
cuagcucgaacuucuugcu

SEQ ID NO: 1931802 - RNA, 19 nt, Artificial Sequence
  Description of Artificial Sequence: Synthetic oligonucleotide
gcuucaauaugcaucuucu

SEQ ID NO: 1931803 - RNA, 19 nt, Artificial Sequence
  Description of Artificial Sequence: Synthetic oligonucleotide
ggcaagggagaagucugag

SEQ ID NO: 1931804 - RNA, 19 nt, Artificial Sequence
  Description of Artificial Sequence: Synthetic oligonucleotide
uccccucuuugucuuucua

SEQ ID NO: 1931805 - RNA, 19 nt, Artificial Sequence
  Description of Artificial Sequence: Synthetic oligonucleotide
ccacagaaaaugucaucuc

SEQ ID NO: 1931806 - RNA, 19 nt, Artificial Sequence
  Description of Artificial Sequence: Synthetic oligonucleotide
gccuagcucgaacuucuug

SEQ ID NO: 1931807 - RNA, 19 nt, Artificial Sequence
  Description of Artificial Sequence: Synthetic oligonucleotide
uaggucccguccagcugca

SEQ ID NO: 1931808 - RNA, 19 nt, Artificial Sequence
  Description of Artificial Sequence: Synthetic oligonucleotide
cugcauuuaaacgcuugua

SEQ ID NO: 1931809 - RNA, 19 nt, Artificial Sequence
  Description of Artificial Sequence: Synthetic oligonucleotide
caauuguuucuugaacccu

SEQ ID NO: 1931810 - RNA, 19 nt, Artificial Sequence
  Description of Artificial Sequence: Synthetic oligonucleotide
gccuucauaaacuccuccu

SEQ ID NO: 1931811 - RNA, 19 nt, Artificial Sequence
  Description of Artificial Sequence: Synthetic oligonucleotide
ggggauguuucaguuuaac

SEQ ID NO: 1931812 - RNA, 19 nt, Artificial Sequence
  Description of Artificial Sequence: Synthetic oligonucleotide
cauguaugauccaucccuu

SEQ ID NO: 1931813 - RNA, 19 nt, Artificial Sequence
  Description of Artificial Sequence: Synthetic oligonucleotide
gcaugauguaauuacuguu

SEQ ID NO: 1931814 - RNA, 19 nt, Artificial Sequence
  Description of Artificial Sequence: Synthetic oligonucleotide
ccuuguuacuuugccuuag

SEQ ID NO: 1931815 - RNA, 19 nt, Artificial Sequence
  Description of Artificial Sequence: Synthetic oligonucleotide
cagucuucuucaaaauuuu

SEQ ID NO: 1931816 - RNA, 19 nt, Artificial Sequence
  Description of Artificial Sequence: Synthetic oligonucleotide
cuuguuacuuugccuuagu

SEQ ID NO: 1931817 - RNA, 19 nt, Artificial Sequence
  Description of Artificial Sequence: Synthetic oligonucleotide
caauccugcuaauugucuu

SEQ ID NO: 1931818 - RNA, 19 nt, Artificial Sequence
  Description of Artificial Sequence: Synthetic oligonucleotide
guuuaacacuuggauuugu

SEQ ID NO: 1931819 - RNA, 19 nt, Artificial Sequence
  Description of Artificial Sequence: Synthetic oligonucleotide
gucuaaccagauuggcagu

SEQ ID NO: 1931820 - RNA, 19 nt, Artificial Sequence
  Description of Artificial Sequence: Synthetic oligonucleotide
cgcgcgacugaguaucugc

SEQ ID NO: 1931821 - RNA, 19 nt, Artificial Sequence
  Description of Artificial Sequence: Synthetic oligonucleotide
cacacggggauguuucagu

SEQ ID NO: 1931822 - RNA, 19 nt, Artificial Sequence
  Description of Artificial Sequence: Synthetic oligonucleotide
cagcugccccucaauccug

SEQ ID NO: 1931823 - RNA, 19 nt, Artificial Sequence
  Description of Artificial Sequence: Synthetic oligonucleotide
aagcugcccgcgcgacuga

SEQ ID NO: 1931824 - RNA, 19 nt, Artificial Sequence
  Description of Artificial Sequence: Synthetic oligonucleotide
gcucucuuauugcuucauc

SEQ ID NO: 1931825 - RNA, 19 nt, Artificial Sequence
  Description of Artificial Sequence: Synthetic oligonucleotide
cucgguucaggcggacuuc

SEQ ID NO: 1931826 - RNA, 19 nt, Artificial Sequence
  Description of Artificial Sequence: Synthetic oligonucleotide
cugcuguaguccaucacau

SEQ ID NO: 1931827 - RNA, 19 nt, Artificial Sequence
  Description of Artificial Sequence: Synthetic oligonucleotide
acaacgcuguccaguuccu

SEQ ID NO: 1931828 - RNA, 19 nt, Artificial Sequence
  Description of Artificial Sequence: Synthetic oligonucleotide
cugaccauguaugauccau

SEQ ID NO: 1931829 - RNA, 19 nt, Artificial Sequence
  Description of Artificial Sequence: Synthetic oligonucleotide
guacuguagccaucuuccu

SEQ ID NO: 1931830 - RNA, 19 nt, Artificial Sequence
  Description of Artificial Sequence: Synthetic oligonucleotide
ccucucuauugaugagagc

SEQ ID NO: 1931831 - RNA, 19 nt, Artificial Sequence
  Description of Artificial Sequence: Synthetic oligonucleotide
ccuucuuacugcacucgca

SEQ ID NO: 1931832 - RNA, 19 nt, Artificial Sequence
  Description of Artificial Sequence: Synthetic oligonucleotide
cacauggaguuuggccuuc

SEQ ID NO: 1931833 - RNA, 19 nt, Artificial Sequence
  Description of Artificial Sequence: Synthetic oligonucleotide
cacacaacgcuguccaguu

SEQ ID NO: 1931834 - RNA, 19 nt, Artificial Sequence
  Description of Artificial Sequence: Synthetic oligonucleotide
auucugcauuuaaacgcuu

SEQ ID NO: 1931835 - RNA, 19 nt, Artificial Sequence
  Description of Artificial Sequence: Synthetic oligonucleotide
ccucuaauucugcauuuaa

SEQ ID NO: 1931836 - RNA, 19 nt, Artificial Sequence
  Description of Artificial Sequence: Synthetic oligonucleotide
caggcggacuucuguggca

SEQ ID NO: 1931837 - RNA, 19 nt, Artificial Sequence
  Description of Artificial Sequence: Synthetic oligonucleotide
gcacucgcacacaacgcug

SEQ ID NO: 1931838 - RNA, 19 nt, Artificial Sequence
  Description of Artificial Sequence: Synthetic oligonucleotide
gcaauauccuuguuacuuu

SEQ ID NO: 1931839 - RNA, 19 nt, Artificial Sequence
  Description of Artificial Sequence: Synthetic oligonucleotide
cucuuugcaugauguaauu

SEQ ID NO: 1931840 - RNA, 19 nt, Artificial Sequence
  Description of Artificial Sequence: Synthetic oligonucleotide
gcacacggggauguuucag

SEQ ID NO: 1931841 - RNA, 19 nt, Artificial Sequence
  Description of Artificial Sequence: Synthetic oligonucleotide
cacucgcacacaacgcugu

SEQ ID NO: 1931842 - RNA, 19 nt, Artificial Sequence
  Description of Artificial Sequence: Synthetic oligonucleotide
gcucacucaugaacugccc

SEQ ID NO: 1931843 - RNA, 19 nt, Artificial Sequence
  Description of Artificial Sequence: Synthetic oligonucleotide
agagcucgguucaggcgga

SEQ ID NO: 1931844 - RNA, 19 nt, Artificial Sequence
  Description of Artificial Sequence: Synthetic oligonucleotide
cucgaacuucuugcugcuc

SEQ ID NO: 1931845 - RNA, 19 nt, Artificial Sequence
  Description of Artificial Sequence: Synthetic oligonucleotide
gcaucacauggaguuuggc

SEQ ID NO: 1931846 - RNA, 19 nt, Artificial Sequence
  Description of Artificial Sequence: Synthetic oligonucleotide
cugggauggccacaucacu

SEQ ID NO: 1931847 - RNA, 19 nt, Artificial Sequence
  Description of Artificial Sequence: Synthetic oligonucleotide
ccucaauccugcuaauugu

SEQ ID NO: 1931848 - RNA, 19 nt, Artificial Sequence
  Description of Artificial Sequence: Synthetic oligonucleotide
ccacaucacuggcagucug

SEQ ID NO: 1931849 - RNA, 19 nt, Artificial Sequence
  Description of Artificial Sequence: Synthetic oligonucleotide
agcucgguucaggcggacu

SEQ ID NO: 1931850 - RNA, 19 nt, Artificial Sequence
  Description of Artificial Sequence: Synthetic oligonucleotide
cugcccgcgcgacugagua

SEQ ID NO: 1931851 - RNA, 19 nt, Artificial Sequence
  Description of Artificial Sequence: Synthetic oligonucleotide
cagcuccucuuuuauacuu

SEQ ID NO: 1931852 - RNA, 19 nt, Artificial Sequence
  Description of Artificial Sequence: Synthetic oligonucleotide
agaugacaacagaucucuu

SEQ ID NO: 1931853 - RNA, 19 nt, Artificial Sequence
  Description of Artificial Sequence: Synthetic oligonucleotide
cgcgacugaguaucugcag

SEQ ID NO: 1931854 - RNA, 19 nt, Artificial Sequence
  Description of Artificial Sequence: Synthetic oligonucleotide
ccacucaagagccuucaua

SEQ ID NO: 1931855 - RNA, 19 nt, Artificial Sequence
  Description of Artificial Sequence: Synthetic oligonucleotide
caucugggauggccacauc

SEQ ID NO: 1931856 - RNA, 19 nt, Artificial Sequence
  Description of Artificial Sequence: Synthetic oligonucleotide
ugcccgcgcgacugaguau

SEQ ID NO: 1931857 - RNA, 19 nt, Artificial Sequence
  Description of Artificial Sequence: Synthetic oligonucleotide
ccaucccuucagaugacaa

SEQ ID NO: 1931858 - RNA, 19 nt, Artificial Sequence
  Description of Artificial Sequence: Synthetic oligonucleotide
cugucccaaugucauuacu

SEQ ID NO: 1931859 - RNA, 19 nt, Artificial Sequence
  Description of Artificial Sequence: Synthetic oligonucleotide
gcccgcgcgacugaguauc

SEQ ID NO: 1931860 - RNA, 19 nt, Artificial Sequence
  Description of Artificial Sequence: Synthetic oligonucleotide
cucgcgggccagguagguc

SEQ ID NO: 1931861 - RNA, 19 nt, Artificial Sequence
  Description of Artificial Sequence: Synthetic oligonucleotide
gcacacaacgcuguccagu

SEQ ID NO: 1931862 - RNA, 19 nt, Artificial Sequence
  Description of Artificial Sequence: Synthetic oligonucleotide
gcucgaacuucuugcugcu

SEQ ID NO: 1931863 - RNA, 19 nt, Artificial Sequence
  Description of Artificial Sequence: Synthetic oligonucleotide
gacuuguggcagccuguuu

SEQ ID NO: 1931864 - RNA, 19 nt, Artificial Sequence
  Description of Artificial Sequence: Synthetic oligonucleotide
gcgcgacugaguaucugca

SEQ ID NO: 1931865 - RNA, 19 nt, Artificial Sequence
  Description of Artificial Sequence: Synthetic oligonucleotide
cuugcucgcgggccaggua

SEQ ID NO: 1931866 - RNA, 19 nt, Artificial Sequence
  Description of Artificial Sequence: Synthetic oligonucleotide
cugcagcaccgcgucucug

SEQ ID NO: 1931867 - RNA, 19 nt, Artificial Sequence
  Description of Artificial Sequence: Synthetic oligonucleotide
cuaaccagauuggcaguuu

SEQ ID NO: 1931868 - RNA, 19 nt, Artificial Sequence
  Description of Artificial Sequence: Synthetic oligonucleotide
cuuugacuuguggcagccu

SEQ ID NO: 1931869 - RNA, 19 nt, Artificial Sequence
  Description of Artificial Sequence: Synthetic oligonucleotide
cagcuugucuaaccagauu

SEQ ID NO: 1931870 - RNA, 19 nt, Artificial Sequence
  Description of Artificial Sequence: Synthetic oligonucleotide
cucugcacucuggcaagcu

SEQ ID NO: 1931871 - RNA, 19 nt, Artificial Sequence
  Description of Artificial Sequence: Synthetic oligonucleotide
ccuuguuuacaggaccagu

SEQ ID NO: 1931872 - RNA, 19 nt, Artificial Sequence
  Description of Artificial Sequence: Synthetic oligonucleotide
cuguggcacuuugacuugu

SEQ ID NO: 1931873 - RNA, 19 nt, Artificial Sequence
  Description of Artificial Sequence: Synthetic oligonucleotide
cugcagaguagagucuguu

SEQ ID NO: 1931874 - RNA, 19 nt, Artificial Sequence
  Description of Artificial Sequence: Synthetic oligonucleotide
cgcacacaacgcuguccag

SEQ ID NO: 1931875 - RNA, 19 nt, Artificial Sequence
  Description of Artificial Sequence: Synthetic oligonucleotide
gccacaucacuggcagucu

SEQ ID NO: 1931876 - RNA, 19 nt, Artificial Sequence
  Description of Artificial Sequence: Synthetic oligonucleotide
aggucccguccagcugcaa

SEQ ID NO: 1931877 - RNA, 19 nt, Artificial Sequence
  Description of Artificial Sequence: Synthetic oligonucleotide
ggcggacuucuguggcacu

SEQ ID NO: 1931878 - RNA, 19 nt, Artificial Sequence
  Description of Artificial Sequence: Synthetic oligonucleotide
ccgcgcgacugaguaucug

SEQ ID NO: 1931879 - RNA, 19 nt, Artificial Sequence
  Description of Artificial Sequence: Synthetic oligonucleotide
gcggacuucuguggcacuu

SEQ ID NO: 1931880 - RNA, 19 nt, Artificial Sequence
  Description of Artificial Sequence: Synthetic oligonucleotide
ccugcaucacauggaguuu

SEQ ID NO: 1931881 - RNA, 19 nt, Artificial Sequence
  Description of Artificial Sequence: Synthetic oligonucleotide
cguugcugucucacacagu

SEQ ID NO: 1931882 - RNA, 19 nt, Artificial Sequence
  Description of Artificial Sequence: Synthetic oligonucleotide
gcucgcgggccagguaggu

SEQ ID NO: 1931883 - RNA, 19 nt, Artificial Sequence
  Description of Artificial Sequence: Synthetic oligonucleotide
gcugcccgcgcgacugagu

SEQ ID NO: 1931884 - RNA, 19 nt, Artificial Sequence
  Description of Artificial Sequence: Synthetic oligonucleotide
cccgcgcgacugaguaucu

SEQ ID NO: 1931885 - RNA, 19 nt, Artificial Sequence
  Description of Artificial Sequence: Synthetic oligonucleotide
ccccucaauccugcuaauu

SEQ ID NO: 1931886 - RNA, 19 nt, Artificial Sequence
  Description of Artificial Sequence: Synthetic oligonucleotide
uuaaucaugaagcagaguc

SEQ ID NO: 1931887 - RNA, 19 nt, Artificial Sequence
  Description of Artificial Sequence: Synthetic oligonucleotide
aagacaacguaucugaauc

SEQ ID NO: 1931888 - RNA, 19 nt, Artificial Sequence
  Description of Artificial Sequence: Synthetic oligonucleotide
uguaguuucugcuugagag

SEQ ID NO: 1931889 - RNA, 19 nt, Artificial Sequence
  Description of Artificial Sequence: Synthetic oligonucleotide
uuccaaauuaaucaugaag

SEQ ID NO: 1931890 - RNA, 19 nt, Artificial Sequence
  Description of Artificial Sequence: Synthetic oligonucleotide
aaauuaaucaugaagcaga

SEQ ID NO: 1931891 - RNA, 19 nt, Artificial Sequence
  Description of Artificial Sequence: Synthetic oligonucleotide
ugaccuuuaaccuugguga

SEQ ID NO: 1931892 - RNA, 19 nt, Artificial Sequence
  Description of Artificial Sequence: Synthetic oligonucleotide
acgucugcuauccucaucc

SEQ ID NO: 1931893 - RNA, 19 nt, Artificial Sequence
  Description of Artificial Sequence: Synthetic oligonucleotide
uuucaauuccacaaaugcc

SEQ ID NO: 1931894 - RNA, 19 nt, Artificial Sequence
  Description of Artificial Sequence: Synthetic oligonucleotide
augacaaugaacuuccaug

SEQ ID NO: 1931895 - RNA, 19 nt, Artificial Sequence
  Description of Artificial Sequence: Synthetic oligonucleotide
ucugaaucagccaagugac

SEQ ID NO: 1931896 - RNA, 19 nt, Artificial Sequence
  Description of Artificial Sequence: Synthetic oligonucleotide
gacauugcauuacaguagg

SEQ ID NO: 1931897 - RNA, 19 nt, Artificial Sequence
  Description of Artificial Sequence: Synthetic oligonucleotide
auguuucacuuucagaacg

SEQ ID NO: 1931898 - RNA, 19 nt, Artificial Sequence
  Description of Artificial Sequence: Synthetic oligonucleotide
uucacuuucagaacgggac

SEQ ID NO: 1931899 - RNA, 19 nt, Artificial Sequence
  Description of Artificial Sequence: Synthetic oligonucleotide
cuuaucacuggauugccgg

SEQ ID NO: 1931900 - RNA, 19 nt, Artificial Sequence
  Description of Artificial Sequence: Synthetic oligonucleotide
cuaacugagacucugaaga

SEQ ID NO: 1931901 - RNA, 19 nt, Artificial Sequence
  Description of Artificial Sequence: Synthetic oligonucleotide
cauacugcgugccagagcc

SEQ ID NO: 1931902 - RNA, 19 nt, Artificial Sequence
  Description of Artificial Sequence: Synthetic oligonucleotide
gaagcuaugacaaugaacu

SEQ ID NO: 1931903 - RNA, 19 nt, Artificial Sequence
  Description of Artificial Sequence: Synthetic oligonucleotide
ucagaauuccaaauuaauc

SEQ ID NO: 1931904 - RNA, 19 nt, Artificial Sequence
  Description of Artificial Sequence: Synthetic oligonucleotide
cagaauuccaaauuaauca

SEQ ID NO: 1931905 - RNA, 19 nt, Artificial Sequence
  Description of Artificial Sequence: Synthetic oligonucleotide
aaaagcgcaaacaggaaag

SEQ ID NO: 1931906 - RNA, 19 nt, Artificial Sequence
  Description of Artificial Sequence: Synthetic oligonucleotide
ugacauugcauuacaguag

SEQ ID NO: 1931907 - RNA, 19 nt, Artificial Sequence
  Description of Artificial Sequence: Synthetic oligonucleotide
acuacuguccugcagcagg

SEQ ID NO: 1931908 - RNA, 19 nt, Artificial Sequence
  Description of Artificial Sequence: Synthetic oligonucleotide
uuuacgucugcuauccuca

SEQ ID NO: 1931909 - RNA, 19 nt, Artificial Sequence
  Description of Artificial Sequence: Synthetic oligonucleotide
uaggaaacgguaucaaaag

SEQ ID NO: 1931910 - RNA, 19 nt, Artificial Sequence
  Description of Artificial Sequence: Synthetic oligonucleotide
auuacaguagguauuuacg

SEQ ID NO: 1931911 - RNA, 19 nt, Artificial Sequence
  Description of Artificial Sequence: Synthetic oligonucleotide
ucuacagaagacaacguau

SEQ ID NO: 1931912 - RNA, 19 nt, Artificial Sequence
  Description of Artificial Sequence: Synthetic oligonucleotide
aacuugagauuccaguucu

SEQ ID NO: 1931913 - RNA, 19 nt, Artificial Sequence
  Description of Artificial Sequence: Synthetic oligonucleotide
auuuacgucugcuauccuc

SEQ ID NO: 1931914 - RNA, 19 nt, Artificial Sequence
  Description of Artificial Sequence: Synthetic oligonucleotide
uguuucacuuucagaacgg

SEQ ID NO: 1931915 - RNA, 19 nt, Artificial Sequence
  Description of Artificial Sequence: Synthetic oligonucleotide
ugacaaugaacuuccaugu

SEQ ID NO: 1931916 - RNA, 19 nt, Artificial Sequence
  Description of Artificial Sequence: Synthetic oligonucleotide
aacgggaccgucuagacuu

SEQ ID NO: 1931917 - RNA, 19 nt, Artificial Sequence
  Description of Artificial Sequence: Synthetic oligonucleotide
acaaugaacuuccauguca

SEQ ID NO: 1931918 - RNA, 19 nt, Artificial Sequence
  Description of Artificial Sequence: Synthetic oligonucleotide
uguggaugcuaacugagac

SEQ ID NO: 1931919 - RNA, 19 nt, Artificial Sequence
  Description of Artificial Sequence: Synthetic oligonucleotide
ucugcuuaucacuggauug

SEQ ID NO: 1931920 - RNA, 19 nt, Artificial Sequence
  Description of Artificial Sequence: Synthetic oligonucleotide
ucgugcuugagucacaagu

SEQ ID NO: 1931921 - RNA, 19 nt, Artificial Sequence
  Description of Artificial Sequence: Synthetic oligonucleotide
aaagcaugcaaugauuaga

SEQ ID NO: 1931922 - RNA, 19 nt, Artificial Sequence
  Description of Artificial Sequence: Synthetic oligonucleotide
uuacaguagguauuuacgu

SEQ ID NO: 1931923 - RNA, 19 nt, Artificial Sequence
  Description of Artificial Sequence: Synthetic oligonucleotide
ugaagcuaugacaaugaac

SEQ ID NO: 1931924 - RNA, 19 nt, Artificial Sequence
  Description of Artificial Sequence: Synthetic oligonucleotide
uuaccaugaauuucaauuc

SEQ ID NO: 1931925 - RNA, 19 nt, Artificial Sequence
  Description of Artificial Sequence: Synthetic oligonucleotide
acaguagguauuuacgucu

SEQ ID NO: 1931926 - RNA, 19 nt, Artificial Sequence
  Description of Artificial Sequence: Synthetic oligonucleotide
aaagcgcaaacaggaaagc

SEQ ID NO: 1931927 - RNA, 19 nt, Artificial Sequence
  Description of Artificial Sequence: Synthetic oligonucleotide
aagcaugcaaugauuagag

SEQ ID NO: 1931928 - RNA, 19 nt, Artificial Sequence
  Description of Artificial Sequence: Synthetic oligonucleotide
uuguacuucuuccuugcag

SEQ ID NO: 1931929 - RNA, 19 nt, Artificial Sequence
  Description of Artificial Sequence: Synthetic oligonucleotide
augaccuuuaaccuuggug

SEQ ID NO: 1931930 - RNA, 19 nt, Artificial Sequence
  Description of Artificial Sequence: Synthetic oligonucleotide
uccaugacuguguuugccg

SEQ ID NO: 1931931 - RNA, 19 nt, Artificial Sequence
  Description of Artificial Sequence: Synthetic oligonucleotide
ucaugaagcagagucuagg

SEQ ID NO: 1931932 - RNA, 19 nt, Artificial Sequence
  Description of Artificial Sequence: Synthetic oligonucleotide
agugacauugcauuacagu

SEQ ID NO: 1931933 - RNA, 19 nt, Artificial Sequence
  Description of Artificial Sequence: Synthetic oligonucleotide
augauuagaggagucacuc

SEQ ID NO: 1931934 - RNA, 19 nt, Artificial Sequence
  Description of Artificial Sequence: Synthetic oligonucleotide
agaauuccaaauuaaucau

SEQ ID NO: 1931935 - RNA, 19 nt, Artificial Sequence
  Description of Artificial Sequence: Synthetic oligonucleotide
uaaucaugaagcagagucu

SEQ ID NO: 1931936 - RNA, 19 nt, Artificial Sequence
  Description of Artificial Sequence: Synthetic oligonucleotide
ggaaacgguaucaaaagcg

SEQ ID NO: 1931937 - RNA, 19 nt, Artificial Sequence
  Description of Artificial Sequence: Synthetic oligonucleotide
ucaucugacgagcucgugc

SEQ ID NO: 1931938 - RNA, 19 nt, Artificial Sequence
  Description of Artificial Sequence: Synthetic oligonucleotide
gaaacgguaucaaaagcgc

SEQ ID NO: 1931939 - RNA, 19 nt, Artificial Sequence
  Description of Artificial Sequence: Synthetic oligonucleotide
acuugcgcccaacaguggc

SEQ ID NO: 1931940 - RNA, 19 nt, Artificial Sequence
  Description of Artificial Sequence: Synthetic oligonucleotide
uuugccgggagccaaacau

SEQ ID NO: 1931941 - RNA, 19 nt, Artificial Sequence
  Description of Artificial Sequence: Synthetic oligonucleotide
ugaaucagccaagugacca

SEQ ID NO: 1931942 - RNA, 19 nt, Artificial Sequence
  Description of Artificial Sequence: Synthetic oligonucleotide
acuguguuugccgggagcc

SEQ ID NO: 1931943 - RNA, 19 nt, Artificial Sequence
  Description of Artificial Sequence: Synthetic oligonucleotide
guaguuucugcuugagagg

SEQ ID NO: 1931944 - RNA, 19 nt, Artificial Sequence
  Description of Artificial Sequence: Synthetic oligonucleotide
acgagcucgugcuugaguc

SEQ ID NO: 1931945 - RNA, 19 nt, Artificial Sequence
  Description of Artificial Sequence: Synthetic oligonucleotide
aggaaagcagccugcgccc

SEQ ID NO: 1931946 - RNA, 19 nt, Artificial Sequence
  Description of Artificial Sequence: Synthetic oligonucleotide
gcuccgaugaccuuuaacc

SEQ ID NO: 1931947 - RNA, 19 nt, Artificial Sequence
  Description of Artificial Sequence: Synthetic oligonucleotide
accgucuagacuugcgccc

SEQ ID NO: 1931948 - RNA, 19 nt, Artificial Sequence
  Description of Artificial Sequence: Synthetic oligonucleotide
ucucuguggaugcuaacug

SEQ ID NO: 1931949 - RNA, 19 nt, Artificial Sequence
  Description of Artificial Sequence: Synthetic oligonucleotide
uuuaaccuuggugacucgg

SEQ ID NO: 1931950 - RNA, 19 nt, Artificial Sequence
  Description of Artificial Sequence: Synthetic oligonucleotide
aaggucaaccacuucugcu

SEQ ID NO: 1931951 - RNA, 19 nt, Artificial Sequence
  Description of Artificial Sequence: Synthetic oligonucleotide
aguagucugauccuuuccu

SEQ ID NO: 1931952 - RNA, 19 nt, Artificial Sequence
  Description of Artificial Sequence: Synthetic oligonucleotide
cuuuccuugugcuuuuggc

SEQ ID NO: 1931953 - RNA, 19 nt, Artificial Sequence
  Description of Artificial Sequence: Synthetic oligonucleotide
uuaaccuuggugacucggc

SEQ ID NO: 1931954 - RNA, 19 nt, Artificial Sequence
  Description of Artificial Sequence: Synthetic oligonucleotide
uccaagguaaggucaacca

SEQ ID NO: 1931955 - RNA, 19 nt, Artificial Sequence
  Description of Artificial Sequence: Synthetic oligonucleotide
guauuuacgucugcuaucc

SEQ ID NO: 1931956 - RNA, 19 nt, Artificial Sequence
  Description of Artificial Sequence: Synthetic oligonucleotide
gauguuucacuuucagaac

SEQ ID NO: 1931957 - RNA, 19 nt, Artificial Sequence
  Description of Artificial Sequence: Synthetic oligonucleotide
aggucacuaucacugguac

SEQ ID NO: 1931958 - RNA, 19 nt, Artificial Sequence
  Description of Artificial Sequence: Synthetic oligonucleotide
agccaaacauacugcgugc

SEQ ID NO: 1931959 - RNA, 19 nt, Artificial Sequence
  Description of Artificial Sequence: Synthetic oligonucleotide
ucacuuucagaacgggacc

SEQ ID NO: 1931960 - RNA, 19 nt, Artificial Sequence
  Description of Artificial Sequence: Synthetic oligonucleotide
ugugcuuuuggcuccgaug

SEQ ID NO: 1931961 - RNA, 19 nt, Artificial Sequence
  Description of Artificial Sequence: Synthetic oligonucleotide
aaguaucuccuucuacugu

SEQ ID NO: 1931962 - RNA, 19 nt, Artificial Sequence
  Description of Artificial Sequence: Synthetic oligonucleotide
aggucaaccacuucugcug

SEQ ID NO: 1931963 - RNA, 19 nt, Artificial Sequence
  Description of Artificial Sequence: Synthetic oligonucleotide
ucauuucagaauuccaaau

SEQ ID NO: 1931964 - RNA, 19 nt, Artificial Sequence
  Description of Artificial Sequence: Synthetic oligonucleotide
agccauuccaucugguauc

SEQ ID NO: 1931965 - RNA, 19 nt, Artificial Sequence
  Description of Artificial Sequence: Synthetic oligonucleotide
aagagucccuucucaguuc

SEQ ID NO: 1931966 - RNA, 19 nt, Artificial Sequence
  Description of Artificial Sequence: Synthetic oligonucleotide
uuucacuuucagaacggga

SEQ ID NO: 1931967 - RNA, 19 nt, Artificial Sequence
  Description of Artificial Sequence: Synthetic oligonucleotide
gguacuacuguccugcagc

SEQ ID NO: 1931968 - RNA, 19 nt, Artificial Sequence
  Description of Artificial Sequence: Synthetic oligonucleotide
aagucugcugcggagucac

SEQ ID NO: 1931969 - RNA, 19 nt, Artificial Sequence
  Description of Artificial Sequence: Synthetic oligonucleotide
uucuacagaagacaacgua

SEQ ID NO: 1931970 - RNA, 19 nt, Artificial Sequence
  Description of Artificial Sequence: Synthetic oligonucleotide
ucaucaucaucugacgagc

SEQ ID NO: 1931971 - RNA, 19 nt, Artificial Sequence
  Description of Artificial Sequence: Synthetic oligonucleotide
aguggcaccagacacuccu

SEQ ID NO: 1931972 - RNA, 19 nt, Artificial Sequence
  Description of Artificial Sequence: Synthetic oligonucleotide
ugcagagaaacagugacau

SEQ ID NO: 1931973 - RNA, 19 nt, Artificial Sequence
  Description of Artificial Sequence: Synthetic oligonucleotide
gaaacagugacauugcauu

SEQ ID NO: 1931974 - RNA, 19 nt, Artificial Sequence
  Description of Artificial Sequence: Synthetic oligonucleotide
cuaggaaacgguaucaaaa

SEQ ID NO: 1931975 - RNA, 19 nt, Artificial Sequence
  Description of Artificial Sequence: Synthetic oligonucleotide
uggaugcuaacugagacuc

SEQ ID NO: 1931976 - RNA, 19 nt, Artificial Sequence
  Description of Artificial Sequence: Synthetic oligonucleotide
gugauugucuugcugcucc

SEQ ID NO: 1931977 - RNA, 19 nt, Artificial Sequence
  Description of Artificial Sequence: Synthetic oligonucleotide
gaugcuaacugagacucug

SEQ ID NO: 1931978 - RNA, 19 nt, Artificial Sequence
  Description of Artificial Sequence: Synthetic oligonucleotide
gacaacguaucugaaucag

SEQ ID NO: 1931979 - RNA, 19 nt, Artificial Sequence
  Description of Artificial Sequence: Synthetic oligonucleotide
cagaagacaacguaucuga

SEQ ID NO: 1931980 - RNA, 19 nt, Artificial Sequence
  Description of Artificial Sequence: Synthetic oligonucleotide
aaucaugaagcagagucua

SEQ ID NO: 1931981 - RNA, 19 nt, Artificial Sequence
  Description of Artificial Sequence: Synthetic oligonucleotide
aaacauacugcgugccaga

SEQ ID NO: 1931982 - RNA, 19 nt, Artificial Sequence
  Description of Artificial Sequence: Synthetic oligonucleotide
acuagaggaaggggaaagc

SEQ ID NO: 1931983 - RNA, 19 nt, Artificial Sequence
  Description of Artificial Sequence: Synthetic oligonucleotide
uaaggucaaccacuucugc

SEQ ID NO: 1931984 - RNA, 19 nt, Artificial Sequence
  Description of Artificial Sequence: Synthetic oligonucleotide
agaacgggaccgucuagac

SEQ ID NO: 1931985 - RNA, 19 nt, Artificial Sequence
  Description of Artificial Sequence: Synthetic oligonucleotide
ucucauaaacucugccagc

SEQ ID NO: 1931986 - RNA, 19 nt, Artificial Sequence
  Description of Artificial Sequence: Synthetic oligonucleotide
gugacauugcauuacagua

SEQ ID NO: 1931987 - RNA, 19 nt, Artificial Sequence
  Description of Artificial Sequence: Synthetic oligonucleotide
aucaucaucugacgagcuc

SEQ ID NO: 1931988 - RNA, 19 nt, Artificial Sequence
  Description of Artificial Sequence: Synthetic oligonucleotide
agguauuuacgucugcuau

SEQ ID NO: 1931989 - RNA, 19 nt, Artificial Sequence
  Description of Artificial Sequence: Synthetic oligonucleotide
uucuacuuuucccacuguc

SEQ ID NO: 1931990 - RNA, 19 nt, Artificial Sequence
  Description of Artificial Sequence: Synthetic oligonucleotide
cuugagaggguucauucuc

SEQ ID NO: 1931991 - RNA, 19 nt, Artificial Sequence
  Description of Artificial Sequence: Synthetic oligonucleotide
acaggaaagcagccugcgc

SEQ ID NO: 1931992 - RNA, 19 nt, Artificial Sequence
  Description of Artificial Sequence: Synthetic oligonucleotide
uaaacucugccagcugugg

SEQ ID NO: 1931993 - RNA, 19 nt, Artificial Sequence
  Description of Artificial Sequence: Synthetic oligonucleotide
ucuaggaaacgguaucaaa

SEQ ID NO: 1931994 - RNA, 19 nt, Artificial Sequence
  Description of Artificial Sequence: Synthetic oligonucleotide
gcagugauugucuugcugc

SEQ ID NO: 1931995 - RNA, 19 nt, Artificial Sequence
  Description of Artificial Sequence: Synthetic oligonucleotide
gcaugcaaugauuagagga

SEQ ID NO: 1931996 - RNA, 19 nt, Artificial Sequence
  Description of Artificial Sequence: Synthetic oligonucleotide
ugcagugauugucuugcug

SEQ ID NO: 1931997 - RNA, 19 nt, Artificial Sequence
  Description of Artificial Sequence: Synthetic oligonucleotide
uuccaguucuacagaacca

SEQ ID NO: 1931998 - RNA, 19 nt, Artificial Sequence
  Description of Artificial Sequence: Synthetic oligonucleotide
ugcuugagaggguucauuc

SEQ ID NO: 1931999 - RNA, 19 nt, Artificial Sequence
  Description of Artificial Sequence: Synthetic oligonucleotide
cuagacuugcgcccaacag

SEQ ID NO: 1932000 - RNA, 19 nt, Artificial Sequence
  Description of Artificial Sequence: Synthetic oligonucleotide
caacaguggcaccagacac

SEQ ID NO: 1932001 - RNA, 19 nt, Artificial Sequence
  Description of Artificial Sequence: Synthetic oligonucleotide
ucuagacuugcgcccaaca

SEQ ID NO: 1932002 - RNA, 19 nt, Artificial Sequence
  Description of Artificial Sequence: Synthetic oligonucleotide
guacuucuuccuugcagcg

SEQ ID NO: 1932003 - RNA, 19 nt, Artificial Sequence
  Description of Artificial Sequence: Synthetic oligonucleotide
gcuaugacaaugaacuucc

SEQ ID NO: 1932004 - RNA, 19 nt, Artificial Sequence
  Description of Artificial Sequence: Synthetic oligonucleotide
aaacagugacauugcauua

SEQ ID NO: 1932005 - RNA, 19 nt, Artificial Sequence
  Description of Artificial Sequence: Synthetic oligonucleotide
caaugauuagaggagucac

SEQ ID NO: 1932006 - RNA, 19 nt, Artificial Sequence
  Description of Artificial Sequence: Synthetic oligonucleotide
gaccgucuagacuugcgcc

SEQ ID NO: 1932007 - RNA, 19 nt, Artificial Sequence
  Description of Artificial Sequence: Synthetic oligonucleotide
caaacauacugcgugccag

SEQ ID NO: 1932008 - RNA, 19 nt, Artificial Sequence
  Description of Artificial Sequence: Synthetic oligonucleotide
ucaaaagcgcaaacaggaa

SEQ ID NO: 1932009 - RNA, 19 nt, Artificial Sequence
  Description of Artificial Sequence: Synthetic oligonucleotide
gugcuuuuggcuccgauga

SEQ ID NO: 1932010 - RNA, 19 nt, Artificial Sequence
  Description of Artificial Sequence: Synthetic oligonucleotide
aacgguaucaaaagcgcaa

SEQ ID NO: 1932011 - RNA, 19 nt, Artificial Sequence
  Description of Artificial Sequence: Synthetic oligonucleotide
agcaugcaaugauuagagg

SEQ ID NO: 1932012 - RNA, 19 nt, Artificial Sequence
  Description of Artificial Sequence: Synthetic oligonucleotide
acuguagagucagcuacac

SEQ ID NO: 1932013 - RNA, 19 nt, Artificial Sequence
  Description of Artificial Sequence: Synthetic oligonucleotide
aagugggagggaacagugc

SEQ ID NO: 1932014 - RNA, 19 nt, Artificial Sequence
  Description of Artificial Sequence: Synthetic oligonucleotide
acuaucacugguacuacug

SEQ ID NO: 1932015 - RNA, 19 nt, Artificial Sequence
  Description of Artificial Sequence: Synthetic oligonucleotide
aacugagacucugaagagu

SEQ ID NO: 1932016 - RNA, 19 nt, Artificial Sequence
  Description of Artificial Sequence: Synthetic oligonucleotide
aaagcagccugcgcccggc

SEQ ID NO: 1932017 - RNA, 19 nt, Artificial Sequence
  Description of Artificial Sequence: Synthetic oligonucleotide
ucacugguacuacuguccu

SEQ ID NO: 1932018 - RNA, 19 nt, Artificial Sequence
  Description of Artificial Sequence: Synthetic oligonucleotide
uucugcuuaucacuggauu

SEQ ID NO: 1932019 - RNA, 19 nt, Artificial Sequence
  Description of Artificial Sequence: Synthetic oligonucleotide
uuggcagccauaguagaug

SEQ ID NO: 1932020 - RNA, 19 nt, Artificial Sequence
  Description of Artificial Sequence: Synthetic oligonucleotide
agacucaaugaguucuucu

SEQ ID NO: 1932021 - RNA, 19 nt, Artificial Sequence
  Description of Artificial Sequence: Synthetic oligonucleotide
aguccaugacuguguuugc

SEQ ID NO: 1932022 - RNA, 19 nt, Artificial Sequence
  Description of Artificial Sequence: Synthetic oligonucleotide
aaccuuggugacucggcca

SEQ ID NO: 1932023 - RNA, 19 nt, Artificial Sequence
  Description of Artificial Sequence: Synthetic oligonucleotide
ugauuagaggagucacucu

SEQ ID NO: 1932024 - RNA, 19 nt, Artificial Sequence
  Description of Artificial Sequence: Synthetic oligonucleotide
gacucaaugaguucuucua

SEQ ID NO: 1932025 - RNA, 19 nt, Artificial Sequence
  Description of Artificial Sequence: Synthetic oligonucleotide
cugcuuaucacuggauugc

SEQ ID NO: 1932026 - RNA, 19 nt, Artificial Sequence
  Description of Artificial Sequence: Synthetic oligonucleotide
auugucuugcugcucccug

SEQ ID NO: 1932027 - RNA, 19 nt, Artificial Sequence
  Description of Artificial Sequence: Synthetic oligonucleotide
cuugagauuccaguucuac

SEQ ID NO: 1932028 - RNA, 19 nt, Artificial Sequence
  Description of Artificial Sequence: Synthetic oligonucleotide
gugaccacuagaggaaggg

SEQ ID NO: 1932029 - RNA, 19 nt, Artificial Sequence
  Description of Artificial Sequence: Synthetic oligonucleotide
uuagaggagucacucucau

SEQ ID NO: 1932030 - RNA, 19 nt, Artificial Sequence
  Description of Artificial Sequence: Synthetic oligonucleotide
aaacgguaucaaaagcgca

SEQ ID NO: 1932031 - RNA, 19 nt, Artificial Sequence
  Description of Artificial Sequence: Synthetic oligonucleotide
caugacuguguuugccggg

SEQ ID NO: 1932032 - RNA, 19 nt, Artificial Sequence
  Description of Artificial Sequence: Synthetic oligonucleotide
aagugaccacuagaggaag

SEQ ID NO: 1932033 - RNA, 19 nt, Artificial Sequence
  Description of Artificial Sequence: Synthetic oligonucleotide
agacaacguaucugaauca

SEQ ID NO: 1932034 - RNA, 19 nt, Artificial Sequence
  Description of Artificial Sequence: Synthetic oligonucleotide
cacuuucagaacgggaccg

SEQ ID NO: 1932035 - RNA, 19 nt, Artificial Sequence
  Description of Artificial Sequence: Synthetic oligonucleotide
ugaccacuagaggaagggg

SEQ ID NO: 1932036 - RNA, 19 nt, Artificial Sequence
  Description of Artificial Sequence: Synthetic oligonucleotide
cacaagucaggucacuauc

SEQ ID NO: 1932037 - RNA, 19 nt, Artificial Sequence
  Description of Artificial Sequence: Synthetic oligonucleotide
agacuugcgcccaacagug

SEQ ID NO: 1932038 - RNA, 19 nt, Artificial Sequence
  Description of Artificial Sequence: Synthetic oligonucleotide
ucugacgagcucgugcuug

SEQ ID NO: 1932039 - RNA, 19 nt, Artificial Sequence
  Description of Artificial Sequence: Synthetic oligonucleotide
cacucucauaaacucugcc

SEQ ID NO: 1932040 - RNA, 19 nt, Artificial Sequence
  Description of Artificial Sequence: Synthetic oligonucleotide
ugccgggagccaaacauac

SEQ ID NO: 1932041 - RNA, 19 nt, Artificial Sequence
  Description of Artificial Sequence: Synthetic oligonucleotide
gaccuuuaaccuuggugac

SEQ ID NO: 1932042 - RNA, 19 nt, Artificial Sequence
  Description of Artificial Sequence: Synthetic oligonucleotide
guuucacuuucagaacggg

SEQ ID NO: 1932043 - RNA, 19 nt, Artificial Sequence
  Description of Artificial Sequence: Synthetic oligonucleotide
ugcggagucacagcagucc

SEQ ID NO: 1932044 - RNA, 19 nt, Artificial Sequence
  Description of Artificial Sequence: Synthetic oligonucleotide
uuaucacuggauugccggu

SEQ ID NO: 1932045 - RNA, 19 nt, Artificial Sequence
  Description of Artificial Sequence: Synthetic oligonucleotide
uacuucuuccuugcagcgg

SEQ ID NO: 1932046 - RNA, 19 nt, Artificial Sequence
  Description of Artificial Sequence: Synthetic oligonucleotide
gggagccaaacauacugcg

SEQ ID NO: 1932047 - RNA, 19 nt, Artificial Sequence
  Description of Artificial Sequence: Synthetic oligonucleotide
uagguauuuacgucugcua

SEQ ID NO: 1932048 - RNA, 19 nt, Artificial Sequence
  Description of Artificial Sequence: Synthetic oligonucleotide
guaaggucaaccacuucug

SEQ ID NO: 1932049 - RNA, 19 nt, Artificial Sequence
  Description of Artificial Sequence: Synthetic oligonucleotide
ucacaagucaggucacuau

SEQ ID NO: 1932050 - RNA, 19 nt, Artificial Sequence
  Description of Artificial Sequence: Synthetic oligonucleotide
gguaaggucaaccacuucu

SEQ ID NO: 1932051 - RNA, 19 nt, Artificial Sequence
  Description of Artificial Sequence: Synthetic oligonucleotide
uccaguucuacagaaccau

SEQ ID NO: 1932052 - RNA, 19 nt, Artificial Sequence
  Description of Artificial Sequence: Synthetic oligonucleotide
caugaagcagagucuagga

SEQ ID NO: 1932053 - RNA, 19 nt, Artificial Sequence
  Description of Artificial Sequence: Synthetic oligonucleotide
agccauaguagauguuuca

SEQ ID NO: 1932054 - RNA, 19 nt, Artificial Sequence
  Description of Artificial Sequence: Synthetic oligonucleotide
gguuguacuucuuccuugc

SEQ ID NO: 1932055 - RNA, 19 nt, Artificial Sequence
  Description of Artificial Sequence: Synthetic oligonucleotide
caagucaggucacuaucac

SEQ ID NO: 1932056 - RNA, 19 nt, Artificial Sequence
  Description of Artificial Sequence: Synthetic oligonucleotide
uccgaugaccuuuaaccuu

SEQ ID NO: 1932057 - RNA, 19 nt, Artificial Sequence
  Description of Artificial Sequence: Synthetic oligonucleotide
caaaagcgcaaacaggaaa

SEQ ID NO: 1932058 - RNA, 19 nt, Artificial Sequence
  Description of Artificial Sequence: Synthetic oligonucleotide
acagcaguccaugacugug

SEQ ID NO: 1932059 - RNA, 19 nt, Artificial Sequence
  Description of Artificial Sequence: Synthetic oligonucleotide
ucagaacgggaccgucuag

SEQ ID NO: 1932060 - RNA, 19 nt, Artificial Sequence
  Description of Artificial Sequence: Synthetic oligonucleotide
ccaagugaccacuagagga

SEQ ID NO: 1932061 - RNA, 19 nt, Artificial Sequence
  Description of Artificial Sequence: Synthetic oligonucleotide
ucaaccacuucugcuggug

SEQ ID NO: 1932062 - RNA, 19 nt, Artificial Sequence
  Description of Artificial Sequence: Synthetic oligonucleotide
uaucuccuucuacuguagu

SEQ ID NO: 1932063 - RNA, 19 nt, Artificial Sequence
  Description of Artificial Sequence: Synthetic oligonucleotide
caagguaaggucaaccacu

SEQ ID NO: 1932064 - RNA, 19 nt, Artificial Sequence
  Description of Artificial Sequence: Synthetic oligonucleotide
agaaacagugacauugcau

SEQ ID NO: 1932065 - RNA, 19 nt, Artificial Sequence
  Description of Artificial Sequence: Synthetic oligonucleotide
cacuagaggaaggggaaag

SEQ ID NO: 1932066 - RNA, 19 nt, Artificial Sequence
  Description of Artificial Sequence: Synthetic oligonucleotide
gcuaacugagacucugaag

SEQ ID NO: 1932067 - RNA, 19 nt, Artificial Sequence
  Description of Artificial Sequence: Synthetic oligonucleotide
ugcuuaucacuggauugcc

SEQ ID NO: 1932068 - RNA, 19 nt, Artificial Sequence
  Description of Artificial Sequence: Synthetic oligonucleotide
aacuguagagucagcuaca

SEQ ID NO: 1932069 - RNA, 19 nt, Artificial Sequence
  Description of Artificial Sequence: Synthetic oligonucleotide
caguagguauuuacgucug

SEQ ID NO: 1932070 - RNA, 19 nt, Artificial Sequence
  Description of Artificial Sequence: Synthetic oligonucleotide
caagugaccacuagaggaa

SEQ ID NO: 1932071 - RNA, 19 nt, Artificial Sequence
  Description of Artificial Sequence: Synthetic oligonucleotide
cugaaucagccaagugacc

SEQ ID NO: 1932072 - RNA, 19 nt, Artificial Sequence
  Description of Artificial Sequence: Synthetic oligonucleotide
acaagucaggucacuauca

SEQ ID NO: 1932073 - RNA, 19 nt, Artificial Sequence
  Description of Artificial Sequence: Synthetic oligonucleotide
gguauuuacgucugcuauc

SEQ ID NO: 1932074 - RNA, 19 nt, Artificial Sequence
  Description of Artificial Sequence: Synthetic oligonucleotide
guccgcgccuccuagcccg

SEQ ID NO: 1932075 - RNA, 19 nt, Artificial Sequence
  Description of Artificial Sequence: Synthetic oligonucleotide
ggucaaccacuucugcugg

SEQ ID NO: 1932076 - RNA, 19 nt, Artificial Sequence
  Description of Artificial Sequence: Synthetic oligonucleotide
agugauugucuugcugcuc

SEQ ID NO: 1932077 - RNA, 19 nt, Artificial Sequence
  Description of Artificial Sequence: Synthetic oligonucleotide
gaagacaacguaucugaau

SEQ ID NO: 1932078 - RNA, 19 nt, Artificial Sequence
  Description of Artificial Sequence: Synthetic oligonucleotide
acucucuguggaugcuaac

SEQ ID NO: 1932079 - RNA, 19 nt, Artificial Sequence
  Description of Artificial Sequence: Synthetic oligonucleotide
auuagaggagucacucuca

SEQ ID NO: 1932080 - RNA, 19 nt, Artificial Sequence
  Description of Artificial Sequence: Synthetic oligonucleotide
cugagacucugaagagucc

SEQ ID NO: 1932081 - RNA, 19 nt, Artificial Sequence
  Description of Artificial Sequence: Synthetic oligonucleotide
cuuuaaccuuggugacucg

SEQ ID NO: 1932082 - RNA, 19 nt, Artificial Sequence
  Description of Artificial Sequence: Synthetic oligonucleotide
ugacgggccgcagacucgg

SEQ ID NO: 1932083 - RNA, 19 nt, Artificial Sequence
  Description of Artificial Sequence: Synthetic oligonucleotide
uggcaccagacacuccuga

SEQ ID NO: 1932084 - RNA, 19 nt, Artificial Sequence
  Description of Artificial Sequence: Synthetic oligonucleotide
acuguaguuucugcuugag

SEQ ID NO: 1932085 - RNA, 19 nt, Artificial Sequence
  Description of Artificial Sequence: Synthetic oligonucleotide
ccaaauuaaucaugaagca

SEQ ID NO: 1932086 - RNA, 19 nt, Artificial Sequence
  Description of Artificial Sequence: Synthetic oligonucleotide
cuguuucuuguucagaggu

SEQ ID NO: 1932087 - RNA, 19 nt, Artificial Sequence
  Description of Artificial Sequence: Synthetic oligonucleotide
uuugguggggcugcagacu

SEQ ID NO: 1932088 - RNA, 19 nt, Artificial Sequence
  Description of Artificial Sequence: Synthetic oligonucleotide
auuaaucaugaagcagagu

SEQ ID NO: 1932089 - RNA, 19 nt, Artificial Sequence
  Description of Artificial Sequence: Synthetic oligonucleotide
ccaugucacaaagaggagg

SEQ ID NO: 1932090 - RNA, 19 nt, Artificial Sequence
  Description of Artificial Sequence: Synthetic oligonucleotide
augcaaugauuagaggagu

SEQ ID NO: 1932091 - RNA, 19 nt, Artificial Sequence
  Description of Artificial Sequence: Synthetic oligonucleotide
ugcugcggagucacagcag

SEQ ID NO: 1932092 - RNA, 19 nt, Artificial Sequence
  Description of Artificial Sequence: Synthetic oligonucleotide
aagguaaggucaaccacuu

SEQ ID NO: 1932093 - RNA, 19 nt, Artificial Sequence
  Description of Artificial Sequence: Synthetic oligonucleotide
uauuuacgucugcuauccu

SEQ ID NO: 1932094 - RNA, 19 nt, Artificial Sequence
  Description of Artificial Sequence: Synthetic oligonucleotide
ggugacucggccauucugc

SEQ ID NO: 1932095 - RNA, 19 nt, Artificial Sequence
  Description of Artificial Sequence: Synthetic oligonucleotide
cuagaggaaggggaaagca

SEQ ID NO: 1932096 - RNA, 19 nt, Artificial Sequence
  Description of Artificial Sequence: Synthetic oligonucleotide
gcuugagucacaagucagg

SEQ ID NO: 1932097 - RNA, 19 nt, Artificial Sequence
  Description of Artificial Sequence: Synthetic oligonucleotide
cagccauaguagauguuuc

SEQ ID NO: 1932098 - RNA, 19 nt, Artificial Sequence
  Description of Artificial Sequence: Synthetic oligonucleotide
agguaaggucaaccacuuc

SEQ ID NO: 1932099 - RNA, 19 nt, Artificial Sequence
  Description of Artificial Sequence: Synthetic oligonucleotide
cuguagagucagcuacacc

SEQ ID NO: 1932100 - RNA, 19 nt, Artificial Sequence
  Description of Artificial Sequence: Synthetic oligonucleotide
gucacaaagaggaggaagu

SEQ ID NO: 1932101 - RNA, 19 nt, Artificial Sequence
  Description of Artificial Sequence: Synthetic oligonucleotide
aagcugaagcuaugacaau

SEQ ID NO: 1932102 - RNA, 19 nt, Artificial Sequence
  Description of Artificial Sequence: Synthetic oligonucleotide
acagaaccaucuuccuccu

SEQ ID NO: 1932103 - RNA, 19 nt, Artificial Sequence
  Description of Artificial Sequence: Synthetic oligonucleotide
cuuuggcagccauaguaga

SEQ ID NO: 1932104 - RNA, 19 nt, Artificial Sequence
  Description of Artificial Sequence: Synthetic oligonucleotide
agagucuaggaaacgguau

SEQ ID NO: 1932105 - RNA, 19 nt, Artificial Sequence
  Description of Artificial Sequence: Synthetic oligonucleotide
cucuguggaugcuaacuga

SEQ ID NO: 1932106 - RNA, 19 nt, Artificial Sequence
  Description of Artificial Sequence: Synthetic oligonucleotide
aacuuccaugucacaaaga

SEQ ID NO: 1932107 - RNA, 19 nt, Artificial Sequence
  Description of Artificial Sequence: Synthetic oligonucleotide
ccgaugaccuuuaaccuug

SEQ ID NO: 1932108 - RNA, 19 nt, Artificial Sequence
  Description of Artificial Sequence: Synthetic oligonucleotide
gagccauuccaucugguau

SEQ ID NO: 1932109 - RNA, 19 nt, Artificial Sequence
  Description of Artificial Sequence: Synthetic oligonucleotide
guacuacuguccugcagca

SEQ ID NO: 1932110 - RNA, 19 nt, Artificial Sequence
  Description of Artificial Sequence: Synthetic oligonucleotide
ucacuaucacugguacuac

SEQ ID NO: 1932111 - RNA, 19 nt, Artificial Sequence
  Description of Artificial Sequence: Synthetic oligonucleotide
gucugauccuuuccuugug

SEQ ID NO: 1932112 - RNA, 19 nt, Artificial Sequence
  Description of Artificial Sequence: Synthetic oligonucleotide
caguucuacagaaccaucu

SEQ ID NO: 1932113 - RNA, 19 nt, Artificial Sequence
  Description of Artificial Sequence: Synthetic oligonucleotide
ccaugacuguguuugccgg

SEQ ID NO: 1932114 - RNA, 19 nt, Artificial Sequence
  Description of Artificial Sequence: Synthetic oligonucleotide
ggaccgucuagacuugcgc

SEQ ID NO: 1932115 - RNA, 19 nt, Artificial Sequence
  Description of Artificial Sequence: Synthetic oligonucleotide
aucaugaagcagagucuag

SEQ ID NO: 1932116 - RNA, 19 nt, Artificial Sequence
  Description of Artificial Sequence: Synthetic oligonucleotide
ccgggagccaaacauacug

SEQ ID NO: 1932117 - RNA, 19 nt, Artificial Sequence
  Description of Artificial Sequence: Synthetic oligonucleotide
uugccgggagccaaacaua

SEQ ID NO: 1932118 - RNA, 19 nt, Artificial Sequence
  Description of Artificial Sequence: Synthetic oligonucleotide
gagcucgugcuugagucac

SEQ ID NO: 1932119 - RNA, 19 nt, Artificial Sequence
  Description of Artificial Sequence: Synthetic oligonucleotide
agcagccugcgcccggccg

SEQ ID NO: 1932120 - RNA, 19 nt, Artificial Sequence
  Description of Artificial Sequence: Synthetic oligonucleotide
ccaagguaaggucaaccac

SEQ ID NO: 1932121 - RNA, 19 nt, Artificial Sequence
  Description of Artificial Sequence: Synthetic oligonucleotide
guccaugacuguguuugcc

SEQ ID NO: 1932122 - RNA, 19 nt, Artificial Sequence
  Description of Artificial Sequence: Synthetic oligonucleotide
gaaggggaaagcaugcaau

SEQ ID NO: 1932123 - RNA, 19 nt, Artificial Sequence
  Description of Artificial Sequence: Synthetic oligonucleotide
uacgucugcuauccucauc

SEQ ID NO: 1932124 - RNA, 19 nt, Artificial Sequence
  Description of Artificial Sequence: Synthetic oligonucleotide
cagggcauugaagaaagaa

SEQ ID NO: 1932125 - RNA, 19 nt, Artificial Sequence
  Description of Artificial Sequence: Synthetic oligonucleotide
uacuacuguccugcagcag

SEQ ID NO: 1932126 - RNA, 19 nt, Artificial Sequence
  Description of Artificial Sequence: Synthetic oligonucleotide
gcuuuuggcuccgaugacc

SEQ ID NO: 1932127 - RNA, 19 nt, Artificial Sequence
  Description of Artificial Sequence: Synthetic oligonucleotide
accuuuaaccuuggugacu

SEQ ID NO: 1932128 - RNA, 19 nt, Artificial Sequence
  Description of Artificial Sequence: Synthetic oligonucleotide
uugugcuuuuggcuccgau

SEQ ID NO: 1932129 - RNA, 19 nt, Artificial Sequence
  Description of Artificial Sequence: Synthetic oligonucleotide
cugacgggccgcagacucg

SEQ ID NO: 1932130 - RNA, 19 nt, Artificial Sequence
  Description of Artificial Sequence: Synthetic oligonucleotide
ccuuuaaccuuggugacuc

SEQ ID NO: 1932131 - RNA, 19 nt, Artificial Sequence
  Description of Artificial Sequence: Synthetic oligonucleotide
uaucacuggauugccgguu

SEQ ID NO: 1932132 - RNA, 19 nt, Artificial Sequence
  Description of Artificial Sequence: Synthetic oligonucleotide
caucugacgagcucgugcu

SEQ ID NO: 1932133 - RNA, 19 nt, Artificial Sequence
  Description of Artificial Sequence: Synthetic oligonucleotide
ggagucacagcaguccaug

SEQ ID NO: 1932134 - RNA, 19 nt, Artificial Sequence
  Description of Artificial Sequence: Synthetic oligonucleotide
cagagucuaggaaacggua

SEQ ID NO: 1932135 - RNA, 19 nt, Artificial Sequence
  Description of Artificial Sequence: Synthetic oligonucleotide
acgguaucaaaagcgcaaa

SEQ ID NO: 1932136 - RNA, 19 nt, Artificial Sequence
  Description of Artificial Sequence: Synthetic oligonucleotide
guagguauuuacgucugcu

SEQ ID NO: 1932137 - RNA, 19 nt, Artificial Sequence
  Description of Artificial Sequence: Synthetic oligonucleotide
gcuuaucacuggauugccg

SEQ ID NO: 1932138 - RNA, 19 nt, Artificial Sequence
  Description of Artificial Sequence: Synthetic oligonucleotide
uguuugccgggagccaaac

SEQ ID NO: 1932139 - RNA, 19 nt, Artificial Sequence
  Description of Artificial Sequence: Synthetic oligonucleotide
gcaaugauuagaggaguca

SEQ ID NO: 1932140 - RNA, 19 nt, Artificial Sequence
  Description of Artificial Sequence: Synthetic oligonucleotide
guggaugcuaacugagacu

SEQ ID NO: 1932141 - RNA, 19 nt, Artificial Sequence
  Description of Artificial Sequence: Synthetic oligonucleotide
ugcagcggccucccguuuc

SEQ ID NO: 1932142 - RNA, 19 nt, Artificial Sequence
  Description of Artificial Sequence: Synthetic oligonucleotide
agcaguccaugacuguguu

SEQ ID NO: 1932143 - RNA, 19 nt, Artificial Sequence
  Description of Artificial Sequence: Synthetic oligonucleotide
cuugcgcccaacaguggca

SEQ ID NO: 1932144 - RNA, 19 nt, Artificial Sequence
  Description of Artificial Sequence: Synthetic oligonucleotide
gacgcugacgggccgcaga

SEQ ID NO: 1932145 - RNA, 19 nt, Artificial Sequence
  Description of Artificial Sequence: Synthetic oligonucleotide
uuacgucugcuauccucau

SEQ ID NO: 1932146 - RNA, 19 nt, Artificial Sequence
  Description of Artificial Sequence: Synthetic oligonucleotide
gacuugcgcccaacagugg

SEQ ID NO: 1932147 - RNA, 19 nt, Artificial Sequence
  Description of Artificial Sequence: Synthetic oligonucleotide
ggaacuugagauuccaguu

SEQ ID NO: 1932148 - RNA, 19 nt, Artificial Sequence
  Description of Artificial Sequence: Synthetic oligonucleotide
gccauaguagauguuucac

SEQ ID NO: 1932149 - RNA, 19 nt, Artificial Sequence
  Description of Artificial Sequence: Synthetic oligonucleotide
gacacuccugaaguaucuc

SEQ ID NO: 1932150 - RNA, 19 nt, Artificial Sequence
  Description of Artificial Sequence: Synthetic oligonucleotide
gacggggcacgcgccaccg

SEQ ID NO: 1932151 - RNA, 19 nt, Artificial Sequence
  Description of Artificial Sequence: Synthetic oligonucleotide
cacugguacuacuguccug

SEQ ID NO: 1932152 - RNA, 19 nt, Artificial Sequence
  Description of Artificial Sequence: Synthetic oligonucleotide
ugguaucucugcagugauu

SEQ ID NO: 1932153 - RNA, 19 nt, Artificial Sequence
  Description of Artificial Sequence: Synthetic oligonucleotide
cuaucacugguacuacugu

SEQ ID NO: 1932154 - RNA, 19 nt, Artificial Sequence
  Description of Artificial Sequence: Synthetic oligonucleotide
cugcugcggagucacagca

SEQ ID NO: 1932155 - RNA, 19 nt, Artificial Sequence
  Description of Artificial Sequence: Synthetic oligonucleotide
cuugagucacaagucaggu

SEQ ID NO: 1932156 - RNA, 19 nt, Artificial Sequence
  Description of Artificial Sequence: Synthetic oligonucleotide
cugcgugccagagccauuc

SEQ ID NO: 1932157 - RNA, 19 nt, Artificial Sequence
  Description of Artificial Sequence: Synthetic oligonucleotide
cagcuacaccauccuuugg

SEQ ID NO: 1932158 - RNA, 19 nt, Artificial Sequence
  Description of Artificial Sequence: Synthetic oligonucleotide
cuccgaugaccuuuaaccu

SEQ ID NO: 1932159 - RNA, 19 nt, Artificial Sequence
  Description of Artificial Sequence: Synthetic oligonucleotide
caggucacuaucacuggua

SEQ ID NO: 1932160 - RNA, 19 nt, Artificial Sequence
  Description of Artificial Sequence: Synthetic oligonucleotide
gcugacgggccgcagacuc

SEQ ID NO: 1932161 - RNA, 19 nt, Artificial Sequence
  Description of Artificial Sequence: Synthetic oligonucleotide
cugaagcuaugacaaugaa

SEQ ID NO: 1932162 - RNA, 19 nt, Artificial Sequence
  Description of Artificial Sequence: Synthetic oligonucleotide
agucacaagucaggucacu

SEQ ID NO: 1932163 - RNA, 19 nt, Artificial Sequence
  Description of Artificial Sequence: Synthetic oligonucleotide
uccuagcccggccccgcgc

SEQ ID NO: 1932164 - RNA, 19 nt, Artificial Sequence
  Description of Artificial Sequence: Synthetic oligonucleotide
cucgugcuugagucacaag

SEQ ID NO: 1932165 - RNA, 19 nt, Artificial Sequence
  Description of Artificial Sequence: Synthetic oligonucleotide
cuucuacagaagacaacgu

SEQ ID NO: 1932166 - RNA, 19 nt, Artificial Sequence
  Description of Artificial Sequence: Synthetic oligonucleotide
cagaacgggaccgucuaga

SEQ ID NO: 1932167 - RNA, 19 nt, Artificial Sequence
  Description of Artificial Sequence: Synthetic oligonucleotide
cuaugacaaugaacuucca

SEQ ID NO: 1932168 - RNA, 19 nt, Artificial Sequence
  Description of Artificial Sequence: Synthetic oligonucleotide
ucacuggauugccgguuuu

SEQ ID NO: 1932169 - RNA, 19 nt, Artificial Sequence
  Description of Artificial Sequence: Synthetic oligonucleotide
gaacgggaccgucuagacu

SEQ ID NO: 1932170 - RNA, 19 nt, Artificial Sequence
  Description of Artificial Sequence: Synthetic oligonucleotide
gcuacaccauccuuuggaa

SEQ ID NO: 1932171 - RNA, 19 nt, Artificial Sequence
  Description of Artificial Sequence: Synthetic oligonucleotide
auucugcuuaucacuggau

SEQ ID NO: 1932172 - RNA, 19 nt, Artificial Sequence
  Description of Artificial Sequence: Synthetic oligonucleotide
cacucucuguggaugcuaa

SEQ ID NO: 1932173 - RNA, 19 nt, Artificial Sequence
  Description of Artificial Sequence: Synthetic oligonucleotide
cugugggcuugucacucuc

SEQ ID NO: 1932174 - RNA, 19 nt, Artificial Sequence
  Description of Artificial Sequence: Synthetic oligonucleotide
ccuugacuguuucuuguuc

SEQ ID NO: 1932175 - RNA, 19 nt, Artificial Sequence
  Description of Artificial Sequence: Synthetic oligonucleotide
gucuaggaaacgguaucaa

SEQ ID NO: 1932176 - RNA, 19 nt, Artificial Sequence
  Description of Artificial Sequence: Synthetic oligonucleotide
uccuugcagcggccucccg

SEQ ID NO: 1932177 - RNA, 19 nt, Artificial Sequence
  Description of Artificial Sequence: Synthetic oligonucleotide
ggagucacucucauaaacu

SEQ ID NO: 1932178 - RNA, 19 nt, Artificial Sequence
  Description of Artificial Sequence: Synthetic oligonucleotide
cucucuguggaugcuaacu

SEQ ID NO: 1932179 - RNA, 19 nt, Artificial Sequence
  Description of Artificial Sequence: Synthetic oligonucleotide
augcuaacugagacucuga

SEQ ID NO: 1932180 - RNA, 19 nt, Artificial Sequence
  Description of Artificial Sequence: Synthetic oligonucleotide
ggcuccgaugaccuuuaac

SEQ ID NO: 1932181 - RNA, 19 nt, Artificial Sequence
  Description of Artificial Sequence: Synthetic oligonucleotide
guuugccgggagccaaaca

SEQ ID NO: 1932182 - RNA, 19 nt, Artificial Sequence
  Description of Artificial Sequence: Synthetic oligonucleotide
gacgagcucgugcuugagu

SEQ ID NO: 1932183 - RNA, 19 nt, Artificial Sequence
  Description of Artificial Sequence: Synthetic oligonucleotide
cugcggagucacagcaguc

SEQ ID NO: 1932184 - RNA, 19 nt, Artificial Sequence
  Description of Artificial Sequence: Synthetic oligonucleotide
uuuuggcuccgaugaccuu

SEQ ID NO: 1932185 - RNA, 19 nt, Artificial Sequence
  Description of Artificial Sequence: Synthetic oligonucleotide
ccgcgggcgacgcugacgg

SEQ ID NO: 1932186 - RNA, 19 nt, Artificial Sequence
  Description of Artificial Sequence: Synthetic oligonucleotide
ccaguucuacagaaccauc

SEQ ID NO: 1932187 - RNA, 19 nt, Artificial Sequence
  Description of Artificial Sequence: Synthetic oligonucleotide
accgcgggcgacgcugacg

SEQ ID NO: 1932188 - RNA, 19 nt, Artificial Sequence
  Description of Artificial Sequence: Synthetic oligonucleotide
gggaccgucuagacuugcg

SEQ ID NO: 1932189 - RNA, 19 nt, Artificial Sequence
  Description of Artificial Sequence: Synthetic oligonucleotide
guuucugcuugagaggguu

SEQ ID NO: 1932190 - RNA, 19 nt, Artificial Sequence
  Description of Artificial Sequence: Synthetic oligonucleotide
caucaucaucugacgagcu

SEQ ID NO: 1932191 - RNA, 19 nt, Artificial Sequence
  Description of Artificial Sequence: Synthetic oligonucleotide
caaugaguucuucuacuuu

SEQ ID NO: 1932192 - RNA, 19 nt, Artificial Sequence
  Description of Artificial Sequence: Synthetic oligonucleotide
cuacuguccugcagcaggu

SEQ ID NO: 1932193 - RNA, 19 nt, Artificial Sequence
  Description of Artificial Sequence: Synthetic oligonucleotide
gcacgcgccaccgcgggcg

SEQ ID NO: 1932194 - RNA, 19 nt, Artificial Sequence
  Description of Artificial Sequence: Synthetic oligonucleotide
cuccuagcccggccccgcg

SEQ ID NO: 1932195 - RNA, 19 nt, Artificial Sequence
  Description of Artificial Sequence: Synthetic oligonucleotide
cacuaucacugguacuacu

SEQ ID NO: 1932196 - RNA, 19 nt, Artificial Sequence
  Description of Artificial Sequence: Synthetic oligonucleotide
gucuagacuugcgcccaac

SEQ ID NO: 1932197 - RNA, 19 nt, Artificial Sequence
  Description of Artificial Sequence: Synthetic oligonucleotide
gcuugagaggguucauucu

SEQ ID NO: 1932198 - RNA, 19 nt, Artificial Sequence
  Description of Artificial Sequence: Synthetic oligonucleotide
gcggagucacagcagucca

SEQ ID NO: 1932199 - RNA, 19 nt, Artificial Sequence
  Description of Artificial Sequence: Synthetic oligonucleotide
ccuagcccggccccgcgcg

SEQ ID NO: 1932200 - RNA, 19 nt, Artificial Sequence
  Description of Artificial Sequence: Synthetic oligonucleotide
cugccucaguagucugauc

SEQ ID NO: 1932201 - RNA, 19 nt, Artificial Sequence
  Description of Artificial Sequence: Synthetic oligonucleotide
cucaguagucugauccuuu

SEQ ID NO: 1932202 - RNA, 19 nt, Artificial Sequence
  Description of Artificial Sequence: Synthetic oligonucleotide
cagcaguccaugacugugu

SEQ ID NO: 1932203 - RNA, 19 nt, Artificial Sequence
  Description of Artificial Sequence: Synthetic oligonucleotide
cguuucugccucaguaguc

SEQ ID NO: 1932204 - RNA, 19 nt, Artificial Sequence
  Description of Artificial Sequence: Synthetic oligonucleotide
cuagcccggccccgcgcgc

SEQ ID NO: 1932205 - RNA, 19 nt, Artificial Sequence
  Description of Artificial Sequence: Synthetic oligonucleotide
gggcacgcgccaccgcggg

SEQ ID NO: 1932206 - RNA, 19 nt, Artificial Sequence
  Description of Artificial Sequence: Synthetic oligonucleotide
ccguccgcgccuccuagcc

SEQ ID NO: 1932207 - RNA, 19 nt, Artificial Sequence
  Description of Artificial Sequence: Synthetic oligonucleotide
gccccgacggggcacgcgc

SEQ ID NO: 1932208 - RNA, 19 nt, Artificial Sequence
  Description of Artificial Sequence: Synthetic oligonucleotide
cuugcagcggccucccguu

SEQ ID NO: 1932209 - RNA, 19 nt, Artificial Sequence
  Description of Artificial Sequence: Synthetic oligonucleotide
gcgggcgacgcugacgggc

SEQ ID NO: 1932210 - RNA, 19 nt, Artificial Sequence
  Description of Artificial Sequence: Synthetic oligonucleotide
uugcagcggccucccguuu

SEQ ID NO: 1932211 - RNA, 19 nt, Artificial Sequence
  Description of Artificial Sequence: Synthetic oligonucleotide
uggcuccgaugaccuuuaa

SEQ ID NO: 1932212 - RNA, 19 nt, Artificial Sequence
  Description of Artificial Sequence: Synthetic oligonucleotide
cacagcaguccaugacugu

SEQ ID NO: 1932213 - RNA, 19 nt, Artificial Sequence
  Description of Artificial Sequence: Synthetic oligonucleotide
gucaaccacuucugcuggu

SEQ ID NO: 1932214 - RNA, 19 nt, Artificial Sequence
  Description of Artificial Sequence: Synthetic oligonucleotide
ggagccaaacauacugcgu

SEQ ID NO: 1932215 - RNA, 19 nt, Artificial Sequence
  Description of Artificial Sequence: Synthetic oligonucleotide
auacugcgugccagagcca

SEQ ID NO: 1932216 - RNA, 19 nt, Artificial Sequence
  Description of Artificial Sequence: Synthetic oligonucleotide
ccugaaguaucuccuucua

SEQ ID NO: 1932217 - RNA, 19 nt, Artificial Sequence
  Description of Artificial Sequence: Synthetic oligonucleotide
acgggaccgucuagacuug

SEQ ID NO: 1932218 - RNA, 19 nt, Artificial Sequence
  Description of Artificial Sequence: Synthetic oligonucleotide
gcgccuccuagcccggccc

SEQ ID NO: 1932219 - RNA, 19 nt, Artificial Sequence
  Description of Artificial Sequence: Synthetic oligonucleotide
uucugcuggugaggcccaa

SEQ ID NO: 1932220 - RNA, 19 nt, Artificial Sequence
  Description of Artificial Sequence: Synthetic oligonucleotide
gggaaagcaugcaaugauu

SEQ ID NO: 1932221 - RNA, 19 nt, Artificial Sequence
  Description of Artificial Sequence: Synthetic oligonucleotide
ggccguccgcgccuccuag

SEQ ID NO: 1932222 - RNA, 19 nt, Artificial Sequence
  Description of Artificial Sequence: Synthetic oligonucleotide
gcgcccaacaguggcacca

SEQ ID NO: 1932223 - RNA, 19 nt, Artificial Sequence
  Description of Artificial Sequence: Synthetic oligonucleotide
ggcugcagacucaaugagu

SEQ ID NO: 1932224 - RNA, 19 nt, Artificial Sequence
  Description of Artificial Sequence: Synthetic oligonucleotide
agcucgugcuugagucaca

SEQ ID NO: 1932225 - RNA, 19 nt, Artificial Sequence
  Description of Artificial Sequence: Synthetic oligonucleotide
cagagccauuccaucuggu

SEQ ID NO: 1932226 - RNA, 19 nt, Artificial Sequence
  Description of Artificial Sequence: Synthetic oligonucleotide
guguuugccgggagccaaa

SEQ ID NO: 1932227 - RNA, 19 nt, Artificial Sequence
  Description of Artificial Sequence: Synthetic oligonucleotide
ggggcacgcgccaccgcgg

SEQ ID NO: 1932228 - RNA, 19 nt, Artificial Sequence
  Description of Artificial Sequence: Synthetic oligonucleotide
gcucgugcuugagucacaa

SEQ ID NO: 1932229 - RNA, 19 nt, Artificial Sequence
  Description of Artificial Sequence: Synthetic oligonucleotide
cgggcgacgcugacgggcc

SEQ ID NO: 1932230 - RNA, 19 nt, Artificial Sequence
  Description of Artificial Sequence: Synthetic oligonucleotide
ggugaggcccaagucugcu

SEQ ID NO: 1932231 - RNA, 19 nt, Artificial Sequence
  Description of Artificial Sequence: Synthetic oligonucleotide
gccguccgcgccuccuagc

SEQ ID NO: 1932232 - RNA, 19 nt, Artificial Sequence
  Description of Artificial Sequence: Synthetic oligonucleotide
ccguuucugccucaguagu

SEQ ID NO: 1932233 - RNA, 19 nt, Artificial Sequence
  Description of Artificial Sequence: Synthetic oligonucleotide
gccuccuagcccggccccg

SEQ ID NO: 1932234 - RNA, 19 nt, Artificial Sequence
  Description of Artificial Sequence: Synthetic oligonucleotide
ccucccguuucugccucag

SEQ ID NO: 1932235 - RNA, 19 nt, Artificial Sequence
  Description of Artificial Sequence: Synthetic oligonucleotide
ggcacgcgccaccgcgggc

SEQ ID NO: 1932236 - RNA, 19 nt, Artificial Sequence
  Description of Artificial Sequence: Synthetic oligonucleotide
acgcgccaccgcgggcgac

SEQ ID NO: 1932237 - RNA, 19 nt, Artificial Sequence
  Description of Artificial Sequence: Synthetic oligonucleotide
cgagcucgugcuugaguca

SEQ ID NO: 1932238 - RNA, 19 nt, Artificial Sequence
  Description of Artificial Sequence: Synthetic oligonucleotide
ccgucuagacuugcgccca

SEQ ID NO: 1932239 - RNA, 19 nt, Artificial Sequence
  Description of Artificial Sequence: Synthetic oligonucleotide
caccgcgggcgacgcugac

SEQ ID NO: 1932240 - RNA, 19 nt, Artificial Sequence
  Description of Artificial Sequence: Synthetic oligonucleotide
ggaugcuaacugagacucu

SEQ ID NO: 1932241 - RNA, 19 nt, Artificial Sequence
  Description of Artificial Sequence: Synthetic oligonucleotide
cagccugcgcccggccguc

SEQ ID NO: 1932242 - RNA, 19 nt, Artificial Sequence
  Description of Artificial Sequence: Synthetic oligonucleotide
gcagcggccucccguuucu

SEQ ID NO: 1932243 - RNA, 19 nt, Artificial Sequence
  Description of Artificial Sequence: Synthetic oligonucleotide
cagcggccucccguuucug

SEQ ID NO: 1932244 - RNA, 19 nt, Artificial Sequence
  Description of Artificial Sequence: Synthetic oligonucleotide
ccugcgcccggccguccgc

SEQ ID NO: 1932245 - RNA, 19 nt, Artificial Sequence
  Description of Artificial Sequence: Synthetic oligonucleotide
ccacuagaggaaggggaaa

SEQ ID NO: 1932246 - RNA, 19 nt, Artificial Sequence
  Description of Artificial Sequence: Synthetic oligonucleotide
cguccgcgccuccuagccc

SEQ ID NO: 1932247 - RNA, 19 nt, Artificial Sequence
  Description of Artificial Sequence: Synthetic oligonucleotide
ccccgacggggcacgcgcc

SEQ ID NO: 1932248 - RNA, 19 nt, Artificial Sequence
  Description of Artificial Sequence: Synthetic oligonucleotide
cacgcgccaccgcgggcga

SEQ ID NO: 1932249 - RNA, 19 nt, Artificial Sequence
  Description of Artificial Sequence: Synthetic oligonucleotide
cgcgccuccuagcccggcc

SEQ ID NO: 1932250 - RNA, 19 nt, Artificial Sequence
  Description of Artificial Sequence: Synthetic oligonucleotide
ccgcgcgccccgacggggc

SEQ ID NO: 1932251 - RNA, 19 nt, Artificial Sequence
  Description of Artificial Sequence: Synthetic oligonucleotide
cgucugcuauccucaucca

SEQ ID NO: 1932252 - RNA, 19 nt, Artificial Sequence
  Description of Artificial Sequence: Synthetic oligonucleotide
cgacggggcacgcgccacc

SEQ ID NO: 1932253 - RNA, 19 nt, Artificial Sequence
  Description of Artificial Sequence: Synthetic oligonucleotide
cgcgccaccgcgggcgacg

SEQ ID NO: 1932254 - RNA, 19 nt, Artificial Sequence
  Description of Artificial Sequence: Synthetic oligonucleotide
ccauuccaucugguaucuc

SEQ ID NO: 1932255 - RNA, 19 nt, Artificial Sequence
  Description of Artificial Sequence: Synthetic oligonucleotide
gccucccguuucugccuca

SEQ ID NO: 1932256 - RNA, 19 nt, Artificial Sequence
  Description of Artificial Sequence: Synthetic oligonucleotide
ccgacggggcacgcgccac

SEQ ID NO: 1932257 - RNA, 19 nt, Artificial Sequence
  Description of Artificial Sequence: Synthetic oligonucleotide
cccgacggggcacgcgcca

SEQ ID NO: 1932258 - RNA, 19 nt, Artificial Sequence
  Description of Artificial Sequence: Synthetic oligonucleotide
ccaccgcgggcgacgcuga

SEQ ID NO: 1932259 - RNA, 19 nt, Artificial Sequence
  Description of Artificial Sequence: Synthetic oligonucleotide
gccgggagccaaacauacu

SEQ ID NO: 1932260 - RNA, 19 nt, Artificial Sequence
  Description of Artificial Sequence: Synthetic oligonucleotide
cugccagcugugggcuugu

SEQ ID NO: 1932261 - RNA, 19 nt, Artificial Sequence
  Description of Artificial Sequence: Synthetic oligonucleotide
cgcgggcgacgcugacggg

SEQ ID NO: 1932262 - RNA, 19 nt, Artificial Sequence
  Description of Artificial Sequence: Synthetic oligonucleotide
cgucuagacuugcgcccaa

SEQ ID NO: 1932263 - RNA, 19 nt, Artificial Sequence
  Description of Artificial Sequence: Synthetic oligonucleotide
cggagucacagcaguccau

SEQ ID NO: 1932264 - RNA, 19 nt, Artificial Sequence
  Description of Artificial Sequence: Synthetic oligonucleotide
cgccccgacggggcacgcg

SEQ ID NO: 1932265 - RNA, 19 nt, Artificial Sequence
  Description of Artificial Sequence: Synthetic oligonucleotide
gcgcgccccgacggggcac

SEQ ID NO: 1932266 - RNA, 19 nt, Artificial Sequence
  Description of Artificial Sequence: Synthetic oligonucleotide
gcgccccgacggggcacgc

SEQ ID NO: 1932267 - RNA, 19 nt, Artificial Sequence
  Description of Artificial Sequence: Synthetic oligonucleotide
cgcgcgccccgacggggca

SEQ ID NO: 1932268 - RNA, 19 nt, Artificial Sequence
  Description of Artificial Sequence: Synthetic oligonucleotide
ccggccguccgcgccuccu

SEQ ID NO: 1932269 - RNA, 19 nt, Artificial Sequence
  Description of Artificial Sequence: Synthetic oligonucleotide
cgcugacgggccgcagacu

SEQ ID NO: 1932270 - RNA, 19 nt, Artificial Sequence
  Description of Artificial Sequence: Synthetic oligonucleotide
acuacaaugauuuagaaag

SEQ ID NO: 1932271 - RNA, 19 nt, Artificial Sequence
  Description of Artificial Sequence: Synthetic oligonucleotide
ugguguauaacacagaucg

SEQ ID NO: 1932272 - RNA, 19 nt, Artificial Sequence
  Description of Artificial Sequence: Synthetic oligonucleotide
aaagcuacagguuuaaaag

SEQ ID NO: 1932273 - RNA, 19 nt, Artificial Sequence
  Description of Artificial Sequence: Synthetic oligonucleotide
uguuuauuaagcaagcucc

SEQ ID NO: 1932274 - RNA, 19 nt, Artificial Sequence
  Description of Artificial Sequence: Synthetic oligonucleotide
ucuuguaaggucaucaugg

SEQ ID NO: 1932275 - RNA, 19 nt, Artificial Sequence
  Description of Artificial Sequence: Synthetic oligonucleotide
aauaccgaaccauuggggc

SEQ ID NO: 1932276 - RNA, 19 nt, Artificial Sequence
  Description of Artificial Sequence: Synthetic oligonucleotide
  modified_base (9)..(9): a, c, u, g, unknown or other
ucaaauuanacuacaauga

SEQ ID NO: 1932277 - RNA, 19 nt, Artificial Sequence
  Description of Artificial Sequence: Synthetic oligonucleotide
auaauugucugucagguac

SEQ ID NO: 1932278 - RNA, 19 nt, Artificial Sequence
  Description of Artificial Sequence: Synthetic oligonucleotide
aauaccaggauguaacuuc

SEQ ID NO: 1932279 - RNA, 19 nt, Artificial Sequence
  Description of Artificial Sequence: Synthetic oligonucleotide
uuuaaaagaaauaccagga

SEQ ID NO: 1932280 - RNA, 19 nt, Artificial Sequence
  Description of Artificial Sequence: Synthetic oligonucleotide
uauuuuaauggccucauag

SEQ ID NO: 1932281 - RNA, 19 nt, Artificial Sequence
  Description of Artificial Sequence: Synthetic oligonucleotide
aaaaucuaggauuuuccac

SEQ ID NO: 1932282 - RNA, 19 nt, Artificial Sequence
  Description of Artificial Sequence: Synthetic oligonucleotide
guacauuaaauguugaugg

SEQ ID NO: 1932283 - RNA, 19 nt, Artificial Sequence
  Description of Artificial Sequence: Synthetic oligonucleotide
agaaagucgagucaaacac

SEQ ID NO: 1932284 - RNA, 19 nt, Artificial Sequence
  Description of Artificial Sequence: Synthetic oligonucleotide
uucaagagcaauaucaacc

SEQ ID NO: 1932285 - RNA, 19 nt, Artificial Sequence
  Description of Artificial Sequence: Synthetic oligonucleotide
uuuaauggccucauagugg

SEQ ID NO: 1932286 - RNA, 19 nt, Artificial Sequence
  Description of Artificial Sequence: Synthetic oligonucleotide
  modified_base (6)..(6): a, c, u, g, unknown or other
aauuanacuacaaugauuu

SEQ ID NO: 1932287 - RNA, 19 nt, Artificial Sequence
  Description of Artificial Sequence: Synthetic oligonucleotide
aagaguauuuucuuacuag

SEQ ID NO: 1932288 - RNA, 19 nt, Artificial Sequence
  Description of Artificial Sequence: Synthetic oligonucleotide
  modified_base (4)..(4): a, c, u, g, unknown or other
uuanacuacaaugauuuag

SEQ ID NO: 1932289 - RNA, 19 nt, Artificial Sequence
  Description of Artificial Sequence: Synthetic oligonucleotide
ucaaacaccauaauugucu

SEQ ID NO: 1932290 - RNA, 19 nt, Artificial Sequence
  Description of Artificial Sequence: Synthetic oligonucleotide
agcaacuacagguauagac

SEQ ID NO: 1932291 - RNA, 19 nt, Artificial Sequence
  Description of Artificial Sequence: Synthetic oligonucleotide
ugaaguuaaaagcuacagg

SEQ ID NO: 1932292 - RNA, 19 nt, Artificial Sequence
  Description of Artificial Sequence: Synthetic oligonucleotide
ucuuuuaaguuucuuaugu

SEQ ID NO: 1932293 - RNA, 19 nt, Artificial Sequence
  Description of Artificial Sequence: Synthetic oligonucleotide
  modified_base (3)..(3): a, c, u, g, unknown or other
uanacuacaaugauuuaga

SEQ ID NO: 1932294 - RNA, 19 nt, Artificial Sequence
  Description of Artificial Sequence: Synthetic oligonucleotide
uuuuaauggccucauagug

SEQ ID NO: 1932295 - RNA, 19 nt, Artificial Sequence
  Description of Artificial Sequence: Synthetic oligonucleotide
uuaauaucuauuccguuug

SEQ ID NO: 1932296 - RNA, 19 nt, Artificial Sequence
  Description of Artificial Sequence: Synthetic oligonucleotide
auaaccuucugccauugcc

SEQ ID NO: 1932297 - RNA, 19 nt, Artificial Sequence
  Description of Artificial Sequence: Synthetic oligonucleotide
uuaauugaaacugaaaauc

SEQ ID NO: 1932298 - RNA, 19 nt, Artificial Sequence
  Description of Artificial Sequence: Synthetic oligonucleotide
aaaagaaauaccaggaugu

SEQ ID NO: 1932299 - RNA, 19 nt, Artificial Sequence
  Description of Artificial Sequence: Synthetic oligonucleotide
aaagacaugugccaugaug

SEQ ID NO: 1932300 - RNA, 19 nt, Artificial Sequence
  Description of Artificial Sequence: Synthetic oligonucleotide
aaaaucagcagcaacuauc

SEQ ID NO: 1932301 - RNA, 19 nt, Artificial Sequence
  Description of Artificial Sequence: Synthetic oligonucleotide
aaagccaacuuugaauacc

SEQ ID NO: 1932302 - RNA, 19 nt, Artificial Sequence
  Description of Artificial Sequence: Synthetic oligonucleotide
uguaaggucaucauggauc

SEQ ID NO: 1932303 - RNA, 19 nt, Artificial Sequence
  Description of Artificial Sequence: Synthetic oligonucleotide
auuaaauguugauggaaac

SEQ ID NO: 1932304 - RNA, 19 nt, Artificial Sequence
  Description of Artificial Sequence: Synthetic oligonucleotide
auugguauggagucacucc

SEQ ID NO: 1932305 - RNA, 19 nt, Artificial Sequence
  Description of Artificial Sequence: Synthetic oligonucleotide
cuuacuaguguucuaaaag

SEQ ID NO: 1932306 - RNA, 19 nt, Artificial Sequence
  Description of Artificial Sequence: Synthetic oligonucleotide
uuauagaucugacaaaauc

SEQ ID NO: 1932307 - RNA, 19 nt, Artificial Sequence
  Description of Artificial Sequence: Synthetic oligonucleotide
aaaagcuacagguuuaaaa

SEQ ID NO: 1932308 - RNA, 19 nt, Artificial Sequence
  Description of Artificial Sequence: Synthetic oligonucleotide
ugaauaccgaaccauuggg

SEQ ID NO: 1932309 - RNA, 19 nt, Artificial Sequence
  Description of Artificial Sequence: Synthetic oligonucleotide
gaaguuaaaagcuacaggu

SEQ ID NO: 1932310 - RNA, 19 nt, Artificial Sequence
  Description of Artificial Sequence: Synthetic oligonucleotide
aacaccauaauugucuguc

SEQ ID NO: 1932311 - RNA, 19 nt, Artificial Sequence
  Description of Artificial Sequence: Synthetic oligonucleotide
uugaauaccgaaccauugg

SEQ ID NO: 1932312 - RNA, 19 nt, Artificial Sequence
  Description of Artificial Sequence: Synthetic oligonucleotide
agaaauaccaggauguaac

SEQ ID NO: 1932313 - RNA, 19 nt, Artificial Sequence
  Description of Artificial Sequence: Synthetic oligonucleotide
uuucuuaugucuccguuag

SEQ ID NO: 1932314 - RNA, 19 nt, Artificial Sequence
  Description of Artificial Sequence: Synthetic oligonucleotide
uguacauuaaauguugaug

SEQ ID NO: 1932315 - RNA, 19 nt, Artificial Sequence
  Description of Artificial Sequence: Synthetic oligonucleotide
aauccaaugggcaauucac

SEQ ID NO: 1932316 - RNA, 19 nt, Artificial Sequence
  Description of Artificial Sequence: Synthetic oligonucleotide
uaauugaaacugaaaaucu

SEQ ID NO: 1932317 - RNA, 19 nt, Artificial Sequence
  Description of Artificial Sequence: Synthetic oligonucleotide
auuagaaacauuuccauuu

SEQ ID NO: 1932318 - RNA, 19 nt, Artificial Sequence
  Description of Artificial Sequence: Synthetic oligonucleotide
uccguuagcaacuacaggu

SEQ ID NO: 1932319 - RNA, 19 nt, Artificial Sequence
  Description of Artificial Sequence: Synthetic oligonucleotide
uauccauugguguauaaca

SEQ ID NO: 1932320 - RNA, 19 nt, Artificial Sequence
  Description of Artificial Sequence: Synthetic oligonucleotide
cauauugugauugguaugg

SEQ ID NO: 1932321 - RNA, 19 nt, Artificial Sequence
  Description of Artificial Sequence: Synthetic oligonucleotide
aucugacaaaaucagcagc

SEQ ID NO: 1932322 - RNA, 19 nt, Artificial Sequence
  Description of Artificial Sequence: Synthetic oligonucleotide
aaaagccaacuuugaauac

SEQ ID NO: 1932323 - RNA, 19 nt, Artificial Sequence
  Description of Artificial Sequence: Synthetic oligonucleotide
ugaaacugaaaaucuagga

SEQ ID NO: 1932324 - RNA, 19 nt, Artificial Sequence
  Description of Artificial Sequence: Synthetic oligonucleotide
aggauguaacuucauaggg

SEQ ID NO: 1932325 - RNA, 19 nt, Artificial Sequence
  Description of Artificial Sequence: Synthetic oligonucleotide
uguucuaaaagccaacuuu

SEQ ID NO: 1932326 - RNA, 19 nt, Artificial Sequence
  Description of Artificial Sequence: Synthetic oligonucleotide
ugauuuagaaagucgaguc

SEQ ID NO: 1932327 - RNA, 19 nt, Artificial Sequence
  Description of Artificial Sequence: Synthetic oligonucleotide
uaagcaagcuccauaaccu

SEQ ID NO: 1932328 - RNA, 19 nt, Artificial Sequence
  Description of Artificial Sequence: Synthetic oligonucleotide
uuugaauaccgaaccauug

SEQ ID NO: 1932329 - RNA, 19 nt, Artificial Sequence
  Description of Artificial Sequence: Synthetic oligonucleotide
uauuaagcaagcuccauaa

SEQ ID NO: 1932330 - RNA, 19 nt, Artificial Sequence
  Description of Artificial Sequence: Synthetic oligonucleotide
  modified_base (11)..(11): a, c, u, g, unknown or other
uaucaaauuanacuacaau

SEQ ID NO: 1932331 - RNA, 19 nt, Artificial Sequence
  Description of Artificial Sequence: Synthetic oligonucleotide
uuuuauagaucugacaaaa

SEQ ID NO: 1932332 - RNA, 19 nt, Artificial Sequence
  Description of Artificial Sequence: Synthetic oligonucleotide
  modified_base (16)..(16): a, c, u, g, unknown or other
guagguaucaaauuanacu

SEQ ID NO: 1932333 - RNA, 19 nt, Artificial Sequence
  Description of Artificial Sequence: Synthetic oligonucleotide
uuaucuuaauugaaacuga

SEQ ID NO: 1932334 - RNA, 19 nt, Artificial Sequence
  Description of Artificial Sequence: Synthetic oligonucleotide
cuaaaaguccccuugcaac

SEQ ID NO: 1932335 - RNA, 19 nt, Artificial Sequence
  Description of Artificial Sequence: Synthetic oligonucleotide
acuacagguauagacacac

SEQ ID NO: 1932336 - RNA, 19 nt, Artificial Sequence
  Description of Artificial Sequence: Synthetic oligonucleotide
ucuaggauuuuccacuuga

SEQ ID NO: 1932337 - RNA, 19 nt, Artificial Sequence
  Description of Artificial Sequence: Synthetic oligonucleotide
uuaauggccucauagugga

SEQ ID NO: 1932338 - RNA, 19 nt, Artificial Sequence
  Description of Artificial Sequence: Synthetic oligonucleotide
ucuuccaugaacuguaauc

SEQ ID NO: 1932339 - RNA, 19 nt, Artificial Sequence
  Description of Artificial Sequence: Synthetic oligonucleotide
uaaaaguccccuugcaacc

SEQ ID NO: 1932340 - RNA, 19 nt, Artificial Sequence
  Description of Artificial Sequence: Synthetic oligonucleotide
agaucuaugguucuuguaa

SEQ ID NO: 1932341 - RNA, 19 nt, Artificial Sequence
  Description of Artificial Sequence: Synthetic oligonucleotide
uggauccuuaucuuaauug

SEQ ID NO: 1932342 - RNA, 19 nt, Artificial Sequence
  Description of Artificial Sequence: Synthetic oligonucleotide
uacuuguuucaccauaucu

SEQ ID NO: 1932343 - RNA, 19 nt, Artificial Sequence
  Description of Artificial Sequence: Synthetic oligonucleotide
  modified_base (17)..(17): a, c, u, g, unknown or other
uguagguaucaaauuanac

SEQ ID NO: 1932344 - RNA, 19 nt, Artificial Sequence
  Description of Artificial Sequence: Synthetic oligonucleotide
agucuuacuggccuagaac

SEQ ID NO: 1932345 - RNA, 19 nt, Artificial Sequence
  Description of Artificial Sequence: Synthetic oligonucleotide
caccauaucuugaacaagc

SEQ ID NO: 1932346 - RNA, 19 nt, Artificial Sequence
  Description of Artificial Sequence: Synthetic oligonucleotide
ugacaaagcguuaaauacu

SEQ ID NO: 1932347 - RNA, 19 nt, Artificial Sequence
  Description of Artificial Sequence: Synthetic oligonucleotide
aagacaugugccaugaugu

SEQ ID NO: 1932348 - RNA, 19 nt, Artificial Sequence
  Description of Artificial Sequence: Synthetic oligonucleotide
caacuuugaauaccgaacc

SEQ ID NO: 1932349 - RNA, 19 nt, Artificial Sequence
  Description of Artificial Sequence: Synthetic oligonucleotide
cuuccaugaacuguaaucc

SEQ ID NO: 1932350 - RNA, 19 nt, Artificial Sequence
  Description of Artificial Sequence: Synthetic oligonucleotide
aagagcaauaucaacccag

SEQ ID NO: 1932351 - RNA, 19 nt, Artificial Sequence
  Description of Artificial Sequence: Synthetic oligonucleotide
cuuguuucaccauaucuug

SEQ ID NO: 1932352 - RNA, 19 nt, Artificial Sequence
  Description of Artificial Sequence: Synthetic oligonucleotide
ucuuaugucuccguuagca

SEQ ID NO: 1932353 - RNA, 19 nt, Artificial Sequence
  Description of Artificial Sequence: Synthetic oligonucleotide
aauaucaacccagucccag

SEQ ID NO: 1932354 - RNA, 19 nt, Artificial Sequence
  Description of Artificial Sequence: Synthetic oligonucleotide
uaauccaggacacuccugu

SEQ ID NO: 1932355 - RNA, 19 nt, Artificial Sequence
  Description of Artificial Sequence: Synthetic oligonucleotide
ugcaucauuagcagcaaac

SEQ ID NO: 1932356 - RNA, 19 nt, Artificial Sequence
  Description of Artificial Sequence: Synthetic oligonucleotide
ucaacccagucccagauac

SEQ ID NO: 1932357 - RNA, 19 nt, Artificial Sequence
  Description of Artificial Sequence: Synthetic oligonucleotide
caggauguaacuucauagg

SEQ ID NO: 1932358 - RNA, 19 nt, Artificial Sequence
  Description of Artificial Sequence: Synthetic oligonucleotide
aguuaaaagcuacagguuu

SEQ ID NO: 1932359 - RNA, 19 nt, Artificial Sequence
  Description of Artificial Sequence: Synthetic oligonucleotide
uaaauucacugucucuugc

SEQ ID NO: 1932360 - RNA, 19 nt, Artificial Sequence
  Description of Artificial Sequence: Synthetic oligonucleotide
gaucuaugguucuuguaag

SEQ ID NO: 1932361 - RNA, 19 nt, Artificial Sequence
  Description of Artificial Sequence: Synthetic oligonucleotide
aggaguuccaaguucaaga

SEQ ID NO: 1932362 - RNA, 19 nt, Artificial Sequence
  Description of Artificial Sequence: Synthetic oligonucleotide
uaaccuucugccauugccc

SEQ ID NO: 1932363 - RNA, 19 nt, Artificial Sequence
  Description of Artificial Sequence: Synthetic oligonucleotide
auuccguuugcauagggcu

SEQ ID NO: 1932364 - RNA, 19 nt, Artificial Sequence
  Description of Artificial Sequence: Synthetic oligonucleotide
ucuugacauauugugauug

SEQ ID NO: 1932365 - RNA, 19 nt, Artificial Sequence
  Description of Artificial Sequence: Synthetic oligonucleotide
ucuccguuagcaacuacag

SEQ ID NO: 1932366 - RNA, 19 nt, Artificial Sequence
  Description of Artificial Sequence: Synthetic oligonucleotide
agaaacauuuccauuuggg

SEQ ID NO: 1932367 - RNA, 19 nt, Artificial Sequence
  Description of Artificial Sequence: Synthetic oligonucleotide
uagaaagucgagucaaaca

SEQ ID NO: 1932368 - RNA, 19 nt, Artificial Sequence
  Description of Artificial Sequence: Synthetic oligonucleotide
aaauucacugucucuugcu

SEQ ID NO: 1932369 - RNA, 19 nt, Artificial Sequence
  Description of Artificial Sequence: Synthetic oligonucleotide
guaaggucaucauggaucc

SEQ ID NO: 1932370 - RNA, 19 nt, Artificial Sequence
  Description of Artificial Sequence: Synthetic oligonucleotide
uuugcauagggcuugcauc

SEQ ID NO: 1932371 - RNA, 19 nt, Artificial Sequence
  Description of Artificial Sequence: Synthetic oligonucleotide
ucuaaaagccaacuuugaa

SEQ ID NO: 1932372 - RNA, 19 nt, Artificial Sequence
  Description of Artificial Sequence: Synthetic oligonucleotide
agucaaacaccauaauugu

SEQ ID NO: 1932373 - RNA, 19 nt, Artificial Sequence
  Description of Artificial Sequence: Synthetic oligonucleotide
uauugugauugguauggag

SEQ ID NO: 1932374 - RNA, 19 nt, Artificial Sequence
  Description of Artificial Sequence: Synthetic oligonucleotide
  modified_base (7)..(7): a, c, u, g, unknown or other
aaauuanacuacaaugauu

SEQ ID NO: 1932375 - RNA, 19 nt, Artificial Sequence
  Description of Artificial Sequence: Synthetic oligonucleotide
ucauagggguuccauguag

SEQ ID NO: 1932376 - RNA, 19 nt, Artificial Sequence
  Description of Artificial Sequence: Synthetic oligonucleotide
ugugguaaauucacugucu

SEQ ID NO: 1932377 - RNA, 19 nt, Artificial Sequence
  Description of Artificial Sequence: Synthetic oligonucleotide
agucacuccucauguauac

SEQ ID NO: 1932378 - RNA, 19 nt, Artificial Sequence
  Description of Artificial Sequence: Synthetic oligonucleotide
uguauaacacagaucgcaa

SEQ ID NO: 1932379 - RNA, 19 nt, Artificial Sequence
  Description of Artificial Sequence: Synthetic oligonucleotide
auagaucugacaaaaucag

SEQ ID NO: 1932380 - RNA, 19 nt, Artificial Sequence
  Description of Artificial Sequence: Synthetic oligonucleotide
aaagaucuaugguucuugu

SEQ ID NO: 1932381 - RNA, 19 nt, Artificial Sequence
  Description of Artificial Sequence: Synthetic oligonucleotide
aagccaacuuugaauaccg

SEQ ID NO: 1932382 - RNA, 19 nt, Artificial Sequence
  Description of Artificial Sequence: Synthetic oligonucleotide
uaugucuccguuagcaacu

SEQ ID NO: 1932383 - RNA, 19 nt, Artificial Sequence
  Description of Artificial Sequence: Synthetic oligonucleotide
caaugauuuagaaagucga

SEQ ID NO: 1932384 - RNA, 19 nt, Artificial Sequence
  Description of Artificial Sequence: Synthetic oligonucleotide
uaaguuucuuaugucuccg

SEQ ID NO: 1932385 - RNA, 19 nt, Artificial Sequence
  Description of Artificial Sequence: Synthetic oligonucleotide
uguuaucuuuuccaucaug

SEQ ID NO: 1932386 - RNA, 19 nt, Artificial Sequence
  Description of Artificial Sequence: Synthetic oligonucleotide
uuauuaagcaagcuccaua

SEQ ID NO: 1932387 - RNA, 19 nt, Artificial Sequence
  Description of Artificial Sequence: Synthetic oligonucleotide
aaagucgagucaaacacca

SEQ ID NO: 1932388 - RNA, 19 nt, Artificial Sequence
  Description of Artificial Sequence: Synthetic oligonucleotide
  modified_base (14)..(14): a, c, u, g, unknown or other
agguaucaaauuanacuac

SEQ ID NO: 1932389 - RNA, 19 nt, Artificial Sequence
  Description of Artificial Sequence: Synthetic oligonucleotide
cuugacauauugugauugg

SEQ ID NO: 1932390 - RNA, 19 nt, Artificial Sequence
  Description of Artificial Sequence: Synthetic oligonucleotide
aacuuugaauaccgaacca

SEQ ID NO: 1932391 - RNA, 19 nt, Artificial Sequence
  Description of Artificial Sequence: Synthetic oligonucleotide
uucaccauaucuugaacaa

SEQ ID NO: 1932392 - RNA, 19 nt, Artificial Sequence
  Description of Artificial Sequence: Synthetic oligonucleotide
uccucauguauacaaaaua

SEQ ID NO: 1932393 - RNA, 19 nt, Artificial Sequence
  Description of Artificial Sequence: Synthetic oligonucleotide
aucuaugguucuuguaagg

SEQ ID NO: 1932394 - RNA, 19 nt, Artificial Sequence
  Description of Artificial Sequence: Synthetic oligonucleotide
uauagacacacuuucuuuu

SEQ ID NO: 1932395 - RNA, 19 nt, Artificial Sequence
  Description of Artificial Sequence: Synthetic oligonucleotide
guucuaaaagccaacuuug

SEQ ID NO: 1932396 - RNA, 19 nt, Artificial Sequence
  Description of Artificial Sequence: Synthetic oligonucleotide
caacuacagguauagacac

SEQ ID NO: 1932397 - RNA, 19 nt, Artificial Sequence
  Description of Artificial Sequence: Synthetic oligonucleotide
gauguaacuucauaggggu

SEQ ID NO: 1932398 - RNA, 19 nt, Artificial Sequence
  Description of Artificial Sequence: Synthetic oligonucleotide
gauuuagaaagucgaguca

SEQ ID NO: 1932399 - RNA, 19 nt, Artificial Sequence
  Description of Artificial Sequence: Synthetic oligonucleotide
  modified_base (2)..(2): a, c, u, g, unknown or other
anacuacaaugauuuagaa

SEQ ID NO: 1932400 - RNA, 19 nt, Artificial Sequence
  Description of Artificial Sequence: Synthetic oligonucleotide
ucauggauccuuaucuuaa

SEQ ID NO: 1932401 - RNA, 19 nt, Artificial Sequence
  Description of Artificial Sequence: Synthetic oligonucleotide
uguaacuucauagggguuc

SEQ ID NO: 1932402 - RNA, 19 nt, Artificial Sequence
  Description of Artificial Sequence: Synthetic oligonucleotide
gaauaccgaaccauugggg

SEQ ID NO: 1932403 - RNA, 19 nt, Artificial Sequence
  Description of Artificial Sequence: Synthetic oligonucleotide
uugugguaaauucacuguc

SEQ ID NO: 1932404 - RNA, 19 nt, Artificial Sequence
  Description of Artificial Sequence: Synthetic oligonucleotide
uagaucugacaaaaucagc

SEQ ID NO: 1932405 - RNA, 19 nt, Artificial Sequence
  Description of Artificial Sequence: Synthetic oligonucleotide
uucuaaaagccaacuuuga

SEQ ID NO: 1932406 - RNA, 19 nt, Artificial Sequence
  Description of Artificial Sequence: Synthetic oligonucleotide
uacauuaaauguugaugga

SEQ ID NO: 1932407 - RNA, 19 nt, Artificial Sequence
  Description of Artificial Sequence: Synthetic oligonucleotide
ugacaaaaucagcagcaac

SEQ ID NO: 1932408 - RNA, 19 nt, Artificial Sequence
  Description of Artificial Sequence: Synthetic oligonucleotide
accauuggggcacagauuu

SEQ ID NO: 1932409 - RNA, 19 nt, Artificial Sequence
  Description of Artificial Sequence: Synthetic oligonucleotide
acugaacaauccaaugggc

SEQ ID NO: 1932410 - RNA, 19 nt, Artificial Sequence
  Description of Artificial Sequence: Synthetic oligonucleotide
ugacauauugugauuggua

SEQ ID NO: 1932411 - RNA, 19 nt, Artificial Sequence
  Description of Artificial Sequence: Synthetic oligonucleotide
ucuuacuuguuucaccaua

SEQ ID NO: 1932412 - RNA, 19 nt, Artificial Sequence
  Description of Artificial Sequence: Synthetic oligonucleotide
ugcuuuuauagaucugaca

SEQ ID NO: 1932413 - RNA, 19 nt, Artificial Sequence
  Description of Artificial Sequence: Synthetic oligonucleotide
auaucuauuccguuugcau

SEQ ID NO: 1932414 - RNA, 19 nt, Artificial Sequence
  Description of Artificial Sequence: Synthetic oligonucleotide
uuucuuacuaguguucuaa

SEQ ID NO: 1932415 - RNA, 19 nt, Artificial Sequence
  Description of Artificial Sequence: Synthetic oligonucleotide
auugugauugguauggagu

SEQ ID NO: 1932416 - RNA, 19 nt, Artificial Sequence
  Description of Artificial Sequence: Synthetic oligonucleotide
uaucuauuccguuugcaua

SEQ ID NO: 1932417 - RNA, 19 nt, Artificial Sequence
  Description of Artificial Sequence: Synthetic oligonucleotide
agggguuccauguagguau

SEQ ID NO: 1932418 - RNA, 19 nt, Artificial Sequence
  Description of Artificial Sequence: Synthetic oligonucleotide
ccucauguauacaaaauag

SEQ ID NO: 1932419 - RNA, 19 nt, Artificial Sequence
  Description of Artificial Sequence: Synthetic oligonucleotide
uaccauuuguccagauuag

SEQ ID NO: 1932420 - RNA, 19 nt, Artificial Sequence
  Description of Artificial Sequence: Synthetic oligonucleotide
acauauugugauugguaug

SEQ ID NO: 1932421 - RNA, 19 nt, Artificial Sequence
  Description of Artificial Sequence: Synthetic oligonucleotide
aagcguuaaauacucuuuu

SEQ ID NO: 1932422 - RNA, 19 nt, Artificial Sequence
  Description of Artificial Sequence: Synthetic oligonucleotide
gacaaagcguuaaauacuc

SEQ ID NO: 1932423 - RNA, 19 nt, Artificial Sequence
  Description of Artificial Sequence: Synthetic oligonucleotide
ucuuacuaguguucuaaaa

SEQ ID NO: 1932424 - RNA, 19 nt, Artificial Sequence
  Description of Artificial Sequence: Synthetic oligonucleotide
cauagggguuccauguagg

SEQ ID NO: 1932425 - RNA, 19 nt, Artificial Sequence
  Description of Artificial Sequence: Synthetic oligonucleotide
uuuauagaucugacaaaau

SEQ ID NO: 1932426 - RNA, 19 nt, Artificial Sequence
  Description of Artificial Sequence: Synthetic oligonucleotide
ucuaugguucuuguaaggu

SEQ ID NO: 1932427 - RNA, 19 nt, Artificial Sequence
  Description of Artificial Sequence: Synthetic oligonucleotide
aaccaucacaccaucuguc

SEQ ID NO: 1932428 - RNA, 19 nt, Artificial Sequence
  Description of Artificial Sequence: Synthetic oligonucleotide
agaucgcaagaguauuuuc

SEQ ID NO: 1932429 - RNA, 19 nt, Artificial Sequence
  Description of Artificial Sequence: Synthetic oligonucleotide
ucacuccucauguauacaa

SEQ ID NO: 1932430 - RNA, 19 nt, Artificial Sequence
  Description of Artificial Sequence: Synthetic oligonucleotide
uccagauuagaaacauuuc

SEQ ID NO: 1932431 - RNA, 19 nt, Artificial Sequence
  Description of Artificial Sequence: Synthetic oligonucleotide
uggccuagaacuuccaguc

SEQ ID NO: 1932432 - RNA, 19 nt, Artificial Sequence
  Description of Artificial Sequence: Synthetic oligonucleotide
gaaagucgagucaaacacc

SEQ ID NO: 1932433 - RNA, 19 nt, Artificial Sequence
  Description of Artificial Sequence: Synthetic oligonucleotide
cauugcccaccucugaggg

SEQ ID NO: 1932434 - RNA, 19 nt, Artificial Sequence
  Description of Artificial Sequence: Synthetic oligonucleotide
gcuguacugaaguuaaaag

SEQ ID NO: 1932435 - RNA, 19 nt, Artificial Sequence
  Description of Artificial Sequence: Synthetic oligonucleotide
caaugguucuuccaugaac

SEQ ID NO: 1932436 - RNA, 19 nt, Artificial Sequence
  Description of Artificial Sequence: Synthetic oligonucleotide
aauugaaacugaaaaucua

SEQ ID NO: 1932437 - RNA, 19 nt, Artificial Sequence
  Description of Artificial Sequence: Synthetic oligonucleotide
auccauugguguauaacac

SEQ ID NO: 1932438 - RNA, 19 nt, Artificial Sequence
  Description of Artificial Sequence: Synthetic oligonucleotide
uaauugucugucagguacu

SEQ ID NO: 1932439 - RNA, 19 nt, Artificial Sequence
  Description of Artificial Sequence: Synthetic oligonucleotide
guguauaacacagaucgca

SEQ ID NO: 1932440 - RNA, 19 nt, Artificial Sequence
  Description of Artificial Sequence: Synthetic oligonucleotide
aagaaauaccaggauguaa

SEQ ID NO: 1932441 - RNA, 19 nt, Artificial Sequence
  Description of Artificial Sequence: Synthetic oligonucleotide
aaccacaguuaauaucuau

SEQ ID NO: 1932442 - RNA, 19 nt, Artificial Sequence
  Description of Artificial Sequence: Synthetic oligonucleotide
cuugacaaagcguuaaaua

SEQ ID NO: 1932443 - RNA, 19 nt, Artificial Sequence
  Description of Artificial Sequence: Synthetic oligonucleotide
cuguaauccaggacacucc

SEQ ID NO: 1932444 - RNA, 19 nt, Artificial Sequence
  Description of Artificial Sequence: Synthetic oligonucleotide
uuuagaaagucgagucaaa

SEQ ID NO: 1932445 - RNA, 19 nt, Artificial Sequence
  Description of Artificial Sequence: Synthetic oligonucleotide
aaccuucugccauugccca

SEQ ID NO: 1932446 - RNA, 19 nt, Artificial Sequence
  Description of Artificial Sequence: Synthetic oligonucleotide
aaggaguuccaaguucaag

SEQ ID NO: 1932447 - RNA, 19 nt, Artificial Sequence
  Description of Artificial Sequence: Synthetic oligonucleotide
auaguggacugguuggugu

SEQ ID NO: 1932448 - RNA, 19 nt, Artificial Sequence
  Description of Artificial Sequence: Synthetic oligonucleotide
aaagcguuaaauacucuuu

SEQ ID NO: 1932449 - RNA, 19 nt, Artificial Sequence
  Description of Artificial Sequence: Synthetic oligonucleotide
ccaggauguaacuucauag

SEQ ID NO: 1932450 - RNA, 19 nt, Artificial Sequence
  Description of Artificial Sequence: Synthetic oligonucleotide
cuggauguuaucuuuucca

SEQ ID NO: 1932451 - RNA, 19 nt, Artificial Sequence
  Description of Artificial Sequence: Synthetic oligonucleotide
ugguuggugucuuucuuca

SEQ ID NO: 1932452 - RNA, 19 nt, Artificial Sequence
  Description of Artificial Sequence: Synthetic oligonucleotide
cuaugguucuuguaagguc

SEQ ID NO: 1932453 - RNA, 19 nt, Artificial Sequence
  Description of Artificial Sequence: Synthetic oligonucleotide
uugcuuuuauagaucugac

SEQ ID NO: 1932454 - RNA, 19 nt, Artificial Sequence
  Description of Artificial Sequence: Synthetic oligonucleotide
uuguuucaccauaucuuga

SEQ ID NO: 1932455 - RNA, 19 nt, Artificial Sequence
  Description of Artificial Sequence: Synthetic oligonucleotide
aaacaccauaauugucugu

SEQ ID NO: 1932456 - RNA, 19 nt, Artificial Sequence
  Description of Artificial Sequence: Synthetic oligonucleotide
uggauguuaucuuuuccau

SEQ ID NO: 1932457 - RNA, 19 nt, Artificial Sequence
  Description of Artificial Sequence: Synthetic oligonucleotide
agacaugugccaugauguc

SEQ ID NO: 1932458 - RNA, 19 nt, Artificial Sequence
  Description of Artificial Sequence: Synthetic oligonucleotide
gauuucuuacuuguuucac

SEQ ID NO: 1932459 - RNA, 19 nt, Artificial Sequence
  Description of Artificial Sequence: Synthetic oligonucleotide
agggcuugcaucauuagca

SEQ ID NO: 1932460 - RNA, 19 nt, Artificial Sequence
  Description of Artificial Sequence: Synthetic oligonucleotide
  modified_base (19)..(19): a, c, u, g, unknown or other
cauguagguaucaaauuan

SEQ ID NO: 1932461 - RNA, 19 nt, Artificial Sequence
  Description of Artificial Sequence: Synthetic oligonucleotide
ggcuuguuuauuaagcaag

SEQ ID NO: 1932462 - RNA, 19 nt, Artificial Sequence
  Description of Artificial Sequence: Synthetic oligonucleotide
ccaacuuugaauaccgaac

SEQ ID NO: 1932463 - RNA, 19 nt, Artificial Sequence
  Description of Artificial Sequence: Synthetic oligonucleotide
ugguaaauucacugucucu

SEQ ID NO: 1932464 - RNA, 19 nt, Artificial Sequence
  Description of Artificial Sequence: Synthetic oligonucleotide
aacauagcuggguuugcua

SEQ ID NO: 1932465 - RNA, 19 nt, Artificial Sequence
  Description of Artificial Sequence: Synthetic oligonucleotide
ucuugcuuuuauagaucug

SEQ ID NO: 1932466 - RNA, 19 nt, Artificial Sequence
  Description of Artificial Sequence: Synthetic oligonucleotide
cauuuguccagauuagaaa

SEQ ID NO: 1932467 - RNA, 19 nt, Artificial Sequence
  Description of Artificial Sequence: Synthetic oligonucleotide
cuaguguucuaaaagccaa

SEQ ID NO: 1932468 - RNA, 19 nt, Artificial Sequence
  Description of Artificial Sequence: Synthetic oligonucleotide
ugcuguacugaaguuaaaa

SEQ ID NO: 1932469 - RNA, 19 nt, Artificial Sequence
  Description of Artificial Sequence: Synthetic oligonucleotide
uaucuugaacaagcucugg

SEQ ID NO: 1932470 - RNA, 19 nt, Artificial Sequence
  Description of Artificial Sequence: Synthetic oligonucleotide
acuaguguucuaaaagcca

SEQ ID NO: 1932471 - RNA, 19 nt, Artificial Sequence
  Description of Artificial Sequence: Synthetic oligonucleotide
auucaccuugguuuguggu

SEQ ID NO: 1932472 - RNA, 19 nt, Artificial Sequence
  Description of Artificial Sequence: Synthetic oligonucleotide
acauagcuggguuugcuaa

SEQ ID NO: 1932473 - RNA, 19 nt, Artificial Sequence
  Description of Artificial Sequence: Synthetic oligonucleotide
uuuccugccuggauguuau

SEQ ID NO: 1932474 - RNA, 19 nt, Artificial Sequence
  Description of Artificial Sequence: Synthetic oligonucleotide
uaguguucuaaaagccaac

SEQ ID NO: 1932475 - RNA, 19 nt, Artificial Sequence
  Description of Artificial Sequence: Synthetic oligonucleotide
gucuuacuggccuagaacu

SEQ ID NO: 1932476 - RNA, 19 nt, Artificial Sequence
  Description of Artificial Sequence: Synthetic oligonucleotide
auaccgaaccauuggggca

SEQ ID NO: 1932477 - RNA, 19 nt, Artificial Sequence
  Description of Artificial Sequence: Synthetic oligonucleotide
aguuaauaucuauuccguu

SEQ ID NO: 1932478 - RNA, 19 nt, Artificial Sequence
  Description of Artificial Sequence: Synthetic oligonucleotide
caaagaucuaugguucuug

SEQ ID NO: 1932479 - RNA, 19 nt, Artificial Sequence
  Description of Artificial Sequence: Synthetic oligonucleotide
cuauccauugguguauaac

SEQ ID NO: 1932480 - RNA, 19 nt, Artificial Sequence
  Description of Artificial Sequence: Synthetic oligonucleotide
aaaaguccccuugcaacca

SEQ ID NO: 1932481 - RNA, 19 nt, Artificial Sequence
  Description of Artificial Sequence: Synthetic oligonucleotide
aaacauagcuggguuugcu

SEQ ID NO: 1932482 - RNA, 19 nt, Artificial Sequence
  Description of Artificial Sequence: Synthetic oligonucleotide
acuuugaauaccgaaccau

SEQ ID NO: 1932483 - RNA, 19 nt, Artificial Sequence
  Description of Artificial Sequence: Synthetic oligonucleotide
ucaccauaucuugaacaag

SEQ ID NO: 1932484 - RNA, 19 nt, Artificial Sequence
  Description of Artificial Sequence: Synthetic oligonucleotide
aacacauaaaggaguucca

SEQ ID NO: 1932485 - RNA, 19 nt, Artificial Sequence
  Description of Artificial Sequence: Synthetic oligonucleotide
uuuauuaagcaagcuccau

SEQ ID NO: 1932486 - RNA, 19 nt, Artificial Sequence
  Description of Artificial Sequence: Synthetic oligonucleotide
aagaucuaugguucuugua

SEQ ID NO: 1932487 - RNA, 19 nt, Artificial Sequence
  Description of Artificial Sequence: Synthetic oligonucleotide
cuauuccguuugcauaggg

SEQ ID NO: 1932488 - RNA, 19 nt, Artificial Sequence
  Description of Artificial Sequence: Synthetic oligonucleotide
uccauguagguaucaaauu

SEQ ID NO: 1932489 - RNA, 19 nt, Artificial Sequence
  Description of Artificial Sequence: Synthetic oligonucleotide
uugacauauugugauuggu

SEQ ID NO: 1932490 - RNA, 19 nt, Artificial Sequence
  Description of Artificial Sequence: Synthetic oligonucleotide
aaagaaauaccaggaugua

SEQ ID NO: 1932491 - RNA, 19 nt, Artificial Sequence
  Description of Artificial Sequence: Synthetic oligonucleotide
ucuauuccguuugcauagg

SEQ ID NO: 1932492 - RNA, 19 nt, Artificial Sequence
  Description of Artificial Sequence: Synthetic oligonucleotide
uucaccuugguuuguggua

SEQ ID NO: 1932493 - RNA, 19 nt, Artificial Sequence
  Description of Artificial Sequence: Synthetic oligonucleotide
aaucagcagcaacuaucca

SEQ ID NO: 1932494 - RNA, 19 nt, Artificial Sequence
  Description of Artificial Sequence: Synthetic oligonucleotide
gaacuguaauccaggacac

SEQ ID NO: 1932495 - RNA, 19 nt, Artificial Sequence
  Description of Artificial Sequence: Synthetic oligonucleotide
auaucuugaacaagcucug

SEQ ID NO: 1932496 - RNA, 19 nt, Artificial Sequence
  Description of Artificial Sequence: Synthetic oligonucleotide
acacacuuucuuuuauuau

SEQ ID NO: 1932497 - RNA, 19 nt, Artificial Sequence
  Description of Artificial Sequence: Synthetic oligonucleotide
ugaugucuggccccagcga

SEQ ID NO: 1932498 - RNA, 19 nt, Artificial Sequence
  Description of Artificial Sequence: Synthetic oligonucleotide
auagggguuccauguaggu

SEQ ID NO: 1932499 - RNA, 19 nt, Artificial Sequence
  Description of Artificial Sequence: Synthetic oligonucleotide
gcaaccaucacaccaucug

SEQ ID NO: 1932500 - RNA, 19 nt, Artificial Sequence
  Description of Artificial Sequence: Synthetic oligonucleotide
auaucaacccagucccaga

SEQ ID NO: 1932501 - RNA, 19 nt, Artificial Sequence
  Description of Artificial Sequence: Synthetic oligonucleotide
aguuucuuaugucuccguu

SEQ ID NO: 1932502 - RNA, 19 nt, Artificial Sequence
  Description of Artificial Sequence: Synthetic oligonucleotide
  modified_base (5)..(5): a, c, u, g, unknown or other
auuanacuacaaugauuua

SEQ ID NO: 1932503 - RNA, 19 nt, Artificial Sequence
  Description of Artificial Sequence: Synthetic oligonucleotide
aucgcaagaguauuuucuu

SEQ ID NO: 1932504 - RNA, 19 nt, Artificial Sequence
  Description of Artificial Sequence: Synthetic oligonucleotide
agggcaaccacaguuaaua

SEQ ID NO: 1932505 - RNA, 19 nt, Artificial Sequence
  Description of Artificial Sequence: Synthetic oligonucleotide
gugguaaauucacugucuc

SEQ ID NO: 1932506 - RNA, 19 nt, Artificial Sequence
  Description of Artificial Sequence: Synthetic oligonucleotide
uagacacacuuucuuuuau

SEQ ID NO: 1932507 - RNA, 19 nt, Artificial Sequence
  Description of Artificial Sequence: Synthetic oligonucleotide
ugggcaauucaccuugguu

SEQ ID NO: 1932508 - RNA, 19 nt, Artificial Sequence
  Description of Artificial Sequence: Synthetic oligonucleotide
ucaaugguucuuccaugaa

SEQ ID NO: 1932509 - RNA, 19 nt, Artificial Sequence
  Description of Artificial Sequence: Synthetic oligonucleotide
cauguauacaaaauaguuu

SEQ ID NO: 1932510 - RNA, 19 nt, Artificial Sequence
  Description of Artificial Sequence: Synthetic oligonucleotide
aucauggauccuuaucuua

SEQ ID NO: 1932511 - RNA, 19 nt, Artificial Sequence
  Description of Artificial Sequence: Synthetic oligonucleotide
ggcaauucaccuugguuug

SEQ ID NO: 1932512 - RNA, 19 nt, Artificial Sequence
  Description of Artificial Sequence: Synthetic oligonucleotide
ugagggcaaccacaguuaa

SEQ ID NO: 1932513 - RNA, 19 nt, Artificial Sequence
  Description of Artificial Sequence: Synthetic oligonucleotide
uccguuugcauagggcuug

SEQ ID NO: 1932514 - RNA, 19 nt, Artificial Sequence
  Description of Artificial Sequence: Synthetic oligonucleotide
uucuuacuaguguucuaaa

SEQ ID NO: 1932515 - RNA, 19 nt, Artificial Sequence
  Description of Artificial Sequence: Synthetic oligonucleotide
guaacuucauagggguucc

SEQ ID NO: 1932516 - RNA, 19 nt, Artificial Sequence
  Description of Artificial Sequence: Synthetic oligonucleotide
aaugggcaauucaccuugg

SEQ ID NO: 1932517 - RNA, 19 nt, Artificial Sequence
  Description of Artificial Sequence: Synthetic oligonucleotide
cuccguuagcaacuacagg

SEQ ID NO: 1932518 - RNA, 19 nt, Artificial Sequence
  Description of Artificial Sequence: Synthetic oligonucleotide
uuuucuuacuaguguucua

SEQ ID NO: 1932519 - RNA, 19 nt, Artificial Sequence
  Description of Artificial Sequence: Synthetic oligonucleotide
  modified_base (8)..(8): a, c, u, g, unknown or other
caaauuanacuacaaugau

SEQ ID NO: 1932520 - RNA, 19 nt, Artificial Sequence
  Description of Artificial Sequence: Synthetic oligonucleotide
ugugcuugacaaagcguua

SEQ ID NO: 1932521 - RNA, 19 nt, Artificial Sequence
  Description of Artificial Sequence: Synthetic oligonucleotide
gaaauaccaggauguaacu

SEQ ID NO: 1932522 - RNA, 19 nt, Artificial Sequence
  Description of Artificial Sequence: Synthetic oligonucleotide
gaucgcaagaguauuuucu

SEQ ID NO: 1932523 - RNA, 19 nt, Artificial Sequence
  Description of Artificial Sequence: Synthetic oligonucleotide
cucauguauacaaaauagu

SEQ ID NO: 1932524 - RNA, 19 nt, Artificial Sequence
  Description of Artificial Sequence: Synthetic oligonucleotide
caugaacuguaauccagga

SEQ ID NO: 1932525 - RNA, 19 nt, Artificial Sequence
  Description of Artificial Sequence: Synthetic oligonucleotide
agcaaacugaacaauccaa

SEQ ID NO: 1932526 - RNA, 19 nt, Artificial Sequence
  Description of Artificial Sequence: Synthetic oligonucleotide
uucuuaugucuccguuagc

SEQ ID NO: 1932527 - RNA, 19 nt, Artificial Sequence
  Description of Artificial Sequence: Synthetic oligonucleotide
guuucuuaugucuccguua

SEQ ID NO: 1932528 - RNA, 19 nt, Artificial Sequence
  Description of Artificial Sequence: Synthetic oligonucleotide
cuuguaaggucaucaugga

SEQ ID NO: 1932529 - RNA, 19 nt, Artificial Sequence
  Description of Artificial Sequence: Synthetic oligonucleotide
gugauugguauggagucac

SEQ ID NO: 1932530 - RNA, 19 nt, Artificial Sequence
  Description of Artificial Sequence: Synthetic oligonucleotide
acaccauaauugucuguca

SEQ ID NO: 1932531 - RNA, 19 nt, Artificial Sequence
  Description of Artificial Sequence: Synthetic oligonucleotide
agcucuggcuuguuuauua

SEQ ID NO: 1932532 - RNA, 19 nt, Artificial Sequence
  Description of Artificial Sequence: Synthetic oligonucleotide
uaccgaaccauuggggcac

SEQ ID NO: 1932533 - RNA, 19 nt, Artificial Sequence
  Description of Artificial Sequence: Synthetic oligonucleotide
uucagugggguuucuucau

SEQ ID NO: 1932534 - RNA, 19 nt, Artificial Sequence
  Description of Artificial Sequence: Synthetic oligonucleotide
agagcaauaucaacccagu

SEQ ID NO: 1932535 - RNA, 19 nt, Artificial Sequence
  Description of Artificial Sequence: Synthetic oligonucleotide
gcagcaaacugaacaaucc

SEQ ID NO: 1932536 - RNA, 19 nt, Artificial Sequence
  Description of Artificial Sequence: Synthetic oligonucleotide
aaaguccccuugcaaccau

SEQ ID NO: 1932537 - RNA, 19 nt, Artificial Sequence
  Description of Artificial Sequence: Synthetic oligonucleotide
uucuuccaugaacuguaau

SEQ ID NO: 1932538 - RNA, 19 nt, Artificial Sequence
  Description of Artificial Sequence: Synthetic oligonucleotide
agacacacuuucuuuuauu

SEQ ID NO: 1932539 - RNA, 19 nt, Artificial Sequence
  Description of Artificial Sequence: Synthetic oligonucleotide
ucgcaagaguauuuucuua

SEQ ID NO: 1932540 - RNA, 19 nt, Artificial Sequence
  Description of Artificial Sequence: Synthetic oligonucleotide
guuccauguagguaucaaa

SEQ ID NO: 1932541 - RNA, 19 nt, Artificial Sequence
  Description of Artificial Sequence: Synthetic oligonucleotide
cagauacauuucagugggg

SEQ ID NO: 1932542 - RNA, 19 nt, Artificial Sequence
  Description of Artificial Sequence: Synthetic oligonucleotide
agucccagauacauuucag

SEQ ID NO: 1932543 - RNA, 19 nt, Artificial Sequence
  Description of Artificial Sequence: Synthetic oligonucleotide
ugauugguauggagucacu

SEQ ID NO: 1932544 - RNA, 19 nt, Artificial Sequence
  Description of Artificial Sequence: Synthetic oligonucleotide
auggauccuuaucuuaauu

SEQ ID NO: 1932545 - RNA, 19 nt, Artificial Sequence
  Description of Artificial Sequence: Synthetic oligonucleotide
cagcaacuauccauuggug

SEQ ID NO: 1932546 - RNA, 19 nt, Artificial Sequence
  Description of Artificial Sequence: Synthetic oligonucleotide
gcuuguuuauuaagcaagc

SEQ ID NO: 1932547 - RNA, 19 nt, Artificial Sequence
  Description of Artificial Sequence: Synthetic oligonucleotide
aacuacagguauagacaca

SEQ ID NO: 1932548 - RNA, 19 nt, Artificial Sequence
  Description of Artificial Sequence: Synthetic oligonucleotide
accacaguuaauaucuauu

SEQ ID NO: 1932549 - RNA, 19 nt, Artificial Sequence
  Description of Artificial Sequence: Synthetic oligonucleotide
gcuggguuugcuaaaaguc

SEQ ID NO: 1932550 - RNA, 19 nt, Artificial Sequence
  Description of Artificial Sequence: Synthetic oligonucleotide
caguuaauaucuauuccgu

SEQ ID NO: 1932551 - RNA, 19 nt, Artificial Sequence
  Description of Artificial Sequence: Synthetic oligonucleotide
gcuugcaucauuagcagca

SEQ ID NO: 1932552 - RNA, 19 nt, Artificial Sequence
  Description of Artificial Sequence: Synthetic oligonucleotide
aauccaggacacuccuguu

SEQ ID NO: 1932553 - RNA, 19 nt, Artificial Sequence
  Description of Artificial Sequence: Synthetic oligonucleotide
uuccguuugcauagggcuu

SEQ ID NO: 1932554 - RNA, 19 nt, Artificial Sequence
  Description of Artificial Sequence: Synthetic oligonucleotide
auaccaggauguaacuuca

SEQ ID NO: 1932555 - RNA, 19 nt, Artificial Sequence
  Description of Artificial Sequence: Synthetic oligonucleotide
cacuugauuucuuacuugu

SEQ ID NO: 1932556 - RNA, 19 nt, Artificial Sequence
  Description of Artificial Sequence: Synthetic oligonucleotide
ucagugggguuucuucaua

SEQ ID NO: 1932557 - RNA, 19 nt, Artificial Sequence
  Description of Artificial Sequence: Synthetic oligonucleotide
uguccagauuagaaacauu

SEQ ID NO: 1932558 - RNA, 19 nt, Artificial Sequence
  Description of Artificial Sequence: Synthetic oligonucleotide
cauagggcuugcaucauua

SEQ ID NO: 1932559 - RNA, 19 nt, Artificial Sequence
  Description of Artificial Sequence: Synthetic oligonucleotide
cuuaugucuccguuagcaa

SEQ ID NO: 1932560 - RNA, 19 nt, Artificial Sequence
  Description of Artificial Sequence: Synthetic oligonucleotide
guugauggaaacacauaaa

SEQ ID NO: 1932561 - RNA, 19 nt, Artificial Sequence
  Description of Artificial Sequence: Synthetic oligonucleotide
ggcaaccacaguuaauauc

SEQ ID NO: 1932562 - RNA, 19 nt, Artificial Sequence
  Description of Artificial Sequence: Synthetic oligonucleotide
ugccauugcccaccucuga

SEQ ID NO: 1932563 - RNA, 19 nt, Artificial Sequence
  Description of Artificial Sequence: Synthetic oligonucleotide
  modified_base (18)..(18): a, c, u, g, unknown or other
auguagguaucaaauuana

SEQ ID NO: 1932564 - RNA, 19 nt, Artificial Sequence
  Description of Artificial Sequence: Synthetic oligonucleotide
caugugccaugaugucugg

SEQ ID NO: 1932565 - RNA, 19 nt, Artificial Sequence
  Description of Artificial Sequence: Synthetic oligonucleotide
cauuuucugcuucuuuuaa

SEQ ID NO: 1932566 - RNA, 19 nt, Artificial Sequence
  Description of Artificial Sequence: Synthetic oligonucleotide
caauucaccuugguuugug

SEQ ID NO: 1932567 - RNA, 19 nt, Artificial Sequence
  Description of Artificial Sequence: Synthetic oligonucleotide
uucuuacuuguuucaccau

SEQ ID NO: 1932568 - RNA, 19 nt, Artificial Sequence
  Description of Artificial Sequence: Synthetic oligonucleotide
cuuacuuguuucaccauau

SEQ ID NO: 1932569 - RNA, 19 nt, Artificial Sequence
  Description of Artificial Sequence: Synthetic oligonucleotide
caaacauagcuggguuugc

SEQ ID NO: 1932570 - RNA, 19 nt, Artificial Sequence
  Description of Artificial Sequence: Synthetic oligonucleotide
accauuuguccagauuaga

SEQ ID NO: 1932571 - RNA, 19 nt, Artificial Sequence
  Description of Artificial Sequence: Synthetic oligonucleotide
augugccaugaugucuggc

SEQ ID NO: 1932572 - RNA, 19 nt, Artificial Sequence
  Description of Artificial Sequence: Synthetic oligonucleotide
gucaaacaccauaauuguc

SEQ ID NO: 1932573 - RNA, 19 nt, Artificial Sequence
  Description of Artificial Sequence: Synthetic oligonucleotide
uaaaagcuacagguuuaaa

SEQ ID NO: 1932574 - RNA, 19 nt, Artificial Sequence
  Description of Artificial Sequence: Synthetic oligonucleotide
cauaguggacugguuggug

SEQ ID NO: 1932575 - RNA, 19 nt, Artificial Sequence
  Description of Artificial Sequence: Synthetic oligonucleotide
gguauggagucacuccuca

SEQ ID NO: 1932576 - RNA, 19 nt, Artificial Sequence
  Description of Artificial Sequence: Synthetic oligonucleotide
guauagacacacuuucuuu

SEQ ID NO: 1932577 - RNA, 19 nt, Artificial Sequence
  Description of Artificial Sequence: Synthetic oligonucleotide
aaguccccuugcaaccauc

SEQ ID NO: 1932578 - RNA, 19 nt, Artificial Sequence
  Description of Artificial Sequence: Synthetic oligonucleotide
caaagcguuaaauacucuu

SEQ ID NO: 1932579 - RNA, 19 nt, Artificial Sequence
  Description of Artificial Sequence: Synthetic oligonucleotide
gcaacuauccauuggugua

SEQ ID NO: 1932580 - RNA, 19 nt, Artificial Sequence
  Description of Artificial Sequence: Synthetic oligonucleotide
gggcuugcaucauuagcag

SEQ ID NO: 1932581 - RNA, 19 nt, Artificial Sequence
  Description of Artificial Sequence: Synthetic oligonucleotide
uaaagacaugugccaugau

SEQ ID NO: 1932582 - RNA, 19 nt, Artificial Sequence
  Description of Artificial Sequence: Synthetic oligonucleotide
cuugcaaccaucacaccau

SEQ ID NO: 1932583 - RNA, 19 nt, Artificial Sequence
  Description of Artificial Sequence: Synthetic oligonucleotide
aaaggaguuccaaguucaa

SEQ ID NO: 1932584 - RNA, 19 nt, Artificial Sequence
  Description of Artificial Sequence: Synthetic oligonucleotide
acacagaucgcaagaguau

SEQ ID NO: 1932585 - RNA, 19 nt, Artificial Sequence
  Description of Artificial Sequence: Synthetic oligonucleotide
acuauccauugguguauaa

SEQ ID NO: 1932586 - RNA, 19 nt, Artificial Sequence
  Description of Artificial Sequence: Synthetic oligonucleotide
cuuugaauaccgaaccauu

SEQ ID NO: 1932587 - RNA, 19 nt, Artificial Sequence
  Description of Artificial Sequence: Synthetic oligonucleotide
ccuugcaaccaucacacca

SEQ ID NO: 1932588 - RNA, 19 nt, Artificial Sequence
  Description of Artificial Sequence: Synthetic oligonucleotide
gggcaauucaccuugguuu

SEQ ID NO: 1932589 - RNA, 19 nt, Artificial Sequence
  Description of Artificial Sequence: Synthetic oligonucleotide
gccaacuuugaauaccgaa

SEQ ID NO: 1932590 - RNA, 19 nt, Artificial Sequence
  Description of Artificial Sequence: Synthetic oligonucleotide
aacuauccauugguguaua

SEQ ID NO: 1932591 - RNA, 19 nt, Artificial Sequence
  Description of Artificial Sequence: Synthetic oligonucleotide
cuacaaugauuuagaaagu

SEQ ID NO: 1932592 - RNA, 19 nt, Artificial Sequence
  Description of Artificial Sequence: Synthetic oligonucleotide
cugccauugcccaccucug

SEQ ID NO: 1932593 - RNA, 19 nt, Artificial Sequence
  Description of Artificial Sequence: Synthetic oligonucleotide
gguauagacacacuuucuu

SEQ ID NO: 1932594 - RNA, 19 nt, Artificial Sequence
  Description of Artificial Sequence: Synthetic oligonucleotide
ccauaucuugaacaagcuc

SEQ ID NO: 1932595 - RNA, 19 nt, Artificial Sequence
  Description of Artificial Sequence: Synthetic oligonucleotide
uagggguuccauguaggua

SEQ ID NO: 1932596 - RNA, 19 nt, Artificial Sequence
  Description of Artificial Sequence: Synthetic oligonucleotide
cauaauugucugucaggua

SEQ ID NO: 1932597 - RNA, 19 nt, Artificial Sequence
  Description of Artificial Sequence: Synthetic oligonucleotide
guaauccaggacacuccug

SEQ ID NO: 1932598 - RNA, 19 nt, Artificial Sequence
  Description of Artificial Sequence: Synthetic oligonucleotide
ggcuugcaucauuagcagc

SEQ ID NO: 1932599 - RNA, 19 nt, Artificial Sequence
  Description of Artificial Sequence: Synthetic oligonucleotide
cuggccuagaacuuccagu

SEQ ID NO: 1932600 - RNA, 19 nt, Artificial Sequence
  Description of Artificial Sequence: Synthetic oligonucleotide
ccacuugauuucuuacuug

SEQ ID NO: 1932601 - RNA, 19 nt, Artificial Sequence
  Description of Artificial Sequence: Synthetic oligonucleotide
gguguauaacacagaucgc

SEQ ID NO: 1932602 - RNA, 19 nt, Artificial Sequence
  Description of Artificial Sequence: Synthetic oligonucleotide
cauagcuggguuugcuaaa

SEQ ID NO: 1932603 - RNA, 19 nt, Artificial Sequence
  Description of Artificial Sequence: Synthetic oligonucleotide
ccauuuguccagauuagaa

SEQ ID NO: 1932604 - RNA, 19 nt, Artificial Sequence
  Description of Artificial Sequence: Synthetic oligonucleotide
acaaagcguuaaauacucu

SEQ ID NO: 1932605 - RNA, 19 nt, Artificial Sequence
  Description of Artificial Sequence: Synthetic oligonucleotide
ccaucacaccaucuguccc

SEQ ID NO: 1932606 - RNA, 19 nt, Artificial Sequence
  Description of Artificial Sequence: Synthetic oligonucleotide
cuugaacaagcucuggcuu

SEQ ID NO: 1932607 - RNA, 19 nt, Artificial Sequence
  Description of Artificial Sequence: Synthetic oligonucleotide
acagaucgcaagaguauuu

SEQ ID NO: 1932608 - RNA, 19 nt, Artificial Sequence
  Description of Artificial Sequence: Synthetic oligonucleotide
caaccaucacaccaucugu

SEQ ID NO: 1932609 - RNA, 19 nt, Artificial Sequence
  Description of Artificial Sequence: Synthetic oligonucleotide
gagucacuccucauguaua

SEQ ID NO: 1932610 - RNA, 19 nt, Artificial Sequence
  Description of Artificial Sequence: Synthetic oligonucleotide
uagcaacuacagguauaga

SEQ ID NO: 1932611 - RNA, 19 nt, Artificial Sequence
  Description of Artificial Sequence: Synthetic oligonucleotide
gcuccauaaccuucugcca

SEQ ID NO: 1932612 - RNA, 19 nt, Artificial Sequence
  Description of Artificial Sequence: Synthetic oligonucleotide
aagucgagucaaacaccau

SEQ ID NO: 1932613 - RNA, 19 nt, Artificial Sequence
  Description of Artificial Sequence: Synthetic oligonucleotide
gcaagaguauuuucuuacu

SEQ ID NO: 1932614 - RNA, 19 nt, Artificial Sequence
  Description of Artificial Sequence: Synthetic oligonucleotide
cuaggauuuuccacuugau

SEQ ID NO: 1932615 - RNA, 19 nt, Artificial Sequence
  Description of Artificial Sequence: Synthetic oligonucleotide
cuugcaucauuagcagcaa

SEQ ID NO: 1932616 - RNA, 19 nt, Artificial Sequence
  Description of Artificial Sequence: Synthetic oligonucleotide
gucacuccucauguauaca

SEQ ID NO: 1932617 - RNA, 19 nt, Artificial Sequence
  Description of Artificial Sequence: Synthetic oligonucleotide
gacugcugaugugcuugac

SEQ ID NO: 1932618 - RNA, 19 nt, Artificial Sequence
  Description of Artificial Sequence: Synthetic oligonucleotide
caacccagucccagauaca

SEQ ID NO: 1932619 - RNA, 19 nt, Artificial Sequence
  Description of Artificial Sequence: Synthetic oligonucleotide
accuugguuugugguaaau

SEQ ID NO: 1932620 - RNA, 19 nt, Artificial Sequence
  Description of Artificial Sequence: Synthetic oligonucleotide
cauggauccuuaucuuaau

SEQ ID NO: 1932621 - RNA, 19 nt, Artificial Sequence
  Description of Artificial Sequence: Synthetic oligonucleotide
agccaacuuugaauaccga

SEQ ID NO: 1932622 - RNA, 19 nt, Artificial Sequence
  Description of Artificial Sequence: Synthetic oligonucleotide
caacuauccauugguguau

SEQ ID NO: 1932623 - RNA, 19 nt, Artificial Sequence
  Description of Artificial Sequence: Synthetic oligonucleotide
gcgacugcugcuguacuga

SEQ ID NO: 1932624 - RNA, 19 nt, Artificial Sequence
  Description of Artificial Sequence: Synthetic oligonucleotide
uucugccauugcccaccuc

SEQ ID NO: 1932625 - RNA, 19 nt, Artificial Sequence
  Description of Artificial Sequence: Synthetic oligonucleotide
cagugggguuucuucauau

SEQ ID NO: 1932626 - RNA, 19 nt, Artificial Sequence
  Description of Artificial Sequence: Synthetic oligonucleotide
ggacugcugaugugcuuga

SEQ ID NO: 1932627 - RNA, 19 nt, Artificial Sequence
  Description of Artificial Sequence: Synthetic oligonucleotide
cagcaaacauagcuggguu

SEQ ID NO: 1932628 - RNA, 19 nt, Artificial Sequence
  Description of Artificial Sequence: Synthetic oligonucleotide
guauggagucacuccucau

SEQ ID NO: 1932629 - RNA, 19 nt, Artificial Sequence
  Description of Artificial Sequence: Synthetic oligonucleotide
gccuagaacuuccagucuu

SEQ ID NO: 1932630 - RNA, 19 nt, Artificial Sequence
  Description of Artificial Sequence: Synthetic oligonucleotide
cacagaucgcaagaguauu

SEQ ID NO: 1932631 - RNA, 19 nt, Artificial Sequence
  Description of Artificial Sequence: Synthetic oligonucleotide
cagacaucugccacacauu

SEQ ID NO: 1932632 - RNA, 19 nt, Artificial Sequence
  Description of Artificial Sequence: Synthetic oligonucleotide
ccguuagcaacuacaggua

SEQ ID NO: 1932633 - RNA, 19 nt, Artificial Sequence
  Description of Artificial Sequence: Synthetic oligonucleotide
cugcuguacugaaguuaaa

SEQ ID NO: 1932634 - RNA, 19 nt, Artificial Sequence
  Description of Artificial Sequence: Synthetic oligonucleotide
cagaucgcaagaguauuuu

SEQ ID NO: 1932635 - RNA, 19 nt, Artificial Sequence
  Description of Artificial Sequence: Synthetic oligonucleotide
ugcccaccucugagggcaa

SEQ ID NO: 1932636 - RNA, 19 nt, Artificial Sequence
  Description of Artificial Sequence: Synthetic oligonucleotide
caccuugguuugugguaaa

SEQ ID NO: 1932637 - RNA, 19 nt, Artificial Sequence
  Description of Artificial Sequence: Synthetic oligonucleotide
accgaaccauuggggcaca

SEQ ID NO: 1932638 - RNA, 19 nt, Artificial Sequence
  Description of Artificial Sequence: Synthetic oligonucleotide
gccccagcgacugcugcug

SEQ ID NO: 1932639 - RNA, 19 nt, Artificial Sequence
  Description of Artificial Sequence: Synthetic oligonucleotide
gagggcaaccacaguuaau

SEQ ID NO: 1932640 - RNA, 19 nt, Artificial Sequence
  Description of Artificial Sequence: Synthetic oligonucleotide
cuagaacuuccagucuuuu

SEQ ID NO: 1932641 - RNA, 19 nt, Artificial Sequence
  Description of Artificial Sequence: Synthetic oligonucleotide
ggccucauaguggacuggu

SEQ ID NO: 1932642 - RNA, 19 nt, Artificial Sequence
  Description of Artificial Sequence: Synthetic oligonucleotide
ggguuccauguagguauca

SEQ ID NO: 1932643 - RNA, 19 nt, Artificial Sequence
  Description of Artificial Sequence: Synthetic oligonucleotide
ggucaucauggauccuuau

SEQ ID NO: 1932644 - RNA, 19 nt, Artificial Sequence
  Description of Artificial Sequence: Synthetic oligonucleotide
ccacacauuuucugcuucu

SEQ ID NO: 1932645 - RNA, 19 nt, Artificial Sequence
  Description of Artificial Sequence: Synthetic oligonucleotide
ccuagaacuuccagucuuu

SEQ ID NO: 1932646 - RNA, 19 nt, Artificial Sequence
  Description of Artificial Sequence: Synthetic oligonucleotide
ccaaugggcaauucaccuu

SEQ ID NO: 1932647 - RNA, 19 nt, Artificial Sequence
  Description of Artificial Sequence: Synthetic oligonucleotide
gcaauucaccuugguuugu

SEQ ID NO: 1932648 - RNA, 19 nt, Artificial Sequence
  Description of Artificial Sequence: Synthetic oligonucleotide
ccgaaccauuggggcacag

SEQ ID NO: 1932649 - RNA, 19 nt, Artificial Sequence
  Description of Artificial Sequence: Synthetic oligonucleotide
cgacugcugcuguacugaa

SEQ ID NO: 1932650 - RNA, 19 nt, Artificial Sequence
  Description of Artificial Sequence: Synthetic oligonucleotide
gccucauaguggacugguu

SEQ ID NO: 1932651 - RNA, 19 nt, Artificial Sequence
  Description of Artificial Sequence: Synthetic oligonucleotide
aaacuaaaaguguagaacc

SEQ ID NO: 1932652 - RNA, 19 nt, Artificial Sequence
  Description of Artificial Sequence: Synthetic oligonucleotide
uaauuaaaaccucacaugg

SEQ ID NO: 1932653 - RNA, 19 nt, Artificial Sequence
  Description of Artificial Sequence: Synthetic oligonucleotide
aauaaugacgauaaaguac

SEQ ID NO: 1932654 - RNA, 19 nt, Artificial Sequence
  Description of Artificial Sequence: Synthetic oligonucleotide
auagagagcaauuuugugc

SEQ ID NO: 1932655 - RNA, 19 nt, Artificial Sequence
  Description of Artificial Sequence: Synthetic oligonucleotide
uacuucauaaaauauagag

SEQ ID NO: 1932656 - RNA, 19 nt, Artificial Sequence
  Description of Artificial Sequence: Synthetic oligonucleotide
uuaauauuauuauuugggg

SEQ ID NO: 1932657 - RNA, 19 nt, Artificial Sequence
  Description of Artificial Sequence: Synthetic oligonucleotide
uaaauacacaguccgaugg

SEQ ID NO: 1932658 - RNA, 19 nt, Artificial Sequence
  Description of Artificial Sequence: Synthetic oligonucleotide
auaccauugacucaugugg

SEQ ID NO: 1932659 - RNA, 19 nt, Artificial Sequence
  Description of Artificial Sequence: Synthetic oligonucleotide
aguguugugauccuagggc

SEQ ID NO: 1932660 - RNA, 19 nt, Artificial Sequence
  Description of Artificial Sequence: Synthetic oligonucleotide
cauuaaugcacuuauauuc

SEQ ID NO: 1932661 - RNA, 19 nt, Artificial Sequence
  Description of Artificial Sequence: Synthetic oligonucleotide
auuaaaaccucacauggag

SEQ ID NO: 1932662 - RNA, 19 nt, Artificial Sequence
  Description of Artificial Sequence: Synthetic oligonucleotide
uuguaagcuaacauuauag

SEQ ID NO: 1932663 - RNA, 19 nt, Artificial Sequence
  Description of Artificial Sequence: Synthetic oligonucleotide
aaauggggaaaacuaaaag

SEQ ID NO: 1932664 - RNA, 19 nt, Artificial Sequence
  Description of Artificial Sequence: Synthetic oligonucleotide
aaauaauuaaaaccucaca

SEQ ID NO: 1932665 - RNA, 19 nt, Artificial Sequence
  Description of Artificial Sequence: Synthetic oligonucleotide
ucucccuuaaaacauauac

SEQ ID NO: 1932666 - RNA, 19 nt, Artificial Sequence
  Description of Artificial Sequence: Synthetic oligonucleotide
uaaaaccucacauggagag

SEQ ID NO: 1932667 - RNA, 19 nt, Artificial Sequence
  Description of Artificial Sequence: Synthetic oligonucleotide
ucccuuaaaacauauaccu

SEQ ID NO: 1932668 - RNA, 19 nt, Artificial Sequence
  Description of Artificial Sequence: Synthetic oligonucleotide
auuauuuggggagacagac

SEQ ID NO: 1932669 - RNA, 19 nt, Artificial Sequence
  Description of Artificial Sequence: Synthetic oligonucleotide
auuaaugcacuuauauucc

SEQ ID NO: 1932670 - RNA, 19 nt, Artificial Sequence
  Description of Artificial Sequence: Synthetic oligonucleotide
aaucugacugcccagcgag

SEQ ID NO: 1932671 - RNA, 19 nt, Artificial Sequence
  Description of Artificial Sequence: Synthetic oligonucleotide
aaugcacuuauauucccag

SEQ ID NO: 1932672 - RNA, 19 nt, Artificial Sequence
  Description of Artificial Sequence: Synthetic oligonucleotide
uuuugcauaccauugacuc

SEQ ID NO: 1932673 - RNA, 19 nt, Artificial Sequence
  Description of Artificial Sequence: Synthetic oligonucleotide
cuuuuaagacguuuggcgg

SEQ ID NO: 1932674 - RNA, 19 nt, Artificial Sequence
  Description of Artificial Sequence: Synthetic oligonucleotide
uuuuaagacguuuggcggg

SEQ ID NO: 1932675 - RNA, 19 nt, Artificial Sequence
  Description of Artificial Sequence: Synthetic oligonucleotide
aguacaaaaucaaccaacc

SEQ ID NO: 1932676 - RNA, 19 nt, Artificial Sequence
  Description of Artificial Sequence: Synthetic oligonucleotide
aacuaaaaguguagaaccc

SEQ ID NO: 1932677 - RNA, 19 nt, Artificial Sequence
  Description of Artificial Sequence: Synthetic oligonucleotide
aaacaagagggguggaagg

SEQ ID NO: 1932678 - RNA, 19 nt, Artificial Sequence
  Description of Artificial Sequence: Synthetic oligonucleotide
aaauacacaguccgauggg

SEQ ID NO: 1932679 - RNA, 19 nt, Artificial Sequence
  Description of Artificial Sequence: Synthetic oligonucleotide
augacgauaaaguacuuca

SEQ ID NO: 1932680 - RNA, 19 nt, Artificial Sequence
  Description of Artificial Sequence: Synthetic oligonucleotide
acuaaaaguguagaacccc

SEQ ID NO: 1932681 - RNA, 19 nt, Artificial Sequence
  Description of Artificial Sequence: Synthetic oligonucleotide
aauaaauacacaguccgau

SEQ ID NO: 1932682 - RNA, 19 nt, Artificial Sequence
  Description of Artificial Sequence: Synthetic oligonucleotide
uuuaauccuagccaccgca

SEQ ID NO: 1932683 - RNA, 19 nt, Artificial Sequence
  Description of Artificial Sequence: Synthetic oligonucleotide
auuuugugccagcaggggc

SEQ ID NO: 1932684 - RNA, 19 nt, Artificial Sequence
  Description of Artificial Sequence: Synthetic oligonucleotide
aaugacgauaaaguacuuc

SEQ ID NO: 1932685 - RNA, 19 nt, Artificial Sequence
  Description of Artificial Sequence: Synthetic oligonucleotide
aagagacugcccaaaaugg

SEQ ID NO: 1932686 - RNA, 19 nt, Artificial Sequence
  Description of Artificial Sequence: Synthetic oligonucleotide
guugucuuuaauccuagcc

SEQ ID NO: 1932687 - RNA, 19 nt, Artificial Sequence
  Description of Artificial Sequence: Synthetic oligonucleotide
auaaugacgauaaaguacu

SEQ ID NO: 1932688 - RNA, 19 nt, Artificial Sequence
  Description of Artificial Sequence: Synthetic oligonucleotide
cauauggcgaguaguaggg

SEQ ID NO: 1932689 - RNA, 19 nt, Artificial Sequence
  Description of Artificial Sequence: Synthetic oligonucleotide
uugagagucaugcaagaga

SEQ ID NO: 1932690 - RNA, 19 nt, Artificial Sequence
  Description of Artificial Sequence: Synthetic oligonucleotide
gcuuuuaagacguuuggcg

SEQ ID NO: 1932691 - RNA, 19 nt, Artificial Sequence
  Description of Artificial Sequence: Synthetic oligonucleotide
gaucaugucguuaucuggg

SEQ ID NO: 1932692 - RNA, 19 nt, Artificial Sequence
  Description of Artificial Sequence: Synthetic oligonucleotide
ugcacuuauauucccagcu

SEQ ID NO: 1932693 - RNA, 19 nt, Artificial Sequence
  Description of Artificial Sequence: Synthetic oligonucleotide
aguuuuaacaguugagagu

SEQ ID NO: 1932694 - RNA, 19 nt, Artificial Sequence
  Description of Artificial Sequence: Synthetic oligonucleotide
uucauaaaauauagagagc

SEQ ID NO: 1932695 - RNA, 19 nt, Artificial Sequence
  Description of Artificial Sequence: Synthetic oligonucleotide
accaguacaaaaucaacca

SEQ ID NO: 1932696 - RNA, 19 nt, Artificial Sequence
  Description of Artificial Sequence: Synthetic oligonucleotide
caugucguuaucugggugg

SEQ ID NO: 1932697 - RNA, 19 nt, Artificial Sequence
  Description of Artificial Sequence: Synthetic oligonucleotide
acuagucugcuuuggaggg

SEQ ID NO: 1932698 - RNA, 19 nt, Artificial Sequence
  Description of Artificial Sequence: Synthetic oligonucleotide
uguaagcuaacauuauagu

SEQ ID NO: 1932699 - RNA, 19 nt, Artificial Sequence
  Description of Artificial Sequence: Synthetic oligonucleotide
auauucccagcuuguaagc

SEQ ID NO: 1932700 - RNA, 19 nt, Artificial Sequence
  Description of Artificial Sequence: Synthetic oligonucleotide
ugucuuuaauccuagccac

SEQ ID NO: 1932701 - RNA, 19 nt, Artificial Sequence
  Description of Artificial Sequence: Synthetic oligonucleotide
uuggagggauccaucaagg

SEQ ID NO: 1932702 - RNA, 19 nt, Artificial Sequence
  Description of Artificial Sequence: Synthetic oligonucleotide
agucaugcaagagacugcc

SEQ ID NO: 1932703 - RNA, 19 nt, Artificial Sequence
  Description of Artificial Sequence: Synthetic oligonucleotide
cuaacauuauaguaaauaa

SEQ ID NO: 1932704 - RNA, 19 nt, Artificial Sequence
  Description of Artificial Sequence: Synthetic oligonucleotide
uaccauugacucauguggg

SEQ ID NO: 1932705 - RNA, 19 nt, Artificial Sequence
  Description of Artificial Sequence: Synthetic oligonucleotide
uccuuaaaagcaaaccagu

SEQ ID NO: 1932706 - RNA, 19 nt, Artificial Sequence
  Description of Artificial Sequence: Synthetic oligonucleotide
ugacuuugggacuagucug

SEQ ID NO: 1932707 - RNA, 19 nt, Artificial Sequence
  Description of Artificial Sequence: Synthetic oligonucleotide
uggagagaaacaagagggg

SEQ ID NO: 1932708 - RNA, 19 nt, Artificial Sequence
  Description of Artificial Sequence: Synthetic oligonucleotide
caagagacugcccaaaaug

SEQ ID NO: 1932709 - RNA, 19 nt, Artificial Sequence
  Description of Artificial Sequence: Synthetic oligonucleotide
uguagaaccccaacucucc

SEQ ID NO: 1932710 - RNA, 19 nt, Artificial Sequence
  Description of Artificial Sequence: Synthetic oligonucleotide
acgauaaaguacuucauaa

SEQ ID NO: 1932711 - RNA, 19 nt, Artificial Sequence
  Description of Artificial Sequence: Synthetic oligonucleotide
caguacaaaaucaaccaac

SEQ ID NO: 1932712 - RNA, 19 nt, Artificial Sequence
  Description of Artificial Sequence: Synthetic oligonucleotide
uuaaaaccucacauggaga

SEQ ID NO: 1932713 - RNA, 19 nt, Artificial Sequence
  Description of Artificial Sequence: Synthetic oligonucleotide
cacagucccaacuagggag

SEQ ID NO: 1932714 - RNA, 19 nt, Artificial Sequence
  Description of Artificial Sequence: Synthetic oligonucleotide
uaagcaguaguggagguug

SEQ ID NO: 1932715 - RNA, 19 nt, Artificial Sequence
  Description of Artificial Sequence: Synthetic oligonucleotide
agagucaugcaagagacug

SEQ ID NO: 1932716 - RNA, 19 nt, Artificial Sequence
  Description of Artificial Sequence: Synthetic oligonucleotide
uuauauucccagcuuguaa

SEQ ID NO: 1932717 - RNA, 19 nt, Artificial Sequence
  Description of Artificial Sequence: Synthetic oligonucleotide
uuaaugcacuuauauuccc

SEQ ID NO: 1932718 - RNA, 19 nt, Artificial Sequence
  Description of Artificial Sequence: Synthetic oligonucleotide
ugggugguuaauauuauua

SEQ ID NO: 1932719 - RNA, 19 nt, Artificial Sequence
  Description of Artificial Sequence: Synthetic oligonucleotide
accauugacucaugugggc

SEQ ID NO: 1932720 - RNA, 19 nt, Artificial Sequence
  Description of Artificial Sequence: Synthetic oligonucleotide
uuaauccuagccaccgcag

SEQ ID NO: 1932721 - RNA, 19 nt, Artificial Sequence
  Description of Artificial Sequence: Synthetic oligonucleotide
ggucugaugacuuugggac

SEQ ID NO: 1932722 - RNA, 19 nt, Artificial Sequence
  Description of Artificial Sequence: Synthetic oligonucleotide
uacuaauguugucuggucu

SEQ ID NO: 1932723 - RNA, 19 nt, Artificial Sequence
  Description of Artificial Sequence: Synthetic oligonucleotide
gaguguugugauccuaggg

SEQ ID NO: 1932724 - RNA, 19 nt, Artificial Sequence
  Description of Artificial Sequence: Synthetic oligonucleotide
uggggaaaacuaaaagugu

SEQ ID NO: 1932725 - RNA, 19 nt, Artificial Sequence
  Description of Artificial Sequence: Synthetic oligonucleotide
ucacauggagagaaacaag

SEQ ID NO: 1932726 - RNA, 19 nt, Artificial Sequence
  Description of Artificial Sequence: Synthetic oligonucleotide
uaaugcacuuauauuccca

SEQ ID NO: 1932727 - RNA, 19 nt, Artificial Sequence
  Description of Artificial Sequence: Synthetic oligonucleotide
uauccgagcgccgaggcgg

SEQ ID NO: 1932728 - RNA, 19 nt, Artificial Sequence
  Description of Artificial Sequence: Synthetic oligonucleotide
ugggacaugagaggaaggg

SEQ ID NO: 1932729 - RNA, 19 nt, Artificial Sequence
  Description of Artificial Sequence: Synthetic oligonucleotide
uauuauuuggggagacaga

SEQ ID NO: 1932730 - RNA, 19 nt, Artificial Sequence
  Description of Artificial Sequence: Synthetic oligonucleotide
cucaugugggccauuaaug

SEQ ID NO: 1932731 - RNA, 19 nt, Artificial Sequence
  Description of Artificial Sequence: Synthetic oligonucleotide
acuucauaaaauauagaga

SEQ ID NO: 1932732 - RNA, 19 nt, Artificial Sequence
  Description of Artificial Sequence: Synthetic oligonucleotide
aauccuagccaccgcagga

SEQ ID NO: 1932733 - RNA, 19 nt, Artificial Sequence
  Description of Artificial Sequence: Synthetic oligonucleotide
cauaccauugacucaugug

SEQ ID NO: 1932734 - RNA, 19 nt, Artificial Sequence
  Description of Artificial Sequence: Synthetic oligonucleotide
uuugcauaccauugacuca

SEQ ID NO: 1932735 - RNA, 19 nt, Artificial Sequence
  Description of Artificial Sequence: Synthetic oligonucleotide
aauuaaaaccucacaugga

SEQ ID NO: 1932736 - RNA, 19 nt, Artificial Sequence
  Description of Artificial Sequence: Synthetic oligonucleotide
aguguagaaccccaacucu

SEQ ID NO: 1932737 - RNA, 19 nt, Artificial Sequence
  Description of Artificial Sequence: Synthetic oligonucleotide
agcaggggcuuuuaagacg

SEQ ID NO: 1932738 - RNA, 19 nt, Artificial Sequence
  Description of Artificial Sequence: Synthetic oligonucleotide
uccaucaaggguccccggg

SEQ ID NO: 1932739 - RNA, 19 nt, Artificial Sequence
  Description of Artificial Sequence: Synthetic oligonucleotide
aaggcagaauggaugacag

SEQ ID NO: 1932740 - RNA, 19 nt, Artificial Sequence
  Description of Artificial Sequence: Synthetic oligonucleotide
aaaccucacauggagagaa

SEQ ID NO: 1932741 - RNA, 19 nt, Artificial Sequence
  Description of Artificial Sequence: Synthetic oligonucleotide
aaauaaauacacaguccga

SEQ ID NO: 1932742 - RNA, 19 nt, Artificial Sequence
  Description of Artificial Sequence: Synthetic oligonucleotide
uacacaguccgauggggag

SEQ ID NO: 1932743 - RNA, 19 nt, Artificial Sequence
  Description of Artificial Sequence: Synthetic oligonucleotide
uuaucugggugguuaauau

SEQ ID NO: 1932744 - RNA, 19 nt, Artificial Sequence
  Description of Artificial Sequence: Synthetic oligonucleotide
guaagcuaacauuauagua

SEQ ID NO: 1932745 - RNA, 19 nt, Artificial Sequence
  Description of Artificial Sequence: Synthetic oligonucleotide
aacaguugagagucaugca

SEQ ID NO: 1932746 - RNA, 19 nt, Artificial Sequence
  Description of Artificial Sequence: Synthetic oligonucleotide
gaaggagggaagguguggg

SEQ ID NO: 1932747 - RNA, 19 nt, Artificial Sequence
  Description of Artificial Sequence: Synthetic oligonucleotide
uguagguuacugguauccg

SEQ ID NO: 1932748 - RNA, 19 nt, Artificial Sequence
  Description of Artificial Sequence: Synthetic oligonucleotide
gagggauccaucaaggguc

SEQ ID NO: 1932749 - RNA, 19 nt, Artificial Sequence
  Description of Artificial Sequence: Synthetic oligonucleotide
aaugcaguuuuaacaguug

SEQ ID NO: 1932750 - RNA, 19 nt, Artificial Sequence
  Description of Artificial Sequence: Synthetic oligonucleotide
gauccuagggcucccugag

SEQ ID NO: 1932751 - RNA, 19 nt, Artificial Sequence
  Description of Artificial Sequence: Synthetic oligonucleotide
cacuuauauucccagcuug

SEQ ID NO: 1932752 - RNA, 19 nt, Artificial Sequence
  Description of Artificial Sequence: Synthetic oligonucleotide
agguuacugguauccgagc

SEQ ID NO: 1932753 - RNA, 19 nt, Artificial Sequence
  Description of Artificial Sequence: Synthetic oligonucleotide
ggcagaauggaugacaggc

SEQ ID NO: 1932754 - RNA, 19 nt, Artificial Sequence
  Description of Artificial Sequence: Synthetic oligonucleotide
gguuacugguauccgagcg

SEQ ID NO: 1932755 - RNA, 19 nt, Artificial Sequence
  Description of Artificial Sequence: Synthetic oligonucleotide
gcauauggcgaguaguagg

SEQ ID NO: 1932756 - RNA, 19 nt, Artificial Sequence
  Description of Artificial Sequence: Synthetic oligonucleotide
uuacugguauccgagcgcc

SEQ ID NO: 1932757 - RNA, 19 nt, Artificial Sequence
  Description of Artificial Sequence: Synthetic oligonucleotide
aagacguuuggcgggaugu

SEQ ID NO: 1932758 - RNA, 19 nt, Artificial Sequence
  Description of Artificial Sequence: Synthetic oligonucleotide
uggucugaugacuuuggga

SEQ ID NO: 1932759 - RNA, 19 nt, Artificial Sequence
  Description of Artificial Sequence: Synthetic oligonucleotide
uaaaaguguagaaccccaa

SEQ ID NO: 1932760 - RNA, 19 nt, Artificial Sequence
  Description of Artificial Sequence: Synthetic oligonucleotide
auggcgaguaguagggucc

SEQ ID NO: 1932761 - RNA, 19 nt, Artificial Sequence
  Description of Artificial Sequence: Synthetic oligonucleotide
ccauacagcgcauauggcg

SEQ ID NO: 1932762 - RNA, 19 nt, Artificial Sequence
  Description of Artificial Sequence: Synthetic oligonucleotide
uagggguaagcaguagugg

SEQ ID NO: 1932763 - RNA, 19 nt, Artificial Sequence
  Description of Artificial Sequence: Synthetic oligonucleotide
cugcguaagaccgggaagg

SEQ ID NO: 1932764 - RNA, 19 nt, Artificial Sequence
  Description of Artificial Sequence: Synthetic oligonucleotide
gauccaucaaggguccccg

SEQ ID NO: 1932765 - RNA, 19 nt, Artificial Sequence
  Description of Artificial Sequence: Synthetic oligonucleotide
gagcuacuaauguugucug

SEQ ID NO: 1932766 - RNA, 19 nt, Artificial Sequence
  Description of Artificial Sequence: Synthetic oligonucleotide
aagggaucaugucguuauc

SEQ ID NO: 1932767 - RNA, 19 nt, Artificial Sequence
  Description of Artificial Sequence: Synthetic oligonucleotide
uggagggauccaucaaggg

SEQ ID NO: 1932768 - RNA, 19 nt, Artificial Sequence
  Description of Artificial Sequence: Synthetic oligonucleotide
guuacugguauccgagcgc

SEQ ID NO: 1932769 - RNA, 19 nt, Artificial Sequence
  Description of Artificial Sequence: Synthetic oligonucleotide
acccggguugucuuuaauc

SEQ ID NO: 1932770 - RNA, 19 nt, Artificial Sequence
  Description of Artificial Sequence: Synthetic oligonucleotide
uuauuuggggagacagacu

SEQ ID NO: 1932771 - RNA, 19 nt, Artificial Sequence
  Description of Artificial Sequence: Synthetic oligonucleotide
uuuaacaguugagagucau

SEQ ID NO: 1932772 - RNA, 19 nt, Artificial Sequence
  Description of Artificial Sequence: Synthetic oligonucleotide
accgcaggaacccacagaa

SEQ ID NO: 1932773 - RNA, 19 nt, Artificial Sequence
  Description of Artificial Sequence: Synthetic oligonucleotide
acccacagaaacccaccgc

SEQ ID NO: 1932774 - RNA, 19 nt, Artificial Sequence
  Description of Artificial Sequence: Synthetic oligonucleotide
uugcauaccauugacucau

SEQ ID NO: 1932775 - RNA, 19 nt, Artificial Sequence
  Description of Artificial Sequence: Synthetic oligonucleotide
ucccuucauuccuuaaaag

SEQ ID NO: 1932776 - RNA, 19 nt, Artificial Sequence
  Description of Artificial Sequence: Synthetic oligonucleotide
cauacagcgcauauggcga

SEQ ID NO: 1932777 - RNA, 19 nt, Artificial Sequence
  Description of Artificial Sequence: Synthetic oligonucleotide
agugggacaugagaggaag

SEQ ID NO: 1932778 - RNA, 19 nt, Artificial Sequence
  Description of Artificial Sequence: Synthetic oligonucleotide
ucaugucguuaucugggug

SEQ ID NO: 1932779 - RNA, 19 nt, Artificial Sequence
  Description of Artificial Sequence: Synthetic oligonucleotide
uauggcgaguaguaggguc

SEQ ID NO: 1932780 - RNA, 19 nt, Artificial Sequence
  Description of Artificial Sequence: Synthetic oligonucleotide
agcuacuaauguugucugg

SEQ ID NO: 1932781 - RNA, 19 nt, Artificial Sequence
  Description of Artificial Sequence: Synthetic oligonucleotide
ucucccuucauuccuuaaa

SEQ ID NO: 1932782 - RNA, 19 nt, Artificial Sequence
  Description of Artificial Sequence: Synthetic oligonucleotide
agggguaagcaguagugga

SEQ ID NO: 1932783 - RNA, 19 nt, Artificial Sequence
  Description of Artificial Sequence: Synthetic oligonucleotide
acucaugugggccauuaau

SEQ ID NO: 1932784 - RNA, 19 nt, Artificial Sequence
  Description of Artificial Sequence: Synthetic oligonucleotide
aguugagagucaugcaaga

SEQ ID NO: 1932785 - RNA, 19 nt, Artificial Sequence
  Description of Artificial Sequence: Synthetic oligonucleotide
cccuucauuccuuaaaagc

SEQ ID NO: 1932786 - RNA, 19 nt, Artificial Sequence
  Description of Artificial Sequence: Synthetic oligonucleotide
uuuaagacguuuggcggga

SEQ ID NO: 1932787 - RNA, 19 nt, Artificial Sequence
  Description of Artificial Sequence: Synthetic oligonucleotide
uccuagggcucccugaguc

SEQ ID NO: 1932788 - RNA, 19 nt, Artificial Sequence
  Description of Artificial Sequence: Synthetic oligonucleotide
accucacauggagagaaac

SEQ ID NO: 1932789 - RNA, 19 nt, Artificial Sequence
  Description of Artificial Sequence: Synthetic oligonucleotide
agagacugcccaaaauggg

SEQ ID NO: 1932790 - RNA, 19 nt, Artificial Sequence
  Description of Artificial Sequence: Synthetic oligonucleotide
ucacagucccaacuaggga

SEQ ID NO: 1932791 - RNA, 19 nt, Artificial Sequence
  Description of Artificial Sequence: Synthetic oligonucleotide
uuuuaacaguugagaguca

SEQ ID NO: 1932792 - RNA, 19 nt, Artificial Sequence
  Description of Artificial Sequence: Synthetic oligonucleotide
uuuggcgggaugugccagg

SEQ ID NO: 1932793 - RNA, 19 nt, Artificial Sequence
  Description of Artificial Sequence: Synthetic oligonucleotide
ggaugacaggcucuguugg

SEQ ID NO: 1932794 - RNA, 19 nt, Artificial Sequence
  Description of Artificial Sequence: Synthetic oligonucleotide
ugacgauaaaguacuucau

SEQ ID NO: 1932795 - RNA, 19 nt, Artificial Sequence
  Description of Artificial Sequence: Synthetic oligonucleotide
guguagguuacugguaucc

SEQ ID NO: 1932796 - RNA, 19 nt, Artificial Sequence
  Description of Artificial Sequence: Synthetic oligonucleotide
gacuuugggacuagucugc

SEQ ID NO: 1932797 - RNA, 19 nt, Artificial Sequence
  Description of Artificial Sequence: Synthetic oligonucleotide
aaccccaacucucccuuca

SEQ ID NO: 1932798 - RNA, 19 nt, Artificial Sequence
  Description of Artificial Sequence: Synthetic oligonucleotide
ugauccuagggcucccuga

SEQ ID NO: 1932799 - RNA, 19 nt, Artificial Sequence
  Description of Artificial Sequence: Synthetic oligonucleotide
guagggguaagcaguagug

SEQ ID NO: 1932800 - RNA, 19 nt, Artificial Sequence
  Description of Artificial Sequence: Synthetic oligonucleotide
guacaaaaucaaccaacca

SEQ ID NO: 1932801 - RNA, 19 nt, Artificial Sequence
  Description of Artificial Sequence: Synthetic oligonucleotide
aagaccgggaaggagggaa

SEQ ID NO: 1932802 - RNA, 19 nt, Artificial Sequence
  Description of Artificial Sequence: Synthetic oligonucleotide
cuuuaauccuagccaccgc

SEQ ID NO: 1932803 - RNA, 19 nt, Artificial Sequence
  Description of Artificial Sequence: Synthetic oligonucleotide
gaugacuuugggacuaguc

SEQ ID NO: 1932804 - RNA, 19 nt, Artificial Sequence
  Description of Artificial Sequence: Synthetic oligonucleotide
agcuuguaagcuaacauua

SEQ ID NO: 1932805 - RNA, 19 nt, Artificial Sequence
  Description of Artificial Sequence: Synthetic oligonucleotide
uuuggggagacagacuuuu

SEQ ID NO: 1932806 - RNA, 19 nt, Artificial Sequence
  Description of Artificial Sequence: Synthetic oligonucleotide
acguuuggcgggaugugcc

SEQ ID NO: 1932807 - RNA, 19 nt, Artificial Sequence
  Description of Artificial Sequence: Synthetic oligonucleotide
ugcugcguaagaccgggaa

SEQ ID NO: 1932808 - RNA, 19 nt, Artificial Sequence
  Description of Artificial Sequence: Synthetic oligonucleotide
gaagggaucaugucguuau

SEQ ID NO: 1932809 - RNA, 19 nt, Artificial Sequence
  Description of Artificial Sequence: Synthetic oligonucleotide
cuagccaccgcaggaaccc

SEQ ID NO: 1932810 - RNA, 19 nt, Artificial Sequence
  Description of Artificial Sequence: Synthetic oligonucleotide
gacaugagaggaaggggug

SEQ ID NO: 1932811 - RNA, 19 nt, Artificial Sequence
  Description of Artificial Sequence: Synthetic oligonucleotide
acauuauaguaaauaaaua

SEQ ID NO: 1932812 - RNA, 19 nt, Artificial Sequence
  Description of Artificial Sequence: Synthetic oligonucleotide
aagcaguaguggagguugc

SEQ ID NO: 1932813 - RNA, 19 nt, Artificial Sequence
  Description of Artificial Sequence: Synthetic oligonucleotide
guugagagucaugcaagag

SEQ ID NO: 1932814 - RNA, 19 nt, Artificial Sequence
  Description of Artificial Sequence: Synthetic oligonucleotide
ugagaggaaggggugggug

SEQ ID NO: 1932815 - RNA, 19 nt, Artificial Sequence
  Description of Artificial Sequence: Synthetic oligonucleotide
ggagcguguagguuacugg

SEQ ID NO: 1932816 - RNA, 19 nt, Artificial Sequence
  Description of Artificial Sequence: Synthetic oligonucleotide
ugccccuaucaccagggga

SEQ ID NO: 1932817 - RNA, 19 nt, Artificial Sequence
  Description of Artificial Sequence: Synthetic oligonucleotide
aucaugucguuaucugggu

SEQ ID NO: 1932818 - RNA, 19 nt, Artificial Sequence
  Description of Artificial Sequence: Synthetic oligonucleotide
guagguuacugguauccga

SEQ ID NO: 1932819 - RNA, 19 nt, Artificial Sequence
  Description of Artificial Sequence: Synthetic oligonucleotide
guugugauccuagggcucc

SEQ ID NO: 1932820 - RNA, 19 nt, Artificial Sequence
  Description of Artificial Sequence: Synthetic oligonucleotide
ugcaagagacugcccaaaa

SEQ ID NO: 1932821 - RNA, 19 nt, Artificial Sequence
  Description of Artificial Sequence: Synthetic oligonucleotide
agggguggaaggaaagggg

SEQ ID NO: 1932822 - RNA, 19 nt, Artificial Sequence
  Description of Artificial Sequence: Synthetic oligonucleotide
gagauugcuggcucagguc

SEQ ID NO: 1932823 - RNA, 19 nt, Artificial Sequence
  Description of Artificial Sequence: Synthetic oligonucleotide
gggcuuuuaagacguuugg

SEQ ID NO: 1932824 - RNA, 19 nt, Artificial Sequence
  Description of Artificial Sequence: Synthetic oligonucleotide
ggcgggaugugccaggucc

SEQ ID NO: 1932825 - RNA, 19 nt, Artificial Sequence
  Description of Artificial Sequence: Synthetic oligonucleotide
gugguuaauauuauuauuu

SEQ ID NO: 1932826 - RNA, 19 nt, Artificial Sequence
  Description of Artificial Sequence: Synthetic oligonucleotide
cccggguugucuuuaaucc

SEQ ID NO: 1932827 - RNA, 19 nt, Artificial Sequence
  Description of Artificial Sequence: Synthetic oligonucleotide
uagaaccccaacucucccu

SEQ ID NO: 1932828 - RNA, 19 nt, Artificial Sequence
  Description of Artificial Sequence: Synthetic oligonucleotide
gcuaacauuauaguaaaua

SEQ ID NO: 1932829 - RNA, 19 nt, Artificial Sequence
  Description of Artificial Sequence: Synthetic oligonucleotide
caucagcuggcaaucugac

SEQ ID NO: 1932830 - RNA, 19 nt, Artificial Sequence
  Description of Artificial Sequence: Synthetic oligonucleotide
ugggacuagucugcuuugg

SEQ ID NO: 1932831 - RNA, 19 nt, Artificial Sequence
  Description of Artificial Sequence: Synthetic oligonucleotide
guagaaccccaacucuccc

SEQ ID NO: 1932832 - RNA, 19 nt, Artificial Sequence
  Description of Artificial Sequence: Synthetic oligonucleotide
cuggcaaucugacugccca

SEQ ID NO: 1932833 - RNA, 19 nt, Artificial Sequence
  Description of Artificial Sequence: Synthetic oligonucleotide
gaggggcugggcuguaucc

SEQ ID NO: 1932834 - RNA, 19 nt, Artificial Sequence
  Description of Artificial Sequence: Synthetic oligonucleotide
caucaaggguccccgggcc

SEQ ID NO: 1932835 - RNA, 19 nt, Artificial Sequence
  Description of Artificial Sequence: Synthetic oligonucleotide
cccacagaaacccaccgcc

SEQ ID NO: 1932836 - RNA, 19 nt, Artificial Sequence
  Description of Artificial Sequence: Synthetic oligonucleotide
uugggacuagucugcuuug

SEQ ID NO: 1932837 - RNA, 19 nt, Artificial Sequence
  Description of Artificial Sequence: Synthetic oligonucleotide
ggaguguugugauccuagg

SEQ ID NO: 1932838 - RNA, 19 nt, Artificial Sequence
  Description of Artificial Sequence: Synthetic oligonucleotide
uauccugguagggguaagc

SEQ ID NO: 1932839 - RNA, 19 nt, Artificial Sequence
  Description of Artificial Sequence: Synthetic oligonucleotide
acacaguccgauggggagg

SEQ ID NO: 1932840 - RNA, 19 nt, Artificial Sequence
  Description of Artificial Sequence: Synthetic oligonucleotide
uacugguauccgagcgccg

SEQ ID NO: 1932841 - RNA, 19 nt, Artificial Sequence
  Description of Artificial Sequence: Synthetic oligonucleotide
ggguaagcaguaguggagg

SEQ ID NO: 1932842 - RNA, 19 nt, Artificial Sequence
  Description of Artificial Sequence: Synthetic oligonucleotide
gagucaugcaagagacugc

SEQ ID NO: 1932843 - RNA, 19 nt, Artificial Sequence
  Description of Artificial Sequence: Synthetic oligonucleotide
aaaucucccuuaaaacaua

SEQ ID NO: 1932844 - RNA, 19 nt, Artificial Sequence
  Description of Artificial Sequence: Synthetic oligonucleotide
auugcuggcucaggucugg

SEQ ID NO: 1932845 - RNA, 19 nt, Artificial Sequence
  Description of Artificial Sequence: Synthetic oligonucleotide
agggaucaugucguuaucu

SEQ ID NO: 1932846 - RNA, 19 nt, Artificial Sequence
  Description of Artificial Sequence: Synthetic oligonucleotide
ucugcuuuggagggaucca

SEQ ID NO: 1932847 - RNA, 19 nt, Artificial Sequence
  Description of Artificial Sequence: Synthetic oligonucleotide
uggcaaucugacugcccag

SEQ ID NO: 1932848 - RNA, 19 nt, Artificial Sequence
  Description of Artificial Sequence: Synthetic oligonucleotide
ugguauccgagcgccgagg

SEQ ID NO: 1932849 - RNA, 19 nt, Artificial Sequence
  Description of Artificial Sequence: Synthetic oligonucleotide
cauugacucaugugggcca

SEQ ID NO: 1932850 - RNA, 19 nt, Artificial Sequence
  Description of Artificial Sequence: Synthetic oligonucleotide
cacaguccgauggggaggg

SEQ ID NO: 1932851 - RNA, 19 nt, Artificial Sequence
  Description of Artificial Sequence: Synthetic oligonucleotide
guauccgagcgccgaggcg

SEQ ID NO: 1932852 - RNA, 19 nt, Artificial Sequence
  Description of Artificial Sequence: Synthetic oligonucleotide
agcgcauauggcgaguagu

SEQ ID NO: 1932853 - RNA, 19 nt, Artificial Sequence
  Description of Artificial Sequence: Synthetic oligonucleotide
agcuggcaaucugacugcc

SEQ ID NO: 1932854 - RNA, 19 nt, Artificial Sequence
  Description of Artificial Sequence: Synthetic oligonucleotide
uguauccugguagggguaa

SEQ ID NO: 1932855 - RNA, 19 nt, Artificial Sequence
  Description of Artificial Sequence: Synthetic oligonucleotide
uccuagccaccgcaggaac

SEQ ID NO: 1932856 - RNA, 19 nt, Artificial Sequence
  Description of Artificial Sequence: Synthetic oligonucleotide
cagcuggcaaucugacugc

SEQ ID NO: 1932857 - RNA, 19 nt, Artificial Sequence
  Description of Artificial Sequence: Synthetic oligonucleotide
gagcguguagguuacuggu

SEQ ID NO: 1932858 - RNA, 19 nt, Artificial Sequence
  Description of Artificial Sequence: Synthetic oligonucleotide
agaaacaagagggguggaa

SEQ ID NO: 1932859 - RNA, 19 nt, Artificial Sequence
  Description of Artificial Sequence: Synthetic oligonucleotide
gcaaucugacugcccagcg

SEQ ID NO: 1932860 - RNA, 19 nt, Artificial Sequence
  Description of Artificial Sequence: Synthetic oligonucleotide
uggcgaguaguaggguccg

SEQ ID NO: 1932861 - RNA, 19 nt, Artificial Sequence
  Description of Artificial Sequence: Synthetic oligonucleotide
gucucuguccauacagcgc

SEQ ID NO: 1932862 - RNA, 19 nt, Artificial Sequence
  Description of Artificial Sequence: Synthetic oligonucleotide
cuaucaccaggggaggaug

SEQ ID NO: 1932863 - RNA, 19 nt, Artificial Sequence
  Description of Artificial Sequence: Synthetic oligonucleotide
ucguuaucugggugguuaa

SEQ ID NO: 1932864 - RNA, 19 nt, Artificial Sequence
  Description of Artificial Sequence: Synthetic oligonucleotide
guguagaaccccaacucuc

SEQ ID NO: 1932865 - RNA, 19 nt, Artificial Sequence
  Description of Artificial Sequence: Synthetic oligonucleotide
uggcucaggucugggacag

SEQ ID NO: 1932866 - RNA, 19 nt, Artificial Sequence
  Description of Artificial Sequence: Synthetic oligonucleotide
gggacaugagaggaagggg

SEQ ID NO: 1932867 - RNA, 19 nt, Artificial Sequence
  Description of Artificial Sequence: Synthetic oligonucleotide
guguugugauccuagggcu

SEQ ID NO: 1932868 - RNA, 19 nt, Artificial Sequence
  Description of Artificial Sequence: Synthetic oligonucleotide
uaaugacgauaaaguacuu

SEQ ID NO: 1932869 - RNA, 19 nt, Artificial Sequence
  Description of Artificial Sequence: Synthetic oligonucleotide
agaagacccggguugucuu

SEQ ID NO: 1932870 - RNA, 19 nt, Artificial Sequence
  Description of Artificial Sequence: Synthetic oligonucleotide
acugguauccgagcgccga

SEQ ID NO: 1932871 - RNA, 19 nt, Artificial Sequence
  Description of Artificial Sequence: Synthetic oligonucleotide
guacuucauaaaauauaga

SEQ ID NO: 1932872 - RNA, 19 nt, Artificial Sequence
  Description of Artificial Sequence: Synthetic oligonucleotide
aggagcguguagguuacug

SEQ ID NO: 1932873 - RNA, 19 nt, Artificial Sequence
  Description of Artificial Sequence: Synthetic oligonucleotide
ugcauaccauugacucaug

SEQ ID NO: 1932874 - RNA, 19 nt, Artificial Sequence
  Description of Artificial Sequence: Synthetic oligonucleotide
agacugcccaaaaugggga

SEQ ID NO: 1932875 - RNA, 19 nt, Artificial Sequence
  Description of Artificial Sequence: Synthetic oligonucleotide
ccaacucucccuucauucc

SEQ ID NO: 1932876 - RNA, 19 nt, Artificial Sequence
  Description of Artificial Sequence: Synthetic oligonucleotide
ggcuguauccugguagggg

SEQ ID NO: 1932877 - RNA, 19 nt, Artificial Sequence
  Description of Artificial Sequence: Synthetic oligonucleotide
gccccuaucaccaggggag

SEQ ID NO: 1932878 - RNA, 19 nt, Artificial Sequence
  Description of Artificial Sequence: Synthetic oligonucleotide
ugggccauuaaugcacuua

SEQ ID NO: 1932879 - RNA, 19 nt, Artificial Sequence
  Description of Artificial Sequence: Synthetic oligonucleotide
gcugcguaagaccgggaag

SEQ ID NO: 1932880 - RNA, 19 nt, Artificial Sequence
  Description of Artificial Sequence: Synthetic oligonucleotide
gauugcuggcucaggucug

SEQ ID NO: 1932881 - RNA, 19 nt, Artificial Sequence
  Description of Artificial Sequence: Synthetic oligonucleotide
auacacaguccgaugggga

SEQ ID NO: 1932882 - RNA, 19 nt, Artificial Sequence
  Description of Artificial Sequence: Synthetic oligonucleotide
ggggcuuuuaagacguuug

SEQ ID NO: 1932883 - RNA, 19 nt, Artificial Sequence
  Description of Artificial Sequence: Synthetic oligonucleotide
accaaccaaaucucccuua

SEQ ID NO: 1932884 - RNA, 19 nt, Artificial Sequence
  Description of Artificial Sequence: Synthetic oligonucleotide
cgcaggaacccacagaaac

SEQ ID NO: 1932885 - RNA, 19 nt, Artificial Sequence
  Description of Artificial Sequence: Synthetic oligonucleotide
ugcagcgucgagggcagug

SEQ ID NO: 1932886 - RNA, 19 nt, Artificial Sequence
  Description of Artificial Sequence: Synthetic oligonucleotide
caaccaaccaaaucucccu

SEQ ID NO: 1932887 - RNA, 19 nt, Artificial Sequence
  Description of Artificial Sequence: Synthetic oligonucleotide
gggguaagcaguaguggag

SEQ ID NO: 1932888 - RNA, 19 nt, Artificial Sequence
  Description of Artificial Sequence: Synthetic oligonucleotide
ugcguaagaccgggaagga

SEQ ID NO: 1932889 - RNA, 19 nt, Artificial Sequence
  Description of Artificial Sequence: Synthetic oligonucleotide
gggaguguugugauccuag

SEQ ID NO: 1932890 - RNA, 19 nt, Artificial Sequence
  Description of Artificial Sequence: Synthetic oligonucleotide
gucguuaucugggugguua

SEQ ID NO: 1932891 - RNA, 19 nt, Artificial Sequence
  Description of Artificial Sequence: Synthetic oligonucleotide
ggaggcuagucucugucca

SEQ ID NO: 1932892 - RNA, 19 nt, Artificial Sequence
  Description of Artificial Sequence: Synthetic oligonucleotide
ccaaaauggggaaaacuaa

SEQ ID NO: 1932893 - RNA, 19 nt, Artificial Sequence
  Description of Artificial Sequence: Synthetic oligonucleotide
gcaggaacccacagaaacc

SEQ ID NO: 1932894 - RNA, 19 nt, Artificial Sequence
  Description of Artificial Sequence: Synthetic oligonucleotide
ugacucaugugggccauua

SEQ ID NO: 1932895 - RNA, 19 nt, Artificial Sequence
  Description of Artificial Sequence: Synthetic oligonucleotide
caagagggguggaaggaaa

SEQ ID NO: 1932896 - RNA, 19 nt, Artificial Sequence
  Description of Artificial Sequence: Synthetic oligonucleotide
gcugcugcguaagaccggg

SEQ ID NO: 1932897 - RNA, 19 nt, Artificial Sequence
  Description of Artificial Sequence: Synthetic oligonucleotide
gcucaggucugggacaggg

SEQ ID NO: 1932898 - RNA, 19 nt, Artificial Sequence
  Description of Artificial Sequence: Synthetic oligonucleotide
gugauccuagggcucccug

SEQ ID NO: 1932899 - RNA, 19 nt, Artificial Sequence
  Description of Artificial Sequence: Synthetic oligonucleotide
gguugucuuuaauccuagc

SEQ ID NO: 1932900 - RNA, 19 nt, Artificial Sequence
  Description of Artificial Sequence: Synthetic oligonucleotide
augucguuaucuggguggu

SEQ ID NO: 1932901 - RNA, 19 nt, Artificial Sequence
  Description of Artificial Sequence: Synthetic oligonucleotide
ccugccccuaucaccaggg

SEQ ID NO: 1932902 - RNA, 19 nt, Artificial Sequence
  Description of Artificial Sequence: Synthetic oligonucleotide
cugguauccgagcgccgag

SEQ ID NO: 1932903 - RNA, 19 nt, Artificial Sequence
  Description of Artificial Sequence: Synthetic oligonucleotide
ugguagggguaagcaguag

SEQ ID NO: 1932904 - RNA, 19 nt, Artificial Sequence
  Description of Artificial Sequence: Synthetic oligonucleotide
aggggaagaaaugcaguuu

SEQ ID NO: 1932905 - RNA, 19 nt, Artificial Sequence
  Description of Artificial Sequence: Synthetic oligonucleotide
caguccgauggggaggggc

SEQ ID NO: 1932906 - RNA, 19 nt, Artificial Sequence
  Description of Artificial Sequence: Synthetic oligonucleotide
ggauccaucaagggucccc

SEQ ID NO: 1932907 - RNA, 19 nt, Artificial Sequence
  Description of Artificial Sequence: Synthetic oligonucleotide
caaucugacugcccagcga

SEQ ID NO: 1932908 - RNA, 19 nt, Artificial Sequence
  Description of Artificial Sequence: Synthetic oligonucleotide
aacccaccgccagcuuugg

SEQ ID NO: 1932909 - RNA, 19 nt, Artificial Sequence
  Description of Artificial Sequence: Synthetic oligonucleotide
cuuauauucccagcuugua

SEQ ID NO: 1932910 - RNA, 19 nt, Artificial Sequence
  Description of Artificial Sequence: Synthetic oligonucleotide
ugaugacuuugggacuagu

SEQ ID NO: 1932911 - RNA, 19 nt, Artificial Sequence
  Description of Artificial Sequence: Synthetic oligonucleotide
gaugugccagguccccauc

SEQ ID NO: 1932912 - RNA, 19 nt, Artificial Sequence
  Description of Artificial Sequence: Synthetic oligonucleotide
cagcgucgagggcaguggg

SEQ ID NO: 1932913 - RNA, 19 nt, Artificial Sequence
  Description of Artificial Sequence: Synthetic oligonucleotide
ugcccaaaauggggaaaac

SEQ ID NO: 1932914 - RNA, 19 nt, Artificial Sequence
  Description of Artificial Sequence: Synthetic oligonucleotide
ggcaaucugacugcccagc

SEQ ID NO: 1932915 - RNA, 19 nt, Artificial Sequence
  Description of Artificial Sequence: Synthetic oligonucleotide
ggggaaaacuaaaagugua

SEQ ID NO: 1932916 - RNA, 19 nt, Artificial Sequence
  Description of Artificial Sequence: Synthetic oligonucleotide
acuuugggacuagucugcu

SEQ ID NO: 1932917 - RNA, 19 nt, Artificial Sequence
  Description of Artificial Sequence: Synthetic oligonucleotide
auugacucaugugggccau

SEQ ID NO: 1932918 - RNA, 19 nt, Artificial Sequence
  Description of Artificial Sequence: Synthetic oligonucleotide
ggugguuaauauuauuauu

SEQ ID NO: 1932919 - RNA, 19 nt, Artificial Sequence
  Description of Artificial Sequence: Synthetic oligonucleotide
ccaucaaggguccccgggc

SEQ ID NO: 1932920 - RNA, 19 nt, Artificial Sequence
  Description of Artificial Sequence: Synthetic oligonucleotide
ugugauccuagggcucccu

SEQ ID NO: 1932921 - RNA, 19 nt, Artificial Sequence
  Description of Artificial Sequence: Synthetic oligonucleotide
aacucucccuucauuccuu

SEQ ID NO: 1932922 - RNA, 19 nt, Artificial Sequence
  Description of Artificial Sequence: Synthetic oligonucleotide
auauggcgaguaguagggu

SEQ ID NO: 1932923 - RNA, 19 nt, Artificial Sequence
  Description of Artificial Sequence: Synthetic oligonucleotide
gguguggggagaagacccg

SEQ ID NO: 1932924 - RNA, 19 nt, Artificial Sequence
  Description of Artificial Sequence: Synthetic oligonucleotide
aagacccggguugucuuua

SEQ ID NO: 1932925 - RNA, 19 nt, Artificial Sequence
  Description of Artificial Sequence: Synthetic oligonucleotide
ucuguccauacagcgcaua

SEQ ID NO: 1932926 - RNA, 19 nt, Artificial Sequence
  Description of Artificial Sequence: Synthetic oligonucleotide
ccuuugggaccacugcccc

SEQ ID NO: 1932927 - RNA, 19 nt, Artificial Sequence
  Description of Artificial Sequence: Synthetic oligonucleotide
ccuuaaaagcaaaccagua

SEQ ID NO: 1932928 - RNA, 19 nt, Artificial Sequence
  Description of Artificial Sequence: Synthetic oligonucleotide
gcuguauccugguaggggu

SEQ ID NO: 1932929 - RNA, 19 nt, Artificial Sequence
  Description of Artificial Sequence: Synthetic oligonucleotide
ggagagaaacaagaggggu

SEQ ID NO: 1932930 - RNA, 19 nt, Artificial Sequence
  Description of Artificial Sequence: Synthetic oligonucleotide
gagaagacccggguugucu

SEQ ID NO: 1932931 - RNA, 19 nt, Artificial Sequence
  Description of Artificial Sequence: Synthetic oligonucleotide
uugugauccuagggcuccc

SEQ ID NO: 1932932 - RNA, 19 nt, Artificial Sequence
  Description of Artificial Sequence: Synthetic oligonucleotide
ggcuagucucuguccauac

SEQ ID NO: 1932933 - RNA, 19 nt, Artificial Sequence
  Description of Artificial Sequence: Synthetic oligonucleotide
ggguugucuuuaauccuag

SEQ ID NO: 1932934 - RNA, 19 nt, Artificial Sequence
  Description of Artificial Sequence: Synthetic oligonucleotide
cagcgcauauggcgaguag

SEQ ID NO: 1932935 - RNA, 19 nt, Artificial Sequence
  Description of Artificial Sequence: Synthetic oligonucleotide
ccuagccaccgcaggaacc

SEQ ID NO: 1932936 - RNA, 19 nt, Artificial Sequence
  Description of Artificial Sequence: Synthetic oligonucleotide
cugaugacuuugggacuag

SEQ ID NO: 1932937 - RNA, 19 nt, Artificial Sequence
  Description of Artificial Sequence: Synthetic oligonucleotide
ggagauugcuggcucaggu

SEQ ID NO: 1932938 - RNA, 19 nt, Artificial Sequence
  Description of Artificial Sequence: Synthetic oligonucleotide
guauccugguagggguaag

SEQ ID NO: 1932939 - RNA, 19 nt, Artificial Sequence
  Description of Artificial Sequence: Synthetic oligonucleotide
gguagggguaagcaguagu

SEQ ID NO: 1932940 - RNA, 19 nt, Artificial Sequence
  Description of Artificial Sequence: Synthetic oligonucleotide
uacagcgcauauggcgagu

SEQ ID NO: 1932941 - RNA, 19 nt, Artificial Sequence
  Description of Artificial Sequence: Synthetic oligonucleotide
ucccaacuagggagagaaa

SEQ ID NO: 1932942 - RNA, 19 nt, Artificial Sequence
  Description of Artificial Sequence: Synthetic oligonucleotide
cuacagagcuacuaauguu

SEQ ID NO: 1932943 - RNA, 19 nt, Artificial Sequence
  Description of Artificial Sequence: Synthetic oligonucleotide
gccaggagcguguagguua

SEQ ID NO: 1932944 - RNA, 19 nt, Artificial Sequence
  Description of Artificial Sequence: Synthetic oligonucleotide
ggcgaagggaguguuguga

SEQ ID NO: 1932945 - RNA, 19 nt, Artificial Sequence
  Description of Artificial Sequence: Synthetic oligonucleotide
auccuagccaccgcaggaa

SEQ ID NO: 1932946 - RNA, 19 nt, Artificial Sequence
  Description of Artificial Sequence: Synthetic oligonucleotide
uaagaccgggaaggaggga

SEQ ID NO: 1932947 - RNA, 19 nt, Artificial Sequence
  Description of Artificial Sequence: Synthetic oligonucleotide
aggggcuuuuaagacguuu

SEQ ID NO: 1932948 - RNA, 19 nt, Artificial Sequence
  Description of Artificial Sequence: Synthetic oligonucleotide
agccaccgcaggaacccac

SEQ ID NO: 1932949 - RNA, 19 nt, Artificial Sequence
  Description of Artificial Sequence: Synthetic oligonucleotide
cagggcgaagggaguguug

SEQ ID NO: 1932950 - RNA, 19 nt, Artificial Sequence
  Description of Artificial Sequence: Synthetic oligonucleotide
ccuagggcucccugagucc

SEQ ID NO: 1932951 - RNA, 19 nt, Artificial Sequence
  Description of Artificial Sequence: Synthetic oligonucleotide
gggacuagucugcuuugga

SEQ ID NO: 1932952 - RNA, 19 nt, Artificial Sequence
  Description of Artificial Sequence: Synthetic oligonucleotide
ccuacagagcuacuaaugu

SEQ ID NO: 1932953 - RNA, 19 nt, Artificial Sequence
  Description of Artificial Sequence: Synthetic oligonucleotide
ccugguagggguaagcagu

SEQ ID NO: 1932954 - RNA, 19 nt, Artificial Sequence
  Description of Artificial Sequence: Synthetic oligonucleotide
aggucugggacagggcgaa

SEQ ID NO: 1932955 - RNA, 19 nt, Artificial Sequence
  Description of Artificial Sequence: Synthetic oligonucleotide
cagucccaacuagggagag

SEQ ID NO: 1932956 - RNA, 19 nt, Artificial Sequence
  Description of Artificial Sequence: Synthetic oligonucleotide
uuaagacguuuggcgggau

SEQ ID NO: 1932957 - RNA, 19 nt, Artificial Sequence
  Description of Artificial Sequence: Synthetic oligonucleotide
cccaacuagggagagaaaa

SEQ ID NO: 1932958 - RNA, 19 nt, Artificial Sequence
  Description of Artificial Sequence: Synthetic oligonucleotide
gcgaguaguaggguccggc

SEQ ID NO: 1932959 - RNA, 19 nt, Artificial Sequence
  Description of Artificial Sequence: Synthetic oligonucleotide
aaccucacauggagagaaa

SEQ ID NO: 1932960 - RNA, 19 nt, Artificial Sequence
  Description of Artificial Sequence: Synthetic oligonucleotide
ccaggagcguguagguuac

SEQ ID NO: 1932961 - RNA, 19 nt, Artificial Sequence
  Description of Artificial Sequence: Synthetic oligonucleotide
gcuagucucuguccauaca

SEQ ID NO: 1932962 - RNA, 19 nt, Artificial Sequence
  Description of Artificial Sequence: Synthetic oligonucleotide
agucccaacuagggagaga

SEQ ID NO: 1932963 - RNA, 19 nt, Artificial Sequence
  Description of Artificial Sequence: Synthetic oligonucleotide
acagcgcauauggcgagua

SEQ ID NO: 1932964 - RNA, 19 nt, Artificial Sequence
  Description of Artificial Sequence: Synthetic oligonucleotide
agcgaggugugggucccug

SEQ ID NO: 1932965 - RNA, 19 nt, Artificial Sequence
  Description of Artificial Sequence: Synthetic oligonucleotide
gggccauuaaugcacuuau

SEQ ID NO: 1932966 - RNA, 19 nt, Artificial Sequence
  Description of Artificial Sequence: Synthetic oligonucleotide
agcguguagguuacuggua

SEQ ID NO: 1932967 - RNA, 19 nt, Artificial Sequence
  Description of Artificial Sequence: Synthetic oligonucleotide
ggggucacagucccaacua

SEQ ID NO: 1932968 - RNA, 19 nt, Artificial Sequence
  Description of Artificial Sequence: Synthetic oligonucleotide
aggcuagucucuguccaua

SEQ ID NO: 1932969 - RNA, 19 nt, Artificial Sequence
  Description of Artificial Sequence: Synthetic oligonucleotide
agacccggguugucuuuaa

SEQ ID NO: 1932970 - RNA, 19 nt, Artificial Sequence
  Description of Artificial Sequence: Synthetic oligonucleotide
cuguauccugguaggggua

SEQ ID NO: 1932971 - RNA, 19 nt, Artificial Sequence
  Description of Artificial Sequence: Synthetic oligonucleotide
gcguaagaccgggaaggag

SEQ ID NO: 1932972 - RNA, 19 nt, Artificial Sequence
  Description of Artificial Sequence: Synthetic oligonucleotide
cagaaacccaccgccagcu

SEQ ID NO: 1932973 - RNA, 19 nt, Artificial Sequence
  Description of Artificial Sequence: Synthetic oligonucleotide
cuagucugcuuuggaggga

SEQ ID NO: 1932974 - RNA, 19 nt, Artificial Sequence
  Description of Artificial Sequence: Synthetic oligonucleotide
ucgagggcagugggacaug

SEQ ID NO: 1932975 - RNA, 19 nt, Artificial Sequence
  Description of Artificial Sequence: Synthetic oligonucleotide
cagugggacaugagaggaa

SEQ ID NO: 1932976 - RNA, 19 nt, Artificial Sequence
  Description of Artificial Sequence: Synthetic oligonucleotide
gcgucgagggcagugggac

SEQ ID NO: 1932977 - RNA, 19 nt, Artificial Sequence
  Description of Artificial Sequence: Synthetic oligonucleotide
acagggcgaagggaguguu

SEQ ID NO: 1932978 - RNA, 19 nt, Artificial Sequence
  Description of Artificial Sequence: Synthetic oligonucleotide
ccauuaaugcacuuauauu

SEQ ID NO: 1932979 - RNA, 19 nt, Artificial Sequence
  Description of Artificial Sequence: Synthetic oligonucleotide
gcaggggcuuuuaagacgu

SEQ ID NO: 1932980 - RNA, 19 nt, Artificial Sequence
  Description of Artificial Sequence: Synthetic oligonucleotide
agcgucgagggcaguggga

SEQ ID NO: 1932981 - RNA, 19 nt, Artificial Sequence
  Description of Artificial Sequence: Synthetic oligonucleotide
cgaggcggaggcuagucuc

SEQ ID NO: 1932982 - RNA, 19 nt, Artificial Sequence
  Description of Artificial Sequence: Synthetic oligonucleotide
agggaguguugugauccua

SEQ ID NO: 1932983 - RNA, 19 nt, Artificial Sequence
  Description of Artificial Sequence: Synthetic oligonucleotide
gcguguagguuacugguau

SEQ ID NO: 1932984 - RNA, 19 nt, Artificial Sequence
  Description of Artificial Sequence: Synthetic oligonucleotide
gaagacccggguugucuuu

SEQ ID NO: 1932985 - RNA, 19 nt, Artificial Sequence
  Description of Artificial Sequence: Synthetic oligonucleotide
cugggacagggcgaaggga

SEQ ID NO: 1932986 - RNA, 19 nt, Artificial Sequence
  Description of Artificial Sequence: Synthetic oligonucleotide
cggaggcuagucucugucc

SEQ ID NO: 1932987 - RNA, 19 nt, Artificial Sequence
  Description of Artificial Sequence: Synthetic oligonucleotide
gcauaccauugacucaugu

SEQ ID NO: 1932988 - RNA, 19 nt, Artificial Sequence
  Description of Artificial Sequence: Synthetic oligonucleotide
gcuggcaaucugacugccc

SEQ ID NO: 1932989 - RNA, 19 nt, Artificial Sequence
  Description of Artificial Sequence: Synthetic oligonucleotide
gggcgaagggaguguugug

SEQ ID NO: 1932990 - RNA, 19 nt, Artificial Sequence
  Description of Artificial Sequence: Synthetic oligonucleotide
gacagggcgaagggagugu

SEQ ID NO: 1932991 - RNA, 19 nt, Artificial Sequence
  Description of Artificial Sequence: Synthetic oligonucleotide
ugucguuaucugggugguu

SEQ ID NO: 1932992 - RNA, 19 nt, Artificial Sequence
  Description of Artificial Sequence: Synthetic oligonucleotide
guaagcaguaguggagguu

SEQ ID NO: 1932993 - RNA, 19 nt, Artificial Sequence
  Description of Artificial Sequence: Synthetic oligonucleotide
cgcauauggcgaguaguag

SEQ ID NO: 1932994 - RNA, 19 nt, Artificial Sequence
  Description of Artificial Sequence: Synthetic oligonucleotide
ccacagaaacccaccgcca

SEQ ID NO: 1932995 - RNA, 19 nt, Artificial Sequence
  Description of Artificial Sequence: Synthetic oligonucleotide
gucgagggcagugggacau

SEQ ID NO: 1932996 - RNA, 19 nt, Artificial Sequence
  Description of Artificial Sequence: Synthetic oligonucleotide
ggaagggaucaugucguua

SEQ ID NO: 1932997 - RNA, 19 nt, Artificial Sequence
  Description of Artificial Sequence: Synthetic oligonucleotide
cugggugguuaauauuauu

SEQ ID NO: 1932998 - RNA, 19 nt, Artificial Sequence
  Description of Artificial Sequence: Synthetic oligonucleotide
ccaccgccagcuuuggaga

SEQ ID NO: 1932999 - RNA, 19 nt, Artificial Sequence
  Description of Artificial Sequence: Synthetic oligonucleotide
gggaagaaaugcaguuuua

SEQ ID NO: 1933000 - RNA, 19 nt, Artificial Sequence
  Description of Artificial Sequence: Synthetic oligonucleotide
gcgcauauggcgaguagua

SEQ ID NO: 1933001 - RNA, 19 nt, Artificial Sequence
  Description of Artificial Sequence: Synthetic oligonucleotide
cguguagguuacugguauc

SEQ ID NO: 1933002 - RNA, 19 nt, Artificial Sequence
  Description of Artificial Sequence: Synthetic oligonucleotide
gcacuuauauucccagcuu

SEQ ID NO: 1933003 - RNA, 19 nt, Artificial Sequence
  Description of Artificial Sequence: Synthetic oligonucleotide
ccaccgcaggaacccacag

SEQ ID NO: 1933004 - RNA, 19 nt, Artificial Sequence
  Description of Artificial Sequence: Synthetic oligonucleotide
ggcgaguaguaggguccgg

SEQ ID NO: 1933005 - RNA, 19 nt, Artificial Sequence
  Description of Artificial Sequence: Synthetic oligonucleotide
gcgggaugugccagguccc

SEQ ID NO: 1933006 - RNA, 19 nt, Artificial Sequence
  Description of Artificial Sequence: Synthetic oligonucleotide
ccagcgagguguggguccc

SEQ ID NO: 1933007 - RNA, 19 nt, Artificial Sequence
  Description of Artificial Sequence: Synthetic oligonucleotide
gggaggggccaggagcgug

SEQ ID NO: 1933008 - RNA, 19 nt, Artificial Sequence
  Description of Artificial Sequence: Synthetic oligonucleotide
ggaugugccagguccccau

SEQ ID NO: 1933009 - RNA, 19 nt, Artificial Sequence
  Description of Artificial Sequence: Synthetic oligonucleotide
cuuugggacuagucugcuu

SEQ ID NO: 1933010 - RNA, 19 nt, Artificial Sequence
  Description of Artificial Sequence: Synthetic oligonucleotide
gacccggguugucuuuaau

SEQ ID NO: 1933011 - RNA, 19 nt, Artificial Sequence
  Description of Artificial Sequence: Synthetic oligonucleotide
cugcugcguaagaccggga

SEQ ID NO: 1933012 - RNA, 19 nt, Artificial Sequence
  Description of Artificial Sequence: Synthetic oligonucleotide
ggccauuaaugcacuuaua

SEQ ID NO: 1933013 - RNA, 19 nt, Artificial Sequence
  Description of Artificial Sequence: Synthetic oligonucleotide
gggaugugccaggucccca

SEQ ID NO: 1933014 - RNA, 19 nt, Artificial Sequence
  Description of Artificial Sequence: Synthetic oligonucleotide
gguccccaucagcuggcaa

SEQ ID NO: 1933015 - RNA, 19 nt, Artificial Sequence
  Description of Artificial Sequence: Synthetic oligonucleotide
ccggguugucuuuaauccu

SEQ ID NO: 1933016 - RNA, 19 nt, Artificial Sequence
  Description of Artificial Sequence: Synthetic oligonucleotide
cguuuggcgggaugugcca

SEQ ID NO: 1933017 - RNA, 19 nt, Artificial Sequence
  Description of Artificial Sequence: Synthetic oligonucleotide
gcgaggugugggucccuga

SEQ ID NO: 1933018 - RNA, 19 nt, Artificial Sequence
  Description of Artificial Sequence: Synthetic oligonucleotide
ccgauggggaggggcuggg

SEQ ID NO: 1933019 - RNA, 19 nt, Artificial Sequence
  Description of Artificial Sequence: Synthetic oligonucleotide
uugcagcgucgagggcagu

SEQ ID NO: 1933020 - RNA, 19 nt, Artificial Sequence
  Description of Artificial Sequence: Synthetic oligonucleotide
gccgaggcggaggcuaguc

SEQ ID NO: 1933021 - RNA, 19 nt, Artificial Sequence
  Description of Artificial Sequence: Synthetic oligonucleotide
caccgccagcuuuggagau

SEQ ID NO: 1933022 - RNA, 19 nt, Artificial Sequence
  Description of Artificial Sequence: Synthetic oligonucleotide
cgggaugugccaggucccc

SEQ ID NO: 1933023 - RNA, 19 nt, Artificial Sequence
  Description of Artificial Sequence: Synthetic oligonucleotide
gugggccauuaaugcacuu

SEQ ID NO: 1933024 - RNA, 19 nt, Artificial Sequence
  Description of Artificial Sequence: Synthetic oligonucleotide
ccccuacagagcuacuaau

SEQ ID NO: 1933025 - RNA, 19 nt, Artificial Sequence
  Description of Artificial Sequence: Synthetic oligonucleotide
gggaagggaucaugucguu

SEQ ID NO: 1933026 - RNA, 19 nt, Artificial Sequence
  Description of Artificial Sequence: Synthetic oligonucleotide
ccuaucaccaggggaggau

SEQ ID NO: 1933027 - RNA, 19 nt, Artificial Sequence
  Description of Artificial Sequence: Synthetic oligonucleotide
ccgcaggaacccacagaaa

SEQ ID NO: 1933028 - RNA, 19 nt, Artificial Sequence
  Description of Artificial Sequence: Synthetic oligonucleotide
cgucgagggcagugggaca

SEQ ID NO: 1933029 - RNA, 19 nt, Artificial Sequence
  Description of Artificial Sequence: Synthetic oligonucleotide
ggaggccuuugggaccacu

SEQ ID NO: 1933030 - RNA, 19 nt, Artificial Sequence
  Description of Artificial Sequence: Synthetic oligonucleotide
ccgaggcggaggcuagucu

SEQ ID NO: 1933031 - RNA, 19 nt, Artificial Sequence
  Description of Artificial Sequence: Synthetic oligonucleotide
caggggcuuuuaagacguu

SEQ ID NO: 1933032 - RNA, 19 nt, Artificial Sequence
  Description of Artificial Sequence: Synthetic oligonucleotide
gcccgggcgcugcugcgua

SEQ ID NO: 1933033 - RNA, 19 nt, Artificial Sequence
  Description of Artificial Sequence: Synthetic oligonucleotide
caggagcguguagguuacu

SEQ ID NO: 1933034 - RNA, 19 nt, Artificial Sequence
  Description of Artificial Sequence: Synthetic oligonucleotide
cccgggcccugccccuauc

SEQ ID NO: 1933035 - RNA, 19 nt, Artificial Sequence
  Description of Artificial Sequence: Synthetic oligonucleotide
cgggcgcugcugcguaaga

SEQ ID NO: 1933036 - RNA, 19 nt, Artificial Sequence
  Description of Artificial Sequence: Synthetic oligonucleotide
cccgggcgcugcugcguaa

SEQ ID NO: 1933037 - RNA, 19 nt, Artificial Sequence
  Description of Artificial Sequence: Synthetic oligonucleotide
ccccgggcccugccccuau

SEQ ID NO: 1933038 - RNA, 19 nt, Artificial Sequence
  Description of Artificial Sequence: Synthetic oligonucleotide
aauauaaugacacuugcac

SEQ ID NO: 1933039 - RNA, 19 nt, Artificial Sequence
  Description of Artificial Sequence: Synthetic oligonucleotide
uauauuagaauuaaaaugu

SEQ ID NO: 1933040 - RNA, 19 nt, Artificial Sequence
  Description of Artificial Sequence: Synthetic oligonucleotide
aaaaguguguacuaugagg

SEQ ID NO: 1933041 - RNA, 19 nt, Artificial Sequence
  Description of Artificial Sequence: Synthetic oligonucleotide
aaacuaguuggcuauagac

SEQ ID NO: 1933042 - RNA, 19 nt, Artificial Sequence
  Description of Artificial Sequence: Synthetic oligonucleotide
aggaagaucacuuaagaac

SEQ ID NO: 1933043 - RNA, 19 nt, Artificial Sequence
  Description of Artificial Sequence: Synthetic oligonucleotide
auuucuaauaggcuuuucc

SEQ ID NO: 1933044 - RNA, 19 nt, Artificial Sequence
  Description of Artificial Sequence: Synthetic oligonucleotide
cacuuaagaacaaauaccg

SEQ ID NO: 1933045 - RNA, 19 nt, Artificial Sequence
  Description of Artificial Sequence: Synthetic oligonucleotide
uucaaauugacuaagccuc

SEQ ID NO: 1933046 - RNA, 19 nt, Artificial Sequence
  Description of Artificial Sequence: Synthetic oligonucleotide
auauaugucaauuaggaau

SEQ ID NO: 1933047 - RNA, 19 nt, Artificial Sequence
  Description of Artificial Sequence: Synthetic oligonucleotide
uuaagaacaaauaccggag

SEQ ID NO: 1933048 - RNA, 19 nt, Artificial Sequence
  Description of Artificial Sequence: Synthetic oligonucleotide
aauguacauaauuucucac

SEQ ID NO: 1933049 - RNA, 19 nt, Artificial Sequence
  Description of Artificial Sequence: Synthetic oligonucleotide
uuucuaauaggcuuuuccg

SEQ ID NO: 1933050 - RNA, 19 nt, Artificial Sequence
  Description of Artificial Sequence: Synthetic oligonucleotide
uguacuaugaggagcacag

SEQ ID NO: 1933051 - RNA, 19 nt, Artificial Sequence
  Description of Artificial Sequence: Synthetic oligonucleotide
uuaauuucaguucuagaga

SEQ ID NO: 1933052 - RNA, 19 nt, Artificial Sequence
  Description of Artificial Sequence: Synthetic oligonucleotide
aguaaggauagucugguuc

SEQ ID NO: 1933053 - RNA, 19 nt, Artificial Sequence
  Description of Artificial Sequence: Synthetic oligonucleotide
aaucuaacuuuauuaaaca

SEQ ID NO: 1933054 - RNA, 19 nt, Artificial Sequence
  Description of Artificial Sequence: Synthetic oligonucleotide
ugucgcaaagcaaugaugc

SEQ ID NO: 1933055 - RNA, 19 nt, Artificial Sequence
  Description of Artificial Sequence: Synthetic oligonucleotide
aaagaaggacgaauuaacc

SEQ ID NO: 1933056 - RNA, 19 nt, Artificial Sequence
  Description of Artificial Sequence: Synthetic oligonucleotide
agaaggacgaauuaaccag

SEQ ID NO: 1933057 - RNA, 19 nt, Artificial Sequence
  Description of Artificial Sequence: Synthetic oligonucleotide
agcacuuucauucugagaa

SEQ ID NO: 1933058 - RNA, 19 nt, Artificial Sequence
  Description of Artificial Sequence: Synthetic oligonucleotide
aguaacuuuagugagucac

SEQ ID NO: 1933059 - RNA, 19 nt, Artificial Sequence
  Description of Artificial Sequence: Synthetic oligonucleotide
acuaaguaacuuuagugag

SEQ ID NO: 1933060 - RNA, 19 nt, Artificial Sequence
  Description of Artificial Sequence: Synthetic oligonucleotide
uuucaaaugacccuguaua

SEQ ID NO: 1933061 - RNA, 19 nt, Artificial Sequence
  Description of Artificial Sequence: Synthetic oligonucleotide
ugucuuaaagacuuggaca

SEQ ID NO: 1933062 - RNA, 19 nt, Artificial Sequence
  Description of Artificial Sequence: Synthetic oligonucleotide
auaauuucucacuucuaac

SEQ ID NO: 1933063 - RNA, 19 nt, Artificial Sequence
  Description of Artificial Sequence: Synthetic oligonucleotide
uguagcauuuuguagcuag

SEQ ID NO: 1933064 - RNA, 19 nt, Artificial Sequence
  Description of Artificial Sequence: Synthetic oligonucleotide
uucaacaagcucuaggccc

SEQ ID NO: 1933065 - RNA, 19 nt, Artificial Sequence
  Description of Artificial Sequence: Synthetic oligonucleotide
ucauaaucuaacuuuauua

SEQ ID NO: 1933066 - RNA, 19 nt, Artificial Sequence
  Description of Artificial Sequence: Synthetic oligonucleotide
uaucaguaauuucaaauga

SEQ ID NO: 1933067 - RNA, 19 nt, Artificial Sequence
  Description of Artificial Sequence: Synthetic oligonucleotide
uacauaauuucucacuucu

SEQ ID NO: 1933068 - RNA, 19 nt, Artificial Sequence
  Description of Artificial Sequence: Synthetic oligonucleotide
caugauacaagaaucggug

SEQ ID NO: 1933069 - RNA, 19 nt, Artificial Sequence
  Description of Artificial Sequence: Synthetic oligonucleotide
uauaugucaauuaggaaua

SEQ ID NO: 1933070 - RNA, 19 nt, Artificial Sequence
  Description of Artificial Sequence: Synthetic oligonucleotide
agcuauauaugucaauuag

SEQ ID NO: 1933071 - RNA, 19 nt, Artificial Sequence
  Description of Artificial Sequence: Synthetic oligonucleotide
aaaguguguacuaugagga

SEQ ID NO: 1933072 - RNA, 19 nt, Artificial Sequence
  Description of Artificial Sequence: Synthetic oligonucleotide
cuauauaugucaauuagga

SEQ ID NO: 1933073 - RNA, 19 nt, Artificial Sequence
  Description of Artificial Sequence: Synthetic oligonucleotide
aaugcaugcagacccuggg

SEQ ID NO: 1933074 - RNA, 19 nt, Artificial Sequence
  Description of Artificial Sequence: Synthetic oligonucleotide
uuaucgucaauauaaugac

SEQ ID NO: 1933075 - RNA, 19 nt, Artificial Sequence
  Description of Artificial Sequence: Synthetic oligonucleotide
ugauacaagaaucgguggc

SEQ ID NO: 1933076 - RNA, 19 nt, Artificial Sequence
  Description of Artificial Sequence: Synthetic oligonucleotide
aguaauuucaaaugacccu

SEQ ID NO: 1933077 - RNA, 19 nt, Artificial Sequence
  Description of Artificial Sequence: Synthetic oligonucleotide
ucuaacuaaguaacuuuag

SEQ ID NO: 1933078 - RNA, 19 nt, Artificial Sequence
  Description of Artificial Sequence: Synthetic oligonucleotide
ucacuucuaacuaaguaac

SEQ ID NO: 1933079 - RNA, 19 nt, Artificial Sequence
  Description of Artificial Sequence: Synthetic oligonucleotide
aagaacaaauaccggaggu

SEQ ID NO: 1933080 - RNA, 19 nt, Artificial Sequence
  Description of Artificial Sequence: Synthetic oligonucleotide
uguauagugagaucagaca

SEQ ID NO: 1933081 - RNA, 19 nt, Artificial Sequence
  Description of Artificial Sequence: Synthetic oligonucleotide
aaucgguggcaucaaauug

SEQ ID NO: 1933082 - RNA, 19 nt, Artificial Sequence
  Description of Artificial Sequence: Synthetic oligonucleotide
guuaucgucaauauaauga

SEQ ID NO: 1933083 - RNA, 19 nt, Artificial Sequence
  Description of Artificial Sequence: Synthetic oligonucleotide
uuuucuaccuaacaucuau

SEQ ID NO: 1933084 - RNA, 19 nt, Artificial Sequence
  Description of Artificial Sequence: Synthetic oligonucleotide
guauagugagaucagacac

SEQ ID NO: 1933085 - RNA, 19 nt, Artificial Sequence
  Description of Artificial Sequence: Synthetic oligonucleotide
uucaaaugacccuguauag

SEQ ID NO: 1933086 - RNA, 19 nt, Artificial Sequence
  Description of Artificial Sequence: Synthetic oligonucleotide
uuuguagcuagcuauuuaa

SEQ ID NO: 1933087 - RNA, 19 nt, Artificial Sequence
  Description of Artificial Sequence: Synthetic oligonucleotide
uacuaugaggagcacagca

SEQ ID NO: 1933088 - RNA, 19 nt, Artificial Sequence
  Description of Artificial Sequence: Synthetic oligonucleotide
aauugacuaagccucugca

SEQ ID NO: 1933089 - RNA, 19 nt, Artificial Sequence
  Description of Artificial Sequence: Synthetic oligonucleotide
agugagaucagacacuuau

SEQ ID NO: 1933090 - RNA, 19 nt, Artificial Sequence
  Description of Artificial Sequence: Synthetic oligonucleotide
acaguuaucgucaauauaa

SEQ ID NO: 1933091 - RNA, 19 nt, Artificial Sequence
  Description of Artificial Sequence: Synthetic oligonucleotide
uguacauaauuucucacuu

SEQ ID NO: 1933092 - RNA, 19 nt, Artificial Sequence
  Description of Artificial Sequence: Synthetic oligonucleotide
acuaguuggcuauagacaa

SEQ ID NO: 1933093 - RNA, 19 nt, Artificial Sequence
  Description of Artificial Sequence: Synthetic oligonucleotide
uguguucaguuuuagccag

SEQ ID NO: 1933094 - RNA, 19 nt, Artificial Sequence
  Description of Artificial Sequence: Synthetic oligonucleotide
acacuuauuuuacuucagg

SEQ ID NO: 1933095 - RNA, 19 nt, Artificial Sequence
  Description of Artificial Sequence: Synthetic oligonucleotide
aguagcguacuuuggcccc

SEQ ID NO: 1933096 - RNA, 19 nt, Artificial Sequence
  Description of Artificial Sequence: Synthetic oligonucleotide
ugauucaauguacauaauu

SEQ ID NO: 1933097 - RNA, 19 nt, Artificial Sequence
  Description of Artificial Sequence: Synthetic oligonucleotide
uuuaugucccuugaguuca

SEQ ID NO: 1933098 - RNA, 19 nt, Artificial Sequence
  Description of Artificial Sequence: Synthetic oligonucleotide
ugagaucagacacuuauuu

SEQ ID NO: 1933099 - RNA, 19 nt, Artificial Sequence
  Description of Artificial Sequence: Synthetic oligonucleotide
uucuagagaaggcagugcu

SEQ ID NO: 1933100 - RNA, 19 nt, Artificial Sequence
  Description of Artificial Sequence: Synthetic oligonucleotide
auauaaugacacuugcaca

SEQ ID NO: 1933101 - RNA, 19 nt, Artificial Sequence
  Description of Artificial Sequence: Synthetic oligonucleotide
guacuuuggccccacaccg

SEQ ID NO: 1933102 - RNA, 19 nt, Artificial Sequence
  Description of Artificial Sequence: Synthetic oligonucleotide
uauagugagaucagacacu

SEQ ID NO: 1933103 - RNA, 19 nt, Artificial Sequence
  Description of Artificial Sequence: Synthetic oligonucleotide
aaaacuaguuggcuauaga

SEQ ID NO: 1933104 - RNA, 19 nt, Artificial Sequence
  Description of Artificial Sequence: Synthetic oligonucleotide
ucgcaaagcaaugaugccg

SEQ ID NO: 1933105 - RNA, 19 nt, Artificial Sequence
  Description of Artificial Sequence: Synthetic oligonucleotide
aaugucgcaaagcaaugau

SEQ ID NO: 1933106 - RNA, 19 nt, Artificial Sequence
  Description of Artificial Sequence: Synthetic oligonucleotide
uaaaagaaggacgaauuaa

SEQ ID NO: 1933107 - RNA, 19 nt, Artificial Sequence
  Description of Artificial Sequence: Synthetic oligonucleotide
augauacaagaaucggugg

SEQ ID NO: 1933108 - RNA, 19 nt, Artificial Sequence
  Description of Artificial Sequence: Synthetic oligonucleotide
aucgguggcaucaaauugc

SEQ ID NO: 1933109 - RNA, 19 nt, Artificial Sequence
  Description of Artificial Sequence: Synthetic oligonucleotide
ccuguguucaguuuuagcc

SEQ ID NO: 1933110 - RNA, 19 nt, Artificial Sequence
  Description of Artificial Sequence: Synthetic oligonucleotide
ucaguuuuagccagcagua

SEQ ID NO: 1933111 - RNA, 19 nt, Artificial Sequence
  Description of Artificial Sequence: Synthetic oligonucleotide
aaugcaggaguuugaacaa

SEQ ID NO: 1933112 - RNA, 19 nt, Artificial Sequence
  Description of Artificial Sequence: Synthetic oligonucleotide
ugaucgaauccaaugucca

SEQ ID NO: 1933113 - RNA, 19 nt, Artificial Sequence
  Description of Artificial Sequence: Synthetic oligonucleotide
uuuuaugucccuugaguuc

SEQ ID NO: 1933114 - RNA, 19 nt, Artificial Sequence
  Description of Artificial Sequence: Synthetic oligonucleotide
agacacuuauuuuacuuca

SEQ ID NO: 1933115 - RNA, 19 nt, Artificial Sequence
  Description of Artificial Sequence: Synthetic oligonucleotide
acuuauuuuacuucagguu

SEQ ID NO: 1933116 - RNA, 19 nt, Artificial Sequence
  Description of Artificial Sequence: Synthetic oligonucleotide
uaaguaacuuuagugaguc

SEQ ID NO: 1933117 - RNA, 19 nt, Artificial Sequence
  Description of Artificial Sequence: Synthetic oligonucleotide
uauauaugucaauuaggaa

SEQ ID NO: 1933118 - RNA, 19 nt, Artificial Sequence
  Description of Artificial Sequence: Synthetic oligonucleotide
ucuaauaggcuuuuccgua

SEQ ID NO: 1933119 - RNA, 19 nt, Artificial Sequence
  Description of Artificial Sequence: Synthetic oligonucleotide
aguuaucgucaauauaaug

SEQ ID NO: 1933120 - RNA, 19 nt, Artificial Sequence
  Description of Artificial Sequence: Synthetic oligonucleotide
aacuaguuggcuauagaca

SEQ ID NO: 1933121 - RNA, 19 nt, Artificial Sequence
  Description of Artificial Sequence: Synthetic oligonucleotide
aaguguguacuaugaggag

SEQ ID NO: 1933122 - RNA, 19 nt, Artificial Sequence
  Description of Artificial Sequence: Synthetic oligonucleotide
augugaucgaauccaaugu

SEQ ID NO: 1933123 - RNA, 19 nt, Artificial Sequence
  Description of Artificial Sequence: Synthetic oligonucleotide
cuguauagugagaucagac

SEQ ID NO: 1933124 - RNA, 19 nt, Artificial Sequence
  Description of Artificial Sequence: Synthetic oligonucleotide
gucuuaaagacuuggacaa

SEQ ID NO: 1933125 - RNA, 19 nt, Artificial Sequence
  Description of Artificial Sequence: Synthetic oligonucleotide
aguuuuagccagcaguagu

SEQ ID NO: 1933126 - RNA, 19 nt, Artificial Sequence
  Description of Artificial Sequence: Synthetic oligonucleotide
uaagccucugcaaacaguu

SEQ ID NO: 1933127 - RNA, 19 nt, Artificial Sequence
  Description of Artificial Sequence: Synthetic oligonucleotide
uaaugacacuugcacagug

SEQ ID NO: 1933128 - RNA, 19 nt, Artificial Sequence
  Description of Artificial Sequence: Synthetic oligonucleotide
ugugaucgaauccaauguc

SEQ ID NO: 1933129 - RNA, 19 nt, Artificial Sequence
  Description of Artificial Sequence: Synthetic oligonucleotide
uguagcuagcuauuuaaua

SEQ ID NO: 1933130 - RNA, 19 nt, Artificial Sequence
  Description of Artificial Sequence: Synthetic oligonucleotide
guuugaagcagguggggag

SEQ ID NO: 1933131 - RNA, 19 nt, Artificial Sequence
  Description of Artificial Sequence: Synthetic oligonucleotide
aauuaaccagcacuuucau

SEQ ID NO: 1933132 - RNA, 19 nt, Artificial Sequence
  Description of Artificial Sequence: Synthetic oligonucleotide
uuccauuucuaauaggcuu

SEQ ID NO: 1933133 - RNA, 19 nt, Artificial Sequence
  Description of Artificial Sequence: Synthetic oligonucleotide
cuauagacaagaaccugug

SEQ ID NO: 1933134 - RNA, 19 nt, Artificial Sequence
  Description of Artificial Sequence: Synthetic oligonucleotide
uucuaccuaacaucuauuc

SEQ ID NO: 1933135 - RNA, 19 nt, Artificial Sequence
  Description of Artificial Sequence: Synthetic oligonucleotide
uaucgucaauauaaugaca

SEQ ID NO: 1933136 - RNA, 19 nt, Artificial Sequence
  Description of Artificial Sequence: Synthetic oligonucleotide
uaggagguagcauuccuca

SEQ ID NO: 1933137 - RNA, 19 nt, Artificial Sequence
  Description of Artificial Sequence: Synthetic oligonucleotide
augucaauuaggaauauau

SEQ ID NO: 1933138 - RNA, 19 nt, Artificial Sequence
  Description of Artificial Sequence: Synthetic oligonucleotide
gaauuaaccagcacuuuca

SEQ ID NO: 1933139 - RNA, 19 nt, Artificial Sequence
  Description of Artificial Sequence: Synthetic oligonucleotide
uggggaguaaggauagucu

SEQ ID NO: 1933140 - RNA, 19 nt, Artificial Sequence
  Description of Artificial Sequence: Synthetic oligonucleotide
aauuagcuuuuaaucaaca

SEQ ID NO: 1933141 - RNA, 19 nt, Artificial Sequence
  Description of Artificial Sequence: Synthetic oligonucleotide
gaacaaauaccggagguuc

SEQ ID NO: 1933142 - RNA, 19 nt, Artificial Sequence
  Description of Artificial Sequence: Synthetic oligonucleotide
aaaaugucgcaaagcaaug

SEQ ID NO: 1933143 - RNA, 19 nt, Artificial Sequence
  Description of Artificial Sequence: Synthetic oligonucleotide
aagccaucaguucucaguu

SEQ ID NO: 1933144 - RNA, 19 nt, Artificial Sequence
  Description of Artificial Sequence: Synthetic oligonucleotide
accuguguucaguuuuagc

SEQ ID NO: 1933145 - RNA, 19 nt, Artificial Sequence
  Description of Artificial Sequence: Synthetic oligonucleotide
aagcuauauaugucaauua

SEQ ID NO: 1933146 - RNA, 19 nt, Artificial Sequence
  Description of Artificial Sequence: Synthetic oligonucleotide
guuggcuauagacaagaac

SEQ ID NO: 1933147 - RNA, 19 nt, Artificial Sequence
  Description of Artificial Sequence: Synthetic oligonucleotide
auuucaaaugacccuguau

SEQ ID NO: 1933148 - RNA, 19 nt, Artificial Sequence
  Description of Artificial Sequence: Synthetic oligonucleotide
cacaguagcguacuuuggc

SEQ ID NO: 1933149 - RNA, 19 nt, Artificial Sequence
  Description of Artificial Sequence: Synthetic oligonucleotide
uccauuucuaauaggcuuu

SEQ ID NO: 1933150 - RNA, 19 nt, Artificial Sequence
  Description of Artificial Sequence: Synthetic oligonucleotide
cauaauuucucacuucuaa

SEQ ID NO: 1933151 - RNA, 19 nt, Artificial Sequence
  Description of Artificial Sequence: Synthetic oligonucleotide
acaagaaucgguggcauca

SEQ ID NO: 1933152 - RNA, 19 nt, Artificial Sequence
  Description of Artificial Sequence: Synthetic oligonucleotide
auagucugguuccugauuu

SEQ ID NO: 1933153 - RNA, 19 nt, Artificial Sequence
  Description of Artificial Sequence: Synthetic oligonucleotide
uuuuguagcuagcuauuua

SEQ ID NO: 1933154 - RNA, 19 nt, Artificial Sequence
  Description of Artificial Sequence: Synthetic oligonucleotide
acuuaaaagaaggacgaau

SEQ ID NO: 1933155 - RNA, 19 nt, Artificial Sequence
  Description of Artificial Sequence: Synthetic oligonucleotide
uauagacaagaaccugugu

SEQ ID NO: 1933156 - RNA, 19 nt, Artificial Sequence
  Description of Artificial Sequence: Synthetic oligonucleotide
gcuauauaugucaauuagg

SEQ ID NO: 1933157 - RNA, 19 nt, Artificial Sequence
  Description of Artificial Sequence: Synthetic oligonucleotide
aaaugucgcaaagcaauga

SEQ ID NO: 1933158 - RNA, 19 nt, Artificial Sequence
  Description of Artificial Sequence: Synthetic oligonucleotide
uccuaaaaugucgcaaagc

SEQ ID NO: 1933159 - RNA, 19 nt, Artificial Sequence
  Description of Artificial Sequence: Synthetic oligonucleotide
gugacauucccacagguaa

SEQ ID NO: 1933160 - RNA, 19 nt, Artificial Sequence
  Description of Artificial Sequence: Synthetic oligonucleotide
gauacaagaaucgguggca

SEQ ID NO: 1933161 - RNA, 19 nt, Artificial Sequence
  Description of Artificial Sequence: Synthetic oligonucleotide
gaaggacgaauuaaccagc

SEQ ID NO: 1933162 - RNA, 19 nt, Artificial Sequence
  Description of Artificial Sequence: Synthetic oligonucleotide
agugcugucuuaaagacuu

SEQ ID NO: 1933163 - RNA, 19 nt, Artificial Sequence
  Description of Artificial Sequence: Synthetic oligonucleotide
uagcuagcuauuuaauauc

SEQ ID NO: 1933164 - RNA, 19 nt, Artificial Sequence
  Description of Artificial Sequence: Synthetic oligonucleotide
cagacacuuauuuuacuuc

SEQ ID NO: 1933165 - RNA, 19 nt, Artificial Sequence
  Description of Artificial Sequence: Synthetic oligonucleotide
aagacuuggacaagauugu

SEQ ID NO: 1933166 - RNA, 19 nt, Artificial Sequence
  Description of Artificial Sequence: Synthetic oligonucleotide
augucccuugaguucauag

SEQ ID NO: 1933167 - RNA, 19 nt, Artificial Sequence
  Description of Artificial Sequence: Synthetic oligonucleotide
uuuagccagcaguagucca

SEQ ID NO: 1933168 - RNA, 19 nt, Artificial Sequence
  Description of Artificial Sequence: Synthetic oligonucleotide
acuaagccucugcaaacag

SEQ ID NO: 1933169 - RNA, 19 nt, Artificial Sequence
  Description of Artificial Sequence: Synthetic oligonucleotide
ugcaugcagacccugggaa

SEQ ID NO: 1933170 - RNA, 19 nt, Artificial Sequence
  Description of Artificial Sequence: Synthetic oligonucleotide
ggaagaucacuuaagaaca

SEQ ID NO: 1933171 - RNA, 19 nt, Artificial Sequence
  Description of Artificial Sequence: Synthetic oligonucleotide
ugaggcguucauaaucuaa

SEQ ID NO: 1933172 - RNA, 19 nt, Artificial Sequence
  Description of Artificial Sequence: Synthetic oligonucleotide
cuuauuuuacuucagguuu

SEQ ID NO: 1933173 - RNA, 19 nt, Artificial Sequence
  Description of Artificial Sequence: Synthetic oligonucleotide
aucgaauccaauguccaug

SEQ ID NO: 1933174 - RNA, 19 nt, Artificial Sequence
  Description of Artificial Sequence: Synthetic oligonucleotide
gaauccaauguccaugaua

SEQ ID NO: 1933175 - RNA, 19 nt, Artificial Sequence
  Description of Artificial Sequence: Synthetic oligonucleotide
aaauaccggagguuccuaa

SEQ ID NO: 1933176 - RNA, 19 nt, Artificial Sequence
  Description of Artificial Sequence: Synthetic oligonucleotide
uuagugagucacuuuugaa

SEQ ID NO: 1933177 - RNA, 19 nt, Artificial Sequence
  Description of Artificial Sequence: Synthetic oligonucleotide
guagcuagcuauuuaauau

SEQ ID NO: 1933178 - RNA, 19 nt, Artificial Sequence
  Description of Artificial Sequence: Synthetic oligonucleotide
aggacgaauuaaccagcac

SEQ ID NO: 1933179 - RNA, 19 nt, Artificial Sequence
  Description of Artificial Sequence: Synthetic oligonucleotide
ugacuaagccucugcaaac

SEQ ID NO: 1933180 - RNA, 19 nt, Artificial Sequence
  Description of Artificial Sequence: Synthetic oligonucleotide
ugauuuguuuuaccagaaa

SEQ ID NO: 1933181 - RNA, 19 nt, Artificial Sequence
  Description of Artificial Sequence: Synthetic oligonucleotide
caguagcguacuuuggccc

SEQ ID NO: 1933182 - RNA, 19 nt, Artificial Sequence
  Description of Artificial Sequence: Synthetic oligonucleotide
gugaucgaauccaaugucc

SEQ ID NO: 1933183 - RNA, 19 nt, Artificial Sequence
  Description of Artificial Sequence: Synthetic oligonucleotide
gaggcguucauaaucuaac

SEQ ID NO: 1933184 - RNA, 19 nt, Artificial Sequence
  Description of Artificial Sequence: Synthetic oligonucleotide
caccgaaguagccacuucc

SEQ ID NO: 1933185 - RNA, 19 nt, Artificial Sequence
  Description of Artificial Sequence: Synthetic oligonucleotide
accggagguuccuaaaaug

SEQ ID NO: 1933186 - RNA, 19 nt, Artificial Sequence
  Description of Artificial Sequence: Synthetic oligonucleotide
uguuuguccauggagccuc

SEQ ID NO: 1933187 - RNA, 19 nt, Artificial Sequence
  Description of Artificial Sequence: Synthetic oligonucleotide
uuggacaagauugucuuua

SEQ ID NO: 1933188 - RNA, 19 nt, Artificial Sequence
  Description of Artificial Sequence: Synthetic oligonucleotide
aaugacacuugcacagugu

SEQ ID NO: 1933189 - RNA, 19 nt, Artificial Sequence
  Description of Artificial Sequence: Synthetic oligonucleotide
caaugcaugcagacccugg

SEQ ID NO: 1933190 - RNA, 19 nt, Artificial Sequence
  Description of Artificial Sequence: Synthetic oligonucleotide
aguuugaacaaugcaugca

SEQ ID NO: 1933191 - RNA, 19 nt, Artificial Sequence
  Description of Artificial Sequence: Synthetic oligonucleotide
aucuauucuccauuccuaa

SEQ ID NO: 1933192 - RNA, 19 nt, Artificial Sequence
  Description of Artificial Sequence: Synthetic oligonucleotide
gagguuccuaaaaugucgc

SEQ ID NO: 1933193 - RNA, 19 nt, Artificial Sequence
  Description of Artificial Sequence: Synthetic oligonucleotide
acuucuaacuaaguaacuu

SEQ ID NO: 1933194 - RNA, 19 nt, Artificial Sequence
  Description of Artificial Sequence: Synthetic oligonucleotide
ucgucaauauaaugacacu

SEQ ID NO: 1933195 - RNA, 19 nt, Artificial Sequence
  Description of Artificial Sequence: Synthetic oligonucleotide
ccuaaaaugucgcaaagca

SEQ ID NO: 1933196 - RNA, 19 nt, Artificial Sequence
  Description of Artificial Sequence: Synthetic oligonucleotide
guuccuaaaaugucgcaaa

SEQ ID NO: 1933197 - RNA, 19 nt, Artificial Sequence
  Description of Artificial Sequence: Synthetic oligonucleotide
auaggagguagcauuccuc

SEQ ID NO: 1933198 - RNA, 19 nt, Artificial Sequence
  Description of Artificial Sequence: Synthetic oligonucleotide
aggauagucugguuccuga

SEQ ID NO: 1933199 - RNA, 19 nt, Artificial Sequence
  Description of Artificial Sequence: Synthetic oligonucleotide
uuguagcuagcuauuuaau

SEQ ID NO: 1933200 - RNA, 19 nt, Artificial Sequence
  Description of Artificial Sequence: Synthetic oligonucleotide
cuagcuauuuaauaucagu

SEQ ID NO: 1933201 - RNA, 19 nt, Artificial Sequence
  Description of Artificial Sequence: Synthetic oligonucleotide
gaucacuuaagaacaaaua

SEQ ID NO: 1933202 - RNA, 19 nt, Artificial Sequence
  Description of Artificial Sequence: Synthetic oligonucleotide
agcaaugaugccguugucu

SEQ ID NO: 1933203 - RNA, 19 nt, Artificial Sequence
  Description of Artificial Sequence: Synthetic oligonucleotide
guuuuagccagcaguaguc

SEQ ID NO: 1933204 - RNA, 19 nt, Artificial Sequence
  Description of Artificial Sequence: Synthetic oligonucleotide
uuugaagcagguggggagu

SEQ ID NO: 1933205 - RNA, 19 nt, Artificial Sequence
  Description of Artificial Sequence: Synthetic oligonucleotide
agcaguaguccacacuuaa

SEQ ID NO: 1933206 - RNA, 19 nt, Artificial Sequence
  Description of Artificial Sequence: Synthetic oligonucleotide
guacauaauuucucacuuc

SEQ ID NO: 1933207 - RNA, 19 nt, Artificial Sequence
  Description of Artificial Sequence: Synthetic oligonucleotide
aaguaacuuuagugaguca

SEQ ID NO: 1933208 - RNA, 19 nt, Artificial Sequence
  Description of Artificial Sequence: Synthetic oligonucleotide
agaucacuuaagaacaaau

SEQ ID NO: 1933209 - RNA, 19 nt, Artificial Sequence
  Description of Artificial Sequence: Synthetic oligonucleotide
aauaggcuuuuccguaauu

SEQ ID NO: 1933210 - RNA, 19 nt, Artificial Sequence
  Description of Artificial Sequence: Synthetic oligonucleotide
caugcagacccugggaagc

SEQ ID NO: 1933211 - RNA, 19 nt, Artificial Sequence
  Description of Artificial Sequence: Synthetic oligonucleotide
caguaguccacacuuaaaa

SEQ ID NO: 1933212 - RNA, 19 nt, Artificial Sequence
  Description of Artificial Sequence: Synthetic oligonucleotide
ucgguggcaucaaauugcu

SEQ ID NO: 1933213 - RNA, 19 nt, Artificial Sequence
  Description of Artificial Sequence: Synthetic oligonucleotide
uuucuaccuaacaucuauu

SEQ ID NO: 1933214 - RNA, 19 nt, Artificial Sequence
  Description of Artificial Sequence: Synthetic oligonucleotide
agcuagcuauuuaauauca

SEQ ID NO: 1933215 - RNA, 19 nt, Artificial Sequence
  Description of Artificial Sequence: Synthetic oligonucleotide
uaaccagcacuuucauucu

SEQ ID NO: 1933216 - RNA, 19 nt, Artificial Sequence
  Description of Artificial Sequence: Synthetic oligonucleotide
ucucaguucucuuggugau

SEQ ID NO: 1933217 - RNA, 19 nt, Artificial Sequence
  Description of Artificial Sequence: Synthetic oligonucleotide
uucucacuucuaacuaagu

SEQ ID NO: 1933218 - RNA, 19 nt, Artificial Sequence
  Description of Artificial Sequence: Synthetic oligonucleotide
caauguccaugauacaaga

SEQ ID NO: 1933219 - RNA, 19 nt, Artificial Sequence
  Description of Artificial Sequence: Synthetic oligonucleotide
gagguagcauuccucaaaa

SEQ ID NO: 1933220 - RNA, 19 nt, Artificial Sequence
  Description of Artificial Sequence: Synthetic oligonucleotide
uggugauucuguagcauuu

SEQ ID NO: 1933221 - RNA, 19 nt, Artificial Sequence
  Description of Artificial Sequence: Synthetic oligonucleotide
aucagacacuuauuuuacu

SEQ ID NO: 1933222 - RNA, 19 nt, Artificial Sequence
  Description of Artificial Sequence: Synthetic oligonucleotide
agcauuuuguagcuagcua

SEQ ID NO: 1933223 - RNA, 19 nt, Artificial Sequence
  Description of Artificial Sequence: Synthetic oligonucleotide
uaauaggcuuuuccguaau

SEQ ID NO: 1933224 - RNA, 19 nt, Artificial Sequence
  Description of Artificial Sequence: Synthetic oligonucleotide
aaggacgaauuaaccagca

SEQ ID NO: 1933225 - RNA, 19 nt, Artificial Sequence
  Description of Artificial Sequence: Synthetic oligonucleotide
auagugagaucagacacuu

SEQ ID NO: 1933226 - RNA, 19 nt, Artificial Sequence
  Description of Artificial Sequence: Synthetic oligonucleotide
acaagaaccuguguucagu

SEQ ID NO: 1933227 - RNA, 19 nt, Artificial Sequence
  Description of Artificial Sequence: Synthetic oligonucleotide
ucauaggagguagcauucc

SEQ ID NO: 1933228 - RNA, 19 nt, Artificial Sequence
  Description of Artificial Sequence: Synthetic oligonucleotide
uccaugugaucgaauccaa

SEQ ID NO: 1933229 - RNA, 19 nt, Artificial Sequence
  Description of Artificial Sequence: Synthetic oligonucleotide
ggggaguaaggauagucug

SEQ ID NO: 1933230 - RNA, 19 nt, Artificial Sequence
  Description of Artificial Sequence: Synthetic oligonucleotide
cauggagccuccugggaug

SEQ ID NO: 1933231 - RNA, 19 nt, Artificial Sequence
  Description of Artificial Sequence: Synthetic oligonucleotide
ccaauguccaugauacaag

SEQ ID NO: 1933232 - RNA, 19 nt, Artificial Sequence
  Description of Artificial Sequence: Synthetic oligonucleotide
uaacuuuagugagucacuu

SEQ ID NO: 1933233 - RNA, 19 nt, Artificial Sequence
  Description of Artificial Sequence: Synthetic oligonucleotide
gucgcaaagcaaugaugcc

SEQ ID NO: 1933234 - RNA, 19 nt, Artificial Sequence
  Description of Artificial Sequence: Synthetic oligonucleotide
aaggauagucugguuccug

SEQ ID NO: 1933235 - RNA, 19 nt, Artificial Sequence
  Description of Artificial Sequence: Synthetic oligonucleotide
uaccggagguuccuaaaau

SEQ ID NO: 1933236 - RNA, 19 nt, Artificial Sequence
  Description of Artificial Sequence: Synthetic oligonucleotide
aagaaucgguggcaucaaa

SEQ ID NO: 1933237 - RNA, 19 nt, Artificial Sequence
  Description of Artificial Sequence: Synthetic oligonucleotide
agaacaaauaccggagguu

SEQ ID NO: 1933238 - RNA, 19 nt, Artificial Sequence
  Description of Artificial Sequence: Synthetic oligonucleotide
auaccggagguuccuaaaa

SEQ ID NO: 1933239 - RNA, 19 nt, Artificial Sequence
  Description of Artificial Sequence: Synthetic oligonucleotide
ggacgaauuaaccagcacu

SEQ ID NO: 1933240 - RNA, 19 nt, Artificial Sequence
  Description of Artificial Sequence: Synthetic oligonucleotide
cuaauaggcuuuuccguaa

SEQ ID NO: 1933241 - RNA, 19 nt, Artificial Sequence
  Description of Artificial Sequence: Synthetic oligonucleotide
auaaugacacuugcacagu

SEQ ID NO: 1933242 - RNA, 19 nt, Artificial Sequence
  Description of Artificial Sequence: Synthetic oligonucleotide
cuaaguaacuuuagugagu

SEQ ID NO: 1933243 - RNA, 19 nt, Artificial Sequence
  Description of Artificial Sequence: Synthetic oligonucleotide
acaccgaaguagccacuuc

SEQ ID NO: 1933244 - RNA, 19 nt, Artificial Sequence
  Description of Artificial Sequence: Synthetic oligonucleotide
caggaguuugaacaaugca

SEQ ID NO: 1933245 - RNA, 19 nt, Artificial Sequence
  Description of Artificial Sequence: Synthetic oligonucleotide
ugcaaacaguuaucgucaa

SEQ ID NO: 1933246 - RNA, 19 nt, Artificial Sequence
  Description of Artificial Sequence: Synthetic oligonucleotide
caggaagaucacuuaagaa

SEQ ID NO: 1933247 - RNA, 19 nt, Artificial Sequence
  Description of Artificial Sequence: Synthetic oligonucleotide
gacuaagccucugcaaaca

SEQ ID NO: 1933248 - RNA, 19 nt, Artificial Sequence
  Description of Artificial Sequence: Synthetic oligonucleotide
agaaucgguggcaucaaau

SEQ ID NO: 1933249 - RNA, 19 nt, Artificial Sequence
  Description of Artificial Sequence: Synthetic oligonucleotide
acuuuggccccacaccgaa

SEQ ID NO: 1933250 - RNA, 19 nt, Artificial Sequence
  Description of Artificial Sequence: Synthetic oligonucleotide
augucgcaaagcaaugaug

SEQ ID NO: 1933251 - RNA, 19 nt, Artificial Sequence
  Description of Artificial Sequence: Synthetic oligonucleotide
guagcauuuuguagcuagc

SEQ ID NO: 1933252 - RNA, 19 nt, Artificial Sequence
  Description of Artificial Sequence: Synthetic oligonucleotide
ccuguagccacuucugaug

SEQ ID NO: 1933253 - RNA, 19 nt, Artificial Sequence
  Description of Artificial Sequence: Synthetic oligonucleotide
uggccccacaccgaaguag

SEQ ID NO: 1933254 - RNA, 19 nt, Artificial Sequence
  Description of Artificial Sequence: Synthetic oligonucleotide
gaaucgguggcaucaaauu

SEQ ID NO: 1933255 - RNA, 19 nt, Artificial Sequence
  Description of Artificial Sequence: Synthetic oligonucleotide
agguuccuaaaaugucgca

SEQ ID NO: 1933256 - RNA, 19 nt, Artificial Sequence
  Description of Artificial Sequence: Synthetic oligonucleotide
cauuccuaagccaucaguu

SEQ ID NO: 1933257 - RNA, 19 nt, Artificial Sequence
  Description of Artificial Sequence: Synthetic oligonucleotide
acaagcucuaggcccucca

SEQ ID NO: 1933258 - RNA, 19 nt, Artificial Sequence
  Description of Artificial Sequence: Synthetic oligonucleotide
gacgaauuaaccagcacuu

SEQ ID NO: 1933259 - RNA, 19 nt, Artificial Sequence
  Description of Artificial Sequence: Synthetic oligonucleotide
auucccacagguaauuauu

SEQ ID NO: 1933260 - RNA, 19 nt, Artificial Sequence
  Description of Artificial Sequence: Synthetic oligonucleotide
augccguugucugugacau

SEQ ID NO: 1933261 - RNA, 19 nt, Artificial Sequence
  Description of Artificial Sequence: Synthetic oligonucleotide
ugaugccguugucugugac

SEQ ID NO: 1933262 - RNA, 19 nt, Artificial Sequence
  Description of Artificial Sequence: Synthetic oligonucleotide
caguuuuagccagcaguag

SEQ ID NO: 1933263 - RNA, 19 nt, Artificial Sequence
  Description of Artificial Sequence: Synthetic oligonucleotide
gaagaucacuuaagaacaa

SEQ ID NO: 1933264 - RNA, 19 nt, Artificial Sequence
  Description of Artificial Sequence: Synthetic oligonucleotide
gacuuggacaagauugucu

SEQ ID NO: 1933265 - RNA, 19 nt, Artificial Sequence
  Description of Artificial Sequence: Synthetic oligonucleotide
guugucugugacauuccca

SEQ ID NO: 1933266 - RNA, 19 nt, Artificial Sequence
  Description of Artificial Sequence: Synthetic oligonucleotide
cucuaggcccuccauguga

SEQ ID NO: 1933267 - RNA, 19 nt, Artificial Sequence
  Description of Artificial Sequence: Synthetic oligonucleotide
cguacuuuggccccacacc

SEQ ID NO: 1933268 - RNA, 19 nt, Artificial Sequence
  Description of Artificial Sequence: Synthetic oligonucleotide
cgaauuaaccagcacuuuc

SEQ ID NO: 1933269 - RNA, 19 nt, Artificial Sequence
  Description of Artificial Sequence: Synthetic oligonucleotide
gcuagcuauuuaauaucag

SEQ ID NO: 1933270 - RNA, 19 nt, Artificial Sequence
  Description of Artificial Sequence: Synthetic oligonucleotide
ggcuauagacaagaaccug

SEQ ID NO: 1933271 - RNA, 19 nt, Artificial Sequence
  Description of Artificial Sequence: Synthetic oligonucleotide
ggagguagcauuccucaaa

SEQ ID NO: 1933272 - RNA, 19 nt, Artificial Sequence
  Description of Artificial Sequence: Synthetic oligonucleotide
auggccacaguagcguacu

SEQ ID NO: 1933273 - RNA, 19 nt, Artificial Sequence
  Description of Artificial Sequence: Synthetic oligonucleotide
accgaaguagccacuucca

SEQ ID NO: 1933274 - RNA, 19 nt, Artificial Sequence
  Description of Artificial Sequence: Synthetic oligonucleotide
guguacuaugaggagcaca

SEQ ID NO: 1933275 - RNA, 19 nt, Artificial Sequence
  Description of Artificial Sequence: Synthetic oligonucleotide
gguuccuaaaaugucgcaa

SEQ ID NO: 1933276 - RNA, 19 nt, Artificial Sequence
  Description of Artificial Sequence: Synthetic oligonucleotide
guaacuuuagugagucacu

SEQ ID NO: 1933277 - RNA, 19 nt, Artificial Sequence
  Description of Artificial Sequence: Synthetic oligonucleotide
cuugaguucauaggaggua

SEQ ID NO: 1933278 - RNA, 19 nt, Artificial Sequence
  Description of Artificial Sequence: Synthetic oligonucleotide
gccguugucugugacauuc

SEQ ID NO: 1933279 - RNA, 19 nt, Artificial Sequence
  Description of Artificial Sequence: Synthetic oligonucleotide
aggagguagcauuccucaa

SEQ ID NO: 1933280 - RNA, 19 nt, Artificial Sequence
  Description of Artificial Sequence: Synthetic oligonucleotide
gaucgaauccaauguccau

SEQ ID NO: 1933281 - RNA, 19 nt, Artificial Sequence
  Description of Artificial Sequence: Synthetic oligonucleotide
uguguacuaugaggagcac

SEQ ID NO: 1933282 - RNA, 19 nt, Artificial Sequence
  Description of Artificial Sequence: Synthetic oligonucleotide
cccacaccgaaguagccac

SEQ ID NO: 1933283 - RNA, 19 nt, Artificial Sequence
  Description of Artificial Sequence: Synthetic oligonucleotide
cccugaggcguucauaauc

SEQ ID NO: 1933284 - RNA, 19 nt, Artificial Sequence
  Description of Artificial Sequence: Synthetic oligonucleotide
cauaggagguagcauuccu

SEQ ID NO: 1933285 - RNA, 19 nt, Artificial Sequence
  Description of Artificial Sequence: Synthetic oligonucleotide
cuaagccucugcaaacagu

SEQ ID NO: 1933286 - RNA, 19 nt, Artificial Sequence
  Description of Artificial Sequence: Synthetic oligonucleotide
acgaauuaaccagcacuuu

SEQ ID NO: 1933287 - RNA, 19 nt, Artificial Sequence
  Description of Artificial Sequence: Synthetic oligonucleotide
gcguacuuuggccccacac

SEQ ID NO: 1933288 - RNA, 19 nt, Artificial Sequence
  Description of Artificial Sequence: Synthetic oligonucleotide
ggaguaaggauagucuggu

SEQ ID NO: 1933289 - RNA, 19 nt, Artificial Sequence
  Description of Artificial Sequence: Synthetic oligonucleotide
gcugucuuaaagacuugga

SEQ ID NO: 1933290 - RNA, 19 nt, Artificial Sequence
  Description of Artificial Sequence: Synthetic oligonucleotide
ugcccugucagggcccaac

SEQ ID NO: 1933291 - RNA, 19 nt, Artificial Sequence
  Description of Artificial Sequence: Synthetic oligonucleotide
ccaugauacaagaaucggu

SEQ ID NO: 1933292 - RNA, 19 nt, Artificial Sequence
  Description of Artificial Sequence: Synthetic oligonucleotide
guuuguccauggagccucc

SEQ ID NO: 1933293 - RNA, 19 nt, Artificial Sequence
  Description of Artificial Sequence: Synthetic oligonucleotide
cguucauaaucuaacuuua

SEQ ID NO: 1933294 - RNA, 19 nt, Artificial Sequence
  Description of Artificial Sequence: Synthetic oligonucleotide
ggccccacaccgaaguagc

SEQ ID NO: 1933295 - RNA, 19 nt, Artificial Sequence
  Description of Artificial Sequence: Synthetic oligonucleotide
caagaaccuguguucaguu

SEQ ID NO: 1933296 - RNA, 19 nt, Artificial Sequence
  Description of Artificial Sequence: Synthetic oligonucleotide
cacagguaauuauuuccau

SEQ ID NO: 1933297 - RNA, 19 nt, Artificial Sequence
  Description of Artificial Sequence: Synthetic oligonucleotide
ccugaggcguucauaaucu

SEQ ID NO: 1933298 - RNA, 19 nt, Artificial Sequence
  Description of Artificial Sequence: Synthetic oligonucleotide
cggagguuccuaaaauguc

SEQ ID NO: 1933299 - RNA, 19 nt, Artificial Sequence
  Description of Artificial Sequence: Synthetic oligonucleotide
ggaagcuauauaugucaau

SEQ ID NO: 1933300 - RNA, 19 nt, Artificial Sequence
  Description of Artificial Sequence: Synthetic oligonucleotide
guagcguacuuuggcccca

SEQ ID NO: 1933301 - RNA, 19 nt, Artificial Sequence
  Description of Artificial Sequence: Synthetic oligonucleotide
gggaagcuauauaugucaa

SEQ ID NO: 1933302 - RNA, 19 nt, Artificial Sequence
  Description of Artificial Sequence: Synthetic oligonucleotide
agcguacuuuggccccaca

SEQ ID NO: 1933303 - RNA, 19 nt, Artificial Sequence
  Description of Artificial Sequence: Synthetic oligonucleotide
caagaaucgguggcaucaa

SEQ ID NO: 1933304 - RNA, 19 nt, Artificial Sequence
  Description of Artificial Sequence: Synthetic oligonucleotide
gcucuaggcccuccaugug

SEQ ID NO: 1933305 - RNA, 19 nt, Artificial Sequence
  Description of Artificial Sequence: Synthetic oligonucleotide
uagcguacuuuggccccac

SEQ ID NO: 1933306 - RNA, 19 nt, Artificial Sequence
  Description of Artificial Sequence: Synthetic oligonucleotide
gaguaaggauagucugguu

SEQ ID NO: 1933307 - RNA, 19 nt, Artificial Sequence
  Description of Artificial Sequence: Synthetic oligonucleotide
ccuguauagugagaucaga

SEQ ID NO: 1933308 - RNA, 19 nt, Artificial Sequence
  Description of Artificial Sequence: Synthetic oligonucleotide
guagccacuuccagaugcu

SEQ ID NO: 1933309 - RNA, 19 nt, Artificial Sequence
  Description of Artificial Sequence: Synthetic oligonucleotide
gcccaacaucccugaggcg

SEQ ID NO: 1933310 - RNA, 19 nt, Artificial Sequence
  Description of Artificial Sequence: Synthetic oligonucleotide
cagcaguaguccacacuua

SEQ ID NO: 1933311 - RNA, 19 nt, Artificial Sequence
  Description of Artificial Sequence: Synthetic oligonucleotide
caaauaccggagguuccua

SEQ ID NO: 1933312 - RNA, 19 nt, Artificial Sequence
  Description of Artificial Sequence: Synthetic oligonucleotide
uggccacaguagcguacuu

SEQ ID NO: 1933313 - RNA, 19 nt, Artificial Sequence
  Description of Artificial Sequence: Synthetic oligonucleotide
cugaggcguucauaaucua

SEQ ID NO: 1933314 - RNA, 19 nt, Artificial Sequence
  Description of Artificial Sequence: Synthetic oligonucleotide
ggauagucugguuccugau

SEQ ID NO: 1933315 - RNA, 19 nt, Artificial Sequence
  Description of Artificial Sequence: Synthetic oligonucleotide
gugagaucagacacuuauu

SEQ ID NO: 1933316 - RNA, 19 nt, Artificial Sequence
  Description of Artificial Sequence: Synthetic oligonucleotide
cgcaaagcaaugaugccgu

SEQ ID NO: 1933317 - RNA, 19 nt, Artificial Sequence
  Description of Artificial Sequence: Synthetic oligonucleotide
caucccugaggcguucaua

SEQ ID NO: 1933318 - RNA, 19 nt, Artificial Sequence
  Description of Artificial Sequence: Synthetic oligonucleotide
ugccguugucugugacauu

SEQ ID NO: 1933319 - RNA, 19 nt, Artificial Sequence
  Description of Artificial Sequence: Synthetic oligonucleotide
caagcucuaggcccuccau

SEQ ID NO: 1933320 - RNA, 19 nt, Artificial Sequence
  Description of Artificial Sequence: Synthetic oligonucleotide
gugauucaauguacauaau

SEQ ID NO: 1933321 - RNA, 19 nt, Artificial Sequence
  Description of Artificial Sequence: Synthetic oligonucleotide
gcaaacaguuaucgucaau

SEQ ID NO: 1933322 - RNA, 19 nt, Artificial Sequence
  Description of Artificial Sequence: Synthetic oligonucleotide
gcccugucagggcccaaca

SEQ ID NO: 1933323 - RNA, 19 nt, Artificial Sequence
  Description of Artificial Sequence: Synthetic oligonucleotide
ggugauucuguagcauuuu

SEQ ID NO: 1933324 - RNA, 19 nt, Artificial Sequence
  Description of Artificial Sequence: Synthetic oligonucleotide
cacaccgaaguagccacuu

SEQ ID NO: 1933325 - RNA, 19 nt, Artificial Sequence
  Description of Artificial Sequence: Synthetic oligonucleotide
ggccacaguagcguacuuu

SEQ ID NO: 1933326 - RNA, 19 nt, Artificial Sequence
  Description of Artificial Sequence: Synthetic oligonucleotide
ggcccuccaugugaucgaa

SEQ ID NO: 1933327 - RNA, 19 nt, Artificial Sequence
  Description of Artificial Sequence: Synthetic oligonucleotide
ccaacaucccugaggcguu

SEQ ID NO: 1933328 - RNA, 19 nt, Artificial Sequence
  Description of Artificial Sequence: Synthetic oligonucleotide
gcaaagcaaugaugccguu

SEQ ID NO: 1933329 - RNA, 19 nt, Artificial Sequence
  Description of Artificial Sequence: Synthetic oligonucleotide
ccauuucuaauaggcuuuu

SEQ ID NO: 1933330 - RNA, 19 nt, Artificial Sequence
  Description of Artificial Sequence: Synthetic oligonucleotide
cccugucagggcccaacau

SEQ ID NO: 1933331 - RNA, 19 nt, Artificial Sequence
  Description of Artificial Sequence: Synthetic oligonucleotide
cgaauccaauguccaugau

SEQ ID NO: 1933332 - RNA, 19 nt, Artificial Sequence
  Description of Artificial Sequence: Synthetic oligonucleotide
aauaucugggcuccaaacg

SEQ ID NO: 1933333 - RNA, 19 nt, Artificial Sequence
  Description of Artificial Sequence: Synthetic oligonucleotide
aacuucacaaggaagaagg

SEQ ID NO: 1933334 - RNA, 19 nt, Artificial Sequence
  Description of Artificial Sequence: Synthetic oligonucleotide
ucuuuuacaaucaugggau

SEQ ID NO: 1933335 - RNA, 19 nt, Artificial Sequence
  Description of Artificial Sequence: Synthetic oligonucleotide
uucuuuuacaaucauggga

SEQ ID NO: 1933336 - RNA, 19 nt, Artificial Sequence
  Description of Artificial Sequence: Synthetic oligonucleotide
guagcgagcaaucagcucg

SEQ ID NO: 1933337 - RNA, 19 nt, Artificial Sequence
  Description of Artificial Sequence: Synthetic oligonucleotide
auaucugggcuccaaacgc

SEQ ID NO: 1933338 - RNA, 19 nt, Artificial Sequence
  Description of Artificial Sequence: Synthetic oligonucleotide
uuuugcgacggccacaggg

SEQ ID NO: 1933339 - RNA, 19 nt, Artificial Sequence
  Description of Artificial Sequence: Synthetic oligonucleotide
ugaccauguacucacagag

SEQ ID NO: 1933340 - RNA, 19 nt, Artificial Sequence
  Description of Artificial Sequence: Synthetic oligonucleotide
ucauucuuucacaagccgg

SEQ ID NO: 1933341 - RNA, 19 nt, Artificial Sequence
  Description of Artificial Sequence: Synthetic oligonucleotide
gacaggaugauuuugcgac

SEQ ID NO: 1933342 - RNA, 19 nt, Artificial Sequence
  Description of Artificial Sequence: Synthetic oligonucleotide
aaucagcucguuccgaccg

SEQ ID NO: 1933343 - RNA, 19 nt, Artificial Sequence
  Description of Artificial Sequence: Synthetic oligonucleotide
ucugcaucauugucgaugg

SEQ ID NO: 1933344 - RNA, 19 nt, Artificial Sequence
  Description of Artificial Sequence: Synthetic oligonucleotide
agagaaagguuucuuuuac

SEQ ID NO: 1933345 - RNA, 19 nt, Artificial Sequence
  Description of Artificial Sequence: Synthetic oligonucleotide
guagauguggugcugagcc

SEQ ID NO: 1933346 - RNA, 19 nt, Artificial Sequence
  Description of Artificial Sequence: Synthetic oligonucleotide
uguucugagagaaagguuu

SEQ ID NO: 1933347 - RNA, 19 nt, Artificial Sequence
  Description of Artificial Sequence: Synthetic oligonucleotide
uucacaagccgguagaugu

SEQ ID NO: 1933348 - RNA, 19 nt, Artificial Sequence
  Description of Artificial Sequence: Synthetic oligonucleotide
guagcgaccguucucauag

SEQ ID NO: 1933349 - RNA, 19 nt, Artificial Sequence
  Description of Artificial Sequence: Synthetic oligonucleotide
uuucuuuuacaaucauggg

SEQ ID NO: 1933350 - RNA, 19 nt, Artificial Sequence
  Description of Artificial Sequence: Synthetic oligonucleotide
auacgguacagguagcgac

SEQ ID NO: 1933351 - RNA, 19 nt, Artificial Sequence
  Description of Artificial Sequence: Synthetic oligonucleotide
cuuucgacgggcaagcacc

SEQ ID NO: 1933352 - RNA, 19 nt, Artificial Sequence
  Description of Artificial Sequence: Synthetic oligonucleotide
ugauguagcgagcaaucag

SEQ ID NO: 1933353 - RNA, 19 nt, Artificial Sequence
  Description of Artificial Sequence: Synthetic oligonucleotide
auuuccuggaucugucccc

SEQ ID NO: 1933354 - RNA, 19 nt, Artificial Sequence
  Description of Artificial Sequence: Synthetic oligonucleotide
uggguaaauggccagugcc

SEQ ID NO: 1933355 - RNA, 19 nt, Artificial Sequence
  Description of Artificial Sequence: Synthetic oligonucleotide
aagccgguagauguggugc

SEQ ID NO: 1933356 - RNA, 19 nt, Artificial Sequence
  Description of Artificial Sequence: Synthetic oligonucleotide
ucucauagcgcgcauacuc

SEQ ID NO: 1933357 - RNA, 19 nt, Artificial Sequence
  Description of Artificial Sequence: Synthetic oligonucleotide
aaagcuccuugccaaaacu

SEQ ID NO: 1933358 - RNA, 19 nt, Artificial Sequence
  Description of Artificial Sequence: Synthetic oligonucleotide
gauguagcgagcaaucagc

SEQ ID NO: 1933359 - RNA, 19 nt, Artificial Sequence
  Description of Artificial Sequence: Synthetic oligonucleotide
ucauguauuucuccgguaa

SEQ ID NO: 1933360 - RNA, 19 nt, Artificial Sequence
  Description of Artificial Sequence: Synthetic oligonucleotide
ucucauucuuucacaagcc

SEQ ID NO: 1933361 - RNA, 19 nt, Artificial Sequence
  Description of Artificial Sequence: Synthetic oligonucleotide
uuuuacaaucaugggauug

SEQ ID NO: 1933362 - RNA, 19 nt, Artificial Sequence
  Description of Artificial Sequence: Synthetic oligonucleotide
gauguugcuccccucgggg

SEQ ID NO: 1933363 - RNA, 19 nt, Artificial Sequence
  Description of Artificial Sequence: Synthetic oligonucleotide
ucuuucacaagccgguaga

SEQ ID NO: 1933364 - RNA, 19 nt, Artificial Sequence
  Description of Artificial Sequence: Synthetic oligonucleotide
gacacuucgaagacguagg

SEQ ID NO: 1933365 - RNA, 19 nt, Artificial Sequence
  Description of Artificial Sequence: Synthetic oligonucleotide
uccgacaggaugauuuugc

SEQ ID NO: 1933366 - RNA, 19 nt, Artificial Sequence
  Description of Artificial Sequence: Synthetic oligonucleotide
ucguuggagguaauggugc

SEQ ID NO: 1933367 - RNA, 19 nt, Artificial Sequence
  Description of Artificial Sequence: Synthetic oligonucleotide
ugugcgaagcuugauguag

SEQ ID NO: 1933368 - RNA, 19 nt, Artificial Sequence
  Description of Artificial Sequence: Synthetic oligonucleotide
ugacacuucgaagacguag

SEQ ID NO: 1933369 - RNA, 19 nt, Artificial Sequence
  Description of Artificial Sequence: Synthetic oligonucleotide
uccgguaagugcuucagcu

SEQ ID NO: 1933370 - RNA, 19 nt, Artificial Sequence
  Description of Artificial Sequence: Synthetic oligonucleotide
agauguggugcugagcccc

SEQ ID NO: 1933371 - RNA, 19 nt, Artificial Sequence
  Description of Artificial Sequence: Synthetic oligonucleotide
ucgacgggcaagcaccugg

SEQ ID NO: 1933372 - RNA, 19 nt, Artificial Sequence
  Description of Artificial Sequence: Synthetic oligonucleotide
ucgauuggugaccaccugc

SEQ ID NO: 1933373 - RNA, 19 nt, Artificial Sequence
  Description of Artificial Sequence: Synthetic oligonucleotide
ugcaucauugucgaugggc

SEQ ID NO: 1933374 - RNA, 19 nt, Artificial Sequence
  Description of Artificial Sequence: Synthetic oligonucleotide
caaaacuugaguuuggccu

SEQ ID NO: 1933375 - RNA, 19 nt, Artificial Sequence
  Description of Artificial Sequence: Synthetic oligonucleotide
ugugugucucgauugguga

SEQ ID NO: 1933376 - RNA, 19 nt, Artificial Sequence
  Description of Artificial Sequence: Synthetic oligonucleotide
cucauucuuucacaagccg

SEQ ID NO: 1933377 - RNA, 19 nt, Artificial Sequence
  Description of Artificial Sequence: Synthetic oligonucleotide
gauuuugcgacggccacag

SEQ ID NO: 1933378 - RNA, 19 nt, Artificial Sequence
  Description of Artificial Sequence: Synthetic oligonucleotide
acacuucgaagacguaggc

SEQ ID NO: 1933379 - RNA, 19 nt, Artificial Sequence
  Description of Artificial Sequence: Synthetic oligonucleotide
guacaucuugccuucgucc

SEQ ID NO: 1933380 - RNA, 19 nt, Artificial Sequence
  Description of Artificial Sequence: Synthetic oligonucleotide
gaagacguaggcaaugcac

SEQ ID NO: 1933381 - RNA, 19 nt, Artificial Sequence
  Description of Artificial Sequence: Synthetic oligonucleotide
uacgguacagguagcgacc

SEQ ID NO: 1933382 - RNA, 19 nt, Artificial Sequence
  Description of Artificial Sequence: Synthetic oligonucleotide
gaugggcuuguccagugcc

SEQ ID NO: 1933383 - RNA, 19 nt, Artificial Sequence
  Description of Artificial Sequence: Synthetic oligonucleotide
aagacguaggcaaugcaca

SEQ ID NO: 1933384 - RNA, 19 nt, Artificial Sequence
  Description of Artificial Sequence: Synthetic oligonucleotide
uugccaaaacuugaguuug

SEQ ID NO: 1933385 - RNA, 19 nt, Artificial Sequence
  Description of Artificial Sequence: Synthetic oligonucleotide
cacaggguggguaaauggc

SEQ ID NO: 1933386 - RNA, 19 nt, Artificial Sequence
  Description of Artificial Sequence: Synthetic oligonucleotide
uccugugugucucgauugg

SEQ ID NO: 1933387 - RNA, 19 nt, Artificial Sequence
  Description of Artificial Sequence: Synthetic oligonucleotide
cuggcugacacuucgaaga

SEQ ID NO: 1933388 - RNA, 19 nt, Artificial Sequence
  Description of Artificial Sequence: Synthetic oligonucleotide
uaucugggcuccaaacgcc

SEQ ID NO: 1933389 - RNA, 19 nt, Artificial Sequence
  Description of Artificial Sequence: Synthetic oligonucleotide
agucgggagagcuccacuc

SEQ ID NO: 1933390 - RNA, 19 nt, Artificial Sequence
  Description of Artificial Sequence: Synthetic oligonucleotide
acaggaugauuuugcgacg

SEQ ID NO: 1933391 - RNA, 19 nt, Artificial Sequence
  Description of Artificial Sequence: Synthetic oligonucleotide
uuggaccggucccagagug

SEQ ID NO: 1933392 - RNA, 19 nt, Artificial Sequence
  Description of Artificial Sequence: Synthetic oligonucleotide
cucguuggagguaauggug

SEQ ID NO: 1933393 - RNA, 19 nt, Artificial Sequence
  Description of Artificial Sequence: Synthetic oligonucleotide
ugcgggucuucccugugcg

SEQ ID NO: 1933394 - RNA, 19 nt, Artificial Sequence
  Description of Artificial Sequence: Synthetic oligonucleotide
caaauagcuccuugaggcc

SEQ ID NO: 1933395 - RNA, 19 nt, Artificial Sequence
  Description of Artificial Sequence: Synthetic oligonucleotide
ucucgauuggugaccaccu

SEQ ID NO: 1933396 - RNA, 19 nt, Artificial Sequence
  Description of Artificial Sequence: Synthetic oligonucleotide
accuugguagaacagguaa

SEQ ID NO: 1933397 - RNA, 19 nt, Artificial Sequence
  Description of Artificial Sequence: Synthetic oligonucleotide
ugccaaaacuugaguuugg

SEQ ID NO: 1933398 - RNA, 19 nt, Artificial Sequence
  Description of Artificial Sequence: Synthetic oligonucleotide
ucguccgacaggaugauuu

SEQ ID NO: 1933399 - RNA, 19 nt, Artificial Sequence
  Description of Artificial Sequence: Synthetic oligonucleotide
caaucaugggauuguuccc

SEQ ID NO: 1933400 - RNA, 19 nt, Artificial Sequence
  Description of Artificial Sequence: Synthetic oligonucleotide
ucaauaucugggcuccaaa

SEQ ID NO: 1933401 - RNA, 19 nt, Artificial Sequence
  Description of Artificial Sequence: Synthetic oligonucleotide
cacucguuggagguaaugg

SEQ ID NO: 1933402 - RNA, 19 nt, Artificial Sequence
  Description of Artificial Sequence: Synthetic oligonucleotide
agacguaggcaaugcacag

SEQ ID NO: 1933403 - RNA, 19 nt, Artificial Sequence
  Description of Artificial Sequence: Synthetic oligonucleotide
gagauguugcuccccucgg

SEQ ID NO: 1933404 - RNA, 19 nt, Artificial Sequence
  Description of Artificial Sequence: Synthetic oligonucleotide
ugcucaauaucugggcucc

SEQ ID NO: 1933405 - RNA, 19 nt, Artificial Sequence
  Description of Artificial Sequence: Synthetic oligonucleotide
auagcgcgcauacucuguc

SEQ ID NO: 1933406 - RNA, 19 nt, Artificial Sequence
  Description of Artificial Sequence: Synthetic oligonucleotide
agcgaccguucucauagcg

SEQ ID NO: 1933407 - RNA, 19 nt, Artificial Sequence
  Description of Artificial Sequence: Synthetic oligonucleotide
aggaugauuuugcgacggc

SEQ ID NO: 1933408 - RNA, 19 nt, Artificial Sequence
  Description of Artificial Sequence: Synthetic oligonucleotide
gcuuucaucgucaauguug

SEQ ID NO: 1933409 - RNA, 19 nt, Artificial Sequence
  Description of Artificial Sequence: Synthetic oligonucleotide
cacccuuccucucuguagg

SEQ ID NO: 1933410 - RNA, 19 nt, Artificial Sequence
  Description of Artificial Sequence: Synthetic oligonucleotide
cauguauuucuccgguaag

SEQ ID NO: 1933411 - RNA, 19 nt, Artificial Sequence
  Description of Artificial Sequence: Synthetic oligonucleotide
acuucacaaggaagaaggc

SEQ ID NO: 1933412 - RNA, 19 nt, Artificial Sequence
  Description of Artificial Sequence: Synthetic oligonucleotide
guucucauagcgcgcauac

SEQ ID NO: 1933413 - RNA, 19 nt, Artificial Sequence
  Description of Artificial Sequence: Synthetic oligonucleotide
ugugucucgauuggugacc

SEQ ID NO: 1933414 - RNA, 19 nt, Artificial Sequence
  Description of Artificial Sequence: Synthetic oligonucleotide
ucauagcgcgcauacucug

SEQ ID NO: 1933415 - RNA, 19 nt, Artificial Sequence
  Description of Artificial Sequence: Synthetic oligonucleotide
uacaaucaugggauuguuc

SEQ ID NO: 1933416 - RNA, 19 nt, Artificial Sequence
  Description of Artificial Sequence: Synthetic oligonucleotide
aggagcgcccguuggaccg

SEQ ID NO: 1933417 - RNA, 19 nt, Artificial Sequence
  Description of Artificial Sequence: Synthetic oligonucleotide
aucaugggauuguucccgg

SEQ ID NO: 1933418 - RNA, 19 nt, Artificial Sequence
  Description of Artificial Sequence: Synthetic oligonucleotide
gagaaagguuucuuuuaca

SEQ ID NO: 1933419 - RNA, 19 nt, Artificial Sequence
  Description of Artificial Sequence: Synthetic oligonucleotide
ugggauuguucccggguug

SEQ ID NO: 1933420 - RNA, 19 nt, Artificial Sequence
  Description of Artificial Sequence: Synthetic oligonucleotide
aucucccgggcuuucgacg

SEQ ID NO: 1933421 - RNA, 19 nt, Artificial Sequence
  Description of Artificial Sequence: Synthetic oligonucleotide
uugguagaacagguaauga

SEQ ID NO: 1933422 - RNA, 19 nt, Artificial Sequence
  Description of Artificial Sequence: Synthetic oligonucleotide
uugccuucguccgacagga

SEQ ID NO: 1933423 - RNA, 19 nt, Artificial Sequence
  Description of Artificial Sequence: Synthetic oligonucleotide
cuucccugugcgaagcuug

SEQ ID NO: 1933424 - RNA, 19 nt, Artificial Sequence
  Description of Artificial Sequence: Synthetic oligonucleotide
acagcaaggucuccugugu

SEQ ID NO: 1933425 - RNA, 19 nt, Artificial Sequence
  Description of Artificial Sequence: Synthetic oligonucleotide
aacgcccucugcaucauug

SEQ ID NO: 1933426 - RNA, 19 nt, Artificial Sequence
  Description of Artificial Sequence: Synthetic oligonucleotide
ucacaagccgguagaugug

SEQ ID NO: 1933427 - RNA, 19 nt, Artificial Sequence
  Description of Artificial Sequence: Synthetic oligonucleotide
uccuugccaaaacuugagu

SEQ ID NO: 1933428 - RNA, 19 nt, Artificial Sequence
  Description of Artificial Sequence: Synthetic oligonucleotide
uuucacaagccgguagaug

SEQ ID NO: 1933429 - RNA, 19 nt, Artificial Sequence
  Description of Artificial Sequence: Synthetic oligonucleotide
aggcguugcuuucaucguc

SEQ ID NO: 1933430 - RNA, 19 nt, Artificial Sequence
  Description of Artificial Sequence: Synthetic oligonucleotide
caaggaagaaggcauuaga

SEQ ID NO: 1933431 - RNA, 19 nt, Artificial Sequence
  Description of Artificial Sequence: Synthetic oligonucleotide
cgaagcuugauguagcgag

SEQ ID NO: 1933432 - RNA, 19 nt, Artificial Sequence
  Description of Artificial Sequence: Synthetic oligonucleotide
ucgaagacguaggcaaugc

SEQ ID NO: 1933433 - RNA, 19 nt, Artificial Sequence
  Description of Artificial Sequence: Synthetic oligonucleotide
uugauguagcgagcaauca

SEQ ID NO: 1933434 - RNA, 19 nt, Artificial Sequence
  Description of Artificial Sequence: Synthetic oligonucleotide
ucguacuggcuggagaccc

SEQ ID NO: 1933435 - RNA, 19 nt, Artificial Sequence
  Description of Artificial Sequence: Synthetic oligonucleotide
cauagaaggcguugcuuuc

SEQ ID NO: 1933436 - RNA, 19 nt, Artificial Sequence
  Description of Artificial Sequence: Synthetic oligonucleotide
uacagguagcgaccguucu

SEQ ID NO: 1933437 - RNA, 19 nt, Artificial Sequence
  Description of Artificial Sequence: Synthetic oligonucleotide
acgggcaagcaccuggaug

SEQ ID NO: 1933438 - RNA, 19 nt, Artificial Sequence
  Description of Artificial Sequence: Synthetic oligonucleotide
aucgucaauguugguauug

SEQ ID NO: 1933439 - RNA, 19 nt, Artificial Sequence
  Description of Artificial Sequence: Synthetic oligonucleotide
ggaagcuuugcucaauauc

SEQ ID NO: 1933440 - RNA, 19 nt, Artificial Sequence
  Description of Artificial Sequence: Synthetic oligonucleotide
gucgggagagcuccacucg

SEQ ID NO: 1933441 - RNA, 19 nt, Artificial Sequence
  Description of Artificial Sequence: Synthetic oligonucleotide
ucgucaauguugguauuga

SEQ ID NO: 1933442 - RNA, 19 nt, Artificial Sequence
  Description of Artificial Sequence: Synthetic oligonucleotide
cauguucgcuggcugacac

SEQ ID NO: 1933443 - RNA, 19 nt, Artificial Sequence
  Description of Artificial Sequence: Synthetic oligonucleotide
agcggggaccgguggauac

SEQ ID NO: 1933444 - RNA, 19 nt, Artificial Sequence
  Description of Artificial Sequence: Synthetic oligonucleotide
agcuccacucguuggaggu

SEQ ID NO: 1933445 - RNA, 19 nt, Artificial Sequence
  Description of Artificial Sequence: Synthetic oligonucleotide
gucucgauuggugaccacc

SEQ ID NO: 1933446 - RNA, 19 nt, Artificial Sequence
  Description of Artificial Sequence: Synthetic oligonucleotide
caaagcuccuugccaaaac

SEQ ID NO: 1933447 - RNA, 19 nt, Artificial Sequence
  Description of Artificial Sequence: Synthetic oligonucleotide
ucuccgguaagugcuucag

SEQ ID NO: 1933448 - RNA, 19 nt, Artificial Sequence
  Description of Artificial Sequence: Synthetic oligonucleotide
gagcuccacucguuggagg

SEQ ID NO: 1933449 - RNA, 19 nt, Artificial Sequence
  Description of Artificial Sequence: Synthetic oligonucleotide
uagauguggugcugagccc

SEQ ID NO: 1933450 - RNA, 19 nt, Artificial Sequence
  Description of Artificial Sequence: Synthetic oligonucleotide
auacucugucucaacuuuc

SEQ ID NO: 1933451 - RNA, 19 nt, Artificial Sequence
  Description of Artificial Sequence: Synthetic oligonucleotide
cacaagccgguagaugugg

SEQ ID NO: 1933452 - RNA, 19 nt, Artificial Sequence
  Description of Artificial Sequence: Synthetic oligonucleotide
uccaaacgcccucugcauc

SEQ ID NO: 1933453 - RNA, 19 nt, Artificial Sequence
  Description of Artificial Sequence: Synthetic oligonucleotide
caggcucucguacuggcug

SEQ ID NO: 1933454 - RNA, 19 nt, Artificial Sequence
  Description of Artificial Sequence: Synthetic oligonucleotide
uggcugacacuucgaagac

SEQ ID NO: 1933455 - RNA, 19 nt, Artificial Sequence
  Description of Artificial Sequence: Synthetic oligonucleotide
ccaaaacuugaguuuggcc

SEQ ID NO: 1933456 - RNA, 19 nt, Artificial Sequence
  Description of Artificial Sequence: Synthetic oligonucleotide
gagagcuccacucguugga

SEQ ID NO: 1933457 - RNA, 19 nt, Artificial Sequence
  Description of Artificial Sequence: Synthetic oligonucleotide
uguucgcuggcugacacuu

SEQ ID NO: 1933458 - RNA, 19 nt, Artificial Sequence
  Description of Artificial Sequence: Synthetic oligonucleotide
aggcucucguacuggcugg

SEQ ID NO: 1933459 - RNA, 19 nt, Artificial Sequence
  Description of Artificial Sequence: Synthetic oligonucleotide
ucccagguccccauuuccu

SEQ ID NO: 1933460 - RNA, 19 nt, Artificial Sequence
  Description of Artificial Sequence: Synthetic oligonucleotide
agcuccuugccaaaacuug

SEQ ID NO: 1933461 - RNA, 19 nt, Artificial Sequence
  Description of Artificial Sequence: Synthetic oligonucleotide
cauucuuucacaagccggu

SEQ ID NO: 1933462 - RNA, 19 nt, Artificial Sequence
  Description of Artificial Sequence: Synthetic oligonucleotide
agaccuugguagaacaggu

SEQ ID NO: 1933463 - RNA, 19 nt, Artificial Sequence
  Description of Artificial Sequence: Synthetic oligonucleotide
ucgaugggcuuguccagug

SEQ ID NO: 1933464 - RNA, 19 nt, Artificial Sequence
  Description of Artificial Sequence: Synthetic oligonucleotide
uuucgacgggcaagcaccu

SEQ ID NO: 1933465 - RNA, 19 nt, Artificial Sequence
  Description of Artificial Sequence: Synthetic oligonucleotide
cuggauguggcuggagacc

SEQ ID NO: 1933466 - RNA, 19 nt, Artificial Sequence
  Description of Artificial Sequence: Synthetic oligonucleotide
uuccgaccguacaucuugc

SEQ ID NO: 1933467 - RNA, 19 nt, Artificial Sequence
  Description of Artificial Sequence: Synthetic oligonucleotide
uguggugcugagccccaug

SEQ ID NO: 1933468 - RNA, 19 nt, Artificial Sequence
  Description of Artificial Sequence: Synthetic oligonucleotide
ucguuccgaccguacaucu

SEQ ID NO: 1933469 - RNA, 19 nt, Artificial Sequence
  Description of Artificial Sequence: Synthetic oligonucleotide
ugauuuugcgacggccaca

SEQ ID NO: 1933470 - RNA, 19 nt, Artificial Sequence
  Description of Artificial Sequence: Synthetic oligonucleotide
uggauacgguacagguagc

SEQ ID NO: 1933471 - RNA, 19 nt, Artificial Sequence
  Description of Artificial Sequence: Synthetic oligonucleotide
auagaaggcguugcuuuca

SEQ ID NO: 1933472 - RNA, 19 nt, Artificial Sequence
  Description of Artificial Sequence: Synthetic oligonucleotide
ucgggagagcuccacucgu

SEQ ID NO: 1933473 - RNA, 19 nt, Artificial Sequence
  Description of Artificial Sequence: Synthetic oligonucleotide
cucggcuuggaggagcgcc

SEQ ID NO: 1933474 - RNA, 19 nt, Artificial Sequence
  Description of Artificial Sequence: Synthetic oligonucleotide
gauacgguacagguagcga

SEQ ID NO: 1933475 - RNA, 19 nt, Artificial Sequence
  Description of Artificial Sequence: Synthetic oligonucleotide
ggcgccaagucuuccagcc

SEQ ID NO: 1933476 - RNA, 19 nt, Artificial Sequence
  Description of Artificial Sequence: Synthetic oligonucleotide
ggauacgguacagguagcg

SEQ ID NO: 1933477 - RNA, 19 nt, Artificial Sequence
  Description of Artificial Sequence: Synthetic oligonucleotide
gaccguacaucuugccuuc

SEQ ID NO: 1933478 - RNA, 19 nt, Artificial Sequence
  Description of Artificial Sequence: Synthetic oligonucleotide
acgguacagguagcgaccg

SEQ ID NO: 1933479 - RNA, 19 nt, Artificial Sequence
  Description of Artificial Sequence: Synthetic oligonucleotide
uucccugugcgaagcuuga

SEQ ID NO: 1933480 - RNA, 19 nt, Artificial Sequence
  Description of Artificial Sequence: Synthetic oligonucleotide
ccaucguucuccaagucuc

SEQ ID NO: 1933481 - RNA, 19 nt, Artificial Sequence
  Description of Artificial Sequence: Synthetic oligonucleotide
uugcgacggccacagggug

SEQ ID NO: 1933482 - RNA, 19 nt, Artificial Sequence
  Description of Artificial Sequence: Synthetic oligonucleotide
gaucucccgggcuuucgac

SEQ ID NO: 1933483 - RNA, 19 nt, Artificial Sequence
  Description of Artificial Sequence: Synthetic oligonucleotide
uagaaggcguugcuuucau

SEQ ID NO: 1933484 - RNA, 19 nt, Artificial Sequence
  Description of Artificial Sequence: Synthetic oligonucleotide
uucuccgguaagugcuuca

SEQ ID NO: 1933485 - RNA, 19 nt, Artificial Sequence
  Description of Artificial Sequence: Synthetic oligonucleotide
ggaugauuuugcgacggcc

SEQ ID NO: 1933486 - RNA, 19 nt, Artificial Sequence
  Description of Artificial Sequence: Synthetic oligonucleotide
caagccgguagauguggug

SEQ ID NO: 1933487 - RNA, 19 nt, Artificial Sequence
  Description of Artificial Sequence: Synthetic oligonucleotide
uagcgagcaaucagcucgu

SEQ ID NO: 1933488 - RNA, 19 nt, Artificial Sequence
  Description of Artificial Sequence: Synthetic oligonucleotide
gugugucucgauuggugac

SEQ ID NO: 1933489 - RNA, 19 nt, Artificial Sequence
  Description of Artificial Sequence: Synthetic oligonucleotide
accggucccagagugcggg

SEQ ID NO: 1933490 - RNA, 19 nt, Artificial Sequence
  Description of Artificial Sequence: Synthetic oligonucleotide
gucucucauucuuucacaa

SEQ ID NO: 1933491 - RNA, 19 nt, Artificial Sequence
  Description of Artificial Sequence: Synthetic oligonucleotide
aucguucuccaagucucuc

SEQ ID NO: 1933492 - RNA, 19 nt, Artificial Sequence
  Description of Artificial Sequence: Synthetic oligonucleotide
gaggagcgcccguuggacc

SEQ ID NO: 1933493 - RNA, 19 nt, Artificial Sequence
  Description of Artificial Sequence: Synthetic oligonucleotide
cgaccguucucauagcgcg

SEQ ID NO: 1933494 - RNA, 19 nt, Artificial Sequence
  Description of Artificial Sequence: Synthetic oligonucleotide
ccacaggguggguaaaugg

SEQ ID NO: 1933495 - RNA, 19 nt, Artificial Sequence
  Description of Artificial Sequence: Synthetic oligonucleotide
aggcaaugcacagcaaggu

SEQ ID NO: 1933496 - RNA, 19 nt, Artificial Sequence
  Description of Artificial Sequence: Synthetic oligonucleotide
uccgaccguacaucuugcc

SEQ ID NO: 1933497 - RNA, 19 nt, Artificial Sequence
  Description of Artificial Sequence: Synthetic oligonucleotide
augggauuguucccggguu

SEQ ID NO: 1933498 - RNA, 19 nt, Artificial Sequence
  Description of Artificial Sequence: Synthetic oligonucleotide
agagcuccacucguuggag

SEQ ID NO: 1933499 - RNA, 19 nt, Artificial Sequence
  Description of Artificial Sequence: Synthetic oligonucleotide
agcucguuccgaccguaca

SEQ ID NO: 1933500 - RNA, 19 nt, Artificial Sequence
  Description of Artificial Sequence: Synthetic oligonucleotide
aagcuccuugccaaaacuu

SEQ ID NO: 1933501 - RNA, 19 nt, Artificial Sequence
  Description of Artificial Sequence: Synthetic oligonucleotide
ugcccuccaaggcucggcu

SEQ ID NO: 1933502 - RNA, 19 nt, Artificial Sequence
  Description of Artificial Sequence: Synthetic oligonucleotide
auguagcgagcaaucagcu

SEQ ID NO: 1933503 - RNA, 19 nt, Artificial Sequence
  Description of Artificial Sequence: Synthetic oligonucleotide
uggaucucccgggcuuucg

SEQ ID NO: 1933504 - RNA, 19 nt, Artificial Sequence
  Description of Artificial Sequence: Synthetic oligonucleotide
gcccucugcaucauugucg

SEQ ID NO: 1933505 - RNA, 19 nt, Artificial Sequence
  Description of Artificial Sequence: Synthetic oligonucleotide
ggaccggucccagagugcg

SEQ ID NO: 1933506 - RNA, 19 nt, Artificial Sequence
  Description of Artificial Sequence: Synthetic oligonucleotide
ccauguacucacagagcgg

SEQ ID NO: 1933507 - RNA, 19 nt, Artificial Sequence
  Description of Artificial Sequence: Synthetic oligonucleotide
agccgguagauguggugcu

SEQ ID NO: 1933508 - RNA, 19 nt, Artificial Sequence
  Description of Artificial Sequence: Synthetic oligonucleotide
uggagguaauggugccggc

SEQ ID NO: 1933509 - RNA, 19 nt, Artificial Sequence
  Description of Artificial Sequence: Synthetic oligonucleotide
ccaagucucucauucuuuc

SEQ ID NO: 1933510 - RNA, 19 nt, Artificial Sequence
  Description of Artificial Sequence: Synthetic oligonucleotide
ccgacaggaugauuuugcg

SEQ ID NO: 1933511 - RNA, 19 nt, Artificial Sequence
  Description of Artificial Sequence: Synthetic oligonucleotide
gguaaauggccagugccuc

SEQ ID NO: 1933512 - RNA, 19 nt, Artificial Sequence
  Description of Artificial Sequence: Synthetic oligonucleotide
gggauuguucccggguugg

SEQ ID NO: 1933513 - RNA, 19 nt, Artificial Sequence
  Description of Artificial Sequence: Synthetic oligonucleotide
accguucucauagcgcgca

SEQ ID NO: 1933514 - RNA, 19 nt, Artificial Sequence
  Description of Artificial Sequence: Synthetic oligonucleotide
auuuugcgacggccacagg

SEQ ID NO: 1933515 - RNA, 19 nt, Artificial Sequence
  Description of Artificial Sequence: Synthetic oligonucleotide
cugucucaacuuucuccac

SEQ ID NO: 1933516 - RNA, 19 nt, Artificial Sequence
  Description of Artificial Sequence: Synthetic oligonucleotide
gccuucguccgacaggaug

SEQ ID NO: 1933517 - RNA, 19 nt, Artificial Sequence
  Description of Artificial Sequence: Synthetic oligonucleotide
gguggguaaauggccagug

SEQ ID NO: 1933518 - RNA, 19 nt, Artificial Sequence
  Description of Artificial Sequence: Synthetic oligonucleotide
uagcgcgcauacucugucu

SEQ ID NO: 1933519 - RNA, 19 nt, Artificial Sequence
  Description of Artificial Sequence: Synthetic oligonucleotide
cucgauuggugaccaccug

SEQ ID NO: 1933520 - RNA, 19 nt, Artificial Sequence
  Description of Artificial Sequence: Synthetic oligonucleotide
ccuggcaaagcuccuugcc

SEQ ID NO: 1933521 - RNA, 19 nt, Artificial Sequence
  Description of Artificial Sequence: Synthetic oligonucleotide
gaccgguggauacgguaca

SEQ ID NO: 1933522 - RNA, 19 nt, Artificial Sequence
  Description of Artificial Sequence: Synthetic oligonucleotide
cagcaaggucuccugugug

SEQ ID NO: 1933523 - RNA, 19 nt, Artificial Sequence
  Description of Artificial Sequence: Synthetic oligonucleotide
uguucccggguuggccugg

SEQ ID NO: 1933524 - RNA, 19 nt, Artificial Sequence
  Description of Artificial Sequence: Synthetic oligonucleotide
acggccacaggguggguaa

SEQ ID NO: 1933525 - RNA, 19 nt, Artificial Sequence
  Description of Artificial Sequence: Synthetic oligonucleotide
ggagguaauggugccggcc

SEQ ID NO: 1933526 - RNA, 19 nt, Artificial Sequence
  Description of Artificial Sequence: Synthetic oligonucleotide
cucguuccgaccguacauc

SEQ ID NO: 1933527 - RNA, 19 nt, Artificial Sequence
  Description of Artificial Sequence: Synthetic oligonucleotide
gagcagaccuugguagaac

SEQ ID NO: 1933528 - RNA, 19 nt, Artificial Sequence
  Description of Artificial Sequence: Synthetic oligonucleotide
auguucgcuggcugacacu

SEQ ID NO: 1933529 - RNA, 19 nt, Artificial Sequence
  Description of Artificial Sequence: Synthetic oligonucleotide
aucagcucguuccgaccgu

SEQ ID NO: 1933530 - RNA, 19 nt, Artificial Sequence
  Description of Artificial Sequence: Synthetic oligonucleotide
agcuugauguagcgagcaa

SEQ ID NO: 1933531 - RNA, 19 nt, Artificial Sequence
  Description of Artificial Sequence: Synthetic oligonucleotide
ggggagucgggagagcucc

SEQ ID NO: 1933532 - RNA, 19 nt, Artificial Sequence
  Description of Artificial Sequence: Synthetic oligonucleotide
gcuuucgacgggcaagcac

SEQ ID NO: 1933533 - RNA, 19 nt, Artificial Sequence
  Description of Artificial Sequence: Synthetic oligonucleotide
cucucguacuggcuggaga

SEQ ID NO: 1933534 - RNA, 19 nt, Artificial Sequence
  Description of Artificial Sequence: Synthetic oligonucleotide
gccaaaacuugaguuuggc

SEQ ID NO: 1933535 - RNA, 19 nt, Artificial Sequence
  Description of Artificial Sequence: Synthetic oligonucleotide
accgguggauacgguacag

SEQ ID NO: 1933536 - RNA, 19 nt, Artificial Sequence
  Description of Artificial Sequence: Synthetic oligonucleotide
uuucuccgguaagugcuuc

SEQ ID NO: 1933537 - RNA, 19 nt, Artificial Sequence
  Description of Artificial Sequence: Synthetic oligonucleotide
guacagguagcgaccguuc

SEQ ID NO: 1933538 - RNA, 19 nt, Artificial Sequence
  Description of Artificial Sequence: Synthetic oligonucleotide
ggcccugaagguucccucc

SEQ ID NO: 1933539 - RNA, 19 nt, Artificial Sequence
  Description of Artificial Sequence: Synthetic oligonucleotide
gaccguucucauagcgcgc

SEQ ID NO: 1933540 - RNA, 19 nt, Artificial Sequence
  Description of Artificial Sequence: Synthetic oligonucleotide
aacuugaguuuggccugga

SEQ ID NO: 1933541 - RNA, 19 nt, Artificial Sequence
  Description of Artificial Sequence: Synthetic oligonucleotide
caaaggagcagaccuuggu

SEQ ID NO: 1933542 - RNA, 19 nt, Artificial Sequence
  Description of Artificial Sequence: Synthetic oligonucleotide
gugcgggucuucccugugc

SEQ ID NO: 1933543 - RNA, 19 nt, Artificial Sequence
  Description of Artificial Sequence: Synthetic oligonucleotide
ggcugacacuucgaagacg

SEQ ID NO: 1933544 - RNA, 19 nt, Artificial Sequence
  Description of Artificial Sequence: Synthetic oligonucleotide
uggugcgggucuucccugu

SEQ ID NO: 1933545 - RNA, 19 nt, Artificial Sequence
  Description of Artificial Sequence: Synthetic oligonucleotide
cagagauguugcuccccuc

SEQ ID NO: 1933546 - RNA, 19 nt, Artificial Sequence
  Description of Artificial Sequence: Synthetic oligonucleotide
uagcgaccguucucauagc

SEQ ID NO: 1933547 - RNA, 19 nt, Artificial Sequence
  Description of Artificial Sequence: Synthetic oligonucleotide
cuggugcgggucuucccug

SEQ ID NO: 1933548 - RNA, 19 nt, Artificial Sequence
  Description of Artificial Sequence: Synthetic oligonucleotide
gguaauggugccggccuug

SEQ ID NO: 1933549 - RNA, 19 nt, Artificial Sequence
  Description of Artificial Sequence: Synthetic oligonucleotide
ggaccgguggauacgguac

SEQ ID NO: 1933550 - RNA, 19 nt, Artificial Sequence
  Description of Artificial Sequence: Synthetic oligonucleotide
auucuuucacaagccggua

SEQ ID NO: 1933551 - RNA, 19 nt, Artificial Sequence
  Description of Artificial Sequence: Synthetic oligonucleotide
cguucaaauagcuccuuga

SEQ ID NO: 1933552 - RNA, 19 nt, Artificial Sequence
  Description of Artificial Sequence: Synthetic oligonucleotide
caugggauuguucccgggu

SEQ ID NO: 1933553 - RNA, 19 nt, Artificial Sequence
  Description of Artificial Sequence: Synthetic oligonucleotide
agucuuccagccgcggcga

SEQ ID NO: 1933554 - RNA, 19 nt, Artificial Sequence
  Description of Artificial Sequence: Synthetic oligonucleotide
gcugacacuucgaagacgu

SEQ ID NO: 1933555 - RNA, 19 nt, Artificial Sequence
  Description of Artificial Sequence: Synthetic oligonucleotide
accguacaucuugccuucg

SEQ ID NO: 1933556 - RNA, 19 nt, Artificial Sequence
  Description of Artificial Sequence: Synthetic oligonucleotide
ggcuccaaacgcccucugc

SEQ ID NO: 1933557 - RNA, 19 nt, Artificial Sequence
  Description of Artificial Sequence: Synthetic oligonucleotide
aaacgcccucugcaucauu

SEQ ID NO: 1933558 - RNA, 19 nt, Artificial Sequence
  Description of Artificial Sequence: Synthetic oligonucleotide
ccugaagguucccucccag

SEQ ID NO: 1933559 - RNA, 19 nt, Artificial Sequence
  Description of Artificial Sequence: Synthetic oligonucleotide
gggucuucccugugcgaag

SEQ ID NO: 1933560 - RNA, 19 nt, Artificial Sequence
  Description of Artificial Sequence: Synthetic oligonucleotide
ccaaacgcccucugcauca

SEQ ID NO: 1933561 - RNA, 19 nt, Artificial Sequence
  Description of Artificial Sequence: Synthetic oligonucleotide
ggggcgccaagucuuccag

SEQ ID NO: 1933562 - RNA, 19 nt, Artificial Sequence
  Description of Artificial Sequence: Synthetic oligonucleotide
agguaauggugccggccuu

SEQ ID NO: 1933563 - RNA, 19 nt, Artificial Sequence
  Description of Artificial Sequence: Synthetic oligonucleotide
gcagaccuugguagaacag

SEQ ID NO: 1933564 - RNA, 19 nt, Artificial Sequence
  Description of Artificial Sequence: Synthetic oligonucleotide
gauguggugcugagcccca

SEQ ID NO: 1933565 - RNA, 19 nt, Artificial Sequence
  Description of Artificial Sequence: Synthetic oligonucleotide
cucaauaucugggcuccaa

SEQ ID NO: 1933566 - RNA, 19 nt, Artificial Sequence
  Description of Artificial Sequence: Synthetic oligonucleotide
caccaucguucuccaaguc

SEQ ID NO: 1933567 - RNA, 19 nt, Artificial Sequence
  Description of Artificial Sequence: Synthetic oligonucleotide
cuugcccuccaaggcucgg

SEQ ID NO: 1933568 - RNA, 19 nt, Artificial Sequence
  Description of Artificial Sequence: Synthetic oligonucleotide
augggcuuguccagugccu

SEQ ID NO: 1933569 - RNA, 19 nt, Artificial Sequence
  Description of Artificial Sequence: Synthetic oligonucleotide
agguucccucccagguccc

SEQ ID NO: 1933570 - RNA, 19 nt, Artificial Sequence
  Description of Artificial Sequence: Synthetic oligonucleotide
ucccgggcuuucgacgggc

SEQ ID NO: 1933571 - RNA, 19 nt, Artificial Sequence
  Description of Artificial Sequence: Synthetic oligonucleotide
ucagcucguuccgaccgua

SEQ ID NO: 1933572 - RNA, 19 nt, Artificial Sequence
  Description of Artificial Sequence: Synthetic oligonucleotide
cagcucguuccgaccguac

SEQ ID NO: 1933573 - RNA, 19 nt, Artificial Sequence
  Description of Artificial Sequence: Synthetic oligonucleotide
gggcuuucgacgggcaagc

SEQ ID NO: 1933574 - RNA, 19 nt, Artificial Sequence
  Description of Artificial Sequence: Synthetic oligonucleotide
ggcguugcuuucaucguca

SEQ ID NO: 1933575 - RNA, 19 nt, Artificial Sequence
  Description of Artificial Sequence: Synthetic oligonucleotide
uucgacgggcaagcaccug

SEQ ID NO: 1933576 - RNA, 19 nt, Artificial Sequence
  Description of Artificial Sequence: Synthetic oligonucleotide
cauagcgcgcauacucugu

SEQ ID NO: 1933577 - RNA, 19 nt, Artificial Sequence
  Description of Artificial Sequence: Synthetic oligonucleotide
gaccggucccagagugcgg

SEQ ID NO: 1933578 - RNA, 19 nt, Artificial Sequence
  Description of Artificial Sequence: Synthetic oligonucleotide
gcgacggccacaggguggg

SEQ ID NO: 1933579 - RNA, 19 nt, Artificial Sequence
  Description of Artificial Sequence: Synthetic oligonucleotide
acaagccgguagauguggu

SEQ ID NO: 1933580 - RNA, 19 nt, Artificial Sequence
  Description of Artificial Sequence: Synthetic oligonucleotide
ccguucaaauagcuccuug

SEQ ID NO: 1933581 - RNA, 19 nt, Artificial Sequence
  Description of Artificial Sequence: Synthetic oligonucleotide
gcgaccguucucauagcgc

SEQ ID NO: 1933582 - RNA, 19 nt, Artificial Sequence
  Description of Artificial Sequence: Synthetic oligonucleotide
uccacucguuggagguaau

SEQ ID NO: 1933583 - RNA, 19 nt, Artificial Sequence
  Description of Artificial Sequence: Synthetic oligonucleotide
guacuggcuggagacccca

SEQ ID NO: 1933584 - RNA, 19 nt, Artificial Sequence
  Description of Artificial Sequence: Synthetic oligonucleotide
cucccgggcuuucgacggg

SEQ ID NO: 1933585 - RNA, 19 nt, Artificial Sequence
  Description of Artificial Sequence: Synthetic oligonucleotide
gcgccaagucuuccagccg

SEQ ID NO: 1933586 - RNA, 19 nt, Artificial Sequence
  Description of Artificial Sequence: Synthetic oligonucleotide
gaccugcuuccuggugcgg

SEQ ID NO: 1933587 - RNA, 19 nt, Artificial Sequence
  Description of Artificial Sequence: Synthetic oligonucleotide
cuuuuacaaucaugggauu

SEQ ID NO: 1933588 - RNA, 19 nt, Artificial Sequence
  Description of Artificial Sequence: Synthetic oligonucleotide
gagaccccauagaaggcgu

SEQ ID NO: 1933589 - RNA, 19 nt, Artificial Sequence
  Description of Artificial Sequence: Synthetic oligonucleotide
gcccugaagguucccuccc

SEQ ID NO: 1933590 - RNA, 19 nt, Artificial Sequence
  Description of Artificial Sequence: Synthetic oligonucleotide
ggaggagcgcccguuggac

SEQ ID NO: 1933591 - RNA, 19 nt, Artificial Sequence
  Description of Artificial Sequence: Synthetic oligonucleotide
cuccacucguuggagguaa

SEQ ID NO: 1933592 - RNA, 19 nt, Artificial Sequence
  Description of Artificial Sequence: Synthetic oligonucleotide
ggcggggugggagcgcucg

SEQ ID NO: 1933593 - RNA, 19 nt, Artificial Sequence
  Description of Artificial Sequence: Synthetic oligonucleotide
gccggcugcagcagguccg

SEQ ID NO: 1933594 - RNA, 19 nt, Artificial Sequence
  Description of Artificial Sequence: Synthetic oligonucleotide
ggaucucccgggcuuucga

SEQ ID NO: 1933595 - RNA, 19 nt, Artificial Sequence
  Description of Artificial Sequence: Synthetic oligonucleotide
agguagcgaccguucucau

SEQ ID NO: 1933596 - RNA, 19 nt, Artificial Sequence
  Description of Artificial Sequence: Synthetic oligonucleotide
cugugcgaagcuugaugua

SEQ ID NO: 1933597 - RNA, 19 nt, Artificial Sequence
  Description of Artificial Sequence: Synthetic oligonucleotide
ggauuguucccggguuggc

SEQ ID NO: 1933598 - RNA, 19 nt, Artificial Sequence
  Description of Artificial Sequence: Synthetic oligonucleotide
cgauuggugaccaccugca

SEQ ID NO: 1933599 - RNA, 19 nt, Artificial Sequence
  Description of Artificial Sequence: Synthetic oligonucleotide
caucguucuccaagucucu

SEQ ID NO: 1933600 - RNA, 19 nt, Artificial Sequence
  Description of Artificial Sequence: Synthetic oligonucleotide
ccuugccaaaacuugaguu

SEQ ID NO: 1933601 - RNA, 19 nt, Artificial Sequence
  Description of Artificial Sequence: Synthetic oligonucleotide
ccuugcccuccaaggcucg

SEQ ID NO: 1933602 - RNA, 19 nt, Artificial Sequence
  Description of Artificial Sequence: Synthetic oligonucleotide
ggcaaagcuccuugccaaa

SEQ ID NO: 1933603 - RNA, 19 nt, Artificial Sequence
  Description of Artificial Sequence: Synthetic oligonucleotide
gggaccgguggauacggua

SEQ ID NO: 1933604 - RNA, 19 nt, Artificial Sequence
  Description of Artificial Sequence: Synthetic oligonucleotide
gccccauguucgcuggcug

SEQ ID NO: 1933605 - RNA, 19 nt, Artificial Sequence
  Description of Artificial Sequence: Synthetic oligonucleotide
cuccaaacgcccucugcau

SEQ ID NO: 1933606 - RNA, 19 nt, Artificial Sequence
  Description of Artificial Sequence: Synthetic oligonucleotide
gcgcccguuggaccggucc

SEQ ID NO: 1933607 - RNA, 19 nt, Artificial Sequence
  Description of Artificial Sequence: Synthetic oligonucleotide
gguagcgaccguucucaua

SEQ ID NO: 1933608 - RNA, 19 nt, Artificial Sequence
  Description of Artificial Sequence: Synthetic oligonucleotide
gggcgccaagucuuccagc

SEQ ID NO: 1933609 - RNA, 19 nt, Artificial Sequence
  Description of Artificial Sequence: Synthetic oligonucleotide
gacggccacagggugggua

SEQ ID NO: 1933610 - RNA, 19 nt, Artificial Sequence
  Description of Artificial Sequence: Synthetic oligonucleotide
gcuugauguagcgagcaau

SEQ ID NO: 1933611 - RNA, 19 nt, Artificial Sequence
  Description of Artificial Sequence: Synthetic oligonucleotide
ccgguggauacgguacagg

SEQ ID NO: 1933612 - RNA, 19 nt, Artificial Sequence
  Description of Artificial Sequence: Synthetic oligonucleotide
cgggcaagcaccuggaugu

SEQ ID NO: 1933613 - RNA, 19 nt, Artificial Sequence
  Description of Artificial Sequence: Synthetic oligonucleotide
ucggcucucuuggcacuuc

SEQ ID NO: 1933614 - RNA, 19 nt, Artificial Sequence
  Description of Artificial Sequence: Synthetic oligonucleotide
cuuucacaagccgguagau

SEQ ID NO: 1933615 - RNA, 19 nt, Artificial Sequence
  Description of Artificial Sequence: Synthetic oligonucleotide
ccagccgcggcgacggcug

SEQ ID NO: 1933616 - RNA, 19 nt, Artificial Sequence
  Description of Artificial Sequence: Synthetic oligonucleotide
uucguccgacaggaugauu

SEQ ID NO: 1933617 - RNA, 19 nt, Artificial Sequence
  Description of Artificial Sequence: Synthetic oligonucleotide
agagugcgggaggcggggu

SEQ ID NO: 1933618 - RNA, 19 nt, Artificial Sequence
  Description of Artificial Sequence: Synthetic oligonucleotide
gcgcauacucugucucaac

SEQ ID NO: 1933619 - RNA, 19 nt, Artificial Sequence
  Description of Artificial Sequence: Synthetic oligonucleotide
cccauguucgcuggcugac

SEQ ID NO: 1933620 - RNA, 19 nt, Artificial Sequence
  Description of Artificial Sequence: Synthetic oligonucleotide
gugcgggaggcgggguggg

SEQ ID NO: 1933621 - RNA, 19 nt, Artificial Sequence
  Description of Artificial Sequence: Synthetic oligonucleotide
ggagucgggagagcuccac

SEQ ID NO: 1933622 - RNA, 19 nt, Artificial Sequence
  Description of Artificial Sequence: Synthetic oligonucleotide
caucauugucgaugggcuu

SEQ ID NO: 1933623 - RNA, 19 nt, Artificial Sequence
  Description of Artificial Sequence: Synthetic oligonucleotide
ugccuucguccgacaggau

SEQ ID NO: 1933624 - RNA, 19 nt, Artificial Sequence
  Description of Artificial Sequence: Synthetic oligonucleotide
gcggggaccgguggauacg

SEQ ID NO: 1933625 - RNA, 19 nt, Artificial Sequence
  Description of Artificial Sequence: Synthetic oligonucleotide
gguacagguagcgaccguu

SEQ ID NO: 1933626 - RNA, 19 nt, Artificial Sequence
  Description of Artificial Sequence: Synthetic oligonucleotide
gucuuccagccgcggcgac

SEQ ID NO: 1933627 - RNA, 19 nt, Artificial Sequence
  Description of Artificial Sequence: Synthetic oligonucleotide
gcgaagcuugauguagcga

SEQ ID NO: 1933628 - RNA, 19 nt, Artificial Sequence
  Description of Artificial Sequence: Synthetic oligonucleotide
gcgcgcauacucugucuca

SEQ ID NO: 1933629 - RNA, 19 nt, Artificial Sequence
  Description of Artificial Sequence: Synthetic oligonucleotide
guucgcuggcugacacuuc

SEQ ID NO: 1933630 - RNA, 19 nt, Artificial Sequence
  Description of Artificial Sequence: Synthetic oligonucleotide
cugacacuucgaagacgua

SEQ ID NO: 1933631 - RNA, 19 nt, Artificial Sequence
  Description of Artificial Sequence: Synthetic oligonucleotide
gcucguuccgaccguacau

SEQ ID NO: 1933632 - RNA, 19 nt, Artificial Sequence
  Description of Artificial Sequence: Synthetic oligonucleotide
ggagcgcccguuggaccgg

SEQ ID NO: 1933633 - RNA, 19 nt, Artificial Sequence
  Description of Artificial Sequence: Synthetic oligonucleotide
ccacucguuggagguaaug

SEQ ID NO: 1933634 - RNA, 19 nt, Artificial Sequence
  Description of Artificial Sequence: Synthetic oligonucleotide
gcucucguacuggcuggag

SEQ ID NO: 1933635 - RNA, 19 nt, Artificial Sequence
  Description of Artificial Sequence: Synthetic oligonucleotide
cgggcuuucgacgggcaag

SEQ ID NO: 1933636 - RNA, 19 nt, Artificial Sequence
  Description of Artificial Sequence: Synthetic oligonucleotide
guucccggguuggccuggc

SEQ ID NO: 1933637 - RNA, 19 nt, Artificial Sequence
  Description of Artificial Sequence: Synthetic oligonucleotide
gacgggcaagcaccuggau

SEQ ID NO: 1933638 - RNA, 19 nt, Artificial Sequence
  Description of Artificial Sequence: Synthetic oligonucleotide
guccgcgcggggcgccaag

SEQ ID NO: 1933639 - RNA, 19 nt, Artificial Sequence
  Description of Artificial Sequence: Synthetic oligonucleotide
ccggguuggccuggcaaag

SEQ ID NO: 1933640 - RNA, 19 nt, Artificial Sequence
  Description of Artificial Sequence: Synthetic oligonucleotide
uggugccggccuugcccuc

SEQ ID NO: 1933641 - RNA, 19 nt, Artificial Sequence
  Description of Artificial Sequence: Synthetic oligonucleotide
cgaagacguaggcaaugca

SEQ ID NO: 1933642 - RNA, 19 nt, Artificial Sequence
  Description of Artificial Sequence: Synthetic oligonucleotide
gggagcgcucggccggcug

SEQ ID NO: 1933643 - RNA, 19 nt, Artificial Sequence
  Description of Artificial Sequence: Synthetic oligonucleotide
gaggcggggugggagcgcu

SEQ ID NO: 1933644 - RNA, 19 nt, Artificial Sequence
  Description of Artificial Sequence: Synthetic oligonucleotide
ccccauguucgcuggcuga

SEQ ID NO: 1933645 - RNA, 19 nt, Artificial Sequence
  Description of Artificial Sequence: Synthetic oligonucleotide
caucgucaauguugguauu

SEQ ID NO: 1933646 - RNA, 19 nt, Artificial Sequence
  Description of Artificial Sequence: Synthetic oligonucleotide
cgcccguuggaccgguccc

SEQ ID NO: 1933647 - RNA, 19 nt, Artificial Sequence
  Description of Artificial Sequence: Synthetic oligonucleotide
cgguggauacgguacaggu

SEQ ID NO: 1933648 - RNA, 19 nt, Artificial Sequence
  Description of Artificial Sequence: Synthetic oligonucleotide
ggcuggcccugaagguucc

SEQ ID NO: 1933649 - RNA, 19 nt, Artificial Sequence
  Description of Artificial Sequence: Synthetic oligonucleotide
ccgaccguacaucuugccu

SEQ ID NO: 1933650 - RNA, 19 nt, Artificial Sequence
  Description of Artificial Sequence: Synthetic oligonucleotide
cagguccgcgcggggcgcc

SEQ ID NO: 1933651 - RNA, 19 nt, Artificial Sequence
  Description of Artificial Sequence: Synthetic oligonucleotide
gcguugcuuucaucgucaa

SEQ ID NO: 1933652 - RNA, 19 nt, Artificial Sequence
  Description of Artificial Sequence: Synthetic oligonucleotide
gcgacggcugcggggccgg

SEQ ID NO: 1933653 - RNA, 19 nt, Artificial Sequence
  Description of Artificial Sequence: Synthetic oligonucleotide
ccgguagauguggugcuga

SEQ ID NO: 1933654 - RNA, 19 nt, Artificial Sequence
  Description of Artificial Sequence: Synthetic oligonucleotide
gccacccuuccucucugua

SEQ ID NO: 1933655 - RNA, 19 nt, Artificial Sequence
  Description of Artificial Sequence: Synthetic oligonucleotide
cgaccguacaucuugccuu

SEQ ID NO: 1933656 - RNA, 19 nt, Artificial Sequence
  Description of Artificial Sequence: Synthetic oligonucleotide
gcgggucuucccugugcga

SEQ ID NO: 1933657 - RNA, 19 nt, Artificial Sequence
  Description of Artificial Sequence: Synthetic oligonucleotide
agcgcccguuggaccgguc

SEQ ID NO: 1933658 - RNA, 19 nt, Artificial Sequence
  Description of Artificial Sequence: Synthetic oligonucleotide
ggaggcggggugggagcgc

SEQ ID NO: 1933659 - RNA, 19 nt, Artificial Sequence
  Description of Artificial Sequence: Synthetic oligonucleotide
ggcucucguacuggcugga

SEQ ID NO: 1933660 - RNA, 19 nt, Artificial Sequence
  Description of Artificial Sequence: Synthetic oligonucleotide
ccccguucaaauagcuccu

SEQ ID NO: 1933661 - RNA, 19 nt, Artificial Sequence
  Description of Artificial Sequence: Synthetic oligonucleotide
aggcggggugggagcgcuc

SEQ ID NO: 1933662 - RNA, 19 nt, Artificial Sequence
  Description of Artificial Sequence: Synthetic oligonucleotide
gcagguccgcgcggggcgc

SEQ ID NO: 1933663 - RNA, 19 nt, Artificial Sequence
  Description of Artificial Sequence: Synthetic oligonucleotide
ggcuuucgacgggcaagca

SEQ ID NO: 1933664 - RNA, 19 nt, Artificial Sequence
  Description of Artificial Sequence: Synthetic oligonucleotide
gcucggccggcugcagcag

SEQ ID NO: 1933665 - RNA, 19 nt, Artificial Sequence
  Description of Artificial Sequence: Synthetic oligonucleotide
gcucaauaucugggcucca

SEQ ID NO: 1933666 - RNA, 19 nt, Artificial Sequence
  Description of Artificial Sequence: Synthetic oligonucleotide
ccauguucgcuggcugaca

SEQ ID NO: 1933667 - RNA, 19 nt, Artificial Sequence
  Description of Artificial Sequence: Synthetic oligonucleotide
cggguuggccuggcaaagc

SEQ ID NO: 1933668 - RNA, 19 nt, Artificial Sequence
  Description of Artificial Sequence: Synthetic oligonucleotide
cggucccagagugcgggag

SEQ ID NO: 1933669 - RNA, 19 nt, Artificial Sequence
  Description of Artificial Sequence: Synthetic oligonucleotide
gcccguuggaccgguccca

SEQ ID NO: 1933670 - RNA, 19 nt, Artificial Sequence
  Description of Artificial Sequence: Synthetic oligonucleotide
agguccgcgcggggcgcca

SEQ ID NO: 1933671 - RNA, 19 nt, Artificial Sequence
  Description of Artificial Sequence: Synthetic oligonucleotide
cgacgggcaagcaccugga

SEQ ID NO: 1933672 - RNA, 19 nt, Artificial Sequence
  Description of Artificial Sequence: Synthetic oligonucleotide
caaacgcccucugcaucau

SEQ ID NO: 1933673 - RNA, 19 nt, Artificial Sequence
  Description of Artificial Sequence: Synthetic oligonucleotide
gcggggcgccaagucuucc

SEQ ID NO: 1933674 - RNA, 19 nt, Artificial Sequence
  Description of Artificial Sequence: Synthetic oligonucleotide
gcucggcuuggaggagcgc

SEQ ID NO: 1933675 - RNA, 19 nt, Artificial Sequence
  Description of Artificial Sequence: Synthetic oligonucleotide
ccgguaagugcuucagcuu

SEQ ID NO: 1933676 - RNA, 19 nt, Artificial Sequence
  Description of Artificial Sequence: Synthetic oligonucleotide
ccguacaucuugccuucgu

SEQ ID NO: 1933677 - RNA, 19 nt, Artificial Sequence
  Description of Artificial Sequence: Synthetic oligonucleotide
cgcgcauacucugucucaa

SEQ ID NO: 1933678 - RNA, 19 nt, Artificial Sequence
  Description of Artificial Sequence: Synthetic oligonucleotide
cccauagaaggcguugcuu

SEQ ID NO: 1933679 - RNA, 19 nt, Artificial Sequence
  Description of Artificial Sequence: Synthetic oligonucleotide
cccgggcuuucgacgggca

SEQ ID NO: 1933680 - RNA, 19 nt, Artificial Sequence
  Description of Artificial Sequence: Synthetic oligonucleotide
ccgcgcggggcgccaaguc

SEQ ID NO: 1933681 - RNA, 19 nt, Artificial Sequence
  Description of Artificial Sequence: Synthetic oligonucleotide
ccguuggaccggucccaga

SEQ ID NO: 1933682 - RNA, 19 nt, Artificial Sequence
  Description of Artificial Sequence: Synthetic oligonucleotide
gagcgcccguuggaccggu

SEQ ID NO: 1933683 - RNA, 19 nt, Artificial Sequence
  Description of Artificial Sequence: Synthetic oligonucleotide
ggccacaggguggguaaau

SEQ ID NO: 1933684 - RNA, 19 nt, Artificial Sequence
  Description of Artificial Sequence: Synthetic oligonucleotide
ccgggcuuucgacgggcaa

SEQ ID NO: 1933685 - RNA, 19 nt, Artificial Sequence
  Description of Artificial Sequence: Synthetic oligonucleotide
ggccacccuuccucucugu

SEQ ID NO: 1933686 - RNA, 19 nt, Artificial Sequence
  Description of Artificial Sequence: Synthetic oligonucleotide
ccggucccagagugcggga

SEQ ID NO: 1933687 - RNA, 19 nt, Artificial Sequence
  Description of Artificial Sequence: Synthetic oligonucleotide
gcccuccaaggcucggcuu

SEQ ID NO: 1933688 - RNA, 19 nt, Artificial Sequence
  Description of Artificial Sequence: Synthetic oligonucleotide
gcgcggggcgccaagucuu

SEQ ID NO: 1933689 - RNA, 19 nt, Artificial Sequence
  Description of Artificial Sequence: Synthetic oligonucleotide
cgcgcggggcgccaagucu

SEQ ID NO: 1933690 - RNA, 19 nt, Artificial Sequence
  Description of Artificial Sequence: Synthetic oligonucleotide
cguuccgaccguacaucuu

SEQ ID NO: 1933691 - RNA, 19 nt, Artificial Sequence
  Description of Artificial Sequence: Synthetic oligonucleotide
ccccaccaucguucuccaa

SEQ ID NO: 1933692 - RNA, 19 nt, Artificial Sequence
  Description of Artificial Sequence: Synthetic oligonucleotide
gguccgcgcggggcgccaa

SEQ ID NO: 1933693 - RNA, 19 nt, Artificial Sequence
  Description of Artificial Sequence: Synthetic oligonucleotide
cggcgacggcugcggggcc

SEQ ID NO: 1933694 - RNA, 19 nt, Artificial Sequence
  Description of Artificial Sequence: Synthetic oligonucleotide
cccguucaaauagcuccuu

SEQ ID NO: 1933695 - RNA, 19 nt, Artificial Sequence
  Description of Artificial Sequence: Synthetic oligonucleotide
cgggagagcuccacucguu

SEQ ID NO: 1933696 - RNA, 19 nt, Artificial Sequence
  Description of Artificial Sequence: Synthetic oligonucleotide
ccguucucauagcgcgcau

SEQ ID NO: 1933697 - RNA, 19 nt, Artificial Sequence
  Description of Artificial Sequence: Synthetic oligonucleotide
cgguacagguagcgaccgu

SEQ ID NO: 1933698 - RNA, 19 nt, Artificial Sequence
  Description of Artificial Sequence: Synthetic oligonucleotide
cgacggcugcggggccgga

SEQ ID NO: 1933699 - RNA, 19 nt, Artificial Sequence
  Description of Artificial Sequence: Synthetic oligonucleotide
aauuauauggcaaauguac

SEQ ID NO: 1933700 - RNA, 19 nt, Artificial Sequence
  Description of Artificial Sequence: Synthetic oligonucleotide
aaguaaaugguuuauaacu

SEQ ID NO: 1933701 - RNA, 19 nt, Artificial Sequence
  Description of Artificial Sequence: Synthetic oligonucleotide
aaaauucacuuucacaguc

SEQ ID NO: 1933702 - RNA, 19 nt, Artificial Sequence
  Description of Artificial Sequence: Synthetic oligonucleotide
uuauagauccaaaugcugg

SEQ ID NO: 1933703 - RNA, 19 nt, Artificial Sequence
  Description of Artificial Sequence: Synthetic oligonucleotide
uaaauuauauggcaaaugu

SEQ ID NO: 1933704 - RNA, 19 nt, Artificial Sequence
  Description of Artificial Sequence: Synthetic oligonucleotide
uaugaauugugucagaggu

SEQ ID NO: 1933705 - RNA, 19 nt, Artificial Sequence
  Description of Artificial Sequence: Synthetic oligonucleotide
uauagaauuguguucaggc

SEQ ID NO: 1933706 - RNA, 19 nt, Artificial Sequence
  Description of Artificial Sequence: Synthetic oligonucleotide
gauuguucaacacagcaag

SEQ ID NO: 1933707 - RNA, 19 nt, Artificial Sequence
  Description of Artificial Sequence: Synthetic oligonucleotide
ucagucucaauacaaacag

SEQ ID NO: 1933708 - RNA, 19 nt, Artificial Sequence
  Description of Artificial Sequence: Synthetic oligonucleotide
ucuguuauagauccaaaug

SEQ ID NO: 1933709 - RNA, 19 nt, Artificial Sequence
  Description of Artificial Sequence: Synthetic oligonucleotide
uauagggugaaucagguuc

SEQ ID NO: 1933710 - RNA, 19 nt, Artificial Sequence
  Description of Artificial Sequence: Synthetic oligonucleotide
agcaagaaaauucacuuuc

SEQ ID NO: 1933711 - RNA, 19 nt, Artificial Sequence
  Description of Artificial Sequence: Synthetic oligonucleotide
aaggaucucaugugaacgc

SEQ ID NO: 1933712 - RNA, 19 nt, Artificial Sequence
  Description of Artificial Sequence: Synthetic oligonucleotide
uacucaguagaacacaaag

SEQ ID NO: 1933713 - RNA, 19 nt, Artificial Sequence
  Description of Artificial Sequence: Synthetic oligonucleotide
aguuucaucaaacagguaa

SEQ ID NO: 1933714 - RNA, 19 nt, Artificial Sequence
  Description of Artificial Sequence: Synthetic oligonucleotide
uacagauucaucccauucg

SEQ ID NO: 1933715 - RNA, 19 nt, Artificial Sequence
  Description of Artificial Sequence: Synthetic oligonucleotide
ucucaauacaaacaggagu

SEQ ID NO: 1933716 - RNA, 19 nt, Artificial Sequence
  Description of Artificial Sequence: Synthetic oligonucleotide
aguguuuugcaguagaaca

SEQ ID NO: 1933717 - RNA, 19 nt, Artificial Sequence
  Description of Artificial Sequence: Synthetic oligonucleotide
auaucugcaaggaaaauac

SEQ ID NO: 1933718 - RNA, 19 nt, Artificial Sequence
  Description of Artificial Sequence: Synthetic oligonucleotide
aagaaaauucacuuucaca

SEQ ID NO: 1933719 - RNA, 19 nt, Artificial Sequence
  Description of Artificial Sequence: Synthetic oligonucleotide
uauuguuucuguuauagau

SEQ ID NO: 1933720 - RNA, 19 nt, Artificial Sequence
  Description of Artificial Sequence: Synthetic oligonucleotide
aaauugguuuucgugacgg

SEQ ID NO: 1933721 - RNA, 19 nt, Artificial Sequence
  Description of Artificial Sequence: Synthetic oligonucleotide
ugguuuauaacuucaauau

SEQ ID NO: 1933722 - RNA, 19 nt, Artificial Sequence
  Description of Artificial Sequence: Synthetic oligonucleotide
ugcaucaugagugugagug

SEQ ID NO: 1933723 - RNA, 19 nt, Artificial Sequence
  Description of Artificial Sequence: Synthetic oligonucleotide
aaugauggccgccaaaggu

SEQ ID NO: 1933724 - RNA, 19 nt, Artificial Sequence
  Description of Artificial Sequence: Synthetic oligonucleotide
uguuauagauccaaaugcu

SEQ ID NO: 1933725 - RNA, 19 nt, Artificial Sequence
  Description of Artificial Sequence: Synthetic oligonucleotide
aguuuaagccagcugaguc

SEQ ID NO: 1933726 - RNA, 19 nt, Artificial Sequence
  Description of Artificial Sequence: Synthetic oligonucleotide
augggaaccaugcauacuc

SEQ ID NO: 1933727 - RNA, 19 nt, Artificial Sequence
  Description of Artificial Sequence: Synthetic oligonucleotide
uacuacaaggaucucaugu

SEQ ID NO: 1933728 - RNA, 19 nt, Artificial Sequence
  Description of Artificial Sequence: Synthetic oligonucleotide
uccugauuguucaacacag

SEQ ID NO: 1933729 - RNA, 19 nt, Artificial Sequence
  Description of Artificial Sequence: Synthetic oligonucleotide
aaaauacaguacaaauuac

SEQ ID NO: 1933730 - RNA, 19 nt, Artificial Sequence
  Description of Artificial Sequence: Synthetic oligonucleotide
aaaugcugggcuguggccc

SEQ ID NO: 1933731 - RNA, 19 nt, Artificial Sequence
  Description of Artificial Sequence: Synthetic oligonucleotide
auugcuuauggguagcauc

SEQ ID NO: 1933732 - RNA, 19 nt, Artificial Sequence
  Description of Artificial Sequence: Synthetic oligonucleotide
aaaauugguuuucgugacg

SEQ ID NO: 1933733 - RNA, 19 nt, Artificial Sequence
  Description of Artificial Sequence: Synthetic oligonucleotide
uccauuguauuuaccaaag

SEQ ID NO: 1933734 - RNA, 19 nt, Artificial Sequence
  Description of Artificial Sequence: Synthetic oligonucleotide
agaacagugacccauuccu

SEQ ID NO: 1933735 - RNA, 19 nt, Artificial Sequence
  Description of Artificial Sequence: Synthetic oligonucleotide
uuuuguacagauucauccc

SEQ ID NO: 1933736 - RNA, 19 nt, Artificial Sequence
  Description of Artificial Sequence: Synthetic oligonucleotide
uuguauuuaccaaagugaa

SEQ ID NO: 1933737 - RNA, 19 nt, Artificial Sequence
  Description of Artificial Sequence: Synthetic oligonucleotide
uauuacaaacuccuccuug

SEQ ID NO: 1933738 - RNA, 19 nt, Artificial Sequence
  Description of Artificial Sequence: Synthetic oligonucleotide
ugaaucagguucuagggcu

SEQ ID NO: 1933739 - RNA, 19 nt, Artificial Sequence
  Description of Artificial Sequence: Synthetic oligonucleotide
aacacaccaaagcaaggag

SEQ ID NO: 1933740 - RNA, 19 nt, Artificial Sequence
  Description of Artificial Sequence: Synthetic oligonucleotide
gaggugacagacuucacag

SEQ ID NO: 1933741 - RNA, 19 nt, Artificial Sequence
  Description of Artificial Sequence: Synthetic oligonucleotide
acuauuguuucuguuauag

SEQ ID NO: 1933742 - RNA, 19 nt, Artificial Sequence
  Description of Artificial Sequence: Synthetic oligonucleotide
aguacauugcuuuucuuca

SEQ ID NO: 1933743 - RNA, 19 nt, Artificial Sequence
  Description of Artificial Sequence: Synthetic oligonucleotide
cugugcuuauacuacaagg

SEQ ID NO: 1933744 - RNA, 19 nt, Artificial Sequence
  Description of Artificial Sequence: Synthetic oligonucleotide
agauucaucccauucggag

SEQ ID NO: 1933745 - RNA, 19 nt, Artificial Sequence
  Description of Artificial Sequence: Synthetic oligonucleotide
ugcacauaccaacacacca

SEQ ID NO: 1933746 - RNA, 19 nt, Artificial Sequence
  Description of Artificial Sequence: Synthetic oligonucleotide
gauaugaauugugucagag

SEQ ID NO: 1933747 - RNA, 19 nt, Artificial Sequence
  Description of Artificial Sequence: Synthetic oligonucleotide
ugaccagguauucacugcg

SEQ ID NO: 1933748 - RNA, 19 nt, Artificial Sequence
  Description of Artificial Sequence: Synthetic oligonucleotide
auaugaauugugucagagg

SEQ ID NO: 1933749 - RNA, 19 nt, Artificial Sequence
  Description of Artificial Sequence: Synthetic oligonucleotide
aaauacuaaaauauagaau

SEQ ID NO: 1933750 - RNA, 19 nt, Artificial Sequence
  Description of Artificial Sequence: Synthetic oligonucleotide
cacaccaaagcaaggaggg

SEQ ID NO: 1933751 - RNA, 19 nt, Artificial Sequence
  Description of Artificial Sequence: Synthetic oligonucleotide
aauauagaauuguguucag

SEQ ID NO: 1933752 - RNA, 19 nt, Artificial Sequence
  Description of Artificial Sequence: Synthetic oligonucleotide
uucggaggaaauauggugu

SEQ ID NO: 1933753 - RNA, 19 nt, Artificial Sequence
  Description of Artificial Sequence: Synthetic oligonucleotide
aggaaaauacaguacaaau

SEQ ID NO: 1933754 - RNA, 19 nt, Artificial Sequence
  Description of Artificial Sequence: Synthetic oligonucleotide
ucaacaagucaucuuacuc

SEQ ID NO: 1933755 - RNA, 19 nt, Artificial Sequence
  Description of Artificial Sequence: Synthetic oligonucleotide
cugaaaagaaguuucccug

SEQ ID NO: 1933756 - RNA, 19 nt, Artificial Sequence
  Description of Artificial Sequence: Synthetic oligonucleotide
aggagauaugaauuguguc

SEQ ID NO: 1933757 - RNA, 19 nt, Artificial Sequence
  Description of Artificial Sequence: Synthetic oligonucleotide
uaaaauugguuuucgugac

SEQ ID NO: 1933758 - RNA, 19 nt, Artificial Sequence
  Description of Artificial Sequence: Synthetic oligonucleotide
caacacagcaagaaaauuc

SEQ ID NO: 1933759 - RNA, 19 nt, Artificial Sequence
  Description of Artificial Sequence: Synthetic oligonucleotide
uacucuauagggugaauca

SEQ ID NO: 1933760 - RNA, 19 nt, Artificial Sequence
  Description of Artificial Sequence: Synthetic oligonucleotide
ucuauagggugaaucaggu

SEQ ID NO: 1933761 - RNA, 19 nt, Artificial Sequence
  Description of Artificial Sequence: Synthetic oligonucleotide
acaaggaucucaugugaac

SEQ ID NO: 1933762 - RNA, 19 nt, Artificial Sequence
  Description of Artificial Sequence: Synthetic oligonucleotide
ucccugauuuccaggaugg

SEQ ID NO: 1933763 - RNA, 19 nt, Artificial Sequence
  Description of Artificial Sequence: Synthetic oligonucleotide
uuacuauuguuucuguuau

SEQ ID NO: 1933764 - RNA, 19 nt, Artificial Sequence
  Description of Artificial Sequence: Synthetic oligonucleotide
auggguucauugcuuaugg

SEQ ID NO: 1933765 - RNA, 19 nt, Artificial Sequence
  Description of Artificial Sequence: Synthetic oligonucleotide
uuagagcagucauaggcag

SEQ ID NO: 1933766 - RNA, 19 nt, Artificial Sequence
  Description of Artificial Sequence: Synthetic oligonucleotide
cucuauagggugaaucagg

SEQ ID NO: 1933767 - RNA, 19 nt, Artificial Sequence
  Description of Artificial Sequence: Synthetic oligonucleotide
uugcuuauggguagcaucu

SEQ ID NO: 1933768 - RNA, 19 nt, Artificial Sequence
  Description of Artificial Sequence: Synthetic oligonucleotide
uuauacuacaaggaucuca

SEQ ID NO: 1933769 - RNA, 19 nt, Artificial Sequence
  Description of Artificial Sequence: Synthetic oligonucleotide
aauacaguacaaauuacua

SEQ ID NO: 1933770 - RNA, 19 nt, Artificial Sequence
  Description of Artificial Sequence: Synthetic oligonucleotide
gugaacgcaguccugauug

SEQ ID NO: 1933771 - RNA, 19 nt, Artificial Sequence
  Description of Artificial Sequence: Synthetic oligonucleotide
agucaucuuacucaguaga

SEQ ID NO: 1933772 - RNA, 19 nt, Artificial Sequence
  Description of Artificial Sequence: Synthetic oligonucleotide
aagucaucuuacucaguag

SEQ ID NO: 1933773 - RNA, 19 nt, Artificial Sequence
  Description of Artificial Sequence: Synthetic oligonucleotide
ugcaaggaaaauacaguac

SEQ ID NO: 1933774 - RNA, 19 nt, Artificial Sequence
  Description of Artificial Sequence: Synthetic oligonucleotide
augcauacucuauagggug

SEQ ID NO: 1933775 - RNA, 19 nt, Artificial Sequence
  Description of Artificial Sequence: Synthetic oligonucleotide
ugauuguucaacacagcaa

SEQ ID NO: 1933776 - RNA, 19 nt, Artificial Sequence
  Description of Artificial Sequence: Synthetic oligonucleotide
agguuacugguuuccaugg

SEQ ID NO: 1933777 - RNA, 19 nt, Artificial Sequence
  Description of Artificial Sequence: Synthetic oligonucleotide
auagaauuguguucaggca

SEQ ID NO: 1933778 - RNA, 19 nt, Artificial Sequence
  Description of Artificial Sequence: Synthetic oligonucleotide
aaacggccugugcuuauac

SEQ ID NO: 1933779 - RNA, 19 nt, Artificial Sequence
  Description of Artificial Sequence: Synthetic oligonucleotide
ugacccauuccuaugcaca

SEQ ID NO: 1933780 - RNA, 19 nt, Artificial Sequence
  Description of Artificial Sequence: Synthetic oligonucleotide
auacaguacaaauuacuaa

SEQ ID NO: 1933781 - RNA, 19 nt, Artificial Sequence
  Description of Artificial Sequence: Synthetic oligonucleotide
ugguguguauuacaaacuc

SEQ ID NO: 1933782 - RNA, 19 nt, Artificial Sequence
  Description of Artificial Sequence: Synthetic oligonucleotide
uugguuuucgugacggcug

SEQ ID NO: 1933783 - RNA, 19 nt, Artificial Sequence
  Description of Artificial Sequence: Synthetic oligonucleotide
caaggaucucaugugaacg

SEQ ID NO: 1933784 - RNA, 19 nt, Artificial Sequence
  Description of Artificial Sequence: Synthetic oligonucleotide
ugcuguaugcacaguuccg

SEQ ID NO: 1933785 - RNA, 19 nt, Artificial Sequence
  Description of Artificial Sequence: Synthetic oligonucleotide
agucucaauacaaacagga

SEQ ID NO: 1933786 - RNA, 19 nt, Artificial Sequence
  Description of Artificial Sequence: Synthetic oligonucleotide
aacagugacccauuccuau

SEQ ID NO: 1933787 - RNA, 19 nt, Artificial Sequence
  Description of Artificial Sequence: Synthetic oligonucleotide
ugugucagaggugacagac

SEQ ID NO: 1933788 - RNA, 19 nt, Artificial Sequence
  Description of Artificial Sequence: Synthetic oligonucleotide
ggagauaugaauuguguca

SEQ ID NO: 1933789 - RNA, 19 nt, Artificial Sequence
  Description of Artificial Sequence: Synthetic oligonucleotide
auugugucagaggugacag

SEQ ID NO: 1933790 - RNA, 19 nt, Artificial Sequence
  Description of Artificial Sequence: Synthetic oligonucleotide
auacucuauagggugaauc

SEQ ID NO: 1933791 - RNA, 19 nt, Artificial Sequence
  Description of Artificial Sequence: Synthetic oligonucleotide
uccgggagaacagugaccc

SEQ ID NO: 1933792 - RNA, 19 nt, Artificial Sequence
  Description of Artificial Sequence: Synthetic oligonucleotide
caaaguaaaugguuuauaa

SEQ ID NO: 1933793 - RNA, 19 nt, Artificial Sequence
  Description of Artificial Sequence: Synthetic oligonucleotide
caucuuacucaguagaaca

SEQ ID NO: 1933794 - RNA, 19 nt, Artificial Sequence
  Description of Artificial Sequence: Synthetic oligonucleotide
uuccauuguauuuaccaaa

SEQ ID NO: 1933795 - RNA, 19 nt, Artificial Sequence
  Description of Artificial Sequence: Synthetic oligonucleotide
uauggcaaauguacaguac

SEQ ID NO: 1933796 - RNA, 19 nt, Artificial Sequence
  Description of Artificial Sequence: Synthetic oligonucleotide
ucuccaggagauaugaauu

SEQ ID NO: 1933797 - RNA, 19 nt, Artificial Sequence
  Description of Artificial Sequence: Synthetic oligonucleotide
gcaaccugaaaucugaaac

SEQ ID NO: 1933798 - RNA, 19 nt, Artificial Sequence
  Description of Artificial Sequence: Synthetic oligonucleotide
cuuagugccagcuucugca

SEQ ID NO: 1933799 - RNA, 19 nt, Artificial Sequence
  Description of Artificial Sequence: Synthetic oligonucleotide
guaaaugguuuauaacuuc

SEQ ID NO: 1933800 - RNA, 19 nt, Artificial Sequence
  Description of Artificial Sequence: Synthetic oligonucleotide
cuaaaauauagaauugugu

SEQ ID NO: 1933801 - RNA, 19 nt, Artificial Sequence
  Description of Artificial Sequence: Synthetic oligonucleotide
uucuguuauagauccaaau

SEQ ID NO: 1933802 - RNA, 19 nt, Artificial Sequence
  Description of Artificial Sequence: Synthetic oligonucleotide
aaagguuacugguuuccau

SEQ ID NO: 1933803 - RNA, 19 nt, Artificial Sequence
  Description of Artificial Sequence: Synthetic oligonucleotide
agaggugacagacuucaca

SEQ ID NO: 1933804 - RNA, 19 nt, Artificial Sequence
  Description of Artificial Sequence: Synthetic oligonucleotide
ggcguuguacauucgaagg

SEQ ID NO: 1933805 - RNA, 19 nt, Artificial Sequence
  Description of Artificial Sequence: Synthetic oligonucleotide
guucauugcuuauggguag

SEQ ID NO: 1933806 - RNA, 19 nt, Artificial Sequence
  Description of Artificial Sequence: Synthetic oligonucleotide
ugucagaggugacagacuu

SEQ ID NO: 1933807 - RNA, 19 nt, Artificial Sequence
  Description of Artificial Sequence: Synthetic oligonucleotide
uagucguccuuucuucucc

SEQ ID NO: 1933808 - RNA, 19 nt, Artificial Sequence
  Description of Artificial Sequence: Synthetic oligonucleotide
auuuccaggauggaguugu

SEQ ID NO: 1933809 - RNA, 19 nt, Artificial Sequence
  Description of Artificial Sequence: Synthetic oligonucleotide
uguuuugcaguagaacaga

SEQ ID NO: 1933810 - RNA, 19 nt, Artificial Sequence
  Description of Artificial Sequence: Synthetic oligonucleotide
uagauccaaaugcugggcu

SEQ ID NO: 1933811 - RNA, 19 nt, Artificial Sequence
  Description of Artificial Sequence: Synthetic oligonucleotide
guuauagauccaaaugcug

SEQ ID NO: 1933812 - RNA, 19 nt, Artificial Sequence
  Description of Artificial Sequence: Synthetic oligonucleotide
aacgcaguccugauuguuc

SEQ ID NO: 1933813 - RNA, 19 nt, Artificial Sequence
  Description of Artificial Sequence: Synthetic oligonucleotide
uguucaggcaucuccacua

SEQ ID NO: 1933814 - RNA, 19 nt, Artificial Sequence
  Description of Artificial Sequence: Synthetic oligonucleotide
cuuagagcagucauaggca

SEQ ID NO: 1933815 - RNA, 19 nt, Artificial Sequence
  Description of Artificial Sequence: Synthetic oligonucleotide
agguucuagggcugugacc

SEQ ID NO: 1933816 - RNA, 19 nt, Artificial Sequence
  Description of Artificial Sequence: Synthetic oligonucleotide
gggugaaucagguucuagg

SEQ ID NO: 1933817 - RNA, 19 nt, Artificial Sequence
  Description of Artificial Sequence: Synthetic oligonucleotide
agccagcugagucuuagag

SEQ ID NO: 1933818 - RNA, 19 nt, Artificial Sequence
  Description of Artificial Sequence: Synthetic oligonucleotide
cauuccuaugcacauacca

SEQ ID NO: 1933819 - RNA, 19 nt, Artificial Sequence
  Description of Artificial Sequence: Synthetic oligonucleotide
uaccaacacaccaaagcaa

SEQ ID NO: 1933820 - RNA, 19 nt, Artificial Sequence
  Description of Artificial Sequence: Synthetic oligonucleotide
cugauuguucaacacagca

SEQ ID NO: 1933821 - RNA, 19 nt, Artificial Sequence
  Description of Artificial Sequence: Synthetic oligonucleotide
cauaggcagagcaagucuc

SEQ ID NO: 1933822 - RNA, 19 nt, Artificial Sequence
  Description of Artificial Sequence: Synthetic oligonucleotide
uagaacagagaguucccac

SEQ ID NO: 1933823 - RNA, 19 nt, Artificial Sequence
  Description of Artificial Sequence: Synthetic oligonucleotide
ugcauacucuauaggguga

SEQ ID NO: 1933824 - RNA, 19 nt, Artificial Sequence
  Description of Artificial Sequence: Synthetic oligonucleotide
gagaacagugacccauucc

SEQ ID NO: 1933825 - RNA, 19 nt, Artificial Sequence
  Description of Artificial Sequence: Synthetic oligonucleotide
acagacuucacaguaaauu

SEQ ID NO: 1933826 - RNA, 19 nt, Artificial Sequence
  Description of Artificial Sequence: Synthetic oligonucleotide
uguguauuacaaacuccuc

SEQ ID NO: 1933827 - RNA, 19 nt, Artificial Sequence
  Description of Artificial Sequence: Synthetic oligonucleotide
agaauuguguucaggcauc

SEQ ID NO: 1933828 - RNA, 19 nt, Artificial Sequence
  Description of Artificial Sequence: Synthetic oligonucleotide
acggcugucuuguaguucu

SEQ ID NO: 1933829 - RNA, 19 nt, Artificial Sequence
  Description of Artificial Sequence: Synthetic oligonucleotide
cacuuucacagucaacaag

SEQ ID NO: 1933830 - RNA, 19 nt, Artificial Sequence
  Description of Artificial Sequence: Synthetic oligonucleotide
agauccaaaugcugggcug

SEQ ID NO: 1933831 - RNA, 19 nt, Artificial Sequence
  Description of Artificial Sequence: Synthetic oligonucleotide
uuguucaacacagcaagaa

SEQ ID NO: 1933832 - RNA, 19 nt, Artificial Sequence
  Description of Artificial Sequence: Synthetic oligonucleotide
guagcuucgguuacuacug

SEQ ID NO: 1933833 - RNA, 19 nt, Artificial Sequence
  Description of Artificial Sequence: Synthetic oligonucleotide
guaaagguuacugguuucc

SEQ ID NO: 1933834 - RNA, 19 nt, Artificial Sequence
  Description of Artificial Sequence: Synthetic oligonucleotide
ugugaguggucugagucug

SEQ ID NO: 1933835 - RNA, 19 nt, Artificial Sequence
  Description of Artificial Sequence: Synthetic oligonucleotide
acacaccaaagcaaggagg

SEQ ID NO: 1933836 - RNA, 19 nt, Artificial Sequence
  Description of Artificial Sequence: Synthetic oligonucleotide
aaccccgaagcagucuggc

SEQ ID NO: 1933837 - RNA, 19 nt, Artificial Sequence
  Description of Artificial Sequence: Synthetic oligonucleotide
auauggcaaauguacagua

SEQ ID NO: 1933838 - RNA, 19 nt, Artificial Sequence
  Description of Artificial Sequence: Synthetic oligonucleotide
auaggcagagcaagucucc

SEQ ID NO: 1933839 - RNA, 19 nt, Artificial Sequence
  Description of Artificial Sequence: Synthetic oligonucleotide
uuauggguagcaucugaaa

SEQ ID NO: 1933840 - RNA, 19 nt, Artificial Sequence
  Description of Artificial Sequence: Synthetic oligonucleotide
gauggguucauugcuuaug

SEQ ID NO: 1933841 - RNA, 19 nt, Artificial Sequence
  Description of Artificial Sequence: Synthetic oligonucleotide
ucggaggaaauauggugug

SEQ ID NO: 1933842 - RNA, 19 nt, Artificial Sequence
  Description of Artificial Sequence: Synthetic oligonucleotide
uggguagcaucugaaaaga

SEQ ID NO: 1933843 - RNA, 19 nt, Artificial Sequence
  Description of Artificial Sequence: Synthetic oligonucleotide
ccauucggaggaaauaugg

SEQ ID NO: 1933844 - RNA, 19 nt, Artificial Sequence
  Description of Artificial Sequence: Synthetic oligonucleotide
uuucuguuauagauccaaa

SEQ ID NO: 1933845 - RNA, 19 nt, Artificial Sequence
  Description of Artificial Sequence: Synthetic oligonucleotide
cagucucaauacaaacagg

SEQ ID NO: 1933846 - RNA, 19 nt, Artificial Sequence
  Description of Artificial Sequence: Synthetic oligonucleotide
aguaaaugguuuauaacuu

SEQ ID NO: 1933847 - RNA, 19 nt, Artificial Sequence
  Description of Artificial Sequence: Synthetic oligonucleotide
guuucccugauuuccagga

SEQ ID NO: 1933848 - RNA, 19 nt, Artificial Sequence
  Description of Artificial Sequence: Synthetic oligonucleotide
ucccuuugcuguaugcaca

SEQ ID NO: 1933849 - RNA, 19 nt, Artificial Sequence
  Description of Artificial Sequence: Synthetic oligonucleotide
auugguuuucgugacggcu

SEQ ID NO: 1933850 - RNA, 19 nt, Artificial Sequence
  Description of Artificial Sequence: Synthetic oligonucleotide
aaccugaaaucugaaacuu

SEQ ID NO: 1933851 - RNA, 19 nt, Artificial Sequence
  Description of Artificial Sequence: Synthetic oligonucleotide
uuuccaugggaaccaugca

SEQ ID NO: 1933852 - RNA, 19 nt, Artificial Sequence
  Description of Artificial Sequence: Synthetic oligonucleotide
guacauugcuuuucuucag

SEQ ID NO: 1933853 - RNA, 19 nt, Artificial Sequence
  Description of Artificial Sequence: Synthetic oligonucleotide
agucaacaagucaucuuac

SEQ ID NO: 1933854 - RNA, 19 nt, Artificial Sequence
  Description of Artificial Sequence: Synthetic oligonucleotide
uuucgugacggcugucuug

SEQ ID NO: 1933855 - RNA, 19 nt, Artificial Sequence
  Description of Artificial Sequence: Synthetic oligonucleotide
acucuauagggugaaucag

SEQ ID NO: 1933856 - RNA, 19 nt, Artificial Sequence
  Description of Artificial Sequence: Synthetic oligonucleotide
aucaaccgcagcagcaacc

SEQ ID NO: 1933857 - RNA, 19 nt, Artificial Sequence
  Description of Artificial Sequence: Synthetic oligonucleotide
acaguaaauuaaaauuggu

SEQ ID NO: 1933858 - RNA, 19 nt, Artificial Sequence
  Description of Artificial Sequence: Synthetic oligonucleotide
uggguucauugcuuauggg

SEQ ID NO: 1933859 - RNA, 19 nt, Artificial Sequence
  Description of Artificial Sequence: Synthetic oligonucleotide
guacagauucaucccauuc

SEQ ID NO: 1933860 - RNA, 19 nt, Artificial Sequence
  Description of Artificial Sequence: Synthetic oligonucleotide
aaaugguuuauaacuucaa

SEQ ID NO: 1933861 - RNA, 19 nt, Artificial Sequence
  Description of Artificial Sequence: Synthetic oligonucleotide
ggcagagcaagucuccagg

SEQ ID NO: 1933862 - RNA, 19 nt, Artificial Sequence
  Description of Artificial Sequence: Synthetic oligonucleotide
ucgguuacuacugcucuca

SEQ ID NO: 1933863 - RNA, 19 nt, Artificial Sequence
  Description of Artificial Sequence: Synthetic oligonucleotide
uugcaguagaacagagagu

SEQ ID NO: 1933864 - RNA, 19 nt, Artificial Sequence
  Description of Artificial Sequence: Synthetic oligonucleotide
guagcaucugaaaagaagu

SEQ ID NO: 1933865 - RNA, 19 nt, Artificial Sequence
  Description of Artificial Sequence: Synthetic oligonucleotide
cacaguuccgggagaacag

SEQ ID NO: 1933866 - RNA, 19 nt, Artificial Sequence
  Description of Artificial Sequence: Synthetic oligonucleotide
cagugacccauuccuaugc

SEQ ID NO: 1933867 - RNA, 19 nt, Artificial Sequence
  Description of Artificial Sequence: Synthetic oligonucleotide
uuacucaguagaacacaaa

SEQ ID NO: 1933868 - RNA, 19 nt, Artificial Sequence
  Description of Artificial Sequence: Synthetic oligonucleotide
uguuacuauuguuucuguu

SEQ ID NO: 1933869 - RNA, 19 nt, Artificial Sequence
  Description of Artificial Sequence: Synthetic oligonucleotide
gguucuagggcugugacca

SEQ ID NO: 1933870 - RNA, 19 nt, Artificial Sequence
  Description of Artificial Sequence: Synthetic oligonucleotide
cucccuuugcuguaugcac

SEQ ID NO: 1933871 - RNA, 19 nt, Artificial Sequence
  Description of Artificial Sequence: Synthetic oligonucleotide
gauggaguuguccuucuua

SEQ ID NO: 1933872 - RNA, 19 nt, Artificial Sequence
  Description of Artificial Sequence: Synthetic oligonucleotide
auggccgccaaagguaugg

SEQ ID NO: 1933873 - RNA, 19 nt, Artificial Sequence
  Description of Artificial Sequence: Synthetic oligonucleotide
caaaugcugggcuguggcc

SEQ ID NO: 1933874 - RNA, 19 nt, Artificial Sequence
  Description of Artificial Sequence: Synthetic oligonucleotide
uucgugacggcugucuugu

SEQ ID NO: 1933875 - RNA, 19 nt, Artificial Sequence
  Description of Artificial Sequence: Synthetic oligonucleotide
cuuucacagucaacaaguc

SEQ ID NO: 1933876 - RNA, 19 nt, Artificial Sequence
  Description of Artificial Sequence: Synthetic oligonucleotide
gcguuguacauucgaaggg

SEQ ID NO: 1933877 - RNA, 19 nt, Artificial Sequence
  Description of Artificial Sequence: Synthetic oligonucleotide
ugauggccgccaaagguau

SEQ ID NO: 1933878 - RNA, 19 nt, Artificial Sequence
  Description of Artificial Sequence: Synthetic oligonucleotide
uccaggagauaugaauugu

SEQ ID NO: 1933879 - RNA, 19 nt, Artificial Sequence
  Description of Artificial Sequence: Synthetic oligonucleotide
gugaccagguauucacugc

SEQ ID NO: 1933880 - RNA, 19 nt, Artificial Sequence
  Description of Artificial Sequence: Synthetic oligonucleotide
cugauuuccaggauggagu

SEQ ID NO: 1933881 - RNA, 19 nt, Artificial Sequence
  Description of Artificial Sequence: Synthetic oligonucleotide
ucaugugaacgcaguccug

SEQ ID NO: 1933882 - RNA, 19 nt, Artificial Sequence
  Description of Artificial Sequence: Synthetic oligonucleotide
ucaaccgcagcagcaaccu

SEQ ID NO: 1933883 - RNA, 19 nt, Artificial Sequence
  Description of Artificial Sequence: Synthetic oligonucleotide
cuacaaggaucucauguga

SEQ ID NO: 1933884 - RNA, 19 nt, Artificial Sequence
  Description of Artificial Sequence: Synthetic oligonucleotide
aacggccugugcuuauacu

SEQ ID NO: 1933885 - RNA, 19 nt, Artificial Sequence
  Description of Artificial Sequence: Synthetic oligonucleotide
ucccauucggaggaaauau

SEQ ID NO: 1933886 - RNA, 19 nt, Artificial Sequence
  Description of Artificial Sequence: Synthetic oligonucleotide
cagucaacaagucaucuua

SEQ ID NO: 1933887 - RNA, 19 nt, Artificial Sequence
  Description of Artificial Sequence: Synthetic oligonucleotide
gucucuguagcuucgguua

SEQ ID NO: 1933888 - RNA, 19 nt, Artificial Sequence
  Description of Artificial Sequence: Synthetic oligonucleotide
accagguauucacugcgcu

SEQ ID NO: 1933889 - RNA, 19 nt, Artificial Sequence
  Description of Artificial Sequence: Synthetic oligonucleotide
guccugauuguucaacaca

SEQ ID NO: 1933890 - RNA, 19 nt, Artificial Sequence
  Description of Artificial Sequence: Synthetic oligonucleotide
ugguuuucgugacggcugu

SEQ ID NO: 1933891 - RNA, 19 nt, Artificial Sequence
  Description of Artificial Sequence: Synthetic oligonucleotide
aacagagaguucccaccau

SEQ ID NO: 1933892 - RNA, 19 nt, Artificial Sequence
  Description of Artificial Sequence: Synthetic oligonucleotide
acagucaacaagucaucuu

SEQ ID NO: 1933893 - RNA, 19 nt, Artificial Sequence
  Description of Artificial Sequence: Synthetic oligonucleotide
guuucaucaaacagguaaa

SEQ ID NO: 1933894 - RNA, 19 nt, Artificial Sequence
  Description of Artificial Sequence: Synthetic oligonucleotide
ucaacacagcaagaaaauu

SEQ ID NO: 1933895 - RNA, 19 nt, Artificial Sequence
  Description of Artificial Sequence: Synthetic oligonucleotide
cagagcaagucuccaggag

SEQ ID NO: 1933896 - RNA, 19 nt, Artificial Sequence
  Description of Artificial Sequence: Synthetic oligonucleotide
guguguauuacaaacuccu

SEQ ID NO: 1933897 - RNA, 19 nt, Artificial Sequence
  Description of Artificial Sequence: Synthetic oligonucleotide
acggccugugcuuauacua

SEQ ID NO: 1933898 - RNA, 19 nt, Artificial Sequence
  Description of Artificial Sequence: Synthetic oligonucleotide
caguguuuugcaguagaac

SEQ ID NO: 1933899 - RNA, 19 nt, Artificial Sequence
  Description of Artificial Sequence: Synthetic oligonucleotide
acgcaguccugauuguuca

SEQ ID NO: 1933900 - RNA, 19 nt, Artificial Sequence
  Description of Artificial Sequence: Synthetic oligonucleotide
acaaaguaaaugguuuaua

SEQ ID NO: 1933901 - RNA, 19 nt, Artificial Sequence
  Description of Artificial Sequence: Synthetic oligonucleotide
gguguguauuacaaacucc

SEQ ID NO: 1933902 - RNA, 19 nt, Artificial Sequence
  Description of Artificial Sequence: Synthetic oligonucleotide
auacaaacaggaguuucau

SEQ ID NO: 1933903 - RNA, 19 nt, Artificial Sequence
  Description of Artificial Sequence: Synthetic oligonucleotide
guggucugagucuggaauc

SEQ ID NO: 1933904 - RNA, 19 nt, Artificial Sequence
  Description of Artificial Sequence: Synthetic oligonucleotide
uguacagauucaucccauu

SEQ ID NO: 1933905 - RNA, 19 nt, Artificial Sequence
  Description of Artificial Sequence: Synthetic oligonucleotide
gcuuauacuacaaggaucu

SEQ ID NO: 1933906 - RNA, 19 nt, Artificial Sequence
  Description of Artificial Sequence: Synthetic oligonucleotide
cagagaguucccaccauca

SEQ ID NO: 1933907 - RNA, 19 nt, Artificial Sequence
  Description of Artificial Sequence: Synthetic oligonucleotide
uuuucgugacggcugucuu

SEQ ID NO: 1933908 - RNA, 19 nt, Artificial Sequence
  Description of Artificial Sequence: Synthetic oligonucleotide
ugugaacgcaguccugauu

SEQ ID NO: 1933909 - RNA, 19 nt, Artificial Sequence
  Description of Artificial Sequence: Synthetic oligonucleotide
agugacccauuccuaugca

SEQ ID NO: 1933910 - RNA, 19 nt, Artificial Sequence
  Description of Artificial Sequence: Synthetic oligonucleotide
aaaccccgaagcagucugg

SEQ ID NO: 1933911 - RNA, 19 nt, Artificial Sequence
  Description of Artificial Sequence: Synthetic oligonucleotide
ugaguggucugagucugga

SEQ ID NO: 1933912 - RNA, 19 nt, Artificial Sequence
  Description of Artificial Sequence: Synthetic oligonucleotide
gggcguuguacauucgaag

SEQ ID NO: 1933913 - RNA, 19 nt, Artificial Sequence
  Description of Artificial Sequence: Synthetic oligonucleotide
uagcuucgguuacuacugc

SEQ ID NO: 1933914 - RNA, 19 nt, Artificial Sequence
  Description of Artificial Sequence: Synthetic oligonucleotide
caaccugaaaucugaaacu

SEQ ID NO: 1933915 - RNA, 19 nt, Artificial Sequence
  Description of Artificial Sequence: Synthetic oligonucleotide
ucauugcuuauggguagca

SEQ ID NO: 1933916 - RNA, 19 nt, Artificial Sequence
  Description of Artificial Sequence: Synthetic oligonucleotide
caacacaccaaagcaagga

SEQ ID NO: 1933917 - RNA, 19 nt, Artificial Sequence
  Description of Artificial Sequence: Synthetic oligonucleotide
gcaucaugagugugagugg

SEQ ID NO: 1933918 - RNA, 19 nt, Artificial Sequence
  Description of Artificial Sequence: Synthetic oligonucleotide
agcuucgguuacuacugcu

SEQ ID NO: 1933919 - RNA, 19 nt, Artificial Sequence
  Description of Artificial Sequence: Synthetic oligonucleotide
uccucccuuugcuguaugc

SEQ ID NO: 1933920 - RNA, 19 nt, Artificial Sequence
  Description of Artificial Sequence: Synthetic oligonucleotide
ggugacagacuucacagua

SEQ ID NO: 1933921 - RNA, 19 nt, Artificial Sequence
  Description of Artificial Sequence: Synthetic oligonucleotide
agcugagucuuagagcagu

SEQ ID NO: 1933922 - RNA, 19 nt, Artificial Sequence
  Description of Artificial Sequence: Synthetic oligonucleotide
gaaaagaaguuucccugau

SEQ ID NO: 1933923 - RNA, 19 nt, Artificial Sequence
  Description of Artificial Sequence: Synthetic oligonucleotide
caugagugugaguggucug

SEQ ID NO: 1933924 - RNA, 19 nt, Artificial Sequence
  Description of Artificial Sequence: Synthetic oligonucleotide
uucgguuacuacugcucuc

SEQ ID NO: 1933925 - RNA, 19 nt, Artificial Sequence
  Description of Artificial Sequence: Synthetic oligonucleotide
uuagugccagcuucugcau

SEQ ID NO: 1933926 - RNA, 19 nt, Artificial Sequence
  Description of Artificial Sequence: Synthetic oligonucleotide
agguauucacugcgcucuc

SEQ ID NO: 1933927 - RNA, 19 nt, Artificial Sequence
  Description of Artificial Sequence: Synthetic oligonucleotide
caugugaacgcaguccuga

SEQ ID NO: 1933928 - RNA, 19 nt, Artificial Sequence
  Description of Artificial Sequence: Synthetic oligonucleotide
ugaacgcaguccugauugu

SEQ ID NO: 1933929 - RNA, 19 nt, Artificial Sequence
  Description of Artificial Sequence: Synthetic oligonucleotide
ucuguagcuucgguuacua

SEQ ID NO: 1933930 - RNA, 19 nt, Artificial Sequence
  Description of Artificial Sequence: Synthetic oligonucleotide
gucauaggcagagcaaguc

SEQ ID NO: 1933931 - RNA, 19 nt, Artificial Sequence
  Description of Artificial Sequence: Synthetic oligonucleotide
aggugacagacuucacagu

SEQ ID NO: 1933932 - RNA, 19 nt, Artificial Sequence
  Description of Artificial Sequence: Synthetic oligonucleotide
auuguucaacacagcaaga

SEQ ID NO: 1933933 - RNA, 19 nt, Artificial Sequence
  Description of Artificial Sequence: Synthetic oligonucleotide
aggaucucaugugaacgca

SEQ ID NO: 1933934 - RNA, 19 nt, Artificial Sequence
  Description of Artificial Sequence: Synthetic oligonucleotide
gugacccauuccuaugcac

SEQ ID NO: 1933935 - RNA, 19 nt, Artificial Sequence
  Description of Artificial Sequence: Synthetic oligonucleotide
caccaucaccuuucuuagg

SEQ ID NO: 1933936 - RNA, 19 nt, Artificial Sequence
  Description of Artificial Sequence: Synthetic oligonucleotide
uacuauuguuucuguuaua

SEQ ID NO: 1933937 - RNA, 19 nt, Artificial Sequence
  Description of Artificial Sequence: Synthetic oligonucleotide
cccauuccuaugcacauac

SEQ ID NO: 1933938 - RNA, 19 nt, Artificial Sequence
  Description of Artificial Sequence: Synthetic oligonucleotide
cucaugugaacgcaguccu

SEQ ID NO: 1933939 - RNA, 19 nt, Artificial Sequence
  Description of Artificial Sequence: Synthetic oligonucleotide
caggagauaugaauugugu

SEQ ID NO: 1933940 - RNA, 19 nt, Artificial Sequence
  Description of Artificial Sequence: Synthetic oligonucleotide
caaggagggcaauggucac

SEQ ID NO: 1933941 - RNA, 19 nt, Artificial Sequence
  Description of Artificial Sequence: Synthetic oligonucleotide
caucaaccgcagcagcaac

SEQ ID NO: 1933942 - RNA, 19 nt, Artificial Sequence
  Description of Artificial Sequence: Synthetic oligonucleotide
guagaacagagaguuccca

SEQ ID NO: 1933943 - RNA, 19 nt, Artificial Sequence
  Description of Artificial Sequence: Synthetic oligonucleotide
uggaaccgccugcaucaug

SEQ ID NO: 1933944 - RNA, 19 nt, Artificial Sequence
  Description of Artificial Sequence: Synthetic oligonucleotide
gaaccgccugcaucaugag

SEQ ID NO: 1933945 - RNA, 19 nt, Artificial Sequence
  Description of Artificial Sequence: Synthetic oligonucleotide
uugugucagaggugacaga

SEQ ID NO: 1933946 - RNA, 19 nt, Artificial Sequence
  Description of Artificial Sequence: Synthetic oligonucleotide
guucaggcaucuccacuac

SEQ ID NO: 1933947 - RNA, 19 nt, Artificial Sequence
  Description of Artificial Sequence: Synthetic oligonucleotide
gccgccaaagguaugguug

SEQ ID NO: 1933948 - RNA, 19 nt, Artificial Sequence
  Description of Artificial Sequence: Synthetic oligonucleotide
ggguucauugcuuaugggu

SEQ ID NO: 1933949 - RNA, 19 nt, Artificial Sequence
  Description of Artificial Sequence: Synthetic oligonucleotide
cguuguacauucgaagggg

SEQ ID NO: 1933950 - RNA, 19 nt, Artificial Sequence
  Description of Artificial Sequence: Synthetic oligonucleotide
ccaacacaccaaagcaagg

SEQ ID NO: 1933951 - RNA, 19 nt, Artificial Sequence
  Description of Artificial Sequence: Synthetic oligonucleotide
gaccagguauucacugcgc

SEQ ID NO: 1933952 - RNA, 19 nt, Artificial Sequence
  Description of Artificial Sequence: Synthetic oligonucleotide
gguucauugcuuaugggua

SEQ ID NO: 1933953 - RNA, 19 nt, Artificial Sequence
  Description of Artificial Sequence: Synthetic oligonucleotide
augauggccgccaaaggua

SEQ ID NO: 1933954 - RNA, 19 nt, Artificial Sequence
  Description of Artificial Sequence: Synthetic oligonucleotide
aggauggaguuguccuucu

SEQ ID NO: 1933955 - RNA, 19 nt, Artificial Sequence
  Description of Artificial Sequence: Synthetic oligonucleotide
uccuucuuagugccagcuu

SEQ ID NO: 1933956 - RNA, 19 nt, Artificial Sequence
  Description of Artificial Sequence: Synthetic oligonucleotide
gucaacaagucaucuuacu

SEQ ID NO: 1933957 - RNA, 19 nt, Artificial Sequence
  Description of Artificial Sequence: Synthetic oligonucleotide
ugcgcucuccuguuacuau

SEQ ID NO: 1933958 - RNA, 19 nt, Artificial Sequence
  Description of Artificial Sequence: Synthetic oligonucleotide
gucaucuuacucaguagaa

SEQ ID NO: 1933959 - RNA, 19 nt, Artificial Sequence
  Description of Artificial Sequence: Synthetic oligonucleotide
uuccaguguuuugcaguag

SEQ ID NO: 1933960 - RNA, 19 nt, Artificial Sequence
  Description of Artificial Sequence: Synthetic oligonucleotide
cacugcgcucuccuguuac

SEQ ID NO: 1933961 - RNA, 19 nt, Artificial Sequence
  Description of Artificial Sequence: Synthetic oligonucleotide
agggugaaucagguucuag

SEQ ID NO: 1933962 - RNA, 19 nt, Artificial Sequence
  Description of Artificial Sequence: Synthetic oligonucleotide
aaaacggccugugcuuaua

SEQ ID NO: 1933963 - RNA, 19 nt, Artificial Sequence
  Description of Artificial Sequence: Synthetic oligonucleotide
ccgccaaagguaugguugg

SEQ ID NO: 1933964 - RNA, 19 nt, Artificial Sequence
  Description of Artificial Sequence: Synthetic oligonucleotide
acugcgcucuccuguuacu

SEQ ID NO: 1933965 - RNA, 19 nt, Artificial Sequence
  Description of Artificial Sequence: Synthetic oligonucleotide
acaguuccgggagaacagu

SEQ ID NO: 1933966 - RNA, 19 nt, Artificial Sequence
  Description of Artificial Sequence: Synthetic oligonucleotide
cauucggaggaaauauggu

SEQ ID NO: 1933967 - RNA, 19 nt, Artificial Sequence
  Description of Artificial Sequence: Synthetic oligonucleotide
ggaucucaugugaacgcag

SEQ ID NO: 1933968 - RNA, 19 nt, Artificial Sequence
  Description of Artificial Sequence: Synthetic oligonucleotide
acaguacauugcuuuucuu

SEQ ID NO: 1933969 - RNA, 19 nt, Artificial Sequence
  Description of Artificial Sequence: Synthetic oligonucleotide
ccugauuguucaacacagc

SEQ ID NO: 1933970 - RNA, 19 nt, Artificial Sequence
  Description of Artificial Sequence: Synthetic oligonucleotide
augugaacgcaguccugau

SEQ ID NO: 1933971 - RNA, 19 nt, Artificial Sequence
  Description of Artificial Sequence: Synthetic oligonucleotide
cagauucaucccauucgga

SEQ ID NO: 1933972 - RNA, 19 nt, Artificial Sequence
  Description of Artificial Sequence: Synthetic oligonucleotide
ccugugcuuauacuacaag

SEQ ID NO: 1933973 - RNA, 19 nt, Artificial Sequence
  Description of Artificial Sequence: Synthetic oligonucleotide
gcagcaaccugaaaucuga

SEQ ID NO: 1933974 - RNA, 19 nt, Artificial Sequence
  Description of Artificial Sequence: Synthetic oligonucleotide
gugacggcugucuuguagu

SEQ ID NO: 1933975 - RNA, 19 nt, Artificial Sequence
  Description of Artificial Sequence: Synthetic oligonucleotide
cuucgguuacuacugcucu

SEQ ID NO: 1933976 - RNA, 19 nt, Artificial Sequence
  Description of Artificial Sequence: Synthetic oligonucleotide
gcuuauggguagcaucuga

SEQ ID NO: 1933977 - RNA, 19 nt, Artificial Sequence
  Description of Artificial Sequence: Synthetic oligonucleotide
cuuauacuacaaggaucuc

SEQ ID NO: 1933978 - RNA, 19 nt, Artificial Sequence
  Description of Artificial Sequence: Synthetic oligonucleotide
gacccauuccuaugcacau

SEQ ID NO: 1933979 - RNA, 19 nt, Artificial Sequence
  Description of Artificial Sequence: Synthetic oligonucleotide
aucaccuuucuuagguuua

SEQ ID NO: 1933980 - RNA, 19 nt, Artificial Sequence
  Description of Artificial Sequence: Synthetic oligonucleotide
cauagucguccuuucuucu

SEQ ID NO: 1933981 - RNA, 19 nt, Artificial Sequence
  Description of Artificial Sequence: Synthetic oligonucleotide
ggagaacagugacccauuc

SEQ ID NO: 1933982 - RNA, 19 nt, Artificial Sequence
  Description of Artificial Sequence: Synthetic oligonucleotide
uuaagccagcugagucuua

SEQ ID NO: 1933983 - RNA, 19 nt, Artificial Sequence
  Description of Artificial Sequence: Synthetic oligonucleotide
guuuucgugacggcugucu

SEQ ID NO: 1933984 - RNA, 19 nt, Artificial Sequence
  Description of Artificial Sequence: Synthetic oligonucleotide
ggaggaaauauggugugua

SEQ ID NO: 1933985 - RNA, 19 nt, Artificial Sequence
  Description of Artificial Sequence: Synthetic oligonucleotide
gacggcugucuuguaguuc

SEQ ID NO: 1933986 - RNA, 19 nt, Artificial Sequence
  Description of Artificial Sequence: Synthetic oligonucleotide
gaacagugacccauuccua

SEQ ID NO: 1933987 - RNA, 19 nt, Artificial Sequence
  Description of Artificial Sequence: Synthetic oligonucleotide
caucaccuuucuuagguuu

SEQ ID NO: 1933988 - RNA, 19 nt, Artificial Sequence
  Description of Artificial Sequence: Synthetic oligonucleotide
ugcacaguuccgggagaac

SEQ ID NO: 1933989 - RNA, 19 nt, Artificial Sequence
  Description of Artificial Sequence: Synthetic oligonucleotide
cagaggugacagacuucac

SEQ ID NO: 1933990 - RNA, 19 nt, Artificial Sequence
  Description of Artificial Sequence: Synthetic oligonucleotide
gcagucuggcauggaaccg

SEQ ID NO: 1933991 - RNA, 19 nt, Artificial Sequence
  Description of Artificial Sequence: Synthetic oligonucleotide
cacaaaguaaaugguuuau

SEQ ID NO: 1933992 - RNA, 19 nt, Artificial Sequence
  Description of Artificial Sequence: Synthetic oligonucleotide
acaagucaucuuacucagu

SEQ ID NO: 1933993 - RNA, 19 nt, Artificial Sequence
  Description of Artificial Sequence: Synthetic oligonucleotide
gauggccgccaaagguaug

SEQ ID NO: 1933994 - RNA, 19 nt, Artificial Sequence
  Description of Artificial Sequence: Synthetic oligonucleotide
gcaguccugauuguucaac

SEQ ID NO: 1933995 - RNA, 19 nt, Artificial Sequence
  Description of Artificial Sequence: Synthetic oligonucleotide
cgugacggcugucuuguag

SEQ ID NO: 1933996 - RNA, 19 nt, Artificial Sequence
  Description of Artificial Sequence: Synthetic oligonucleotide
cccgaagcagucuggcaug

SEQ ID NO: 1933997 - RNA, 19 nt, Artificial Sequence
  Description of Artificial Sequence: Synthetic oligonucleotide
gcccaguuuaagccagcug

SEQ ID NO: 1933998 - RNA, 19 nt, Artificial Sequence
  Description of Artificial Sequence: Synthetic oligonucleotide
cagcaagaaaauucacuuu

SEQ ID NO: 1933999 - RNA, 19 nt, Artificial Sequence
  Description of Artificial Sequence: Synthetic oligonucleotide
gguuacuacugcucucacu

SEQ ID NO: 1934000 - RNA, 19 nt, Artificial Sequence
  Description of Artificial Sequence: Synthetic oligonucleotide
uucaucccauucggaggaa

SEQ ID NO: 1934001 - RNA, 19 nt, Artificial Sequence
  Description of Artificial Sequence: Synthetic oligonucleotide
caucccauucggaggaaau

SEQ ID NO: 1934002 - RNA, 19 nt, Artificial Sequence
  Description of Artificial Sequence: Synthetic oligonucleotide
ggcuguggcccaguuuaag

SEQ ID NO: 1934003 - RNA, 19 nt, Artificial Sequence
  Description of Artificial Sequence: Synthetic oligonucleotide
uagggugaaucagguucua

SEQ ID NO: 1934004 - RNA, 19 nt, Artificial Sequence
  Description of Artificial Sequence: Synthetic oligonucleotide
cugugaccagguauucacu

SEQ ID NO: 1934005 - RNA, 19 nt, Artificial Sequence
  Description of Artificial Sequence: Synthetic oligonucleotide
cuccucccuuugcuguaug

SEQ ID NO: 1934006 - RNA, 19 nt, Artificial Sequence
  Description of Artificial Sequence: Synthetic oligonucleotide
cagcaaccugaaaucugaa

SEQ ID NO: 1934007 - RNA, 19 nt, Artificial Sequence
  Description of Artificial Sequence: Synthetic oligonucleotide
gggaaccaugcauacucua

SEQ ID NO: 1934008 - RNA, 19 nt, Artificial Sequence
  Description of Artificial Sequence: Synthetic oligonucleotide
uggccgccaaagguauggu

SEQ ID NO: 1934009 - RNA, 19 nt, Artificial Sequence
  Description of Artificial Sequence: Synthetic oligonucleotide
guccuucuuagugccagcu

SEQ ID NO: 1934010 - RNA, 19 nt, Artificial Sequence
  Description of Artificial Sequence: Synthetic oligonucleotide
cggccugugcuuauacuac

SEQ ID NO: 1934011 - RNA, 19 nt, Artificial Sequence
  Description of Artificial Sequence: Synthetic oligonucleotide
cagccccaccaaugauggc

SEQ ID NO: 1934012 - RNA, 19 nt, Artificial Sequence
  Description of Artificial Sequence: Synthetic oligonucleotide
cuauagggugaaucagguu

SEQ ID NO: 1934013 - RNA, 19 nt, Artificial Sequence
  Description of Artificial Sequence: Synthetic oligonucleotide
gaguuucaucaaacaggua

SEQ ID NO: 1934014 - RNA, 19 nt, Artificial Sequence
  Description of Artificial Sequence: Synthetic oligonucleotide
ccgaagcagucuggcaugg

SEQ ID NO: 1934015 - RNA, 19 nt, Artificial Sequence
  Description of Artificial Sequence: Synthetic oligonucleotide
agcaagucuccaggagaua

SEQ ID NO: 1934016 - RNA, 19 nt, Artificial Sequence
  Description of Artificial Sequence: Synthetic oligonucleotide
caguuuaagccagcugagu

SEQ ID NO: 1934017 - RNA, 19 nt, Artificial Sequence
  Description of Artificial Sequence: Synthetic oligonucleotide
cugcauagucguccuuucu

SEQ ID NO: 1934018 - RNA, 19 nt, Artificial Sequence
  Description of Artificial Sequence: Synthetic oligonucleotide
gaacgcaguccugauuguu

SEQ ID NO: 1934019 - RNA, 19 nt, Artificial Sequence
  Description of Artificial Sequence: Synthetic oligonucleotide
caugggaaccaugcauacu

SEQ ID NO: 1934020 - RNA, 19 nt, Artificial Sequence
  Description of Artificial Sequence: Synthetic oligonucleotide
ggggcguuguacauucgaa

SEQ ID NO: 1934021 - RNA, 19 nt, Artificial Sequence
  Description of Artificial Sequence: Synthetic oligonucleotide
gcaguagaacagagaguuc

SEQ ID NO: 1934022 - RNA, 19 nt, Artificial Sequence
  Description of Artificial Sequence: Synthetic oligonucleotide
auggaaccgccugcaucau

SEQ ID NO: 1934023 - RNA, 19 nt, Artificial Sequence
  Description of Artificial Sequence: Synthetic oligonucleotide
ccucccuuugcuguaugca

SEQ ID NO: 1934024 - RNA, 19 nt, Artificial Sequence
  Description of Artificial Sequence: Synthetic oligonucleotide
ugcucucacugugguuguu

SEQ ID NO: 1934025 - RNA, 19 nt, Artificial Sequence
  Description of Artificial Sequence: Synthetic oligonucleotide
ucgugacggcugucuugua

SEQ ID NO: 1934026 - RNA, 19 nt, Artificial Sequence
  Description of Artificial Sequence: Synthetic oligonucleotide
cugcgcucuccuguuacua

SEQ ID NO: 1934027 - RNA, 19 nt, Artificial Sequence
  Description of Artificial Sequence: Synthetic oligonucleotide
ggguagcaucugaaaagaa

SEQ ID NO: 1934028 - RNA, 19 nt, Artificial Sequence
  Description of Artificial Sequence: Synthetic oligonucleotide
cauacucuauagggugaau

SEQ ID NO: 1934029 - RNA, 19 nt, Artificial Sequence
  Description of Artificial Sequence: Synthetic oligonucleotide
gguuuucgugacggcuguc

SEQ ID NO: 1934030 - RNA, 19 nt, Artificial Sequence
  Description of Artificial Sequence: Synthetic oligonucleotide
cgccaaagguaugguuggg

SEQ ID NO: 1934031 - RNA, 19 nt, Artificial Sequence
  Description of Artificial Sequence: Synthetic oligonucleotide
ccccaccaaugauggccgc

SEQ ID NO: 1934032 - RNA, 19 nt, Artificial Sequence
  Description of Artificial Sequence: Synthetic oligonucleotide
cgguuacuacugcucucac

SEQ ID NO: 1934033 - RNA, 19 nt, Artificial Sequence
  Description of Artificial Sequence: Synthetic oligonucleotide
gcgcucuccuguuacuauu

SEQ ID NO: 1934034 - RNA, 19 nt, Artificial Sequence
  Description of Artificial Sequence: Synthetic oligonucleotide
ggcauggaaccgccugcau

SEQ ID NO: 1934035 - RNA, 19 nt, Artificial Sequence
  Description of Artificial Sequence: Synthetic oligonucleotide
gcucucacugugguuguuu

SEQ ID NO: 1934036 - RNA, 19 nt, Artificial Sequence
  Description of Artificial Sequence: Synthetic oligonucleotide
ggccgccaaagguaugguu

SEQ ID NO: 1934037 - RNA, 19 nt, Artificial Sequence
  Description of Artificial Sequence: Synthetic oligonucleotide
gucuggcauggaaccgccu

SEQ ID NO: 1934038 - RNA, 19 nt, Artificial Sequence
  Description of Artificial Sequence: Synthetic oligonucleotide
ccaucaccuuucuuagguu

SEQ ID NO: 1934039 - RNA, 19 nt, Artificial Sequence
  Description of Artificial Sequence: Synthetic oligonucleotide
ccgggagaacagugaccca

SEQ ID NO: 1934040 - RNA, 19 nt, Artificial Sequence
  Description of Artificial Sequence: Synthetic oligonucleotide
gggcaguuucagucucaau

SEQ ID NO: 1934041 - RNA, 19 nt, Artificial Sequence
  Description of Artificial Sequence: Synthetic oligonucleotide
cggaggaaauauggugugu

SEQ ID NO: 1934042 - RNA, 19 nt, Artificial Sequence
  Description of Artificial Sequence: Synthetic oligonucleotide
ccgcagcagcaaccugaaa

SEQ ID NO: 1934043 - RNA, 19 nt, Artificial Sequence
  Description of Artificial Sequence: Synthetic oligonucleotide
aguacguaugcucugaguc

SEQ ID NO: 1934044 - RNA, 19 nt, Artificial Sequence
  Description of Artificial Sequence: Synthetic oligonucleotide
acuucgaagaggcugaauc

SEQ ID NO: 1934045 - RNA, 19 nt, Artificial Sequence
  Description of Artificial Sequence: Synthetic oligonucleotide
aauagcuucucuucggcug

SEQ ID NO: 1934046 - RNA, 19 nt, Artificial Sequence
  Description of Artificial Sequence: Synthetic oligonucleotide
auacucauaggcuagcgag

SEQ ID NO: 1934047 - RNA, 19 nt, Artificial Sequence
  Description of Artificial Sequence: Synthetic oligonucleotide
auuugaggcccacugaacg

SEQ ID NO: 1934048 - RNA, 19 nt, Artificial Sequence
  Description of Artificial Sequence: Synthetic oligonucleotide
aagauguaauucaaacagc

SEQ ID NO: 1934049 - RNA, 19 nt, Artificial Sequence
  Description of Artificial Sequence: Synthetic oligonucleotide
agauguaauucaaacagcg

SEQ ID NO: 1934050 - RNA, 19 nt, Artificial Sequence
  Description of Artificial Sequence: Synthetic oligonucleotide
aaucaaccuguauggcucc

SEQ ID NO: 1934051 - RNA, 19 nt, Artificial Sequence
  Description of Artificial Sequence: Synthetic oligonucleotide
ugggcuaagauguaauuca

SEQ ID NO: 1934052 - RNA, 19 nt, Artificial Sequence
  Description of Artificial Sequence: Synthetic oligonucleotide
uguaauucaaacagcgcuc

SEQ ID NO: 1934053 - RNA, 19 nt, Artificial Sequence
  Description of Artificial Sequence: Synthetic oligonucleotide
uaggcuagcgagucgaggg

SEQ ID NO: 1934054 - RNA, 19 nt, Artificial Sequence
  Description of Artificial Sequence: Synthetic oligonucleotide
cuugcagauucaauggccg

SEQ ID NO: 1934055 - RNA, 19 nt, Artificial Sequence
  Description of Artificial Sequence: Synthetic oligonucleotide
ugcaagacuggugagcucg

SEQ ID NO: 1934056 - RNA, 19 nt, Artificial Sequence
  Description of Artificial Sequence: Synthetic oligonucleotide
ucugcaguacgucagggcu

SEQ ID NO: 1934057 - RNA, 19 nt, Artificial Sequence
  Description of Artificial Sequence: Synthetic oligonucleotide
aagacuggugagcucguuc

SEQ ID NO: 1934058 - RNA, 19 nt, Artificial Sequence
  Description of Artificial Sequence: Synthetic oligonucleotide
caagggacuucgaagaggc

SEQ ID NO: 1934059 - RNA, 19 nt, Artificial Sequence
  Description of Artificial Sequence: Synthetic oligonucleotide
gacaggaccaccuugucca

SEQ ID NO: 1934060 - RNA, 19 nt, Artificial Sequence
  Description of Artificial Sequence: Synthetic oligonucleotide
gaacaagggacuucgaaga

SEQ ID NO: 1934061 - RNA, 19 nt, Artificial Sequence
  Description of Artificial Sequence: Synthetic oligonucleotide
cacaguaccagaccuaggc

SEQ ID NO: 1934062 - RNA, 19 nt, Artificial Sequence
  Description of Artificial Sequence: Synthetic oligonucleotide
cuguguaggcuucagacag

SEQ ID NO: 1934063 - RNA, 19 nt, Artificial Sequence
  Description of Artificial Sequence: Synthetic oligonucleotide
aguacgucagggcuguccg

SEQ ID NO: 1934064 - RNA, 19 nt, Artificial Sequence
  Description of Artificial Sequence: Synthetic oligonucleotide
ugcagagccuuguauauug

SEQ ID NO: 1934065 - RNA, 19 nt, Artificial Sequence
  Description of Artificial Sequence: Synthetic oligonucleotide
uuguccaguugccaucucg

SEQ ID NO: 1934066 - RNA, 19 nt, Artificial Sequence
  Description of Artificial Sequence: Synthetic oligonucleotide
acgauuagcugcuggucgc

SEQ ID NO: 1934067 - RNA, 19 nt, Artificial Sequence
  Description of Artificial Sequence: Synthetic oligonucleotide
acucugcgccauuugaggc

SEQ ID NO: 1934068 - RNA, 19 nt, Artificial Sequence
  Description of Artificial Sequence: Synthetic oligonucleotide
agugcagucgcacgucagc

SEQ ID NO: 1934069 - RNA, 19 nt, Artificial Sequence
  Description of Artificial Sequence: Synthetic oligonucleotide
cuaagauguaauucaaaca

SEQ ID NO: 1934070 - RNA, 19 nt, Artificial Sequence
  Description of Artificial Sequence: Synthetic oligonucleotide
cuugaguaucugcaguacg

SEQ ID NO: 1934071 - RNA, 19 nt, Artificial Sequence
  Description of Artificial Sequence: Synthetic oligonucleotide
ucggcuugcaugaagcgga

SEQ ID NO: 1934072 - RNA, 19 nt, Artificial Sequence
  Description of Artificial Sequence: Synthetic oligonucleotide
acagcuacgcugcagcgag

SEQ ID NO: 1934073 - RNA, 19 nt, Artificial Sequence
  Description of Artificial Sequence: Synthetic oligonucleotide
agcacgcaacuccaguugc

SEQ ID NO: 1934074 - RNA, 19 nt, Artificial Sequence
  Description of Artificial Sequence: Synthetic oligonucleotide
gcucguauagcccaucucg

SEQ ID NO: 1934075 - RNA, 19 nt, Artificial Sequence
  Description of Artificial Sequence: Synthetic oligonucleotide
ggaacaagggacuucgaag

SEQ ID NO: 1934076 - RNA, 19 nt, Artificial Sequence
  Description of Artificial Sequence: Synthetic oligonucleotide
ucgucggucagccaagugu

SEQ ID NO: 1934077 - RNA, 19 nt, Artificial Sequence
  Description of Artificial Sequence: Synthetic oligonucleotide
cacgauuagcugcuggucg

SEQ ID NO: 1934078 - RNA, 19 nt, Artificial Sequence
  Description of Artificial Sequence: Synthetic oligonucleotide
cugaccauggaacagaaaa

SEQ ID NO: 1934079 - RNA, 19 nt, Artificial Sequence
  Description of Artificial Sequence: Synthetic oligonucleotide
ucgacagcuacgcugcagc

SEQ ID NO: 1934080 - RNA, 19 nt, Artificial Sequence
  Description of Artificial Sequence: Synthetic oligonucleotide
aaagcggucagcaguagca

SEQ ID NO: 1934081 - RNA, 19 nt, Artificial Sequence
  Description of Artificial Sequence: Synthetic oligonucleotide
cuuguauauugacagcuuc

SEQ ID NO: 1934082 - RNA, 19 nt, Artificial Sequence
  Description of Artificial Sequence: Synthetic oligonucleotide
gaaucaaccuguauggcuc

SEQ ID NO: 1934083 - RNA, 19 nt, Artificial Sequence
  Description of Artificial Sequence: Synthetic oligonucleotide
guaacugcacgauuagcug

SEQ ID NO: 1934084 - RNA, 19 nt, Artificial Sequence
  Description of Artificial Sequence: Synthetic oligonucleotide
ugcucgacagcuacgcugc

SEQ ID NO: 1934085 - RNA, 19 nt, Artificial Sequence
  Description of Artificial Sequence: Synthetic oligonucleotide
agguaugcacugccuaccc

SEQ ID NO: 1934086 - RNA, 19 nt, Artificial Sequence
  Description of Artificial Sequence: Synthetic oligonucleotide
ggcugaaucaaccuguaug

SEQ ID NO: 1934087 - RNA, 19 nt, Artificial Sequence
  Description of Artificial Sequence: Synthetic oligonucleotide
cuacccacucuucaugucc

SEQ ID NO: 1934088 - RNA, 19 nt, Artificial Sequence
  Description of Artificial Sequence: Synthetic oligonucleotide
agccuuguauauugacagc

SEQ ID NO: 1934089 - RNA, 19 nt, Artificial Sequence
  Description of Artificial Sequence: Synthetic oligonucleotide
ucugcaagacuggugagcu

SEQ ID NO: 1934090 - RNA, 19 nt, Artificial Sequence
  Description of Artificial Sequence: Synthetic oligonucleotide
uacgggcugaccauggaac

SEQ ID NO: 1934091 - RNA, 19 nt, Artificial Sequence
  Description of Artificial Sequence: Synthetic oligonucleotide
guaauucaaacagcgcucc

SEQ ID NO: 1934092 - RNA, 19 nt, Artificial Sequence
  Description of Artificial Sequence: Synthetic oligonucleotide
guacguaugcucugagucc

SEQ ID NO: 1934093 - RNA, 19 nt, Artificial Sequence
  Description of Artificial Sequence: Synthetic oligonucleotide
aagugccgaggccaugcac

SEQ ID NO: 1934094 - RNA, 19 nt, Artificial Sequence
  Description of Artificial Sequence: Synthetic oligonucleotide
cacucugcgccauuugagg

SEQ ID NO: 1934095 - RNA, 19 nt, Artificial Sequence
  Description of Artificial Sequence: Synthetic oligonucleotide
uugcagauucaauggccgg

SEQ ID NO: 1934096 - RNA, 19 nt, Artificial Sequence
  Description of Artificial Sequence: Synthetic oligonucleotide
ucaaacagcgcuccucguc

SEQ ID NO: 1934097 - RNA, 19 nt, Artificial Sequence
  Description of Artificial Sequence: Synthetic oligonucleotide
ucgcacgucagcuugcgga

SEQ ID NO: 1934098 - RNA, 19 nt, Artificial Sequence
  Description of Artificial Sequence: Synthetic oligonucleotide
agacuggugagcucguucu

SEQ ID NO: 1934099 - RNA, 19 nt, Artificial Sequence
  Description of Artificial Sequence: Synthetic oligonucleotide
guaugcacugccuacccac

SEQ ID NO: 1934100 - RNA, 19 nt, Artificial Sequence
  Description of Artificial Sequence: Synthetic oligonucleotide
acucauaggcuagcgaguc

SEQ ID NO: 1934101 - RNA, 19 nt, Artificial Sequence
  Description of Artificial Sequence: Synthetic oligonucleotide
cucguauagcccaucucgc

SEQ ID NO: 1934102 - RNA, 19 nt, Artificial Sequence
  Description of Artificial Sequence: Synthetic oligonucleotide
ucgcucauacucauaggcu

SEQ ID NO: 1934103 - RNA, 19 nt, Artificial Sequence
  Description of Artificial Sequence: Synthetic oligonucleotide
uacucauaggcuagcgagu

SEQ ID NO: 1934104 - RNA, 19 nt, Artificial Sequence
  Description of Artificial Sequence: Synthetic oligonucleotide
ucaauggccgguucacuac

SEQ ID NO: 1934105 - RNA, 19 nt, Artificial Sequence
  Description of Artificial Sequence: Synthetic oligonucleotide
agauucaauggccgguuca

SEQ ID NO: 1934106 - RNA, 19 nt, Artificial Sequence
  Description of Artificial Sequence: Synthetic oligonucleotide
uacguaugcucugagucca

SEQ ID NO: 1934107 - RNA, 19 nt, Artificial Sequence
  Description of Artificial Sequence: Synthetic oligonucleotide
ucgaagaggcugaaucaac

SEQ ID NO: 1934108 - RNA, 19 nt, Artificial Sequence
  Description of Artificial Sequence: Synthetic oligonucleotide
aggcuagcgagucgagggc

SEQ ID NO: 1934109 - RNA, 19 nt, Artificial Sequence
  Description of Artificial Sequence: Synthetic oligonucleotide
agcugguugaccgcccucc

SEQ ID NO: 1934110 - RNA, 19 nt, Artificial Sequence
  Description of Artificial Sequence: Synthetic oligonucleotide
uuuuguccaguugccaucu

SEQ ID NO: 1934111 - RNA, 19 nt, Artificial Sequence
  Description of Artificial Sequence: Synthetic oligonucleotide
cucggcgaguuccucaucc

SEQ ID NO: 1934112 - RNA, 19 nt, Artificial Sequence
  Description of Artificial Sequence: Synthetic oligonucleotide
agcggucagcaguagcaac

SEQ ID NO: 1934113 - RNA, 19 nt, Artificial Sequence
  Description of Artificial Sequence: Synthetic oligonucleotide
uggaaagcggucagcagua

SEQ ID NO: 1934114 - RNA, 19 nt, Artificial Sequence
  Description of Artificial Sequence: Synthetic oligonucleotide
accguaacugcacgauuag

SEQ ID NO: 1934115 - RNA, 19 nt, Artificial Sequence
  Description of Artificial Sequence: Synthetic oligonucleotide
ugccuacccacucuucaug

SEQ ID NO: 1934116 - RNA, 19 nt, Artificial Sequence
  Description of Artificial Sequence: Synthetic oligonucleotide
uggccuagcagaucuucug

SEQ ID NO: 1934117 - RNA, 19 nt, Artificial Sequence
  Description of Artificial Sequence: Synthetic oligonucleotide
uccgcacucucugacaaug

SEQ ID NO: 1934118 - RNA, 19 nt, Artificial Sequence
  Description of Artificial Sequence: Synthetic oligonucleotide
cuucgaagaggcugaauca

SEQ ID NO: 1934119 - RNA, 19 nt, Artificial Sequence
  Description of Artificial Sequence: Synthetic oligonucleotide
caauggccgguucacuacg

SEQ ID NO: 1934120 - RNA, 19 nt, Artificial Sequence
  Description of Artificial Sequence: Synthetic oligonucleotide
uucgaagaggcugaaucaa

SEQ ID NO: 1934121 - RNA, 19 nt, Artificial Sequence
  Description of Artificial Sequence: Synthetic oligonucleotide
ucuugaguaucugcaguac

SEQ ID NO: 1934122 - RNA, 19 nt, Artificial Sequence
  Description of Artificial Sequence: Synthetic oligonucleotide
gugcucgacagcuacgcug

SEQ ID NO: 1934123 - RNA, 19 nt, Artificial Sequence
  Description of Artificial Sequence: Synthetic oligonucleotide
agaggcugaaucaaccugu

SEQ ID NO: 1934124 - RNA, 19 nt, Artificial Sequence
  Description of Artificial Sequence: Synthetic oligonucleotide
guaugcucugaguccagug

SEQ ID NO: 1934125 - RNA, 19 nt, Artificial Sequence
  Description of Artificial Sequence: Synthetic oligonucleotide
cauuugaggcccacugaac

SEQ ID NO: 1934126 - RNA, 19 nt, Artificial Sequence
  Description of Artificial Sequence: Synthetic oligonucleotide
ucguauagcccaucucgcu

SEQ ID NO: 1934127 - RNA, 19 nt, Artificial Sequence
  Description of Artificial Sequence: Synthetic oligonucleotide
agagccuuguauauugaca

SEQ ID NO: 1934128 - RNA, 19 nt, Artificial Sequence
  Description of Artificial Sequence: Synthetic oligonucleotide
aaccguaacugcacgauua

SEQ ID NO: 1934129 - RNA, 19 nt, Artificial Sequence
  Description of Artificial Sequence: Synthetic oligonucleotide
ugcacugccuacccacucu

SEQ ID NO: 1934130 - RNA, 19 nt, Artificial Sequence
  Description of Artificial Sequence: Synthetic oligonucleotide
guauagcccaucucgcuca

SEQ ID NO: 1934131 - RNA, 19 nt, Artificial Sequence
  Description of Artificial Sequence: Synthetic oligonucleotide
ugcagauucaauggccggu

SEQ ID NO: 1934132 - RNA, 19 nt, Artificial Sequence
  Description of Artificial Sequence: Synthetic oligonucleotide
cugaacgcgcgaaugucug

SEQ ID NO: 1934133 - RNA, 19 nt, Artificial Sequence
  Description of Artificial Sequence: Synthetic oligonucleotide
cuacgcugcagcgagcgcc

SEQ ID NO: 1934134 - RNA, 19 nt, Artificial Sequence
  Description of Artificial Sequence: Synthetic oligonucleotide
aauggccgguucacuacgg

SEQ ID NO: 1934135 - RNA, 19 nt, Artificial Sequence
  Description of Artificial Sequence: Synthetic oligonucleotide
guaguacguaugcucugag

SEQ ID NO: 1934136 - RNA, 19 nt, Artificial Sequence
  Description of Artificial Sequence: Synthetic oligonucleotide
ucgcgguaggcuuggagga

SEQ ID NO: 1934137 - RNA, 19 nt, Artificial Sequence
  Description of Artificial Sequence: Synthetic oligonucleotide
uaguacguaugcucugagu

SEQ ID NO: 1934138 - RNA, 19 nt, Artificial Sequence
  Description of Artificial Sequence: Synthetic oligonucleotide
cucggcuugcaugaagcgg

SEQ ID NO: 1934139 - RNA, 19 nt, Artificial Sequence
  Description of Artificial Sequence: Synthetic oligonucleotide
accccaauagccaccagug

SEQ ID NO: 1934140 - RNA, 19 nt, Artificial Sequence
  Description of Artificial Sequence: Synthetic oligonucleotide
acgcgcgaaugucugcugg

SEQ ID NO: 1934141 - RNA, 19 nt, Artificial Sequence
  Description of Artificial Sequence: Synthetic oligonucleotide
uucggcuggagagggaaca

SEQ ID NO: 1934142 - RNA, 19 nt, Artificial Sequence
  Description of Artificial Sequence: Synthetic oligonucleotide
gaccauggaacagaaaagu

SEQ ID NO: 1934143 - RNA, 19 nt, Artificial Sequence
  Description of Artificial Sequence: Synthetic oligonucleotide
cucauaggcuagcgagucg

SEQ ID NO: 1934144 - RNA, 19 nt, Artificial Sequence
  Description of Artificial Sequence: Synthetic oligonucleotide
gcggaguucauucuccagc

SEQ ID NO: 1934145 - RNA, 19 nt, Artificial Sequence
  Description of Artificial Sequence: Synthetic oligonucleotide
gcuugcaugaagcggagca

SEQ ID NO: 1934146 - RNA, 19 nt, Artificial Sequence
  Description of Artificial Sequence: Synthetic oligonucleotide
ggaggaaccggccgcacag

SEQ ID NO: 1934147 - RNA, 19 nt, Artificial Sequence
  Description of Artificial Sequence: Synthetic oligonucleotide
uacgucagggcuguccgca

SEQ ID NO: 1934148 - RNA, 19 nt, Artificial Sequence
  Description of Artificial Sequence: Synthetic oligonucleotide
ugaacgcgcgaaugucugc

SEQ ID NO: 1934149 - RNA, 19 nt, Artificial Sequence
  Description of Artificial Sequence: Synthetic oligonucleotide
aacgcgcgaaugucugcug

SEQ ID NO: 1934150 - RNA, 19 nt, Artificial Sequence
  Description of Artificial Sequence: Synthetic oligonucleotide
ucugcgccagcacgcaacu

SEQ ID NO: 1934151 - RNA, 19 nt, Artificial Sequence
  Description of Artificial Sequence: Synthetic oligonucleotide
gcaauagcuucucuucggc

SEQ ID NO: 1934152 - RNA, 19 nt, Artificial Sequence
  Description of Artificial Sequence: Synthetic oligonucleotide
guggggaccaaacccuggc

SEQ ID NO: 1934153 - RNA, 19 nt, Artificial Sequence
  Description of Artificial Sequence: Synthetic oligonucleotide
agaaccguaacugcacgau

SEQ ID NO: 1934154 - RNA, 19 nt, Artificial Sequence
  Description of Artificial Sequence: Synthetic oligonucleotide
uggaaagccugcucguaua

SEQ ID NO: 1934155 - RNA, 19 nt, Artificial Sequence
  Description of Artificial Sequence: Synthetic oligonucleotide
guggaaagcggucagcagu

SEQ ID NO: 1934156 - RNA, 19 nt, Artificial Sequence
  Description of Artificial Sequence: Synthetic oligonucleotide
ugcaguacgucagggcugu

SEQ ID NO: 1934157 - RNA, 19 nt, Artificial Sequence
  Description of Artificial Sequence: Synthetic oligonucleotide
caucucgacuccuggccgc

SEQ ID NO: 1934158 - RNA, 19 nt, Artificial Sequence
  Description of Artificial Sequence: Synthetic oligonucleotide
gcagaaccguaacugcacg

SEQ ID NO: 1934159 - RNA, 19 nt, Artificial Sequence
  Description of Artificial Sequence: Synthetic oligonucleotide
accggcaauagcuucucuu

SEQ ID NO: 1934160 - RNA, 19 nt, Artificial Sequence
  Description of Artificial Sequence: Synthetic oligonucleotide
ugcucguauagcccaucuc

SEQ ID NO: 1934161 - RNA, 19 nt, Artificial Sequence
  Description of Artificial Sequence: Synthetic oligonucleotide
uggaggaaccggccgcaca

SEQ ID NO: 1934162 - RNA, 19 nt, Artificial Sequence
  Description of Artificial Sequence: Synthetic oligonucleotide
cauaggcuagcgagucgag

SEQ ID NO: 1934163 - RNA, 19 nt, Artificial Sequence
  Description of Artificial Sequence: Synthetic oligonucleotide
cugcucugcgccagcacgc

SEQ ID NO: 1934164 - RNA, 19 nt, Artificial Sequence
  Description of Artificial Sequence: Synthetic oligonucleotide
uggggaccaaacccuggcu

SEQ ID NO: 1934165 - RNA, 19 nt, Artificial Sequence
  Description of Artificial Sequence: Synthetic oligonucleotide
cagcacgcaacuccaguug

SEQ ID NO: 1934166 - RNA, 19 nt, Artificial Sequence
  Description of Artificial Sequence: Synthetic oligonucleotide
acugaacgcgcgaaugucu

SEQ ID NO: 1934167 - RNA, 19 nt, Artificial Sequence
  Description of Artificial Sequence: Synthetic oligonucleotide
acgcccgcagaaccguaac

SEQ ID NO: 1934168 - RNA, 19 nt, Artificial Sequence
  Description of Artificial Sequence: Synthetic oligonucleotide
acgggcugaccauggaaca

SEQ ID NO: 1934169 - RNA, 19 nt, Artificial Sequence
  Description of Artificial Sequence: Synthetic oligonucleotide
aacagcgcuccucgucggu

SEQ ID NO: 1934170 - RNA, 19 nt, Artificial Sequence
  Description of Artificial Sequence: Synthetic oligonucleotide
aucucgacuccuggccgcc

SEQ ID NO: 1934171 - RNA, 19 nt, Artificial Sequence
  Description of Artificial Sequence: Synthetic oligonucleotide
caguacgucagggcugucc

SEQ ID NO: 1934172 - RNA, 19 nt, Artificial Sequence
  Description of Artificial Sequence: Synthetic oligonucleotide
ucggcgaguuccucauccc

SEQ ID NO: 1934173 - RNA, 19 nt, Artificial Sequence
  Description of Artificial Sequence: Synthetic oligonucleotide
gcagucgcacgucagcuug

SEQ ID NO: 1934174 - RNA, 19 nt, Artificial Sequence
  Description of Artificial Sequence: Synthetic oligonucleotide
gucgcugcaguggaucuug

SEQ ID NO: 1934175 - RNA, 19 nt, Artificial Sequence
  Description of Artificial Sequence: Synthetic oligonucleotide
ggccuagcagaucuucugc

SEQ ID NO: 1934176 - RNA, 19 nt, Artificial Sequence
  Description of Artificial Sequence: Synthetic oligonucleotide
agucgcacgucagcuugcg

SEQ ID NO: 1934177 - RNA, 19 nt, Artificial Sequence
  Description of Artificial Sequence: Synthetic oligonucleotide
aguggggaccaaacccugg

SEQ ID NO: 1934178 - RNA, 19 nt, Artificial Sequence
  Description of Artificial Sequence: Synthetic oligonucleotide
ggcgaguuccucaucccgg

SEQ ID NO: 1934179 - RNA, 19 nt, Artificial Sequence
  Description of Artificial Sequence: Synthetic oligonucleotide
agugcucgacagcuacgcu

SEQ ID NO: 1934180 - RNA, 19 nt, Artificial Sequence
  Description of Artificial Sequence: Synthetic oligonucleotide
acuacgggcugaccaugga

SEQ ID NO: 1934181 - RNA, 19 nt, Artificial Sequence
  Description of Artificial Sequence: Synthetic oligonucleotide
acagcgcuccucgucgguc

SEQ ID NO: 1934182 - RNA, 19 nt, Artificial Sequence
  Description of Artificial Sequence: Synthetic oligonucleotide
gacagcuacgcugcagcga

SEQ ID NO: 1934183 - RNA, 19 nt, Artificial Sequence
  Description of Artificial Sequence: Synthetic oligonucleotide
guccaguugccaucucgac

SEQ ID NO: 1934184 - RNA, 19 nt, Artificial Sequence
  Description of Artificial Sequence: Synthetic oligonucleotide
cagugcagucgcacgucag

SEQ ID NO: 1934185 - RNA, 19 nt, Artificial Sequence
  Description of Artificial Sequence: Synthetic oligonucleotide
cgagucgagggcaggaucc

SEQ ID NO: 1934186 - RNA, 19 nt, Artificial Sequence
  Description of Artificial Sequence: Synthetic oligonucleotide
agcucggcgaguuccucau

SEQ ID NO: 1934187 - RNA, 19 nt, Artificial Sequence
  Description of Artificial Sequence: Synthetic oligonucleotide
cacugaacgcgcgaauguc

SEQ ID NO: 1934188 - RNA, 19 nt, Artificial Sequence
  Description of Artificial Sequence: Synthetic oligonucleotide
uggguggaaagcggucagc

SEQ ID NO: 1934189 - RNA, 19 nt, Artificial Sequence
  Description of Artificial Sequence: Synthetic oligonucleotide
cagaaccguaacugcacga

SEQ ID NO: 1934190 - RNA, 19 nt, Artificial Sequence
  Description of Artificial Sequence: Synthetic oligonucleotide
cccucggcuugcaugaagc

SEQ ID NO: 1934191 - RNA, 19 nt, Artificial Sequence
  Description of Artificial Sequence: Synthetic oligonucleotide
cuagcgagucgagggcagg

SEQ ID NO: 1934192 - RNA, 19 nt, Artificial Sequence
  Description of Artificial Sequence: Synthetic oligonucleotide
ccaucucgacuccuggccg

SEQ ID NO: 1934193 - RNA, 19 nt, Artificial Sequence
  Description of Artificial Sequence: Synthetic oligonucleotide
gguaguacguaugcucuga

SEQ ID NO: 1934194 - RNA, 19 nt, Artificial Sequence
  Description of Artificial Sequence: Synthetic oligonucleotide
cucgacagcuacgcugcag

SEQ ID NO: 1934195 - RNA, 19 nt, Artificial Sequence
  Description of Artificial Sequence: Synthetic oligonucleotide
caaacccuggcuggccagc

SEQ ID NO: 1934196 - RNA, 19 nt, Artificial Sequence
  Description of Artificial Sequence: Synthetic oligonucleotide
aaccggccgcacagcagac

SEQ ID NO: 1934197 - RNA, 19 nt, Artificial Sequence
  Description of Artificial Sequence: Synthetic oligonucleotide
uagcgagucgagggcagga

SEQ ID NO: 1934198 - RNA, 19 nt, Artificial Sequence
  Description of Artificial Sequence: Synthetic oligonucleotide
cagucgcacgucagcuugc

SEQ ID NO: 1934199 - RNA, 19 nt, Artificial Sequence
  Description of Artificial Sequence: Synthetic oligonucleotide
acacucgccgggcuccgcu

SEQ ID NO: 1934200 - RNA, 19 nt, Artificial Sequence
  Description of Artificial Sequence: Synthetic oligonucleotide
ugcagucgcacgucagcuu

SEQ ID NO: 1934201 - RNA, 19 nt, Artificial Sequence
  Description of Artificial Sequence: Synthetic oligonucleotide
gccaugcaccucugcagcg

SEQ ID NO: 1934202 - RNA, 19 nt, Artificial Sequence
  Description of Artificial Sequence: Synthetic oligonucleotide
guacgucagggcuguccgc

SEQ ID NO: 1934203 - RNA, 19 nt, Artificial Sequence
  Description of Artificial Sequence: Synthetic oligonucleotide
cccgcagaaccguaacugc

SEQ ID NO: 1934204 - RNA, 19 nt, Artificial Sequence
  Description of Artificial Sequence: Synthetic oligonucleotide
ggguaguacguaugcucug

SEQ ID NO: 1934205 - RNA, 19 nt, Artificial Sequence
  Description of Artificial Sequence: Synthetic oligonucleotide
gucgcacgucagcuugcgg

SEQ ID NO: 1934206 - RNA, 19 nt, Artificial Sequence
  Description of Artificial Sequence: Synthetic oligonucleotide
aggcugaaucaaccuguau

SEQ ID NO: 1934207 - RNA, 19 nt, Artificial Sequence
  Description of Artificial Sequence: Synthetic oligonucleotide
agcgcggugcgcagcgccc

SEQ ID NO: 1934208 - RNA, 19 nt, Artificial Sequence
  Description of Artificial Sequence: Synthetic oligonucleotide
ccuguauggcuccacccug

SEQ ID NO: 1934209 - RNA, 19 nt, Artificial Sequence
  Description of Artificial Sequence: Synthetic oligonucleotide
gcuugcggaguucauucuc

SEQ ID NO: 1934210 - RNA, 19 nt, Artificial Sequence
  Description of Artificial Sequence: Synthetic oligonucleotide
ucucgacuccuggccgccg

SEQ ID NO: 1934211 - RNA, 19 nt, Artificial Sequence
  Description of Artificial Sequence: Synthetic oligonucleotide
cuacgggcugaccauggaa

SEQ ID NO: 1934212 - RNA, 19 nt, Artificial Sequence
  Description of Artificial Sequence: Synthetic oligonucleotide
gcuuccugggcaagugccg

SEQ ID NO: 1934213 - RNA, 19 nt, Artificial Sequence
  Description of Artificial Sequence: Synthetic oligonucleotide
accauccggcuccgccugg

SEQ ID NO: 1934214 - RNA, 19 nt, Artificial Sequence
  Description of Artificial Sequence: Synthetic oligonucleotide
caguggaucuugaguaucu

SEQ ID NO: 1934215 - RNA, 19 nt, Artificial Sequence
  Description of Artificial Sequence: Synthetic oligonucleotide
gaacgcgcgaaugucugcu

SEQ ID NO: 1934216 - RNA, 19 nt, Artificial Sequence
  Description of Artificial Sequence: Synthetic oligonucleotide
caguugccaucucgacucc

SEQ ID NO: 1934217 - RNA, 19 nt, Artificial Sequence
  Description of Artificial Sequence: Synthetic oligonucleotide
gcagacgcccgcagaaccg

SEQ ID NO: 1934218 - RNA, 19 nt, Artificial Sequence
  Description of Artificial Sequence: Synthetic oligonucleotide
gcccgcagaaccguaacug

SEQ ID NO: 1934219 - RNA, 19 nt, Artificial Sequence
  Description of Artificial Sequence: Synthetic oligonucleotide
gcgagcgccccacucugcg

SEQ ID NO: 1934220 - RNA, 19 nt, Artificial Sequence
  Description of Artificial Sequence: Synthetic oligonucleotide
accgcccuccccacaguac

SEQ ID NO: 1934221 - RNA, 19 nt, Artificial Sequence
  Description of Artificial Sequence: Synthetic oligonucleotide
ugcucugcgccagcacgca

SEQ ID NO: 1934222 - RNA, 19 nt, Artificial Sequence
  Description of Artificial Sequence: Synthetic oligonucleotide
ccucggcuugcaugaagcg

SEQ ID NO: 1934223 - RNA, 19 nt, Artificial Sequence
  Description of Artificial Sequence: Synthetic oligonucleotide
ucgcugcaguggaucuuga

SEQ ID NO: 1934224 - RNA, 19 nt, Artificial Sequence
  Description of Artificial Sequence: Synthetic oligonucleotide
gccuuguauauugacagcu

SEQ ID NO: 1934225 - RNA, 19 nt, Artificial Sequence
  Description of Artificial Sequence: Synthetic oligonucleotide
cggcaauagcuucucuucg

SEQ ID NO: 1934226 - RNA, 19 nt, Artificial Sequence
  Description of Artificial Sequence: Synthetic oligonucleotide
ccauuugaggcccacugaa

SEQ ID NO: 1934227 - RNA, 19 nt, Artificial Sequence
  Description of Artificial Sequence: Synthetic oligonucleotide
gguaugcacugccuaccca

SEQ ID NO: 1934228 - RNA, 19 nt, Artificial Sequence
  Description of Artificial Sequence: Synthetic oligonucleotide
cguauagcccaucucgcuc

SEQ ID NO: 1934229 - RNA, 19 nt, Artificial Sequence
  Description of Artificial Sequence: Synthetic oligonucleotide
cucgucggucagccaagug

SEQ ID NO: 1934230 - RNA, 19 nt, Artificial Sequence
  Description of Artificial Sequence: Synthetic oligonucleotide
cuuggaggaaccggccgca

SEQ ID NO: 1934231 - RNA, 19 nt, Artificial Sequence
  Description of Artificial Sequence: Synthetic oligonucleotide
aguugccaucucgacuccu

SEQ ID NO: 1934232 - RNA, 19 nt, Artificial Sequence
  Description of Artificial Sequence: Synthetic oligonucleotide
ccccaauagccaccagugg

SEQ ID NO: 1934233 - RNA, 19 nt, Artificial Sequence
  Description of Artificial Sequence: Synthetic oligonucleotide
cgucggucagccaaguguc

SEQ ID NO: 1934234 - RNA, 19 nt, Artificial Sequence
  Description of Artificial Sequence: Synthetic oligonucleotide
cagcguggcacggcggccc

SEQ ID NO: 1934235 - RNA, 19 nt, Artificial Sequence
  Description of Artificial Sequence: Synthetic oligonucleotide
cugcaagacuggugagcuc

SEQ ID NO: 1934236 - RNA, 19 nt, Artificial Sequence
  Description of Artificial Sequence: Synthetic oligonucleotide
gccauuugaggcccacuga

SEQ ID NO: 1934237 - RNA, 19 nt, Artificial Sequence
  Description of Artificial Sequence: Synthetic oligonucleotide
cgcagaaccguaacugcac

SEQ ID NO: 1934238 - RNA, 19 nt, Artificial Sequence
  Description of Artificial Sequence: Synthetic oligonucleotide
gucggucagccaagugucc

SEQ ID NO: 1934239 - RNA, 19 nt, Artificial Sequence
  Description of Artificial Sequence: Synthetic oligonucleotide
gucgagggcaggaucccuc

SEQ ID NO: 1934240 - RNA, 19 nt, Artificial Sequence
  Description of Artificial Sequence: Synthetic oligonucleotide
ugcgccauuugaggcccac

SEQ ID NO: 1934241 - RNA, 19 nt, Artificial Sequence
  Description of Artificial Sequence: Synthetic oligonucleotide
ggaccaaacccuggcuggc

SEQ ID NO: 1934242 - RNA, 19 nt, Artificial Sequence
  Description of Artificial Sequence: Synthetic oligonucleotide
cagcucggcgaguuccuca

SEQ ID NO: 1934243 - RNA, 19 nt, Artificial Sequence
  Description of Artificial Sequence: Synthetic oligonucleotide
gcaguggaucuugaguauc

SEQ ID NO: 1934244 - RNA, 19 nt, Artificial Sequence
  Description of Artificial Sequence: Synthetic oligonucleotide
cgccauuugaggcccacug

SEQ ID NO: 1934245 - RNA, 19 nt, Artificial Sequence
  Description of Artificial Sequence: Synthetic oligonucleotide
gcuagcgagucgagggcag

SEQ ID NO: 1934246 - RNA, 19 nt, Artificial Sequence
  Description of Artificial Sequence: Synthetic oligonucleotide
guugaccgcccuccccaca

SEQ ID NO: 1934247 - RNA, 19 nt, Artificial Sequence
  Description of Artificial Sequence: Synthetic oligonucleotide
agcgagucgagggcaggau

SEQ ID NO: 1934248 - RNA, 19 nt, Artificial Sequence
  Description of Artificial Sequence: Synthetic oligonucleotide
gggguaguacguaugcucu

SEQ ID NO: 1934249 - RNA, 19 nt, Artificial Sequence
  Description of Artificial Sequence: Synthetic oligonucleotide
gcgaguuccucaucccgga

SEQ ID NO: 1934250 - RNA, 19 nt, Artificial Sequence
  Description of Artificial Sequence: Synthetic oligonucleotide
gcugguugaccgcccuccc

SEQ ID NO: 1934251 - RNA, 19 nt, Artificial Sequence
  Description of Artificial Sequence: Synthetic oligonucleotide
augcaccucugcagcgcgg

SEQ ID NO: 1934252 - RNA, 19 nt, Artificial Sequence
  Description of Artificial Sequence: Synthetic oligonucleotide
cuggccuagcagaucuucu

SEQ ID NO: 1934253 - RNA, 19 nt, Artificial Sequence
  Description of Artificial Sequence: Synthetic oligonucleotide
cagcuacgcugcagcgagc

SEQ ID NO: 1934254 - RNA, 19 nt, Artificial Sequence
  Description of Artificial Sequence: Synthetic oligonucleotide
cagggcuguccgcacucuc

SEQ ID NO: 1934255 - RNA, 19 nt, Artificial Sequence
  Description of Artificial Sequence: Synthetic oligonucleotide
gaccgcccuccccacagua

SEQ ID NO: 1934256 - RNA, 19 nt, Artificial Sequence
  Description of Artificial Sequence: Synthetic oligonucleotide
ggaucccucagugcucgac

SEQ ID NO: 1934257 - RNA, 19 nt, Artificial Sequence
  Description of Artificial Sequence: Synthetic oligonucleotide
ccguaacugcacgauuagc

SEQ ID NO: 1934258 - RNA, 19 nt, Artificial Sequence
  Description of Artificial Sequence: Synthetic oligonucleotide
gggcuaagauguaauucaa

SEQ ID NO: 1934259 - RNA, 19 nt, Artificial Sequence
  Description of Artificial Sequence: Synthetic oligonucleotide
ccuacccacucuucauguc

SEQ ID NO: 1934260 - RNA, 19 nt, Artificial Sequence
  Description of Artificial Sequence: Synthetic oligonucleotide
gcgagucgagggcaggauc

SEQ ID NO: 1934261 - RNA, 19 nt, Artificial Sequence
  Description of Artificial Sequence: Synthetic oligonucleotide
cgacagcuacgcugcagcg

SEQ ID NO: 1934262 - RNA, 19 nt, Artificial Sequence
  Description of Artificial Sequence: Synthetic oligonucleotide
agcguggcacggcggcccu

SEQ ID NO: 1934263 - RNA, 19 nt, Artificial Sequence
  Description of Artificial Sequence: Synthetic oligonucleotide
gaccuaggccaggccacca

SEQ ID NO: 1934264 - RNA, 19 nt, Artificial Sequence
  Description of Artificial Sequence: Synthetic oligonucleotide
agcgccccacucugcgcca

SEQ ID NO: 1934265 - RNA, 19 nt, Artificial Sequence
  Description of Artificial Sequence: Synthetic oligonucleotide
gacgcccgcagaaccguaa

SEQ ID NO: 1934266 - RNA, 19 nt, Artificial Sequence
  Description of Artificial Sequence: Synthetic oligonucleotide
ccgcagaaccguaacugca

SEQ ID NO: 1934267 - RNA, 19 nt, Artificial Sequence
  Description of Artificial Sequence: Synthetic oligonucleotide
ccuaggccaggccaccauc

SEQ ID NO: 1934268 - RNA, 19 nt, Artificial Sequence
  Description of Artificial Sequence: Synthetic oligonucleotide
gguugaccgcccuccccac

SEQ ID NO: 1934269 - RNA, 19 nt, Artificial Sequence
  Description of Artificial Sequence: Synthetic oligonucleotide
ccucgcgguaggcuuggag

SEQ ID NO: 1934270 - RNA, 19 nt, Artificial Sequence
  Description of Artificial Sequence: Synthetic oligonucleotide
cggcgaguuccucaucccg

SEQ ID NO: 1934271 - RNA, 19 nt, Artificial Sequence
  Description of Artificial Sequence: Synthetic oligonucleotide
cagcugguugaccgcccuc

SEQ ID NO: 1934272 - RNA, 19 nt, Artificial Sequence
  Description of Artificial Sequence: Synthetic oligonucleotide
gguucacuacgggcugacc

SEQ ID NO: 1934273 - RNA, 19 nt, Artificial Sequence
  Description of Artificial Sequence: Synthetic oligonucleotide
cccacucugcgccauuuga

SEQ ID NO: 1934274 - RNA, 19 nt, Artificial Sequence
  Description of Artificial Sequence: Synthetic oligonucleotide
cugcucguauagcccaucu

SEQ ID NO: 1934275 - RNA, 19 nt, Artificial Sequence
  Description of Artificial Sequence: Synthetic oligonucleotide
ccuggccuagcagaucuuc

SEQ ID NO: 1934276 - RNA, 19 nt, Artificial Sequence
  Description of Artificial Sequence: Synthetic oligonucleotide
aggaucccucagugcucga

SEQ ID NO: 1934277 - RNA, 19 nt, Artificial Sequence
  Description of Artificial Sequence: Synthetic oligonucleotide
gcgguaggcuuggaggaac

SEQ ID NO: 1934278 - RNA, 19 nt, Artificial Sequence
  Description of Artificial Sequence: Synthetic oligonucleotide
gcuacgcugcagcgagcgc

SEQ ID NO: 1934279 - RNA, 19 nt, Artificial Sequence
  Description of Artificial Sequence: Synthetic oligonucleotide
agggaacaagggacuucga

SEQ ID NO: 1934280 - RNA, 19 nt, Artificial Sequence
  Description of Artificial Sequence: Synthetic oligonucleotide
cugccuacccacucuucau

SEQ ID NO: 1934281 - RNA, 19 nt, Artificial Sequence
  Description of Artificial Sequence: Synthetic oligonucleotide
cgguaggcuuggaggaacc

SEQ ID NO: 1934282 - RNA, 19 nt, Artificial Sequence
  Description of Artificial Sequence: Synthetic oligonucleotide
aggccaccauccggcuccg

SEQ ID NO: 1934283 - RNA, 19 nt, Artificial Sequence
  Description of Artificial Sequence: Synthetic oligonucleotide
ggcuugcaugaagcggagc

SEQ ID NO: 1934284 - RNA, 19 nt, Artificial Sequence
  Description of Artificial Sequence: Synthetic oligonucleotide
gcagagccuuguauauuga

SEQ ID NO: 1934285 - RNA, 19 nt, Artificial Sequence
  Description of Artificial Sequence: Synthetic oligonucleotide
ggcaggccaccggcaauag

SEQ ID NO: 1934286 - RNA, 19 nt, Artificial Sequence
  Description of Artificial Sequence: Synthetic oligonucleotide
aggccaccggcaauagcuu

SEQ ID NO: 1934287 - RNA, 19 nt, Artificial Sequence
  Description of Artificial Sequence: Synthetic oligonucleotide
gacuucgaagaggcugaau

SEQ ID NO: 1934288 - RNA, 19 nt, Artificial Sequence
  Description of Artificial Sequence: Synthetic oligonucleotide
ccagugcagucgcacguca

SEQ ID NO: 1934289 - RNA, 19 nt, Artificial Sequence
  Description of Artificial Sequence: Synthetic oligonucleotide
cacacucgccgggcuccgc

SEQ ID NO: 1934290 - RNA, 19 nt, Artificial Sequence
  Description of Artificial Sequence: Synthetic oligonucleotide
gccgcaccgcuuccugggc

SEQ ID NO: 1934291 - RNA, 19 nt, Artificial Sequence
  Description of Artificial Sequence: Synthetic oligonucleotide
gcacgcaacuccaguugca

SEQ ID NO: 1934292 - RNA, 19 nt, Artificial Sequence
  Description of Artificial Sequence: Synthetic oligonucleotide
gcgcgaaugucugcugguc

SEQ ID NO: 1934293 - RNA, 19 nt, Artificial Sequence
  Description of Artificial Sequence: Synthetic oligonucleotide
ggcaagugccgaggccaug

SEQ ID NO: 1934294 - RNA, 19 nt, Artificial Sequence
  Description of Artificial Sequence: Synthetic oligonucleotide
cguggcacggcggcccucg

SEQ ID NO: 1934295 - RNA, 19 nt, Artificial Sequence
  Description of Artificial Sequence: Synthetic oligonucleotide
cgggcugaccauggaacag

SEQ ID NO: 1934296 - RNA, 19 nt, Artificial Sequence
  Description of Artificial Sequence: Synthetic oligonucleotide
ccacugaacgcgcgaaugu

SEQ ID NO: 1934297 - RNA, 19 nt, Artificial Sequence
  Description of Artificial Sequence: Synthetic oligonucleotide
cggcuugcaugaagcggag

SEQ ID NO: 1934298 - RNA, 19 nt, Artificial Sequence
  Description of Artificial Sequence: Synthetic oligonucleotide
cugcgccagcacgcaacuc

SEQ ID NO: 1934299 - RNA, 19 nt, Artificial Sequence
  Description of Artificial Sequence: Synthetic oligonucleotide
cagacgcccgcagaaccgu

SEQ ID NO: 1934300 - RNA, 19 nt, Artificial Sequence
  Description of Artificial Sequence: Synthetic oligonucleotide
ccaccggcaauagcuucuc

SEQ ID NO: 1934301 - RNA, 19 nt, Artificial Sequence
  Description of Artificial Sequence: Synthetic oligonucleotide
ggcccacugaacgcgcgaa

SEQ ID NO: 1934302 - RNA, 19 nt, Artificial Sequence
  Description of Artificial Sequence: Synthetic oligonucleotide
ccugcucguauagcccauc

SEQ ID NO: 1934303 - RNA, 19 nt, Artificial Sequence
  Description of Artificial Sequence: Synthetic oligonucleotide
cggcccucggcuugcauga

SEQ ID NO: 1934304 - RNA, 19 nt, Artificial Sequence
  Description of Artificial Sequence: Synthetic oligonucleotide
guccgcacucucugacaau

SEQ ID NO: 1934305 - RNA, 19 nt, Artificial Sequence
  Description of Artificial Sequence: Synthetic oligonucleotide
gcucgacagcuacgcugca

SEQ ID NO: 1934306 - RNA, 19 nt, Artificial Sequence
  Description of Artificial Sequence: Synthetic oligonucleotide
gcucggcgaguuccucauc

SEQ ID NO: 1934307 - RNA, 19 nt, Artificial Sequence
  Description of Artificial Sequence: Synthetic oligonucleotide
cgucagcuugcggaguuca

SEQ ID NO: 1934308 - RNA, 19 nt, Artificial Sequence
  Description of Artificial Sequence: Synthetic oligonucleotide
ccgcacacucgccgggcuc

SEQ ID NO: 1934309 - RNA, 19 nt, Artificial Sequence
  Description of Artificial Sequence: Synthetic oligonucleotide
ccgaggccaugcaccucug

SEQ ID NO: 1934310 - RNA, 19 nt, Artificial Sequence
  Description of Artificial Sequence: Synthetic oligonucleotide
gcucugcgccagcacgcaa

SEQ ID NO: 1934311 - RNA, 19 nt, Artificial Sequence
  Description of Artificial Sequence: Synthetic oligonucleotide
caccggcaauagcuucucu

SEQ ID NO: 1934312 - RNA, 19 nt, Artificial Sequence
  Description of Artificial Sequence: Synthetic oligonucleotide
gcaagacuggugagcucgu

SEQ ID NO: 1934313 - RNA, 19 nt, Artificial Sequence
  Description of Artificial Sequence: Synthetic oligonucleotide
caagacuggugagcucguu

SEQ ID NO: 1934314 - RNA, 19 nt, Artificial Sequence
  Description of Artificial Sequence: Synthetic oligonucleotide
ccgcaccgcuuccugggca

SEQ ID NO: 1934315 - RNA, 19 nt, Artificial Sequence
  Description of Artificial Sequence: Synthetic oligonucleotide
ccggucgggcuucugggcu

SEQ ID NO: 1934316 - RNA, 19 nt, Artificial Sequence
  Description of Artificial Sequence: Synthetic oligonucleotide
gccgcacacucgccgggcu

SEQ ID NO: 1934317 - RNA, 19 nt, Artificial Sequence
  Description of Artificial Sequence: Synthetic oligonucleotide
ccgguucacuacgggcuga

SEQ ID NO: 1934318 - RNA, 19 nt, Artificial Sequence
  Description of Artificial Sequence: Synthetic oligonucleotide
cgccgcacacucgccgggc

SEQ ID NO: 1934319 - RNA, 19 nt, Artificial Sequence
  Description of Artificial Sequence: Synthetic oligonucleotide
ccggagccggucgggcuuc

SEQ ID NO: 1934320 - RNA, 19 nt, Artificial Sequence
  Description of Artificial Sequence: Synthetic oligonucleotide
ggucgcugcaguggaucuu

SEQ ID NO: 1934321 - RNA, 19 nt, Artificial Sequence
  Description of Artificial Sequence: Synthetic oligonucleotide
ccgccuggccuagcagauc

SEQ ID NO: 1934322 - RNA, 19 nt, Artificial Sequence
  Description of Artificial Sequence: Synthetic oligonucleotide
cgcgcgaaugucugcuggu

SEQ ID NO: 1934323 - RNA, 19 nt, Artificial Sequence
  Description of Artificial Sequence: Synthetic oligonucleotide
cguaugcucugaguccagu

SEQ ID NO: 1934324 - RNA, 19 nt, Artificial Sequence
  Description of Artificial Sequence: Synthetic oligonucleotide
gcgccauuugaggcccacu

SEQ ID NO: 1934325 - RNA, 19 nt, Artificial Sequence
  Description of Artificial Sequence: Synthetic oligonucleotide
gcaguacgucagggcuguc

SEQ ID NO: 1934326 - RNA, 19 nt, Artificial Sequence
  Description of Artificial Sequence: Synthetic oligonucleotide
gccugcucguauagcccau

SEQ ID NO: 1934327 - RNA, 19 nt, Artificial Sequence
  Description of Artificial Sequence: Synthetic oligonucleotide
cgcgguaggcuuggaggaa

SEQ ID NO: 1934328 - RNA, 19 nt, Artificial Sequence
  Description of Artificial Sequence: Synthetic oligonucleotide
cgcccgcagaaccguaacu

SEQ ID NO: 1934329 - RNA, 19 nt, Artificial Sequence
  Description of Artificial Sequence: Synthetic oligonucleotide
ccucgucggucagccaagu

SEQ ID NO: 1934330 - RNA, 19 nt, Artificial Sequence
  Description of Artificial Sequence: Synthetic oligonucleotide
gcguggcacggcggcccuc

SEQ ID NO: 1934331 - RNA, 19 nt, Artificial Sequence
  Description of Artificial Sequence: Synthetic oligonucleotide
gcgccccacucugcgccau

SEQ ID NO: 1934332 - RNA, 19 nt, Artificial Sequence
  Description of Artificial Sequence: Synthetic oligonucleotide
cggcuccgccuggccuagc

SEQ ID NO: 1934333 - RNA, 19 nt, Artificial Sequence
  Description of Artificial Sequence: Synthetic oligonucleotide
ucuaguuaaguuuagcugg

SEQ ID NO: 1934334 - RNA, 19 nt, Artificial Sequence
  Description of Artificial Sequence: Synthetic oligonucleotide
gaauuaaaagcauuggucc

SEQ ID NO: 1934335 - RNA, 19 nt, Artificial Sequence
  Description of Artificial Sequence: Synthetic oligonucleotide
uuagcagggauuaugagcc

SEQ ID NO: 1934336 - RNA, 19 nt, Artificial Sequence
  Description of Artificial Sequence: Synthetic oligonucleotide
aaagauguguacccagucc

SEQ ID NO: 1934337 - RNA, 19 nt, Artificial Sequence
  Description of Artificial Sequence: Synthetic oligonucleotide
aauagggugggcuauuagg

SEQ ID NO: 1934338 - RNA, 19 nt, Artificial Sequence
  Description of Artificial Sequence: Synthetic oligonucleotide
ucaaaggcaguacagagcc

SEQ ID NO: 1934339 - RNA, 19 nt, Artificial Sequence
  Description of Artificial Sequence: Synthetic oligonucleotide
aauuucagguuccauaugu

SEQ ID NO: 1934340 - RNA, 19 nt, Artificial Sequence
  Description of Artificial Sequence: Synthetic oligonucleotide
cauaguggcaggaugaugg

SEQ ID NO: 1934341 - RNA, 19 nt, Artificial Sequence
  Description of Artificial Sequence: Synthetic oligonucleotide
gaugaugggguuuagauga

SEQ ID NO: 1934342 - RNA, 19 nt, Artificial Sequence
  Description of Artificial Sequence: Synthetic oligonucleotide
uccaaaucggggaaaauag

SEQ ID NO: 1934343 - RNA, 19 nt, Artificial Sequence
  Description of Artificial Sequence: Synthetic oligonucleotide
aguugguucauguacuugg

SEQ ID NO: 1934344 - RNA, 19 nt, Artificial Sequence
  Description of Artificial Sequence: Synthetic oligonucleotide
aaucggggaaaauagggug

SEQ ID NO: 1934345 - RNA, 19 nt, Artificial Sequence
  Description of Artificial Sequence: Synthetic oligonucleotide
aaugaaguccaucccuuuc

SEQ ID NO: 1934346 - RNA, 19 nt, Artificial Sequence
  Description of Artificial Sequence: Synthetic oligonucleotide
caaaucggggaaaauaggg

SEQ ID NO: 1934347 - RNA, 19 nt, Artificial Sequence
  Description of Artificial Sequence: Synthetic oligonucleotide
aagccuaucuuccaggcug

SEQ ID NO: 1934348 - RNA, 19 nt, Artificial Sequence
  Description of Artificial Sequence: Synthetic oligonucleotide
aucccuuucugguagacac

SEQ ID NO: 1934349 - RNA, 19 nt, Artificial Sequence
  Description of Artificial Sequence: Synthetic oligonucleotide
cuugaaugaagucugugag

SEQ ID NO: 1934350 - RNA, 19 nt, Artificial Sequence
  Description of Artificial Sequence: Synthetic oligonucleotide
aacucauguuuacuuuccc

SEQ ID NO: 1934351 - RNA, 19 nt, Artificial Sequence
  Description of Artificial Sequence: Synthetic oligonucleotide
uuaugagccaaucuaucug

SEQ ID NO: 1934352 - RNA, 19 nt, Artificial Sequence
  Description of Artificial Sequence: Synthetic oligonucleotide
ucagguuccauaugugacg

SEQ ID NO: 1934353 - RNA, 19 nt, Artificial Sequence
  Description of Artificial Sequence: Synthetic oligonucleotide
uuuagcugggcuugaaucc

SEQ ID NO: 1934354 - RNA, 19 nt, Artificial Sequence
  Description of Artificial Sequence: Synthetic oligonucleotide
ugguucauguacuuggucc

SEQ ID NO: 1934355 - RNA, 19 nt, Artificial Sequence
  Description of Artificial Sequence: Synthetic oligonucleotide
cuuuccaaacccuggaggg

SEQ ID NO: 1934356 - RNA, 19 nt, Artificial Sequence
  Description of Artificial Sequence: Synthetic oligonucleotide
uaugugacggaguuucagg

SEQ ID NO: 1934357 - RNA, 19 nt, Artificial Sequence
  Description of Artificial Sequence: Synthetic oligonucleotide
ucuggaaagauguguaccc

SEQ ID NO: 1934358 - RNA, 19 nt, Artificial Sequence
  Description of Artificial Sequence: Synthetic oligonucleotide
ucaauuucagguuccauau

SEQ ID NO: 1934359 - RNA, 19 nt, Artificial Sequence
  Description of Artificial Sequence: Synthetic oligonucleotide
agggagugcacugaaaggc

SEQ ID NO: 1934360 - RNA, 19 nt, Artificial Sequence
  Description of Artificial Sequence: Synthetic oligonucleotide
gaagaaaugggagugcagc

SEQ ID NO: 1934361 - RNA, 19 nt, Artificial Sequence
  Description of Artificial Sequence: Synthetic oligonucleotide
agcgcaggaacucagaacu

SEQ ID NO: 1934362 - RNA, 19 nt, Artificial Sequence
  Description of Artificial Sequence: Synthetic oligonucleotide
agcacggugauuuucuguc

SEQ ID NO: 1934363 - RNA, 19 nt, Artificial Sequence
  Description of Artificial Sequence: Synthetic oligonucleotide
agaugagggucauccaugc

SEQ ID NO: 1934364 - RNA, 19 nt, Artificial Sequence
  Description of Artificial Sequence: Synthetic oligonucleotide
auuaugagccaaucuaucu

SEQ ID NO: 1934365 - RNA, 19 nt, Artificial Sequence
  Description of Artificial Sequence: Synthetic oligonucleotide
uacagaacuucuuuguugu

SEQ ID NO: 1934366 - RNA, 19 nt, Artificial Sequence
  Description of Artificial Sequence: Synthetic oligonucleotide
ugagggucauccaugcagg

SEQ ID NO: 1934367 - RNA, 19 nt, Artificial Sequence
  Description of Artificial Sequence: Synthetic oligonucleotide
uuguuuucugcccggagcc

SEQ ID NO: 1934368 - RNA, 19 nt, Artificial Sequence
  Description of Artificial Sequence: Synthetic oligonucleotide
agacuggguaggcaaagcc

SEQ ID NO: 1934369 - RNA, 19 nt, Artificial Sequence
  Description of Artificial Sequence: Synthetic oligonucleotide
uaggcaaagccuaucuucc

SEQ ID NO: 1934370 - RNA, 19 nt, Artificial Sequence
  Description of Artificial Sequence: Synthetic oligonucleotide
auuagggaggacaucauuc

SEQ ID NO: 1934371 - RNA, 19 nt, Artificial Sequence
  Description of Artificial Sequence: Synthetic oligonucleotide
uaugagccaaucuaucuga

SEQ ID NO: 1934372 - RNA, 19 nt, Artificial Sequence
  Description of Artificial Sequence: Synthetic oligonucleotide
gaaaugggagugcagcucc

SEQ ID NO: 1934373 - RNA, 19 nt, Artificial Sequence
  Description of Artificial Sequence: Synthetic oligonucleotide
auacagaacuucuuuguug

SEQ ID NO: 1934374 - RNA, 19 nt, Artificial Sequence
  Description of Artificial Sequence: Synthetic oligonucleotide
uuaaguuuagcugggcuug

SEQ ID NO: 1934375 - RNA, 19 nt, Artificial Sequence
  Description of Artificial Sequence: Synthetic oligonucleotide
aaggcuucccaaucagcac

SEQ ID NO: 1934376 - RNA, 19 nt, Artificial Sequence
  Description of Artificial Sequence: Synthetic oligonucleotide
uuuccgaaucuccacagcu

SEQ ID NO: 1934377 - RNA, 19 nt, Artificial Sequence
  Description of Artificial Sequence: Synthetic oligonucleotide
aaucuuagcagggauuaug

SEQ ID NO: 1934378 - RNA, 19 nt, Artificial Sequence
  Description of Artificial Sequence: Synthetic oligonucleotide
acugaaaggcuucccaauc

SEQ ID NO: 1934379 - RNA, 19 nt, Artificial Sequence
  Description of Artificial Sequence: Synthetic oligonucleotide
acaucauucauuccaacau

SEQ ID NO: 1934380 - RNA, 19 nt, Artificial Sequence
  Description of Artificial Sequence: Synthetic oligonucleotide
uucagguuccauaugugac

SEQ ID NO: 1934381 - RNA, 19 nt, Artificial Sequence
  Description of Artificial Sequence: Synthetic oligonucleotide
cuaguuaaguuuagcuggg

SEQ ID NO: 1934382 - RNA, 19 nt, Artificial Sequence
  Description of Artificial Sequence: Synthetic oligonucleotide
uucuuuguugugcacggug

SEQ ID NO: 1934383 - RNA, 19 nt, Artificial Sequence
  Description of Artificial Sequence: Synthetic oligonucleotide
aauuccccacuugaagcgc

SEQ ID NO: 1934384 - RNA, 19 nt, Artificial Sequence
  Description of Artificial Sequence: Synthetic oligonucleotide
caauuccccacuugaagcg

SEQ ID NO: 1934385 - RNA, 19 nt, Artificial Sequence
  Description of Artificial Sequence: Synthetic oligonucleotide
gauuggugguuggagaccg

SEQ ID NO: 1934386 - RNA, 19 nt, Artificial Sequence
  Description of Artificial Sequence: Synthetic oligonucleotide
cuuguuuucugcccggagc

SEQ ID NO: 1934387 - RNA, 19 nt, Artificial Sequence
  Description of Artificial Sequence: Synthetic oligonucleotide
auagggugggcuauuaggg

SEQ ID NO: 1934388 - RNA, 19 nt, Artificial Sequence
  Description of Artificial Sequence: Synthetic oligonucleotide
aaacucaaaggcaguacag

SEQ ID NO: 1934389 - RNA, 19 nt, Artificial Sequence
  Description of Artificial Sequence: Synthetic oligonucleotide
aagcauugguccaucuccc

SEQ ID NO: 1934390 - RNA, 19 nt, Artificial Sequence
  Description of Artificial Sequence: Synthetic oligonucleotide
aggcuucccaaucagcacg

SEQ ID NO: 1934391 - RNA, 19 nt, Artificial Sequence
  Description of Artificial Sequence: Synthetic oligonucleotide
ugaagaaaugggagugcag

SEQ ID NO: 1934392 - RNA, 19 nt, Artificial Sequence
  Description of Artificial Sequence: Synthetic oligonucleotide
aguuaaguuuagcugggcu

SEQ ID NO: 1934393 - RNA, 19 nt, Artificial Sequence
  Description of Artificial Sequence: Synthetic oligonucleotide
uucaguuccgaccccgcag

SEQ ID NO: 1934394 - RNA, 19 nt, Artificial Sequence
  Description of Artificial Sequence: Synthetic oligonucleotide
gaaacaucuaguuaaguuu

SEQ ID NO: 1934395 - RNA, 19 nt, Artificial Sequence
  Description of Artificial Sequence: Synthetic oligonucleotide
aacgcaucaauuucagguu

SEQ ID NO: 1934396 - RNA, 19 nt, Artificial Sequence
  Description of Artificial Sequence: Synthetic oligonucleotide
ugggcuauuagggaggaca

SEQ ID NO: 1934397 - RNA, 19 nt, Artificial Sequence
  Description of Artificial Sequence: Synthetic oligonucleotide
acucagaacucauguuuac

SEQ ID NO: 1934398 - RNA, 19 nt, Artificial Sequence
  Description of Artificial Sequence: Synthetic oligonucleotide
acaucuaguuaaguuuagc

SEQ ID NO: 1934399 - RNA, 19 nt, Artificial Sequence
  Description of Artificial Sequence: Synthetic oligonucleotide
guuuagcugggcuugaauc

SEQ ID NO: 1934400 - RNA, 19 nt, Artificial Sequence
  Description of Artificial Sequence: Synthetic oligonucleotide
cauggucaggucuuagggg

SEQ ID NO: 1934401 - RNA, 19 nt, Artificial Sequence
  Description of Artificial Sequence: Synthetic oligonucleotide
ugcacggugaguugguuca

SEQ ID NO: 1934402 - RNA, 19 nt, Artificial Sequence
  Description of Artificial Sequence: Synthetic oligonucleotide
gacgcuacuggcuaugguc

SEQ ID NO: 1934403 - RNA, 19 nt, Artificial Sequence
  Description of Artificial Sequence: Synthetic oligonucleotide
gaacggccacuucacaugg

SEQ ID NO: 1934404 - RNA, 19 nt, Artificial Sequence
  Description of Artificial Sequence: Synthetic oligonucleotide
aaacaucuaguuaaguuua

SEQ ID NO: 1934405 - RNA, 19 nt, Artificial Sequence
  Description of Artificial Sequence: Synthetic oligonucleotide
aaaucggggaaaauagggu

SEQ ID NO: 1934406 - RNA, 19 nt, Artificial Sequence
  Description of Artificial Sequence: Synthetic oligonucleotide
aaucagcacggugauuuuc

SEQ ID NO: 1934407 - RNA, 19 nt, Artificial Sequence
  Description of Artificial Sequence: Synthetic oligonucleotide
gagccgcucaagcacaggg

SEQ ID NO: 1934408 - RNA, 19 nt, Artificial Sequence
  Description of Artificial Sequence: Synthetic oligonucleotide
aaugguuguggagcuguuc

SEQ ID NO: 1934409 - RNA, 19 nt, Artificial Sequence
  Description of Artificial Sequence: Synthetic oligonucleotide
gaaguccaucccuuucugg

SEQ ID NO: 1934410 - RNA, 19 nt, Artificial Sequence
  Description of Artificial Sequence: Synthetic oligonucleotide
aaucagccgcccaauuccc

SEQ ID NO: 1934411 - RNA, 19 nt, Artificial Sequence
  Description of Artificial Sequence: Synthetic oligonucleotide
ggccacuucacauggaggg

SEQ ID NO: 1934412 - RNA, 19 nt, Artificial Sequence
  Description of Artificial Sequence: Synthetic oligonucleotide
ggugaguugguucauguac

SEQ ID NO: 1934413 - RNA, 19 nt, Artificial Sequence
  Description of Artificial Sequence: Synthetic oligonucleotide
ucaguuccgaccccgcagc

SEQ ID NO: 1934414 - RNA, 19 nt, Artificial Sequence
  Description of Artificial Sequence: Synthetic oligonucleotide
caaagccuaucuuccaggc

SEQ ID NO: 1934415 - RNA, 19 nt, Artificial Sequence
  Description of Artificial Sequence: Synthetic oligonucleotide
ugaaguccaucccuuucug

SEQ ID NO: 1934416 - RNA, 19 nt, Artificial Sequence
  Description of Artificial Sequence: Synthetic oligonucleotide
aaagccuaucuuccaggcu

SEQ ID NO: 1934417 - RNA, 19 nt, Artificial Sequence
  Description of Artificial Sequence: Synthetic oligonucleotide
cauugguccaucucccagc

SEQ ID NO: 1934418 - RNA, 19 nt, Artificial Sequence
  Description of Artificial Sequence: Synthetic oligonucleotide
gagccaagcaagcuugggc

SEQ ID NO: 1934419 - RNA, 19 nt, Artificial Sequence
  Description of Artificial Sequence: Synthetic oligonucleotide
agagaugagggucauccau

SEQ ID NO: 1934420 - RNA, 19 nt, Artificial Sequence
  Description of Artificial Sequence: Synthetic oligonucleotide
agacccaugacgacgcuac

SEQ ID NO: 1934421 - RNA, 19 nt, Artificial Sequence
  Description of Artificial Sequence: Synthetic oligonucleotide
uuccauaugugacggaguu

SEQ ID NO: 1934422 - RNA, 19 nt, Artificial Sequence
  Description of Artificial Sequence: Synthetic oligonucleotide
acucauguuuacuuucccu

SEQ ID NO: 1934423 - RNA, 19 nt, Artificial Sequence
  Description of Artificial Sequence: Synthetic oligonucleotide
uugcccaagcugaagaaau

SEQ ID NO: 1934424 - RNA, 19 nt, Artificial Sequence
  Description of Artificial Sequence: Synthetic oligonucleotide
uguuccgccugcaucuuca

SEQ ID NO: 1934425 - RNA, 19 nt, Artificial Sequence
  Description of Artificial Sequence: Synthetic oligonucleotide
cauucauuccaacaugcca

SEQ ID NO: 1934426 - RNA, 19 nt, Artificial Sequence
  Description of Artificial Sequence: Synthetic oligonucleotide
uggaaaugguuguggagcu

SEQ ID NO: 1934427 - RNA, 19 nt, Artificial Sequence
  Description of Artificial Sequence: Synthetic oligonucleotide
agugcacugaaaggcuucc

SEQ ID NO: 1934428 - RNA, 19 nt, Artificial Sequence
  Description of Artificial Sequence: Synthetic oligonucleotide
uuccgaaucuccacagcug

SEQ ID NO: 1934429 - RNA, 19 nt, Artificial Sequence
  Description of Artificial Sequence: Synthetic oligonucleotide
acacauuugcccaagcuga

SEQ ID NO: 1934430 - RNA, 19 nt, Artificial Sequence
  Description of Artificial Sequence: Synthetic oligonucleotide
uacagagccaagcaagcuu

SEQ ID NO: 1934431 - RNA, 19 nt, Artificial Sequence
  Description of Artificial Sequence: Synthetic oligonucleotide
ugugagggcuuuccgaauc

SEQ ID NO: 1934432 - RNA, 19 nt, Artificial Sequence
  Description of Artificial Sequence: Synthetic oligonucleotide
caacgcaucaauuucaggu

SEQ ID NO: 1934433 - RNA, 19 nt, Artificial Sequence
  Description of Artificial Sequence: Synthetic oligonucleotide
acgcuacuggcuauggucc

SEQ ID NO: 1934434 - RNA, 19 nt, Artificial Sequence
  Description of Artificial Sequence: Synthetic oligonucleotide
agggccucgguucucaaug

SEQ ID NO: 1934435 - RNA, 19 nt, Artificial Sequence
  Description of Artificial Sequence: Synthetic oligonucleotide
cuaugguccaggugagccg

SEQ ID NO: 1934436 - RNA, 19 nt, Artificial Sequence
  Description of Artificial Sequence: Synthetic oligonucleotide
gauuaugagccaaucuauc

SEQ ID NO: 1934437 - RNA, 19 nt, Artificial Sequence
  Description of Artificial Sequence: Synthetic oligonucleotide
aacaugccauaguggcagg

SEQ ID NO: 1934438 - RNA, 19 nt, Artificial Sequence
  Description of Artificial Sequence: Synthetic oligonucleotide
guuccgaccccgcagcccg

SEQ ID NO: 1934439 - RNA, 19 nt, Artificial Sequence
  Description of Artificial Sequence: Synthetic oligonucleotide
aacaucuaguuaaguuuag

SEQ ID NO: 1934440 - RNA, 19 nt, Artificial Sequence
  Description of Artificial Sequence: Synthetic oligonucleotide
agggauuaugagccaaucu

SEQ ID NO: 1934441 - RNA, 19 nt, Artificial Sequence
  Description of Artificial Sequence: Synthetic oligonucleotide
uguaggugcccaccagacc

SEQ ID NO: 1934442 - RNA, 19 nt, Artificial Sequence
  Description of Artificial Sequence: Synthetic oligonucleotide
ugucuucuuguccggggcc

SEQ ID NO: 1934443 - RNA, 19 nt, Artificial Sequence
  Description of Artificial Sequence: Synthetic oligonucleotide
auaugugacggaguuucag

SEQ ID NO: 1934444 - RNA, 19 nt, Artificial Sequence
  Description of Artificial Sequence: Synthetic oligonucleotide
uauuagggaggacaucauu

SEQ ID NO: 1934445 - RNA, 19 nt, Artificial Sequence
  Description of Artificial Sequence: Synthetic oligonucleotide
cagggagugcacugaaagg

SEQ ID NO: 1934446 - RNA, 19 nt, Artificial Sequence
  Description of Artificial Sequence: Synthetic oligonucleotide
uguguacccaguccccaug

SEQ ID NO: 1934447 - RNA, 19 nt, Artificial Sequence
  Description of Artificial Sequence: Synthetic oligonucleotide
uacccaguccccaugguua

SEQ ID NO: 1934448 - RNA, 19 nt, Artificial Sequence
  Description of Artificial Sequence: Synthetic oligonucleotide
accagacccaugacgacgc

SEQ ID NO: 1934449 - RNA, 19 nt, Artificial Sequence
  Description of Artificial Sequence: Synthetic oligonucleotide
gagaugagggucauccaug

SEQ ID NO: 1934450 - RNA, 19 nt, Artificial Sequence
  Description of Artificial Sequence: Synthetic oligonucleotide
agucugugagggcuuuccg

SEQ ID NO: 1934451 - RNA, 19 nt, Artificial Sequence
  Description of Artificial Sequence: Synthetic oligonucleotide
ugguuaaguuucuccaaaa

SEQ ID NO: 1934452 - RNA, 19 nt, Artificial Sequence
  Description of Artificial Sequence: Synthetic oligonucleotide
caucuaguuaaguuuagcu

SEQ ID NO: 1934453 - RNA, 19 nt, Artificial Sequence
  Description of Artificial Sequence: Synthetic oligonucleotide
cagguuccauaugugacgg

SEQ ID NO: 1934454 - RNA, 19 nt, Artificial Sequence
  Description of Artificial Sequence: Synthetic oligonucleotide
accacuuuccaaacccugg

SEQ ID NO: 1934455 - RNA, 19 nt, Artificial Sequence
  Description of Artificial Sequence: Synthetic oligonucleotide
uugugcagggaagaaacuc

SEQ ID NO: 1934456 - RNA, 19 nt, Artificial Sequence
  Description of Artificial Sequence: Synthetic oligonucleotide
ucaagcacagggagugcac

SEQ ID NO: 1934457 - RNA, 19 nt, Artificial Sequence
  Description of Artificial Sequence: Synthetic oligonucleotide
augccauaguggcaggaug

SEQ ID NO: 1934458 - RNA, 19 nt, Artificial Sequence
  Description of Artificial Sequence: Synthetic oligonucleotide
gguagacaccaucuccucg

SEQ ID NO: 1934459 - RNA, 19 nt, Artificial Sequence
  Description of Artificial Sequence: Synthetic oligonucleotide
gaaaggcuucccaaucagc

SEQ ID NO: 1934460 - RNA, 19 nt, Artificial Sequence
  Description of Artificial Sequence: Synthetic oligonucleotide
gguuccauaugugacggag

SEQ ID NO: 1934461 - RNA, 19 nt, Artificial Sequence
  Description of Artificial Sequence: Synthetic oligonucleotide
cauuugcccaagcugaaga

SEQ ID NO: 1934462 - RNA, 19 nt, Artificial Sequence
  Description of Artificial Sequence: Synthetic oligonucleotide
agccaaucuaucugaauua

SEQ ID NO: 1934463 - RNA, 19 nt, Artificial Sequence
  Description of Artificial Sequence: Synthetic oligonucleotide
ggaugaugggguuuagaug

SEQ ID NO: 1934464 - RNA, 19 nt, Artificial Sequence
  Description of Artificial Sequence: Synthetic oligonucleotide
gcaaagccuaucuuccagg

SEQ ID NO: 1934465 - RNA, 19 nt, Artificial Sequence
  Description of Artificial Sequence: Synthetic oligonucleotide
gugacggaguuucaggauc

SEQ ID NO: 1934466 - RNA, 19 nt, Artificial Sequence
  Description of Artificial Sequence: Synthetic oligonucleotide
cugaauuaaaagcauuggu

SEQ ID NO: 1934467 - RNA, 19 nt, Artificial Sequence
  Description of Artificial Sequence: Synthetic oligonucleotide
gcuauuagggaggacauca

SEQ ID NO: 1934468 - RNA, 19 nt, Artificial Sequence
  Description of Artificial Sequence: Synthetic oligonucleotide
cuguaggugcccaccagac

SEQ ID NO: 1934469 - RNA, 19 nt, Artificial Sequence
  Description of Artificial Sequence: Synthetic oligonucleotide
cuaacagaaacaucuaguu

SEQ ID NO: 1934470 - RNA, 19 nt, Artificial Sequence
  Description of Artificial Sequence: Synthetic oligonucleotide
gagccaaucuaucugaauu

SEQ ID NO: 1934471 - RNA, 19 nt, Artificial Sequence
  Description of Artificial Sequence: Synthetic oligonucleotide
cuuuccgaaucuccacagc

SEQ ID NO: 1934472 - RNA, 19 nt, Artificial Sequence
  Description of Artificial Sequence: Synthetic oligonucleotide
auuugcccaagcugaagaa

SEQ ID NO: 1934473 - RNA, 19 nt, Artificial Sequence
  Description of Artificial Sequence: Synthetic oligonucleotide
ucauuccaacaugccauag

SEQ ID NO: 1934474 - RNA, 19 nt, Artificial Sequence
  Description of Artificial Sequence: Synthetic oligonucleotide
ugugacggaguuucaggau

SEQ ID NO: 1934475 - RNA, 19 nt, Artificial Sequence
  Description of Artificial Sequence: Synthetic oligonucleotide
ucagccgcccaauucccca

SEQ ID NO: 1934476 - RNA, 19 nt, Artificial Sequence
  Description of Artificial Sequence: Synthetic oligonucleotide
guuguggagcuguuccgcc

SEQ ID NO: 1934477 - RNA, 19 nt, Artificial Sequence
  Description of Artificial Sequence: Synthetic oligonucleotide
augacgacgcuacuggcua

SEQ ID NO: 1934478 - RNA, 19 nt, Artificial Sequence
  Description of Artificial Sequence: Synthetic oligonucleotide
uuuguugugcacggugagu

SEQ ID NO: 1934479 - RNA, 19 nt, Artificial Sequence
  Description of Artificial Sequence: Synthetic oligonucleotide
ggaacggccacuucacaug

SEQ ID NO: 1934480 - RNA, 19 nt, Artificial Sequence
  Description of Artificial Sequence: Synthetic oligonucleotide
acggugaguugguucaugu

SEQ ID NO: 1934481 - RNA, 19 nt, Artificial Sequence
  Description of Artificial Sequence: Synthetic oligonucleotide
gaagcgcaggaacucagaa

SEQ ID NO: 1934482 - RNA, 19 nt, Artificial Sequence
  Description of Artificial Sequence: Synthetic oligonucleotide
ggguuuagaugacacucag

SEQ ID NO: 1934483 - RNA, 19 nt, Artificial Sequence
  Description of Artificial Sequence: Synthetic oligonucleotide
caccagacccaugacgacg

SEQ ID NO: 1934484 - RNA, 19 nt, Artificial Sequence
  Description of Artificial Sequence: Synthetic oligonucleotide
aaaauagggugggcuauua

SEQ ID NO: 1934485 - RNA, 19 nt, Artificial Sequence
  Description of Artificial Sequence: Synthetic oligonucleotide
ucccuuucugguagacacc

SEQ ID NO: 1934486 - RNA, 19 nt, Artificial Sequence
  Description of Artificial Sequence: Synthetic oligonucleotide
cuuugucuucuuguccggg

SEQ ID NO: 1934487 - RNA, 19 nt, Artificial Sequence
  Description of Artificial Sequence: Synthetic oligonucleotide
ugcucccuuggcuaaggac

SEQ ID NO: 1934488 - RNA, 19 nt, Artificial Sequence
  Description of Artificial Sequence: Synthetic oligonucleotide
ugagccaaucuaucugaau

SEQ ID NO: 1934489 - RNA, 19 nt, Artificial Sequence
  Description of Artificial Sequence: Synthetic oligonucleotide
uggucaggucuuaggggcc

SEQ ID NO: 1934490 - RNA, 19 nt, Artificial Sequence
  Description of Artificial Sequence: Synthetic oligonucleotide
aguuccgaccccgcagccc

SEQ ID NO: 1934491 - RNA, 19 nt, Artificial Sequence
  Description of Artificial Sequence: Synthetic oligonucleotide
ugccagcuaacagaaacau

SEQ ID NO: 1934492 - RNA, 19 nt, Artificial Sequence
  Description of Artificial Sequence: Synthetic oligonucleotide
guuaaguuuagcugggcuu

SEQ ID NO: 1934493 - RNA, 19 nt, Artificial Sequence
  Description of Artificial Sequence: Synthetic oligonucleotide
acagaacuucuuuguugug

SEQ ID NO: 1934494 - RNA, 19 nt, Artificial Sequence
  Description of Artificial Sequence: Synthetic oligonucleotide
caauuucagguuccauaug

SEQ ID NO: 1934495 - RNA, 19 nt, Artificial Sequence
  Description of Artificial Sequence: Synthetic oligonucleotide
caccacuuuccaaacccug

SEQ ID NO: 1934496 - RNA, 19 nt, Artificial Sequence
  Description of Artificial Sequence: Synthetic oligonucleotide
cccaugacgacgcuacugg

SEQ ID NO: 1934497 - RNA, 19 nt, Artificial Sequence
  Description of Artificial Sequence: Synthetic oligonucleotide
gaaaugguuguggagcugu

SEQ ID NO: 1934498 - RNA, 19 nt, Artificial Sequence
  Description of Artificial Sequence: Synthetic oligonucleotide
cugaaaggcuucccaauca

SEQ ID NO: 1934499 - RNA, 19 nt, Artificial Sequence
  Description of Artificial Sequence: Synthetic oligonucleotide
uuguccggggccacccaag

SEQ ID NO: 1934500 - RNA, 19 nt, Artificial Sequence
  Description of Artificial Sequence: Synthetic oligonucleotide
uuggggcacagacugggua

SEQ ID NO: 1934501 - RNA, 19 nt, Artificial Sequence
  Description of Artificial Sequence: Synthetic oligonucleotide
agagccaagcaagcuuggg

SEQ ID NO: 1934502 - RNA, 19 nt, Artificial Sequence
  Description of Artificial Sequence: Synthetic oligonucleotide
uaguuaaguuuagcugggc

SEQ ID NO: 1934503 - RNA, 19 nt, Artificial Sequence
  Description of Artificial Sequence: Synthetic oligonucleotide
caugguuaaguuucuccaa

SEQ ID NO: 1934504 - RNA, 19 nt, Artificial Sequence
  Description of Artificial Sequence: Synthetic oligonucleotide
gguccaacgcaucaauuuc

SEQ ID NO: 1934505 - RNA, 19 nt, Artificial Sequence
  Description of Artificial Sequence: Synthetic oligonucleotide
uguccggggccacccaagc

SEQ ID NO: 1934506 - RNA, 19 nt, Artificial Sequence
  Description of Artificial Sequence: Synthetic oligonucleotide
aaaucuuagcagggauuau

SEQ ID NO: 1934507 - RNA, 19 nt, Artificial Sequence
  Description of Artificial Sequence: Synthetic oligonucleotide
cucuugaaugaagucugug

SEQ ID NO: 1934508 - RNA, 19 nt, Artificial Sequence
  Description of Artificial Sequence: Synthetic oligonucleotide
caugcaggauuggugguug

SEQ ID NO: 1934509 - RNA, 19 nt, Artificial Sequence
  Description of Artificial Sequence: Synthetic oligonucleotide
acauuugcccaagcugaag

SEQ ID NO: 1934510 - RNA, 19 nt, Artificial Sequence
  Description of Artificial Sequence: Synthetic oligonucleotide
uuguggagcuguuccgccu

SEQ ID NO: 1934511 - RNA, 19 nt, Artificial Sequence
  Description of Artificial Sequence: Synthetic oligonucleotide
gcuuuccgaaucuccacag

SEQ ID NO: 1934512 - RNA, 19 nt, Artificial Sequence
  Description of Artificial Sequence: Synthetic oligonucleotide
uccaugcaggauugguggu

SEQ ID NO: 1934513 - RNA, 19 nt, Artificial Sequence
  Description of Artificial Sequence: Synthetic oligonucleotide
guuuucugcccggagccgc

SEQ ID NO: 1934514 - RNA, 19 nt, Artificial Sequence
  Description of Artificial Sequence: Synthetic oligonucleotide
uagacaccaucuccucgac

SEQ ID NO: 1934515 - RNA, 19 nt, Artificial Sequence
  Description of Artificial Sequence: Synthetic oligonucleotide
uaaguuuagcugggcuuga

SEQ ID NO: 1934516 - RNA, 19 nt, Artificial Sequence
  Description of Artificial Sequence: Synthetic oligonucleotide
ugaugggguuuagaugaca

SEQ ID NO: 1934517 - RNA, 19 nt, Artificial Sequence
  Description of Artificial Sequence: Synthetic oligonucleotide
uguacccaguccccauggu

SEQ ID NO: 1934518 - RNA, 19 nt, Artificial Sequence
  Description of Artificial Sequence: Synthetic oligonucleotide
uucuuguccggggccaccc

SEQ ID NO: 1934519 - RNA, 19 nt, Artificial Sequence
  Description of Artificial Sequence: Synthetic oligonucleotide
ugguagacaccaucuccuc

SEQ ID NO: 1934520 - RNA, 19 nt, Artificial Sequence
  Description of Artificial Sequence: Synthetic oligonucleotide
acaaaucuuagcagggauu

SEQ ID NO: 1934521 - RNA, 19 nt, Artificial Sequence
  Description of Artificial Sequence: Synthetic oligonucleotide
cuacuggcuaugguccagg

SEQ ID NO: 1934522 - RNA, 19 nt, Artificial Sequence
  Description of Artificial Sequence: Synthetic oligonucleotide
caggauuggugguuggaga

SEQ ID NO: 1934523 - RNA, 19 nt, Artificial Sequence
  Description of Artificial Sequence: Synthetic oligonucleotide
ggcaguacagagccaagca

SEQ ID NO: 1934524 - RNA, 19 nt, Artificial Sequence
  Description of Artificial Sequence: Synthetic oligonucleotide
uagcugggcuugaauccug

SEQ ID NO: 1934525 - RNA, 19 nt, Artificial Sequence
  Description of Artificial Sequence: Synthetic oligonucleotide
guccaaaucggggaaaaua

SEQ ID NO: 1934526 - RNA, 19 nt, Artificial Sequence
  Description of Artificial Sequence: Synthetic oligonucleotide
gccgcucaagcacagggag

SEQ ID NO: 1934527 - RNA, 19 nt, Artificial Sequence
  Description of Artificial Sequence: Synthetic oligonucleotide
guuuugugcagggaagaaa

SEQ ID NO: 1934528 - RNA, 19 nt, Artificial Sequence
  Description of Artificial Sequence: Synthetic oligonucleotide
aguccaucccuuucuggua

SEQ ID NO: 1934529 - RNA, 19 nt, Artificial Sequence
  Description of Artificial Sequence: Synthetic oligonucleotide
acuggguaggcaaagccua

SEQ ID NO: 1934530 - RNA, 19 nt, Artificial Sequence
  Description of Artificial Sequence: Synthetic oligonucleotide
aggcaaagccuaucuucca

SEQ ID NO: 1934531 - RNA, 19 nt, Artificial Sequence
  Description of Artificial Sequence: Synthetic oligonucleotide
ugcaggauuggugguugga

SEQ ID NO: 1934532 - RNA, 19 nt, Artificial Sequence
  Description of Artificial Sequence: Synthetic oligonucleotide
aguccccaugguuaaguuu

SEQ ID NO: 1934533 - RNA, 19 nt, Artificial Sequence
  Description of Artificial Sequence: Synthetic oligonucleotide
gaugagggucauccaugca

SEQ ID NO: 1934534 - RNA, 19 nt, Artificial Sequence
  Description of Artificial Sequence: Synthetic oligonucleotide
aucagccgcccaauucccc

SEQ ID NO: 1934535 - RNA, 19 nt, Artificial Sequence
  Description of Artificial Sequence: Synthetic oligonucleotide
acccaugacgacgcuacug

SEQ ID NO: 1934536 - RNA, 19 nt, Artificial Sequence
  Description of Artificial Sequence: Synthetic oligonucleotide
guccuguaccaccacuuuc

SEQ ID NO: 1934537 - RNA, 19 nt, Artificial Sequence
  Description of Artificial Sequence: Synthetic oligonucleotide
gcaagcuugggcagggucc

SEQ ID NO: 1934538 - RNA, 19 nt, Artificial Sequence
  Description of Artificial Sequence: Synthetic oligonucleotide
aggguccuguaccaccacu

SEQ ID NO: 1934539 - RNA, 19 nt, Artificial Sequence
  Description of Artificial Sequence: Synthetic oligonucleotide
guccaacgcaucaauuuca

SEQ ID NO: 1934540 - RNA, 19 nt, Artificial Sequence
  Description of Artificial Sequence: Synthetic oligonucleotide
aggacaucauucauuccaa

SEQ ID NO: 1934541 - RNA, 19 nt, Artificial Sequence
  Description of Artificial Sequence: Synthetic oligonucleotide
uaaggacuuuggggcacag

SEQ ID NO: 1934542 - RNA, 19 nt, Artificial Sequence
  Description of Artificial Sequence: Synthetic oligonucleotide
gagugcacugaaaggcuuc

SEQ ID NO: 1934543 - RNA, 19 nt, Artificial Sequence
  Description of Artificial Sequence: Synthetic oligonucleotide
gccucaguuuugugcaggg

SEQ ID NO: 1934544 - RNA, 19 nt, Artificial Sequence
  Description of Artificial Sequence: Synthetic oligonucleotide
gcaaucagccgcccaauuc

SEQ ID NO: 1934545 - RNA, 19 nt, Artificial Sequence
  Description of Artificial Sequence: Synthetic oligonucleotide
gacgacgcuacuggcuaug

SEQ ID NO: 1934546 - RNA, 19 nt, Artificial Sequence
  Description of Artificial Sequence: Synthetic oligonucleotide
uacuggcuaugguccaggu

SEQ ID NO: 1934547 - RNA, 19 nt, Artificial Sequence
  Description of Artificial Sequence: Synthetic oligonucleotide
gguuuagaugacacucagc

SEQ ID NO: 1934548 - RNA, 19 nt, Artificial Sequence
  Description of Artificial Sequence: Synthetic oligonucleotide
gguguucauggucaggucu

SEQ ID NO: 1934549 - RNA, 19 nt, Artificial Sequence
  Description of Artificial Sequence: Synthetic oligonucleotide
gguuguggagcuguuccgc

SEQ ID NO: 1934550 - RNA, 19 nt, Artificial Sequence
  Description of Artificial Sequence: Synthetic oligonucleotide
gcaggauuggugguuggag

SEQ ID NO: 1934551 - RNA, 19 nt, Artificial Sequence
  Description of Artificial Sequence: Synthetic oligonucleotide
cuugggcaggguccuguac

SEQ ID NO: 1934552 - RNA, 19 nt, Artificial Sequence
  Description of Artificial Sequence: Synthetic oligonucleotide
ucuuguccggggccaccca

SEQ ID NO: 1934553 - RNA, 19 nt, Artificial Sequence
  Description of Artificial Sequence: Synthetic oligonucleotide
agacaccaucuccucgaca

SEQ ID NO: 1934554 - RNA, 19 nt, Artificial Sequence
  Description of Artificial Sequence: Synthetic oligonucleotide
acgacgcuacuggcuaugg

SEQ ID NO: 1934555 - RNA, 19 nt, Artificial Sequence
  Description of Artificial Sequence: Synthetic oligonucleotide
uccaucccuuucugguaga

SEQ ID NO: 1934556 - RNA, 19 nt, Artificial Sequence
  Description of Artificial Sequence: Synthetic oligonucleotide
gcuaacagaaacaucuagu

SEQ ID NO: 1934557 - RNA, 19 nt, Artificial Sequence
  Description of Artificial Sequence: Synthetic oligonucleotide
ggugaagcagaugucugca

SEQ ID NO: 1934558 - RNA, 19 nt, Artificial Sequence
  Description of Artificial Sequence: Synthetic oligonucleotide
gugcacggugaguugguuc

SEQ ID NO: 1934559 - RNA, 19 nt, Artificial Sequence
  Description of Artificial Sequence: Synthetic oligonucleotide
cagggauuaugagccaauc

SEQ ID NO: 1934560 - RNA, 19 nt, Artificial Sequence
  Description of Artificial Sequence: Synthetic oligonucleotide
cauaugugacggaguuuca

SEQ ID NO: 1934561 - RNA, 19 nt, Artificial Sequence
  Description of Artificial Sequence: Synthetic oligonucleotide
caugacgacgcuacuggcu

SEQ ID NO: 1934562 - RNA, 19 nt, Artificial Sequence
  Description of Artificial Sequence: Synthetic oligonucleotide
cucaagcacagggagugca

SEQ ID NO: 1934563 - RNA, 19 nt, Artificial Sequence
  Description of Artificial Sequence: Synthetic oligonucleotide
gagggucauccaugcagga

SEQ ID NO: 1934564 - RNA, 19 nt, Artificial Sequence
  Description of Artificial Sequence: Synthetic oligonucleotide
uucugcccggagccgcuca

SEQ ID NO: 1934565 - RNA, 19 nt, Artificial Sequence
  Description of Artificial Sequence: Synthetic oligonucleotide
agggaggacaucauucauu

SEQ ID NO: 1934566 - RNA, 19 nt, Artificial Sequence
  Description of Artificial Sequence: Synthetic oligonucleotide
caguuuugugcagggaaga

SEQ ID NO: 1934567 - RNA, 19 nt, Artificial Sequence
  Description of Artificial Sequence: Synthetic oligonucleotide
gggcccaaugcucccuugg

SEQ ID NO: 1934568 - RNA, 19 nt, Artificial Sequence
  Description of Artificial Sequence: Synthetic oligonucleotide
gcugcugggguccaacgca

SEQ ID NO: 1934569 - RNA, 19 nt, Artificial Sequence
  Description of Artificial Sequence: Synthetic oligonucleotide
gacggaguuucaggauccc

SEQ ID NO: 1934570 - RNA, 19 nt, Artificial Sequence
  Description of Artificial Sequence: Synthetic oligonucleotide
ccaacgcaucaauuucagg

SEQ ID NO: 1934571 - RNA, 19 nt, Artificial Sequence
  Description of Artificial Sequence: Synthetic oligonucleotide
cacuugaagcgcaggaacu

SEQ ID NO: 1934572 - RNA, 19 nt, Artificial Sequence
  Description of Artificial Sequence: Synthetic oligonucleotide
agcaaucagccgcccaauu

SEQ ID NO: 1934573 - RNA, 19 nt, Artificial Sequence
  Description of Artificial Sequence: Synthetic oligonucleotide
cacaaaucuuagcagggau

SEQ ID NO: 1934574 - RNA, 19 nt, Artificial Sequence
  Description of Artificial Sequence: Synthetic oligonucleotide
cauuccaacaugccauagu

SEQ ID NO: 1934575 - RNA, 19 nt, Artificial Sequence
  Description of Artificial Sequence: Synthetic oligonucleotide
ggcuucccaaucagcacgg

SEQ ID NO: 1934576 - RNA, 19 nt, Artificial Sequence
  Description of Artificial Sequence: Synthetic oligonucleotide
ggaggacaucauucauucc

SEQ ID NO: 1934577 - RNA, 19 nt, Artificial Sequence
  Description of Artificial Sequence: Synthetic oligonucleotide
ggauuggugguuggagacc

SEQ ID NO: 1934578 - RNA, 19 nt, Artificial Sequence
  Description of Artificial Sequence: Synthetic oligonucleotide
gccgcuggaauuccucuug

SEQ ID NO: 1934579 - RNA, 19 nt, Artificial Sequence
  Description of Artificial Sequence: Synthetic oligonucleotide
uccauaugugacggaguuu

SEQ ID NO: 1934580 - RNA, 19 nt, Artificial Sequence
  Description of Artificial Sequence: Synthetic oligonucleotide
gcaguacagagccaagcaa

SEQ ID NO: 1934581 - RNA, 19 nt, Artificial Sequence
  Description of Artificial Sequence: Synthetic oligonucleotide
auuccccacuugaagcgca

SEQ ID NO: 1934582 - RNA, 19 nt, Artificial Sequence
  Description of Artificial Sequence: Synthetic oligonucleotide
cuucaguuccgaccccgca

SEQ ID NO: 1934583 - RNA, 19 nt, Artificial Sequence
  Description of Artificial Sequence: Synthetic oligonucleotide
gcacagacuggguaggcaa

SEQ ID NO: 1934584 - RNA, 19 nt, Artificial Sequence
  Description of Artificial Sequence: Synthetic oligonucleotide
ggcccaaugcucccuuggc

SEQ ID NO: 1934585 - RNA, 19 nt, Artificial Sequence
  Description of Artificial Sequence: Synthetic oligonucleotide
uuccgaccccgcagcccgg

SEQ ID NO: 1934586 - RNA, 19 nt, Artificial Sequence
  Description of Artificial Sequence: Synthetic oligonucleotide
ggauuaugagccaaucuau

SEQ ID NO: 1934587 - RNA, 19 nt, Artificial Sequence
  Description of Artificial Sequence: Synthetic oligonucleotide
ugacgacgcuacuggcuau

SEQ ID NO: 1934588 - RNA, 19 nt, Artificial Sequence
  Description of Artificial Sequence: Synthetic oligonucleotide
ccuucuggaaagaugugua

SEQ ID NO: 1934589 - RNA, 19 nt, Artificial Sequence
  Description of Artificial Sequence: Synthetic oligonucleotide
agguuccauaugugacgga

SEQ ID NO: 1934590 - RNA, 19 nt, Artificial Sequence
  Description of Artificial Sequence: Synthetic oligonucleotide
caguuccgaccccgcagcc

SEQ ID NO: 1934591 - RNA, 19 nt, Artificial Sequence
  Description of Artificial Sequence: Synthetic oligonucleotide
gggguuuagaugacacuca

SEQ ID NO: 1934592 - RNA, 19 nt, Artificial Sequence
  Description of Artificial Sequence: Synthetic oligonucleotide
cagcuaacagaaacaucua

SEQ ID NO: 1934593 - RNA, 19 nt, Artificial Sequence
  Description of Artificial Sequence: Synthetic oligonucleotide
ggccucgguucucaaugag

SEQ ID NO: 1934594 - RNA, 19 nt, Artificial Sequence
  Description of Artificial Sequence: Synthetic oligonucleotide
cacggugaguugguucaug

SEQ ID NO: 1934595 - RNA, 19 nt, Artificial Sequence
  Description of Artificial Sequence: Synthetic oligonucleotide
ccaugacgacgcuacuggc

SEQ ID NO: 1934596 - RNA, 19 nt, Artificial Sequence
  Description of Artificial Sequence: Synthetic oligonucleotide
gccucgguucucaaugagc

SEQ ID NO: 1934597 - RNA, 19 nt, Artificial Sequence
  Description of Artificial Sequence: Synthetic oligonucleotide
gccacccaagcacaaaucu

SEQ ID NO: 1934598 - RNA, 19 nt, Artificial Sequence
  Description of Artificial Sequence: Synthetic oligonucleotide
gcucauacagaacuucuuu

SEQ ID NO: 1934599 - RNA, 19 nt, Artificial Sequence
  Description of Artificial Sequence: Synthetic oligonucleotide
augagccaaucuaucugaa

SEQ ID NO: 1934600 - RNA, 19 nt, Artificial Sequence
  Description of Artificial Sequence: Synthetic oligonucleotide
gaaaauagggugggcuauu

SEQ ID NO: 1934601 - RNA, 19 nt, Artificial Sequence
  Description of Artificial Sequence: Synthetic oligonucleotide
cucagaacucauguuuacu

SEQ ID NO: 1934602 - RNA, 19 nt, Artificial Sequence
  Description of Artificial Sequence: Synthetic oligonucleotide
ggcaccgcggggaacggcc

SEQ ID NO: 1934603 - RNA, 19 nt, Artificial Sequence
  Description of Artificial Sequence: Synthetic oligonucleotide
cagccgcccaauuccccac

SEQ ID NO: 1934604 - RNA, 19 nt, Artificial Sequence
  Description of Artificial Sequence: Synthetic oligonucleotide
ggucaggucuuaggggccc

SEQ ID NO: 1934605 - RNA, 19 nt, Artificial Sequence
  Description of Artificial Sequence: Synthetic oligonucleotide
gccaaucuaucugaauuaa

SEQ ID NO: 1934606 - RNA, 19 nt, Artificial Sequence
  Description of Artificial Sequence: Synthetic oligonucleotide
cuaaggacuuuggggcaca

SEQ ID NO: 1934607 - RNA, 19 nt, Artificial Sequence
  Description of Artificial Sequence: Synthetic oligonucleotide
aacggccacuucacaugga

SEQ ID NO: 1934608 - RNA, 19 nt, Artificial Sequence
  Description of Artificial Sequence: Synthetic oligonucleotide
agccgcucaagcacaggga

SEQ ID NO: 1934609 - RNA, 19 nt, Artificial Sequence
  Description of Artificial Sequence: Synthetic oligonucleotide
gcuacuggcuaugguccag

SEQ ID NO: 1934610 - RNA, 19 nt, Artificial Sequence
  Description of Artificial Sequence: Synthetic oligonucleotide
cgcucaagcacagggagug

SEQ ID NO: 1934611 - RNA, 19 nt, Artificial Sequence
  Description of Artificial Sequence: Synthetic oligonucleotide
caucccuuucugguagaca

SEQ ID NO: 1934612 - RNA, 19 nt, Artificial Sequence
  Description of Artificial Sequence: Synthetic oligonucleotide
guuccauaugugacggagu

SEQ ID NO: 1934613 - RNA, 19 nt, Artificial Sequence
  Description of Artificial Sequence: Synthetic oligonucleotide
ccuucaguuccgaccccgc

SEQ ID NO: 1934614 - RNA, 19 nt, Artificial Sequence
  Description of Artificial Sequence: Synthetic oligonucleotide
cuauuagggaggacaucau

SEQ ID NO: 1934615 - RNA, 19 nt, Artificial Sequence
  Description of Artificial Sequence: Synthetic oligonucleotide
agccgcccaauuccccacu

SEQ ID NO: 1934616 - RNA, 19 nt, Artificial Sequence
  Description of Artificial Sequence: Synthetic oligonucleotide
ggguccaacgcaucaauuu

SEQ ID NO: 1934617 - RNA, 19 nt, Artificial Sequence
  Description of Artificial Sequence: Synthetic oligonucleotide
gggguguucauggucaggu

SEQ ID NO: 1934618 - RNA, 19 nt, Artificial Sequence
  Description of Artificial Sequence: Synthetic oligonucleotide
caggaugaugggguuuaga

SEQ ID NO: 1934619 - RNA, 19 nt, Artificial Sequence
  Description of Artificial Sequence: Synthetic oligonucleotide
ggaauuccucuugaaugaa

SEQ ID NO: 1934620 - RNA, 19 nt, Artificial Sequence
  Description of Artificial Sequence: Synthetic oligonucleotide
gcacacauuugcccaagcu

SEQ ID NO: 1934621 - RNA, 19 nt, Artificial Sequence
  Description of Artificial Sequence: Synthetic oligonucleotide
ccaaucagcacggugauuu

SEQ ID NO: 1934622 - RNA, 19 nt, Artificial Sequence
  Description of Artificial Sequence: Synthetic oligonucleotide
gggaacggccacuucacau

SEQ ID NO: 1934623 - RNA, 19 nt, Artificial Sequence
  Description of Artificial Sequence: Synthetic oligonucleotide
ccgaaucuccacagcugac

SEQ ID NO: 1934624 - RNA, 19 nt, Artificial Sequence
  Description of Artificial Sequence: Synthetic oligonucleotide
cagcacggugauuuucugu

SEQ ID NO: 1934625 - RNA, 19 nt, Artificial Sequence
  Description of Artificial Sequence: Synthetic oligonucleotide
ggcuugaauccuggccaag

SEQ ID NO: 1934626 - RNA, 19 nt, Artificial Sequence
  Description of Artificial Sequence: Synthetic oligonucleotide
auuggugguuggagaccgu

SEQ ID NO: 1934627 - RNA, 19 nt, Artificial Sequence
  Description of Artificial Sequence: Synthetic oligonucleotide
ggcacagacuggguaggca

SEQ ID NO: 1934628 - RNA, 19 nt, Artificial Sequence
  Description of Artificial Sequence: Synthetic oligonucleotide
ggugggcuauuagggagga

SEQ ID NO: 1934629 - RNA, 19 nt, Artificial Sequence
  Description of Artificial Sequence: Synthetic oligonucleotide
ggcuauuagggaggacauc

SEQ ID NO: 1934630 - RNA, 19 nt, Artificial Sequence
  Description of Artificial Sequence: Synthetic oligonucleotide
caugccauaguggcaggau

SEQ ID NO: 1934631 - RNA, 19 nt, Artificial Sequence
  Description of Artificial Sequence: Synthetic oligonucleotide
accgcggggaacggccacu

SEQ ID NO: 1934632 - RNA, 19 nt, Artificial Sequence
  Description of Artificial Sequence: Synthetic oligonucleotide
caccgcggggaacggccac

SEQ ID NO: 1934633 - RNA, 19 nt, Artificial Sequence
  Description of Artificial Sequence: Synthetic oligonucleotide
cugggguccaacgcaucaa

SEQ ID NO: 1934634 - RNA, 19 nt, Artificial Sequence
  Description of Artificial Sequence: Synthetic oligonucleotide
ccaaugcucccuuggcuaa

SEQ ID NO: 1934635 - RNA, 19 nt, Artificial Sequence
  Description of Artificial Sequence: Synthetic oligonucleotide
cggggaacggccacuucac

SEQ ID NO: 1934636 - RNA, 19 nt, Artificial Sequence
  Description of Artificial Sequence: Synthetic oligonucleotide
gggagugcacugaaaggcu

SEQ ID NO: 1934637 - RNA, 19 nt, Artificial Sequence
  Description of Artificial Sequence: Synthetic oligonucleotide
gacccaugacgacgcuacu

SEQ ID NO: 1934638 - RNA, 19 nt, Artificial Sequence
  Description of Artificial Sequence: Synthetic oligonucleotide
ggggaacggccacuucaca

SEQ ID NO: 1934639 - RNA, 19 nt, Artificial Sequence
  Description of Artificial Sequence: Synthetic oligonucleotide
cuggguaggcaaagccuau

SEQ ID NO: 1934640 - RNA, 19 nt, Artificial Sequence
  Description of Artificial Sequence: Synthetic oligonucleotide
gcucaagcacagggagugc

SEQ ID NO: 1934641 - RNA, 19 nt, Artificial Sequence
  Description of Artificial Sequence: Synthetic oligonucleotide
cauggaggggcaucuccuu

SEQ ID NO: 1934642 - RNA, 19 nt, Artificial Sequence
  Description of Artificial Sequence: Synthetic oligonucleotide
caucaauuucagguuccau

SEQ ID NO: 1934643 - RNA, 19 nt, Artificial Sequence
  Description of Artificial Sequence: Synthetic oligonucleotide
cgcccaauuccccacuuga

SEQ ID NO: 1934644 - RNA, 19 nt, Artificial Sequence
  Description of Artificial Sequence: Synthetic oligonucleotide
gcccaaugcucccuuggcu

SEQ ID NO: 1934645 - RNA, 19 nt, Artificial Sequence
  Description of Artificial Sequence: Synthetic oligonucleotide
ccaucccuuucugguagac

SEQ ID NO: 1934646 - RNA, 19 nt, Artificial Sequence
  Description of Artificial Sequence: Synthetic oligonucleotide
cagacccaugacgacgcua

SEQ ID NO: 1934647 - RNA, 19 nt, Artificial Sequence
  Description of Artificial Sequence: Synthetic oligonucleotide
gugggcuauuagggaggac

SEQ ID NO: 1934648 - RNA, 19 nt, Artificial Sequence
  Description of Artificial Sequence: Synthetic oligonucleotide
ccaucucccagccucaguu

SEQ ID NO: 1934649 - RNA, 19 nt, Artificial Sequence
  Description of Artificial Sequence: Synthetic oligonucleotide
caaucagcacggugauuuu

SEQ ID NO: 1934650 - RNA, 19 nt, Artificial Sequence
  Description of Artificial Sequence: Synthetic oligonucleotide
cggggcaccgcggggaacg

SEQ ID NO: 1934651 - RNA, 19 nt, Artificial Sequence
  Description of Artificial Sequence: Synthetic oligonucleotide
gguccuguaccaccacuuu

SEQ ID NO: 1934652 - RNA, 19 nt, Artificial Sequence
  Description of Artificial Sequence: Synthetic oligonucleotide
gggcuauuagggaggacau

SEQ ID NO: 1934653 - RNA, 19 nt, Artificial Sequence
  Description of Artificial Sequence: Synthetic oligonucleotide
ccgcccaauuccccacuug

SEQ ID NO: 1934654 - RNA, 19 nt, Artificial Sequence
  Description of Artificial Sequence: Synthetic oligonucleotide
gcccaauuccccacuugaa

SEQ ID NO: 1934655 - RNA, 19 nt, Artificial Sequence
  Description of Artificial Sequence: Synthetic oligonucleotide
caguccccaugguuaaguu

SEQ ID NO: 1934656 - RNA, 19 nt, Artificial Sequence
  Description of Artificial Sequence: Synthetic oligonucleotide
ggagugcacugaaaggcuu

SEQ ID NO: 1934657 - RNA, 19 nt, Artificial Sequence
  Description of Artificial Sequence: Synthetic oligonucleotide
ccuaucuuccaggcuggaa

SEQ ID NO: 1934658 - RNA, 19 nt, Artificial Sequence
  Description of Artificial Sequence: Synthetic oligonucleotide
gcgcaggaacucagaacuc

SEQ ID NO: 1934659 - RNA, 19 nt, Artificial Sequence
  Description of Artificial Sequence: Synthetic oligonucleotide
ccgcuggaauuccucuuga

SEQ ID NO: 1934660 - RNA, 19 nt, Artificial Sequence
  Description of Artificial Sequence: Synthetic oligonucleotide
ccggggccacccaagcaca

SEQ ID NO: 1934661 - RNA, 19 nt, Artificial Sequence
  Description of Artificial Sequence: Synthetic oligonucleotide
ccucaguuuugugcaggga

SEQ ID NO: 1934662 - RNA, 19 nt, Artificial Sequence
  Description of Artificial Sequence: Synthetic oligonucleotide
ccacccaagcacaaaucuu

SEQ ID NO: 1934663 - RNA, 19 nt, Artificial Sequence
  Description of Artificial Sequence: Synthetic oligonucleotide
gcagggauuaugagccaau

SEQ ID NO: 1934664 - RNA, 19 nt, Artificial Sequence
  Description of Artificial Sequence: Synthetic oligonucleotide
gucaggucuuaggggcccu

SEQ ID NO: 1934665 - RNA, 19 nt, Artificial Sequence
  Description of Artificial Sequence: Synthetic oligonucleotide
ccccaugguuaaguuucuc

SEQ ID NO: 1934666 - RNA, 19 nt, Artificial Sequence
  Description of Artificial Sequence: Synthetic oligonucleotide
cagggccucgguucucaau

SEQ ID NO: 1934667 - RNA, 19 nt, Artificial Sequence
  Description of Artificial Sequence: Synthetic oligonucleotide
cccaguccccaugguuaag

SEQ ID NO: 1934668 - RNA, 19 nt, Artificial Sequence
  Description of Artificial Sequence: Synthetic oligonucleotide
ccaguccccaugguuaagu

SEQ ID NO: 1934669 - RNA, 19 nt, Artificial Sequence
  Description of Artificial Sequence: Synthetic oligonucleotide
cagcaaucagccgcccaau

SEQ ID NO: 1934670 - RNA, 19 nt, Artificial Sequence
  Description of Artificial Sequence: Synthetic oligonucleotide
cgcuacuggcuauggucca

SEQ ID NO: 1934671 - RNA, 19 nt, Artificial Sequence
  Description of Artificial Sequence: Synthetic oligonucleotide
gccuaucuuccaggcugga

SEQ ID NO: 1934672 - RNA, 19 nt, Artificial Sequence
  Description of Artificial Sequence: Synthetic oligonucleotide
cggugaguugguucaugua

SEQ ID NO: 1934673 - RNA, 19 nt, Artificial Sequence
  Description of Artificial Sequence: Synthetic oligonucleotide
ccgcucaagcacagggagu

SEQ ID NO: 1934674 - RNA, 19 nt, Artificial Sequence
  Description of Artificial Sequence: Synthetic oligonucleotide
ccuuucugguagacaccau

SEQ ID NO: 1934675 - RNA, 19 nt, Artificial Sequence
  Description of Artificial Sequence: Synthetic oligonucleotide
ccaugcaggauuggugguu

SEQ ID NO: 1934676 - RNA, 19 nt, Artificial Sequence
  Description of Artificial Sequence: Synthetic oligonucleotide
gcuucccaaucagcacggu

SEQ ID NO: 1934677 - RNA, 19 nt, Artificial Sequence
  Description of Artificial Sequence: Synthetic oligonucleotide
gccgcccaauuccccacuu

SEQ ID NO: 1934678 - RNA, 19 nt, Artificial Sequence
  Description of Artificial Sequence: Synthetic oligonucleotide
cgcggggaacggccacuuc

SEQ ID NO: 1934679 - RNA, 19 nt, Artificial Sequence
  Description of Artificial Sequence: Synthetic oligonucleotide
cgacgcuacuggcuauggu

SEQ ID NO: 1934680 - RNA, 19 nt, Artificial Sequence
  Description of Artificial Sequence: Synthetic oligonucleotide
gcacggugaguugguucau

SEQ ID NO: 1934681 - RNA, 19 nt, Artificial Sequence
  Description of Artificial Sequence: Synthetic oligonucleotide
ccagacccaugacgacgcu

SEQ ID NO: 1934682 - RNA, 19 nt, Artificial Sequence
  Description of Artificial Sequence: Synthetic oligonucleotide
ccggggcaccgcggggaac

SEQ ID NO: 1934683 - RNA, 19 nt, Artificial Sequence
  Description of Artificial Sequence: Synthetic oligonucleotide
cccaaucagcacggugauu

SEQ ID NO: 1934684 - RNA, 19 nt, Artificial Sequence
  Description of Artificial Sequence: Synthetic oligonucleotide
ccgcggggaacggccacuu

SEQ ID NO: 1934685 - RNA, 19 nt, Artificial Sequence
  Description of Artificial Sequence: Synthetic oligonucleotide
aacauuaauacacaucacc

SEQ ID NO: 1934686 - RNA, 19 nt, Artificial Sequence
  Description of Artificial Sequence: Synthetic oligonucleotide
aauuuuaagcaaaauaacc

SEQ ID NO: 1934687 - RNA, 19 nt, Artificial Sequence
  Description of Artificial Sequence: Synthetic oligonucleotide
acuauaaccacacauuccc

SEQ ID NO: 1934688 - RNA, 19 nt, Artificial Sequence
  Description of Artificial Sequence: Synthetic oligonucleotide
aguugaaauaacugaaucc

SEQ ID NO: 1934689 - RNA, 19 nt, Artificial Sequence
  Description of Artificial Sequence: Synthetic oligonucleotide
aacccuaacaaauuuguuc

SEQ ID NO: 1934690 - RNA, 19 nt, Artificial Sequence
  Description of Artificial Sequence: Synthetic oligonucleotide
aauucaagcaaguugaaaa

SEQ ID NO: 1934691 - RNA, 19 nt, Artificial Sequence
  Description of Artificial Sequence: Synthetic oligonucleotide
auaaauauaugguugaacu

SEQ ID NO: 1934692 - RNA, 19 nt, Artificial Sequence
  Description of Artificial Sequence: Synthetic oligonucleotide
uauuaaguuacauagcuga

SEQ ID NO: 1934693 - RNA, 19 nt, Artificial Sequence
  Description of Artificial Sequence: Synthetic oligonucleotide
uauccaauuauuaaguuac

SEQ ID NO: 1934694 - RNA, 19 nt, Artificial Sequence
  Description of Artificial Sequence: Synthetic oligonucleotide
aaguugaaauaacugaauc

SEQ ID NO: 1934695 - RNA, 19 nt, Artificial Sequence
  Description of Artificial Sequence: Synthetic oligonucleotide
aaaagagcaaaauuuacaa

SEQ ID NO: 1934696 - RNA, 19 nt, Artificial Sequence
  Description of Artificial Sequence: Synthetic oligonucleotide
acaacaauguaucucuacc

SEQ ID NO: 1934697 - RNA, 19 nt, Artificial Sequence
  Description of Artificial Sequence: Synthetic oligonucleotide
auuuacuaaauuaaagagc

SEQ ID NO: 1934698 - RNA, 19 nt, Artificial Sequence
  Description of Artificial Sequence: Synthetic oligonucleotide
aaacuuaaucuuuacaaga

SEQ ID NO: 1934699 - RNA, 19 nt, Artificial Sequence
  Description of Artificial Sequence: Synthetic oligonucleotide
uugauuaagaauugguuag

SEQ ID NO: 1934700 - RNA, 19 nt, Artificial Sequence
  Description of Artificial Sequence: Synthetic oligonucleotide
aguuacauagcugaaaagg

SEQ ID NO: 1934701 - RNA, 19 nt, Artificial Sequence
  Description of Artificial Sequence: Synthetic oligonucleotide
cuuuacaagacuuaaccag

SEQ ID NO: 1934702 - RNA, 19 nt, Artificial Sequence
  Description of Artificial Sequence: Synthetic oligonucleotide
uaugguugaacuaacauua

SEQ ID NO: 1934703 - RNA, 19 nt, Artificial Sequence
  Description of Artificial Sequence: Synthetic oligonucleotide
aauuauuaaguuacauagc

SEQ ID NO: 1934704 - RNA, 19 nt, Artificial Sequence
  Description of Artificial Sequence: Synthetic oligonucleotide
acuguuuucccucaguacg

SEQ ID NO: 1934705 - RNA, 19 nt, Artificial Sequence
  Description of Artificial Sequence: Synthetic oligonucleotide
uuagcuacaacaauguauc

SEQ ID NO: 1934706 - RNA, 19 nt, Artificial Sequence
  Description of Artificial Sequence: Synthetic oligonucleotide
uucaacagugcucauaacc

SEQ ID NO: 1934707 - RNA, 19 nt, Artificial Sequence
  Description of Artificial Sequence: Synthetic oligonucleotide
cuaacauuaauacacauca

SEQ ID NO: 1934708 - RNA, 19 nt, Artificial Sequence
  Description of Artificial Sequence: Synthetic oligonucleotide
uaaaagagcaaaauuuaca

SEQ ID NO: 1934709 - RNA, 19 nt, Artificial Sequence
  Description of Artificial Sequence: Synthetic oligonucleotide
uaaauuaacuauaaggcuu

SEQ ID NO: 1934710 - RNA, 19 nt, Artificial Sequence
  Description of Artificial Sequence: Synthetic oligonucleotide
cauacucuuacuauugugg

SEQ ID NO: 1934711 - RNA, 19 nt, Artificial Sequence
  Description of Artificial Sequence: Synthetic oligonucleotide
ucgauuacauaauaaaaca

SEQ ID NO: 1934712 - RNA, 19 nt, Artificial Sequence
  Description of Artificial Sequence: Synthetic oligonucleotide
uuaaagagcauauucuaca

SEQ ID NO: 1934713 - RNA, 19 nt, Artificial Sequence
  Description of Artificial Sequence: Synthetic oligonucleotide
ucauaaguugaaauaacug

SEQ ID NO: 1934714 - RNA, 19 nt, Artificial Sequence
  Description of Artificial Sequence: Synthetic oligonucleotide
uucaauuaaugcuagggca

SEQ ID NO: 1934715 - RNA, 19 nt, Artificial Sequence
  Description of Artificial Sequence: Synthetic oligonucleotide
aaaaggccagucuaagaac

SEQ ID NO: 1934716 - RNA, 19 nt, Artificial Sequence
  Description of Artificial Sequence: Synthetic oligonucleotide
acaaaguugauuuucaaau

SEQ ID NO: 1934717 - RNA, 19 nt, Artificial Sequence
  Description of Artificial Sequence: Synthetic oligonucleotide
aacagcacaaaaucuccac

SEQ ID NO: 1934718 - RNA, 19 nt, Artificial Sequence
  Description of Artificial Sequence: Synthetic oligonucleotide
cauuuuaucgauuacauaa

SEQ ID NO: 1934719 - RNA, 19 nt, Artificial Sequence
  Description of Artificial Sequence: Synthetic oligonucleotide
ugucuuaugaacuguacug

SEQ ID NO: 1934720 - RNA, 19 nt, Artificial Sequence
  Description of Artificial Sequence: Synthetic oligonucleotide
cauaauucaagcaaguuga

SEQ ID NO: 1934721 - RNA, 19 nt, Artificial Sequence
  Description of Artificial Sequence: Synthetic oligonucleotide
aaaggcaacauuuuacuaa

SEQ ID NO: 1934722 - RNA, 19 nt, Artificial Sequence
  Description of Artificial Sequence: Synthetic oligonucleotide
aucgauuacauaauaaaac

SEQ ID NO: 1934723 - RNA, 19 nt, Artificial Sequence
  Description of Artificial Sequence: Synthetic oligonucleotide
aacuuaaucuuuacaagac

SEQ ID NO: 1934724 - RNA, 19 nt, Artificial Sequence
  Description of Artificial Sequence: Synthetic oligonucleotide
ucuggagacauuauugaag

SEQ ID NO: 1934725 - RNA, 19 nt, Artificial Sequence
  Description of Artificial Sequence: Synthetic oligonucleotide
caaguauccaauuauuaag

SEQ ID NO: 1934726 - RNA, 19 nt, Artificial Sequence
  Description of Artificial Sequence: Synthetic oligonucleotide
aacaaaugaucaaguaucc

SEQ ID NO: 1934727 - RNA, 19 nt, Artificial Sequence
  Description of Artificial Sequence: Synthetic oligonucleotide
uuauuucucccacagaacu

SEQ ID NO: 1934728 - RNA, 19 nt, Artificial Sequence
  Description of Artificial Sequence: Synthetic oligonucleotide
aaauauaugguugaacuaa

SEQ ID NO: 1934729 - RNA, 19 nt, Artificial Sequence
  Description of Artificial Sequence: Synthetic oligonucleotide
uaaccagucaucuacaauc

SEQ ID NO: 1934730 - RNA, 19 nt, Artificial Sequence
  Description of Artificial Sequence: Synthetic oligonucleotide
uaaugcuagggcaacaagc

SEQ ID NO: 1934731 - RNA, 19 nt, Artificial Sequence
  Description of Artificial Sequence: Synthetic oligonucleotide
uugguuagcuacaacaaug

SEQ ID NO: 1934732 - RNA, 19 nt, Artificial Sequence
  Description of Artificial Sequence: Synthetic oligonucleotide
uuaucgauuacauaauaaa

SEQ ID NO: 1934733 - RNA, 19 nt, Artificial Sequence
  Description of Artificial Sequence: Synthetic oligonucleotide
uauuuaauagccuccuccc

SEQ ID NO: 1934734 - RNA, 19 nt, Artificial Sequence
  Description of Artificial Sequence: Synthetic oligonucleotide
aauaacugaauccauuguu

SEQ ID NO: 1934735 - RNA, 19 nt, Artificial Sequence
  Description of Artificial Sequence: Synthetic oligonucleotide
gaauugguuagcuacaaca

SEQ ID NO: 1934736 - RNA, 19 nt, Artificial Sequence
  Description of Artificial Sequence: Synthetic oligonucleotide
uaaguuacauagcugaaaa

SEQ ID NO: 1934737 - RNA, 19 nt, Artificial Sequence
  Description of Artificial Sequence: Synthetic oligonucleotide
aguauaaauauaugguuga

SEQ ID NO: 1934738 - RNA, 19 nt, Artificial Sequence
  Description of Artificial Sequence: Synthetic oligonucleotide
agcaaaauaaccucaguga

SEQ ID NO: 1934739 - RNA, 19 nt, Artificial Sequence
  Description of Artificial Sequence: Synthetic oligonucleotide
uauucaacagugcucauaa

SEQ ID NO: 1934740 - RNA, 19 nt, Artificial Sequence
  Description of Artificial Sequence: Synthetic oligonucleotide
uuuacaagacuuaaccagu

SEQ ID NO: 1934741 - RNA, 19 nt, Artificial Sequence
  Description of Artificial Sequence: Synthetic oligonucleotide
aacuauaaccacacauucc

SEQ ID NO: 1934742 - RNA, 19 nt, Artificial Sequence
  Description of Artificial Sequence: Synthetic oligonucleotide
ucaacugguucuuaaaaga

SEQ ID NO: 1934743 - RNA, 19 nt, Artificial Sequence
  Description of Artificial Sequence: Synthetic oligonucleotide
uaucgauuacauaauaaaa

SEQ ID NO: 1934744 - RNA, 19 nt, Artificial Sequence
  Description of Artificial Sequence: Synthetic oligonucleotide
ucuauuacaaacuguuuuc

SEQ ID NO: 1934745 - RNA, 19 nt, Artificial Sequence
  Description of Artificial Sequence: Synthetic oligonucleotide
aauauaugguugaacuaac

SEQ ID NO: 1934746 - RNA, 19 nt, Artificial Sequence
  Description of Artificial Sequence: Synthetic oligonucleotide
cauaaguugaaauaacuga

SEQ ID NO: 1934747 - RNA, 19 nt, Artificial Sequence
  Description of Artificial Sequence: Synthetic oligonucleotide
cugaaaaggcauauaaaag

SEQ ID NO: 1934748 - RNA, 19 nt, Artificial Sequence
  Description of Artificial Sequence: Synthetic oligonucleotide
caaauuauuucucccacag

SEQ ID NO: 1934749 - RNA, 19 nt, Artificial Sequence
  Description of Artificial Sequence: Synthetic oligonucleotide
uugagugcaaacauuaaau

SEQ ID NO: 1934750 - RNA, 19 nt, Artificial Sequence
  Description of Artificial Sequence: Synthetic oligonucleotide
uuaaguuccucuauaaauu

SEQ ID NO: 1934751 - RNA, 19 nt, Artificial Sequence
  Description of Artificial Sequence: Synthetic oligonucleotide
uucaacugguucuuaaaag

SEQ ID NO: 1934752 - RNA, 19 nt, Artificial Sequence
  Description of Artificial Sequence: Synthetic oligonucleotide
gacuuaaccagucaucuac

SEQ ID NO: 1934753 - RNA, 19 nt, Artificial Sequence
  Description of Artificial Sequence: Synthetic oligonucleotide
uaagucgcaccuuugagug

SEQ ID NO: 1934754 - RNA, 19 nt, Artificial Sequence
  Description of Artificial Sequence: Synthetic oligonucleotide
uuuaucgauuacauaauaa

SEQ ID NO: 1934755 - RNA, 19 nt, Artificial Sequence
  Description of Artificial Sequence: Synthetic oligonucleotide
uuuaagucgcaccuuugag

SEQ ID NO: 1934756 - RNA, 19 nt, Artificial Sequence
  Description of Artificial Sequence: Synthetic oligonucleotide
caguauaaauauaugguug

SEQ ID NO: 1934757 - RNA, 19 nt, Artificial Sequence
  Description of Artificial Sequence: Synthetic oligonucleotide
auauaaaagaagggaaaac

SEQ ID NO: 1934758 - RNA, 19 nt, Artificial Sequence
  Description of Artificial Sequence: Synthetic oligonucleotide
cauaacagcacaaaaucuc

SEQ ID NO: 1934759 - RNA, 19 nt, Artificial Sequence
  Description of Artificial Sequence: Synthetic oligonucleotide
guacgcaacauucaacugg

SEQ ID NO: 1934760 - RNA, 19 nt, Artificial Sequence
  Description of Artificial Sequence: Synthetic oligonucleotide
uugucuggagacauuauug

SEQ ID NO: 1934761 - RNA, 19 nt, Artificial Sequence
  Description of Artificial Sequence: Synthetic oligonucleotide
ucaaguauccaauuauuaa

SEQ ID NO: 1934762 - RNA, 19 nt, Artificial Sequence
  Description of Artificial Sequence: Synthetic oligonucleotide
auuacaaacuguuuucccu

SEQ ID NO: 1934763 - RNA, 19 nt, Artificial Sequence
  Description of Artificial Sequence: Synthetic oligonucleotide
uuauuaaguuacauagcug

SEQ ID NO: 1934764 - RNA, 19 nt, Artificial Sequence
  Description of Artificial Sequence: Synthetic oligonucleotide
aacugguucuuaaaagagc

SEQ ID NO: 1934765 - RNA, 19 nt, Artificial Sequence
  Description of Artificial Sequence: Synthetic oligonucleotide
auaacagcacaaaaucucc

SEQ ID NO: 1934766 - RNA, 19 nt, Artificial Sequence
  Description of Artificial Sequence: Synthetic oligonucleotide
gucaucuacaaucugguug

SEQ ID NO: 1934767 - RNA, 19 nt, Artificial Sequence
  Description of Artificial Sequence: Synthetic oligonucleotide
uuacauagcugaaaaggca

SEQ ID NO: 1934768 - RNA, 19 nt, Artificial Sequence
  Description of Artificial Sequence: Synthetic oligonucleotide
ucuuuuaucaggcccuccc

SEQ ID NO: 1934769 - RNA, 19 nt, Artificial Sequence
  Description of Artificial Sequence: Synthetic oligonucleotide
aauggacagcaauacagca

SEQ ID NO: 1934770 - RNA, 19 nt, Artificial Sequence
  Description of Artificial Sequence: Synthetic oligonucleotide
uagauguugaagcucuugc

SEQ ID NO: 1934771 - RNA, 19 nt, Artificial Sequence
  Description of Artificial Sequence: Synthetic oligonucleotide
uauaugguugaacuaacau

SEQ ID NO: 1934772 - RNA, 19 nt, Artificial Sequence
  Description of Artificial Sequence: Synthetic oligonucleotide
acacugacaaauuauuucu

SEQ ID NO: 1934773 - RNA, 19 nt, Artificial Sequence
  Description of Artificial Sequence: Synthetic oligonucleotide
ucaauuaaugcuagggcaa

SEQ ID NO: 1934774 - RNA, 19 nt, Artificial Sequence
  Description of Artificial Sequence: Synthetic oligonucleotide
auuaaagagcauauucuac

SEQ ID NO: 1934775 - RNA, 19 nt, Artificial Sequence
  Description of Artificial Sequence: Synthetic oligonucleotide
uuauuuagauguugaagcu

SEQ ID NO: 1934776 - RNA, 19 nt, Artificial Sequence
  Description of Artificial Sequence: Synthetic oligonucleotide
uuugagugcaaacauuaaa

SEQ ID NO: 1934777 - RNA, 19 nt, Artificial Sequence
  Description of Artificial Sequence: Synthetic oligonucleotide
ucuuuacaagacuuaacca

SEQ ID NO: 1934778 - RNA, 19 nt, Artificial Sequence
  Description of Artificial Sequence: Synthetic oligonucleotide
uauugugguaacuccauac

SEQ ID NO: 1934779 - RNA, 19 nt, Artificial Sequence
  Description of Artificial Sequence: Synthetic oligonucleotide
ugacaaacgcauuucauuc

SEQ ID NO: 1934780 - RNA, 19 nt, Artificial Sequence
  Description of Artificial Sequence: Synthetic oligonucleotide
aaggcauauaaaagaaggg

SEQ ID NO: 1934781 - RNA, 19 nt, Artificial Sequence
  Description of Artificial Sequence: Synthetic oligonucleotide
aaaccauaauucaagcaag

SEQ ID NO: 1934782 - RNA, 19 nt, Artificial Sequence
  Description of Artificial Sequence: Synthetic oligonucleotide
acccuaacaaauuuguuca

SEQ ID NO: 1934783 - RNA, 19 nt, Artificial Sequence
  Description of Artificial Sequence: Synthetic oligonucleotide
cuaagaacuacgaauuguc

SEQ ID NO: 1934784 - RNA, 19 nt, Artificial Sequence
  Description of Artificial Sequence: Synthetic oligonucleotide
uauuacaaacuguuuuccc

SEQ ID NO: 1934785 - RNA, 19 nt, Artificial Sequence
  Description of Artificial Sequence: Synthetic oligonucleotide
aagacuuaaccagucaucu

SEQ ID NO: 1934786 - RNA, 19 nt, Artificial Sequence
  Description of Artificial Sequence: Synthetic oligonucleotide
ugacaaauuauuucuccca

SEQ ID NO: 1934787 - RNA, 19 nt, Artificial Sequence
  Description of Artificial Sequence: Synthetic oligonucleotide
cuguacugcaucuucauac

SEQ ID NO: 1934788 - RNA, 19 nt, Artificial Sequence
  Description of Artificial Sequence: Synthetic oligonucleotide
uccauuguuuucuacaaaa

SEQ ID NO: 1934789 - RNA, 19 nt, Artificial Sequence
  Description of Artificial Sequence: Synthetic oligonucleotide
uaagaacuacgaauugucc

SEQ ID NO: 1934790 - RNA, 19 nt, Artificial Sequence
  Description of Artificial Sequence: Synthetic oligonucleotide
gauguugaagcucuugcac

SEQ ID NO: 1934791 - RNA, 19 nt, Artificial Sequence
  Description of Artificial Sequence: Synthetic oligonucleotide
uuacuauugugguaacucc

SEQ ID NO: 1934792 - RNA, 19 nt, Artificial Sequence
  Description of Artificial Sequence: Synthetic oligonucleotide
aaagagcauauucuacaug

SEQ ID NO: 1934793 - RNA, 19 nt, Artificial Sequence
  Description of Artificial Sequence: Synthetic oligonucleotide
uaagaauugguuagcuaca

SEQ ID NO: 1934794 - RNA, 19 nt, Artificial Sequence
  Description of Artificial Sequence: Synthetic oligonucleotide
acaguauaaauauaugguu

SEQ ID NO: 1934795 - RNA, 19 nt, Artificial Sequence
  Description of Artificial Sequence: Synthetic oligonucleotide
aaguuacauagcugaaaag

SEQ ID NO: 1934796 - RNA, 19 nt, Artificial Sequence
  Description of Artificial Sequence: Synthetic oligonucleotide
uuuuacaagcuggugaaca

SEQ ID NO: 1934797 - RNA, 19 nt, Artificial Sequence
  Description of Artificial Sequence: Synthetic oligonucleotide
uuaauacacaucaccauuu

SEQ ID NO: 1934798 - RNA, 19 nt, Artificial Sequence
  Description of Artificial Sequence: Synthetic oligonucleotide
aucuauuacaaacuguuuu

SEQ ID NO: 1934799 - RNA, 19 nt, Artificial Sequence
  Description of Artificial Sequence: Synthetic oligonucleotide
aaggcaacauuuuacuaaa

SEQ ID NO: 1934800 - RNA, 19 nt, Artificial Sequence
  Description of Artificial Sequence: Synthetic oligonucleotide
ugguggugcaccaucauca

SEQ ID NO: 1934801 - RNA, 19 nt, Artificial Sequence
  Description of Artificial Sequence: Synthetic oligonucleotide
ugacugauggaacugaguu

SEQ ID NO: 1934802 - RNA, 19 nt, Artificial Sequence
  Description of Artificial Sequence: Synthetic oligonucleotide
aaugcuagggcaacaagca

SEQ ID NO: 1934803 - RNA, 19 nt, Artificial Sequence
  Description of Artificial Sequence: Synthetic oligonucleotide
uuaagucgcaccuuugagu

SEQ ID NO: 1934804 - RNA, 19 nt, Artificial Sequence
  Description of Artificial Sequence: Synthetic oligonucleotide
cugacaaauuauuucuccc

SEQ ID NO: 1934805 - RNA, 19 nt, Artificial Sequence
  Description of Artificial Sequence: Synthetic oligonucleotide
guuacauagcugaaaaggc

SEQ ID NO: 1934806 - RNA, 19 nt, Artificial Sequence
  Description of Artificial Sequence: Synthetic oligonucleotide
cacaaaaucuccacgccgc

SEQ ID NO: 1934807 - RNA, 19 nt, Artificial Sequence
  Description of Artificial Sequence: Synthetic oligonucleotide
ugaaauaacugaauccauu

SEQ ID NO: 1934808 - RNA, 19 nt, Artificial Sequence
  Description of Artificial Sequence: Synthetic oligonucleotide
ucccauucuuuuaucaggc

SEQ ID NO: 1934809 - RNA, 19 nt, Artificial Sequence
  Description of Artificial Sequence: Synthetic oligonucleotide
uuaaugcuagggcaacaag

SEQ ID NO: 1934810 - RNA, 19 nt, Artificial Sequence
  Description of Artificial Sequence: Synthetic oligonucleotide
uacaagcuggugaacacug

SEQ ID NO: 1934811 - RNA, 19 nt, Artificial Sequence
  Description of Artificial Sequence: Synthetic oligonucleotide
uacuaaauuaaagagcaua

SEQ ID NO: 1934812 - RNA, 19 nt, Artificial Sequence
  Description of Artificial Sequence: Synthetic oligonucleotide
uaaguugaaauaacugaau

SEQ ID NO: 1934813 - RNA, 19 nt, Artificial Sequence
  Description of Artificial Sequence: Synthetic oligonucleotide
uacuauugugguaacucca

SEQ ID NO: 1934814 - RNA, 19 nt, Artificial Sequence
  Description of Artificial Sequence: Synthetic oligonucleotide
ucuuaugaacuguacugca

SEQ ID NO: 1934815 - RNA, 19 nt, Artificial Sequence
  Description of Artificial Sequence: Synthetic oligonucleotide
acgaauuguccuuucuuuc

SEQ ID NO: 1934816 - RNA, 19 nt, Artificial Sequence
  Description of Artificial Sequence: Synthetic oligonucleotide
ucuaagaacuacgaauugu

SEQ ID NO: 1934817 - RNA, 19 nt, Artificial Sequence
  Description of Artificial Sequence: Synthetic oligonucleotide
uuuuaucaggcccucccug

SEQ ID NO: 1934818 - RNA, 19 nt, Artificial Sequence
  Description of Artificial Sequence: Synthetic oligonucleotide
cauaacccuaacaaauuug

SEQ ID NO: 1934819 - RNA, 19 nt, Artificial Sequence
  Description of Artificial Sequence: Synthetic oligonucleotide
agugcaaacauuaaauuaa

SEQ ID NO: 1934820 - RNA, 19 nt, Artificial Sequence
  Description of Artificial Sequence: Synthetic oligonucleotide
acauuaauacacaucacca

SEQ ID NO: 1934821 - RNA, 19 nt, Artificial Sequence
  Description of Artificial Sequence: Synthetic oligonucleotide
uuuuaucgauuacauaaua

SEQ ID NO: 1934822 - RNA, 19 nt, Artificial Sequence
  Description of Artificial Sequence: Synthetic oligonucleotide
ugcuagggcaacaagcacu

SEQ ID NO: 1934823 - RNA, 19 nt, Artificial Sequence
  Description of Artificial Sequence: Synthetic oligonucleotide
caauggacagcaauacagc

SEQ ID NO: 1934824 - RNA, 19 nt, Artificial Sequence
  Description of Artificial Sequence: Synthetic oligonucleotide
uacauguucugcacaagac

SEQ ID NO: 1934825 - RNA, 19 nt, Artificial Sequence
  Description of Artificial Sequence: Synthetic oligonucleotide
ucccagacaguauaaauau

SEQ ID NO: 1934826 - RNA, 19 nt, Artificial Sequence
  Description of Artificial Sequence: Synthetic oligonucleotide
uuuacaagcuggugaacac

SEQ ID NO: 1934827 - RNA, 19 nt, Artificial Sequence
  Description of Artificial Sequence: Synthetic oligonucleotide
ugguuagcuacaacaaugu

SEQ ID NO: 1934828 - RNA, 19 nt, Artificial Sequence
  Description of Artificial Sequence: Synthetic oligonucleotide
uacgcaacauucaacuggu

SEQ ID NO: 1934829 - RNA, 19 nt, Artificial Sequence
  Description of Artificial Sequence: Synthetic oligonucleotide
aaauggagguuucccauaa

SEQ ID NO: 1934830 - RNA, 19 nt, Artificial Sequence
  Description of Artificial Sequence: Synthetic oligonucleotide
ucccauaacagcacaaaau

SEQ ID NO: 1934831 - RNA, 19 nt, Artificial Sequence
  Description of Artificial Sequence: Synthetic oligonucleotide
aagauaugugcuucuguaa

SEQ ID NO: 1934832 - RNA, 19 nt, Artificial Sequence
  Description of Artificial Sequence: Synthetic oligonucleotide
auuuagauguugaagcucu

SEQ ID NO: 1934833 - RNA, 19 nt, Artificial Sequence
  Description of Artificial Sequence: Synthetic oligonucleotide
aauggagguuucccauaac

SEQ ID NO: 1934834 - RNA, 19 nt, Artificial Sequence
  Description of Artificial Sequence: Synthetic oligonucleotide
gacaaaggcaacauuuuac

SEQ ID NO: 1934835 - RNA, 19 nt, Artificial Sequence
  Description of Artificial Sequence: Synthetic oligonucleotide
uaaccucagugacaaacgc

SEQ ID NO: 1934836 - RNA, 19 nt, Artificial Sequence
  Description of Artificial Sequence: Synthetic oligonucleotide
ugaagauaugugcuucugu

SEQ ID NO: 1934837 - RNA, 19 nt, Artificial Sequence
  Description of Artificial Sequence: Synthetic oligonucleotide
uucccagacaguauaaaua

SEQ ID NO: 1934838 - RNA, 19 nt, Artificial Sequence
  Description of Artificial Sequence: Synthetic oligonucleotide
aaaugaucaaguauccaau

SEQ ID NO: 1934839 - RNA, 19 nt, Artificial Sequence
  Description of Artificial Sequence: Synthetic oligonucleotide
cagcacaaaaucuccacgc

SEQ ID NO: 1934840 - RNA, 19 nt, Artificial Sequence
  Description of Artificial Sequence: Synthetic oligonucleotide
auugugguaacuccauacu

SEQ ID NO: 1934841 - RNA, 19 nt, Artificial Sequence
  Description of Artificial Sequence: Synthetic oligonucleotide
auaaguugaaauaacugaa

SEQ ID NO: 1934842 - RNA, 19 nt, Artificial Sequence
  Description of Artificial Sequence: Synthetic oligonucleotide
agaauugguuagcuacaac

SEQ ID NO: 1934843 - RNA, 19 nt, Artificial Sequence
  Description of Artificial Sequence: Synthetic oligonucleotide
cacuugguauucaacagug

SEQ ID NO: 1934844 - RNA, 19 nt, Artificial Sequence
  Description of Artificial Sequence: Synthetic oligonucleotide
acugaauccauuguuuucu

SEQ ID NO: 1934845 - RNA, 19 nt, Artificial Sequence
  Description of Artificial Sequence: Synthetic oligonucleotide
uucacgaaacuuaaucuuu

SEQ ID NO: 1934846 - RNA, 19 nt, Artificial Sequence
  Description of Artificial Sequence: Synthetic oligonucleotide
cuaacaaauuuguucauaa

SEQ ID NO: 1934847 - RNA, 19 nt, Artificial Sequence
  Description of Artificial Sequence: Synthetic oligonucleotide
cuccacaagaguagugucg

SEQ ID NO: 1934848 - RNA, 19 nt, Artificial Sequence
  Description of Artificial Sequence: Synthetic oligonucleotide
agcuacaacaauguaucuc

SEQ ID NO: 1934849 - RNA, 19 nt, Artificial Sequence
  Description of Artificial Sequence: Synthetic oligonucleotide
acuaaauuaaagagcauau

SEQ ID NO: 1934850 - RNA, 19 nt, Artificial Sequence
  Description of Artificial Sequence: Synthetic oligonucleotide
acauacucuuacuauugug

SEQ ID NO: 1934851 - RNA, 19 nt, Artificial Sequence
  Description of Artificial Sequence: Synthetic oligonucleotide
auacucuuacuauuguggu

SEQ ID NO: 1934852 - RNA, 19 nt, Artificial Sequence
  Description of Artificial Sequence: Synthetic oligonucleotide
aaaggccagucuaagaacu

SEQ ID NO: 1934853 - RNA, 19 nt, Artificial Sequence
  Description of Artificial Sequence: Synthetic oligonucleotide
auaaccucagugacaaacg

SEQ ID NO: 1934854 - RNA, 19 nt, Artificial Sequence
  Description of Artificial Sequence: Synthetic oligonucleotide
uuuucccucaguacgcaac

SEQ ID NO: 1934855 - RNA, 19 nt, Artificial Sequence
  Description of Artificial Sequence: Synthetic oligonucleotide
uagggcaacaagcacugga

SEQ ID NO: 1934856 - RNA, 19 nt, Artificial Sequence
  Description of Artificial Sequence: Synthetic oligonucleotide
uucugauagguauggaaaa

SEQ ID NO: 1934857 - RNA, 19 nt, Artificial Sequence
  Description of Artificial Sequence: Synthetic oligonucleotide
acaagacuuaaccagucau

SEQ ID NO: 1934858 - RNA, 19 nt, Artificial Sequence
  Description of Artificial Sequence: Synthetic oligonucleotide
gacaguauaaauauauggu

SEQ ID NO: 1934859 - RNA, 19 nt, Artificial Sequence
  Description of Artificial Sequence: Synthetic oligonucleotide
uacaacaauguaucucuac

SEQ ID NO: 1934860 - RNA, 19 nt, Artificial Sequence
  Description of Artificial Sequence: Synthetic oligonucleotide
uucacauacucuuacuauu

SEQ ID NO: 1934861 - RNA, 19 nt, Artificial Sequence
  Description of Artificial Sequence: Synthetic oligonucleotide
caaucugguuggauggugg

SEQ ID NO: 1934862 - RNA, 19 nt, Artificial Sequence
  Description of Artificial Sequence: Synthetic oligonucleotide
uguacugcaucuucauacu

SEQ ID NO: 1934863 - RNA, 19 nt, Artificial Sequence
  Description of Artificial Sequence: Synthetic oligonucleotide
auggagguuucccauaaca

SEQ ID NO: 1934864 - RNA, 19 nt, Artificial Sequence
  Description of Artificial Sequence: Synthetic oligonucleotide
gauaugugcuucuguaaca

SEQ ID NO: 1934865 - RNA, 19 nt, Artificial Sequence
  Description of Artificial Sequence: Synthetic oligonucleotide
aacuacgaauuguccuuuc

SEQ ID NO: 1934866 - RNA, 19 nt, Artificial Sequence
  Description of Artificial Sequence: Synthetic oligonucleotide
acuucugauagguauggaa

SEQ ID NO: 1934867 - RNA, 19 nt, Artificial Sequence
  Description of Artificial Sequence: Synthetic oligonucleotide
aauacacaucaccauuuua

SEQ ID NO: 1934868 - RNA, 19 nt, Artificial Sequence
  Description of Artificial Sequence: Synthetic oligonucleotide
ugauuaagaauugguuagc

SEQ ID NO: 1934869 - RNA, 19 nt, Artificial Sequence
  Description of Artificial Sequence: Synthetic oligonucleotide
ucauaacccuaacaaauuu

SEQ ID NO: 1934870 - RNA, 19 nt, Artificial Sequence
  Description of Artificial Sequence: Synthetic oligonucleotide
acauuauugaagauaugug

SEQ ID NO: 1934871 - RNA, 19 nt, Artificial Sequence
  Description of Artificial Sequence: Synthetic oligonucleotide
aaacgcauuucauucuuua

SEQ ID NO: 1934872 - RNA, 19 nt, Artificial Sequence
  Description of Artificial Sequence: Synthetic oligonucleotide
agaacuacgaauuguccuu

SEQ ID NO: 1934873 - RNA, 19 nt, Artificial Sequence
  Description of Artificial Sequence: Synthetic oligonucleotide
aagucgcaccuuugagugc

SEQ ID NO: 1934874 - RNA, 19 nt, Artificial Sequence
  Description of Artificial Sequence: Synthetic oligonucleotide
gagugcaaacauuaaauua

SEQ ID NO: 1934875 - RNA, 19 nt, Artificial Sequence
  Description of Artificial Sequence: Synthetic oligonucleotide
uacaagacuuaaccaguca

SEQ ID NO: 1934876 - RNA, 19 nt, Artificial Sequence
  Description of Artificial Sequence: Synthetic oligonucleotide
uuauugaagauaugugcuu

SEQ ID NO: 1934877 - RNA, 19 nt, Artificial Sequence
  Description of Artificial Sequence: Synthetic oligonucleotide
agugucguaaguugcuuca

SEQ ID NO: 1934878 - RNA, 19 nt, Artificial Sequence
  Description of Artificial Sequence: Synthetic oligonucleotide
auaacccuaacaaauuugu

SEQ ID NO: 1934879 - RNA, 19 nt, Artificial Sequence
  Description of Artificial Sequence: Synthetic oligonucleotide
ugagugcaaacauuaaauu

SEQ ID NO: 1934880 - RNA, 19 nt, Artificial Sequence
  Description of Artificial Sequence: Synthetic oligonucleotide
uucuacauguucugcacaa

SEQ ID NO: 1934881 - RNA, 19 nt, Artificial Sequence
  Description of Artificial Sequence: Synthetic oligonucleotide
auugaagauaugugcuucu

SEQ ID NO: 1934882 - RNA, 19 nt, Artificial Sequence
  Description of Artificial Sequence: Synthetic oligonucleotide
acucuuacuauugugguaa

SEQ ID NO: 1934883 - RNA, 19 nt, Artificial Sequence
  Description of Artificial Sequence: Synthetic oligonucleotide
auacacaucaccauuuuau

SEQ ID NO: 1934884 - RNA, 19 nt, Artificial Sequence
  Description of Artificial Sequence: Synthetic oligonucleotide
ucaguacgcaacauucaac

SEQ ID NO: 1934885 - RNA, 19 nt, Artificial Sequence
  Description of Artificial Sequence: Synthetic oligonucleotide
uguugaagcucuugcacaa

SEQ ID NO: 1934886 - RNA, 19 nt, Artificial Sequence
  Description of Artificial Sequence: Synthetic oligonucleotide
aaguugauuuucaaaugga

SEQ ID NO: 1934887 - RNA, 19 nt, Artificial Sequence
  Description of Artificial Sequence: Synthetic oligonucleotide
acgaaacuuaaucuuuaca

SEQ ID NO: 1934888 - RNA, 19 nt, Artificial Sequence
  Description of Artificial Sequence: Synthetic oligonucleotide
uguuuaagucgcaccuuug

SEQ ID NO: 1934889 - RNA, 19 nt, Artificial Sequence
  Description of Artificial Sequence: Synthetic oligonucleotide
caaaaggccagucuaagaa

SEQ ID NO: 1934890 - RNA, 19 nt, Artificial Sequence
  Description of Artificial Sequence: Synthetic oligonucleotide
uauuuagauguugaagcuc

SEQ ID NO: 1934891 - RNA, 19 nt, Artificial Sequence
  Description of Artificial Sequence: Synthetic oligonucleotide
agugcucauaacccuaaca

SEQ ID NO: 1934892 - RNA, 19 nt, Artificial Sequence
  Description of Artificial Sequence: Synthetic oligonucleotide
uacgaauuguccuuucuuu

SEQ ID NO: 1934893 - RNA, 19 nt, Artificial Sequence
  Description of Artificial Sequence: Synthetic oligonucleotide
caagacuuaaccagucauc

SEQ ID NO: 1934894 - RNA, 19 nt, Artificial Sequence
  Description of Artificial Sequence: Synthetic oligonucleotide
aaucugguuggaugguggu

SEQ ID NO: 1934895 - RNA, 19 nt, Artificial Sequence
  Description of Artificial Sequence: Synthetic oligonucleotide
gggaaaaccauaauucaag

SEQ ID NO: 1934896 - RNA, 19 nt, Artificial Sequence
  Description of Artificial Sequence: Synthetic oligonucleotide
ugucguaaguugcuucaca

SEQ ID NO: 1934897 - RNA, 19 nt, Artificial Sequence
  Description of Artificial Sequence: Synthetic oligonucleotide
ccauaauucaagcaaguug

SEQ ID NO: 1934898 - RNA, 19 nt, Artificial Sequence
  Description of Artificial Sequence: Synthetic oligonucleotide
cauauucuacauguucugc

SEQ ID NO: 1934899 - RNA, 19 nt, Artificial Sequence
  Description of Artificial Sequence: Synthetic oligonucleotide
caaaauaaccucagugaca

SEQ ID NO: 1934900 - RNA, 19 nt, Artificial Sequence
  Description of Artificial Sequence: Synthetic oligonucleotide
auugguuagcuacaacaau

SEQ ID NO: 1934901 - RNA, 19 nt, Artificial Sequence
  Description of Artificial Sequence: Synthetic oligonucleotide
ggagguuucccauaacagc

SEQ ID NO: 1934902 - RNA, 19 nt, Artificial Sequence
  Description of Artificial Sequence: Synthetic oligonucleotide
cuguuuucccucaguacgc

SEQ ID NO: 1934903 - RNA, 19 nt, Artificial Sequence
  Description of Artificial Sequence: Synthetic oligonucleotide
auuaagaauugguuagcua

SEQ ID NO: 1934904 - RNA, 19 nt, Artificial Sequence
  Description of Artificial Sequence: Synthetic oligonucleotide
gucuuaugaacuguacugc

SEQ ID NO: 1934905 - RNA, 19 nt, Artificial Sequence
  Description of Artificial Sequence: Synthetic oligonucleotide
uugcuucacauacucuuac

SEQ ID NO: 1934906 - RNA, 19 nt, Artificial Sequence
  Description of Artificial Sequence: Synthetic oligonucleotide
ugcucauaacccuaacaaa

SEQ ID NO: 1934907 - RNA, 19 nt, Artificial Sequence
  Description of Artificial Sequence: Synthetic oligonucleotide
gugcucauaacccuaacaa

SEQ ID NO: 1934908 - RNA, 19 nt, Artificial Sequence
  Description of Artificial Sequence: Synthetic oligonucleotide
agaacuauaaccacacauu

SEQ ID NO: 1934909 - RNA, 19 nt, Artificial Sequence
  Description of Artificial Sequence: Synthetic oligonucleotide
aauuaaugcuagggcaaca

SEQ ID NO: 1934910 - RNA, 19 nt, Artificial Sequence
  Description of Artificial Sequence: Synthetic oligonucleotide
ucaaggucaccaucuauua

SEQ ID NO: 1934911 - RNA, 19 nt, Artificial Sequence
  Description of Artificial Sequence: Synthetic oligonucleotide
ucacgaaacuuaaucuuua

SEQ ID NO: 1934912 - RNA, 19 nt, Artificial Sequence
  Description of Artificial Sequence: Synthetic oligonucleotide
uccaauuauuaaguuacau

SEQ ID NO: 1934913 - RNA, 19 nt, Artificial Sequence
  Description of Artificial Sequence: Synthetic oligonucleotide
aguacgcaacauucaacug

SEQ ID NO: 1934914 - RNA, 19 nt, Artificial Sequence
  Description of Artificial Sequence: Synthetic oligonucleotide
augaucaaguauccaauua

SEQ ID NO: 1934915 - RNA, 19 nt, Artificial Sequence
  Description of Artificial Sequence: Synthetic oligonucleotide
guauccaauuauuaaguua

SEQ ID NO: 1934916 - RNA, 19 nt, Artificial Sequence
  Description of Artificial Sequence: Synthetic oligonucleotide
guuuaagucgcaccuuuga

SEQ ID NO: 1934917 - RNA, 19 nt, Artificial Sequence
  Description of Artificial Sequence: Synthetic oligonucleotide
aguauccaauuauuaaguu

SEQ ID NO: 1934918 - RNA, 19 nt, Artificial Sequence
  Description of Artificial Sequence: Synthetic oligonucleotide
agucuaagaacuacgaauu

SEQ ID NO: 1934919 - RNA, 19 nt, Artificial Sequence
  Description of Artificial Sequence: Synthetic oligonucleotide
ugguugaacuaacauuaau

SEQ ID NO: 1934920 - RNA, 19 nt, Artificial Sequence
  Description of Artificial Sequence: Synthetic oligonucleotide
uugugguaacuccauacuu

SEQ ID NO: 1934921 - RNA, 19 nt, Artificial Sequence
  Description of Artificial Sequence: Synthetic oligonucleotide
uauuucucccacagaacua

SEQ ID NO: 1934922 - RNA, 19 nt, Artificial Sequence
  Description of Artificial Sequence: Synthetic oligonucleotide
aucaaaaggccagucuaag

SEQ ID NO: 1934923 - RNA, 19 nt, Artificial Sequence
  Description of Artificial Sequence: Synthetic oligonucleotide
cugcacaagacaaaggcaa

SEQ ID NO: 1934924 - RNA, 19 nt, Artificial Sequence
  Description of Artificial Sequence: Synthetic oligonucleotide
uccacaagaguagugucgu

SEQ ID NO: 1934925 - RNA, 19 nt, Artificial Sequence
  Description of Artificial Sequence: Synthetic oligonucleotide
ugcacaagacaaaggcaac

SEQ ID NO: 1934926 - RNA, 19 nt, Artificial Sequence
  Description of Artificial Sequence: Synthetic oligonucleotide
guaacaaaguugauuuuca

SEQ ID NO: 1934927 - RNA, 19 nt, Artificial Sequence
  Description of Artificial Sequence: Synthetic oligonucleotide
acuacgaauuguccuuucu

SEQ ID NO: 1934928 - RNA, 19 nt, Artificial Sequence
  Description of Artificial Sequence: Synthetic oligonucleotide
aaccauaauucaagcaagu

SEQ ID NO: 1934929 - RNA, 19 nt, Artificial Sequence
  Description of Artificial Sequence: Synthetic oligonucleotide
guucauaaguugaaauaac

SEQ ID NO: 1934930 - RNA, 19 nt, Artificial Sequence
  Description of Artificial Sequence: Synthetic oligonucleotide
agagcaaaauuuacaauaa

SEQ ID NO: 1934931 - RNA, 19 nt, Artificial Sequence
  Description of Artificial Sequence: Synthetic oligonucleotide
uaauucaagcaaguugaaa

SEQ ID NO: 1934932 - RNA, 19 nt, Artificial Sequence
  Description of Artificial Sequence: Synthetic oligonucleotide
auucaacagugcucauaac

SEQ ID NO: 1934933 - RNA, 19 nt, Artificial Sequence
  Description of Artificial Sequence: Synthetic oligonucleotide
gaacuaacauuaauacaca

SEQ ID NO: 1934934 - RNA, 19 nt, Artificial Sequence
  Description of Artificial Sequence: Synthetic oligonucleotide
aagaauugguuagcuacaa

SEQ ID NO: 1934935 - RNA, 19 nt, Artificial Sequence
  Description of Artificial Sequence: Synthetic oligonucleotide
gucuaagaacuacgaauug

SEQ ID NO: 1934936 - RNA, 19 nt, Artificial Sequence
  Description of Artificial Sequence: Synthetic oligonucleotide
gcacaaaaucuccacgccg

SEQ ID NO: 1934937 - RNA, 19 nt, Artificial Sequence
  Description of Artificial Sequence: Synthetic oligonucleotide
ucccuguuuaagucgcacc

SEQ ID NO: 1934938 - RNA, 19 nt, Artificial Sequence
  Description of Artificial Sequence: Synthetic oligonucleotide
uugaagauaugugcuucug

SEQ ID NO: 1934939 - RNA, 19 nt, Artificial Sequence
  Description of Artificial Sequence: Synthetic oligonucleotide
uuacuaaauuaaagagcau

SEQ ID NO: 1934940 - RNA, 19 nt, Artificial Sequence
  Description of Artificial Sequence: Synthetic oligonucleotide
ucaccauuuuaucgauuac

SEQ ID NO: 1934941 - RNA, 19 nt, Artificial Sequence
  Description of Artificial Sequence: Synthetic oligonucleotide
cguaaguugcuucacauac

SEQ ID NO: 1934942 - RNA, 19 nt, Artificial Sequence
  Description of Artificial Sequence: Synthetic oligonucleotide
aagacaaaggcaacauuuu

SEQ ID NO: 1934943 - RNA, 19 nt, Artificial Sequence
  Description of Artificial Sequence: Synthetic oligonucleotide
auuaaugcuagggcaacaa

SEQ ID NO: 1934944 - RNA, 19 nt, Artificial Sequence
  Description of Artificial Sequence: Synthetic oligonucleotide
cacgaaacuuaaucuuuac

SEQ ID NO: 1934945 - RNA, 19 nt, Artificial Sequence
  Description of Artificial Sequence: Synthetic oligonucleotide
acaaacgcauuucauucuu

SEQ ID NO: 1934946 - RNA, 19 nt, Artificial Sequence
  Description of Artificial Sequence: Synthetic oligonucleotide
uuacaagcuggugaacacu

SEQ ID NO: 1934947 - RNA, 19 nt, Artificial Sequence
  Description of Artificial Sequence: Synthetic oligonucleotide
ucuacauguucugcacaag

SEQ ID NO: 1934948 - RNA, 19 nt, Artificial Sequence
  Description of Artificial Sequence: Synthetic oligonucleotide
uuaauagccuccucccauu

SEQ ID NO: 1934949 - RNA, 19 nt, Artificial Sequence
  Description of Artificial Sequence: Synthetic oligonucleotide
cuacauguucugcacaaga

SEQ ID NO: 1934950 - RNA, 19 nt, Artificial Sequence
  Description of Artificial Sequence: Synthetic oligonucleotide
aacaagaauuucagaaauu

SEQ ID NO: 1934951 - RNA, 19 nt, Artificial Sequence
  Description of Artificial Sequence: Synthetic oligonucleotide
gugcaccaucaucaaaagg

SEQ ID NO: 1934952 - RNA, 19 nt, Artificial Sequence
  Description of Artificial Sequence: Synthetic oligonucleotide
caccuucaauuaaugcuag

SEQ ID NO: 1934953 - RNA, 19 nt, Artificial Sequence
  Description of Artificial Sequence: Synthetic oligonucleotide
cagucuaagaacuacgaau

SEQ ID NO: 1934954 - RNA, 19 nt, Artificial Sequence
  Description of Artificial Sequence: Synthetic oligonucleotide
ccugcaacacaauggacag

SEQ ID NO: 1934955 - RNA, 19 nt, Artificial Sequence
  Description of Artificial Sequence: Synthetic oligonucleotide
aggccagucuaagaacuac

SEQ ID NO: 1934956 - RNA, 19 nt, Artificial Sequence
  Description of Artificial Sequence: Synthetic oligonucleotide
uaauagccuccucccauuc

SEQ ID NO: 1934957 - RNA, 19 nt, Artificial Sequence
  Description of Artificial Sequence: Synthetic oligonucleotide
auucuuuuaucaggcccuc

SEQ ID NO: 1934958 - RNA, 19 nt, Artificial Sequence
  Description of Artificial Sequence: Synthetic oligonucleotide
caauuaaugcuagggcaac

SEQ ID NO: 1934959 - RNA, 19 nt, Artificial Sequence
  Description of Artificial Sequence: Synthetic oligonucleotide
uacucuuacuauuguggua

SEQ ID NO: 1934960 - RNA, 19 nt, Artificial Sequence
  Description of Artificial Sequence: Synthetic oligonucleotide
ucuuacuauugugguaacu

SEQ ID NO: 1934961 - RNA, 19 nt, Artificial Sequence
  Description of Artificial Sequence: Synthetic oligonucleotide
gagcaaaauuuacaauaaa

SEQ ID NO: 1934962 - RNA, 19 nt, Artificial Sequence
  Description of Artificial Sequence: Synthetic oligonucleotide
cgaaacuuaaucuuuacaa

SEQ ID NO: 1934963 - RNA, 19 nt, Artificial Sequence
  Description of Artificial Sequence: Synthetic oligonucleotide
gauuaagaauugguuagcu

SEQ ID NO: 1934964 - RNA, 19 nt, Artificial Sequence
  Description of Artificial Sequence: Synthetic oligonucleotide
uagugucguaaguugcuuc

SEQ ID NO: 1934965 - RNA, 19 nt, Artificial Sequence
  Description of Artificial Sequence: Synthetic oligonucleotide
uaacccuaacaaauuuguu

SEQ ID NO: 1934966 - RNA, 19 nt, Artificial Sequence
  Description of Artificial Sequence: Synthetic oligonucleotide
gguugaacuaacauuaaua

SEQ ID NO: 1934967 - RNA, 19 nt, Artificial Sequence
  Description of Artificial Sequence: Synthetic oligonucleotide
aagcucuugcacaaguuuu

SEQ ID NO: 1934968 - RNA, 19 nt, Artificial Sequence
  Description of Artificial Sequence: Synthetic oligonucleotide
auagccuccucccauucuu

SEQ ID NO: 1934969 - RNA, 19 nt, Artificial Sequence
  Description of Artificial Sequence: Synthetic oligonucleotide
auauaugguugaacuaaca

SEQ ID NO: 1934970 - RNA, 19 nt, Artificial Sequence
  Description of Artificial Sequence: Synthetic oligonucleotide
caguacgcaacauucaacu

SEQ ID NO: 1934971 - RNA, 19 nt, Artificial Sequence
  Description of Artificial Sequence: Synthetic oligonucleotide
ggcauauaaaagaagggaa

SEQ ID NO: 1934972 - RNA, 19 nt, Artificial Sequence
  Description of Artificial Sequence: Synthetic oligonucleotide
ugauggaacugaguuuuaa

SEQ ID NO: 1934973 - RNA, 19 nt, Artificial Sequence
  Description of Artificial Sequence: Synthetic oligonucleotide
agucgcaccuuugagugca

SEQ ID NO: 1934974 - RNA, 19 nt, Artificial Sequence
  Description of Artificial Sequence: Synthetic oligonucleotide
ucguaaguugcuucacaua

SEQ ID NO: 1934975 - RNA, 19 nt, Artificial Sequence
  Description of Artificial Sequence: Synthetic oligonucleotide
agguuucccauaacagcac

SEQ ID NO: 1934976 - RNA, 19 nt, Artificial Sequence
  Description of Artificial Sequence: Synthetic oligonucleotide
acaaucugguuggauggug

SEQ ID NO: 1934977 - RNA, 19 nt, Artificial Sequence
  Description of Artificial Sequence: Synthetic oligonucleotide
gacaaacgcauuucauucu

SEQ ID NO: 1934978 - RNA, 19 nt, Artificial Sequence
  Description of Artificial Sequence: Synthetic oligonucleotide
ggugcaccaucaucaaaag

SEQ ID NO: 1934979 - RNA, 19 nt, Artificial Sequence
  Description of Artificial Sequence: Synthetic oligonucleotide
aacagugcucauaacccua

SEQ ID NO: 1934980 - RNA, 19 nt, Artificial Sequence
  Description of Artificial Sequence: Synthetic oligonucleotide
cucaguacgcaacauucaa

SEQ ID NO: 1934981 - RNA, 19 nt, Artificial Sequence
  Description of Artificial Sequence: Synthetic oligonucleotide
caacaauguaucucuaccu

SEQ ID NO: 1934982 - RNA, 19 nt, Artificial Sequence
  Description of Artificial Sequence: Synthetic oligonucleotide
cuauaaccacacauuccca

SEQ ID NO: 1934983 - RNA, 19 nt, Artificial Sequence
  Description of Artificial Sequence: Synthetic oligonucleotide
cauuaauacacaucaccau

SEQ ID NO: 1934984 - RNA, 19 nt, Artificial Sequence
  Description of Artificial Sequence: Synthetic oligonucleotide
uuuagauguugaagcucuu

SEQ ID NO: 1934985 - RNA, 19 nt, Artificial Sequence
  Description of Artificial Sequence: Synthetic oligonucleotide
acuuaaccagucaucuaca

SEQ ID NO: 1934986 - RNA, 19 nt, Artificial Sequence
  Description of Artificial Sequence: Synthetic oligonucleotide
ggagacauuauugaagaua

SEQ ID NO: 1934987 - RNA, 19 nt, Artificial Sequence
  Description of Artificial Sequence: Synthetic oligonucleotide
agugacaaacgcauuucau

SEQ ID NO: 1934988 - RNA, 19 nt, Artificial Sequence
  Description of Artificial Sequence: Synthetic oligonucleotide
gguuggaugguggugcacc

SEQ ID NO: 1934989 - RNA, 19 nt, Artificial Sequence
  Description of Artificial Sequence: Synthetic oligonucleotide
aauuaacuauaaggcuuuu

SEQ ID NO: 1934990 - RNA, 19 nt, Artificial Sequence
  Description of Artificial Sequence: Synthetic oligonucleotide
cacacauucccagacagua

SEQ ID NO: 1934991 - RNA, 19 nt, Artificial Sequence
  Description of Artificial Sequence: Synthetic oligonucleotide
cacauucccagacaguaua

SEQ ID NO: 1934992 - RNA, 19 nt, Artificial Sequence
  Description of Artificial Sequence: Synthetic oligonucleotide
ccgcuuuugucuuaugaac

SEQ ID NO: 1934993 - RNA, 19 nt, Artificial Sequence
  Description of Artificial Sequence: Synthetic oligonucleotide
accauaauucaagcaaguu

SEQ ID NO: 1934994 - RNA, 19 nt, Artificial Sequence
  Description of Artificial Sequence: Synthetic oligonucleotide
gugacaaacgcauuucauu

SEQ ID NO: 1934995 - RNA, 19 nt, Artificial Sequence
  Description of Artificial Sequence: Synthetic oligonucleotide
aggcccucccuguuuaagu

SEQ ID NO: 1934996 - RNA, 19 nt, Artificial Sequence
  Description of Artificial Sequence: Synthetic oligonucleotide
caaaggcaacauuuuacua

SEQ ID NO: 1934997 - RNA, 19 nt, Artificial Sequence
  Description of Artificial Sequence: Synthetic oligonucleotide
uggagacauuauugaagau

SEQ ID NO: 1934998 - RNA, 19 nt, Artificial Sequence
  Description of Artificial Sequence: Synthetic oligonucleotide
cacaauggacagcaauaca

SEQ ID NO: 1934999 - RNA, 19 nt, Artificial Sequence
  Description of Artificial Sequence: Synthetic oligonucleotide
cuucacgaaacuuaaucuu

SEQ ID NO: 1935000 - RNA, 19 nt, Artificial Sequence
  Description of Artificial Sequence: Synthetic oligonucleotide
aaaucuccacgccgcuuuu

SEQ ID NO: 1935001 - RNA, 19 nt, Artificial Sequence
  Description of Artificial Sequence: Synthetic oligonucleotide
cucuuacuauugugguaac

SEQ ID NO: 1935002 - RNA, 19 nt, Artificial Sequence
  Description of Artificial Sequence: Synthetic oligonucleotide
gguucuuaaaagagcaaaa

SEQ ID NO: 1935003 - RNA, 19 nt, Artificial Sequence
  Description of Artificial Sequence: Synthetic oligonucleotide
agacuuaaccagucaucua

SEQ ID NO: 1935004 - RNA, 19 nt, Artificial Sequence
  Description of Artificial Sequence: Synthetic oligonucleotide
ggccagucuaagaacuacg

SEQ ID NO: 1935005 - RNA, 19 nt, Artificial Sequence
  Description of Artificial Sequence: Synthetic oligonucleotide
cagugacaaacgcauuuca

SEQ ID NO: 1935006 - RNA, 19 nt, Artificial Sequence
  Description of Artificial Sequence: Synthetic oligonucleotide
agccagguucuucacgaaa

SEQ ID NO: 1935007 - RNA, 19 nt, Artificial Sequence
  Description of Artificial Sequence: Synthetic oligonucleotide
ggugaacacugacaaauua

SEQ ID NO: 1935008 - RNA, 19 nt, Artificial Sequence
  Description of Artificial Sequence: Synthetic oligonucleotide
guuggaugguggugcacca

SEQ ID NO: 1935009 - RNA, 19 nt, Artificial Sequence
  Description of Artificial Sequence: Synthetic oligonucleotide
agucaucuacaaucugguu

SEQ ID NO: 1935010 - RNA, 19 nt, Artificial Sequence
  Description of Artificial Sequence: Synthetic oligonucleotide
gaucaaguauccaauuauu

SEQ ID NO: 1935011 - RNA, 19 nt, Artificial Sequence
  Description of Artificial Sequence: Synthetic oligonucleotide
gcuagggcaacaagcacug

SEQ ID NO: 1935012 - RNA, 19 nt, Artificial Sequence
  Description of Artificial Sequence: Synthetic oligonucleotide
gccugcaacacaauggaca

SEQ ID NO: 1935013 - RNA, 19 nt, Artificial Sequence
  Description of Artificial Sequence: Synthetic oligonucleotide
aucugguuggaugguggug

SEQ ID NO: 1935014 - RNA, 19 nt, Artificial Sequence
  Description of Artificial Sequence: Synthetic oligonucleotide
gucguaaguugcuucacau

SEQ ID NO: 1935015 - RNA, 19 nt, Artificial Sequence
  Description of Artificial Sequence: Synthetic oligonucleotide
guauucaacagugcucaua

SEQ ID NO: 1935016 - RNA, 19 nt, Artificial Sequence
  Description of Artificial Sequence: Synthetic oligonucleotide
gggcaacaagcacuggagc

SEQ ID NO: 1935017 - RNA, 19 nt, Artificial Sequence
  Description of Artificial Sequence: Synthetic oligonucleotide
caaauggagguuucccaua

SEQ ID NO: 1935018 - RNA, 19 nt, Artificial Sequence
  Description of Artificial Sequence: Synthetic oligonucleotide
auccaauuauuaaguuaca

SEQ ID NO: 1935019 - RNA, 19 nt, Artificial Sequence
  Description of Artificial Sequence: Synthetic oligonucleotide
ggcaacaagcacuggagcu

SEQ ID NO: 1935020 - RNA, 19 nt, Artificial Sequence
  Description of Artificial Sequence: Synthetic oligonucleotide
aucaggcccucccuguuua

SEQ ID NO: 1935021 - RNA, 19 nt, Artificial Sequence
  Description of Artificial Sequence: Synthetic oligonucleotide
gcccucccuguuuaagucg

SEQ ID NO: 1935022 - RNA, 19 nt, Artificial Sequence
  Description of Artificial Sequence: Synthetic oligonucleotide
gacugauggaacugaguuu

SEQ ID NO: 1935023 - RNA, 19 nt, Artificial Sequence
  Description of Artificial Sequence: Synthetic oligonucleotide
ccaccuucaauuaaugcua

SEQ ID NO: 1935024 - RNA, 19 nt, Artificial Sequence
  Description of Artificial Sequence: Synthetic oligonucleotide
cucccuguuuaagucgcac

SEQ ID NO: 1935025 - RNA, 19 nt, Artificial Sequence
  Description of Artificial Sequence: Synthetic oligonucleotide
ucuccacgccgcuuuuguc

SEQ ID NO: 1935026 - RNA, 19 nt, Artificial Sequence
  Description of Artificial Sequence: Synthetic oligonucleotide
gcucauaacccuaacaaau

SEQ ID NO: 1935027 - RNA, 19 nt, Artificial Sequence
  Description of Artificial Sequence: Synthetic oligonucleotide
guugcuucacauacucuua

SEQ ID NO: 1935028 - RNA, 19 nt, Artificial Sequence
  Description of Artificial Sequence: Synthetic oligonucleotide
gccgcuuuugucuuaugaa

SEQ ID NO: 1935029 - RNA, 19 nt, Artificial Sequence
  Description of Artificial Sequence: Synthetic oligonucleotide
cugccaaggccugcaacac

SEQ ID NO: 1935030 - RNA, 19 nt, Artificial Sequence
  Description of Artificial Sequence: Synthetic oligonucleotide
aaggccagucuaagaacua

SEQ ID NO: 1935031 - RNA, 19 nt, Artificial Sequence
  Description of Artificial Sequence: Synthetic oligonucleotide
acagugcucauaacccuaa

SEQ ID NO: 1935032 - RNA, 19 nt, Artificial Sequence
  Description of Artificial Sequence: Synthetic oligonucleotide
cuccacgccgcuuuugucu

SEQ ID NO: 1935033 - RNA, 19 nt, Artificial Sequence
  Description of Artificial Sequence: Synthetic oligonucleotide
acauagcugaaaaggcaua

SEQ ID NO: 1935034 - RNA, 19 nt, Artificial Sequence
  Description of Artificial Sequence: Synthetic oligonucleotide
cugcaacacaauggacagc

SEQ ID NO: 1935035 - RNA, 19 nt, Artificial Sequence
  Description of Artificial Sequence: Synthetic oligonucleotide
cuauugugguaacuccaua

SEQ ID NO: 1935036 - RNA, 19 nt, Artificial Sequence
  Description of Artificial Sequence: Synthetic oligonucleotide
cagugcucauaacccuaac

SEQ ID NO: 1935037 - RNA, 19 nt, Artificial Sequence
  Description of Artificial Sequence: Synthetic oligonucleotide
guuuucccucaguacgcaa

SEQ ID NO: 1935038 - RNA, 19 nt, Artificial Sequence
  Description of Artificial Sequence: Synthetic oligonucleotide
guaaguugcuucacauacu

SEQ ID NO: 1935039 - RNA, 19 nt, Artificial Sequence
  Description of Artificial Sequence: Synthetic oligonucleotide
cuacaacaauguaucucua

SEQ ID NO: 1935040 - RNA, 19 nt, Artificial Sequence
  Description of Artificial Sequence: Synthetic oligonucleotide
cuagggcaacaagcacugg

SEQ ID NO: 1935041 - RNA, 19 nt, Artificial Sequence
  Description of Artificial Sequence: Synthetic oligonucleotide
cacauacucuuacuauugu

SEQ ID NO: 1935042 - RNA, 19 nt, Artificial Sequence
  Description of Artificial Sequence: Synthetic oligonucleotide
cuccucccauucuuuuauc

SEQ ID NO: 1935043 - RNA, 19 nt, Artificial Sequence
  Description of Artificial Sequence: Synthetic oligonucleotide
gugucguaaguugcuucac

SEQ ID NO: 1935044 - RNA, 19 nt, Artificial Sequence
  Description of Artificial Sequence: Synthetic oligonucleotide
cauagcugaaaaggcauau

SEQ ID NO: 1935045 - RNA, 19 nt, Artificial Sequence
  Description of Artificial Sequence: Synthetic oligonucleotide
acacauucccagacaguau

SEQ ID NO: 1935046 - RNA, 19 nt, Artificial Sequence
  Description of Artificial Sequence: Synthetic oligonucleotide
cuacgaauuguccuuucuu

SEQ ID NO: 1935047 - RNA, 19 nt, Artificial Sequence
  Description of Artificial Sequence: Synthetic oligonucleotide
cauucccagacaguauaaa

SEQ ID NO: 1935048 - RNA, 19 nt, Artificial Sequence
  Description of Artificial Sequence: Synthetic oligonucleotide
gccagucuaagaacuacga

SEQ ID NO: 1935049 - RNA, 19 nt, Artificial Sequence
  Description of Artificial Sequence: Synthetic oligonucleotide
cuguuuaagucgcaccuuu

SEQ ID NO: 1935050 - RNA, 19 nt, Artificial Sequence
  Description of Artificial Sequence: Synthetic oligonucleotide
gguuagcuacaacaaugua

SEQ ID NO: 1935051 - RNA, 19 nt, Artificial Sequence
  Description of Artificial Sequence: Synthetic oligonucleotide
gcacuugguauucaacagu

SEQ ID NO: 1935052 - RNA, 19 nt, Artificial Sequence
  Description of Artificial Sequence: Synthetic oligonucleotide
cugguuggaugguggugca

SEQ ID NO: 1935053 - RNA, 19 nt, Artificial Sequence
  Description of Artificial Sequence: Synthetic oligonucleotide
ugguuggaugguggugcac

SEQ ID NO: 1935054 - RNA, 19 nt, Artificial Sequence
  Description of Artificial Sequence: Synthetic oligonucleotide
ucaggcccucccuguuuaa

SEQ ID NO: 1935055 - RNA, 19 nt, Artificial Sequence
  Description of Artificial Sequence: Synthetic oligonucleotide
uucccucaguacgcaacau

SEQ ID NO: 1935056 - RNA, 19 nt, Artificial Sequence
  Description of Artificial Sequence: Synthetic oligonucleotide
gaacuacgaauuguccuuu

SEQ ID NO: 1935057 - RNA, 19 nt, Artificial Sequence
  Description of Artificial Sequence: Synthetic oligonucleotide
ccucaguacgcaacauuca

SEQ ID NO: 1935058 - RNA, 19 nt, Artificial Sequence
  Description of Artificial Sequence: Synthetic oligonucleotide
ccauuuuaucgauuacaua

SEQ ID NO: 1935059 - RNA, 19 nt, Artificial Sequence
  Description of Artificial Sequence: Synthetic oligonucleotide
guacugcaucuucauacuu

SEQ ID NO: 1935060 - RNA, 19 nt, Artificial Sequence
  Description of Artificial Sequence: Synthetic oligonucleotide
ccagucuaagaacuacgaa

SEQ ID NO: 1935061 - RNA, 19 nt, Artificial Sequence
  Description of Artificial Sequence: Synthetic oligonucleotide
ucgcaccuuugagugcaaa

SEQ ID NO: 1935062 - RNA, 19 nt, Artificial Sequence
  Description of Artificial Sequence: Synthetic oligonucleotide
cccuguuuaagucgcaccu

SEQ ID NO: 1935063 - RNA, 19 nt, Artificial Sequence
  Description of Artificial Sequence: Synthetic oligonucleotide
cugauggaacugaguuuua

SEQ ID NO: 1935064 - RNA, 19 nt, Artificial Sequence
  Description of Artificial Sequence: Synthetic oligonucleotide
caaacgcauuucauucuuu

SEQ ID NO: 1935065 - RNA, 19 nt, Artificial Sequence
  Description of Artificial Sequence: Synthetic oligonucleotide
cgcuuuugucuuaugaacu

SEQ ID NO: 1935066 - RNA, 19 nt, Artificial Sequence
  Description of Artificial Sequence: Synthetic oligonucleotide
guagugucguaaguugcuu

SEQ ID NO: 1935067 - RNA, 19 nt, Artificial Sequence
  Description of Artificial Sequence: Synthetic oligonucleotide
ccauuguuuucuacaaaau

SEQ ID NO: 1935068 - RNA, 19 nt, Artificial Sequence
  Description of Artificial Sequence: Synthetic oligonucleotide
acgccgcuuuugucuuaug

SEQ ID NO: 1935069 - RNA, 19 nt, Artificial Sequence
  Description of Artificial Sequence: Synthetic oligonucleotide
caucuacaaucugguugga

SEQ ID NO: 1935070 - RNA, 19 nt, Artificial Sequence
  Description of Artificial Sequence: Synthetic oligonucleotide
ggccugcaacacaauggac

SEQ ID NO: 1935071 - RNA, 19 nt, Artificial Sequence
  Description of Artificial Sequence: Synthetic oligonucleotide
caucaccauuuuaucgauu

SEQ ID NO: 1935072 - RNA, 19 nt, Artificial Sequence
  Description of Artificial Sequence: Synthetic oligonucleotide
caaaaucuccacgccgcuu

SEQ ID NO: 1935073 - RNA, 19 nt, Artificial Sequence
  Description of Artificial Sequence: Synthetic oligonucleotide
cgccgcuuuugucuuauga

SEQ ID NO: 1935074 - RNA, 19 nt, Artificial Sequence
  Description of Artificial Sequence: Synthetic oligonucleotide
gguauucaacagugcucau

SEQ ID NO: 1935075 - RNA, 19 nt, Artificial Sequence
  Description of Artificial Sequence: Synthetic oligonucleotide
cacgccgcuuuugucuuau

SEQ ID NO: 1935076 - RNA, 19 nt, Artificial Sequence
  Description of Artificial Sequence: Synthetic oligonucleotide
gucgcaccuuugagugcaa

SEQ ID NO: 1935077 - RNA, 19 nt, Artificial Sequence
  Description of Artificial Sequence: Synthetic oligonucleotide
ccacaagaguagugucgua

SEQ ID NO: 1935078 - RNA, 19 nt, Artificial Sequence
  Description of Artificial Sequence: Synthetic oligonucleotide
ccuguuuaagucgcaccuu

SEQ ID NO: 1935079 - RNA, 19 nt, Artificial Sequence
  Description of Artificial Sequence: Synthetic oligonucleotide
ccacgccgcuuuugucuua

SEQ ID NO: 1935080 - RNA, 19 nt, Artificial Sequence
  Description of Artificial Sequence: Synthetic oligonucleotide
ugcaacacagguuucaggg

SEQ ID NO: 1935081 - RNA, 19 nt, Artificial Sequence
  Description of Artificial Sequence: Synthetic oligonucleotide
gauaaguuccccuugacca

SEQ ID NO: 1935082 - RNA, 19 nt, Artificial Sequence
  Description of Artificial Sequence: Synthetic oligonucleotide
aucaccaucagauccaggg

SEQ ID NO: 1935083 - RNA, 19 nt, Artificial Sequence
  Description of Artificial Sequence: Synthetic oligonucleotide
uuuaguuuuauggacagca

SEQ ID NO: 1935084 - RNA, 19 nt, Artificial Sequence
  Description of Artificial Sequence: Synthetic oligonucleotide
ucuucuggggauaaguucc

SEQ ID NO: 1935085 - RNA, 19 nt, Artificial Sequence
  Description of Artificial Sequence: Synthetic oligonucleotide
uguggguggagccagauca

SEQ ID NO: 1935086 - RNA, 19 nt, Artificial Sequence
  Description of Artificial Sequence: Synthetic oligonucleotide
gggaacuuuaguuuuaugg

SEQ ID NO: 1935087 - RNA, 19 nt, Artificial Sequence
  Description of Artificial Sequence: Synthetic oligonucleotide
aggacuagagggcucagcc

SEQ ID NO: 1935088 - RNA, 19 nt, Artificial Sequence
  Description of Artificial Sequence: Synthetic oligonucleotide
auaguccugagccacuugc

SEQ ID NO: 1935089 - RNA, 19 nt, Artificial Sequence
  Description of Artificial Sequence: Synthetic oligonucleotide
uugaccucaucccaguggg

SEQ ID NO: 1935090 - RNA, 19 nt, Artificial Sequence
  Description of Artificial Sequence: Synthetic oligonucleotide
uguucuagcucucugggga

SEQ ID NO: 1935091 - RNA, 19 nt, Artificial Sequence
  Description of Artificial Sequence: Synthetic oligonucleotide
uccaauacagagaaggguc

SEQ ID NO: 1935092 - RNA, 19 nt, Artificial Sequence
  Description of Artificial Sequence: Synthetic oligonucleotide
aaaagacuagacgccaugg

SEQ ID NO: 1935093 - RNA, 19 nt, Artificial Sequence
  Description of Artificial Sequence: Synthetic oligonucleotide
aguuuuauggacagcaggg

SEQ ID NO: 1935094 - RNA, 19 nt, Artificial Sequence
  Description of Artificial Sequence: Synthetic oligonucleotide
gacuagagggcucagccgg

SEQ ID NO: 1935095 - RNA, 19 nt, Artificial Sequence
  Description of Artificial Sequence: Synthetic oligonucleotide
uacggagaacagaagaugc

SEQ ID NO: 1935096 - RNA, 19 nt, Artificial Sequence
  Description of Artificial Sequence: Synthetic oligonucleotide
agguuucagggccacagcc

SEQ ID NO: 1935097 - RNA, 19 nt, Artificial Sequence
  Description of Artificial Sequence: Synthetic oligonucleotide
acgcacucgagcuugcucc

SEQ ID NO: 1935098 - RNA, 19 nt, Artificial Sequence
  Description of Artificial Sequence: Synthetic oligonucleotide
agccagaucaggcuugggc

SEQ ID NO: 1935099 - RNA, 19 nt, Artificial Sequence
  Description of Artificial Sequence: Synthetic oligonucleotide
agccauuggaggcauggcc

SEQ ID NO: 1935100 - RNA, 19 nt, Artificial Sequence
  Description of Artificial Sequence: Synthetic oligonucleotide
aacaggucaacagaggggu

SEQ ID NO: 1935101 - RNA, 19 nt, Artificial Sequence
  Description of Artificial Sequence: Synthetic oligonucleotide
guuuucacugcucuguggc

SEQ ID NO: 1935102 - RNA, 19 nt, Artificial Sequence
  Description of Artificial Sequence: Synthetic oligonucleotide
uugaccaucagucccgcca

SEQ ID NO: 1935103 - RNA, 19 nt, Artificial Sequence
  Description of Artificial Sequence: Synthetic oligonucleotide
cuuccucaggaaauggucg

SEQ ID NO: 1935104 - RNA, 19 nt, Artificial Sequence
  Description of Artificial Sequence: Synthetic oligonucleotide
cagaagaugcuccaggcag

SEQ ID NO: 1935105 - RNA, 19 nt, Artificial Sequence
  Description of Artificial Sequence: Synthetic oligonucleotide
ugcuagucugagcucauag

SEQ ID NO: 1935106 - RNA, 19 nt, Artificial Sequence
  Description of Artificial Sequence: Synthetic oligonucleotide
aaggcguggcacuugagga

SEQ ID NO: 1935107 - RNA, 19 nt, Artificial Sequence
  Description of Artificial Sequence: Synthetic oligonucleotide
uccacugaguuccuguagc

SEQ ID NO: 1935108 - RNA, 19 nt, Artificial Sequence
  Description of Artificial Sequence: Synthetic oligonucleotide
cauguucuagcucucuggg

SEQ ID NO: 1935109 - RNA, 19 nt, Artificial Sequence
  Description of Artificial Sequence: Synthetic oligonucleotide
aagcaaggcgccgagggac

SEQ ID NO: 1935110 - RNA, 19 nt, Artificial Sequence
  Description of Artificial Sequence: Synthetic oligonucleotide
aggaaauggucgcucugcc

SEQ ID NO: 1935111 - RNA, 19 nt, Artificial Sequence
  Description of Artificial Sequence: Synthetic oligonucleotide
gaaaagacuagacgccaug

SEQ ID NO: 1935112 - RNA, 19 nt, Artificial Sequence
  Description of Artificial Sequence: Synthetic oligonucleotide
gaucaucccucacuucucg

SEQ ID NO: 1935113 - RNA, 19 nt, Artificial Sequence
  Description of Artificial Sequence: Synthetic oligonucleotide
ccgagaaucagacuuaggg

SEQ ID NO: 1935114 - RNA, 19 nt, Artificial Sequence
  Description of Artificial Sequence: Synthetic oligonucleotide
aagggaucucuuuccgggg

SEQ ID NO: 1935115 - RNA, 19 nt, Artificial Sequence
  Description of Artificial Sequence: Synthetic oligonucleotide
uccucaugcugcuaggggc

SEQ ID NO: 1935116 - RNA, 19 nt, Artificial Sequence
  Description of Artificial Sequence: Synthetic oligonucleotide
guugaccucaucccagugg

SEQ ID NO: 1935117 - RNA, 19 nt, Artificial Sequence
  Description of Artificial Sequence: Synthetic oligonucleotide
cccugaaaagacuagacgc

SEQ ID NO: 1935118 - RNA, 19 nt, Artificial Sequence
  Description of Artificial Sequence: Synthetic oligonucleotide
ucuuaggggcugaagcaag

SEQ ID NO: 1935119 - RNA, 19 nt, Artificial Sequence
  Description of Artificial Sequence: Synthetic oligonucleotide
aauacagagaaggguccag

SEQ ID NO: 1935120 - RNA, 19 nt, Artificial Sequence
  Description of Artificial Sequence: Synthetic oligonucleotide
cccaagaugagacaguccg

SEQ ID NO: 1935121 - RNA, 19 nt, Artificial Sequence
  Description of Artificial Sequence: Synthetic oligonucleotide
ggaacuuuaguuuuaugga

SEQ ID NO: 1935122 - RNA, 19 nt, Artificial Sequence
  Description of Artificial Sequence: Synthetic oligonucleotide
ggaugagggaagcucaugg

SEQ ID NO: 1935123 - RNA, 19 nt, Artificial Sequence
  Description of Artificial Sequence: Synthetic oligonucleotide
ugccuuguaaaugggauga

SEQ ID NO: 1935124 - RNA, 19 nt, Artificial Sequence
  Description of Artificial Sequence: Synthetic oligonucleotide
gaucuggggaggcacuacg

SEQ ID NO: 1935125 - RNA, 19 nt, Artificial Sequence
  Description of Artificial Sequence: Synthetic oligonucleotide
aaggcgccgagggacagcc

SEQ ID NO: 1935126 - RNA, 19 nt, Artificial Sequence
  Description of Artificial Sequence: Synthetic oligonucleotide
cucccguucagccauuucc

SEQ ID NO: 1935127 - RNA, 19 nt, Artificial Sequence
  Description of Artificial Sequence: Synthetic oligonucleotide
gcaacaggucaacagaggg

SEQ ID NO: 1935128 - RNA, 19 nt, Artificial Sequence
  Description of Artificial Sequence: Synthetic oligonucleotide
auacagagaaggguccagc

SEQ ID NO: 1935129 - RNA, 19 nt, Artificial Sequence
  Description of Artificial Sequence: Synthetic oligonucleotide
guugccacucuucagguca

SEQ ID NO: 1935130 - RNA, 19 nt, Artificial Sequence
  Description of Artificial Sequence: Synthetic oligonucleotide
agucuuaggggcugaagca

SEQ ID NO: 1935131 - RNA, 19 nt, Artificial Sequence
  Description of Artificial Sequence: Synthetic oligonucleotide
guaaaugggaugagggaag

SEQ ID NO: 1935132 - RNA, 19 nt, Artificial Sequence
  Description of Artificial Sequence: Synthetic oligonucleotide
ugggaagggaucucuuucc

SEQ ID NO: 1935133 - RNA, 19 nt, Artificial Sequence
  Description of Artificial Sequence: Synthetic oligonucleotide
ucaugggcccugaaaagac

SEQ ID NO: 1935134 - RNA, 19 nt, Artificial Sequence
  Description of Artificial Sequence: Synthetic oligonucleotide
ucaggucacgcacucgagc

SEQ ID NO: 1935135 - RNA, 19 nt, Artificial Sequence
  Description of Artificial Sequence: Synthetic oligonucleotide
gugaaggccuccaauacag

SEQ ID NO: 1935136 - RNA, 19 nt, Artificial Sequence
  Description of Artificial Sequence: Synthetic oligonucleotide
agcucaugggcccugaaaa

SEQ ID NO: 1935137 - RNA, 19 nt, Artificial Sequence
  Description of Artificial Sequence: Synthetic oligonucleotide
ucacuucucggcuuugcug

SEQ ID NO: 1935138 - RNA, 19 nt, Artificial Sequence
  Description of Artificial Sequence: Synthetic oligonucleotide
ucaucccucacuucucggc

SEQ ID NO: 1935139 - RNA, 19 nt, Artificial Sequence
  Description of Artificial Sequence: Synthetic oligonucleotide
uuccucaggaaauggucgc

SEQ ID NO: 1935140 - RNA, 19 nt, Artificial Sequence
  Description of Artificial Sequence: Synthetic oligonucleotide
agugaaggccuccaauaca

SEQ ID NO: 1935141 - RNA, 19 nt, Artificial Sequence
  Description of Artificial Sequence: Synthetic oligonucleotide
ggggaucucacccaagcgg

SEQ ID NO: 1935142 - RNA, 19 nt, Artificial Sequence
  Description of Artificial Sequence: Synthetic oligonucleotide
cuuaaggccuuccagcuga

SEQ ID NO: 1935143 - RNA, 19 nt, Artificial Sequence
  Description of Artificial Sequence: Synthetic oligonucleotide
gagccugaggguugggagg

SEQ ID NO: 1935144 - RNA, 19 nt, Artificial Sequence
  Description of Artificial Sequence: Synthetic oligonucleotide
cuuaggggcugaagcaagg

SEQ ID NO: 1935145 - RNA, 19 nt, Artificial Sequence
  Description of Artificial Sequence: Synthetic oligonucleotide
auguucuagcucucugggg

SEQ ID NO: 1935146 - RNA, 19 nt, Artificial Sequence
  Description of Artificial Sequence: Synthetic oligonucleotide
ucuuaaggccuuccagcug

SEQ ID NO: 1935147 - RNA, 19 nt, Artificial Sequence
  Description of Artificial Sequence: Synthetic oligonucleotide
gacgccauggcuaagggaa

SEQ ID NO: 1935148 - RNA, 19 nt, Artificial Sequence
  Description of Artificial Sequence: Synthetic oligonucleotide
uuuucagucuuaggggcug

SEQ ID NO: 1935149 - RNA, 19 nt, Artificial Sequence
  Description of Artificial Sequence: Synthetic oligonucleotide
ccugaaaagacuagacgcc

SEQ ID NO: 1935150 - RNA, 19 nt, Artificial Sequence
  Description of Artificial Sequence: Synthetic oligonucleotide
auuuccaccuugaacugag

SEQ ID NO: 1935151 - RNA, 19 nt, Artificial Sequence
  Description of Artificial Sequence: Synthetic oligonucleotide
ugcccuguggucagcagug

SEQ ID NO: 1935152 - RNA, 19 nt, Artificial Sequence
  Description of Artificial Sequence: Synthetic oligonucleotide
ugaaaagacuagacgccau

SEQ ID NO: 1935153 - RNA, 19 nt, Artificial Sequence
  Description of Artificial Sequence: Synthetic oligonucleotide
ucccguucagccauuucca

SEQ ID NO: 1935154 - RNA, 19 nt, Artificial Sequence
  Description of Artificial Sequence: Synthetic oligonucleotide
ucuaccagcuccacccgcu

SEQ ID NO: 1935155 - RNA, 19 nt, Artificial Sequence
  Description of Artificial Sequence: Synthetic oligonucleotide
cuagacgccauggcuaagg

SEQ ID NO: 1935156 - RNA, 19 nt, Artificial Sequence
  Description of Artificial Sequence: Synthetic oligonucleotide
uaaaugggaugagggaagc

SEQ ID NO: 1935157 - RNA, 19 nt, Artificial Sequence
  Description of Artificial Sequence: Synthetic oligonucleotide
gcuuuucagucuuaggggc

SEQ ID NO: 1935158 - RNA, 19 nt, Artificial Sequence
  Description of Artificial Sequence: Synthetic oligonucleotide
gaacugagccagcugggug

SEQ ID NO: 1935159 - RNA, 19 nt, Artificial Sequence
  Description of Artificial Sequence: Synthetic oligonucleotide
cuuggagccucucuaccag

SEQ ID NO: 1935160 - RNA, 19 nt, Artificial Sequence
  Description of Artificial Sequence: Synthetic oligonucleotide
aaauggucgcucugcccug

SEQ ID NO: 1935161 - RNA, 19 nt, Artificial Sequence
  Description of Artificial Sequence: Synthetic oligonucleotide
ucugagcucauaguccuga

SEQ ID NO: 1935162 - RNA, 19 nt, Artificial Sequence
  Description of Artificial Sequence: Synthetic oligonucleotide
gugcuguccacugaguucc

SEQ ID NO: 1935163 - RNA, 19 nt, Artificial Sequence
  Description of Artificial Sequence: Synthetic oligonucleotide
ggauaaguuccccuugacc

SEQ ID NO: 1935164 - RNA, 19 nt, Artificial Sequence
  Description of Artificial Sequence: Synthetic oligonucleotide
uuuucacugcucuguggca

SEQ ID NO: 1935165 - RNA, 19 nt, Artificial Sequence
  Description of Artificial Sequence: Synthetic oligonucleotide
uccgagaaucagacuuagg

SEQ ID NO: 1935166 - RNA, 19 nt, Artificial Sequence
  Description of Artificial Sequence: Synthetic oligonucleotide
ucuggggauaaguuccccu

SEQ ID NO: 1935167 - RNA, 19 nt, Artificial Sequence
  Description of Artificial Sequence: Synthetic oligonucleotide
guggucagcagugaaggcc

SEQ ID NO: 1935168 - RNA, 19 nt, Artificial Sequence
  Description of Artificial Sequence: Synthetic oligonucleotide
uuccgugcuggcuuuucag

SEQ ID NO: 1935169 - RNA, 19 nt, Artificial Sequence
  Description of Artificial Sequence: Synthetic oligonucleotide
cuacggagaacagaagaug

SEQ ID NO: 1935170 - RNA, 19 nt, Artificial Sequence
  Description of Artificial Sequence: Synthetic oligonucleotide
uggcuaagggaacuuuagu

SEQ ID NO: 1935171 - RNA, 19 nt, Artificial Sequence
  Description of Artificial Sequence: Synthetic oligonucleotide
ggagcuuccucccaagaug

SEQ ID NO: 1935172 - RNA, 19 nt, Artificial Sequence
  Description of Artificial Sequence: Synthetic oligonucleotide
aaggguccagcugugggug

SEQ ID NO: 1935173 - RNA, 19 nt, Artificial Sequence
  Description of Artificial Sequence: Synthetic oligonucleotide
cacuacggagaacagaaga

SEQ ID NO: 1935174 - RNA, 19 nt, Artificial Sequence
  Description of Artificial Sequence: Synthetic oligonucleotide
aggccuuccagcugagaag

SEQ ID NO: 1935175 - RNA, 19 nt, Artificial Sequence
  Description of Artificial Sequence: Synthetic oligonucleotide
aagcgggagucuguguuuc

SEQ ID NO: 1935176 - RNA, 19 nt, Artificial Sequence
  Description of Artificial Sequence: Synthetic oligonucleotide
cgagaaucagacuuagggg

SEQ ID NO: 1935177 - RNA, 19 nt, Artificial Sequence
  Description of Artificial Sequence: Synthetic oligonucleotide
cugcaacacagguuucagg

SEQ ID NO: 1935178 - RNA, 19 nt, Artificial Sequence
  Description of Artificial Sequence: Synthetic oligonucleotide
gauccagggucuuccucag

SEQ ID NO: 1935179 - RNA, 19 nt, Artificial Sequence
  Description of Artificial Sequence: Synthetic oligonucleotide
aagcucaugggcccugaaa

SEQ ID NO: 1935180 - RNA, 19 nt, Artificial Sequence
  Description of Artificial Sequence: Synthetic oligonucleotide
gcccugaaaagacuagacg

SEQ ID NO: 1935181 - RNA, 19 nt, Artificial Sequence
  Description of Artificial Sequence: Synthetic oligonucleotide
ugaggagcuuccucccaag

SEQ ID NO: 1935182 - RNA, 19 nt, Artificial Sequence
  Description of Artificial Sequence: Synthetic oligonucleotide
auggcuaagggaacuuuag

SEQ ID NO: 1935183 - RNA, 19 nt, Artificial Sequence
  Description of Artificial Sequence: Synthetic oligonucleotide
cagugaaggccuccaauac

SEQ ID NO: 1935184 - RNA, 19 nt, Artificial Sequence
  Description of Artificial Sequence: Synthetic oligonucleotide
uugaggagcuuccucccaa

SEQ ID NO: 1935185 - RNA, 19 nt, Artificial Sequence
  Description of Artificial Sequence: Synthetic oligonucleotide
ugggcccugaaaagacuag

SEQ ID NO: 1935186 - RNA, 19 nt, Artificial Sequence
  Description of Artificial Sequence: Synthetic oligonucleotide
cugccuuguaaaugggaug

SEQ ID NO: 1935187 - RNA, 19 nt, Artificial Sequence
  Description of Artificial Sequence: Synthetic oligonucleotide
agugcugagaccacugccu

SEQ ID NO: 1935188 - RNA, 19 nt, Artificial Sequence
  Description of Artificial Sequence: Synthetic oligonucleotide
ugagaccacugccuuguaa

SEQ ID NO: 1935189 - RNA, 19 nt, Artificial Sequence
  Description of Artificial Sequence: Synthetic oligonucleotide
ggaaagagggucccagcag

SEQ ID NO: 1935190 - RNA, 19 nt, Artificial Sequence
  Description of Artificial Sequence: Synthetic oligonucleotide
cagugcugagaccacugcc

SEQ ID NO: 1935191 - RNA, 19 nt, Artificial Sequence
  Description of Artificial Sequence: Synthetic oligonucleotide
gguuuucacugcucugugg

SEQ ID NO: 1935192 - RNA, 19 nt, Artificial Sequence
  Description of Artificial Sequence: Synthetic oligonucleotide
uccccuugaccaucagucc

SEQ ID NO: 1935193 - RNA, 19 nt, Artificial Sequence
  Description of Artificial Sequence: Synthetic oligonucleotide
ucagucuuaggggcugaag

SEQ ID NO: 1935194 - RNA, 19 nt, Artificial Sequence
  Description of Artificial Sequence: Synthetic oligonucleotide
acuacggagaacagaagau

SEQ ID NO: 1935195 - RNA, 19 nt, Artificial Sequence
  Description of Artificial Sequence: Synthetic oligonucleotide
caucagucccgccauguuc

SEQ ID NO: 1935196 - RNA, 19 nt, Artificial Sequence
  Description of Artificial Sequence: Synthetic oligonucleotide
ccaauacagagaagggucc

SEQ ID NO: 1935197 - RNA, 19 nt, Artificial Sequence
  Description of Artificial Sequence: Synthetic oligonucleotide
ccauguucuagcucucugg

SEQ ID NO: 1935198 - RNA, 19 nt, Artificial Sequence
  Description of Artificial Sequence: Synthetic oligonucleotide
agaugccuccccuacuccu

SEQ ID NO: 1935199 - RNA, 19 nt, Artificial Sequence
  Description of Artificial Sequence: Synthetic oligonucleotide
aagggaacuuuaguuuuau

SEQ ID NO: 1935200 - RNA, 19 nt, Artificial Sequence
  Description of Artificial Sequence: Synthetic oligonucleotide
ggagaacagaagaugcucc

SEQ ID NO: 1935201 - RNA, 19 nt, Artificial Sequence
  Description of Artificial Sequence: Synthetic oligonucleotide
ugaccaucagucccgccau

SEQ ID NO: 1935202 - RNA, 19 nt, Artificial Sequence
  Description of Artificial Sequence: Synthetic oligonucleotide
cuuuaguuuuauggacagc

SEQ ID NO: 1935203 - RNA, 19 nt, Artificial Sequence
  Description of Artificial Sequence: Synthetic oligonucleotide
gggaucucacccaagcggg

SEQ ID NO: 1935204 - RNA, 19 nt, Artificial Sequence
  Description of Artificial Sequence: Synthetic oligonucleotide
agcagugaaggccuccaau

SEQ ID NO: 1935205 - RNA, 19 nt, Artificial Sequence
  Description of Artificial Sequence: Synthetic oligonucleotide
ucuucaggucacgcacucg

SEQ ID NO: 1935206 - RNA, 19 nt, Artificial Sequence
  Description of Artificial Sequence: Synthetic oligonucleotide
uuaaggccuuccagcugag

SEQ ID NO: 1935207 - RNA, 19 nt, Artificial Sequence
  Description of Artificial Sequence: Synthetic oligonucleotide
ugaaggccuccaauacaga

SEQ ID NO: 1935208 - RNA, 19 nt, Artificial Sequence
  Description of Artificial Sequence: Synthetic oligonucleotide
aucagucccgccauguucu

SEQ ID NO: 1935209 - RNA, 19 nt, Artificial Sequence
  Description of Artificial Sequence: Synthetic oligonucleotide
uccgugcuggcuuuucagu

SEQ ID NO: 1935210 - RNA, 19 nt, Artificial Sequence
  Description of Artificial Sequence: Synthetic oligonucleotide
ugguugccacucuucaggu

SEQ ID NO: 1935211 - RNA, 19 nt, Artificial Sequence
  Description of Artificial Sequence: Synthetic oligonucleotide
auggcuuggagccucucua

SEQ ID NO: 1935212 - RNA, 19 nt, Artificial Sequence
  Description of Artificial Sequence: Synthetic oligonucleotide
agaucaucccucacuucuc

SEQ ID NO: 1935213 - RNA, 19 nt, Artificial Sequence
  Description of Artificial Sequence: Synthetic oligonucleotide
aggagcuuccucccaagau

SEQ ID NO: 1935214 - RNA, 19 nt, Artificial Sequence
  Description of Artificial Sequence: Synthetic oligonucleotide
uggucgcucugcccugugg

SEQ ID NO: 1935215 - RNA, 19 nt, Artificial Sequence
  Description of Artificial Sequence: Synthetic oligonucleotide
ggaggcuaagaucugggga

SEQ ID NO: 1935216 - RNA, 19 nt, Artificial Sequence
  Description of Artificial Sequence: Synthetic oligonucleotide
ggggcucaucuccagaugc

SEQ ID NO: 1935217 - RNA, 19 nt, Artificial Sequence
  Description of Artificial Sequence: Synthetic oligonucleotide
gacuagacgccauggcuaa

SEQ ID NO: 1935218 - RNA, 19 nt, Artificial Sequence
  Description of Artificial Sequence: Synthetic oligonucleotide
ucgagcuugcucccuugcu

SEQ ID NO: 1935219 - RNA, 19 nt, Artificial Sequence
  Description of Artificial Sequence: Synthetic oligonucleotide
ucccagugggccugcagca

SEQ ID NO: 1935220 - RNA, 19 nt, Artificial Sequence
  Description of Artificial Sequence: Synthetic oligonucleotide
guccacugaguuccuguag

SEQ ID NO: 1935221 - RNA, 19 nt, Artificial Sequence
  Description of Artificial Sequence: Synthetic oligonucleotide
agggaacuuuaguuuuaug

SEQ ID NO: 1935222 - RNA, 19 nt, Artificial Sequence
  Description of Artificial Sequence: Synthetic oligonucleotide
aacacagguuucagggcca

SEQ ID NO: 1935223 - RNA, 19 nt, Artificial Sequence
  Description of Artificial Sequence: Synthetic oligonucleotide
ugguugaccucaucccagu

SEQ ID NO: 1935224 - RNA, 19 nt, Artificial Sequence
  Description of Artificial Sequence: Synthetic oligonucleotide
agaucuggggaggcacuac

SEQ ID NO: 1935225 - RNA, 19 nt, Artificial Sequence
  Description of Artificial Sequence: Synthetic oligonucleotide
uguccacugaguuccugua

SEQ ID NO: 1935226 - RNA, 19 nt, Artificial Sequence
  Description of Artificial Sequence: Synthetic oligonucleotide
ugcugagaccacugccuug

SEQ ID NO: 1935227 - RNA, 19 nt, Artificial Sequence
  Description of Artificial Sequence: Synthetic oligonucleotide
aggcuaagaucuggggagg

SEQ ID NO: 1935228 - RNA, 19 nt, Artificial Sequence
  Description of Artificial Sequence: Synthetic oligonucleotide
ggaaauggucgcucugccc

SEQ ID NO: 1935229 - RNA, 19 nt, Artificial Sequence
  Description of Artificial Sequence: Synthetic oligonucleotide
gaagcaaggcgccgaggga

SEQ ID NO: 1935230 - RNA, 19 nt, Artificial Sequence
  Description of Artificial Sequence: Synthetic oligonucleotide
cucccaagaugagacaguc

SEQ ID NO: 1935231 - RNA, 19 nt, Artificial Sequence
  Description of Artificial Sequence: Synthetic oligonucleotide
gagaaggguccagcugugg

SEQ ID NO: 1935232 - RNA, 19 nt, Artificial Sequence
  Description of Artificial Sequence: Synthetic oligonucleotide
ccuuguaaaugggaugagg

SEQ ID NO: 1935233 - RNA, 19 nt, Artificial Sequence
  Description of Artificial Sequence: Synthetic oligonucleotide
uugcucccuugcuagucug

SEQ ID NO: 1935234 - RNA, 19 nt, Artificial Sequence
  Description of Artificial Sequence: Synthetic oligonucleotide
cuaagggaacuuuaguuuu

SEQ ID NO: 1935235 - RNA, 19 nt, Artificial Sequence
  Description of Artificial Sequence: Synthetic oligonucleotide
aucuggggaggcacuacgg

SEQ ID NO: 1935236 - RNA, 19 nt, Artificial Sequence
  Description of Artificial Sequence: Synthetic oligonucleotide
guuucuucuggggauaagu

SEQ ID NO: 1935237 - RNA, 19 nt, Artificial Sequence
  Description of Artificial Sequence: Synthetic oligonucleotide
agacuagacgccauggcua

SEQ ID NO: 1935238 - RNA, 19 nt, Artificial Sequence
  Description of Artificial Sequence: Synthetic oligonucleotide
gaaggguccagcugugggu

SEQ ID NO: 1935239 - RNA, 19 nt, Artificial Sequence
  Description of Artificial Sequence: Synthetic oligonucleotide
uucuagcucucuggggagc

SEQ ID NO: 1935240 - RNA, 19 nt, Artificial Sequence
  Description of Artificial Sequence: Synthetic oligonucleotide
ugaccucaucccagugggc

SEQ ID NO: 1935241 - RNA, 19 nt, Artificial Sequence
  Description of Artificial Sequence: Synthetic oligonucleotide
aucucacccaagcgggagu

SEQ ID NO: 1935242 - RNA, 19 nt, Artificial Sequence
  Description of Artificial Sequence: Synthetic oligonucleotide
aggcauggcccagagccuc

SEQ ID NO: 1935243 - RNA, 19 nt, Artificial Sequence
  Description of Artificial Sequence: Synthetic oligonucleotide
gagggguuuucacugcucu

SEQ ID NO: 1935244 - RNA, 19 nt, Artificial Sequence
  Description of Artificial Sequence: Synthetic oligonucleotide
guccgagaaucagacuuag

SEQ ID NO: 1935245 - RNA, 19 nt, Artificial Sequence
  Description of Artificial Sequence: Synthetic oligonucleotide
cucggcuuugcugcaacac

SEQ ID NO: 1935246 - RNA, 19 nt, Artificial Sequence
  Description of Artificial Sequence: Synthetic oligonucleotide
cucccuugcuagucugagc

SEQ ID NO: 1935247 - RNA, 19 nt, Artificial Sequence
  Description of Artificial Sequence: Synthetic oligonucleotide
ccuguggucagcagugaag

SEQ ID NO: 1935248 - RNA, 19 nt, Artificial Sequence
  Description of Artificial Sequence: Synthetic oligonucleotide
ugggaugagggaagcucau

SEQ ID NO: 1935249 - RNA, 19 nt, Artificial Sequence
  Description of Artificial Sequence: Synthetic oligonucleotide
agacaguccgagaaucaga

SEQ ID NO: 1935250 - RNA, 19 nt, Artificial Sequence
  Description of Artificial Sequence: Synthetic oligonucleotide
uuccucccaagaugagaca

SEQ ID NO: 1935251 - RNA, 19 nt, Artificial Sequence
  Description of Artificial Sequence: Synthetic oligonucleotide
cauggcuaagggaacuuua

SEQ ID NO: 1935252 - RNA, 19 nt, Artificial Sequence
  Description of Artificial Sequence: Synthetic oligonucleotide
cucaugggcccugaaaaga

SEQ ID NO: 1935253 - RNA, 19 nt, Artificial Sequence
  Description of Artificial Sequence: Synthetic oligonucleotide
cucgagcuugcucccuugc

SEQ ID NO: 1935254 - RNA, 19 nt, Artificial Sequence
  Description of Artificial Sequence: Synthetic oligonucleotide
gcucaugggcccugaaaag

SEQ ID NO: 1935255 - RNA, 19 nt, Artificial Sequence
  Description of Artificial Sequence: Synthetic oligonucleotide
ucgcucugcccugugguca

SEQ ID NO: 1935256 - RNA, 19 nt, Artificial Sequence
  Description of Artificial Sequence: Synthetic oligonucleotide
acaguccgagaaucagacu

SEQ ID NO: 1935257 - RNA, 19 nt, Artificial Sequence
  Description of Artificial Sequence: Synthetic oligonucleotide
ggccuuccagcugagaagc

SEQ ID NO: 1935258 - RNA, 19 nt, Artificial Sequence
  Description of Artificial Sequence: Synthetic oligonucleotide
agagggguuuucacugcuc

SEQ ID NO: 1935259 - RNA, 19 nt, Artificial Sequence
  Description of Artificial Sequence: Synthetic oligonucleotide
uugccacucuucaggucac

SEQ ID NO: 1935260 - RNA, 19 nt, Artificial Sequence
  Description of Artificial Sequence: Synthetic oligonucleotide
ucucggcuuugcugcaaca

SEQ ID NO: 1935261 - RNA, 19 nt, Artificial Sequence
  Description of Artificial Sequence: Synthetic oligonucleotide
aauggucgcucugcccugu

SEQ ID NO: 1935262 - RNA, 19 nt, Artificial Sequence
  Description of Artificial Sequence: Synthetic oligonucleotide
caguccgagaaucagacuu

SEQ ID NO: 1935263 - RNA, 19 nt, Artificial Sequence
  Description of Artificial Sequence: Synthetic oligonucleotide
cagaugccuccccuacucc

SEQ ID NO: 1935264 - RNA, 19 nt, Artificial Sequence
  Description of Artificial Sequence: Synthetic oligonucleotide
uucuggggauaaguucccc

SEQ ID NO: 1935265 - RNA, 19 nt, Artificial Sequence
  Description of Artificial Sequence: Synthetic oligonucleotide
ucucacccaagcgggaguc

SEQ ID NO: 1935266 - RNA, 19 nt, Artificial Sequence
  Description of Artificial Sequence: Synthetic oligonucleotide
acucgagcuugcucccuug

SEQ ID NO: 1935267 - RNA, 19 nt, Artificial Sequence
  Description of Artificial Sequence: Synthetic oligonucleotide
ggccaguuccugcuggugc

SEQ ID NO: 1935268 - RNA, 19 nt, Artificial Sequence
  Description of Artificial Sequence: Synthetic oligonucleotide
uggggagccagugcugaga

SEQ ID NO: 1935269 - RNA, 19 nt, Artificial Sequence
  Description of Artificial Sequence: Synthetic oligonucleotide
uccagagccccaggacuag

SEQ ID NO: 1935270 - RNA, 19 nt, Artificial Sequence
  Description of Artificial Sequence: Synthetic oligonucleotide
uuucagucuuaggggcuga

SEQ ID NO: 1935271 - RNA, 19 nt, Artificial Sequence
  Description of Artificial Sequence: Synthetic oligonucleotide
cuugaccaucagucccgcc

SEQ ID NO: 1935272 - RNA, 19 nt, Artificial Sequence
  Description of Artificial Sequence: Synthetic oligonucleotide
ggugcccacuuuucuuccg

SEQ ID NO: 1935273 - RNA, 19 nt, Artificial Sequence
  Description of Artificial Sequence: Synthetic oligonucleotide
acuucucggcuuugcugca

SEQ ID NO: 1935274 - RNA, 19 nt, Artificial Sequence
  Description of Artificial Sequence: Synthetic oligonucleotide
cacugccuuguaaauggga

SEQ ID NO: 1935275 - RNA, 19 nt, Artificial Sequence
  Description of Artificial Sequence: Synthetic oligonucleotide
caauacagagaagggucca

SEQ ID NO: 1935276 - RNA, 19 nt, Artificial Sequence
  Description of Artificial Sequence: Synthetic oligonucleotide
gaggcacuacggagaacag

SEQ ID NO: 1935277 - RNA, 19 nt, Artificial Sequence
  Description of Artificial Sequence: Synthetic oligonucleotide
agggucuuccucaggaaau

SEQ ID NO: 1935278 - RNA, 19 nt, Artificial Sequence
  Description of Artificial Sequence: Synthetic oligonucleotide
gcugguugccacucuucag

SEQ ID NO: 1935279 - RNA, 19 nt, Artificial Sequence
  Description of Artificial Sequence: Synthetic oligonucleotide
cuuuucagucuuaggggcu

SEQ ID NO: 1935280 - RNA, 19 nt, Artificial Sequence
  Description of Artificial Sequence: Synthetic oligonucleotide
ggguuuucacugcucugug

SEQ ID NO: 1935281 - RNA, 19 nt, Artificial Sequence
  Description of Artificial Sequence: Synthetic oligonucleotide
caucuccagaugccucccc

SEQ ID NO: 1935282 - RNA, 19 nt, Artificial Sequence
  Description of Artificial Sequence: Synthetic oligonucleotide
ggcuaagggaacuuuaguu

SEQ ID NO: 1935283 - RNA, 19 nt, Artificial Sequence
  Description of Artificial Sequence: Synthetic oligonucleotide
ccccuugaccaucaguccc

SEQ ID NO: 1935284 - RNA, 19 nt, Artificial Sequence
  Description of Artificial Sequence: Synthetic oligonucleotide
ggcuuggagccucucuacc

SEQ ID NO: 1935285 - RNA, 19 nt, Artificial Sequence
  Description of Artificial Sequence: Synthetic oligonucleotide
gcugaagcaaggcgccgag

SEQ ID NO: 1935286 - RNA, 19 nt, Artificial Sequence
  Description of Artificial Sequence: Synthetic oligonucleotide
gagggcucagccggaggag

SEQ ID NO: 1935287 - RNA, 19 nt, Artificial Sequence
  Description of Artificial Sequence: Synthetic oligonucleotide
ccguucagccauuuccacc

SEQ ID NO: 1935288 - RNA, 19 nt, Artificial Sequence
  Description of Artificial Sequence: Synthetic oligonucleotide
cacgcacucgagcuugcuc

SEQ ID NO: 1935289 - RNA, 19 nt, Artificial Sequence
  Description of Artificial Sequence: Synthetic oligonucleotide
caggucacgcacucgagcu

SEQ ID NO: 1935290 - RNA, 19 nt, Artificial Sequence
  Description of Artificial Sequence: Synthetic oligonucleotide
gcuggcuuuucagucuuag

SEQ ID NO: 1935291 - RNA, 19 nt, Artificial Sequence
  Description of Artificial Sequence: Synthetic oligonucleotide
gccauguucuagcucucug

SEQ ID NO: 1935292 - RNA, 19 nt, Artificial Sequence
  Description of Artificial Sequence: Synthetic oligonucleotide
gucuuaggggcugaagcaa

SEQ ID NO: 1935293 - RNA, 19 nt, Artificial Sequence
  Description of Artificial Sequence: Synthetic oligonucleotide
ucccucacuucucggcuuu

SEQ ID NO: 1935294 - RNA, 19 nt, Artificial Sequence
  Description of Artificial Sequence: Synthetic oligonucleotide
agagaaggguccagcugug

SEQ ID NO: 1935295 - RNA, 19 nt, Artificial Sequence
  Description of Artificial Sequence: Synthetic oligonucleotide
ggggauaaguuccccuuga

SEQ ID NO: 1935296 - RNA, 19 nt, Artificial Sequence
  Description of Artificial Sequence: Synthetic oligonucleotide
cuagagggcucagccggag

SEQ ID NO: 1935297 - RNA, 19 nt, Artificial Sequence
  Description of Artificial Sequence: Synthetic oligonucleotide
cucuggggagccagugcug

SEQ ID NO: 1935298 - RNA, 19 nt, Artificial Sequence
  Description of Artificial Sequence: Synthetic oligonucleotide
cuccaauacagagaagggu

SEQ ID NO: 1935299 - RNA, 19 nt, Artificial Sequence
  Description of Artificial Sequence: Synthetic oligonucleotide
ugccacucuucaggucacg

SEQ ID NO: 1935300 - RNA, 19 nt, Artificial Sequence
  Description of Artificial Sequence: Synthetic oligonucleotide
gggauaaguuccccuugac

SEQ ID NO: 1935301 - RNA, 19 nt, Artificial Sequence
  Description of Artificial Sequence: Synthetic oligonucleotide
ccauuuccaccuugaacug

SEQ ID NO: 1935302 - RNA, 19 nt, Artificial Sequence
  Description of Artificial Sequence: Synthetic oligonucleotide
acgccauggcuaagggaac

SEQ ID NO: 1935303 - RNA, 19 nt, Artificial Sequence
  Description of Artificial Sequence: Synthetic oligonucleotide
gguugaccucaucccagug

SEQ ID NO: 1935304 - RNA, 19 nt, Artificial Sequence
  Description of Artificial Sequence: Synthetic oligonucleotide
cuaccagcuccacccgcug

SEQ ID NO: 1935305 - RNA, 19 nt, Artificial Sequence
  Description of Artificial Sequence: Synthetic oligonucleotide
cauuuccaccuugaacuga

SEQ ID NO: 1935306 - RNA, 19 nt, Artificial Sequence
  Description of Artificial Sequence: Synthetic oligonucleotide
aguccgagaaucagacuua

SEQ ID NO: 1935307 - RNA, 19 nt, Artificial Sequence
  Description of Artificial Sequence: Synthetic oligonucleotide
ggcccugaaaagacuagac

SEQ ID NO: 1935308 - RNA, 19 nt, Artificial Sequence
  Description of Artificial Sequence: Synthetic oligonucleotide
ucuuccgugcuggcuuuuc

SEQ ID NO: 1935309 - RNA, 19 nt, Artificial Sequence
  Description of Artificial Sequence: Synthetic oligonucleotide
acccaagcgggagucugug

SEQ ID NO: 1935310 - RNA, 19 nt, Artificial Sequence
  Description of Artificial Sequence: Synthetic oligonucleotide
uucagucuuaggggcugaa

SEQ ID NO: 1935311 - RNA, 19 nt, Artificial Sequence
  Description of Artificial Sequence: Synthetic oligonucleotide
cuuccgugcuggcuuuuca

SEQ ID NO: 1935312 - RNA, 19 nt, Artificial Sequence
  Description of Artificial Sequence: Synthetic oligonucleotide
cuggggagccagugcugag

SEQ ID NO: 1935313 - RNA, 19 nt, Artificial Sequence
  Description of Artificial Sequence: Synthetic oligonucleotide
ucccgccauguucuagcuc

SEQ ID NO: 1935314 - RNA, 19 nt, Artificial Sequence
  Description of Artificial Sequence: Synthetic oligonucleotide
gguuucagggccacagcca

SEQ ID NO: 1935315 - RNA, 19 nt, Artificial Sequence
  Description of Artificial Sequence: Synthetic oligonucleotide
acuagacgccauggcuaag

SEQ ID NO: 1935316 - RNA, 19 nt, Artificial Sequence
  Description of Artificial Sequence: Synthetic oligonucleotide
gguggagccagaucaggcu

SEQ ID NO: 1935317 - RNA, 19 nt, Artificial Sequence
  Description of Artificial Sequence: Synthetic oligonucleotide
gucgcucugcccugugguc

SEQ ID NO: 1935318 - RNA, 19 nt, Artificial Sequence
  Description of Artificial Sequence: Synthetic oligonucleotide
cuguggguggagccagauc

SEQ ID NO: 1935319 - RNA, 19 nt, Artificial Sequence
  Description of Artificial Sequence: Synthetic oligonucleotide
cagccggaggagccugagg

SEQ ID NO: 1935320 - RNA, 19 nt, Artificial Sequence
  Description of Artificial Sequence: Synthetic oligonucleotide
agcgggagucuguguuucu

SEQ ID NO: 1935321 - RNA, 19 nt, Artificial Sequence
  Description of Artificial Sequence: Synthetic oligonucleotide
cugccguuccucccguuca

SEQ ID NO: 1935322 - RNA, 19 nt, Artificial Sequence
  Description of Artificial Sequence: Synthetic oligonucleotide
aggucaacagagggguuuu

SEQ ID NO: 1935323 - RNA, 19 nt, Artificial Sequence
  Description of Artificial Sequence: Synthetic oligonucleotide
aggucacgcacucgagcuu

SEQ ID NO: 1935324 - RNA, 19 nt, Artificial Sequence
  Description of Artificial Sequence: Synthetic oligonucleotide
gagccagaucaggcuuggg

SEQ ID NO: 1935325 - RNA, 19 nt, Artificial Sequence
  Description of Artificial Sequence: Synthetic oligonucleotide
ccuugaacugagccagcug

SEQ ID NO: 1935326 - RNA, 19 nt, Artificial Sequence
  Description of Artificial Sequence: Synthetic oligonucleotide
acuagagggcucagccgga

SEQ ID NO: 1935327 - RNA, 19 nt, Artificial Sequence
  Description of Artificial Sequence: Synthetic oligonucleotide
cuugcucccuugcuagucu

SEQ ID NO: 1935328 - RNA, 19 nt, Artificial Sequence
  Description of Artificial Sequence: Synthetic oligonucleotide
ccacugccuuguaaauggg

SEQ ID NO: 1935329 - RNA, 19 nt, Artificial Sequence
  Description of Artificial Sequence: Synthetic oligonucleotide
caucccucacuucucggcu

SEQ ID NO: 1935330 - RNA, 19 nt, Artificial Sequence
  Description of Artificial Sequence: Synthetic oligonucleotide
ccgugcuggcuuuucaguc

SEQ ID NO: 1935331 - RNA, 19 nt, Artificial Sequence
  Description of Artificial Sequence: Synthetic oligonucleotide
gcacuugaggagcuuccuc

SEQ ID NO: 1935332 - RNA, 19 nt, Artificial Sequence
  Description of Artificial Sequence: Synthetic oligonucleotide
auggucgcucugcccugug

SEQ ID NO: 1935333 - RNA, 19 nt, Artificial Sequence
  Description of Artificial Sequence: Synthetic oligonucleotide
cagcauggcuuggagccuc

SEQ ID NO: 1935334 - RNA, 19 nt, Artificial Sequence
  Description of Artificial Sequence: Synthetic oligonucleotide
ccuugcuagucugagcuca

SEQ ID NO: 1935335 - RNA, 19 nt, Artificial Sequence
  Description of Artificial Sequence: Synthetic oligonucleotide
gggaaggcguggcacuuga

SEQ ID NO: 1935336 - RNA, 19 nt, Artificial Sequence
  Description of Artificial Sequence: Synthetic oligonucleotide
agcaaggcgccgagggaca

SEQ ID NO: 1935337 - RNA, 19 nt, Artificial Sequence
  Description of Artificial Sequence: Synthetic oligonucleotide
gcuuccucccaagaugaga

SEQ ID NO: 1935338 - RNA, 19 nt, Artificial Sequence
  Description of Artificial Sequence: Synthetic oligonucleotide
ggcagaucaucccucacuu

SEQ ID NO: 1935339 - RNA, 19 nt, Artificial Sequence
  Description of Artificial Sequence: Synthetic oligonucleotide
ucagucccgccauguucua

SEQ ID NO: 1935340 - RNA, 19 nt, Artificial Sequence
  Description of Artificial Sequence: Synthetic oligonucleotide
ugcuggcuuuucagucuua

SEQ ID NO: 1935341 - RNA, 19 nt, Artificial Sequence
  Description of Artificial Sequence: Synthetic oligonucleotide
agggaagcucaugggcccu

SEQ ID NO: 1935342 - RNA, 19 nt, Artificial Sequence
  Description of Artificial Sequence: Synthetic oligonucleotide
uugcuagucugagcucaua

SEQ ID NO: 1935343 - RNA, 19 nt, Artificial Sequence
  Description of Artificial Sequence: Synthetic oligonucleotide
caugggcccugaaaagacu

SEQ ID NO: 1935344 - RNA, 19 nt, Artificial Sequence
  Description of Artificial Sequence: Synthetic oligonucleotide
gggaugagggaagcucaug

SEQ ID NO: 1935345 - RNA, 19 nt, Artificial Sequence
  Description of Artificial Sequence: Synthetic oligonucleotide
cagucccgccauguucuag

SEQ ID NO: 1935346 - RNA, 19 nt, Artificial Sequence
  Description of Artificial Sequence: Synthetic oligonucleotide
guggagccagaucaggcuu

SEQ ID NO: 1935347 - RNA, 19 nt, Artificial Sequence
  Description of Artificial Sequence: Synthetic oligonucleotide
ggcaggagcguggugcuga

SEQ ID NO: 1935348 - RNA, 19 nt, Artificial Sequence
  Description of Artificial Sequence: Synthetic oligonucleotide
caaggcgccgagggacagc

SEQ ID NO: 1935349 - RNA, 19 nt, Artificial Sequence
  Description of Artificial Sequence: Synthetic oligonucleotide
ccaagaugagacaguccga

SEQ ID NO: 1935350 - RNA, 19 nt, Artificial Sequence
  Description of Artificial Sequence: Synthetic oligonucleotide
ccagcagcugcugacaaaa

SEQ ID NO: 1935351 - RNA, 19 nt, Artificial Sequence
  Description of Artificial Sequence: Synthetic oligonucleotide
gccuuguaaaugggaugag

SEQ ID NO: 1935352 - RNA, 19 nt, Artificial Sequence
  Description of Artificial Sequence: Synthetic oligonucleotide
gucccagcaggaggcuaag

SEQ ID NO: 1935353 - RNA, 19 nt, Artificial Sequence
  Description of Artificial Sequence: Synthetic oligonucleotide
gcacuacggagaacagaag

SEQ ID NO: 1935354 - RNA, 19 nt, Artificial Sequence
  Description of Artificial Sequence: Synthetic oligonucleotide
cccguucagccauuuccac

SEQ ID NO: 1935355 - RNA, 19 nt, Artificial Sequence
  Description of Artificial Sequence: Synthetic oligonucleotide
gcuugcucccuugcuaguc

SEQ ID NO: 1935356 - RNA, 19 nt, Artificial Sequence
  Description of Artificial Sequence: Synthetic oligonucleotide
ccauuggaggcauggccca

SEQ ID NO: 1935357 - RNA, 19 nt, Artificial Sequence
  Description of Artificial Sequence: Synthetic oligonucleotide
ggggaggcacuacggagaa

SEQ ID NO: 1935358 - RNA, 19 nt, Artificial Sequence
  Description of Artificial Sequence: Synthetic oligonucleotide
ggucgcucugcccuguggu

SEQ ID NO: 1935359 - RNA, 19 nt, Artificial Sequence
  Description of Artificial Sequence: Synthetic oligonucleotide
ccgagggacagccugggaa

SEQ ID NO: 1935360 - RNA, 19 nt, Artificial Sequence
  Description of Artificial Sequence: Synthetic oligonucleotide
ggcugaagcaaggcgccga

SEQ ID NO: 1935361 - RNA, 19 nt, Artificial Sequence
  Description of Artificial Sequence: Synthetic oligonucleotide
ccucaggaaauggucgcuc

SEQ ID NO: 1935362 - RNA, 19 nt, Artificial Sequence
  Description of Artificial Sequence: Synthetic oligonucleotide
cuugcuagucugagcucau

SEQ ID NO: 1935363 - RNA, 19 nt, Artificial Sequence
  Description of Artificial Sequence: Synthetic oligonucleotide
cucagccggaggagccuga

SEQ ID NO: 1935364 - RNA, 19 nt, Artificial Sequence
  Description of Artificial Sequence: Synthetic oligonucleotide
ggucccagcaggaggcuaa

SEQ ID NO: 1935365 - RNA, 19 nt, Artificial Sequence
  Description of Artificial Sequence: Synthetic oligonucleotide
agcauggcuuggagccucu

SEQ ID NO: 1935366 - RNA, 19 nt, Artificial Sequence
  Description of Artificial Sequence: Synthetic oligonucleotide
ccuugaccaucagucccgc

SEQ ID NO: 1935367 - RNA, 19 nt, Artificial Sequence
  Description of Artificial Sequence: Synthetic oligonucleotide
cuccccuacuccucaugcu

SEQ ID NO: 1935368 - RNA, 19 nt, Artificial Sequence
  Description of Artificial Sequence: Synthetic oligonucleotide
gccuccccuacuccucaug

SEQ ID NO: 1935369 - RNA, 19 nt, Artificial Sequence
  Description of Artificial Sequence: Synthetic oligonucleotide
gugcugagaccacugccuu

SEQ ID NO: 1935370 - RNA, 19 nt, Artificial Sequence
  Description of Artificial Sequence: Synthetic oligonucleotide
caagcgggagucuguguuu

SEQ ID NO: 1935371 - RNA, 19 nt, Artificial Sequence
  Description of Artificial Sequence: Synthetic oligonucleotide
caggucaacagagggguuu

SEQ ID NO: 1935372 - RNA, 19 nt, Artificial Sequence
  Description of Artificial Sequence: Synthetic oligonucleotide
agcucucuggggagccagu

SEQ ID NO: 1935373 - RNA, 19 nt, Artificial Sequence
  Description of Artificial Sequence: Synthetic oligonucleotide
cuagcucucuggggagcca

SEQ ID NO: 1935374 - RNA, 19 nt, Artificial Sequence
  Description of Artificial Sequence: Synthetic oligonucleotide
acaggucaacagagggguu

SEQ ID NO: 1935375 - RNA, 19 nt, Artificial Sequence
  Description of Artificial Sequence: Synthetic oligonucleotide
cagggugcccacuuuucuu

SEQ ID NO: 1935376 - RNA, 19 nt, Artificial Sequence
  Description of Artificial Sequence: Synthetic oligonucleotide
aggcaggagcguggugcug

SEQ ID NO: 1935377 - RNA, 19 nt, Artificial Sequence
  Description of Artificial Sequence: Synthetic oligonucleotide
gucccgccauguucuagcu

SEQ ID NO: 1935378 - RNA, 19 nt, Artificial Sequence
  Description of Artificial Sequence: Synthetic oligonucleotide
ggaucucacccaagcggga

SEQ ID NO: 1935379 - RNA, 19 nt, Artificial Sequence
  Description of Artificial Sequence: Synthetic oligonucleotide
gcgccgagggacagccugg

SEQ ID NO: 1935380 - RNA, 19 nt, Artificial Sequence
  Description of Artificial Sequence: Synthetic oligonucleotide
uccucccguucagccauuu

SEQ ID NO: 1935381 - RNA, 19 nt, Artificial Sequence
  Description of Artificial Sequence: Synthetic oligonucleotide
gcucagccggaggagccug

SEQ ID NO: 1935382 - RNA, 19 nt, Artificial Sequence
  Description of Artificial Sequence: Synthetic oligonucleotide
cccuugcuagucugagcuc

SEQ ID NO: 1935383 - RNA, 19 nt, Artificial Sequence
  Description of Artificial Sequence: Synthetic oligonucleotide
ggggaaggcguggcacuug

SEQ ID NO: 1935384 - RNA, 19 nt, Artificial Sequence
  Description of Artificial Sequence: Synthetic oligonucleotide
cuucucggcuuugcugcaa

SEQ ID NO: 1935385 - RNA, 19 nt, Artificial Sequence
  Description of Artificial Sequence: Synthetic oligonucleotide
ggucaacagagggguuuuc

SEQ ID NO: 1935386 - RNA, 19 nt, Artificial Sequence
  Description of Artificial Sequence: Synthetic oligonucleotide
ggaagcucaugggcccuga

SEQ ID NO: 1935387 - RNA, 19 nt, Artificial Sequence
  Description of Artificial Sequence: Synthetic oligonucleotide
cacccaagcgggagucugu

SEQ ID NO: 1935388 - RNA, 19 nt, Artificial Sequence
  Description of Artificial Sequence: Synthetic oligonucleotide
cguuccucccguucagcca

SEQ ID NO: 1935389 - RNA, 19 nt, Artificial Sequence
  Description of Artificial Sequence: Synthetic oligonucleotide
ccaagcgggagucuguguu

SEQ ID NO: 1935390 - RNA, 19 nt, Artificial Sequence
  Description of Artificial Sequence: Synthetic oligonucleotide
cugagaccacugccuugua

SEQ ID NO: 1935391 - RNA, 19 nt, Artificial Sequence
  Description of Artificial Sequence: Synthetic oligonucleotide
ccucccguucagccauuuc

SEQ ID NO: 1935392 - RNA, 19 nt, Artificial Sequence
  Description of Artificial Sequence: Synthetic oligonucleotide
cacucgagcuugcucccuu

SEQ ID NO: 1935393 - RNA, 19 nt, Artificial Sequence
  Description of Artificial Sequence: Synthetic oligonucleotide
cccuguggucagcagugaa

SEQ ID NO: 1935394 - RNA, 19 nt, Artificial Sequence
  Description of Artificial Sequence: Synthetic oligonucleotide
ccgccauguucuagcucuc

SEQ ID NO: 1935395 - RNA, 19 nt, Artificial Sequence
  Description of Artificial Sequence: Synthetic oligonucleotide
gccggaggagccugagggu

SEQ ID NO: 1935396 - RNA, 19 nt, Artificial Sequence
  Description of Artificial Sequence: Synthetic oligonucleotide
gggaggcacuacggagaac

SEQ ID NO: 1935397 - RNA, 19 nt, Artificial Sequence
  Description of Artificial Sequence: Synthetic oligonucleotide
gguugggaggcaggagcgu

SEQ ID NO: 1935398 - RNA, 19 nt, Artificial Sequence
  Description of Artificial Sequence: Synthetic oligonucleotide
cucacccaagcgggagucu

SEQ ID NO: 1935399 - RNA, 19 nt, Artificial Sequence
  Description of Artificial Sequence: Synthetic oligonucleotide
gccgagggacagccuggga

SEQ ID NO: 1935400 - RNA, 19 nt, Artificial Sequence
  Description of Artificial Sequence: Synthetic oligonucleotide
gggcagggugcccacuuuu

SEQ ID NO: 1935401 - RNA, 19 nt, Artificial Sequence
  Description of Artificial Sequence: Synthetic oligonucleotide
gcguggugcugagcagcug

SEQ ID NO: 1935402 - RNA, 19 nt, Artificial Sequence
  Description of Artificial Sequence: Synthetic oligonucleotide
ggacagccugggaagggau

SEQ ID NO: 1935403 - RNA, 19 nt, Artificial Sequence
  Description of Artificial Sequence: Synthetic oligonucleotide
gccacuugcugcugccguu

SEQ ID NO: 1935404 - RNA, 19 nt, Artificial Sequence
  Description of Artificial Sequence: Synthetic oligonucleotide
aggcgccgagggacagccu

SEQ ID NO: 1935405 - RNA, 19 nt, Artificial Sequence
  Description of Artificial Sequence: Synthetic oligonucleotide
ccagagccccaggacuaga

SEQ ID NO: 1935406 - RNA, 19 nt, Artificial Sequence
  Description of Artificial Sequence: Synthetic oligonucleotide
gcgggagucuguguuucuu

SEQ ID NO: 1935407 - RNA, 19 nt, Artificial Sequence
  Description of Artificial Sequence: Synthetic oligonucleotide
cccaagcgggagucugugu

SEQ ID NO: 1935408 - RNA, 19 nt, Artificial Sequence
  Description of Artificial Sequence: Synthetic oligonucleotide
ccaucagucccgccauguu

SEQ ID NO: 1935409 - RNA, 19 nt, Artificial Sequence
  Description of Artificial Sequence: Synthetic oligonucleotide
gcacucgagcuugcucccu

SEQ ID NO: 1935410 - RNA, 19 nt, Artificial Sequence
  Description of Artificial Sequence: Synthetic oligonucleotide
ccggaggagccugaggguu

SEQ ID NO: 1935411 - RNA, 19 nt, Artificial Sequence
  Description of Artificial Sequence: Synthetic oligonucleotide
aaggucuccagucacaucc

SEQ ID NO: 1935412 - RNA, 19 nt, Artificial Sequence
  Description of Artificial Sequence: Synthetic oligonucleotide
aaucgugccgucuuccucc

SEQ ID NO: 1935413 - RNA, 19 nt, Artificial Sequence
  Description of Artificial Sequence: Synthetic oligonucleotide
ugacuuaggguacaggagg

SEQ ID NO: 1935414 - RNA, 19 nt, Artificial Sequence
  Description of Artificial Sequence: Synthetic oligonucleotide
agcaucuucagacaggcgg

SEQ ID NO: 1935415 - RNA, 19 nt, Artificial Sequence
  Description of Artificial Sequence: Synthetic oligonucleotide
uuucaagauauccugggcc

SEQ ID NO: 1935416 - RNA, 19 nt, Artificial Sequence
  Description of Artificial Sequence: Synthetic oligonucleotide
ucuugcgcuguucugaugg

SEQ ID NO: 1935417 - RNA, 19 nt, Artificial Sequence
  Description of Artificial Sequence: Synthetic oligonucleotide
agugcucacugcuacaugc

SEQ ID NO: 1935418 - RNA, 19 nt, Artificial Sequence
  Description of Artificial Sequence: Synthetic oligonucleotide
aaguguuuguccccuaaac

SEQ ID NO: 1935419 - RNA, 19 nt, Artificial Sequence
  Description of Artificial Sequence: Synthetic oligonucleotide
uucugcaggaccaugaaca

SEQ ID NO: 1935420 - RNA, 19 nt, Artificial Sequence
  Description of Artificial Sequence: Synthetic oligonucleotide
aaugucuguugcuugauga

SEQ ID NO: 1935421 - RNA, 19 nt, Artificial Sequence
  Description of Artificial Sequence: Synthetic oligonucleotide
uaaacuaccugugacauga

SEQ ID NO: 1935422 - RNA, 19 nt, Artificial Sequence
  Description of Artificial Sequence: Synthetic oligonucleotide
aaagggauagcuguggucu

SEQ ID NO: 1935423 - RNA, 19 nt, Artificial Sequence
  Description of Artificial Sequence: Synthetic oligonucleotide
ugcugcauauaacuggagg

SEQ ID NO: 1935424 - RNA, 19 nt, Artificial Sequence
  Description of Artificial Sequence: Synthetic oligonucleotide
cauugcagcaucuucagac

SEQ ID NO: 1935425 - RNA, 19 nt, Artificial Sequence
  Description of Artificial Sequence: Synthetic oligonucleotide
uuugcgaaccuuccgaucu

SEQ ID NO: 1935426 - RNA, 19 nt, Artificial Sequence
  Description of Artificial Sequence: Synthetic oligonucleotide
agggacaaguguuuguccc

SEQ ID NO: 1935427 - RNA, 19 nt, Artificial Sequence
  Description of Artificial Sequence: Synthetic oligonucleotide
agcuggauuguguuggacc

SEQ ID NO: 1935428 - RNA, 19 nt, Artificial Sequence
  Description of Artificial Sequence: Synthetic oligonucleotide
uggacagugacuuagggua

SEQ ID NO: 1935429 - RNA, 19 nt, Artificial Sequence
  Description of Artificial Sequence: Synthetic oligonucleotide
ugucucaacaaucgugccg

SEQ ID NO: 1935430 - RNA, 19 nt, Artificial Sequence
  Description of Artificial Sequence: Synthetic oligonucleotide
caucaaucuucuuuguugg

SEQ ID NO: 1935431 - RNA, 19 nt, Artificial Sequence
  Description of Artificial Sequence: Synthetic oligonucleotide
gagcauuuccuucacgacg

SEQ ID NO: 1935432 - RNA, 19 nt, Artificial Sequence
  Description of Artificial Sequence: Synthetic oligonucleotide
uugaugagcauggucaagg

SEQ ID NO: 1935433 - RNA, 19 nt, Artificial Sequence
  Description of Artificial Sequence: Synthetic oligonucleotide
uauaggucaaagguuaccc

SEQ ID NO: 1935434 - RNA, 19 nt, Artificial Sequence
  Description of Artificial Sequence: Synthetic oligonucleotide
agugacuuaggguacagga

SEQ ID NO: 1935435 - RNA, 19 nt, Artificial Sequence
  Description of Artificial Sequence: Synthetic oligonucleotide
uuguauaggucaaagguua

SEQ ID NO: 1935436 - RNA, 19 nt, Artificial Sequence
  Description of Artificial Sequence: Synthetic oligonucleotide
uucacguucaggcagccga

SEQ ID NO: 1935437 - RNA, 19 nt, Artificial Sequence
  Description of Artificial Sequence: Synthetic oligonucleotide
ucuugauucaggucaaagu

SEQ ID NO: 1935438 - RNA, 19 nt, Artificial Sequence
  Description of Artificial Sequence: Synthetic oligonucleotide
uucugucucaacaaucgug

SEQ ID NO: 1935439 - RNA, 19 nt, Artificial Sequence
  Description of Artificial Sequence: Synthetic oligonucleotide
caugugaagaccgaguggc

SEQ ID NO: 1935440 - RNA, 19 nt, Artificial Sequence
  Description of Artificial Sequence: Synthetic oligonucleotide
ggucaaaguauucuggagg

SEQ ID NO: 1935441 - RNA, 19 nt, Artificial Sequence
  Description of Artificial Sequence: Synthetic oligonucleotide
acuaccugugacaugaagg

SEQ ID NO: 1935442 - RNA, 19 nt, Artificial Sequence
  Description of Artificial Sequence: Synthetic oligonucleotide
agcauuuccuucacgacgc

SEQ ID NO: 1935443 - RNA, 19 nt, Artificial Sequence
  Description of Artificial Sequence: Synthetic oligonucleotide
uguuuguccccuaaacuac

SEQ ID NO: 1935444 - RNA, 19 nt, Artificial Sequence
  Description of Artificial Sequence: Synthetic oligonucleotide
aacaaucgugccgucuucc

SEQ ID NO: 1935445 - RNA, 19 nt, Artificial Sequence
  Description of Artificial Sequence: Synthetic oligonucleotide
uucaagauauccugggccu

SEQ ID NO: 1935446 - RNA, 19 nt, Artificial Sequence
  Description of Artificial Sequence: Synthetic oligonucleotide
auaggucaaagguuacccg

SEQ ID NO: 1935447 - RNA, 19 nt, Artificial Sequence
  Description of Artificial Sequence: Synthetic oligonucleotide
gucgccuucacguucaggc

SEQ ID NO: 1935448 - RNA, 19 nt, Artificial Sequence
  Description of Artificial Sequence: Synthetic oligonucleotide
uucacgacgcgcuuggccc

SEQ ID NO: 1935449 - RNA, 19 nt, Artificial Sequence
  Description of Artificial Sequence: Synthetic oligonucleotide
acugcuacaugccuggaca

SEQ ID NO: 1935450 - RNA, 19 nt, Artificial Sequence
  Description of Artificial Sequence: Synthetic oligonucleotide
agcagugcaggucauagga

SEQ ID NO: 1935451 - RNA, 19 nt, Artificial Sequence
  Description of Artificial Sequence: Synthetic oligonucleotide
aaguuucaagauauccugg

SEQ ID NO: 1935452 - RNA, 19 nt, Artificial Sequence
  Description of Artificial Sequence: Synthetic oligonucleotide
aacucgacagggccucgcc

SEQ ID NO: 1935453 - RNA, 19 nt, Artificial Sequence
  Description of Artificial Sequence: Synthetic oligonucleotide
auagggauggcaugugaag

SEQ ID NO: 1935454 - RNA, 19 nt, Artificial Sequence
  Description of Artificial Sequence: Synthetic oligonucleotide
aggaaguucucccgugacc

SEQ ID NO: 1935455 - RNA, 19 nt, Artificial Sequence
  Description of Artificial Sequence: Synthetic oligonucleotide
ucuuuguuggcuucuggga

SEQ ID NO: 1935456 - RNA, 19 nt, Artificial Sequence
  Description of Artificial Sequence: Synthetic oligonucleotide
aacuaccugugacaugaag

SEQ ID NO: 1935457 - RNA, 19 nt, Artificial Sequence
  Description of Artificial Sequence: Synthetic oligonucleotide
ugaacacaguaucucuugc

SEQ ID NO: 1935458 - RNA, 19 nt, Artificial Sequence
  Description of Artificial Sequence: Synthetic oligonucleotide
ugugacaugaaggaaggaa

SEQ ID NO: 1935459 - RNA, 19 nt, Artificial Sequence
  Description of Artificial Sequence: Synthetic oligonucleotide
uauaacuggaggagccaag

SEQ ID NO: 1935460 - RNA, 19 nt, Artificial Sequence
  Description of Artificial Sequence: Synthetic oligonucleotide
aguguuuguccccuaaacu

SEQ ID NO: 1935461 - RNA, 19 nt, Artificial Sequence
  Description of Artificial Sequence: Synthetic oligonucleotide
cacaguaucucuugccagg

SEQ ID NO: 1935462 - RNA, 19 nt, Artificial Sequence
  Description of Artificial Sequence: Synthetic oligonucleotide
uugauucaggucaaaguau

SEQ ID NO: 1935463 - RNA, 19 nt, Artificial Sequence
  Description of Artificial Sequence: Synthetic oligonucleotide
gauauccugggccuugccc

SEQ ID NO: 1935464 - RNA, 19 nt, Artificial Sequence
  Description of Artificial Sequence: Synthetic oligonucleotide
guauucuucugucucaaca

SEQ ID NO: 1935465 - RNA, 19 nt, Artificial Sequence
  Description of Artificial Sequence: Synthetic oligonucleotide
cauaguccauccuugucag

SEQ ID NO: 1935466 - RNA, 19 nt, Artificial Sequence
  Description of Artificial Sequence: Synthetic oligonucleotide
ugccgugcuaacucgacag

SEQ ID NO: 1935467 - RNA, 19 nt, Artificial Sequence
  Description of Artificial Sequence: Synthetic oligonucleotide
gagacuucauggcauaguc

SEQ ID NO: 1935468 - RNA, 19 nt, Artificial Sequence
  Description of Artificial Sequence: Synthetic oligonucleotide
uguggucucgucuugcgcu

SEQ ID NO: 1935469 - RNA, 19 nt, Artificial Sequence
  Description of Artificial Sequence: Synthetic oligonucleotide
cuugauucaggucaaagua

SEQ ID NO: 1935470 - RNA, 19 nt, Artificial Sequence
  Description of Artificial Sequence: Synthetic oligonucleotide
auauccugggccuugccca

SEQ ID NO: 1935471 - RNA, 19 nt, Artificial Sequence
  Description of Artificial Sequence: Synthetic oligonucleotide
uucauggcauaguccaucc

SEQ ID NO: 1935472 - RNA, 19 nt, Artificial Sequence
  Description of Artificial Sequence: Synthetic oligonucleotide
gucagcuggauuguguugg

SEQ ID NO: 1935473 - RNA, 19 nt, Artificial Sequence
  Description of Artificial Sequence: Synthetic oligonucleotide
aaguauucuggaggccacc

SEQ ID NO: 1935474 - RNA, 19 nt, Artificial Sequence
  Description of Artificial Sequence: Synthetic oligonucleotide
gaaguauucuucugucuca

SEQ ID NO: 1935475 - RNA, 19 nt, Artificial Sequence
  Description of Artificial Sequence: Synthetic oligonucleotide
aggaaaguguguauguguc

SEQ ID NO: 1935476 - RNA, 19 nt, Artificial Sequence
  Description of Artificial Sequence: Synthetic oligonucleotide
uguccccuaaacuaccugu

SEQ ID NO: 1935477 - RNA, 19 nt, Artificial Sequence
  Description of Artificial Sequence: Synthetic oligonucleotide
ugcauauaacuggaggagc

SEQ ID NO: 1935478 - RNA, 19 nt, Artificial Sequence
  Description of Artificial Sequence: Synthetic oligonucleotide
uuaggguacaggaggcuga

SEQ ID NO: 1935479 - RNA, 19 nt, Artificial Sequence
  Description of Artificial Sequence: Synthetic oligonucleotide
ucaacaaucgugccgucuu

SEQ ID NO: 1935480 - RNA, 19 nt, Artificial Sequence
  Description of Artificial Sequence: Synthetic oligonucleotide
guuucaagauauccugggc

SEQ ID NO: 1935481 - RNA, 19 nt, Artificial Sequence
  Description of Artificial Sequence: Synthetic oligonucleotide
accauagcaaugucuguug

SEQ ID NO: 1935482 - RNA, 19 nt, Artificial Sequence
  Description of Artificial Sequence: Synthetic oligonucleotide
aagaccgaguggcagacuu

SEQ ID NO: 1935483 - RNA, 19 nt, Artificial Sequence
  Description of Artificial Sequence: Synthetic oligonucleotide
gaucugccgugcuaacucg

SEQ ID NO: 1935484 - RNA, 19 nt, Artificial Sequence
  Description of Artificial Sequence: Synthetic oligonucleotide
uggugagaagcucuccagc

SEQ ID NO: 1935485 - RNA, 19 nt, Artificial Sequence
  Description of Artificial Sequence: Synthetic oligonucleotide
uguauaggucaaagguuac

SEQ ID NO: 1935486 - RNA, 19 nt, Artificial Sequence
  Description of Artificial Sequence: Synthetic oligonucleotide
uauucuggaggccaccaua

SEQ ID NO: 1935487 - RNA, 19 nt, Artificial Sequence
  Description of Artificial Sequence: Synthetic oligonucleotide
cuuggugccugccagggac

SEQ ID NO: 1935488 - RNA, 19 nt, Artificial Sequence
  Description of Artificial Sequence: Synthetic oligonucleotide
uaguccauccuugucagcu

SEQ ID NO: 1935489 - RNA, 19 nt, Artificial Sequence
  Description of Artificial Sequence: Synthetic oligonucleotide
cuaccugugacaugaagga

SEQ ID NO: 1935490 - RNA, 19 nt, Artificial Sequence
  Description of Artificial Sequence: Synthetic oligonucleotide
acacaguaucucuugccag

SEQ ID NO: 1935491 - RNA, 19 nt, Artificial Sequence
  Description of Artificial Sequence: Synthetic oligonucleotide
aacugagccaggcuaggaa

SEQ ID NO: 1935492 - RNA, 19 nt, Artificial Sequence
  Description of Artificial Sequence: Synthetic oligonucleotide
agacuucauggcauagucc

SEQ ID NO: 1935493 - RNA, 19 nt, Artificial Sequence
  Description of Artificial Sequence: Synthetic oligonucleotide
uggaaguauucuucugucu

SEQ ID NO: 1935494 - RNA, 19 nt, Artificial Sequence
  Description of Artificial Sequence: Synthetic oligonucleotide
guucagcuuguauagguca

SEQ ID NO: 1935495 - RNA, 19 nt, Artificial Sequence
  Description of Artificial Sequence: Synthetic oligonucleotide
uggauuguguuggaccucc

SEQ ID NO: 1935496 - RNA, 19 nt, Artificial Sequence
  Description of Artificial Sequence: Synthetic oligonucleotide
guagcagugcaggucauag

SEQ ID NO: 1935497 - RNA, 19 nt, Artificial Sequence
  Description of Artificial Sequence: Synthetic oligonucleotide
cuuggugcugugcugugag

SEQ ID NO: 1935498 - RNA, 19 nt, Artificial Sequence
  Description of Artificial Sequence: Synthetic oligonucleotide
auagagggucgccuucacg

SEQ ID NO: 1935499 - RNA, 19 nt, Artificial Sequence
  Description of Artificial Sequence: Synthetic oligonucleotide
uggugcugugcugugagag

SEQ ID NO: 1935500 - RNA, 19 nt, Artificial Sequence
  Description of Artificial Sequence: Synthetic oligonucleotide
ugggaaagggauagcugug

SEQ ID NO: 1935501 - RNA, 19 nt, Artificial Sequence
  Description of Artificial Sequence: Synthetic oligonucleotide
ugccuuugcgaaccuuccg

SEQ ID NO: 1935502 - RNA, 19 nt, Artificial Sequence
  Description of Artificial Sequence: Synthetic oligonucleotide
gaccgaguggcagacuugg

SEQ ID NO: 1935503 - RNA, 19 nt, Artificial Sequence
  Description of Artificial Sequence: Synthetic oligonucleotide
ugcaugcugaagagggccc

SEQ ID NO: 1935504 - RNA, 19 nt, Artificial Sequence
  Description of Artificial Sequence: Synthetic oligonucleotide
guguuuguccccuaaacua

SEQ ID NO: 1935505 - RNA, 19 nt, Artificial Sequence
  Description of Artificial Sequence: Synthetic oligonucleotide
auagcuguggucucgucuu

SEQ ID NO: 1935506 - RNA, 19 nt, Artificial Sequence
  Description of Artificial Sequence: Synthetic oligonucleotide
acucgacagggccucgccc

SEQ ID NO: 1935507 - RNA, 19 nt, Artificial Sequence
  Description of Artificial Sequence: Synthetic oligonucleotide
gaaagggauagcugugguc

SEQ ID NO: 1935508 - RNA, 19 nt, Artificial Sequence
  Description of Artificial Sequence: Synthetic oligonucleotide
agggaggaggucuuggccu

SEQ ID NO: 1935509 - RNA, 19 nt, Artificial Sequence
  Description of Artificial Sequence: Synthetic oligonucleotide
gagccaugaugccuuugcg

SEQ ID NO: 1935510 - RNA, 19 nt, Artificial Sequence
  Description of Artificial Sequence: Synthetic oligonucleotide
ggagccaagcagcaugugg

SEQ ID NO: 1935511 - RNA, 19 nt, Artificial Sequence
  Description of Artificial Sequence: Synthetic oligonucleotide
uagggauggcaugugaaga

SEQ ID NO: 1935512 - RNA, 19 nt, Artificial Sequence
  Description of Artificial Sequence: Synthetic oligonucleotide
aguucucccgugaccagcc

SEQ ID NO: 1935513 - RNA, 19 nt, Artificial Sequence
  Description of Artificial Sequence: Synthetic oligonucleotide
gugcuaacucgacagggcc

SEQ ID NO: 1935514 - RNA, 19 nt, Artificial Sequence
  Description of Artificial Sequence: Synthetic oligonucleotide
uucaggcagccgaugaagu

SEQ ID NO: 1935515 - RNA, 19 nt, Artificial Sequence
  Description of Artificial Sequence: Synthetic oligonucleotide
aggggugcgagagagggag

SEQ ID NO: 1935516 - RNA, 19 nt, Artificial Sequence
  Description of Artificial Sequence: Synthetic oligonucleotide
uacaugccuggacagugac

SEQ ID NO: 1935517 - RNA, 19 nt, Artificial Sequence
  Description of Artificial Sequence: Synthetic oligonucleotide
ugggucaccacugcagugc

SEQ ID NO: 1935518 - RNA, 19 nt, Artificial Sequence
  Description of Artificial Sequence: Synthetic oligonucleotide
uggcacauagggauggcau

SEQ ID NO: 1935519 - RNA, 19 nt, Artificial Sequence
  Description of Artificial Sequence: Synthetic oligonucleotide
cuuuaaguuucaagauauc

SEQ ID NO: 1935520 - RNA, 19 nt, Artificial Sequence
  Description of Artificial Sequence: Synthetic oligonucleotide
ucucgucuugcgcuguucu

SEQ ID NO: 1935521 - RNA, 19 nt, Artificial Sequence
  Description of Artificial Sequence: Synthetic oligonucleotide
auuuccuucacgacgcgcu

SEQ ID NO: 1935522 - RNA, 19 nt, Artificial Sequence
  Description of Artificial Sequence: Synthetic oligonucleotide
ucaaaguauucuggaggcc

SEQ ID NO: 1935523 - RNA, 19 nt, Artificial Sequence
  Description of Artificial Sequence: Synthetic oligonucleotide
cuucacgacgcgcuuggcc

SEQ ID NO: 1935524 - RNA, 19 nt, Artificial Sequence
  Description of Artificial Sequence: Synthetic oligonucleotide
gucuuuaaguuucaagaua

SEQ ID NO: 1935525 - RNA, 19 nt, Artificial Sequence
  Description of Artificial Sequence: Synthetic oligonucleotide
caaaguauucuggaggcca

SEQ ID NO: 1935526 - RNA, 19 nt, Artificial Sequence
  Description of Artificial Sequence: Synthetic oligonucleotide
uaggaaguucucccgugac

SEQ ID NO: 1935527 - RNA, 19 nt, Artificial Sequence
  Description of Artificial Sequence: Synthetic oligonucleotide
uccccuaaacuaccuguga

SEQ ID NO: 1935528 - RNA, 19 nt, Artificial Sequence
  Description of Artificial Sequence: Synthetic oligonucleotide
ugcuaacucgacagggccu

SEQ ID NO: 1935529 - RNA, 19 nt, Artificial Sequence
  Description of Artificial Sequence: Synthetic oligonucleotide
auucuggaggccaccauag

SEQ ID NO: 1935530 - RNA, 19 nt, Artificial Sequence
  Description of Artificial Sequence: Synthetic oligonucleotide
ggaacugcugcauauaacu

SEQ ID NO: 1935531 - RNA, 19 nt, Artificial Sequence
  Description of Artificial Sequence: Synthetic oligonucleotide
uggcaugugaagaccgagu

SEQ ID NO: 1935532 - RNA, 19 nt, Artificial Sequence
  Description of Artificial Sequence: Synthetic oligonucleotide
uagcagugcaggucauagg

SEQ ID NO: 1935533 - RNA, 19 nt, Artificial Sequence
  Description of Artificial Sequence: Synthetic oligonucleotide
agccaugaugccuuugcga

SEQ ID NO: 1935534 - RNA, 19 nt, Artificial Sequence
  Description of Artificial Sequence: Synthetic oligonucleotide
gacuuaggguacaggaggc

SEQ ID NO: 1935535 - RNA, 19 nt, Artificial Sequence
  Description of Artificial Sequence: Synthetic oligonucleotide
guauaggucaaagguuacc

SEQ ID NO: 1935536 - RNA, 19 nt, Artificial Sequence
  Description of Artificial Sequence: Synthetic oligonucleotide
uccaggaacugcugcauau

SEQ ID NO: 1935537 - RNA, 19 nt, Artificial Sequence
  Description of Artificial Sequence: Synthetic oligonucleotide
cuuaggguacaggaggcug

SEQ ID NO: 1935538 - RNA, 19 nt, Artificial Sequence
  Description of Artificial Sequence: Synthetic oligonucleotide
ggcaugugaagaccgagug

SEQ ID NO: 1935539 - RNA, 19 nt, Artificial Sequence
  Description of Artificial Sequence: Synthetic oligonucleotide
ugcucacugcuacaugccu

SEQ ID NO: 1935540 - RNA, 19 nt, Artificial Sequence
  Description of Artificial Sequence: Synthetic oligonucleotide
guggccugcaugcugaaga

SEQ ID NO: 1935541 - RNA, 19 nt, Artificial Sequence
  Description of Artificial Sequence: Synthetic oligonucleotide
aaguauucuucugucucaa

SEQ ID NO: 1935542 - RNA, 19 nt, Artificial Sequence
  Description of Artificial Sequence: Synthetic oligonucleotide
gugcugugcugugagaggg

SEQ ID NO: 1935543 - RNA, 19 nt, Artificial Sequence
  Description of Artificial Sequence: Synthetic oligonucleotide
aaaguguguaugugucaua

SEQ ID NO: 1935544 - RNA, 19 nt, Artificial Sequence
  Description of Artificial Sequence: Synthetic oligonucleotide
cugcaugcugaagagggcc

SEQ ID NO: 1935545 - RNA, 19 nt, Artificial Sequence
  Description of Artificial Sequence: Synthetic oligonucleotide
ccugugacaugaaggaagg

SEQ ID NO: 1935546 - RNA, 19 nt, Artificial Sequence
  Description of Artificial Sequence: Synthetic oligonucleotide
gaguggcagacuuggugcc

SEQ ID NO: 1935547 - RNA, 19 nt, Artificial Sequence
  Description of Artificial Sequence: Synthetic oligonucleotide
ugugucauagagggucgcc

SEQ ID NO: 1935548 - RNA, 19 nt, Artificial Sequence
  Description of Artificial Sequence: Synthetic oligonucleotide
cuaaacuaccugugacaug

SEQ ID NO: 1935549 - RNA, 19 nt, Artificial Sequence
  Description of Artificial Sequence: Synthetic oligonucleotide
gcauaguccauccuuguca

SEQ ID NO: 1935550 - RNA, 19 nt, Artificial Sequence
  Description of Artificial Sequence: Synthetic oligonucleotide
uugucuugauucaggucaa

SEQ ID NO: 1935551 - RNA, 19 nt, Artificial Sequence
  Description of Artificial Sequence: Synthetic oligonucleotide
acauagggauggcauguga

SEQ ID NO: 1935552 - RNA, 19 nt, Artificial Sequence
  Description of Artificial Sequence: Synthetic oligonucleotide
acugcugcauauaacugga

SEQ ID NO: 1935553 - RNA, 19 nt, Artificial Sequence
  Description of Artificial Sequence: Synthetic oligonucleotide
ucgucuugcgcuguucuga

SEQ ID NO: 1935554 - RNA, 19 nt, Artificial Sequence
  Description of Artificial Sequence: Synthetic oligonucleotide
acgcgcuuggcccgguagc

SEQ ID NO: 1935555 - RNA, 19 nt, Artificial Sequence
  Description of Artificial Sequence: Synthetic oligonucleotide
cuugggccuucauugcagc

SEQ ID NO: 1935556 - RNA, 19 nt, Artificial Sequence
  Description of Artificial Sequence: Synthetic oligonucleotide
cuagcagagugcaaggucu

SEQ ID NO: 1935557 - RNA, 19 nt, Artificial Sequence
  Description of Artificial Sequence: Synthetic oligonucleotide
ugaagaccgaguggcagac

SEQ ID NO: 1935558 - RNA, 19 nt, Artificial Sequence
  Description of Artificial Sequence: Synthetic oligonucleotide
ugagagacuucauggcaua

SEQ ID NO: 1935559 - RNA, 19 nt, Artificial Sequence
  Description of Artificial Sequence: Synthetic oligonucleotide
gcuucugggaaagggauag

SEQ ID NO: 1935560 - RNA, 19 nt, Artificial Sequence
  Description of Artificial Sequence: Synthetic oligonucleotide
agcggagcauuuccuucac

SEQ ID NO: 1935561 - RNA, 19 nt, Artificial Sequence
  Description of Artificial Sequence: Synthetic oligonucleotide
gccgucuuccuccagcacg

SEQ ID NO: 1935562 - RNA, 19 nt, Artificial Sequence
  Description of Artificial Sequence: Synthetic oligonucleotide
ucugccgugcuaacucgac

SEQ ID NO: 1935563 - RNA, 19 nt, Artificial Sequence
  Description of Artificial Sequence: Synthetic oligonucleotide
gcauauaacuggaggagcc

SEQ ID NO: 1935564 - RNA, 19 nt, Artificial Sequence
  Description of Artificial Sequence: Synthetic oligonucleotide
acccgggccacaucaaucu

SEQ ID NO: 1935565 - RNA, 19 nt, Artificial Sequence
  Description of Artificial Sequence: Synthetic oligonucleotide
cugucucaacaaucgugcc

SEQ ID NO: 1935566 - RNA, 19 nt, Artificial Sequence
  Description of Artificial Sequence: Synthetic oligonucleotide
uucucccgugaccagccca

SEQ ID NO: 1935567 - RNA, 19 nt, Artificial Sequence
  Description of Artificial Sequence: Synthetic oligonucleotide
ucacgacgcgcuuggcccg

SEQ ID NO: 1935568 - RNA, 19 nt, Artificial Sequence
  Description of Artificial Sequence: Synthetic oligonucleotide
guuuguccccuaaacuacc

SEQ ID NO: 1935569 - RNA, 19 nt, Artificial Sequence
  Description of Artificial Sequence: Synthetic oligonucleotide
gcaugugaagaccgagugg

SEQ ID NO: 1935570 - RNA, 19 nt, Artificial Sequence
  Description of Artificial Sequence: Synthetic oligonucleotide
aguauucuggaggccacca

SEQ ID NO: 1935571 - RNA, 19 nt, Artificial Sequence
  Description of Artificial Sequence: Synthetic oligonucleotide
uugggucaccacugcagug

SEQ ID NO: 1935572 - RNA, 19 nt, Artificial Sequence
  Description of Artificial Sequence: Synthetic oligonucleotide
cuugcgcuguucugauggg

SEQ ID NO: 1935573 - RNA, 19 nt, Artificial Sequence
  Description of Artificial Sequence: Synthetic oligonucleotide
cugggaaagggauagcugu

SEQ ID NO: 1935574 - RNA, 19 nt, Artificial Sequence
  Description of Artificial Sequence: Synthetic oligonucleotide
acaaucgugccgucuuccu

SEQ ID NO: 1935575 - RNA, 19 nt, Artificial Sequence
  Description of Artificial Sequence: Synthetic oligonucleotide
auauaacuggaggagccaa

SEQ ID NO: 1935576 - RNA, 19 nt, Artificial Sequence
  Description of Artificial Sequence: Synthetic oligonucleotide
acggcaucugaggacuugg

SEQ ID NO: 1935577 - RNA, 19 nt, Artificial Sequence
  Description of Artificial Sequence: Synthetic oligonucleotide
cuuguauaggucaaagguu

SEQ ID NO: 1935578 - RNA, 19 nt, Artificial Sequence
  Description of Artificial Sequence: Synthetic oligonucleotide
cauagggauggcaugugaa

SEQ ID NO: 1935579 - RNA, 19 nt, Artificial Sequence
  Description of Artificial Sequence: Synthetic oligonucleotide
uugcgcuguucugaugggg

SEQ ID NO: 1935580 - RNA, 19 nt, Artificial Sequence
  Description of Artificial Sequence: Synthetic oligonucleotide
cuuugcgaaccuuccgauc

SEQ ID NO: 1935581 - RNA, 19 nt, Artificial Sequence
  Description of Artificial Sequence: Synthetic oligonucleotide
agcauggucaaggcaggag

SEQ ID NO: 1935582 - RNA, 19 nt, Artificial Sequence
  Description of Artificial Sequence: Synthetic oligonucleotide
augugucauagagggucgc

SEQ ID NO: 1935583 - RNA, 19 nt, Artificial Sequence
  Description of Artificial Sequence: Synthetic oligonucleotide
gagagacuucauggcauag

SEQ ID NO: 1935584 - RNA, 19 nt, Artificial Sequence
  Description of Artificial Sequence: Synthetic oligonucleotide
uggacggcuguucuuccuc

SEQ ID NO: 1935585 - RNA, 19 nt, Artificial Sequence
  Description of Artificial Sequence: Synthetic oligonucleotide
uagacaccagcuguugggu

SEQ ID NO: 1935586 - RNA, 19 nt, Artificial Sequence
  Description of Artificial Sequence: Synthetic oligonucleotide
agggauagcuguggucucg

SEQ ID NO: 1935587 - RNA, 19 nt, Artificial Sequence
  Description of Artificial Sequence: Synthetic oligonucleotide
cuugccagggcuuggaagu

SEQ ID NO: 1935588 - RNA, 19 nt, Artificial Sequence
  Description of Artificial Sequence: Synthetic oligonucleotide
gacuugggccuucauugca

SEQ ID NO: 1935589 - RNA, 19 nt, Artificial Sequence
  Description of Artificial Sequence: Synthetic oligonucleotide
agagacuucauggcauagu

SEQ ID NO: 1935590 - RNA, 19 nt, Artificial Sequence
  Description of Artificial Sequence: Synthetic oligonucleotide
ggaaguucucccgugacca

SEQ ID NO: 1935591 - RNA, 19 nt, Artificial Sequence
  Description of Artificial Sequence: Synthetic oligonucleotide
ggugcugugcugugagagg

SEQ ID NO: 1935592 - RNA, 19 nt, Artificial Sequence
  Description of Artificial Sequence: Synthetic oligonucleotide
uugcgaaccuuccgaucug

SEQ ID NO: 1935593 - RNA, 19 nt, Artificial Sequence
  Description of Artificial Sequence: Synthetic oligonucleotide
uucccggcugggcuuagac

SEQ ID NO: 1935594 - RNA, 19 nt, Artificial Sequence
  Description of Artificial Sequence: Synthetic oligonucleotide
aguggcacauagggauggc

SEQ ID NO: 1935595 - RNA, 19 nt, Artificial Sequence
  Description of Artificial Sequence: Synthetic oligonucleotide
agagugcaaggucuccagu

SEQ ID NO: 1935596 - RNA, 19 nt, Artificial Sequence
  Description of Artificial Sequence: Synthetic oligonucleotide
ggcugagagacuucauggc

SEQ ID NO: 1935597 - RNA, 19 nt, Artificial Sequence
  Description of Artificial Sequence: Synthetic oligonucleotide
ugcgagagagggaguggca

SEQ ID NO: 1935598 - RNA, 19 nt, Artificial Sequence
  Description of Artificial Sequence: Synthetic oligonucleotide
acuugggccuucauugcag

SEQ ID NO: 1935599 - RNA, 19 nt, Artificial Sequence
  Description of Artificial Sequence: Synthetic oligonucleotide
uacccgggccacaucaauc

SEQ ID NO: 1935600 - RNA, 19 nt, Artificial Sequence
  Description of Artificial Sequence: Synthetic oligonucleotide
gacgcgcuuggcccgguag

SEQ ID NO: 1935601 - RNA, 19 nt, Artificial Sequence
  Description of Artificial Sequence: Synthetic oligonucleotide
cagucacauccuuggcugg

SEQ ID NO: 1935602 - RNA, 19 nt, Artificial Sequence
  Description of Artificial Sequence: Synthetic oligonucleotide
uggcauaguccauccuugu

SEQ ID NO: 1935603 - RNA, 19 nt, Artificial Sequence
  Description of Artificial Sequence: Synthetic oligonucleotide
cugcagugcucacugcuac

SEQ ID NO: 1935604 - RNA, 19 nt, Artificial Sequence
  Description of Artificial Sequence: Synthetic oligonucleotide
ucgccuucacguucaggca

SEQ ID NO: 1935605 - RNA, 19 nt, Artificial Sequence
  Description of Artificial Sequence: Synthetic oligonucleotide
gguuacccgggccacauca

SEQ ID NO: 1935606 - RNA, 19 nt, Artificial Sequence
  Description of Artificial Sequence: Synthetic oligonucleotide
uuacccgggccacaucaau

SEQ ID NO: 1935607 - RNA, 19 nt, Artificial Sequence
  Description of Artificial Sequence: Synthetic oligonucleotide
ugcagugcucacugcuaca

SEQ ID NO: 1935608 - RNA, 19 nt, Artificial Sequence
  Description of Artificial Sequence: Synthetic oligonucleotide
cauuuccuucacgacgcgc

SEQ ID NO: 1935609 - RNA, 19 nt, Artificial Sequence
  Description of Artificial Sequence: Synthetic oligonucleotide
ggcaucugaggacuugggc

SEQ ID NO: 1935610 - RNA, 19 nt, Artificial Sequence
  Description of Artificial Sequence: Synthetic oligonucleotide
aagguuacccgggccacau

SEQ ID NO: 1935611 - RNA, 19 nt, Artificial Sequence
  Description of Artificial Sequence: Synthetic oligonucleotide
cagugcaggucauaggaaa

SEQ ID NO: 1935612 - RNA, 19 nt, Artificial Sequence
  Description of Artificial Sequence: Synthetic oligonucleotide
uuccgaucugccgugcuaa

SEQ ID NO: 1935613 - RNA, 19 nt, Artificial Sequence
  Description of Artificial Sequence: Synthetic oligonucleotide
ggcacauagggauggcaug

SEQ ID NO: 1935614 - RNA, 19 nt, Artificial Sequence
  Description of Artificial Sequence: Synthetic oligonucleotide
aaagguuacccgggccaca

SEQ ID NO: 1935615 - RNA, 19 nt, Artificial Sequence
  Description of Artificial Sequence: Synthetic oligonucleotide
agacaggcggggaggaggg

SEQ ID NO: 1935616 - RNA, 19 nt, Artificial Sequence
  Description of Artificial Sequence: Synthetic oligonucleotide
agcccuuccugcaguuucc

SEQ ID NO: 1935617 - RNA, 19 nt, Artificial Sequence
  Description of Artificial Sequence: Synthetic oligonucleotide
ucccgugaccagcccaccc

SEQ ID NO: 1935618 - RNA, 19 nt, Artificial Sequence
  Description of Artificial Sequence: Synthetic oligonucleotide
cagcccaccccagagcucc

SEQ ID NO: 1935619 - RNA, 19 nt, Artificial Sequence
  Description of Artificial Sequence: Synthetic oligonucleotide
gaagagggcccagcggagc

SEQ ID NO: 1935620 - RNA, 19 nt, Artificial Sequence
  Description of Artificial Sequence: Synthetic oligonucleotide
cccggcugggcuuagacac

SEQ ID NO: 1935621 - RNA, 19 nt, Artificial Sequence
  Description of Artificial Sequence: Synthetic oligonucleotide
agcauguggccuguggccu

SEQ ID NO: 1935622 - RNA, 19 nt, Artificial Sequence
  Description of Artificial Sequence: Synthetic oligonucleotide
cauccuuggcuggggacgg

SEQ ID NO: 1935623 - RNA, 19 nt, Artificial Sequence
  Description of Artificial Sequence: Synthetic oligonucleotide
ggagcauuuccuucacgac

SEQ ID NO: 1935624 - RNA, 19 nt, Artificial Sequence
  Description of Artificial Sequence: Synthetic oligonucleotide
ugcgaaccuuccgaucugc

SEQ ID NO: 1935625 - RNA, 19 nt, Artificial Sequence
  Description of Artificial Sequence: Synthetic oligonucleotide
gucucaacaaucgugccgu

SEQ ID NO: 1935626 - RNA, 19 nt, Artificial Sequence
  Description of Artificial Sequence: Synthetic oligonucleotide
cacugcuacaugccuggac

SEQ ID NO: 1935627 - RNA, 19 nt, Artificial Sequence
  Description of Artificial Sequence: Synthetic oligonucleotide
ucacguucaggcagccgau

SEQ ID NO: 1935628 - RNA, 19 nt, Artificial Sequence
  Description of Artificial Sequence: Synthetic oligonucleotide
gcuacaugccuggacagug

SEQ ID NO: 1935629 - RNA, 19 nt, Artificial Sequence
  Description of Artificial Sequence: Synthetic oligonucleotide
gagggucgccuucacguuc

SEQ ID NO: 1935630 - RNA, 19 nt, Artificial Sequence
  Description of Artificial Sequence: Synthetic oligonucleotide
caaagguuacccgggccac

SEQ ID NO: 1935631 - RNA, 19 nt, Artificial Sequence
  Description of Artificial Sequence: Synthetic oligonucleotide
cauauaacuggaggagcca

SEQ ID NO: 1935632 - RNA, 19 nt, Artificial Sequence
  Description of Artificial Sequence: Synthetic oligonucleotide
uguuggcuucugggaaagg

SEQ ID NO: 1935633 - RNA, 19 nt, Artificial Sequence
  Description of Artificial Sequence: Synthetic oligonucleotide
caaucgugccgucuuccuc

SEQ ID NO: 1935634 - RNA, 19 nt, Artificial Sequence
  Description of Artificial Sequence: Synthetic oligonucleotide
ugggccuucauugcagcau

SEQ ID NO: 1935635 - RNA, 19 nt, Artificial Sequence
  Description of Artificial Sequence: Synthetic oligonucleotide
ucucuugccagggcuugga

SEQ ID NO: 1935636 - RNA, 19 nt, Artificial Sequence
  Description of Artificial Sequence: Synthetic oligonucleotide
gugcaaggucuccagucac

SEQ ID NO: 1935637 - RNA, 19 nt, Artificial Sequence
  Description of Artificial Sequence: Synthetic oligonucleotide
uuggacggcuguucuuccu

SEQ ID NO: 1935638 - RNA, 19 nt, Artificial Sequence
  Description of Artificial Sequence: Synthetic oligonucleotide
gauggcaugugaagaccga

SEQ ID NO: 1935639 - RNA, 19 nt, Artificial Sequence
  Description of Artificial Sequence: Synthetic oligonucleotide
gcuguggucucgucuugcg

SEQ ID NO: 1935640 - RNA, 19 nt, Artificial Sequence
  Description of Artificial Sequence: Synthetic oligonucleotide
gugcgagagagggaguggc

SEQ ID NO: 1935641 - RNA, 19 nt, Artificial Sequence
  Description of Artificial Sequence: Synthetic oligonucleotide
guccccuaaacuaccugug

SEQ ID NO: 1935642 - RNA, 19 nt, Artificial Sequence
  Description of Artificial Sequence: Synthetic oligonucleotide
cucgucuugcgcuguucug

SEQ ID NO: 1935643 - RNA, 19 nt, Artificial Sequence
  Description of Artificial Sequence: Synthetic oligonucleotide
ugcuacaugccuggacagu

SEQ ID NO: 1935644 - RNA, 19 nt, Artificial Sequence
  Description of Artificial Sequence: Synthetic oligonucleotide
agccaggcuaggaaguucu

SEQ ID NO: 1935645 - RNA, 19 nt, Artificial Sequence
  Description of Artificial Sequence: Synthetic oligonucleotide
cugcugcauauaacuggag

SEQ ID NO: 1935646 - RNA, 19 nt, Artificial Sequence
  Description of Artificial Sequence: Synthetic oligonucleotide
guggucucgucuugcgcug

SEQ ID NO: 1935647 - RNA, 19 nt, Artificial Sequence
  Description of Artificial Sequence: Synthetic oligonucleotide
cuccagucacauccuuggc

SEQ ID NO: 1935648 - RNA, 19 nt, Artificial Sequence
  Description of Artificial Sequence: Synthetic oligonucleotide
gggaguggcacauagggau

SEQ ID NO: 1935649 - RNA, 19 nt, Artificial Sequence
  Description of Artificial Sequence: Synthetic oligonucleotide
ucccggcugggcuuagaca

SEQ ID NO: 1935650 - RNA, 19 nt, Artificial Sequence
  Description of Artificial Sequence: Synthetic oligonucleotide
ggucauaggaaagugugua

SEQ ID NO: 1935651 - RNA, 19 nt, Artificial Sequence
  Description of Artificial Sequence: Synthetic oligonucleotide
cauagagggucgccuucac

SEQ ID NO: 1935652 - RNA, 19 nt, Artificial Sequence
  Description of Artificial Sequence: Synthetic oligonucleotide
uaccugugacaugaaggaa

SEQ ID NO: 1935653 - RNA, 19 nt, Artificial Sequence
  Description of Artificial Sequence: Synthetic oligonucleotide
caacaaucgugccgucuuc

SEQ ID NO: 1935654 - RNA, 19 nt, Artificial Sequence
  Description of Artificial Sequence: Synthetic oligonucleotide
cuugucagcuggauugugu

SEQ ID NO: 1935655 - RNA, 19 nt, Artificial Sequence
  Description of Artificial Sequence: Synthetic oligonucleotide
acggcuguucuuccucagu

SEQ ID NO: 1935656 - RNA, 19 nt, Artificial Sequence
  Description of Artificial Sequence: Synthetic oligonucleotide
gugcuucuagcagagugca

SEQ ID NO: 1935657 - RNA, 19 nt, Artificial Sequence
  Description of Artificial Sequence: Synthetic oligonucleotide
ggugagaagcucuccagcu

SEQ ID NO: 1935658 - RNA, 19 nt, Artificial Sequence
  Description of Artificial Sequence: Synthetic oligonucleotide
gacggcaucugaggacuug

SEQ ID NO: 1935659 - RNA, 19 nt, Artificial Sequence
  Description of Artificial Sequence: Synthetic oligonucleotide
ugugagaggggugcagguu

SEQ ID NO: 1935660 - RNA, 19 nt, Artificial Sequence
  Description of Artificial Sequence: Synthetic oligonucleotide
ggaggucuuggccuuggac

SEQ ID NO: 1935661 - RNA, 19 nt, Artificial Sequence
  Description of Artificial Sequence: Synthetic oligonucleotide
cagcggagcauuuccuuca

SEQ ID NO: 1935662 - RNA, 19 nt, Artificial Sequence
  Description of Artificial Sequence: Synthetic oligonucleotide
ggcuugugggugcuucuag

SEQ ID NO: 1935663 - RNA, 19 nt, Artificial Sequence
  Description of Artificial Sequence: Synthetic oligonucleotide
ccaagcagcauguggccug

SEQ ID NO: 1935664 - RNA, 19 nt, Artificial Sequence
  Description of Artificial Sequence: Synthetic oligonucleotide
cuggacagugacuuagggu

SEQ ID NO: 1935665 - RNA, 19 nt, Artificial Sequence
  Description of Artificial Sequence: Synthetic oligonucleotide
cauggcauaguccauccuu

SEQ ID NO: 1935666 - RNA, 19 nt, Artificial Sequence
  Description of Artificial Sequence: Synthetic oligonucleotide
gccuuugcgaaccuuccga

SEQ ID NO: 1935667 - RNA, 19 nt, Artificial Sequence
  Description of Artificial Sequence: Synthetic oligonucleotide
cugagagacuucauggcau

SEQ ID NO: 1935668 - RNA, 19 nt, Artificial Sequence
  Description of Artificial Sequence: Synthetic oligonucleotide
cacauagggauggcaugug

SEQ ID NO: 1935669 - RNA, 19 nt, Artificial Sequence
  Description of Artificial Sequence: Synthetic oligonucleotide
gcuggauuguguuggaccu

SEQ ID NO: 1935670 - RNA, 19 nt, Artificial Sequence
  Description of Artificial Sequence: Synthetic oligonucleotide
gggauggcaugugaagacc

SEQ ID NO: 1935671 - RNA, 19 nt, Artificial Sequence
  Description of Artificial Sequence: Synthetic oligonucleotide
cugugcugugagaggggug

SEQ ID NO: 1935672 - RNA, 19 nt, Artificial Sequence
  Description of Artificial Sequence: Synthetic oligonucleotide
uggcagacuuggugccugc

SEQ ID NO: 1935673 - RNA, 19 nt, Artificial Sequence
  Description of Artificial Sequence: Synthetic oligonucleotide
caaggucuccagucacauc

SEQ ID NO: 1935674 - RNA, 19 nt, Artificial Sequence
  Description of Artificial Sequence: Synthetic oligonucleotide
gaacugagccaggcuagga

SEQ ID NO: 1935675 - RNA, 19 nt, Artificial Sequence
  Description of Artificial Sequence: Synthetic oligonucleotide
uccgaucugccgugcuaac

SEQ ID NO: 1935676 - RNA, 19 nt, Artificial Sequence
  Description of Artificial Sequence: Synthetic oligonucleotide
gucauaggaaaguguguau

SEQ ID NO: 1935677 - RNA, 19 nt, Artificial Sequence
  Description of Artificial Sequence: Synthetic oligonucleotide
agagggucgccuucacguu

SEQ ID NO: 1935678 - RNA, 19 nt, Artificial Sequence
  Description of Artificial Sequence: Synthetic oligonucleotide
cagguuggugagaagcucu

SEQ ID NO: 1935679 - RNA, 19 nt, Artificial Sequence
  Description of Artificial Sequence: Synthetic oligonucleotide
agguuacccgggccacauc

SEQ ID NO: 1935680 - RNA, 19 nt, Artificial Sequence
  Description of Artificial Sequence: Synthetic oligonucleotide
accuuccgaucugccgugc

SEQ ID NO: 1935681 - RNA, 19 nt, Artificial Sequence
  Description of Artificial Sequence: Synthetic oligonucleotide
gcuguugggucaccacugc

SEQ ID NO: 1935682 - RNA, 19 nt, Artificial Sequence
  Description of Artificial Sequence: Synthetic oligonucleotide
ggugcgagagagggagugg

SEQ ID NO: 1935683 - RNA, 19 nt, Artificial Sequence
  Description of Artificial Sequence: Synthetic oligonucleotide
guggcagacuuggugccug

SEQ ID NO: 1935684 - RNA, 19 nt, Artificial Sequence
  Description of Artificial Sequence: Synthetic oligonucleotide
caugccuggacagugacuu

SEQ ID NO: 1935685 - RNA, 19 nt, Artificial Sequence
  Description of Artificial Sequence: Synthetic oligonucleotide
gcuuagacaccagcuguug

SEQ ID NO: 1935686 - RNA, 19 nt, Artificial Sequence
  Description of Artificial Sequence: Synthetic oligonucleotide
ccgugcuaacucgacaggg

SEQ ID NO: 1935687 - RNA, 19 nt, Artificial Sequence
  Description of Artificial Sequence: Synthetic oligonucleotide
gccgugcuaacucgacagg

SEQ ID NO: 1935688 - RNA, 19 nt, Artificial Sequence
  Description of Artificial Sequence: Synthetic oligonucleotide
aguggcagacuuggugccu

SEQ ID NO: 1935689 - RNA, 19 nt, Artificial Sequence
  Description of Artificial Sequence: Synthetic oligonucleotide
ucucaacaaucgugccguc

SEQ ID NO: 1935690 - RNA, 19 nt, Artificial Sequence
  Description of Artificial Sequence: Synthetic oligonucleotide
cuuggcccgguagcagugc

SEQ ID NO: 1935691 - RNA, 19 nt, Artificial Sequence
  Description of Artificial Sequence: Synthetic oligonucleotide
ugucuugauucaggucaaa

SEQ ID NO: 1935692 - RNA, 19 nt, Artificial Sequence
  Description of Artificial Sequence: Synthetic oligonucleotide
aucgugccgucuuccucca

SEQ ID NO: 1935693 - RNA, 19 nt, Artificial Sequence
  Description of Artificial Sequence: Synthetic oligonucleotide
gcuaacucgacagggccuc

SEQ ID NO: 1935694 - RNA, 19 nt, Artificial Sequence
  Description of Artificial Sequence: Synthetic oligonucleotide
caggaccaugaacacagua

SEQ ID NO: 1935695 - RNA, 19 nt, Artificial Sequence
  Description of Artificial Sequence: Synthetic oligonucleotide
gcauuuccuucacgacgcg

SEQ ID NO: 1935696 - RNA, 19 nt, Artificial Sequence
  Description of Artificial Sequence: Synthetic oligonucleotide
cucgcccuggggacuuccc

SEQ ID NO: 1935697 - RNA, 19 nt, Artificial Sequence
  Description of Artificial Sequence: Synthetic oligonucleotide
ugugagccaugaugccuuu

SEQ ID NO: 1935698 - RNA, 19 nt, Artificial Sequence
  Description of Artificial Sequence: Synthetic oligonucleotide
gcucacugcuacaugccug

SEQ ID NO: 1935699 - RNA, 19 nt, Artificial Sequence
  Description of Artificial Sequence: Synthetic oligonucleotide
ggaguggcacauagggaug

SEQ ID NO: 1935700 - RNA, 19 nt, Artificial Sequence
  Description of Artificial Sequence: Synthetic oligonucleotide
gguuggugagaagcucucc

SEQ ID NO: 1935701 - RNA, 19 nt, Artificial Sequence
  Description of Artificial Sequence: Synthetic oligonucleotide
cgaucugccgugcuaacuc

SEQ ID NO: 1935702 - RNA, 19 nt, Artificial Sequence
  Description of Artificial Sequence: Synthetic oligonucleotide
gggguucagcuuguauagg

SEQ ID NO: 1935703 - RNA, 19 nt, Artificial Sequence
  Description of Artificial Sequence: Synthetic oligonucleotide
ccagcggagcauuuccuuc

SEQ ID NO: 1935704 - RNA, 19 nt, Artificial Sequence
  Description of Artificial Sequence: Synthetic oligonucleotide
agaccgaguggcagacuug

SEQ ID NO: 1935705 - RNA, 19 nt, Artificial Sequence
  Description of Artificial Sequence: Synthetic oligonucleotide
agggucgccuucacguuca

SEQ ID NO: 1935706 - RNA, 19 nt, Artificial Sequence
  Description of Artificial Sequence: Synthetic oligonucleotide
augugaagaccgaguggca

SEQ ID NO: 1935707 - RNA, 19 nt, Artificial Sequence
  Description of Artificial Sequence: Synthetic oligonucleotide
cggagcauuuccuucacga

SEQ ID NO: 1935708 - RNA, 19 nt, Artificial Sequence
  Description of Artificial Sequence: Synthetic oligonucleotide
guucucccgugaccagccc

SEQ ID NO: 1935709 - RNA, 19 nt, Artificial Sequence
  Description of Artificial Sequence: Synthetic oligonucleotide
cucgacagggccucgcccu

SEQ ID NO: 1935710 - RNA, 19 nt, Artificial Sequence
  Description of Artificial Sequence: Synthetic oligonucleotide
aaacuaccugugacaugaa

SEQ ID NO: 1935711 - RNA, 19 nt, Artificial Sequence
  Description of Artificial Sequence: Synthetic oligonucleotide
gggcuuagacaccagcugu

SEQ ID NO: 1935712 - RNA, 19 nt, Artificial Sequence
  Description of Artificial Sequence: Synthetic oligonucleotide
gggugcgagagagggagug

SEQ ID NO: 1935713 - RNA, 19 nt, Artificial Sequence
  Description of Artificial Sequence: Synthetic oligonucleotide
cuggauuguguuggaccuc

SEQ ID NO: 1935714 - RNA, 19 nt, Artificial Sequence
  Description of Artificial Sequence: Synthetic oligonucleotide
cacgagggagaagggcuug

SEQ ID NO: 1935715 - RNA, 19 nt, Artificial Sequence
  Description of Artificial Sequence: Synthetic oligonucleotide
ccuuggacggcuguucuuc

SEQ ID NO: 1935716 - RNA, 19 nt, Artificial Sequence
  Description of Artificial Sequence: Synthetic oligonucleotide
ggacagugacuuaggguac

SEQ ID NO: 1935717 - RNA, 19 nt, Artificial Sequence
  Description of Artificial Sequence: Synthetic oligonucleotide
cuucugucucaacaaucgu

SEQ ID NO: 1935718 - RNA, 19 nt, Artificial Sequence
  Description of Artificial Sequence: Synthetic oligonucleotide
cccgugaccagcccacccc

SEQ ID NO: 1935719 - RNA, 19 nt, Artificial Sequence
  Description of Artificial Sequence: Synthetic oligonucleotide
aggaggucuuggccuugga

SEQ ID NO: 1935720 - RNA, 19 nt, Artificial Sequence
  Description of Artificial Sequence: Synthetic oligonucleotide
ggaaagggauagcuguggu

SEQ ID NO: 1935721 - RNA, 19 nt, Artificial Sequence
  Description of Artificial Sequence: Synthetic oligonucleotide
uggaggagccaagcagcau

SEQ ID NO: 1935722 - RNA, 19 nt, Artificial Sequence
  Description of Artificial Sequence: Synthetic oligonucleotide
uuggccuuggacggcuguu

SEQ ID NO: 1935723 - RNA, 19 nt, Artificial Sequence
  Description of Artificial Sequence: Synthetic oligonucleotide
cugugagccaugaugccuu

SEQ ID NO: 1935724 - RNA, 19 nt, Artificial Sequence
  Description of Artificial Sequence: Synthetic oligonucleotide
cugccgugcuaacucgaca

SEQ ID NO: 1935725 - RNA, 19 nt, Artificial Sequence
  Description of Artificial Sequence: Synthetic oligonucleotide
cacguucaggcagccgaug

SEQ ID NO: 1935726 - RNA, 19 nt, Artificial Sequence
  Description of Artificial Sequence: Synthetic oligonucleotide
gcgagagagggaguggcac

SEQ ID NO: 1935727 - RNA, 19 nt, Artificial Sequence
  Description of Artificial Sequence: Synthetic oligonucleotide
cgugccgucuuccuccagc

SEQ ID NO: 1935728 - RNA, 19 nt, Artificial Sequence
  Description of Artificial Sequence: Synthetic oligonucleotide
cuuccgaucugccgugcua

SEQ ID NO: 1935729 - RNA, 19 nt, Artificial Sequence
  Description of Artificial Sequence: Synthetic oligonucleotide
ucgugccgucuuccuccag

SEQ ID NO: 1935730 - RNA, 19 nt, Artificial Sequence
  Description of Artificial Sequence: Synthetic oligonucleotide
gagcauggucaaggcagga

SEQ ID NO: 1935731 - RNA, 19 nt, Artificial Sequence
  Description of Artificial Sequence: Synthetic oligonucleotide
cgccuucacguucaggcag

SEQ ID NO: 1935732 - RNA, 19 nt, Artificial Sequence
  Description of Artificial Sequence: Synthetic oligonucleotide
ggacggcuguucuuccuca

SEQ ID NO: 1935733 - RNA, 19 nt, Artificial Sequence
  Description of Artificial Sequence: Synthetic oligonucleotide
aggagccaagcagcaugug

SEQ ID NO: 1935734 - RNA, 19 nt, Artificial Sequence
  Description of Artificial Sequence: Synthetic oligonucleotide
cuccaggcugugagccaug

SEQ ID NO: 1935735 - RNA, 19 nt, Artificial Sequence
  Description of Artificial Sequence: Synthetic oligonucleotide
cggcuguucuuccucagug

SEQ ID NO: 1935736 - RNA, 19 nt, Artificial Sequence
  Description of Artificial Sequence: Synthetic oligonucleotide
gcauguggccuguggccug

SEQ ID NO: 1935737 - RNA, 19 nt, Artificial Sequence
  Description of Artificial Sequence: Synthetic oligonucleotide
gccuucacguucaggcagc

SEQ ID NO: 1935738 - RNA, 19 nt, Artificial Sequence
  Description of Artificial Sequence: Synthetic oligonucleotide
cacgacgcgcuuggcccgg

SEQ ID NO: 1935739 - RNA, 19 nt, Artificial Sequence
  Description of Artificial Sequence: Synthetic oligonucleotide
guauucuggaggccaccau

SEQ ID NO: 1935740 - RNA, 19 nt, Artificial Sequence
  Description of Artificial Sequence: Synthetic oligonucleotide
cugugagaggggugcaggu

SEQ ID NO: 1935741 - RNA, 19 nt, Artificial Sequence
  Description of Artificial Sequence: Synthetic oligonucleotide
ccagggcuuggaaguauuc

SEQ ID NO: 1935742 - RNA, 19 nt, Artificial Sequence
  Description of Artificial Sequence: Synthetic oligonucleotide
cucaacaaucgugccgucu

SEQ ID NO: 1935743 - RNA, 19 nt, Artificial Sequence
  Description of Artificial Sequence: Synthetic oligonucleotide
ggucgccuucacguucagg

SEQ ID NO: 1935744 - RNA, 19 nt, Artificial Sequence
  Description of Artificial Sequence: Synthetic oligonucleotide
gcacauagggauggcaugu

SEQ ID NO: 1935745 - RNA, 19 nt, Artificial Sequence
  Description of Artificial Sequence: Synthetic oligonucleotide
ccuaaacuaccugugacau

SEQ ID NO: 1935746 - RNA, 19 nt, Artificial Sequence
  Description of Artificial Sequence: Synthetic oligonucleotide
ccgucuuccuccagcacga

SEQ ID NO: 1935747 - RNA, 19 nt, Artificial Sequence
  Description of Artificial Sequence: Synthetic oligonucleotide
guuacccgggccacaucaa

SEQ ID NO: 1935748 - RNA, 19 nt, Artificial Sequence
  Description of Artificial Sequence: Synthetic oligonucleotide
gucucgucuugcgcuguuc

SEQ ID NO: 1935749 - RNA, 19 nt, Artificial Sequence
  Description of Artificial Sequence: Synthetic oligonucleotide
cugugacaugaaggaagga

SEQ ID NO: 1935750 - RNA, 19 nt, Artificial Sequence
  Description of Artificial Sequence: Synthetic oligonucleotide
cgcccuggggacuucccgg

SEQ ID NO: 1935751 - RNA, 19 nt, Artificial Sequence
  Description of Artificial Sequence: Synthetic oligonucleotide
gcugugagccaugaugccu

SEQ ID NO: 1935752 - RNA, 19 nt, Artificial Sequence
  Description of Artificial Sequence: Synthetic oligonucleotide
cucuugccagggcuuggaa

SEQ ID NO: 1935753 - RNA, 19 nt, Artificial Sequence
  Description of Artificial Sequence: Synthetic oligonucleotide
cucccgugaccagcccacc

SEQ ID NO: 1935754 - RNA, 19 nt, Artificial Sequence
  Description of Artificial Sequence: Synthetic oligonucleotide
ggauuguguuggaccuccc

SEQ ID NO: 1935755 - RNA, 19 nt, Artificial Sequence
  Description of Artificial Sequence: Synthetic oligonucleotide
aggcggggaggagggagga

SEQ ID NO: 1935756 - RNA, 19 nt, Artificial Sequence
  Description of Artificial Sequence: Synthetic oligonucleotide
gcuuggcccgguagcagug

SEQ ID NO: 1935757 - RNA, 19 nt, Artificial Sequence
  Description of Artificial Sequence: Synthetic oligonucleotide
ggcagacuuggugccugcc

SEQ ID NO: 1935758 - RNA, 19 nt, Artificial Sequence
  Description of Artificial Sequence: Synthetic oligonucleotide
cauccuugucagcuggauu

SEQ ID NO: 1935759 - RNA, 19 nt, Artificial Sequence
  Description of Artificial Sequence: Synthetic oligonucleotide
ccugccagggacaaguguu

SEQ ID NO: 1935760 - RNA, 19 nt, Artificial Sequence
  Description of Artificial Sequence: Synthetic oligonucleotide
agagagggaguggcacaua

SEQ ID NO: 1935761 - RNA, 19 nt, Artificial Sequence
  Description of Artificial Sequence: Synthetic oligonucleotide
ccaggcuugugggugcuuc

SEQ ID NO: 1935762 - RNA, 19 nt, Artificial Sequence
  Description of Artificial Sequence: Synthetic oligonucleotide
ccggcugggcuuagacacc

SEQ ID NO: 1935763 - RNA, 19 nt, Artificial Sequence
  Description of Artificial Sequence: Synthetic oligonucleotide
ggggacuucccggcugggc

SEQ ID NO: 1935764 - RNA, 19 nt, Artificial Sequence
  Description of Artificial Sequence: Synthetic oligonucleotide
gacuucccggcugggcuua

SEQ ID NO: 1935765 - RNA, 19 nt, Artificial Sequence
  Description of Artificial Sequence: Synthetic oligonucleotide
cugaggacuugggccuuca

SEQ ID NO: 1935766 - RNA, 19 nt, Artificial Sequence
  Description of Artificial Sequence: Synthetic oligonucleotide
acuucccggcugggcuuag

SEQ ID NO: 1935767 - RNA, 19 nt, Artificial Sequence
  Description of Artificial Sequence: Synthetic oligonucleotide
ccuugucagcuggauugug

SEQ ID NO: 1935768 - RNA, 19 nt, Artificial Sequence
  Description of Artificial Sequence: Synthetic oligonucleotide
ggaggaggucuuggccuug

SEQ ID NO: 1935769 - RNA, 19 nt, Artificial Sequence
  Description of Artificial Sequence: Synthetic oligonucleotide
gaagaccgaguggcagacu

SEQ ID NO: 1935770 - RNA, 19 nt, Artificial Sequence
  Description of Artificial Sequence: Synthetic oligonucleotide
ggccaccauagcaaugucu

SEQ ID NO: 1935771 - RNA, 19 nt, Artificial Sequence
  Description of Artificial Sequence: Synthetic oligonucleotide
cgagagagggaguggcaca

SEQ ID NO: 1935772 - RNA, 19 nt, Artificial Sequence
  Description of Artificial Sequence: Synthetic oligonucleotide
ggugccugccagggacaag

SEQ ID NO: 1935773 - RNA, 19 nt, Artificial Sequence
  Description of Artificial Sequence: Synthetic oligonucleotide
gacaggcggggaggaggga

SEQ ID NO: 1935774 - RNA, 19 nt, Artificial Sequence
  Description of Artificial Sequence: Synthetic oligonucleotide
gcaaggucuccagucacau

SEQ ID NO: 1935775 - RNA, 19 nt, Artificial Sequence
  Description of Artificial Sequence: Synthetic oligonucleotide
gcagugcucacugcuacau

SEQ ID NO: 1935776 - RNA, 19 nt, Artificial Sequence
  Description of Artificial Sequence: Synthetic oligonucleotide
ggccuuggacggcuguucu

SEQ ID NO: 1935777 - RNA, 19 nt, Artificial Sequence
  Description of Artificial Sequence: Synthetic oligonucleotide
gcugugcugugagaggggu

SEQ ID NO: 1935778 - RNA, 19 nt, Artificial Sequence
  Description of Artificial Sequence: Synthetic oligonucleotide
gggucgccuucacguucag

SEQ ID NO: 1935779 - RNA, 19 nt, Artificial Sequence
  Description of Artificial Sequence: Synthetic oligonucleotide
ccuuugcgaaccuuccgau

SEQ ID NO: 1935780 - RNA, 19 nt, Artificial Sequence
  Description of Artificial Sequence: Synthetic oligonucleotide
caccacugcagugcucacu

SEQ ID NO: 1935781 - RNA, 19 nt, Artificial Sequence
  Description of Artificial Sequence: Synthetic oligonucleotide
ggcugggcuuagacaccag

SEQ ID NO: 1935782 - RNA, 19 nt, Artificial Sequence
  Description of Artificial Sequence: Synthetic oligonucleotide
ggcggggaggagggaggag

SEQ ID NO: 1935783 - RNA, 19 nt, Artificial Sequence
  Description of Artificial Sequence: Synthetic oligonucleotide
gggaggaggucuuggccuu

SEQ ID NO: 1935784 - RNA, 19 nt, Artificial Sequence
  Description of Artificial Sequence: Synthetic oligonucleotide
gcaaugucuguugcuugau

SEQ ID NO: 1935785 - RNA, 19 nt, Artificial Sequence
  Description of Artificial Sequence: Synthetic oligonucleotide
ccagcccaccccagagcuc

SEQ ID NO: 1935786 - RNA, 19 nt, Artificial Sequence
  Description of Artificial Sequence: Synthetic oligonucleotide
cguucaggcagccgaugaa

SEQ ID NO: 1935787 - RNA, 19 nt, Artificial Sequence
  Description of Artificial Sequence: Synthetic oligonucleotide
gagggcccagcggagcauu

SEQ ID NO: 1935788 - RNA, 19 nt, Artificial Sequence
  Description of Artificial Sequence: Synthetic oligonucleotide
cuucccggcugggcuuaga

SEQ ID NO: 1935789 - RNA, 19 nt, Artificial Sequence
  Description of Artificial Sequence: Synthetic oligonucleotide
ggacuucccggcugggcuu

SEQ ID NO: 1935790 - RNA, 19 nt, Artificial Sequence
  Description of Artificial Sequence: Synthetic oligonucleotide
ccucgcccuggggacuucc

SEQ ID NO: 1935791 - RNA, 19 nt, Artificial Sequence
  Description of Artificial Sequence: Synthetic oligonucleotide
acgacgcgcuuggcccggu

SEQ ID NO: 1935792 - RNA, 19 nt, Artificial Sequence
  Description of Artificial Sequence: Synthetic oligonucleotide
ggccuucauugcagcaucu

SEQ ID NO: 1935793 - RNA, 19 nt, Artificial Sequence
  Description of Artificial Sequence: Synthetic oligonucleotide
cccagcggagcauuuccuu

SEQ ID NO: 1935794 - RNA, 19 nt, Artificial Sequence
  Description of Artificial Sequence: Synthetic oligonucleotide
gcacgagggagaagggcuu

SEQ ID NO: 1935795 - RNA, 19 nt, Artificial Sequence
  Description of Artificial Sequence: Synthetic oligonucleotide
gccuuggacggcuguucuu

SEQ ID NO: 1935796 - RNA, 19 nt, Artificial Sequence
  Description of Artificial Sequence: Synthetic oligonucleotide
ggucucgucuugcgcuguu

SEQ ID NO: 1935797 - RNA, 19 nt, Artificial Sequence
  Description of Artificial Sequence: Synthetic oligonucleotide
ccgaucugccgugcuaacu

SEQ ID NO: 1935798 - RNA, 19 nt, Artificial Sequence
  Description of Artificial Sequence: Synthetic oligonucleotide
ccuuccgaucugccgugcu

SEQ ID NO: 1935799 - RNA, 19 nt, Artificial Sequence
  Description of Artificial Sequence: Synthetic oligonucleotide
gcccagcggagcauuuccu

SEQ ID NO: 1935800 - RNA, 19 nt, Artificial Sequence
  Description of Artificial Sequence: Synthetic oligonucleotide
gccagggcuuggaaguauu

SEQ ID NO: 1935801 - RNA, 19 nt, Artificial Sequence
  Description of Artificial Sequence: Synthetic oligonucleotide
cgucuugcgcuguucugau

SEQ ID NO: 1935802 - RNA, 19 nt, Artificial Sequence
  Description of Artificial Sequence: Synthetic oligonucleotide
ggggugcgagagagggagu

SEQ ID NO: 1935803 - RNA, 19 nt, Artificial Sequence
  Description of Artificial Sequence: Synthetic oligonucleotide
ggacggcaucugaggacuu

SEQ ID NO: 1935804 - RNA, 19 nt, Artificial Sequence
  Description of Artificial Sequence: Synthetic oligonucleotide
ggccucgcccuggggacuu

SEQ ID NO: 1935805 - RNA, 19 nt, Artificial Sequence
  Description of Artificial Sequence: Synthetic oligonucleotide
gccucgcccuggggacuuc

SEQ ID NO: 1935806 - RNA, 19 nt, Artificial Sequence
  Description of Artificial Sequence: Synthetic oligonucleotide
cgguagcagugcaggucau

SEQ ID NO: 1935807 - RNA, 19 nt, Artificial Sequence
  Description of Artificial Sequence: Synthetic oligonucleotide
cgacgcgcuuggcccggua

SEQ ID NO: 1935808 - RNA, 19 nt, Artificial Sequence
  Description of Artificial Sequence: Synthetic oligonucleotide
gaugcauuaauacugaugg

SEQ ID NO: 1935809 - RNA, 19 nt, Artificial Sequence
  Description of Artificial Sequence: Synthetic oligonucleotide
guugacagaaacuagaugc

SEQ ID NO: 1935810 - RNA, 19 nt, Artificial Sequence
  Description of Artificial Sequence: Synthetic oligonucleotide
aaacuagaugcauuaauac

SEQ ID NO: 1935811 - RNA, 19 nt, Artificial Sequence
  Description of Artificial Sequence: Synthetic oligonucleotide
ugaucuaucaguuuuccag

SEQ ID NO: 1935812 - RNA, 19 nt, Artificial Sequence
  Description of Artificial Sequence: Synthetic oligonucleotide
uugauggugguauagaucc

SEQ ID NO: 1935813 - RNA, 19 nt, Artificial Sequence
  Description of Artificial Sequence: Synthetic oligonucleotide
uuuuaucacacccaaagga

SEQ ID NO: 1935814 - RNA, 19 nt, Artificial Sequence
  Description of Artificial Sequence: Synthetic oligonucleotide
ugaagauccauuaaccacc

SEQ ID NO: 1935815 - RNA, 19 nt, Artificial Sequence
  Description of Artificial Sequence: Synthetic oligonucleotide
ucuugcauuauucauguca

SEQ ID NO: 1935816 - RNA, 19 nt, Artificial Sequence
  Description of Artificial Sequence: Synthetic oligonucleotide
uccaauacaccuuucacag

SEQ ID NO: 1935817 - RNA, 19 nt, Artificial Sequence
  Description of Artificial Sequence: Synthetic oligonucleotide
ggagguauaagcuugagag

SEQ ID NO: 1935818 - RNA, 19 nt, Artificial Sequence
  Description of Artificial Sequence: Synthetic oligonucleotide
aaccugaagauccauuaac

SEQ ID NO: 1935819 - RNA, 19 nt, Artificial Sequence
  Description of Artificial Sequence: Synthetic oligonucleotide
cauuuuaucacacccaaag

SEQ ID NO: 1935820 - RNA, 19 nt, Artificial Sequence
  Description of Artificial Sequence: Synthetic oligonucleotide
caaagcuagaagcugaccg

SEQ ID NO: 1935821 - RNA, 19 nt, Artificial Sequence
  Description of Artificial Sequence: Synthetic oligonucleotide
caauuauggagguauaagc

SEQ ID NO: 1935822 - RNA, 19 nt, Artificial Sequence
  Description of Artificial Sequence: Synthetic oligonucleotide
aggaaagccacguagucgg

SEQ ID NO: 1935823 - RNA, 19 nt, Artificial Sequence
  Description of Artificial Sequence: Synthetic oligonucleotide
aaggaauaaaccuguuaag

SEQ ID NO: 1935824 - RNA, 19 nt, Artificial Sequence
  Description of Artificial Sequence: Synthetic oligonucleotide
agguauaagcuugagagac

SEQ ID NO: 1935825 - RNA, 19 nt, Artificial Sequence
  Description of Artificial Sequence: Synthetic oligonucleotide
gaucuaucaguuuuccagg

SEQ ID NO: 1935826 - RNA, 19 nt, Artificial Sequence
  Description of Artificial Sequence: Synthetic oligonucleotide
uuauggagguauaagcuug

SEQ ID NO: 1935827 - RNA, 19 nt, Artificial Sequence
  Description of Artificial Sequence: Synthetic oligonucleotide
aauuauggagguauaagcu

SEQ ID NO: 1935828 - RNA, 19 nt, Artificial Sequence
  Description of Artificial Sequence: Synthetic oligonucleotide
ucuuccaaagguaucuugc

SEQ ID NO: 1935829 - RNA, 19 nt, Artificial Sequence
  Description of Artificial Sequence: Synthetic oligonucleotide
aggaauaaaccuguuaagg

SEQ ID NO: 1935830 - RNA, 19 nt, Artificial Sequence
  Description of Artificial Sequence: Synthetic oligonucleotide
agaguaaaugaaccagggc

SEQ ID NO: 1935831 - RNA, 19 nt, Artificial Sequence
  Description of Artificial Sequence: Synthetic oligonucleotide
uaagcuugagagaccaggg

SEQ ID NO: 1935832 - RNA, 19 nt, Artificial Sequence
  Description of Artificial Sequence: Synthetic oligonucleotide
acuagaugcauuaauacug

SEQ ID NO: 1935833 - RNA, 19 nt, Artificial Sequence
  Description of Artificial Sequence: Synthetic oligonucleotide
agauccauuaaccaccuca

SEQ ID NO: 1935834 - RNA, 19 nt, Artificial Sequence
  Description of Artificial Sequence: Synthetic oligonucleotide
cagacuuuauagcaggugg

SEQ ID NO: 1935835 - RNA, 19 nt, Artificial Sequence
  Description of Artificial Sequence: Synthetic oligonucleotide
accucaaaucuucaagggc

SEQ ID NO: 1935836 - RNA, 19 nt, Artificial Sequence
  Description of Artificial Sequence: Synthetic oligonucleotide
aagcuugagagaccagggc

SEQ ID NO: 1935837 - RNA, 19 nt, Artificial Sequence
  Description of Artificial Sequence: Synthetic oligonucleotide
ugauccaugcaaacgagca

SEQ ID NO: 1935838 - RNA, 19 nt, Artificial Sequence
  Description of Artificial Sequence: Synthetic oligonucleotide
uuaaccaccucaaaucuuc

SEQ ID NO: 1935839 - RNA, 19 nt, Artificial Sequence
  Description of Artificial Sequence: Synthetic oligonucleotide
aacuggacauacaaugcgc

SEQ ID NO: 1935840 - RNA, 19 nt, Artificial Sequence
  Description of Artificial Sequence: Synthetic oligonucleotide
uucgcuguccuacugacca

SEQ ID NO: 1935841 - RNA, 19 nt, Artificial Sequence
  Description of Artificial Sequence: Synthetic oligonucleotide
augcauucagcauuucuac

SEQ ID NO: 1935842 - RNA, 19 nt, Artificial Sequence
  Description of Artificial Sequence: Synthetic oligonucleotide
gaguaaaugaaccagggcu

SEQ ID NO: 1935843 - RNA, 19 nt, Artificial Sequence
  Description of Artificial Sequence: Synthetic oligonucleotide
aaauacaaagcuagaagcu

SEQ ID NO: 1935844 - RNA, 19 nt, Artificial Sequence
  Description of Artificial Sequence: Synthetic oligonucleotide
aaagcuagaagcugaccgu

SEQ ID NO: 1935845 - RNA, 19 nt, Artificial Sequence
  Description of Artificial Sequence: Synthetic oligonucleotide
acagaacucucucugcuac

SEQ ID NO: 1935846 - RNA, 19 nt, Artificial Sequence
  Description of Artificial Sequence: Synthetic oligonucleotide
cucugauaaaggaauaaac

SEQ ID NO: 1935847 - RNA, 19 nt, Artificial Sequence
  Description of Artificial Sequence: Synthetic oligonucleotide
ucauucuggagcaaauaca

SEQ ID NO: 1935848 - RNA, 19 nt, Artificial Sequence
  Description of Artificial Sequence: Synthetic oligonucleotide
gacacuguggugcucaccc

SEQ ID NO: 1935849 - RNA, 19 nt, Artificial Sequence
  Description of Artificial Sequence: Synthetic oligonucleotide
uccauuaaccaccucaaau

SEQ ID NO: 1935850 - RNA, 19 nt, Artificial Sequence
  Description of Artificial Sequence: Synthetic oligonucleotide
ccuguuaagggaaacaucc

SEQ ID NO: 1935851 - RNA, 19 nt, Artificial Sequence
  Description of Artificial Sequence: Synthetic oligonucleotide
uggugugugccacagaacu

SEQ ID NO: 1935852 - RNA, 19 nt, Artificial Sequence
  Description of Artificial Sequence: Synthetic oligonucleotide
aacaaaggcugcaaaauca

SEQ ID NO: 1935853 - RNA, 19 nt, Artificial Sequence
  Description of Artificial Sequence: Synthetic oligonucleotide
uugcagacuuuauagcagg

SEQ ID NO: 1935854 - RNA, 19 nt, Artificial Sequence
  Description of Artificial Sequence: Synthetic oligonucleotide
uguuccaauacaccuuuca

SEQ ID NO: 1935855 - RNA, 19 nt, Artificial Sequence
  Description of Artificial Sequence: Synthetic oligonucleotide
auugaacaaaugcagagua

SEQ ID NO: 1935856 - RNA, 19 nt, Artificial Sequence
  Description of Artificial Sequence: Synthetic oligonucleotide
cugguucucgcacugaucc

SEQ ID NO: 1935857 - RNA, 19 nt, Artificial Sequence
  Description of Artificial Sequence: Synthetic oligonucleotide
cuaagggcuuccaugauug

SEQ ID NO: 1935858 - RNA, 19 nt, Artificial Sequence
  Description of Artificial Sequence: Synthetic oligonucleotide
cugaagauccauuaaccac

SEQ ID NO: 1935859 - RNA, 19 nt, Artificial Sequence
  Description of Artificial Sequence: Synthetic oligonucleotide
uucugggugcauuuuauca

SEQ ID NO: 1935860 - RNA, 19 nt, Artificial Sequence
  Description of Artificial Sequence: Synthetic oligonucleotide
guuaagggaaacauccagg

SEQ ID NO: 1935861 - RNA, 19 nt, Artificial Sequence
  Description of Artificial Sequence: Synthetic oligonucleotide
uguugacagaaacuagaug

SEQ ID NO: 1935862 - RNA, 19 nt, Artificial Sequence
  Description of Artificial Sequence: Synthetic oligonucleotide
uccuuguuccaauacaccu

SEQ ID NO: 1935863 - RNA, 19 nt, Artificial Sequence
  Description of Artificial Sequence: Synthetic oligonucleotide
uccaugauuggcugcacag

SEQ ID NO: 1935864 - RNA, 19 nt, Artificial Sequence
  Description of Artificial Sequence: Synthetic oligonucleotide
aacucagagugaucuauca

SEQ ID NO: 1935865 - RNA, 19 nt, Artificial Sequence
  Description of Artificial Sequence: Synthetic oligonucleotide
cauuaauacugauggcucc

SEQ ID NO: 1935866 - RNA, 19 nt, Artificial Sequence
  Description of Artificial Sequence: Synthetic oligonucleotide
accugaagauccauuaacc

SEQ ID NO: 1935867 - RNA, 19 nt, Artificial Sequence
  Description of Artificial Sequence: Synthetic oligonucleotide
agugaucuaucaguuuucc

SEQ ID NO: 1935868 - RNA, 19 nt, Artificial Sequence
  Description of Artificial Sequence: Synthetic oligonucleotide
ugcauuauucaugucauuc

SEQ ID NO: 1935869 - RNA, 19 nt, Artificial Sequence
  Description of Artificial Sequence: Synthetic oligonucleotide
accaaagugauccaugcaa

SEQ ID NO: 1935870 - RNA, 19 nt, Artificial Sequence
  Description of Artificial Sequence: Synthetic oligonucleotide
gauggugguauagaucccg

SEQ ID NO: 1935871 - RNA, 19 nt, Artificial Sequence
  Description of Artificial Sequence: Synthetic oligonucleotide
accaccucaaaucuucaag

SEQ ID NO: 1935872 - RNA, 19 nt, Artificial Sequence
  Description of Artificial Sequence: Synthetic oligonucleotide
agagugaucuaucaguuuu

SEQ ID NO: 1935873 - RNA, 19 nt, Artificial Sequence
  Description of Artificial Sequence: Synthetic oligonucleotide
ggugcauuuuaucacaccc

SEQ ID NO: 1935874 - RNA, 19 nt, Artificial Sequence
  Description of Artificial Sequence: Synthetic oligonucleotide
agaaacuagaugcauuaau

SEQ ID NO: 1935875 - RNA, 19 nt, Artificial Sequence
  Description of Artificial Sequence: Synthetic oligonucleotide
uucagaguccaguuguuga

SEQ ID NO: 1935876 - RNA, 19 nt, Artificial Sequence
  Description of Artificial Sequence: Synthetic oligonucleotide
uacaaugcgcuucaucuuc

SEQ ID NO: 1935877 - RNA, 19 nt, Artificial Sequence
  Description of Artificial Sequence: Synthetic oligonucleotide
uaucacacccaaaggacac

SEQ ID NO: 1935878 - RNA, 19 nt, Artificial Sequence
  Description of Artificial Sequence: Synthetic oligonucleotide
auuauucaugucauucugg

SEQ ID NO: 1935879 - RNA, 19 nt, Artificial Sequence
  Description of Artificial Sequence: Synthetic oligonucleotide
caaccaaagugauccaugc

SEQ ID NO: 1935880 - RNA, 19 nt, Artificial Sequence
  Description of Artificial Sequence: Synthetic oligonucleotide
ugaaccugaagauccauua

SEQ ID NO: 1935881 - RNA, 19 nt, Artificial Sequence
  Description of Artificial Sequence: Synthetic oligonucleotide
augcauuaauacugauggc

SEQ ID NO: 1935882 - RNA, 19 nt, Artificial Sequence
  Description of Artificial Sequence: Synthetic oligonucleotide
cauacaaugcgcuucaucu

SEQ ID NO: 1935883 - RNA, 19 nt, Artificial Sequence
  Description of Artificial Sequence: Synthetic oligonucleotide
aguaaaugaaccagggcug

SEQ ID NO: 1935884 - RNA, 19 nt, Artificial Sequence
  Description of Artificial Sequence: Synthetic oligonucleotide
auuauggagguauaagcuu

SEQ ID NO: 1935885 - RNA, 19 nt, Artificial Sequence
  Description of Artificial Sequence: Synthetic oligonucleotide
ugucuuguguucagagucc

SEQ ID NO: 1935886 - RNA, 19 nt, Artificial Sequence
  Description of Artificial Sequence: Synthetic oligonucleotide
ucagugaacucagaacaag

SEQ ID NO: 1935887 - RNA, 19 nt, Artificial Sequence
  Description of Artificial Sequence: Synthetic oligonucleotide
ggugguauagaucccgggg

SEQ ID NO: 1935888 - RNA, 19 nt, Artificial Sequence
  Description of Artificial Sequence: Synthetic oligonucleotide
aacucucucugcuacucga

SEQ ID NO: 1935889 - RNA, 19 nt, Artificial Sequence
  Description of Artificial Sequence: Synthetic oligonucleotide
gauaaaggaauaaaccugu

SEQ ID NO: 1935890 - RNA, 19 nt, Artificial Sequence
  Description of Artificial Sequence: Synthetic oligonucleotide
caccucaaaucuucaaggg

SEQ ID NO: 1935891 - RNA, 19 nt, Artificial Sequence
  Description of Artificial Sequence: Synthetic oligonucleotide
ucagagugaucuaucaguu

SEQ ID NO: 1935892 - RNA, 19 nt, Artificial Sequence
  Description of Artificial Sequence: Synthetic oligonucleotide
uuguugacagaaacuagau

SEQ ID NO: 1935893 - RNA, 19 nt, Artificial Sequence
  Description of Artificial Sequence: Synthetic oligonucleotide
aacugaaggcgccguccgc

SEQ ID NO: 1935894 - RNA, 19 nt, Artificial Sequence
  Description of Artificial Sequence: Synthetic oligonucleotide
ucucucugcuacucgaagc

SEQ ID NO: 1935895 - RNA, 19 nt, Artificial Sequence
  Description of Artificial Sequence: Synthetic oligonucleotide
gaaacuagaugcauuaaua

SEQ ID NO: 1935896 - RNA, 19 nt, Artificial Sequence
  Description of Artificial Sequence: Synthetic oligonucleotide
cucgcacugauccagcagc

SEQ ID NO: 1935897 - RNA, 19 nt, Artificial Sequence
  Description of Artificial Sequence: Synthetic oligonucleotide
uauccucuuccaaagguau

SEQ ID NO: 1935898 - RNA, 19 nt, Artificial Sequence
  Description of Artificial Sequence: Synthetic oligonucleotide
ucugaaacugaaggcgccg

SEQ ID NO: 1935899 - RNA, 19 nt, Artificial Sequence
  Description of Artificial Sequence: Synthetic oligonucleotide
uccucguugcaucucuaag

SEQ ID NO: 1935900 - RNA, 19 nt, Artificial Sequence
  Description of Artificial Sequence: Synthetic oligonucleotide
ugugccacagaacucucuc

SEQ ID NO: 1935901 - RNA, 19 nt, Artificial Sequence
  Description of Artificial Sequence: Synthetic oligonucleotide
cugaagguggaucuugaac

SEQ ID NO: 1935902 - RNA, 19 nt, Artificial Sequence
  Description of Artificial Sequence: Synthetic oligonucleotide
uggagguauaagcuugaga

SEQ ID NO: 1935903 - RNA, 19 nt, Artificial Sequence
  Description of Artificial Sequence: Synthetic oligonucleotide
acucagagugaucuaucag

SEQ ID NO: 1935904 - RNA, 19 nt, Artificial Sequence
  Description of Artificial Sequence: Synthetic oligonucleotide
gaacaagacuccacguccg

SEQ ID NO: 1935905 - RNA, 19 nt, Artificial Sequence
  Description of Artificial Sequence: Synthetic oligonucleotide
ucagaguccaguuguugac

SEQ ID NO: 1935906 - RNA, 19 nt, Artificial Sequence
  Description of Artificial Sequence: Synthetic oligonucleotide
ucagaacaagacuccacgu

SEQ ID NO: 1935907 - RNA, 19 nt, Artificial Sequence
  Description of Artificial Sequence: Synthetic oligonucleotide
uugaacaaaugcagaguaa

SEQ ID NO: 1935908 - RNA, 19 nt, Artificial Sequence
  Description of Artificial Sequence: Synthetic oligonucleotide
guuguugacagaaacuaga

SEQ ID NO: 1935909 - RNA, 19 nt, Artificial Sequence
  Description of Artificial Sequence: Synthetic oligonucleotide
aaccuguuaagggaaacau

SEQ ID NO: 1935910 - RNA, 19 nt, Artificial Sequence
  Description of Artificial Sequence: Synthetic oligonucleotide
guuccaauacaccuuucac

SEQ ID NO: 1935911 - RNA, 19 nt, Artificial Sequence
  Description of Artificial Sequence: Synthetic oligonucleotide
agaugcauucagcauuucu

SEQ ID NO: 1935912 - RNA, 19 nt, Artificial Sequence
  Description of Artificial Sequence: Synthetic oligonucleotide
uacaaagcuagaagcugac

SEQ ID NO: 1935913 - RNA, 19 nt, Artificial Sequence
  Description of Artificial Sequence: Synthetic oligonucleotide
caggacaugcagcagugcc

SEQ ID NO: 1935914 - RNA, 19 nt, Artificial Sequence
  Description of Artificial Sequence: Synthetic oligonucleotide
cacccaaaggacacugugg

SEQ ID NO: 1935915 - RNA, 19 nt, Artificial Sequence
  Description of Artificial Sequence: Synthetic oligonucleotide
acguccguuugccagugac

SEQ ID NO: 1935916 - RNA, 19 nt, Artificial Sequence
  Description of Artificial Sequence: Synthetic oligonucleotide
ucugcuacucgaagcagaa

SEQ ID NO: 1935917 - RNA, 19 nt, Artificial Sequence
  Description of Artificial Sequence: Synthetic oligonucleotide
aaccaaagugauccaugca

SEQ ID NO: 1935918 - RNA, 19 nt, Artificial Sequence
  Description of Artificial Sequence: Synthetic oligonucleotide
gauucgcuguccuacugac

SEQ ID NO: 1935919 - RNA, 19 nt, Artificial Sequence
  Description of Artificial Sequence: Synthetic oligonucleotide
aagacuccacguccguuug

SEQ ID NO: 1935920 - RNA, 19 nt, Artificial Sequence
  Description of Artificial Sequence: Synthetic oligonucleotide
acaaagcuagaagcugacc

SEQ ID NO: 1935921 - RNA, 19 nt, Artificial Sequence
  Description of Artificial Sequence: Synthetic oligonucleotide
gaagcugaccguacacugg

SEQ ID NO: 1935922 - RNA, 19 nt, Artificial Sequence
  Description of Artificial Sequence: Synthetic oligonucleotide
agaugcauuaauacugaug

SEQ ID NO: 1935923 - RNA, 19 nt, Artificial Sequence
  Description of Artificial Sequence: Synthetic oligonucleotide
ucuaagggcuuccaugauu

SEQ ID NO: 1935924 - RNA, 19 nt, Artificial Sequence
  Description of Artificial Sequence: Synthetic oligonucleotide
auuaauacugauggcucca

SEQ ID NO: 1935925 - RNA, 19 nt, Artificial Sequence
  Description of Artificial Sequence: Synthetic oligonucleotide
acgagcacugcuccaggac

SEQ ID NO: 1935926 - RNA, 19 nt, Artificial Sequence
  Description of Artificial Sequence: Synthetic oligonucleotide
cuagaugcauuaauacuga

SEQ ID NO: 1935927 - RNA, 19 nt, Artificial Sequence
  Description of Artificial Sequence: Synthetic oligonucleotide
ccauuaaccaccucaaauc

SEQ ID NO: 1935928 - RNA, 19 nt, Artificial Sequence
  Description of Artificial Sequence: Synthetic oligonucleotide
agcaaauacaaagcuagaa

SEQ ID NO: 1935929 - RNA, 19 nt, Artificial Sequence
  Description of Artificial Sequence: Synthetic oligonucleotide
uauaagcuugagagaccag

SEQ ID NO: 1935930 - RNA, 19 nt, Artificial Sequence
  Description of Artificial Sequence: Synthetic oligonucleotide
uggugguauagaucccggg

SEQ ID NO: 1935931 - RNA, 19 nt, Artificial Sequence
  Description of Artificial Sequence: Synthetic oligonucleotide
auccuuguuccaauacacc

SEQ ID NO: 1935932 - RNA, 19 nt, Artificial Sequence
  Description of Artificial Sequence: Synthetic oligonucleotide
ucucgcacugauccagcag

SEQ ID NO: 1935933 - RNA, 19 nt, Artificial Sequence
  Description of Artificial Sequence: Synthetic oligonucleotide
ucaagcuccugguucucgc

SEQ ID NO: 1935934 - RNA, 19 nt, Artificial Sequence
  Description of Artificial Sequence: Synthetic oligonucleotide
guauaagcuugagagacca

SEQ ID NO: 1935935 - RNA, 19 nt, Artificial Sequence
  Description of Artificial Sequence: Synthetic oligonucleotide
gcauucagcauuucuacac

SEQ ID NO: 1935936 - RNA, 19 nt, Artificial Sequence
  Description of Artificial Sequence: Synthetic oligonucleotide
auacaaagcuagaagcuga

SEQ ID NO: 1935937 - RNA, 19 nt, Artificial Sequence
  Description of Artificial Sequence: Synthetic oligonucleotide
ugguauagaucccggggaa

SEQ ID NO: 1935938 - RNA, 19 nt, Artificial Sequence
  Description of Artificial Sequence: Synthetic oligonucleotide
cagaacaagacuccacguc

SEQ ID NO: 1935939 - RNA, 19 nt, Artificial Sequence
  Description of Artificial Sequence: Synthetic oligonucleotide
ccaccucaaaucuucaagg

SEQ ID NO: 1935940 - RNA, 19 nt, Artificial Sequence
  Description of Artificial Sequence: Synthetic oligonucleotide
gagguauaagcuugagaga

SEQ ID NO: 1935941 - RNA, 19 nt, Artificial Sequence
  Description of Artificial Sequence: Synthetic oligonucleotide
auagaucccggggaaaucu

SEQ ID NO: 1935942 - RNA, 19 nt, Artificial Sequence
  Description of Artificial Sequence: Synthetic oligonucleotide
uaauacugauggcuccaac

SEQ ID NO: 1935943 - RNA, 19 nt, Artificial Sequence
  Description of Artificial Sequence: Synthetic oligonucleotide
aacaagacuccacguccgu

SEQ ID NO: 1935944 - RNA, 19 nt, Artificial Sequence
  Description of Artificial Sequence: Synthetic oligonucleotide
caauacaccuuucacagcu

SEQ ID NO: 1935945 - RNA, 19 nt, Artificial Sequence
  Description of Artificial Sequence: Synthetic oligonucleotide
aggcgcgucuccucguugc

SEQ ID NO: 1935946 - RNA, 19 nt, Artificial Sequence
  Description of Artificial Sequence: Synthetic oligonucleotide
aaaugaaccagggcuguuu

SEQ ID NO: 1935947 - RNA, 19 nt, Artificial Sequence
  Description of Artificial Sequence: Synthetic oligonucleotide
guccguuugccagugacag

SEQ ID NO: 1935948 - RNA, 19 nt, Artificial Sequence
  Description of Artificial Sequence: Synthetic oligonucleotide
aaccauucuuguggcagag

SEQ ID NO: 1935949 - RNA, 19 nt, Artificial Sequence
  Description of Artificial Sequence: Synthetic oligonucleotide
ugcaauuauggagguauaa

SEQ ID NO: 1935950 - RNA, 19 nt, Artificial Sequence
  Description of Artificial Sequence: Synthetic oligonucleotide
agauucgcuguccuacuga

SEQ ID NO: 1935951 - RNA, 19 nt, Artificial Sequence
  Description of Artificial Sequence: Synthetic oligonucleotide
agucuccgaccacuggugg

SEQ ID NO: 1935952 - RNA, 19 nt, Artificial Sequence
  Description of Artificial Sequence: Synthetic oligonucleotide
gcaauuauggagguauaag
